United States Patent Application Publication US 2026/0240980 A1 - sequence listing, part 3

SEQ ID NO: 13057 - protein, 566 aa, synthetic construct
  REGION 1..566: note = hemagglutinin__InfluenzaA__ALA08582
MKTIIALSYILCLVFAQKLPENDNSTATLCLGHHAVPNGTIVKTITNDRIEVTNATELVQNSSIGEICDSPHQILDGKNCTLIDALLGDPQCDGFQNKKWDLFVERSKAYSNCYPYDVPDYASLRSLVASSGTLEFNDESFNWAGVTQNGTSSACIRGSNSSFFSRLNWLTHSNFKYPALNVTMPNNEQFDKLYIWGVHHPGTDKDQIFLYAQSSGRITVSTKRSQQAVIPNIGSRPRIRNIPSRISIYWTIVKPGDILLINSTGNLIAPRGYFKIRSGKSSIMRSDAPIGKCKSECITPNGSIPNDKPFQNVNRITYGACPRYVKQSTLKLATGMRNVPEKQTRGIFGAIAGFIENGWEGMKDGWYGFRHQNSEGRGQAADLKSTQAAIDQINGKLNRLIGKTNEKFHQIEKEFSEVEGRIQDLEKYVEDTKIDLWSYNAELLVALENQHTIDLTDSEMNKLFEKTKKQLRENAEDMGNGCFKIYHKCDNACIGSIRNGTYDHDVYRDEALNNRFQIKGVELKSGYKDWILWISFAISCFLLCVALLGFIMWACQKGNIRCNICI

SEQ ID NO: 13058 - protein, 566 aa, synthetic construct; identical to SEQ ID NO: 13057
  REGION 1..566: note = hemagglutinin__InfluenzaA__ALA08583

SEQ ID NO: 13059 - protein, 566 aa, synthetic construct; identical to SEQ ID NO: 13057
  REGION 1..566: note = hemagglutinin__InfluenzaA__ALA08584

SEQ ID NO: 13060 - protein, 566 aa, synthetic construct; identical to SEQ ID NO: 13057
  REGION 1..566: note = hemagglutinin__InfluenzaA__ALA08585

SEQ ID NO: 13061 - protein, 566 aa, synthetic construct; identical to SEQ ID NO: 12441
  REGION 1..566: note = hemagglutinin__InfluenzaA__ALA08586

SEQ ID NO: 13062 - protein, 566 aa, synthetic construct; identical to SEQ ID NO: 13057
  REGION 1..566: note = hemagglutinin__InfluenzaA__ALA08587

SEQ ID NO: 13063 - protein, 566 aa, synthetic construct; identical to SEQ ID NO: 12441
  REGION 1..566: note = hemagglutinin__InfluenzaA__ALA08588

SEQ ID NO: 13064 - protein, 566 aa, synthetic construct; identical to SEQ ID NO: 12441
  REGION 1..566: note = hemagglutinin__InfluenzaA__ALA08589

SEQ ID NO: 13065 - protein, 566 aa, synthetic construct; identical to SEQ ID NO: 13057
  REGION 1..566: note = hemagglutinin__InfluenzaA__ALA08590

SEQ ID NO: 13066 - protein, 566 aa, synthetic construct; identical to SEQ ID NO: 12441
  REGION 1..566: note = hemagglutinin__InfluenzaA__ALA08591

SEQ ID NO: 13067 - protein, 566 aa, synthetic construct; identical to SEQ ID NO: 12998
  REGION 1..566: note = hemagglutinin__InfluenzaA__ALA08592

SEQ ID NO: 13068 - protein, 566 aa, synthetic construct
  REGION 1..566: note = hemagglutinin__InfluenzaA__ALA08594
MKTIIALSYILCLVFAQKLPENDNSTATLCLGHHAVPNGTIVKTITSDRIEVTNATELVQNSSIGEICDSPHQILDGKNCTLIDALLGDPQCDGFQNKKWDLFVERSKAYSNCYPYDVPDYASLRSLVASSGTLEFNDESFNWAGVTQNGTSSACIRGSNSSFFSRLNWLTHSNFKYPALNVTMPNNEQFDKLYIWGVHHPGTDKDQIFLYAQSSGRITVSTKRSQQAVIPNIGSRPRIRNIPSRISIYWTIVKPGDILLINSTGNLIAPRGYFKIRSGKSSIMRSDAPIGKCKSECITPNGSIPNDKPFQNVNRITYGACPRYVKQSTLKLATGMRNVPEKQTRGIFGAIAGFIENGWEGMKDGWYGFRHQNSEGRGQAADLKSTQAAIDQINGKLNRLIGKTNEKFHQIEKEFSEVEGRIQDLEKYVEDTKIDLWSYNAELLVALENQHTIDLTDSEMNKLFEKTKKQLRENAEDMGNGCFKIYHKCDNACIGSIRNGTYDHDVYRDEALNNRFQIKGVELKSGYKDWILWISFAMSCFLLCVALLGFIMWACQKGNIRCNICI

SEQ ID NO: 13069 - protein, 566 aa, synthetic construct; identical to SEQ ID NO: 12441
  REGION 1..566: note = hemagglutinin__InfluenzaA__ALA08595

SEQ ID NO: 13070 - protein, 566 aa, synthetic construct; identical to SEQ ID NO: 12441
  REGION 1..566: note = hemagglutinin__InfluenzaA__ALA08596

SEQ ID NO: 13071 - protein, 566 aa, synthetic construct
  REGION 1..566: note = hemagglutinin__InfluenzaA__ALA08597
MKTIIALSYILCLVFAQKIPGNDNSTATLCLGHHAVPNGTIVKTITNDRIEVTNATELVQNSSIGEICDSPHQILDGENCTLIDALLGDPQCDGFQNKKWDLFVERSKAYSNCYPYDVPDYASLRSLVASSGTLEFNNESFNWTGVTQNGTSSACIRRSSSSFFSRLNWLTHLNYTYPALNVTMPNNEQFDKLYIWGVHHPGTDKDQIFLYAQSSGRITVSTKRSQQAVIPNIGSRPRIRDIPSRISIYWTIVKPGDILLINSTGNLIAPRGYFKIRSGKSSIMRSDAPIGKCKSECITPNGSIPNDKPFQNVNRITYGACPRYVKHSTLKLATGMRNVPEKQTRGIFGAIAGFIENGWEGMVDGWYGFRHQNSEGRGQAADLKSTQAAIDQINGKLNRLIGKTNEKFHQIEKEFSEVEGRIQDLEKYVEDTKIDLWSYNAELLVALENQHTIDLTDSEMNKLFEKTKKQLRENAEDMGNGCFKIYHKCDNACIGSIRNGTYDHNVYRDEALNNRFQIKGVELKSGYKDWILWISFAISCFLLCVALLGFIMWACQNGNIRCNICI

SEQ ID NO: 13072 - protein, 566 aa, synthetic construct
  REGION 1..566: note = hemagglutinin__InfluenzaA__ALA08598
MKTIIASSYILCLVFAQKIPGNDNSTATLCLGHHAVPNGTIVKTITNDRIEVTNATELVQNSSIGEICDSPHQILDGENCTLIDALLGDPQCDGFQNKKWDLFVERSKAYSNCYPYDVPDYASLRSLVASSGTLEFNNESFNWTGVTQNGTSSACIRRSSSSFFSRLNWLTHLNYTYPALNVTMPNNEQFDKLYIWGVHHPGTDKDQIFLYAQSSGRITVSTKRSQQAVIPNIGSRPRIRDIPSRISIYWTIVKPGDILLINSTGNLIAPRGYFKIRSGKSSIMRSDAPIGKCKSECITPNGSIPNDKPFQNVNRITYGACPRYVKHSTLKLATGMRNVPEKQTRGIFGAIAGFIENGWEGMVDGWYGFRHQNSEGRGQAADLKSTQAAIDQINGKLNRLIGKTNEKFHQIEKEFSEVEGRIQDLEKYVEDTKIDLWSYNAELLVALENQHTIDLTDSEMNKLFEKTKKQLRENAEDMGNGCFKIYHKCDNACIGSIRNGTYDHNVYRDEALNNRFQIKGVELKSGYKDWILWISFAISCFLLCVALLGFIMWACQKGNIRCNICI

SEQ ID NO: 13073 - protein, 566 aa, synthetic construct; identical to SEQ ID NO: 12441
  REGION 1..566: note = hemagglutinin__InfluenzaA__ALA08599

SEQ ID NO: 13074 - protein, 566 aa, synthetic construct
  REGION 1..566: note = hemagglutinin__InfluenzaA__ALA08600
MKTIIALSYILCLVFAQKIPGNDNSTATLCLGHHAVPNGTIVKTITNDRIEVTNATELVQNSSIGEICDSPHQILDGENCTLIDALLGDPQCDGFQNKKWDLFVERSKAYSNCYPYDVPDYASLRSLVASSGTLEFNNESFNWTGVTQNGTSSACIRRSSSSFFSRLNWLTHLNYRYPALNVTMPNNEQFDKLYIWGVHHPGTDKDQISLYAQSSGRITVSTKRSQQAVIPNIGSRPRIRDIPSRISIYWTIVKPGDILLINSTGNLIAPRGYFKIRSGKSSIMRSDAPIGKCKSECITPNGSIPNDKPFQNVNRITYGACPRYVKHSTLKLATGMRNVPEKQTRGIFGAIAGFIENGWEGMVDGWYGFRHQNSEGRGQAADLKSTQAAIDQINGKLNRLIGKTNEKFHQIEKEFSEVEGRIQDLEKYVEDTKIDLWSYNAELLVALENQHTIDLTDSEMNKLFEKTKKQLRENAEDMGNGCFKIYHKCDNACIGSIRNGTYDHNVYRDEALNNRFQIKGVELKSGYKDWILWISFAISCFLLCVALLGFIMWACQKGNIRCNICI

SEQ ID NO: 13075 - protein, 566 aa, synthetic construct; identical to SEQ ID NO: 12441
  REGION 1..566: note = hemagglutinin__InfluenzaA__ALA08601

SEQ ID NO: 13076 - protein, 566 aa, synthetic construct
  REGION 1..566: note = hemagglutinin__InfluenzaA__ALA08602
MKTIIALSYILCLVFAQKIPGNDNSTATLCLGHHAVPNGTIVKTITNDRIEVTNATELVQNSSIGEICDSPHQILDGENCTLIDALLGDPQCDDFQNKKWDLFVERSKAYSNCYPYDVPDYASLRSLVASSGTLEFNNESFNWTGVTQNGTSSACIRRSSSSFFSRLNWLTHLNYTYPALNVTMPNNEQFDKLYIWGVHHPGTDKDQISLYAQSSGRITVSTKRSQQAVIPNIGSRPRIRDIPSRISIYWTIVKPGDILLINSTGNLIAPRGYFKIRSGKSSIMRSDAPIGKCKSECITPNGSIPNDKPFQNVNRITYGACPRYVKHSTLKLATGMRNVPEKQTRGIFGAIAGFIENGWEGMVDGWYGFRHQNSEGRGQAADLKSTQAAIDQINGKLNRLIGKTNEKFHQIEKEFSEVEGRIQDLEKYVEDTKIDLWSYNAELLVALENQHTIDLTDSEMNKLFEKTKKQLRENAEDMGNGCFKIYHKCDNACIGSIRNGTYDHNVYRDEALNNRFQIKGVELKSGYKDWILWISFAISCFLLCVALLGFIMWACQKGNIRCNICI

SEQ ID NO: 13077 - protein, 566 aa, synthetic construct
  REGION 1..566: note = hemagglutinin__InfluenzaA__ALA08603
MKTIIALSYILCLVFAQKIPGNDNSTATLCLGHHAVPNGTIVKTITNDRIEVTNATELVQNSSIGEICDSPHQILDGENCTLIDALLGDPQCDGFQNKKWDLFVERSKAYSNCYPYDVPDYASLRSLVASSGTLEFNNESFNWTGVTQNGTSSACIRRSSSSFFSRLNWLTHLNYIYPALNVTMPNNEQFDKLYIWGVHHPGTDKDQIFLYAQSSGRITVSTKRSQQAVIPNIGSRPRIRDIPSRISIYWTIVKPGDILLINSTGNLIAPRGYFKIRSGKSSIMRSDAPIGKCKSECITPNGSIPNDKPFQNVNRITYGACPRYVKHSTLKLATGMRNVPEKQTRGIFGAIAGFIENGWEGMVDGWYGFRHQNSEGRGQAADLKSTQAAIDQINGKLNRLIGKTNEKFHQIEKEFSEVEGRIQDLEKYVEDTKIDLWSYNAELLVALENQHTIDLTDSEMNKLFEKTKKQLRENAEDMGNGCFKIYHKCDNACIGSIRNGTYDHNVYRDEALNNRFQIKGVELKSGYKDWILWISFAISCFLLCVALLGFIMWACQKGNIRCNICI

SEQ ID NO: 13078 - protein, 566 aa, synthetic construct; identical to SEQ ID NO: 12441
  REGION 1..566: note = hemagglutinin__InfluenzaA__ALA08605

SEQ ID NO: 13079 - protein, 566 aa, synthetic construct; identical to SEQ ID NO: 12441
  REGION 1..566: note = hemagglutinin__InfluenzaA__ALA08606

SEQ ID NO: 13080 - protein, 566 aa, synthetic construct; identical to SEQ ID NO: 13056
  REGION 1..566: note = hemagglutinin__InfluenzaA__ALA08607

SEQ ID NO: 13081 - protein, 566 aa, synthetic construct
  REGION 1..566: note = hemagglutinin__InfluenzaA__ALA08609
MKTIIALGYILCLVFAQKIPGNDNSTATLCLGHHAVPNGTIVKTITNDRIEVTNATELVQNSSIGEICDSPHKILDGENCTLIDALLGDPQCDGFQNKKWDLFVERSKAYSNCYPYDVPDYASLRSLVASSGTLEFNNESFNWTGVTQNGTSSACIRRSSSSFFSRLNWLTHLNYTYPALNVTMPNNEQFDKLYIWGVHHPGTDKDQIFLYAQSSGRITVSTKRSQQAVIPNIGSRPRIRDIPSRISIYWTIVKPGDILLINSTGNLIAPRGYFKIRSGKSSIMRSDAPIGKCKSECITPNGSIPNDKPFQNVNRITYGACPRYVKHSTLKLATGMRNVPEKQTRGIFGAIAGFIENGWEGMVDGWYGFRHQNSEGRGQAADLKSTQAAIDQINGKLNRLIGKTNEKFHQIEKEFSEVEGRIQDLDKYVEDTKIDLWSYNAELLVALENQHTIDLTDSEMNKLFEKTKKQLRENAEDMGNGCFKIYHKCDNACIGSIRNGTYDHNVYRDEALNNRFQIKGVELKSGYKDWILWISFAISCFLLCVALLGFIMWACQKGNIRCNICI

SEQ ID NO: 13082 - protein, 566 aa, synthetic construct; identical to SEQ ID NO: 12998
  REGION 1..566: note = hemagglutinin__InfluenzaA__ALA08610

SEQ ID NO: 13083 - protein, 566 aa, synthetic construct
  REGION 1..566: note = hemagglutinin__InfluenzaA__ALA08611
MKIIIALSYILCLVFAQKIPGNDNSTATLCLGHHAVPNGTIVKTITNDRIEVTNATELVQNSSIGEICDSPHRILDGENCTLIDALLGDPQCDGFQNKKWDLFVERSKAYSNCYPYDVPDYASLRSLVASSGTLEFNNESFNWTGVTQNGTSSACIRRSSSSFFSRLNWLTHLNYTYPALNVTMPNNEQFDKLYIWGVHHPGTDKDQIFLYAQSSGRITVSTKRSQQAVIPNIGSRPRIRDIPSRISIYWTIVKPGDILLINSTGNLIAPRGYFKIRSGKSSIMRSDAPIGKCKSECITPNGSIPNDKPFQNVNRITYGACPRYVKHSTLKLATGMRNVPEKQTRGIFGAIAGFIENGWEGMVDGWYGFRHQNSEGRGQAADLKSTQAAIDQINGKLNRLIGKTNEKFHQIEKEFSEVEGRIQDLEKYVEDTKIDLWSYNAELLVALENQHTIDLTDSEMNKLFEKTKKQLRENAEDMGNGCFKIYHKCDNACIGSIRNGTYDHNVYRDEALNNRFQIKGVELKSGYKDWILWISFAISCFLLCVALLGFIMWACQKGNIRCNICI

SEQ ID NO: 13084 - protein, 566 aa, synthetic construct; identical to SEQ ID NO: 13056
  REGION 1..566: note = hemagglutinin__InfluenzaA__ALA08612

SEQ ID NO: 13085 - protein, 566 aa, synthetic construct; identical to SEQ ID NO: 12441
  REGION 1..566: note = hemagglutinin__InfluenzaA__ALA08614

SEQ ID NO: 13086 - protein, 566 aa, synthetic construct; identical to SEQ ID NO: 12441
  REGION 1..566: note = hemagglutinin__InfluenzaA__ALA08615

SEQ ID NO: 13087 - protein, 566 aa, synthetic construct; identical to SEQ ID NO: 12441
  REGION 1..566: note = hemagglutinin__InfluenzaA__ALA08616

SEQ ID NO: 13088 - protein, 566 aa, synthetic construct; identical to SEQ ID NO: 12981
  REGION 1..566: note = hemagglutinin__InfluenzaA__ALA08617

SEQ ID NO: 13089 - protein, 566 aa, synthetic construct
  REGION 1..566: note = hemagglutinin__InfluenzaA__ALA08619
MKTVIALSYILCLVFAQKIPGNDNSTATLCLGHHAVPNGTIVKTITNDRIEVTNATELVQNSSIGEICDSPHQILDGENCTLIDALLGDPQCDGFQNKKWDLFVERSKAYSNCYPYDVPDYASLRSLIASSGTLEFNNESFNWTGVTQNGTSSACIRKSSSSFFSRLNWLTHLNYTYPALNVTMPNNEQFDKLYIWGVHHPGTDKDQIFLYARSSGRITVSTKRSQQAVIPNIGSRPRIRDIPSRISIYWTIVKPGDILLINSTGNLIAPRGYFKIRSGKSSIMRSDAPIGKCKSECITPNGSIPNEKPFQNVNRITYGACPRYVKHSTLKLATGMRNVPEKQTRGIFGAIAGFIENGWEGMVDGWYGFRHQNSEGRGQAADLKSTQAAIDQINGKLNRLIGKTNEKFHQIEKEFSEVEGRIQDLEKYVEDTKIDLWSYNAELLVALENQHTIDLTDSEMNKLFEKTKKQLRENAEDMGNGCFKIYHKCDNACIGSIRNGIYDHNVYRDEALNNRFQIKGVELKSGYKDWILWISFAISCFLLCVALLGFIMWACQKGNIRCNICI

SEQ ID NO: 13090 - protein, 566 aa, synthetic construct; identical to SEQ ID NO: 13056
  REGION 1..566: note = hemagglutinin__InfluenzaA__ALA08620

SEQ ID NO: 13091 - protein, 566 aa, synthetic construct; identical to SEQ ID NO: 13047
  REGION 1..566: note = hemagglutinin__InfluenzaA__ALA08621

SEQ ID NO: 13092 - protein, 566 aa, synthetic construct
  REGION 1..566: note = hemagglutinin__InfluenzaA__ALA08622
MKTIIALSYILCLVFAQKIPGNDNSTATLCLGHHAVPNGTIVKTITNDRIEVTNATELVQNSSIGEICDSPHQILDGENCTLIDALLGDPQCDGFQNKKWDLFVERSKAYSNCYPYDVPDYASLRSLVASSGTLEFNNESFNWTGVTQNGTSSACIRRSSSSFFSRLNWLTHLNYKYPALNVTMPNNEQFDKLYIWGVHHPGTDKDQIFLYAQSSGRITVSTKRSQQAVIPNIGSRPRIRDIPSRISIYWTIVKPGDILLINSTGNLIAPRGYFKIRSGKSSIMRSDAPIGKCKSECITPNGSIPNDKPFQNVNRITYGACPRYVKHSTLKLATGMRNVPEKQTRGIFGAIAGFIENGWEGMVDGWYGFRHQNSEGRGQAADLKSTQAAIDQINGKLNRLIGKTNEKFHQIEKEFSEVEGRIQDLEKYVEDTKIDLWSYNAELLVALENQHTIDLTDSEMNKLFEKTKKQLRENAEDMGNGCFKIYHKCDNACIGSIRNGTYDHNVYRDEALNNRFQIKGVELKSGYKDWILWISFAISCFLLCVALLGFIMWACQKGNIRCNICI

SEQ ID NO: 13093 - protein, 566 aa, synthetic construct; identical to SEQ ID NO: 12441
  REGION 1..566: note = hemagglutinin__InfluenzaA__ALA08623

SEQ ID NO: 13094 - protein, 566 aa, synthetic construct; identical to SEQ ID NO: 13047
  REGION 1..566: note = hemagglutinin__InfluenzaA__ALA08624

SEQ ID NO: 13095 - protein, 566 aa, synthetic construct; identical to SEQ ID NO: 12441
  REGION 1..566: note = hemagglutinin__InfluenzaA__ALA08625

SEQ ID NO: 13096 - protein, 566 aa, synthetic construct; identical to SEQ ID NO: 12441
  REGION 1..566: note = hemagglutinin__InfluenzaA__ALA08626

SEQ ID NO: 13097 - protein, 566 aa, synthetic construct; identical to SEQ ID NO: 12441
  REGION 1..566: note = hemagglutinin__InfluenzaA__ALA08627

SEQ ID NO: 13098 - protein, 566 aa, synthetic construct; identical to SEQ ID NO: 12985
  REGION 1..566: note = hemagglutinin__InfluenzaA__ALA08629

SEQ ID NO: 13099 - protein, 566 aa, synthetic construct
  REGION 1..566: note = hemagglutinin__InfluenzaA__ALA08630
MKTIIALSYILCLVFAQKIPGNDNSTATLCLGHHAVPNGTIVKTITNDRIEVTNATELVQNSSIGEICDSPHQILDGENCTLIDALLGDPQCDGFQNKKWDLFVERSKAYSNCYPYDVPDYASLRSLVASSGTLEFNNESFNWTGVTQNGTSSACIRKSSSSFFSRLNWLTHLNYTYPALNVTMPNNEQFDKLYIWGVHHPGTDKDQIFLYARSSGRITVSTKRSQQAVIPNIGSRPRIRDIPSRISIYWTIVKPGDILLINSTGNLIAPRGYFKIRSGKSSIMRSDAPIGKCKSECITPNGSIPNDKPFQNVNRITYGACPRYVKHSTLKLATGMRNVPEKQTRGIFGAIAGFIENGWEGMVDGWYGFRHQNSEGRGQAADLKSTQAAIDQINGKLNRLIGKTNEKFHQIEKEFSEVEGRIQDLEKYVEDTKIDLWSYNAELLVALENQHTIDLTDSEMNKLFEKTKKQLRENAEDMGNGCFKIYHKCDNACIGSIRNGTYDHNVYRDEALNNRFQIKGVELKSGYKDWILWISFAISCFLLCVALLGFIMWACQKGNIRCNICI

SEQ ID NO: 13100 - protein, 566 aa, synthetic construct
  REGION 1..566: note = hemagglutinin__InfluenzaA__ALA08631
MKTIIALSYILCLVFAQKIPGNDNSTATLCLGHHAVPNGTIVKTITNDRIEVTNATELVQNSSIGEICDSPHQILDGENCTLIDALLGDPQCDGFQNKKWDLFVERSKAYSNCYPYDVPDYASLRSLVASSGTLEFNNESFNWTGVTQNGTSSACIRRSSSSFFSRLNWLTHLNYTYPALNVTMPNKEQFDKLYIWGVHHPGTDKDQIFLYAQSSGRITVSTKRSQQAVIPNIGSRPRIRDIPSRISIYWTIVKPGDILLINSTGNLIAPRGYFKIRSGKSSIMRSDAPIGKCKSECITPNGSIPNDKPFQNVNRITYGACPRYVKHSTLKLATGMRNVPEKQTRGIFGAIAGFIENGWEGMVDGWYGFRHQNSEGRGQAADLKSTQAAIDQINGKLNRLIGKTNEKFHQIEKEFSEVEGRIQDLEKYVEDTKIDLWSYNAELLVALENQHTIDLTDSEMNKLFEKTKKQLRENAEDMGNGCFKIYHKCDNACIGSIRNGTYDHNVYRDEALNNRFQIKGVELKSGYKDWILWISFAISCFLLCVALLGFIMWACQKGNIRCNICI

SEQ ID NO: 13101 - protein, 566 aa, synthetic construct
  REGION 1..566: note = hemagglutinin__InfluenzaA__ALA08632
MKTIIALSYILCLVFAQKIPGNDNSTATLCLGHHAVPNGTIVKTITNDRIEVTNATELVQNSSIGEICDSPHQILDGENCTLIDALLGDPQCDGFQNKKWDLFVERSKAYSNCYPYDVPDYASLRSLVASSGTLEFNNESFNWTGVTQNGTSSACIRRSSSSFFSRLNWLTHLNYTYPALNVTMPNNEQFDKLYIWGVHHPGTDKDQIFLYAQSSGRITVSTKGSQQAVIPNVGSRPRIRDIPSRISIYWTIVKPGDILLINSTGNLIAPRGYFKIRSGKSSIMRSDAPIGKCKSECITPNGSIPNDKPFQNVNRITYGACPRYVKHSTLKLATGMRNVPEKQTRGIFGAIAGFIENGWEGMVDGWYGFRHQNSEGRGQAADLKSTQAAIDQINGKLNRLIGKTNEKFHQIEKEFSEVEGRIQDLEKYVEDTKIDLWSYNAELLVALENQHTIDLTDSEMNKLFEKTKKQLRENAEDMGNGCFKIYHKCDNACIGSIRNGTYDHNVYRDEALNNRFQIKGVELKSGYKDWILWISFAISCFLLCVALLGFIMWACQKGNIRCNICI

SEQ ID NO: 13102 - protein, 566 aa, synthetic construct; identical to SEQ ID NO: 12998
  REGION 1..566: note = hemagglutinin__InfluenzaA__ALA08634

SEQ ID NO: 13103 - protein, 566 aa, synthetic construct; identical to SEQ ID NO: 12441
  REGION 1..566: note = hemagglutinin__InfluenzaA__ALA08635

SEQ ID NO: 13104 - protein, 566 aa, synthetic construct
  REGION 1..566: note = hemagglutinin__InfluenzaA__ALA08636
MKTIIALSYILCLVFAQKIPGNDNSTATLCLGHHAVPNGTIVKTITNDRIEVTNATELVQNSSIGEICDSPHQILDGENCTLIDALLGDPQCDGFQNKKWDLFVERSKAYSNCYPYDVPDYASLRSLVASSGTLEFNNESFNWTGVTQNGTSSACIRRSSSSFFSRLNWLTHLNYTYPALNVTMPNNEQFDKLYIWGIHHPGTDKDQIFLYAQSSGRITVSTKRSQQAVIPNIGSRPRIRDIPSRISIYWTIVKPGDILLINSTGNLIAPRGYFKIRSGKSSIMRSDAPIGKCKSECITPNGSIPNDKPFQNVNRITYGACPRYVKHSTLKLATGMRNVPEKQTRGIFGAIAGFIENGWEGMVDGWYGFRHQNSEGRGQAADLKSTQAAIDQINGKLNRLIGKTNEKFHQIEKEFSEVEGRIQDLEKYVEDTKIDLWSYNAELLVALENQHTIDLTDSEMNKLFEKTKKQLRENAEDMGNGCFKIYHKCDNACIGSIRNGTYDHNVYRDEALNNRFQIKGVELKSGYKDWILWISFAISCFLLCVALLGFIMWACQKGNIRCNICI

SEQ ID NO: 13105 - protein, 566 aa, synthetic construct; identical to SEQ ID NO: 12998
  REGION 1..566: note = hemagglutinin__InfluenzaA__ALA08637

SEQ ID NO: 13106 - protein, 566 aa, synthetic construct
  REGION 1..566: note = hemagglutinin__InfluenzaA__ALA08638
MKTIIALSYILCLVFAQKIPGNDNSTATLCLGHHAVPNGTIVKTITNDRIEVTNATELVQNSSIGEICDSPHQILDGENCTLIDALLGDPQCDGFQNKKWDLFVERSKAYSNCYPYDVPDYASLRSLVASSGTLEFNNESFNWTGVTQNGTSSACIRGSNSSFFSRLNWLTHSNFKYPALNVTMPNNEQFDKLYIWGVHHPGTDKDQIFLYAQSSGRITVSTKRSQQAVIPNIGSRPRIRDIPSRISIYWTIVKPGDILLINSTGNLIAPRGYFKIRSGKSSIMRSDAPIGKCKSECITPNGSIPNDKPFQNVNRITYGACPRYVKHSTLKLATGMRNVPEKQTRGIFGAIAGFIENGWEGMVDGWYGFRHQNSEGRGQAADLKSTQAAIDQINGKLNRLIGKTNEKFHQIEKEFSEVEGRIQDLEKYVEDTKIDLWSYNAELLVALENQHTIDLTDSEMNKLFEKTKKQLRENAEDMGNGCFKIYHKCDNACIGSIRNGTYDHNVYRDEALNNRFQIKGVELKSGYKDWILWISFAISCFLLCVALLGFIMWACQKGNIRCNICI

SEQ ID NO: 13107 - protein, 566 aa, synthetic construct; identical to SEQ ID NO: 12998
  REGION 1..566: note = hemagglutinin__InfluenzaA__ALA08639

SEQ ID NO: 13108 - protein, 566 aa, synthetic construct; identical to SEQ ID NO: 12998
  REGION 1..566: note = hemagglutinin__InfluenzaA__ALA08640

SEQ ID NO: 13109 - protein, 566 aa, synthetic construct; identical to SEQ ID NO: 12998
  REGION 1..566: note = hemagglutinin__InfluenzaA__ALA08641

SEQ ID NO: 13110 - protein, 566 aa, synthetic construct; identical to SEQ ID NO: 12998
  REGION 1..566: note = hemagglutinin__InfluenzaA__ALA08642

SEQ ID NO: 13111 - protein, 566 aa, synthetic construct; identical to SEQ ID NO: 12998
  REGION 1..566: note = hemagglutinin__InfluenzaA__ALA08643

SEQ ID NO: 13112 - protein, 566 aa, synthetic construct; identical to SEQ ID NO: 12441
  REGION 1..566: note = hemagglutinin__InfluenzaA__ALA08644

SEQ ID NO: 13113 - protein, 566 aa, synthetic construct
  REGION 1..566: note = hemagglutinin__InfluenzaA__ALA08645
MKTIIALSYILCLVFAQKLPENDNSTATLCLGHHAVPNGTIVKTITSDRIEVTNATELVQNSSIGEICDSPHQILDGKNCTLIDALLGDPQCDGFQNKKWDLFVERSKAYSNCYPYDVPDYASLRSLVASSGTLEFNDESFNWAGVTQNGTSSACIRGSNSSFFSRLNWLTHSNFKYPALNVTMPNNEQFDKLYIWGVHHPGTDKDQIFLYAQSSGRITVSTKRSQQAVIPNIGSRPRIRNIPSRISIYWTIVKPGDILLINSTGNLIAPRGYFKIRSGKSSIMRSDAPIGKCKSECITPNGSIPNDKPFQNVNRITYGACPRYVKQSTLKLATGMRNVPEKQTRGIFGAIAGFIENGWEGMKDGWYGFRHQNSEGRGQAADLKSTQAAIDQINGKLNRLIGKTNEKFHQIEKEFSEVEGRIQDLEKYVEDTKIDIWSYNAELLVALENQHTIDLTDSEMNKLFEKTKKQLRENAEDMGNGCFKIYHKCDNACIGSIRNGTYDHDVYRDEALNNRFQIKGVELKSGYKDWILWISFAISCFLLCVALLGFIMWACQKGNIRCNICI

SEQ ID NO: 13114 - protein, 566 aa, synthetic construct; identical to SEQ ID NO: 12441
  REGION 1..566: note = hemagglutinin__InfluenzaA__ALA08646

SEQ ID NO: 13115 - protein, 566 aa, synthetic construct; identical to SEQ ID NO: 12441
  REGION 1..566: note = hemagglutinin__InfluenzaA__ALA08647

SEQ ID NO: 13116 - protein, 566 aa, synthetic construct; identical to SEQ ID NO: 12998
  REGION 1..566: note = hemagglutinin__InfluenzaA__ALA08648

SEQ ID NO: 13117 - protein, 566 aa, synthetic construct
  REGION 1..566: note = hemagglutinin__InfluenzaA__ALA08650
MKTIIALSYILCLVFAQKIPGNDNSTATLCLGHHAVPNGTIVKTITNERIEVTNATELVQNSSIGEICDSPHQILDGENCTLIDALLGDPQCDGFQNKKWDLFVERSKAYSNCYPYDVPDYASLRSLVASSGTLEFNNESFNWTGVTQNGTSSACIRRSSSSFFSRLNWLTHLNYTYPALNVTMPNNEQFDKLYIWGVHHPGTDKDQIFLYAQSSGRITVSTKRSQQAVIPNIGSRPRIRDIPSRISIYWTIVKPGDILLINSTGNLIAPRGYFKIRSGKSSIMRSDAPIGKCKSECITPNGSIPNDKPFQNVNRITYGACPRYVKHSTLKLATGMRNVPEKQTRGIFGAIAGFIENGWEGMVDGWYGFRHQNSEGRGQAADLKSTQAAIDQINGKLNRLIGKTNEKFHQIEKEFSEVEGRIQDLEKYVEDTKIDLWSYNAELLVALENQHTIDLTDSEMNKLFEKTKKQLRENAEDMGNGCFKIYHKCDNACIGSIRNGTYDHNVYRDEALNNRFQIKGVELKSGYKDWILWISFAISCFLLCVALLGFIMWACQKGNIRCNICI

SEQ ID NO: 13118 - protein, 566 aa, synthetic construct; identical to SEQ ID NO: 12998
  REGION 1..566: note = hemagglutinin__InfluenzaA__ALA08652

SEQ ID NO: 13119 - protein, 566 aa, synthetic construct; identical to SEQ ID NO: 12441
  REGION 1..566: note = hemagglutinin__InfluenzaA__ALA08653

SEQ ID NO: 13120 - protein, 566 aa, synthetic construct
  REGION 1..566: note = hemagglutinin__InfluenzaA__ALA08654
MKTIIALSYILCLVFAQKIPGNDNSTATLCLGHHAVPNGTIVKTITNDRIEVTNATELVQNSSIGEICDSPHQILDGENCTLIDALLGDPQCDGFQNKKWDLFVERSKAYSNCYPYDVPDYASLRSLVASSGTLEFNNESFNWTGVTQNGTSSACIRRSSSSFFSRLNWLTHLNYTYPALNVTMPNNEQFDKLYIWGVHHPGTDKDQIFLYAQSSGRITVSTKRSQQAVIPNIGSRPRIRDIPSRISIYWTIVKPGDILLINSTGNLIAPRGYFKIRSGKSSIMRSDAPIGKCKSECITPNGSIPNDKPFQNVNRITYGACPRYVKHSTLKLATGMRNVPEKQTRGIFGAIAGFIENGWEGMVDGWYGFRHQNSEGRGQAADLKSTQAAIDQINGKLNRLIGKTNEKFHQIEKEFSEVEGRIQDLEKYVEDTKIDLWSYNAELLVALENQHTIDLTDSEMNKLFEKTKKQLRENAEDMGNGCFKIYHKCDNACIGSIRNGTYDHNVYRDEALNNRFQIKGVELKSGYKDWILWISFAKSCFLLCVALLGFIMWACQKGNIRCNICI

SEQ ID NO: 13121 - protein, 566 aa, synthetic construct; identical to SEQ ID NO: 12998
  REGION 1..566: note = hemagglutinin__InfluenzaA__ALA08655

SEQ ID NO: 13122 - protein, 566 aa, synthetic construct; identical to SEQ ID NO: 12998
  REGION 1..566: note = hemagglutinin__InfluenzaA__ALA08656

SEQ ID NO: 13123 - protein, 566 aa, synthetic construct
  REGION 1..566: note = hemagglutinin__InfluenzaA__ALA08657
MKTIIALSYILCLVFAQKLPENDNSTATLCLGHHAVPNGTIVKTITSDRIEVTNATELVQNSSIGEICDSPHQILDGKNCTLIDALLGDPQCDGFQNKKWDLFIERSKAYSNCYPYDVPDYASLRSLVASSGTLEFNDESFNWAGVTQNGTSSACIRGSNSSFFSRLNWLTHSNFKYPALNVTMPNNEQFDKLYIWGVHHPGTDKDQIFLYAQSSGRITVSTKRSQQAVIPNIGSRPRIRNIPSRISIYWTIVKPGDILLINSTGNLIAPRGYFKIRSGKSSIMRSDAPIGKCKSECITPNGSIPNDKPFQNVNRITYGACPRYVKQSTLKLATGMRNVPEKQTRGIFGAIAGFIENGWEGMKDGWYGFRHQNSEGRGQAADLKSTQAAIDQINGKLNRLIGKTNEKFHQIEKEFSEVEGRIQDLEKYVEDTKIDLWSYNAELLVALENQHTIDLTDSEMNKLFEKTKKQLRENAEDMGNGCFKIYHKCDNACIGSIRNGTYDHDVYRDEALNNRFQIKGVELKSGYKDWILWISFAISCFLLCVALLGFIMWACQKGNIRCNICI

SEQ ID NO: 13124 - protein, 566 aa, synthetic construct; identical to SEQ ID NO: 12998
  REGION 1..566: note = hemagglutinin__InfluenzaA__ALA08658

SEQ ID NO: 13125 - protein, 566 aa, synthetic construct; identical to SEQ ID NO: 12985
  REGION 1..566: note = hemagglutinin__InfluenzaA__ALA08659

SEQ ID NO: 13126 - protein, 566 aa, synthetic construct
  REGION 1..566: note = hemagglutinin__InfluenzaA__ALA08660
MKTIIALSYILCLVFAQKIPGNDNSTATLCLGHHAVPNGTIVKTITNDRIEVTNATELVQNSSIGEICDSPHQILDGENCTLIDALLGDPQCDGFQNKKWDLFVERSKAYSNCYPYDVPDYASLRSLVASSGTLEFNNESFNWTGVTQNGTSSACIRRSSSSFFSRLNWLTHLNYTYPALNVTMPNNEQFDKLYIWGVHHPGTDKDQIFLYAQSSGRITVSTKRSQQAVIPNIGSRPRIRDIPSRISIYWTIVKPGDILLINSTGNLIAPRGYFKIRSGKSSIMRSDAPIGKCKSECITPNGSIPNDKPFQNVNRITYGACPRYVKHGTLKLATGMRNVPEKQTRGIFGAIAGFIENGWEGMVDGWYGFRHQNSEGRGQAADLKSTQAAIDQINGKLNRLIGKTNEKFHQIEKEFSEVEGRIQDLEKYVEDTKIDLWSYNAELLVALENQHTIDLTDSEMNKLFEKTKKQLRENAEDMGNGCFKIYHKCDNACIGSIRNGTYDHNVYRDEALNNRFQIKGVELKSGYKDWILWISFAISCFLLCVALLGFIMWACQKGNIRCNICI

SEQ ID NO: 13127 - protein, 566 aa, synthetic construct
  REGION 1..566: note = hemagglutinin__InfluenzaA__ALA08662
MKTIIALSYILCLVFAQKIPGNDNSTATLCLGHHAVPNGTIVKTITNDRIEVTNATELVQNSSIGEICDSPHQILDGENCTLIDALLGDPQCDGFQNKKWDLFVERSKAYSNCYPYDVPDYASLRSLVASSGTLEFNNESFNWTGVTQNGTSSACIRRSSSSFFSRLNWLTHLNYTYPALNVTMPNNEQFDKLYIWGVHHPGTDKDQIFLYAQSSGRITVSTKRSQQAVIPNIGSRPRIRDIPSRISIYWTIVKPGDILLINSTGNLIAPRGYFKILSGKSSIMRSDAPIGKCKSECITPNGSIPNDKPFQNVNRITYGACPRYVKHSTLKLATGMRNVPEKQTRGIFGAIAGFIENGWEGMVDGWYGFRHQNSEGRGQAADLKSTQAAIDQINGKLNRLIGKTNEKFHQIEKEFSEVEGRIQDLEKYVEDSKIDLWSYNAELLVALENQHTIDLTDSEMNKLFEKTKKQLRENAEDMGNGCFKIYHKCDNACIGSIRNGTYDHNVYRDEALNNRFQIKGVELKSGYKDWILWISFAISCFLLCVALLGFIMWACQKGNIRCNICI

SEQ ID NO: 13128 - protein, 566 aa, synthetic construct; identical to SEQ ID NO: 13099
  REGION 1..566: note = hemagglutinin__InfluenzaA__ALA08663

SEQ ID NO: 13129 - protein, 566 aa, synthetic construct; identical to SEQ ID NO: 13127
  REGION 1..566: note = hemagglutinin__InfluenzaA__ALA08665

SEQ ID NO: 13130 - protein, 566 aa, synthetic construct
  REGION 1..566: note = hemagglutinin__InfluenzaA__ALA08666
MKTIIALSYILCLVFAQKLPGNDNSTATLCLGHHAVPNGTIVKTITNDRIEVTNATELVQNSSIGEICDSPHQILDGENCTLIDALLGDPQCDGFQNKKWDLFVERSKAYSNCYPYDVPDYASLRSLVASSGTLEFNNESFNWAGVTQNGTSSACIRGSNSSFFSRLNWLTHLNFKYPALNVTMPNNEQFDKLYIWGVHHPGTDKDQIFLYAQSSGRITVSTKRSQQAVIPNIGSRPRIRNIPSRISIYWTIVKPGDILLINSTGNLIAPRGYFKIRSGKSSIMRSDAPIGKCKSECITPNGSIPNDKPFQNVNRITYGACPRYVKQSTLKLATGMRNVPEKQTRGIFGAIAGFIENGWEGMVDGWYGFRHQNSEGRGQAADLKSTQAAIDQINGKLNRLIGKTNEKFHQIEKEFSEVEGRIQDLEKYVEDTKIDLWSYNAELLVALENQHTIDLTDSEMNKLFEKTKKQLRENAEDMGNGCFKIYHKCDNACIGSIRNGTYDHDVYRDEALNNRFQIKGVELKSGYKDWILWISFAMSCFLLCVALLGFIMWACQKGNIRCNICI

SEQ ID NO: 13131 - protein, 566 aa, synthetic construct
  REGION 1..566: note = hemagglutinin__InfluenzaA__ALA08667
MKTIIALSYILCLVFAQKIPGNDNSTATLCLGHHAVPNGTIVKTITNDRIEVTNATELVQNSSIGEICDSPHQILDGENCTLIDALLGDPQCDGFQNKKWDLFVERSKAYSNCYPYDVPDYASLRSLVASSGTLEFNNESFNWTGVTQNGTSSACIRKSSSSFFSRLNWLTHLNYKYPALNVTMPNNEQFDKLYIWGVHHPGTDKDQIFLYARSSGRITVSTKRSQQAVIPNIGSRPRIRDIPSRISIYWTIVKPGDILLINSTGNLIAPRGYFKIRSGKSSIMRSDAPIGKCKSECITPNGSIPNDKPFQNVNRITYGACPRYVKHSTLKLATGMRNVPEKQTRGIFGAIAGFIENGWEGMVDGWYGFRHQNSEGRGQAADLKSTQAAIDQINGKLNRLIGKTNEKFHQIEKEFSEVEGRIQDLEKYVEDTKIDLWSYNAELLVALENQHTIDLTDSEMNKLFEKTKKQLRENAEDMGNGCFKIYHKCDNACIGSIRNGTYDHNVYRDEALNNRFQIKGVELKSGYKDWILWISFAISCFLLCVALLGFIMWACQKGNIRCNICI

SEQ ID NO: 13132 - protein, 566 aa, synthetic construct
  REGION 1..566: note = hemagglutinin__InfluenzaA__ALA08668
MKTIIALSYILCLVFAQKIPGNDNSTATLCLGHHAVPNGTIVKTITNDRIEVTNATELVQNSSIGEICDSPHQILDGENCTLIDALLGDPQCDGFQNKKWDLFVERSKAYSNCYPYDVPDYASLRSLVASSGTLEFNNESFNWTGVTQNGTSSACIRRSSSSFFSRLNWLTHLNYTYPALNVTMPNNEQFDKLYIWGVHHPGTDKDQIFLYAQSSGRITVSTKRSQQAVIPNIGSRPRIRDIPSRISIYWTIVKPGDILLINSTGNLIAPRGYFKIRSGKSSIMRSDAPIGKCKSECITPNGSIPNDKPFQNVNRITYGACPRYVKHSTLKLATGMRNVPEKQTRGIFGAIAGFIENGWEGMVDGWYGFRHQNSEGRGQAADLKSTQAAIDQINGKLNRLIGKTNEKFHQIEKEFSEVEGRIQDLEKYVEDTKIDLWSYNAELLVALENQHTIDLTDSEMNKLFEKTKKQLRENAEDMGNGCFKIYHKCDNACIGSIRNGTYDHNVYRDEAINNRFQIKGVELKSGYKDWILWISFAISCFLLCVALLGFIMWACQKGNIRCNICI

SEQ ID NO: 13133 - protein, 566 aa, synthetic construct; identical to SEQ ID NO: 13099
  REGION 1..566: note = hemagglutinin__InfluenzaA__ALA08669

SEQ ID NO: 13134 - protein, 566 aa, synthetic construct; identical to SEQ ID NO: 12992
  REGION 1..566: note = hemagglutinin__InfluenzaA__ALA08670

SEQ ID NO: 13135 - protein, 566 aa, synthetic construct; identical to SEQ ID NO: 13099
  REGION 1..566: note = hemagglutinin__InfluenzaA__ALA08671

SEQ ID NO: 13136 - protein, 566 aa, synthetic construct; identical to SEQ ID NO: 13099
  REGION 1..566: note = hemagglutinin__InfluenzaA__ALA08672

SEQ ID NO: 13137 - protein, 566 aa, synthetic construct; identical to SEQ ID NO: 12992
  REGION 1..566: note = hemagglutinin__InfluenzaA__ALA08673

SEQ ID NO: 13138 - protein, 566 aa, synthetic construct; identical to SEQ ID NO: 13099
  REGION 1..566: note = hemagglutinin__InfluenzaA__ALA08674

SEQ ID NO: 13139 - protein, 566 aa, synthetic construct; identical to SEQ ID NO: 12441
  REGION 1..566: note = hemagglutinin__InfluenzaA__ALA08675

SEQ ID NO: 13140 - protein, 566 aa, synthetic construct; identical to SEQ ID NO: 13099
  REGION 1..566: note = hemagglutinin__InfluenzaA__ALA08676

SEQ ID NO: 13141 - protein, 566 aa, synthetic construct; identical to SEQ ID NO: 13099
  REGION 1..566: note = hemagglutinin__InfluenzaA__ALA08677

SEQ ID NO: 13142 - protein, 566 aa, synthetic construct; identical to SEQ ID NO: 13099
  REGION 1..566: note = hemagglutinin__InfluenzaA__ALA08678

SEQ ID NO: 13143 - protein, 566 aa, synthetic construct; identical to SEQ ID NO: 13099
  REGION 1..566: note = hemagglutinin__InfluenzaA__ALA08679

SEQ ID NO: 13144 - protein, 566 aa, synthetic construct; identical to SEQ ID NO: 13099
  REGION 1..566: note = hemagglutinin__InfluenzaA__ALA08680

SEQ ID NO: 13145 - protein, 566 aa, synthetic construct; identical to SEQ ID NO: 12998
  REGION 1..566: note = hemagglutinin__InfluenzaA__ALA08681

SEQ ID NO: 13146 - protein, 566 aa, synthetic construct; identical to SEQ ID NO: 13077
  REGION 1..566: note = hemagglutinin__InfluenzaA__ALA08682

SEQ ID NO: 13147 - protein, 566 aa, synthetic construct; identical to SEQ ID NO: 12998
  REGION 1..566: note = hemagglutinin__InfluenzaA__ALA08683

SEQ ID NO: 13148 - protein, 566 aa, synthetic construct
  REGION 1..566: note = hemagglutinin__InfluenzaA__ALA08684
MKTIIALSHILCLVFAQKIPGNDNSTATLCLGHHAVPNGTIVKTITNDRIEVTNATELVQNSSIGEICDSPHQILDGENCTLIDALLGDPQCDGFQNKKWDLFVERSKAYSNCYPYDVPDYASLRSLVASSGTLEFNNESFNWTGVTQNGTSSACIRRSSSSFFSRLNWLTHLNYKYPALNVTMPNNEQFDKLYIWGVHHPGTDKDQIFLYAQSSGRITVSTKGSQQAVIPNIGSRPRIRDIPSRISIYWTIVKPGDILLINSTGNLIAPRGYFKIRSGKSSIMRSDAPIGKCKSECITPNGSIPNDKPFQNVNRITYGACPRYVKHSTLKLATGMRNVPEKQTRGIFGAIAGFIENGWEGMVDGWYGFRHQNSEGRGQAADLKSTQAAIDQINGKLNRLIGKTNEKFHQIEKEFSEVEGRIQDLEKYVEDTKIDLWSYNAELLVALENQHTIDLTDSEMNKLFEKTKKQLRENAEDMGNGCFKIYHKCDNACIGSIRNGTYDHNVYRDEALNNRFQIKGIELKSGYKDWILWISFAISCFLLCVALLGFIMWACQKGNIRCNICI

SEQ ID NO: 13149 - protein, 566 aa, synthetic construct; identical to SEQ ID NO: 12441
  REGION 1..566: note = hemagglutinin__InfluenzaA__ALA08686

SEQ ID NO: 13150 - protein, 566 aa, synthetic construct
  REGION 1..566: note = hemagglutinin__InfluenzaA__ALA08687
MKTIIALSYILCLVFAQKIPGNDNSTATLCLGHHAVPNGTIVKTITNDRIEVTNATELVQNSSIGEICDSPHQILDGENCTLIDALLGDPQCDGFQNKKWDLFVERSKAYSNCYPYDVPDYASLRSLIASSGTLEFNNESFNWTGVTQNGTSSACIRRSSSSFFSRLNWLTHLNYTYPALNVTMPNNEQFDKLYIWGVHHPGTDKDQIFLYAQSSGRITVSTKRSQQAVIPNIGSRPRIRDIPSRISIYWTIVKPGDILLINSTGNLIAPRGYFKIRSGKSSIMRSDAPIGKCKSECITPNGSIPNDKPFQNVNRITYGACPRYVKHSTLKLATGMRNVPEKQTRGIFGAIAGFIENGWEGMVDGWYGFRHQNSEGRGQAADLKSTQAAIDQINGKLNRLIGKTNEKFHQIEKEFSEVEGRIQDLEKYVEDTKIDLWSYNAELLVALENQHTIDLTDSEMNKLFEKTKKQLRENAEDMGNGCFKIYHKCDNACIGSIRNGTYDHNVYRDEALNNRFQIKGVELKSGYKDWILWISFAISCFLLCVALLGFIMWACQKGNIRCNICI

SEQ ID NO: 13151 - protein, 566 aa, synthetic construct; identical to SEQ ID NO: 13092
  REGION 1..566: note = hemagglutinin__InfluenzaA__ALA08688

SEQ ID NO: 13152 - protein, 566 aa, synthetic construct; identical to SEQ ID NO: 12441
  REGION 1..566: note = hemagglutinin__InfluenzaA__ALE31612

SEQ ID NO: 13153 - protein, 566 aa, synthetic construct
  REGION 1..566: note = hemagglutinin__InfluenzaA__ALE31613
MKTIIALSYILCLVFAQKIPGNDNSTATLCLGHHAVPNGTIVKTITNDRIEVTNATELVQNSSIGEICDSPHQILDGENCTLIDALLGDPQCDGFQNKKWDLFVERSKAYSNCYPYDVPDYASLRSLVASSGTLEFNNESFNWTGVTQNGTSSACIRRSSSSFFSRLNWLTHLNYTYPALNVTMPNNEQFDKLYIWGVHHPGTDKDQIFLYAQSSGRITVSTKGSQQAVIPNIGSRPRIRDIPSRISIYWTIVKPGDILLISSTGNLIAPRGYFKIRSGKSSIMRSDAPIGKCKSECITPNGSIPNDKPFQNVNRITYGACPRYVKHSTLKLATGMRNVPEKQTRGIFGAIAGFIENGWEGMVDGWYGFRHQNSEGRGQAADLKSTQAAIDQINGKLNRLIGKTNEKFHQIEKEFSEVEGRIQDLEKYVEDTKIDLWSYNAELLVALENQHTIDLTDSEMNKLFEKTKKQLRENAEDMGNGCFKIYHKCDNACIGSIRNGTYDHNVYRDEALNNRFQIKGVELKSGYKDWILWISFAISCLLLCVALLGFIMWACQKGNIRCNICI

SEQ ID NO: 13154 - protein, 566 aa, synthetic construct
  REGION 1..566: note = hemagglutinin__InfluenzaA__ALE31614
MKTIIALSYILCLVFAQKIPGNDNSTATLCLGHHAVPNGTIVKTITNDRIEVTNATELVQNSSIGKICDSPHQILDGENCTLIDALLGDPQCDGFQNKKWDLFVERSKAYSNCYPYDVPDYASLRSLVASSGTLEFNNESFNWTGVTQNGTSSACIRRSSSSFFSRLNWLTHLNYTYPALNVTMPNNEQFDKLYIWGVHHPGTDKDQIFLYAQSSGRITVSTKRSQQAVIPNIGSRPRIRDIPSRISIYWTIVKPGDILLINSTGNLIAPRGYFKIRSGKSSIMRSDAPIGKCKSECITPNGSIPNDKPFQNVNRITYGACPRYVKHSTLKLATGMRNVPEKQTRGIFGAIAGFIENGWEGMVDGWYGFRHQNSEGRGQAADLKSTQAAIDQINGKLNRLIGKTNEKFHQIEKEFSEVEGRIQDLEKYVEDTKIDLWSYNAELLVALENQHTIDLTDSEMNKLFEKTKKQLRENAEDMGNGCFKIYHKCDNACIGSIRNGTYDHNVYRDEALNNRFQIKGVELKSGYKDWILWISFAISCFLLCVALLGFIMWACQKGNIRCNICI

SEQ ID NO: 13155 - protein, 566 aa, synthetic construct
  REGION 1..566: note = hemagglutinin__InfluenzaA__ALE31615
MKTIIALSYILCLVFAQKLPGNDNSTATLCLGHHAVPNGTIVKTITNDRIEVTNATELVQNSSIGEICDSPHQILDGENCTLIDALLGDPQCDGFQNKKWDLFVERSKAYSNCYPYDVPDYASLRSLVASSGTLEFNNESFNWAGVTQNGTSSACIRGSNSSFFSRLNWLTHLNFKYPALNVTMPNNEQFDKLYIWGVHHPGTDKDQIFLYAQSSGRITVSTKRSQQAVIPNIGSRPRIRNIPSRISIYWTIVKPGDILLINSTGNLIAPRGYFKIRSGKSSIMRSDAPIGKCKSECITPNGSIPNDKPFQNVNRITYGACPRYVKQSTLKLATGMRNVPEKQTRGIFGAIAGFIENGWEGMVDGWYGFRHQNSEGRGQAADLKSTQAAIDQINGKLNRLIGKTNEKFHQIEKEFSEVEGRIQDLEKYVEDTKIDLWSYNAELLVALENQHTIDLTDSEMNKLFEKTKKQLRENAEDMGNGCFKIYHKCDNACIESIRNGTYDHDVYRDEALNNRFQIKGVELKSGYKDWILWISFAISCFLLCVALLGFIMWACQKGNIRCNICI

SEQ ID NO: 13156 - protein, 566 aa, synthetic construct; identical to SEQ ID NO: 12441
  REGION 1..566: note = hemagglutinin__InfluenzaA__ALE31616

SEQ ID NO: 13157 - protein, 566 aa, synthetic construct; identical to SEQ ID NO: 12441
  REGION 1..566: note = hemagglutinin__InfluenzaA__ALE31617

SEQ ID NO: 13158 - protein, 566 aa, synthetic construct; identical to SEQ ID NO: 12441
  REGION 1..566: note = hemagglutinin__InfluenzaA__ALE31618

SEQ ID NO: 13159 - protein, 566 aa, synthetic construct; identical to SEQ ID NO: 13099
  REGION 1..566: note = hemagglutinin__InfluenzaA__ALE31619

SEQ ID NO: 13160 - protein, 566 aa, synthetic construct; identical to SEQ ID NO: 12441
  REGION 1..566: note = hemagglutinin__InfluenzaA__ALE31620

SEQ ID NO: 13161 - protein, 566 aa, synthetic construct
  REGION 1..566: note = hemagglutinin__InfluenzaA__ALE31622
MKTIIALSYILCLVFAQKIPGNDNSTATLCLGHHAVPNGTIVKTITNDRIEVTNATELVQNSSIGEICDSPHQILDGENCTLIDALLGDPQCDGFQNKKWDLFVERSKAYSNCYPYDVPDYASLRSLVASSGTLEFNNESFNWTGVTQNGTSSACIRRSSSSFFSRLNWLTHLNYTYPALNVTMPNNEQFDKLYIWGVHHPGTDKDQIFLYAQSSGRITVSTKRSQQAVIPNIGSRPRIRDIPSRISIYWTIVKPGDILLINSTGNLIAPRGYFKIRSGKSSIMRSDVPIGKCKSECITPNGSIPNDKPFQNVNRITYGACPRYVKHSTLKLATGMRNVPEKQTRGIFGAIAGFIENGWEGMVDGWYGFRHQNSEGRGQAADLKSTQAAIDQINGKLNRLIGKTNEKFHQIEKEFSEVEGRIQDLEKYVEDTKIDLWSYNAELLVALENQHTIDLTDSEMNKLFEKTKKQLRENAEDMGNGCFKIYHKCDNACIGSIRNGTYDHNVYRDEALNNRFQIKGVELKSGYKDWILWISFAISCFLLCVALLGFIMWACQKGNIRCNICI

SEQ ID NO: 13162 - protein, 566 aa, synthetic construct; identical to SEQ ID NO: 12441
  REGION 1..566: note = hemagglutinin__InfluenzaA__ALE31623

SEQ ID NO: 13163 - protein, 566 aa, synthetic construct; identical to SEQ ID NO: 12441
  REGION 1..566: note = hemagglutinin__InfluenzaA__ALE31625

SEQ ID NO: 13164 - protein, 566 aa, synthetic construct; identical to SEQ ID NO: 12441
  REGION 1..566: note = hemagglutinin__InfluenzaA__ALE31626

SEQ ID NO: 13165 - protein, 566 aa, synthetic construct; identical to SEQ ID NO: 12441
  REGION 1..566: note = hemagglutinin__InfluenzaA__ALE31627

SEQ ID NO: 13166 - protein, 566 aa, synthetic construct; identical to SEQ ID NO: 12441
  REGION 1..566: note = hemagglutinin__InfluenzaA__ALE31628

SEQ ID NO: 13167 - protein, 566 aa, synthetic construct; identical to SEQ ID NO: 12441
  REGION 1..566: note = hemagglutinin__InfluenzaA__ALE31629

SEQ ID NO: 13168 - protein, 566 aa, synthetic construct; identical to SEQ ID NO: 12441
  REGION 1..566: note = hemagglutinin__InfluenzaA__ALE31632

SEQ ID NO: 13169 - protein, 566 aa, synthetic construct
  REGION 1..566: note = hemagglutinin__InfluenzaA__ALE31634
MKTIIALSYILCLVLAQKIPGNDNSTATLCLGHHAVPNGTIVKTITNDRIEVTNATELVQNSSIGEICDSPHQILDGENCTLIDALLGDPQCDGFQNKKWDLFVERSKAYSNCYPYDVPDYASLRSLVASSGTLEFNNESFNWTGVTQNGTSSACIRRSSSSFFSRLNWLTHLNYTYPALNVTMPNNEQFDKLYIWGVHHPGTDKDQIFLYAQSSGRITVSTKRSQQAVIPNIGSRPRIRDIPSRISIYWTIVKPGDILLINSTGNLIAPRGYFKIRSGKSSIMRSDAPIGKCKSECITPNGSIPNDKPFQNVNRITYGACPRYVKHSTLKLATGMRNVPEKQTRGIFGAIAGFIENGWEGMVDGWYGFRHQNSEGRGQAADLKSTQAAIDQINGKLNRLIGKTNEKFHQIEKEFSEVEGRIQDLEKYVEDTKIDLWSYNAELLVALENQHTIDLTDSEMNKLFEKTKKQLRENAEDMGNGCFKIYHKCDNACIGSIRNGTYDHNVYRDEALNNRFQIKGVELKSGYKDWILWISFAISCFLLCVALLGFIMWACQKGNIRCNICI

SEQ ID NO: 13170 - protein, 566 aa, synthetic construct; identical to SEQ ID NO: 12441
  REGION 1..566: note = hemagglutinin__InfluenzaA__ALE31635

SEQ ID NO: 13171 - protein, 566 aa, synthetic construct; identical to SEQ ID NO: 12441
  REGION 1..566: note = hemagglutinin__InfluenzaA__ALE31636

SEQ ID NO: 13172 - protein, 566 aa, synthetic construct
  REGION 1..566: note = hemagglutinin__InfluenzaA__ALE31638
MKTIIALSYILCLVFAQKIPGNDNSTATLCLGHHAVPNGTIVKTITNDRIEVTNATELVQNSSIGEICDSPHQILDGENCTLIDALLGDPQCDGFQNKKWDLFVERSKAYSNCYPYDVPDYASLRSLVASSGTLEFNNESFNWTGVTQNGTSSACIRRSSSSFFSRLNWLTHLNYTYPALNVTMPNNEQFDKLYIWGVHHPGTDKDQIFLYAQSSGRITVSTKRSQQAVIPNIGSRPRIRDIPSRISIYWTIVKPGDILLINSTGNLIAPRGYFKIRSGKSSIMRSDAPIGKCKSECITPNGSIPNGKPFQNVNRITYGACPRYVKHSTLKLATGMRNVPEKQTRGIFGAIAGFIENGWEGMVDGWYGFRHQNSEGRGQAADLKSTQAAIDQINGKLNRLIGKTNEKFHQIEKEFSEVEGRIQDLEKYVEDTKIDLWSYNAELLVALENQHTIDLTDSEMNKLFEKTKKQLRENAEDMGNGCFKIYHKCDNACIGSIRNGTYDHNVYRDEALNNRFQIKGVELKSGYKDWILWISFAISCFLLCVALLGFIMWACQKGNIRCNICI

SEQ ID NO: 13173 - protein, 566 aa, synthetic construct; identical to SEQ ID NO: 12441
  REGION 1..566: note = hemagglutinin__InfluenzaA__ALE31639

SEQ ID NO: 13174 - protein, 566 aa, synthetic construct; identical to SEQ ID NO: 12992
  REGION 1..566: note = hemagglutinin__InfluenzaA__ALE31640

SEQ ID NO: 13175 - protein, 566 aa, synthetic construct; identical to SEQ ID NO: 12998
  REGION 1..566: note = hemagglutinin__InfluenzaA__ALE31641

SEQ ID NO: 13176 - protein, 566 aa, synthetic construct; identical to SEQ ID NO: 12998
  REGION 1..566: note = hemagglutinin__InfluenzaA__ALE31642

SEQ ID NO: 13177 - protein, 566 aa, synthetic construct
  REGION 1..566: note = hemagglutinin__InfluenzaA__ALE31643
MKTIIALSYILCLVFAQKLPENDNSTATLCLGHHAVPNGTIVKTITSDRIEVTNATELVQNSSIGEICDSPHQILDGKNCTLIDALLGDPQCDGFQNKKWDLFVERSTAYSNCYPYDVPDYASLRSLVASSGTLEFNDESFNWAGVTQNGTSSACIRGSNSSFFSRLNWLTHSNFKYPALNVTMPNNEQFDKLYIWGVHHPGTDKDQIFLYAQSSGRITVSTKRSQQAVIPNIGSRPRIRNIPSRISIYWTIVKPGDILLINSTGNLIAPRGYFKIRSGKSSIMRSDAPIGKCKSECITPNGSIPNDKPFQNVNRITYGACPRYVKQSTLKLATGMRNVPEKQTRGIFGAIAGFIENGWEGMKDGWYGFRHQNSEGRGQAADLKSTQAAIDQINGKLNRLIGKTNEKFHQIEKEFSEVEGRIQDLEKYVEDTKIDLWSYNAELLVALENQHTIDLTDSEMNKLFEKTKKQLRENAEDMGNGCFKIYHKCDNACIGSIRNGTYDHDVYRDEALNNRFQIKGVELKSGYKDWILWISFAISCFLLCVALLGFIMWACQKGNIRCNICI

SEQ ID NO: 13178 - protein, 566 aa, synthetic construct; identical to SEQ ID NO: 12441
  REGION 1..566: note = hemagglutinin__InfluenzaA__ALE31644

SEQ ID NO: 13179 - protein, 566 aa, synthetic construct; identical to SEQ ID NO: 12441
  REGION 1..566: note = hemagglutinin__InfluenzaA__ALE31645

SEQ ID NO: 13180 - protein, 566 aa, synthetic construct; identical to SEQ ID NO: 12441
  REGION 1..566: note = hemagglutinin__InfluenzaA__ALE31646

SEQ ID NO: 13181 - protein, 566 aa, synthetic construct; identical to SEQ ID NO: 12998
  REGION 1..566: note = hemagglutinin__InfluenzaA__ALE31647

SEQ ID NO: 13182 - protein, 566 aa, synthetic construct
  REGION 1..566: note = hemagglutinin__InfluenzaA__ALE31648
MKTIIALSYILCLVFAQKIPGNDNSTATLCLGHHAVPNGTIVKTITNDRIEVTNATELVQNSSIGEICDSPHQILDGENCTLIDALLGDPQCDGFQNKKWDLFVERSKAYSNCYPYDVPDYASLRSLVASSGTLEFNNESFNWTGVTQNGTSSACIRRSSSSFFSRLNWLTHLNYTYPALNVTMPNNEQFDKLYIWGVHHPGTDKDQIFLYAQPSGRITVSTKRSQQAVIPNIGSRPRIRDIPSRISIYWTIVKPGDILLINSTGNLIAPRGYFKIRSGKSSIMRSDAPIGKCKSECITPNGSIPNDKPFQNVNRITYGACPRYVKHSTLKLATGMRNVPEKQTRGIFGAIAGFIENGWEGMVDGWYGFRHQNSEGRGQAADLKSTQAATDQINGKLNRLIGKTNEKFHQIEKEFSEVEGRIQDLEKYVEDTKIDLWSYNAELLVALENQHTIDLTDSEMNKLFEKTKKQLRENAEDMGNGCFKIYHKCDNACIGSIRNGTYDHNVYRDEALNNRFQIKGVELKSGYKDWILWISFAISCFLLCVALLGFIMWACQKGNIRCNICI

SEQ ID NO: 13183 - protein, 566 aa, synthetic construct; identical to SEQ ID NO: 12441
  REGION 1..566: note = hemagglutinin__InfluenzaA__ALE31649

SEQ ID NO: 13184 - protein, 566 aa, synthetic construct; identical to SEQ ID NO: 12998
  REGION 1..566: note = hemagglutinin__InfluenzaA__ALE31650

SEQ ID NO: 13185 - protein, 566 aa, synthetic construct
  REGION 1..566: note = hemagglutinin__InfluenzaA__ALE31652
MKTIIALSYILCLVFAQKIPGNDNSTATLCLGHHAVPNGTIVKTITNDRIEVTNATELVQNSSIGEICDSPHQILDGENCTLIDALLGDPQCDGFQNKKWDLFVERSKAYSNCYPYDVPDYASLRSLVASSGTLEFNNESFNWTGVTQNGTSSACIRRSSSSFFSRLNWLTHLNYKYPALNVTMPNNEQFDKLYIWGVHHPGTDKDQISLYAQSSGRITVSTKRSQQAVIPNIGSRPRIRDIPSRISIYWTIVKPGDILLINSTGNLIAPRGYFKIRSGKSSIMRSDAPIGKCKSECITPNGSIPNDKPFQNVNRITYGACPRYVKHSTLKLATGMRNVPEKQTRGIFGAIAGFIENGWEGMVDGWYGFRHQNSEGRGQAADLKSTQAAIDQINGKLNRLIGKTNEKFHQIEKEFSEVEGRIQDLEKYVEDTKIDLWSYNAELLVALENQHTIDLTDSEMNKLFEKTKKQLRENAEDMGNGCFKIYHKCDNACIGSIRNGTYDHNVYRDEALNNRFQIKGVELKSGYKDWILWISFAISCFLLCVALLGFIMWACQKGNIRCNICI

SEQ ID NO: 13186 - protein, 566 aa, synthetic construct; identical to SEQ ID NO: 13092
  REGION 1..566: note = hemagglutinin__InfluenzaA__ALE31653

SEQ ID NO: 13187 - protein, 566 aa, synthetic construct; identical to SEQ ID NO: 12441
  REGION 1..566: note = hemagglutinin__InfluenzaA__ALE31654

SEQ ID NO: 13188 - protein, 566 aa, synthetic construct; identical to SEQ ID NO: 12441
  REGION 1..566: note = hemagglutinin__InfluenzaA__ALE31655

SEQ ID NO: 13189 - protein, 566 aa, synthetic construct
  REGION 1..566: note = hemagglutinin__InfluenzaA__ALE31656
MKTIIALSYILCLVFAQKIPGNDNSTATLCLGHHAVPNGTIVKTITNDRIEVTNATELVQNSSIGEICDSPHQILDGENCTLIDALLGDPQCDGFQNKKWDIFVERSKAYSNCYPYDVPDYASLRSLVASSGTLEFNNESFNWTGVTQNGTSSACIRRSSSSFFSRLNWLTHLNYTYPALNVTMPNNEQFDKLYIWGVHHPGTDKDQIFLYAQSSGRITVSTKRSQQAVIPNIGSRPRIRDIPSRISIYWTIVKPGDILLINSTGNLIAPRGYFKIRSGKSSIMRSDAPIGKCKSECITPNGSIPNDKPFQNVNRITYGACPRYVKHSTLKLATGMRNVPEKQTRGIFGAIAGFIENGWEGMMDGWYGFRHQNSEGRGQAADLKSTQAAIDQINGKLNRLIGKTNEKFHQIEKEFSEVEGRIQDLEKYVEDTKIDLWSYNAELLVALENQHTIDLTDSEMNKLFEKTKKQLRENAEDMGNGCFKIYHKCDNACIGSIRNGTYDHNVYRDEALNNRFQIKGVELKSGYKDWILWISFAISCFLLCVALLGFIMWACQKGNIRCNICI

SEQ ID NO: 13190 - protein, 566 aa, synthetic construct
  REGION 1..566: note = hemagglutinin__InfluenzaA__ALE31657
MKTIIALSYILCLVSAQKIPGNDNSTATLCLGHHAVPNGTIVKTITNDRIEVTNATELVQNSSIGEICDSPHQILDGENCTLIDALLGDPQCDGFQNKKWDLFVERSKAYSNCYPYDVPDYASLRSLVASSGTLEFNNESFNWTGVTQNGTSSACIRRSSSSFFSRLNWLTHLNYTYPALNVTMPNNEQFDKLYIWGVHHPGTDKDQIFLYAQSSGRITVSTKRSQQAVIPNIGSRPRIRDIPSRISIYWTIVKPGDILLINSTGNLIAPRGYFKIRSGKSSIMRSDAPIGKCKSECITPNGSIPNDKPFQNVNRITYGACPRYVKHSTLKLATGMRNVPEKQTRGIFGAIAGFIENGWEGMVDGWYGFRHQNSEGRGQAADLKSTQAAIDQINGKLNRLIGKTNEKFHQIEKEFSEVEGRIQDLEKYVEDTKIDLWSYNAELLVALENQHTIDLTDSEMNKLFEKTKKQLRENAEDMGNGCFKIYHKCDNACIGSIRNGTYDHNVYRDEALNNRFQIKGVELKSGYKDWILWISFAISCFLLCVALLGFIMWACQKGNIRCNICI

SEQ ID NO: 13191 - protein, 566 aa, synthetic construct; identical to SEQ ID NO: 12441
  REGION 1..566: note = hemagglutinin__InfluenzaA__ALE31658

SEQ ID NO: 13192 - protein, 566 aa, synthetic construct; identical to SEQ ID NO: 13056
  REGION 1..566: note = hemagglutinin__InfluenzaA__ALE31659

SEQ ID NO: 13193 - protein, 566 aa, synthetic construct; identical to SEQ ID NO: 12985
  REGION 1..566: note = hemagglutinin__InfluenzaA__ALE31660

SEQ ID NO: 13194 - protein, 566 aa, synthetic construct
  REGION 1..566: note = hemagglutinin__InfluenzaA__ALE31661
MKTIIALSYILCLVFAQKIPGNDNSTATLCLGHHAVPNGTIVKTITNDRIEVTNATELVQNSSIGEICDSPHQILDGENCTLIDALLGDPQCDGFQNKKWDLFVERSKAYSNCYPYDVPDYASLRSLVASSGTLEFNNESFNWTGVTQNGTSSACIRRSSSSFFSRLNWLTHLNYTYPALNVTMPNNEQFDKLYIWGVHHPGTDKDQIFLYAQSSGRITVSTKKSQQAVIPNIGSRPRIRDIPSRISIYWTIVKPGDILLINSTGNLIAPRGYFKIRSGKSSIMRSDAPIGKCKSECITPNGSIPNDKPFQNVNRITYGACPRYVKHSTLKLATGMRNVPEKQTRGIFGAIAGFIENGWEGMVDGWYGFRHQNSEGRGQAADLKSTQAAIDQINGKLNRLIGKTNEKFHQIEKEFSEVEGRIQDLEKYVEDTKIDLWSYNAELLVALENQHTIDLTDSEMNKLFEKTKKQLRENAEDMGNGCFKIYHKCDNACIGSIRNGTYDHNVYRDEALNNRFQIKGVELKSGYKDWILWISFAISCFLLCVALLGFIMWACQKGNIRCNICI

SEQ ID NO: 13195 - protein, 566 aa, synthetic construct
  REGION 1..566: note = hemagglutinin__InfluenzaA__ALE31662
MKTIIALSYILCLVFAQKIPGNDNSTATLCLGHHAVPNGTIVKTIANDRIEVTNATELVQNSSIGEICDSPHQILDGENCTLIDALLGDPQCDGFQNKKWDLFVERSKAYSNCYPYDVPDYASLRSLVASSGTLEFNNESFNWTGVTQNGTSSACIRRSSSSFFSRLNWLTHLNYTYPALNVTMPNNEQFDKLYIWGVHHPGTDKDQIFLYAQSSGRITVSTKGSQQAVIPNIGSRPRIRDIPSRISIYWTIVKPGDILLINSTGNLIAPRGYFKIRSGKSSIMRSDAPIGKCKSECITPNGSIPNDKPFQNVNRITYGACPRYVKHSTLKLATGMRNVPEKQTRGIFGAIAGFIENGWEGMVDGWYGFRHQNSEGRGQAADLKSTQAAIDQINGKLNRLIGKTNEKFHQIEKEFSEVEGRIQDLEKYVEDTKIDLWSYNAELLVALENQHTIDLTDSEMNKLFEKTKKQLRENAEDMGNGCFKIYHKCDNACIGSIRNGTYDHNVYRDEALNNRFQIKGVELKSGYKDWILWISFAISCLLLCVALLGFIMWACQKGNIRCNICI

SEQ ID NO: 13196 - protein, 566 aa, synthetic construct; identical to SEQ ID NO: 12427
  REGION 1..566: note = hemagglutinin__InfluenzaA__ALE31663

SEQ ID NO: 13197 - protein, 566 aa, synthetic construct
  REGION 1..566: note = hemagglutinin__InfluenzaA__ALE31666
MKTIIALSYILCLVFAQKIPGNDNSTATLCLGHHAVPNGTIVKTITNDRIEVTNATELVQNSSIGEICDSPHQILDGENCTLIDALLGDPQCDGFQNKKWDLFVERSKAYSNCYPYDVPDYASLRSLVASSGTLEFNNESFNWTGVTQNGTSSACIRKSSSSFFSRLNWLTHLKYTYPALNVTMPNNEQFDKLYIWGVHHPGTDKDQIFLYARSSGRITVSTKRSQQAVIPNIGSRPRIRDIPSRISIYWTIVKPGDILLINSTGNLIAPRGYFKIRSGKSSIMRSDAPIGKCKSECITPNGSIPNDKPFQNVNRITYGACPRYVKHSTLKLATGMRNVPEKQTRGIFGAIAGFIENGWEGMVDGWYGFRHQNSEGRGQAADLKSTQAAIDQINGKLNRLIGKTNEKFHQIEKEFSEVEGRIQDLEKYVEDTKIDLWSYNAELLVALENQHTIDLTDSEMNKLFEKTKKQLRENAEDMGNGCFKIYHKCDNACIGSIRNGTYDHNVYRDEALNNRFQIKGVELKSGYKDWILWISFAISCFLLCVALLGFIMWACQKGNIRCNICI

SEQ ID NO: 13198 - protein, 566 aa, synthetic construct
  REGION 1..566: note = hemagglutinin__InfluenzaA__ALE31667
MKTIIALSYILCLVFAQKIPGNDNSTATLCLGHHAVLNGTIVKTITNDRIEVTNATELVQNSSIGEICDSPHQILDGENCTLIDALLGDPQCDGFQNKKWDLFVERSKAYSNCYPYDVPDYASLRSLVASSGTLEFNNESFNWTGVTQNGTSSACIRKSSSSFFSRLNWLTHLNYTYPALNVTMPNNEQFDKLYIWGVHHPGTDKDQIFLYARSSGRITVSTKRSQQAVIPNIGSRPRIRDIPSRISIYWTIVKPGDILLINSTGNLIAPRGYFKIRSGKSSIMRSDAPIGKCKSECITPNGSIPNDKPFQNVNRITYGACPRYVKHSTLKLATGMRNVPEKQTRGIFGAIAGFIENGWEGMVDGWYGFRHQNSEGRGQAADLKSTQAAIDQINGKLNRLIGKTNEKFHQIEKEFSEVEGRIQDLEKYVEDTKIDLWSYNAELLVALENQHTIDLTDSEMNKLFEKTKKQLRENAEDMGNGCFKIYHKCDNACIGSIRNGTYDHNVYRDEALNNRFQIKGVELKSGYKDWILWISFAISCFLLCVALLGFIMWACQKGNIRCNICI

SEQ ID NO: 13199 - protein, 566 aa, synthetic construct; identical to SEQ ID NO: 12441
  REGION 1..566: note = hemagglutinin__InfluenzaA__ALE31668

SEQ ID NO: 13200 - protein, 566 aa, synthetic construct; identical to SEQ ID NO: 12441
  REGION 1..566: note = hemagglutinin__InfluenzaA__ALE31669

SEQ ID NO: 13201 - protein, 566 aa, synthetic construct
  REGION 1..566: note = hemagglutinin__InfluenzaA__ALE31670
MKTIIALSYILCLVFAQKLPENDNSTATLCLGHHAVPNGTIVKTITSDRIEVTNATELVQNSSIGEICDSPHQILDGKNCTLIDALLGDPQCDGFQNKKWDLFVERSKAYSNCYPYDVPDYASLRSLVASSGTLEFNDESFNWAGVTQNGTSSACIRGSNSSFFSRLNWLTHSNFKYPALNVTMPNNEQFDKLYIWGVHHPGTDKDQIFLYAQSSGRITVSTKRSQQAVIPNIGSRPRIRNIPSRISIYWTIVKPGDILLINSTGNLIAPRGYFKIRSGKSSIMRSDAPIGKCKSECITPNGSIPNDKPFQNVNRITYGACPRYVKQSTLKLATGMRNVPEKQTRGIFGAIAGFIENGWEGMKDGWYGFRHQNSEGRGQAADLKSTQAAIDQINGKLNRLIGKTNEKFHQIEKEFSEVEGRIQDLEKYVEDTKIDLWSYNAELLVALENQHTIDLTDSEMNKLFEKTKKQMRENAEDMGNGCFKIYHKCDNACIGSIRNGTYDHDVYRDEALNNRFQIKGVELKSGYKDWILWISFAISCFLLCVALLGFIMWACQKGNIRCNICI

SEQ ID NO: 13202 - protein, 566 aa, synthetic construct; identical to SEQ ID NO: 12441
  REGION 1..566: note = hemagglutinin__InfluenzaA__ALE31671

SEQ ID NO: 13203 - protein, 566 aa, synthetic construct; identical to SEQ ID NO: 12441
  REGION 1..566: note = hemagglutinin__InfluenzaA__ALE31672

SEQ ID NO: 13204 - protein, 566 aa, synthetic construct; identical to SEQ ID NO: 12998
  REGION 1..566: note = hemagglutinin__InfluenzaA__ALE31673

SEQ ID NO: 13205 - protein, 566 aa, synthetic construct
  REGION 1..566: note = hemagglutinin__InfluenzaA__ALE31674
MKTIIALSYILCLVFAQKIPGNDNSTATLCLGHHAVPNGTIVKTITNDRIEVTNATELVQNSSIGEICDSPHQILDGENCTLIDALLGDPQCDGFQNKKWDLFVERSKAYSNCYPYDVPDYASLRSLVASSGTLEFNNESFNWTGVTQNGTSSACIRRSSSSFFSRLNWLTHLNYTYPALNVTMPNNEQFDKLYIWGVHHPGTDKDQIFLYAHSSGRITVSTKRSQQAVIPNIGSRPRIRDIPSRISIYWTIVKPGDILLINSTGNLIAPRGYFKIRSGKSSIMRSDAPIGKCKSECITPNGSIPNDKPFQNVNRITYGACPRYVKHSTLKLATGMRNVPEKQTRGIFGAIAGFIENGWEGMVDGWYGFRHQNSEGRGQAADLKSTQAAIDQINGKLNRLIGKTNEKFHQIEKEFSEVEGRIQDLEKYVEDTKIDLWSYNAELLVALENQHTIDLTDSEMNKLFEKTKKQLRENAEDMGNGCFKIYHKCDNACIGSIRNGTYDHNVYRDEALNNRFQIKGVELKSGYKDWILWISFAISCFLLCVALLGFIMWACQKGNIRCNICI

SEQ ID NO: 13206 - protein, 566 aa, synthetic construct
  REGION 1..566: note = hemagglutinin__InfluenzaA__ALE31675
MKTIIALSYILCLVFAQKIPGNDNSTATLCLGHHAVPNGTIVKTITNDRIEVTNATELVQNSSIGEICNSPHQILDGENCTLIDALLGDPQCDGFQNKKWDLFVERSKAYSNCYPYDVPDYASLRSLVASSGTLEFNNESFNWTGVTQNGTSSACIRRSSSSFFSRLNWLTHLNYTYPALNVTMPNNEQFDKLYIWGVHHPGTDKDQIFLYAQSSGRITVSTKGSQQAVIPNIGSRPRIRDIPSRISIYWTIVKPGDILLINSTGNLIAPRGYFKIRSGKSSIMRSDAPIGKCKSECITPNGSIPNDKPFQNVNRITYGACPRYVKHSTLKLATGMRNVPEKQTRGIFGAIAGFIENGWEGMVDGWYGFRHQNSEGRGQAADLKSTQAAIDQINGKLNRLIGKTNEKFHQIEKEFSEVEGRIQDLEKYVEDTKIDLWSYNAELLVALENQHTIDLTDSEMNKLFEKTKKQLRENAEDMGNGCFKIYHKCDNACIGSIRNGTYDHNVYRDEALNNRFQIKGVELKSGYKDWILWISFAISCFLLCVALLGFIMWACQKGNIRCNICI

SEQ ID NO: 13207 - protein, 566 aa, synthetic construct
  REGION 1..566: note = hemagglutinin__InfluenzaA__ALE31676
MKTIIALSYILCLVFAQKIPGNDNSTATLCLGHHAVPNGTIVKTITNDRIEVTNATELVQNSSIGEICDSPHQILDGENCTLIDALLGDPQCDGFQNKKWDLFVERSKAYSNCYPYDVPDYASLRSLVASSGTLEFNNESFNWTGVTQNGTSSACIRRSSSSFFSRLNWLTHLNYTYPALNVTMPNNEQFDKLYIWGVHHPGTDKDQIFLYAQSSGRITVSTKRSQQAVIPNIGSRPKIRDIPSRISIYWTIVKPGDILLINSTGNLIAPRGYFKILSGKSSIMRSDAPIGKCKSECITPNGSIPNDKPFQNVNRITYGACPRYVKHSTLKLATGMRNVPEKQTRGIFGAIAGFIENGWEGMVDGWYGFRHQNSEGRGQAADLKSTQAAIDQINGKLNRLIGKTNEKFHQIEKEFSEVEGRIQDLEKYVEDSKIDLWSYNAELLVALENQHTIDLTDSEMNKLFEKTKKQLRENAEDMGNGCFKIYHKCDNACIGSIRNGTYDHNVYRDEALNNRFQIKGVELKSGYKDWILWISFAISCFLLCVALLGFIMWACQKGNIRCNICI

SEQ ID NO: 13208 - protein, 566 aa, synthetic construct; identical to SEQ ID NO: 13099
  REGION 1..566: note = hemagglutinin__InfluenzaA__ALE31677

SEQ ID NO: 13209 - protein, 566 aa, synthetic construct; identical to SEQ ID NO: 12441
  REGION 1..566: note = hemagglutinin__InfluenzaA__ALE31678

SEQ ID NO: 13210 - protein, 566 aa, synthetic construct; identical to SEQ ID NO: 12441
  REGION 1..566: note = hemagglutinin__InfluenzaA__ALE31679

SEQ ID NO: 13211 - protein, 566 aa, synthetic construct; identical to SEQ ID NO: 13057
  REGION 1..566: note = hemagglutinin__InfluenzaA__ALE31680

SEQ ID NO: 13212 - protein, 566 aa, synthetic construct; identical to SEQ ID NO: 13056
  REGION 1..566: note = hemagglutinin__InfluenzaA__ALE31681

SEQ ID NO: 13213 - protein, 566 aa, synthetic construct; identical to SEQ ID NO: 12441
  REGION 1..566: note = hemagglutinin__InfluenzaA__ALE31682

SEQ ID NO: 13214 - protein, 566 aa, synthetic construct; identical to SEQ ID NO: 12441
  REGION 1..566: note = hemagglutinin__InfluenzaA__ALE31683

SEQ ID NO: 13215 - protein, 566 aa, synthetic construct; identical to SEQ ID NO: 12441
  REGION 1..566: note = hemagglutinin__InfluenzaA__ALE31684

SEQ ID NO: 13216 - protein, 566 aa, synthetic construct; identical to SEQ ID NO: 12441
  REGION 1..566: note = hemagglutinin__InfluenzaA__ALE31685

SEQ ID NO: 13217 - protein, 566 aa, synthetic construct; identical to SEQ ID NO: 12441
  REGION 1..566: note = hemagglutinin__InfluenzaA__ALE31686

SEQ ID NO: 13218 - protein, 566 aa, synthetic construct
  REGION 1..566: note = hemagglutinin__InfluenzaA__ALE31687
MKTIIALSYILCLVFAQKIPGNDNSTATLCLGHHAVPNGTIVKTITNDRIEVTNATELVQNSSIGEICDSPHQILDGENCTLIDALLGDPQCDGFQNKKWDLFVERSKAYSNCYPYDVPDYASLRSLVASSGTLEFNNESFNWTGVTQNGTSSACIRRSSSSFFSRLNWLTHLNYTYPALNVTMPNNEQFDKLYIWGVHHPGTDKDQIFLYAQSSGRITVSTKRSQQAVIPNIGSRPRIRDIPSRISIYWTIVKPGDILLINSTGNLIAPRGYFKIRSGKSSIMRSDAPIGKCKSECITPNGSIPNDKPFQNVNRITYGACPRYVKHSTLKLATGMRNVPEKQTRGIFGAIAGFIENGWEGMVDGWYGFRHQNSEGRGQAADLKSTQAAIDQINGKLNRLIGKTNEKFHQIEKEFSEVEGRIQDLEKYVEDTKIDLWSYNAELLVALENQHTIDLTDSEMNKLFEKTKKQLRENAEDMGNGCFKIYHKCDNACIESIRNGTYDHNVYRDEALNNRFQIKGVELKSGYKDWILWISFAISCFLLCVALLGFIMWACQKGNIRCNICI

SEQ ID NO: 13219 - protein, 566 aa, synthetic construct
  REGION 1..566: note = hemagglutinin__InfluenzaA__ALE31688
MKTTIALSYILCLVFAQKLPENDNSTATLCLGHHAVPNGTIVKTITSDRIEVTNATELVQNSSIGEICDSPHQILDGKNCTLIDALLGDPQCDGFQNKKWDLFVERSKAYSNCYPYDVPDYASLRSLVASSGTLEFNDESFNWAGVTQNGTSSACIRGSNSSFFSRLNWLTHSNFKYPALNVTMPNNEQFDKLYIWGVHHPGTDKDQIFLYAQSSGRITVSTKRSQQAVIPNIGSRPRIRNIPSRISIYWTIVKPGDILLINSTGNLIAPRGYFKIRSGKSSIMRSDAPIGKCKSECITPNGSIPNDKPFQNVNRITYGACPRYVKQSTLKLATGMRNVPEKQTRGIFGAIAGFIENGWEGMKDGWYGFRHQNSEGRGQAADLKSTQAAIDQINGKLNRLIGKTNEKFHQIEKEFSEVEGRIQDLEKYVEDTKIDLWSYNAELLVALENQHTIDLTDSEMNKLFEKTKKQLRENAEDMGNGCFKIYHKCDNACIGSIRNGTYDHDVYRDEALNNRFQIKGVELKSGYKDWILWISFAISCFLLCVALLGFIMWACQKGNIRCNICI

SEQ ID NO: 13220 - protein, 566 aa, synthetic construct; identical to SEQ ID NO: 12441
  REGION 1..566: note = hemagglutinin__InfluenzaA__ALE31689

SEQ ID NO: 13221 - protein, 566 aa, synthetic construct
  REGION 1..566: note = hemagglutinin__InfluenzaA__ALE31690
MKTIIALSCILCLVFAQKLPGNDNSTATLCLGHHAVPNGTIVKTITNDRIEVTNATELVQNSSIGEICDSPHQILDGENCTLIDALLGDPQCDGFQNKKWDLFVERSKAYSNCYPYDVPDYASLRSLVASSGTLEFNNESFNWAGVTQNGTSSSCIRGSNSSFFSRLNWLTHLNSKYPALNVTMPNNEQFDKLYIWGVHHPGTDKDQIFLYAQSSGRITVSTKRSQQAVIPNIGSRPRIRDIPSRISIYWTIVKPGDILLINSTGNLIAPRGYFKIRSGKSSIMRSDAPIGKCKSECITPNGSIPNDKPFQNVNRITYGACPRYVKQSTLKLATGMRNVPERQTRGIFGAIAGFIENGWEGMVDGWYGFRHQNSEGRGQAADLKSTQAAIDQINGKLNRLIGKTNEKFHQIEKEFSEVEGRIQDLEKYVEDTKIDLWSYNAELLVALENQHTIDLTDSEMNKLFEKTKKQLRENAEDMGNGCFKIYHKCDNACIGSIRNGTYDHNVYRDEALNNRFQIKGVELKSGYKDWILWISFAISCFLLCVALLGFIMWACQKGNIRCNICI

SEQ ID NO: 13222 - protein, 566 aa, synthetic construct; identical to SEQ ID NO: 9994
  REGION 1..566: note = hemagglutinin__InfluenzaA__ALE31691

SEQ ID NO: 13223 - protein, 566 aa, synthetic construct
  REGION 1..566: note = hemagglutinin__InfluenzaA__ALE31692
MKTIIALSYILCLVFAQKIPGNDNSTATLCLGHHAVPNGTIVKTITNDRIEVTNATELVQNSSIGEICDSPHQILDGENCTLIDALLGDPQCDGFQNKKWDLFVERSKAYSNCYPYDVPDYASLRSLVASSGTLEFNNESFNWTGVTQNGTSSACIRKSSSSFFSRLNWLTHLNYTYPALNVTMPNNEQFDKLYIWGVHHPGTDKDQIFLYARSSGRITVSTKRSQQAVIPNIGYRPRIRDIPSRISIYWTIVKPGDILLINSTGNLIAPRGYFKIRSGKSSIMRSDAPIGKCKSECITPNGSIPNDKPFQNVNRITYGACPRYVKHSTLKLATGMRNVPEKQTRGIFGAIAGFIENGWEGMVDGWYGFRHQNSEGRGQAADLKSTQAAIDQINGKLNRLIGKTNEKFHQIEKEFSEVEGRIQDLEKYVEDTKIDLWSYNAELLVALENQHTIDLTDSEMNKLFEKTKKQLRENAEDMGNGCFKIYHKCDNACIGSIRNGTYDHNVYRDEALNNRFQIKGVELKSGYKDWILWISFAISCFLLCVALLGFIMWACQKGNIRCNICI

SEQ ID NO: 13224 - protein, 566 aa, synthetic construct; identical to SEQ ID NO: 13223
  REGION 1..566: note = hemagglutinin__InfluenzaA__ALE31693

SEQ ID NO: 13225 - protein, 566 aa, synthetic construct; identical to SEQ ID NO: 12441
  REGION 1..566: note = hemagglutinin__InfluenzaA__ALE31694

SEQ ID NO: 13226 - protein, 566 aa, synthetic construct; identical to SEQ ID NO: 13223
  REGION 1..566: note = hemagglutinin__InfluenzaA__ALE31695

SEQ ID NO: 13227 - protein, 566 aa, synthetic construct; identical to SEQ ID NO: 13099
  REGION 1..566: note = hemagglutinin__InfluenzaA__ALE31696

SEQ ID NO: 13228 - protein, 566 aa, synthetic construct; identical to SEQ ID NO: 13223
  REGION 1..566: note = hemagglutinin__InfluenzaA__ALE31697

SEQ ID NO: 13229 - protein, 566 aa, synthetic construct
  REGION 1..566: note = hemagglutinin__InfluenzaA__ALE31698
MKTIIALSYILCMVFAQKIPGNDNSTATLCLGHHAVPNGTIVKTITNDRIEVTNATELVQNSSIGEICDSPHQILDGENCTLIDALLGDPQCDGFQNKKWDLFVERSKAYSNCYPYDVPDYASLRSLVASSGTLEFNNESFNWTGVTQNGTSSACIRRSSSSFFSRLNWLTHLNYTYPALNVTMPNNEQFDKLYIWGVHHPGTDKDQIFLYAQSSGRITVSTKRSQQAVIPNIGSRPRIRDIPSRISIYWTIVKPGDILLINSTGNLIAPRGYFKIRSGKSSIMRSDAPIGKCKSECITPNGSIPNDKPFQNVNRITYGACPRYVKHSTLKLATGMRNVPEKQTRGIFGAIAGFIENGWEGMVDGWYGFRHQNSEGRGQAADLKSTQAAIDQINGKLNRLIGKTNEKFHQIEKEFSEVEGRIQDLEKYVEDTKIDLWSYNAELLVALENQHTIDLTDSEMNKLFEKTKKQLRENAEDMGNGCFKIYHKCDNACIGSIRNGTYDHNVYRDEALNNRFQIKGVELKSGYKDWILWISFAISCFLLCVALLGFIMWACQKGNIRCNICI

SEQ ID NO: 13230 - protein, 566 aa, synthetic construct
  REGION 1..566: note = hemagglutinin__InfluenzaA__ALE31699
MKTIIALSYILCLVFAQKIPGNDNSTATLCLGHHAVPNGTIVKTITNDRIEVTNATELVQNSSIGEICDSPHQILDGENCTLIDALLGDPQCDGFQNKKWDLFVERSKAYSNCYPYDVPNYASLRSLVASSGTLEFNNESFNWTGVTQNGTSSACIRRSSSSFFSRLNWLTHLNYAYPALNVTMPNNEQFDKLYIWGVHHPGTDKDQIFLYAQSSGRITVSTKRSQQAVIPNIGSRPRIRDIPSRISIYWTIVKPGDILLINSTGNLIAPRGYFKIRSGKSSIMRSDAPIGKCKSECITPNGSIPNDKPFQNVNRITYGACPRYVKHSTLKLATGMRNVPEKQTRGIFGAIAGFIENGWEGMVDGWYGFRHQNSEGRGQAADLKSTQAAIDQINGKLNRLIGKTNEKFHQIEKEFSEVEGRIQDLEKYVEDTKIDLWSYNAELLVALENQHTIDLTDSEMNKLFEKTKKQLRENAEDMGNGCFKIYHKCDNACIGSIRNGTYDHNVYRDEALNNRFQIKGVELKSGYKDWILWISFAISCFLLCVALLGFIMWACQKGNIRCNICI

SEQ ID NO: 13231 - protein, 566 aa, synthetic construct; identical to SEQ ID NO: 12441
  REGION 1..566: note = hemagglutinin__InfluenzaA__ALE31700

SEQ ID NO: 13232 - protein, 566 aa, synthetic construct; identical to SEQ ID NO: 12441
  REGION 1..566: note = hemagglutinin__InfluenzaA__ALE31701

SEQ ID NO: 13233 - protein, 566 aa, synthetic construct; identical to SEQ ID NO: 12998
  REGION 1..566: note = hemagglutinin__InfluenzaA__ALE31702

SEQ ID NO: 13234 - protein, 566 aa, synthetic construct; identical to SEQ ID NO: 12441
  REGION 1..566: note = hemagglutinin__InfluenzaA__ALE31703

SEQ ID NO: 13235 - protein, 566 aa, synthetic construct; identical to SEQ ID NO: 12441
  REGION 1..566: note = hemagglutinin__InfluenzaA__ALE31704

SEQ ID NO: 13236 - protein, 566 aa, synthetic construct; identical to SEQ ID NO: 12998
  REGION 1..566: note = hemagglutinin__InfluenzaA__ALE31705

SEQ ID NO: 13237 - protein, 566 aa, synthetic construct
  REGION 1..566: note = hemagglutinin__InfluenzaA__ALE31706
MKTIIALSYILCLVFAQKIPGNDNSTATLCLGHHAVPNGTIVKTITNDRIEVTNATELVQNSSIGEICDSPHQILDGENCTLIDALLGDPQCDGFQNKKWDLFVERSKAYSNCYPYDVPDYASLRSLVASSGTLEFNNESFNWTGVTQNGTSSACIRRSSSSFFSRLNWLTHLNYTYPALNVTMPNNEQFDKLYIWGVHHPGTDKDQIFLYAQSSGRITVSTKGSQQAVIPNIGSRPRIRDIPSRISIYWTIVKPGDILLINSTGNLIAPRGYFKIRSGKSSIMRSDAPIGKCKSECITPNGSIPNDKPFQNVNRITYGACPRYVKHSTLKLATGMRNVPEKQTRGIFGAIAGFIENGWEGMVDGWYGFRHQNSEGRGQAADLKSTQAAIDQINGKLNRLIGKTNEKFHQIEKEFSEVEGRIQDLEKYVEDTKIDLWSYNAELLVALENQHTIDLTDSEMNKLFEKTKKQLRENAEDMGNGCFKIYHKCDNACIGSIRNGTYDHNVYRDEALNNRFQIKGVELKSGYKDWILWISFAISCLLLCVALLGFIMWACQKGNIRCNICI

SEQ ID NO: 13238 - protein, 566 aa, synthetic construct; identical to SEQ ID NO: 13127
  REGION 1..566: note = hemagglutinin__InfluenzaA__ALE31707

SEQ ID NO: 13239 - protein, 566 aa, synthetic construct; identical to SEQ ID NO: 13127
  REGION 1..566: note = hemagglutinin__InfluenzaA__ALE31708

SEQ ID NO: 13240 - protein, 566 aa, synthetic construct; identical to SEQ ID NO: 12427
  REGION 1..566: note = hemagglutinin__InfluenzaA__ALE31709

SEQ ID NO: 13241 - protein, 566 aa, synthetic construct
  REGION 1..566: note = hemagglutinin__InfluenzaA__ALE31710
MKTIIALSYILCLVFAQKIPGNDNSTATLCLGHHAVPNGTIVKTITNDRIEVTNATELVQNSSIGEICDSPHQILDGENCTLIDALLGDPQCDGFQNKKWDLFVERSKAYSNCYPYDVPDYASLRSLVASSGTLEFNNESFNWTGVTQNGTSSACIRRSSSSFFSRLNWLTHLNYTYPALNVTMPNNEQFDKLYIWGVHHPGTDKDQIFLYAQSSGRITVSTKRSQQAVIPNIGSRLRIRDIPSRISIYWTIVKPGDILLINSTGNLIAPRGYFKILSGKSSIMRSDAPIGKCKSECITPNGSIPNDKPFQNVNRITYGACPRYVKHSTLKLATGMRNVPEKQTRGIFGAIAGFIENGWEGMVDGWYGFRHQNSEGRGQAADLKSTQAAIDQINGKLNRLIGKTNEKFHQIEKEFSEVEGRIQDLEKYVEDSKIDLWSYNAELLVALENQHTIDLTDSEMNKLFEKTKKQLRENAEDMGNGCFKIYHKCDNACIGSIRNGTYDHNVYRDEALNNRFQIKGVELKSGYKDWILWISFAISCFLLCVALLGFIMWACQKGNIRCNICI

SEQ ID NO: 13242 - protein, 566 aa, synthetic construct; identical to SEQ ID NO: 13127
  REGION 1..566: note = hemagglutinin__InfluenzaA__ALE31711

SEQ ID NO: 13243 - protein, 566 aa, synthetic construct; identical to SEQ ID NO: 12985
  REGION 1..566: note = hemagglutinin__InfluenzaA__ALE31712

SEQ ID NO: 13244 - protein, 566 aa, synthetic construct
  REGION 1..566: note = hemagglutinin__InfluenzaA__ALE31713
MKTIIALSYILCLVFAQKIPGNDNSTATLCLGHHAVPNGTIVKTITNDRIEVTNATELVQNSSIGEICDSPHQILDGENCTLIDALLGDPQCDGFQNKKWDLFVERSKAYSNCYPYDVPDYASLRSLVASSGTLEFNNESFNWTGVTQNGTSSACIRKSSSSFFSRLNWLTHLNYTYPALNVTMPNNEQFDKLYIWGIHHPGTDKDQIFLYARSSGRITVSTKRSQQAVIPNIGSRPRIRDIPSRISIYWTIVKPGDILLINSTGNLIAPRGYFKIRSGKSSIMRSDAPIGKCKSECITPNGSIPNDKPFQNVNRITYGACPRYVKHSTLKLATGMRNIPEKQTKGIFGAIAGFIENGWEGMVDGWYGFRHQNSEGRGQAADLKSTQAAIDQINGKLNRLIGKTNEKFHQIEKEFSEVEGRIQDLEKYVEDTKIDLWSYNAELLVALENQHTIDLTDSEMNKLFEKTKKQLRENAEDMGNGCFKIYHKCDNACIGSIRNGTYDHNVYRDEALNNRFQIKGVELKSGYKDWILWISFATSCFLLCVALLGFIMWACQKGNIRCNICI

SEQ ID NO: 13245 - protein, 566 aa, synthetic construct; identical to SEQ ID NO: 13099
  REGION 1..566: note = hemagglutinin__InfluenzaA__ALE31714

SEQ ID NO: 13246 - protein, 566 aa, synthetic construct; identical to SEQ ID NO: 13099
  REGION 1..566: note = hemagglutinin__InfluenzaA__ALE31715

SEQ ID NO: 13247 - protein, 566 aa, synthetic construct; identical to SEQ ID NO: 13127
  REGION 1..566: note = hemagglutinin__InfluenzaA__ALE31716

SEQ ID NO: 13248 - protein, 566 aa, synthetic construct
  REGION 1..566: note = hemagglutinin__InfluenzaA__ALE31717
MKTIIALSYILCLVFAQKIPGNDNSTATLCLGHHAVPNGTIVKTITNDRIEVTNATELVQNSSIGEICDSPHQILDGENCTLIDALLGDPQCDGFQNKKWDLFVERSKAYSNCYPYDVPDYASLRSLVASSGTLEFNNESFNWTGVTQNGTSSACIRKSSSSFFSRLNWLTHLNYKYPALNVTMPNNEQFDKLYIWGVHHPGTDKDQIFLYARSSGRITVSTKTSQQAVIPNIGSRPRIRDIPSRISIYWTIVKPGDILLINSTGNLIAPRGYFKIRSGKSSIMRSDAPIGKCKSECITPNGSIPNDKPFQNVNRTTYGACPRYVKHSTLKLATGMRNVPEKQTRGIFGAIAGFIENGWEGMVDGWYGFRHQNSEGRGQAADLKSTQAAIDQINGKLNRLIGKTNEKFHQIEKEFSEVEGRIQDLEKYVEDTKIDLWSYNAELLVALENQHTIDLTDSEMNKLFEKTKKQLRENAEDMGNGCFKIYHKCDNACIGSIRNGTYDHNVYRDEALNNRFQIKGVELKSGYKDWILWISFAISCFLLCVALLGFIMWACQKGNIRCNICI

SEQ ID NO: 13249 - protein, 566 aa, synthetic construct; identical to SEQ ID NO: 13099
  REGION 1..566: note = hemagglutinin__InfluenzaA__ALE31718

SEQ ID NO: 13250 - protein, 566 aa, synthetic construct
  REGION 1..566: note = hemagglutinin__InfluenzaA__ALE31719
MKTIIALSYILCLVFAQKIPGNDNSTATLCLGHHAVPNGTIVKTITNDRIEVTNATELVQNSSIGEICDSPHQILDGENCTLIDALLGDPQCDGFQNKKWDLFVERSKAYSNCYPYDVPDYASLRSLVASSGTLEFNNESFNWTGVTQNGTSSACIRKSSSSFFSRLNWLTHLNYTYPALNVTMPNNEQFDKLYIWGVHHPGTDKDQIFLYARSSGRITVSTKRSQQAVIPNIGSRPRIRDIPSRISIYWTIVKPGDILLINSTGNLIAPRGYFKIRSGKSSIMRSDAPIGKCKSECITPNGSIPNDKPFQNVNRITYGACPRYVKHSTLKLATGMRNIPEKQTRGIFGAIAGFIENGWEGMVDGWYGFRHQNSEGRGQAADLKSTQAAIDQINGKLNRLIGKTNEKFHQIEKEFSEVEGRIQDLEKYVEDTKIDLWSYNAELLVALENQHTIDLTDSEMNKLFEKTKKQLRENAEDMGNGCFKIYHKCDNACIGSIRNGTYDHNVYRDEALNNRFQIKGVELKSGYKDWILWISFAISCFLLCVALLGFIMWACQKGNIRCNICI

SEQ ID NO: 13251 - protein, 566 aa, synthetic construct; identical to SEQ ID NO: 12985
  REGION 1..566: note = hemagglutinin__InfluenzaA__ALE31720

SEQ ID NO: 13252 - protein, 566 aa, synthetic construct; identical to SEQ ID NO: 12998
  REGION 1..566: note = hemagglutinin__InfluenzaA__ALE31721

SEQ ID NO: 13253 - protein, 566 aa, synthetic construct; identical to SEQ ID NO: 13221
  REGION 1..566: note = hemagglutinin__InfluenzaA__ALE31722

SEQ ID NO: 13254 - protein, 566 aa, synthetic construct
  REGION 1..566: note = hemagglutinin__InfluenzaA__ALE31723
MKTIIALSYILCLVFAQKIPGNDNSTATLCLGHHAVPNGTIVKTITNDRIEVTNATELVQNSSIGEICDSPHQILDGENCTLIDALLGDPQCDGFQNKKWDLFVERSKAYSNCYPYDVPDYASLRSLVASSGTLEFNNESFNWTGVTQNGTSSACIRKSSSSFFSRLNWLTHLNYTYPALNVTMPNNEQFDKLYIWGVHHPGTDKDQIFLYARSSGRITVSTKRSQQAVIPNIGSRPRIRDIPSRISIYWTIVKPGDILLINSTGNLIAPRGYFKIRSGKSSIMRSDAPIGKCKSECTTPNGSIPNDKPFQNVNRITYGACPRYVKHSTLKLATGMRNVPEKQTRGIFGAIAGFIENGWEGMVDGWYGFRHQNSEGRGQAADLKSTQAAIDQINGKLNRLIGKTNEKFHQIEKEFSEVEGRIQDLEKYVEDTKIDLWSYNAELLVALENQHTIDLTDSEMNKLFEKTKKQLRENAEDMGNGCFKIYHKCDNACIGSIRNGTYDHNVYRDEALNNRFQIKGVELKSGYKDWILWISFAISCFLLCVALLGFIMWACQKGNIRCNICI

SEQ ID NO: 13255 - protein, 566 aa, synthetic construct; identical to SEQ ID NO: 12441
  REGION 1..566: note = hemagglutinin__InfluenzaA__ALE31724

SEQ ID NO: 13256 - protein, 566 aa, synthetic construct; identical to SEQ ID NO: 12441
  REGION 1..566: note = hemagglutinin__InfluenzaA__ALE31725

SEQ ID NO: 13257 - protein, 566 aa, synthetic construct; identical to SEQ ID NO: 12441
  REGION 1..566: note = hemagglutinin__InfluenzaA__ALE31726

SEQ ID NO: 13258 - protein, 566 aa, synthetic construct; identical to SEQ ID NO: 12441
  REGION 1..566: note = hemagglutinin__InfluenzaA__ALE31727

SEQ ID NO: 13259 - protein, 566 aa, synthetic construct
  REGION 1..566: note = hemagglutinin__InfluenzaA__ALE31728
MKTIIALSYILCLVFAQKIPGNDNSTATLCLGHHAVPNGTIVKTITNDRIEVTNATELVQNSSIGEICDSPHQILDGENCTLIDALLGDPQCDGFQNKKWDLFVERSKAYSNCYPYDVPDYASLRSLVASSGTLEFNNESFNWTGVTQNGTSSACIRRSSSSFFSRLNWLTHLNYTYPALNVTIPNNEQFDKLYIWGVHHPGTDKDQIFLYAQSSGRITVSTKRSQQAVIPNIGSRPRIRDIPSRISIYWTIVKPGDILLINSTGNLIAPRGYFKIRSGKSSIMRSDAPIGKCKSECITPNGSIPNDKPFQNVNRITYGACPRYVKHSTLKLATGMRNVPEKQTRGIFGAIAGFIENGWEGMVDGWYGFRHQNSEGRGQAADLKSTQAAIDQINGKLNRLIGKTNEKFHQIEKEFSEVEGRIQDLEKYVEDTKIDLWSYNAELLVALENQHTIDLTDSEMNKLFEKTKKQLRENAEDMGNGCFKIYHKCDNACIGSIRNGTYDHNVYRDEALNNRFQIKGVELKSGYKDWILWISFAISCFLLCVALLGFIMWACQKGNIRCNICI

SEQ ID NO: 13260 - protein, 566 aa, synthetic construct
  REGION 1..566: note = hemagglutinin__InfluenzaA__ALE31729
MKTIIALSYILCLVFAQKIPGNDNSTATLCLGHHAVPNGTIVKTITNDRIEVTNATELVQNSSIGEICDSPHQIIDGENCTLIDALLGDPQCDGFQNKKWDLFVERSKAYSNCYPYDVPDYASLRSLVASSGTLEFNNESFNWTGVTQNGTSSACIRRSSSSFFSRLNWLTHLNYTYPALNVTMPNNEQFDKLYIWGVHHPGTDKDQIFLYAQSSGRITVSTKRSQQAVIPNIGSRPRIRDIPSRISIYWTIVKPGDILLINSTGNLIAPRGYFKIRSGKSSIMRSDAPIGKCKSECITPNGSIPNDKPFQNVNRITYGACPRYVKHSTLKLATGMRNVPEKQTRGIFGAIAGFIENGWEGMVDGWYGFRHQNSEGRGQAADLKSTQAAIDQINGKLNRLIGKTNEKFHQIEKEFSEVEGRIQDLEKYVEDTKIDLWSYNAELLVALENQHTIDLTDSEMNKLFEKTKKQLRENAEDMGNGCFKIYHKCDNACIGSIRNGTYDHNVYRDEALNNRFQIKGVELKSGYKDWILWISFAISCFLLCVALLGFIMWACQKGNIRCNICI

SEQ ID NO: 13261 - protein, 566 aa, synthetic construct; identical to SEQ ID NO: 12441
  REGION 1..566: note = hemagglutinin__InfluenzaA__ALE31730

SEQ ID NO: 13262 - protein, 566 aa, synthetic construct
  REGION 1..566: note = hemagglutinin__InfluenzaA__ALE31731
MKTIIALSYILCQVFAQKIPGNDNSTATLCLGHHAVPNGTIVKTITNDRIEVTNATELVQNSSIGEICDSPHQILDGENCTLIDALLGDPQCDGFQNKKWDLFVERSKAYSNCYPYDVPDYASLRSLVASSGTLEFNNESFNWTGVTQNGTSSACIRKSSSSFFSRLNWLTHLNYTYPALNVTMPNNEQFDKLYIWGVHHPGTDKDQIFLYARSSGRITVSTKRSQQAVIPNIGSRPRIRDIPSRISIYWTIVKPGDILLINSTGNLIAPRGYFKIRSGKSSIMRSDAPIGKCKSECITPNGSIPNDKPFQNVNRITYGACPRYVKHSTLKLATGMRNVPEKQTRGIFGAIAGFIENGWEGMVDGWYGFRHQNSEGRGQAADLKSTQAAIDQINGKLNRLIGKTNEKFHQIEKEFSEVEGRIQDLEKYVEDTKIDLWSYNAELLVALENQHTIDLTDSEMNKLFEKTKKQLRENAEDMGNGCFKIYHKCDNACIGSIRNGTYDHNVYRDEALNNRFQIKGVELKSGYKDWILWISFAISCFLLCVALLGFIMWACQKGNIRCNICI

SEQ ID NO: 13263 - protein, 566 aa, synthetic construct; identical to SEQ ID NO: 13099
  REGION 1..566: note = hemagglutinin__InfluenzaA__ALE31732

SEQ ID NO: 13264 - protein, 566 aa, synthetic construct; identical to SEQ ID NO: 13099
  REGION 1..566: note = hemagglutinin__InfluenzaA__ALE31733

SEQ ID NO: 13265 - protein, 566 aa, synthetic construct
  REGION 1..566: note = hemagglutinin__InfluenzaA__ALE31734
MKTIIALSYILCLVFAQKIPGNDNSTATLCLGHHAVPNGTIVKTITNDRIEVTNATELVQNSSIGEICDSPHQILDGENCTLIDALLGDPQCDGFQNKKWDLFVERSKAYSNCYPYDVPDYASLRSLVASSGTLEFNNESFNWTGVTQNGTSSACIRKSSSSFFSRLNWLTHLKYTYPALNVTMPNNEQFDKLYIWGVHHPGTDKDQIFLYARSSGRITVSTKRSQQAVIPNIGFRPRIRDIPSRISIYWTIVKPGDILLINSTGNLIAPRGYFKIRSGKSSIMRSDAPIGKCKSECITPNGSIPNDKPFQNVNRITYGACPRYVKHSTLKLATGMRNVPEKQTRGIFGAIAGFIENGWEGMVDGWYGFRHQNSEGRGQAADLKSTQAAIDQINGKLNRLIGKTNEKFHQIEKEFSEVEGRIQDLEKYVEDTKIDLWSYNAELLVALENQHTIDLTDSEMNKLFEKTKKQLRENAEDMGNGCFKIYHKCDNACIGSIRNGTYDHNVYRDEALNNRFQIKGVELKSGYKDWILWISFAISCFLLCVALLGFIMWACQKGNIRCNICI

SEQ ID NO: 13266 - protein, 566 aa, synthetic construct; identical to SEQ ID NO: 13099
  REGION 1..566: note = hemagglutinin__InfluenzaA__ALE31735

SEQ ID NO: 13267 - protein, 566 aa, synthetic construct; identical to SEQ ID NO: 12998
  REGION 1..566: note = hemagglutinin__InfluenzaA__ALE31736

SEQ ID NO: 13268 - protein, 566 aa, synthetic construct; identical to SEQ ID NO: 12998
  REGION 1..566: note = hemagglutinin__InfluenzaA__ALE31737

SEQ ID NO: 13269 - protein, 566 aa, synthetic construct
  REGION 1..566: note = hemagglutinin__InfluenzaA__ALE31738
MKTIIALSYILCLVFAQKIPGNDNSTATLCLGHHAVPNGTIVKTITNDRIEVTNATELVQNSSIGEICDSPHQILDGENCTLIDALLGDPQCDGFQNKKWDLFVERSKAYSNCYPYDVPDYASLRSLVASSGTLEFNNESFNWTGVTQNGTSSACIRRSSSSFFSRLNWLTHLNYKYPALNVTMPNNEQFDKLYIWGVHHPGTDKDQIFLYAQSSGRITVSTKGSQQAVIPNIGSRPRIRDIPSRISIYWTIVKPGDILLINSTGNLIAPRGYFKIRSGKSSIMRSDAPIGKCKSECITPNGSIPNDKPFQNVNRITYGACPRYVKHSTLKLATGMRNVPEKQTRGIFGAIAGFIENGWEGMVDGWYGFRHQNSEGRGQAADLKSTQAAIDQINGKLNRLIGKTNEKFHQIEKEFSEVEGRIQDLEKYVEDTKIDLWSYNAELLVALENQHTIDLTDSEMNKLFEKTKKQLRENAEDMGNGCFKIYHKCDNACIGSIRNGTYDHNVYRDEALNNRFQIKGVELKSGYKDWILWISFAISCFLLCVALLGFIMWACQKGNIRCNICI

SEQ ID NO: 13270 - protein, 566 aa, synthetic construct; identical to SEQ ID NO: 12441
  REGION 1..566: note = hemagglutinin__InfluenzaA__ALE31739

SEQ ID NO: 13271 - protein, 566 aa, synthetic construct
  REGION 1..566: note = hemagglutinin__InfluenzaA__ALE31741
MKTIIALSYILCLVFAQKLPENDNSTATLCLGHHAVPNGTIVKTITSDRIEVTNATELVQNSSISEICDSPHQILDGKNCTLIDALLGDPQCDGFQNKKWDLFVERSKAYSNCYPYDVPDYASLRSLVASSGTLEFNDESFNWAGVTQNGTSSACIRGSNSSFFSRLNWLTHSNFKYPALNVTMPNNEQFDKLYIWGVHHPGTDKDQIFLYAQSSGRITVSTKRSQQAVIPNIGSRPRIRNIPSRISIYWTIVKPGDILLINSTGNLIAPRGYFKIRSGKSSIMRSDAPIGKCKSECITPNGSIPNDKPFQNVNRITYGACPRYVKQSTLKLATGMRNVPEKQTRGIFGAIAGFIENGWEGMKDGWYGFRHQNSEGRGQAADLKSTQAAIDQINGKLNRLIGKTNEKFHQIEKEFSEVEGRIQDLEKYVEDTKIDLWSYNAELLVALENQHTIDLTDSEMNKLFEKTKKQLRENAEDMGNGCFKIYHKCDNACIGSIRNGTYDHDVYRDEALNNRFQIKGVELKSGYKDWILWISFAISCFLLCVALLGFIMWACQKGNIRCNICI

SEQ ID NO: 13272 - protein, 566 aa, synthetic construct
  REGION 1..566: note = hemagglutinin__InfluenzaA__ALE31742
MKTIIALSYILCLGFAQKIPGNDNSTATLCLGHHAVPNGTIVKTITNDRIEVTNATELVQNSSIGEICDSPHQILDGENCTLIDALLGDPQCDGFQNKKWDLFVERSKAYSNCYPYDVPDYASLRSLVASSGTLEFNNESFNWTGVTQNGTSSACIRRSSSSFFSRLNWLTHLNYTYPALNVTMPNNEQFDKLYIWGVHHPGTDKDQIFLYAQSSGRITVSTKRSQQAVIPNIGSRPRIRDIPSRISIYWTIVKPGDILLINSTGNLIAPRGYFKIRSGKSSIMRSDAPIGKCKSECITPNGSIPNDKPFQNVNRVTYGACPRYVKHSTLKLATGMRNVPEKQTRGIFGAIAGFIENGWEGMVDGWYGFRHQNSEGRGQAADLKSTQAAIDQINGKLNRLIGKTNEKFHQIEKEFSEVEGRIQDLEKYVEDTKIDLWSYNAELLVALENQHTIDLTDSEMNKLFEKTKKQLRENAEDMGNGCFKIYHKCDNACIGSIRNGTYDHNVYRDEALNNRFQIKGVELKSGYKDWILWISFAISCFLLCVALLGFIMWACQKGNIRCNICI

SEQ ID NO: 13273 - protein, 566 aa, synthetic construct; identical to SEQ ID NO: 12998
  REGION 1..566: note = hemagglutinin__InfluenzaA__ALE31743

SEQ ID NO: 13274 - protein, 566 aa, synthetic construct; identical to SEQ ID NO: 12441
  REGION 1..566: note = hemagglutinin__InfluenzaA__ALE31744

SEQ ID NO: 13275 - protein, 566 aa, synthetic construct
  REGION 1..566: note = hemagglutinin__InfluenzaA__ALE31745
MKTIIALSYILCLVFAQKLPGNDNSTATLCLGHHAVPNGTIVKTITNDRIEVTNATELVQNSSIGEICDSPHQILDGKNCTLIDALLGDPQCDGFQNKRWDLFVERSKAYSNCYPYDVPDYASLRSLVASSGTLEFNDESFNWAGVTQNGTSSACIRGSNSSFFSRLNWLTHSNFKYPALNVTMPNNEQFDKLYIWGVHHPGTDKDQIFLYAQSSGRITVSTKRSQQAVIPNIGSRLRIRNIPSRISIYWTIVKPGDILLINSTGNLIAPRGYFKIQSGKSSIMRSDAPIGKCKSECITPNGSIPNDKPFQNVNKITYGACPRYVKQSTLKLATGMRNVPEKQTRGIFGAIAGFIENGWEGMKDGWYGFRHQNSEGRGQAADLKSTQAAIDQINGKLNRLIGKTNEKFHQIEKEFSEVEGRIQDLEKYVEDTKIDLWSYNAELLVALENQHTIDLTDSEMNKLFEKTKKQLRENAEDMGNGCFKIYHKCDNACIGSIRNGTYDHDVYRDEALNNRFQIKGVELKSGYKDWILWISFAISCFLLCVALLGFIMWACQKGNIRCNICI

SEQ ID NO: 13276 - protein, 566 aa, synthetic construct
  REGION 1..566: note = hemagglutinin__InfluenzaA__ALE31747
MKTIIALSYILCLVFAQKLPGNDNSTATLCLGHHAVPNGTIVKTITNDRIEVTNATELVQNSSIGEICDSPHQILDGKNCTLIDALLGDPQCDGFQNKRWDLFVERSKAYSNCYPYDVPDYASLRSLVASSGTLEFNDESFNWAGVTQNGTSSACIRGSNSSFFSRLNWLTHSNFKYPALNVTMPNNEQFDKLYIWGVHHPGTDKDQIFLYAQSSGRITVSTKRSQQAVIPNIGSRPRIRNIPSRISIYWTIVKPGDILLINSTGNLIAPRGYFKIQSGKSSIMRSDAPIGKCKSECITPNGSIPNDKPFQNVNRITYGACPRYVKQSTLKLATGMRNVPEKQTRGIFGAIAGFIENGWEGMKDGWYGFRHQNSEGRGQAADLKSTQAAIDQINGKLNRLIGKTNEKFHQIEKEFSEVEGRVQDLEKYVEDTKIDLWSYNAELLVALENQHTIDLTDSEMNKLFEKTKKQLRENAEDMGNGCFKIYHKCDNACIGSIRNGTYDHDVYRDEALNNRFQIKGVELKSGYKDWILWISFAISCFLLCVALLGFIMWACQKGNIRCNICI

SEQ ID NO: 13277 - protein, 566 aa, synthetic construct; identical to SEQ ID NO: 12998
  REGION 1..566: note = hemagglutinin__InfluenzaA__ALE31748

SEQ ID NO: 13278 - protein, 566 aa, synthetic construct; identical to SEQ ID NO: 12441
  REGION 1..566: note = hemagglutinin__InfluenzaA__ALE31749

SEQ ID NO: 13279 - protein, 566 aa, synthetic construct; identical to SEQ ID NO: 12985
  REGION 1..566: note = hemagglutinin__InfluenzaA__ALE31750

SEQ ID NO: 13280 - protein, 566 aa, synthetic construct
  REGION 1..566: note = hemagglutinin__InfluenzaA__ALE31751
MKTIIALSYILCLVFAQKIPGNDNSTATLCLGHHAVPNGTIVKTITNDRIEVTNATELVQNSSIGEICDSPHQILDGENCTLIDALLGDPQCDGFQNKKWDLFVERSKAYSNCYPYDVPDYASLRSLVASSGTLEFNNESFNWTGVTQNGTSSACIRRSSSSFFSRLNWLTHLDYTYPALNVTMPNNEQFDKLYIWGVHHPGTDKDQIFLYAQSSGRITVSTKRSQQAVIPNIGSRPRIRDIPSRISIYWTIVKPGDILLINSTGNLIAPRGYFKIRSGKSSIMRSDAPIGKCKSECITPNGSIPNDKPFQNVNRITYGACPRYVKHSTLKLATGMRNVPEKQTRGIFGAIAGFIENGWEGMVDGWYGFRHQNSEGRGQAADLKSTQAAIDQINGKLNRLIGKTNEKFHQIEKEFSEVEGRIQDLEKYVEDTKIDLWSYNAELLVALENQHTIDLTDSEMNKLFEKTKKQLRENAEDMGNGCFKIYHKCDNACIGSIRNGTYDHNVYRDEALNNRFQIKGVELKSGYKDWILWISFAISCFLLCVALLGFIMWACQKGNIRCNICI

SEQ ID NO: 13281 - protein, 566 aa, synthetic construct; identical to SEQ ID NO: 12441
  REGION 1..566: note = hemagglutinin__InfluenzaA__ALE31752

SEQ ID NO: 13282 - protein, 566 aa, synthetic construct; identical to SEQ ID NO: 12985
  REGION 1..566: note = hemagglutinin__InfluenzaA__ALE31753

SEQ ID NO: 13283 - protein, 566 aa, synthetic construct; identical to SEQ ID NO: 12441
  REGION 1..566: note = hemagglutinin__InfluenzaA__ALE31754

SEQ ID NO: 13284 - protein, 566 aa, synthetic construct
  REGION 1..566: note = hemagglutinin__InfluenzaA__ALE31755
MKTIIALSYILCLVFAQKLPENDNSTATLCLGHHAVPNGTIVKTITSDQIEVTNATELVQNSSIGEICDSPHQILDGKNCTLIDALLGDPQCDGFQNKKWDLFVERSKAYSNCYPYDVPDYASLRSLVASSGTLEFNDESFNWAGVTQNGTSSACIRGSNSSFFSRLNWLTHSNFKYPALNVTMPNNEQFDKLYIWGVHHPGTDKDQIFLYAQSSGRITVSTKRSQQAVIPNIGSRPRIRNIPSRISIYWTIVKPGDILLINSTGNLIAPRGYFKIRSGKSSIMRSDAPIGKCKSECITPNGSIPNDKPFQNVNRITYGACPRYVKQSTLKLATGMRNVPEKQTRGIFGAIAGFIENGWEGMKDGWYGFRHQNSEGRGQAADLKSTQAAIDQINGKLNRLIGKTNEKFHQIEKEFSEVEGRIQDLEKYVEDTKIDLWSYNAELLVALENQHTIDLTDSEMNKLFEKTKKQLRENAEDMGNGCFKIYHKCDNACIGSIRNGTYDHNVYRDEALNNRFQIKGVELKSGYKDWILWISFAISCFLLCVALLGFIMWACQKGNIRCNICI

SEQ ID NO: 13285 - protein, 566 aa, synthetic construct; identical to SEQ ID NO: 12985
  REGION 1..566: note = hemagglutinin__InfluenzaA__ALE31756

SEQ ID NO: 13286 - protein, 566 aa, synthetic construct; identical to SEQ ID NO: 12441
  REGION 1..566: note = hemagglutinin__InfluenzaA__ALE31757

SEQ ID NO: 13287 - protein, 566 aa, synthetic construct
  REGION 1..566: note = hemagglutinin__InfluenzaA__ALE31758
MKTIIALSYILCLVFAQKIPGNDNSTATLCLGHHAVPNGTIVKTITNDRIEVTNATELVQNSSIGEICDSPHQILDGENCTLIDALLGDPQCDGFQNKKWDLFVERSKAYSNCYPYDVPDYASLRSLVASSGTLEFNNESFNWTGVTQNGTSSACIRRSSSSFFSRLNWLTHLNYTYPALNVTMPNNEQFDKLYIWGVHHPGTDKDQIFLYAQSSGRITVSTKRSQQAVIPNIGSRPRIRDIPSRISIYWTIVKPGDILLINSTGNLVAPRGYFKIRSGKSSIMRSDAPIGKCKSECITPNGSIPNDKPFQNVNRITYGACPRYVKHSTLKLATGMRNVPEKQTRGIFGAIAGFIENGWEGMVDGWYGFRHQNSEGRGQAADLKSTQAAIDQINGKLNRLIGKTNEKFHQIEKEFSEVEGRIQDLEKYVEDTKIDLWSYNAELLVALENQHTIDLTDSEMNKLFEKTKKQLRENAEDMGNGCFKIYHKCDNACIGSIRNGTYDHNVYRDEALNNRFQIKGVELKSGYKDWILWISFAISCFLLCVALLGFIMWACQKGNIRCNICI

SEQ ID NO: 13288 - protein, 566 aa, synthetic construct
  REGION 1..566: note = hemagglutinin__InfluenzaA__ALE31759
MKTIIALSYILCLVFAQKLPGNDNSTATLCLGHHAVPNGTIVKTITNDRIEVTNATELVQNSSIGEICDSPHQILDGKNCTLIDALLGDPQCDGFQNKRWDLFVERSKAYSNCYPYDVPDYASLRSLVASSGTLEFNDESFNWAGVTQNGTSSACIRGSNSSFFSRLNWLTHSNFKYPALNVTMPNNEQFDKLYIWGVHHPGTDKDQIFLYAQSSGRVTVSTKRSQQAVIPNIGSRPRIRNIPSRISIYWTIVKPGDILLINSTGNLIAPRGYFKIQSGKSSIMRSDAPIGKCKSECITPNGSIPNNKPFQNVNRITYGACPRYVKQSTLKLATGMRNVPEKQTRGIFGAIAGFIENGWEGMKDGWYGFRHQNSEGRGQAADLKSTQAAIDQINGKLNRLIGKTNEKFHQIEKEFSEVEGRIQDLEKYVEDTKIDLWSYNAELLVALENQHTIDLTDSEMNKLFEKTKKQLRENAEDMGNGCFKIYHKCDNACIGSIRNGTYDHDVYRDEALNNRFQIKGVELKSGYKDWILWISFAISCFLLCVALLGFIMWACQKGNIRCNICI

SEQ ID NO: 13289 - protein, 566 aa, synthetic construct
  REGION 1..566: note = hemagglutinin__InfluenzaA__ALE31760
MKTIIALSYILCLVFAQKIPGNDNSTATLCLGHHAVPNGTIVKTITNDRIEVTNATELVQNSSIGEICDSPHQILDGENCTLIDALLGDPQCDGFQNKKWDLFVERSKAYSNCYPYDVPDYASLRSLVASSGTLEFNNESFNWTGVTQNGTSSACIRRSSSSFFSRLNWLTHLNYTYPALNVTMPNNEQFDKLYIWGVHHPGTDKDQIFLYAQSSGRITVSTKRSQQAVIPNIGYRPRIRDIPSRISIYWTIVKPGDILLINSTGNLIAPRGYFKIRSGKSSIMRSDAPIGKCKSECITPNGSIPNDKPFQNVNRITYGACPRYVKHSTLKLATGMRNVPEKQTRGIFGAIAGFIENGWEGMVDGWYGFRHQNSEGRGQAADLKSTQAAIDQINGKLNRLIGKTNEKFHQIEKEFSEVEGRIQDLEKYVEDAKIDLWSYNAELLVALENQHTIDLTDSEMNKLFEKTKKQLRENAEDMGNGCFKIYHKCDNACIGSIRNGTYDHNVYRDEALNNRFQIKGVELKSGYKDWILWISFAISCFLLCVALLGFIMWACQKGNIRCNICI

SEQ ID NO: 13290 - protein, 566 aa, synthetic construct; identical to SEQ ID NO: 12985
  REGION 1..566: note = hemagglutinin__InfluenzaA__ALE31761

SEQ ID NO: 13291 - protein, 566 aa, synthetic construct; identical to SEQ ID NO: 12441
  REGION 1..566: note = hemagglutinin__InfluenzaA__ALE31762

SEQ ID NO: 13292 - protein, 566 aa, synthetic construct; identical to SEQ ID NO: 13047
  REGION 1..566: note = hemagglutinin__InfluenzaA__ALE31763

SEQ ID NO: 13293 - protein, 566 aa, synthetic construct; identical to SEQ ID NO: 13099
  REGION 1..566: note = hemagglutinin__InfluenzaA__ALE31764

SEQ ID NO: 13294 - protein, 566 aa, synthetic construct; identical to SEQ ID NO: 12441
  REGION 1..566: note = hemagglutinin__InfluenzaA__ALE31765

SEQ ID NO: 13295 - protein, 566 aa, synthetic construct
  REGION 1..566: note = hemagglutinin__InfluenzaA__ALE31774
MKTIIALSYILCLVFAQKIPGNDNSTATLCLGHHAVPNGTIVKTITNDRIEVTNATELVQNSSIGEICDSPHQILDGENCTLIDALLGDPQCDGFQNKKWDLFVERSKAYSNCYPYDVPDYASLRSLVASSGTLEFNNESFNWTGVTQNGTSSACIRRSSSSFFSRLNWLTHLNYTYPALNVTMPNNEQFDKLYIWGVHHPGTDKDQVFLYAQSSGRITVSTKRSQQAVIPNIGSRPRIRDIPSRISIYWTIVKPGDILLINSTGNLIAPRGYFKIRSGKSSIMRSDAPIGKCKSECITPNGSIPNDKPFQNVNRITYGACPRYVKHSTLKLATGMRNVPEKQTRGIFGAIAGFIENGWEGMVDGWYGFRHQNSEGRGQAADLKSTQAAIDQINGKLNRLIGKTNEKFHQIEKEFSEVEGRIQDLEKYVEDTKIDLWSYNAELLVALENQHTIDLTDSEMNKLFEKTKKQLRENAEDMGNGCFKIYHKCDNACIGSIRNGTYDHNVYRDEALNNRFQIKGVELKSGYKDWILWISFAISCFLLCVALLGFIMWACQKGNIRCNICI

SEQ ID NO: 13296 - protein, 566 aa, synthetic construct
  REGION 1..566: note = hemagglutinin__InfluenzaA__ALE31775
MKTIIALSYILCLVFAQKIPGNDNSTATLCLGHHAVPNGTIVKTITNDRIEVTNATELVQNSSIGEICDSPHQILDGENCTLIDALLGDPQCDGFQNKKWDLFVERSKAYSNCYPYDVPDYASLRSLVASSGTLEFNNESFNWTGVTQNGTSSACIRKSSSSFFSRLNWLTHLNYTYPALNVTMPNNEQFDKLYIWGVHHPGTDKDQIFLYARSSGRITVSTKRSQQAVIPNIGSRPRIRDIPSRISIYWTIVKPGDILLINSTGNLIAPRGYFKIRSGKSSIMRSDAPIGKCKSECITPNGSIPNDKPFQNVNRITYGACPRYVKHSTLKLATGMRNVPEKQTRGIFGAIAGFIENGWEGMVDGWYGFRHQNSEGRGQAADLKSTQAAIDQINGKLNRLIGKTNEKFHQIEKEFSEVEGRIQDLEKYVEDTKIDLWSYNAEFLVALENQHTIDLTDSEMNKLFEKTKKQLRENAEDMGNGCFKIYHKCDNACIGSIRNGTYDHNVYRDEALNNRFQIKGVELKSGYKDWILWISFAISCFLLCVALLGFIMWACQKGNIRCNICI

SEQ ID NO: 13297 - protein, 566 aa, synthetic construct
  REGION 1..566: note = hemagglutinin__InfluenzaA__ALE31776
MKTIIALSYILCLVFAQKLPENDNSTATLCLGHHAVPNGTIVKTITSDRIEVTNATELVQNSSIGEICDSPHQILDGKNCTLIDALLGDPQCDGFQNKKWDLFVERSKAYSNCYPYDVPDYASLRSLVASSGTLEFNDESFNWAGVTQNGTSSACIRGSNSSFFSRLNWLTHSNFKYPALNVTMPNNEQFDKLYIWGVHHPGTDKDQIFLYAQSSGRITVSTKRSQQAVIPNIGSRPRIRNIPSRISIYWTIVKPGDILLINSTGNLIAPRGYFKIRSGKSSIMRSDASIGKCKSECITPNGSIPNDKPFQNVNRITYGACPRYVKQSTLKLATGMRNVPEKQTRGIFGAIAGFIENGWEGMKDGWYGFRHQNSEGRGQAADLKSTQAAIDQINGKLNRLIGKTNEKFHQIEKEFSEVEGRIQDLEKYVEDTKIDLWSYNAELLVALENQHTIDLTDSEMNKLFEKTKKQLRENAEDMGNGCFKIYHKCDNACIGSIRNGTYDHDVYRDEALNNRFQIKGVELKSGYKDWILWISFAISCFLLCVALLGFIMWACQKGNIRCNICI

SEQ ID NO: 13298 - protein, 566 aa, synthetic construct
  REGION 1..566: note = hemagglutinin__InfluenzaA__ALE31777
MKTIIALSYILCLVFAQKIPGNDNSTATLCLGHHAVPNGTIVKTITNDRIEVTNATELVQNSSIGEICDSPHQILDGENCTLIDALLGDPQCDGFQNKKWDLFVERSKAYSNCYPYDVPDYASLRSLVASSGTLEFNNESFNWTGVTQNGTSSACIRRSSSSFFSRLNWLTHLNYTYPALNVTMPNNEQFDKLYIWGVHHPGTDKDQIFLYAQSSGRITVSTKRSQQAVVPNIGSRPRIRDIPSRISIYWTIVKPGDILLINSTGNLIAPRGYFKIRSGKSSIMRSDAPIGKCKSECITPNGSIPNDKPFQNVNRITYGACPRYVKHSTLKLATGMRNVPEKQTRGIFGAIAGFIENGWEGMVDGWYGFRHQNSEGRGQAADLKSTQAAIDQINGKLNRLIGKTNEKFHQIEKEFSEVEGRIQDLEKYVEDTKIDLWSYNAELLVALENQHTIDLTDSEMNKLFEKTKKQLRENAEDMGNGCFKIYHKCDNACIGSIRNGTYDHNVYRDEALNNRFQIKGVELKSGYKDWILWISFAISCFLLCVALLGFIMWACQKGNIRCNICI

SEQ ID NO: 13299 - protein, 566 aa, synthetic construct; identical to SEQ ID NO: 13047
  REGION 1..566: note = hemagglutinin__InfluenzaA__ALE31778

SEQ ID NO: 13300 - protein, 566 aa, synthetic construct; identical to SEQ ID NO: 12441
  REGION 1..566: note = hemagglutinin__InfluenzaA__ALE31779

SEQ ID NO: 13301 - protein, 566 aa, synthetic construct
  REGION 1..566: note = hemagglutinin__InfluenzaA__ALE31780
MKTIIALSYILCLVFAQKIPGNDNSTATLCLGHHAVPNGTIVKTITNDRIEVTNATELVQNSSIGEICDSPHQILDGENCTLIDALLGDPQCDGFQNKKWDLFVERSKAHSNCYPYDVPDYASLRSLVASSGTLEFNNESFNWTGVTQNGTSSACIRRSSSSFFSRLNWLTHLNYTYPALNVTMPNNEQFDKLYIWGVHHPGTDKDQIFLYAQSSGRITVSTKRSQQAVIPNIGSRPRIRDIPSRISIYWTIVKPGDILLINSTGNLIAPRGYFKIRSGKSSIMRTDAPIGKCKSECITPNGSIPNDKPFQNVNRITYGACPRYVKHSTLKLATGMRNVPEKQTRGIFGAIAGFIENGWEGMVDGWYGFRHQNSEGRGQAADLKSTQAAIDQINGKLNRLIGKTNEKFHQIEKEFSEVEGRIQDLEKYVEDTKIDLWSYNAELLVALENQHTIDLTDSEMNKLFEKTKKQLRENAEDMGNGCFKIYHKCDNACIGSIRNGTYDHNVYRDEALNNRFQIKGVELKSGYKDWILWISFAISCFLLCVALLGFIMWACQKGNIRCNICI

SEQ ID NO: 13302 - protein, 566 aa, synthetic construct
  REGION 1..566: note = hemagglutinin__InfluenzaA__ALE31781
MKTIIALSYILCLVFAQKIPGNDNSTATLCLGHHAVPNGTIVKTITNDRIEVTNATELVQNSSIGEICGSPHQILDGENCTLIDALLGDPQCDGFQNKKWDLFVERSKAYSNCYPYDVPDYASLRSLVASSGTLEFNNESFNWTGVTQNGTSSACIRKSSSSFFSKLNWLTHLNYTYPALNVTMPNNEQFDKLYIWGVHHPGTDKDQIFLYARSSGRITVSTKRSQQAVIPNIGSRPRIRDIPSRISIYWTIVKPGDILLINSTGNLIAPRGYFKIRSGKSSIMRSDAPIGKCKSECITPNGSIPNDKPFQNVNRITYGACPRYVKHSTLKLATGMRNVPEKQTRGIFGAIAGFIENGWEGMVDGWYGFRHQNSEGRGQAADLKSTQAAIDQINGKLNRLIGKTNEKFHQIEKEFSEVEGRIQDLEKYVEDTKIDLWSYNAELLVALENQHTIDLTDSEMNKLFEKTKKQLRENAEDMGNGCFKIYHKCDNACIGSIRNGTYDHNVYRDEALNNRFQIKGVELKSGYKDWILWISFAISCFLLCVALLGFIMWACQKGNIRCNICI

SEQ ID NO: 13303 - protein, 566 aa, synthetic construct
  REGION 1..566: note = hemagglutinin__InfluenzaA__ALE31782
MKTIIALSYILCLVFAQKIPGNDNSTATLCLGHHAVPNGTIVKTITNDRIEVTNATELVQNSSIGEICDSPHQILDGENCTLIDALLGDPQCDGFQNKKWDLFVERSKAYSNCYPYDVPDYVSLRSLVASSGTLEFNNESFNWTGVTQNGTSSACIRRSSSSFFSRLNWLTHLNYTYPALNVTMPNNEQFDKLYIWGVHHPGTDKDQIFLYAQSSGRITVSTKRSQQAVIPNIGSRPRIRDIPSRISIYWTIVKPGDILLINSTGNLIAPRGYFKIRSGKSSIMRSDAPIGKCKSECITPNGSIPNDKPFQNVNRITYGACPRYVKQSTLKLATGMRNVPEKQTRGIFGAIAGFIENGWEGMVDGWYGFRHQNSEGRGQAADLKSTQAAIDQINGKLNRLIGKTNEKFHQIEKEFSEVEGRIQDLEKYVEDTKIDLWSYNAELLVALENQHTIDLTDSEMNKLFEKTKKQLRENAEDMGNGCFKIYHKCDNACIGSIRNGTYDHNVYRDEALNNRFQIKGVELKSGYKDWILWISFAISCFLLCVALLGFIMWACQKGNIRCNICI

SEQ ID NO: 13304 - protein, 566 aa, synthetic construct
  REGION 1..566: note = hemagglutinin__InfluenzaA__ALE31783
MKTIIALSYILCLVFAQKIPGNDNSTATLCLGHHAVPNGTIVKTITNDRIEVTNATELVQNSSIGEICDSPHQILDGENCTLIDALLGDPQCDGFQNKKWDLFVERSKAYSNCYPYDVPDYASLRSLVASSGTLEFNNESFNWTGVTQNGTSSACIRRSSSSFFSRLNWLTHLNYTYPALNVTVPNNEQFDKLYIWGVHHPGTDKDQIFLYAQSSGRITVSTKRSQQAVIPNIGSRPRIRDIPSRISIYWTIVKPGDILLINSTGNLIAPRGYFKIRSGKSSIMRSDAPIGKCKSECITPNGSIPNDKPFQNVNRITYGACPRYVKHSTLKLATGMRNVPEKQTRGIFGAIAGFIENGWEGMVDGWYGFRHQNSEGRGQAADLKSTQAAIDQINGKLNRLIGKTNEKFHQIEKEFSEVEGRIQDLEKYVEDTKIDLWSYNAELLVALENQHTIDLTDSEMNKLFEKTKKQLRENAEDMGNGCFKIYHKCDNACIGSIRNGTYDHNVYRDEALNNRFQIKGVELKSGYKDWILWISFAISCFLLCVALLGFIMWACQKGNIRCNICI

SEQ ID NO: 13305 - protein, 566 aa, synthetic construct; identical to SEQ ID NO: 13057
  REGION 1..566: note = hemagglutinin__InfluenzaA__ALE31784

SEQ ID NO: 13306 - protein, 566 aa, synthetic construct; identical to SEQ ID NO: 12441
  REGION 1..566: note = hemagglutinin__InfluenzaA__ALE31785

SEQ ID NO: 13307 - protein, 566 aa, synthetic construct; identical to SEQ ID NO: 13047
  REGION 1..566: note = hemagglutinin__InfluenzaA__ALE31786

SEQ ID NO: 13308 - protein, 566 aa, synthetic construct; identical to SEQ ID NO: 13099
  REGION 1..566: note = hemagglutinin__InfluenzaA__ALE31787

SEQ ID NO: 13309 - protein, 566 aa, synthetic construct; identical to SEQ ID NO: 12541
  REGION 1..566: note = hemagglutinin__InfluenzaA__ALE31788

SEQ ID NO: 13310 - protein, 566 aa, synthetic construct; identical to SEQ ID NO: 12441
  REGION 1..566: note = hemagglutinin__InfluenzaA__ALE31789

SEQ ID NO: 13311 - protein, 566 aa, synthetic construct; identical to SEQ ID NO: 13056
  REGION 1..566: note = hemagglutinin__InfluenzaA__ALE31790

SEQ ID NO: 13312 - protein, 566 aa, synthetic construct; identical to SEQ ID NO: 13177
  REGION 1..566: note = hemagglutinin__InfluenzaA__ALE31791

SEQ ID NO: 13313 - protein, 566 aa, synthetic construct; identical to SEQ ID NO: 13077
  REGION 1..566: note = hemagglutinin__InfluenzaA__ALE31792

SEQ ID NO: 13314 - protein, 566 aa, synthetic construct
  REGION 1..566: note = hemagglutinin__InfluenzaA__ALE31793
MKTIIALSYILCLVFAQKIPGNDNSTATLCLGHHAVPNGTIVKTITNDRIEVTNATELVQNSSIGEICDSPHQILDGENCTLIDALLGDPQCDGFQNKKWDLFVERSKAYSNCYPYDVPDYASLRSLVASSGTLEFNNESFNWTGVTQNGTSSACIRRSSSSFFSRLNWLTHLNYTYPALNVTMPNNEQFDKLYIWGVHHPGTDKDQISLYAQSSGRITVSTKRSQQAVIPNIGSRPRIRDIPSRISIYWTIVKPGDILLINSTGNLIAPRGYFKIRSGKSSIMRSDAPIGKCKSECITPNGSIPNDKPFQNVNRITYGACPRYVKHSTLKLATGMRNVPEKQTRGIFGAIAGFIENGWEGMVDGWYGFRHQNSEGRGQAADLKSTQAAIDQINGKLNRLIGKTNEKFHQIEKEFSEVEGRIQDLEKYVEDTKIDLWSYNAELLVALENQHTIDLTDSEMNKLFEKTKKQLRENAEDMGNGCFKIYHKCDNACIGSIRNGTYDHNVYRDEALNNRFQIKGVELKSGYKDWILWISFAISCFLLCVALLGFIMWACQKGNIRCNICI

SEQ ID NO: 13315 - protein, 566 aa, synthetic construct; identical to SEQ ID NO: 12441
  REGION 1..566: note = hemagglutinin__InfluenzaA__ALE31794

SEQ ID NO: 13316 - protein, 566 aa, synthetic construct; identical to SEQ ID NO: 12441
  REGION 1..566: note = hemagglutinin__InfluenzaA__ALE31795

SEQ ID NO: 13317 - protein, 566 aa, synthetic construct; identical to SEQ ID NO: 12441
  REGION 1..566: note = hemagglutinin__InfluenzaA__ALE31796

SEQ ID NO: 13318 - protein, 566 aa, synthetic construct; identical to SEQ ID NO: 13099
  REGION 1..566: note = hemagglutinin__InfluenzaA__ALE31797

SEQ ID NO: 13319 - protein, 566 aa, synthetic construct; identical to SEQ ID NO: 13099
  REGION 1..566: note = hemagglutinin__InfluenzaA__ALE31798

SEQ ID NO: 13320 - protein, 566 aa, synthetic construct; identical to SEQ ID NO: 12441
  REGION 1..566: note = hemagglutinin__InfluenzaA__ALE31799

SEQ ID NO: 13321 - protein, 566 aa, synthetic construct; identical to SEQ ID NO: 13047
  REGION 1..566: note = hemagglutinin__InfluenzaA__ALE31800

SEQ ID NO: 13322 - protein, 566 aa, synthetic construct; identical to SEQ ID NO: 12441
  REGION 1..566: note = hemagglutinin__InfluenzaA__ALE31801

SEQ ID NO: 13323 - protein, 566 aa, synthetic construct; identical to SEQ ID NO: 12441
  REGION 1..566: note = hemagglutinin__InfluenzaA__ALE31802

SEQ ID NO: 13324 - protein, 566 aa, synthetic construct; identical to SEQ ID NO: 13047
  REGION 1..566: note = hemagglutinin__InfluenzaA__ALE31803

SEQ ID NO: 13325 - protein, 566 aa, synthetic construct; identical to SEQ ID NO: 12998
  REGION 1..566: note = hemagglutinin__InfluenzaA__ALE31805

SEQ ID NO: 13326 - protein, 566 aa, synthetic construct
  REGION 1..566: note = hemagglutinin__InfluenzaA__ALE31806
MKTIIALSYILCLVFAQKIPGNDNSTATLCLGHHAVPNGTIVKTITNDRIEVTNATELVQNSSIGEICDSPHQILDGENCTLIDALLGDPQCDGFQNKKWDLFVERSKAYSNCYPYDVPDYASLRSLVASSGTLEFNNESFNWTGVTQNGTSSACIRRSSSSFFSRLNWLTHLNYTYPALNVTMPNNEQFDKLYIWGVHHPGTDKDQIFLYAQSSGRITVSTKRSQQAVIPNIGSRPRIRDIPSRISIYWTIVKPGDTLLINSTGNLIAPRGYFKIRSGKSSIMRSDAPIGKCKSECITPNGSIPNDKPFQNVNRITYGACPRYVKHSTLKLATGMRNVPEKQTRGIFGAIAGFIENGWEGMVDGWYGFRHQNSEGRGQAADLKSTQAAIDQINGKLNRLIGKTNEKFHQIEKEFSEVEGRIQDLEKYVEDTKIDLWSYNAELLVALENQHTIDLTDSEMNKLFEKTKKQLRENAEDMGNGCFKIYHKCDNACIGSIRNGTYDHNVYRDEALNNRFQIKGVELKSGYKDWILWISFAISCFLLCVALLGFIMWACQKGNIRCNICI

SEQ ID NO: 13327 - protein, 566 aa, synthetic construct
  REGION 1..566: note = hemagglutinin__InfluenzaA__ALE31807
MKTIIALSYILCLVFAQKLPGNDNSTATLCLGHHAVPNGTIVKTITNDRIEVTNATELVQNSSIGEICDSPHQILDGENCTLIDALLGDPQCDGFQNKKWDLFVERSKAYSNCYPYDVPDYASLRSLVASSGTLEFNNESFNWTGVTQNGTSSACIRRSSSSFFSRLNWLTHLNFTYPALNVTMPNNEQFDKLYVWGVHHPGTDKDQIFLYAQSSGRITVSTKRSQQAVIPNIGSRPRIRNIPSRISIYWTIVKPGDILLINSTGNLIAPRGYFKIRSGKSSIMRSDAPIGKCKSECITPNGSIPNDKPFQNVNRITYGACPRYVKHSTLKLATGMRNVPEKQTRGIFGAIAGFIENGWEGMVDGWYGFRHQNSEGRGQAADLKSTQAAIDQINGKLNRLIGKTNEKFHQIEKEFSEVEGRIQDLEKYVEDTKIDLWSYNAELLVALENQHTIDLTDSEMNKLFEKTKKQLRENAEDMGNGCFKIYHKCDNACIGSIRNGTYDHNVYRDEALNNRFQIKGVELKSGYKDWILWISFAISCFLLCVALLGFIMWACQKGNIRCNICI

SEQ ID NO: 13328 - protein, 566 aa, synthetic construct
  REGION 1..566: note = hemagglutinin__InfluenzaA__ALE31808
MKTIIALGYILCLVFAQKIPGNDNSTATLCLGHHAVPNGTIVKTITNDRIEVTNATELVQNSSIGEICDSPHKILDGENCTLIDALLGDPQCDGFQNKKWDLFVERSKAYSNCYPYDVPDYASLRSLVASSGTLEFNNESFNWTGVTQNGTSSACIRRSSSSFFSRLNWLTHLNYTYPALNVTMPNNEQFDKLYIWGVHHPGTDKDQIFLYAQSSGRITVSTKRSQQAVIPNIGSRPRIRDIPSRISIYWTIVKPGDILLINSTGNLIAPRGYFKIRSGKSSIMRSDAPIGKCKSECITPNGSIPNDKPFQNVNRITYGACPRYVKHSTLKLATGMRNVPEKQTRGIFGAIAGFIENGWEGMVDGWYGFRHQNSEGRGQAADLKSTQAAIDQINGKLNRLIGKTNEKFHQIEKEFSEVEGRIQDLEKYVEDTKIDLWSYNAELLVALENQHTIDLTDSEMNKLFEKTKKQLRENAEDMGNGCFKIYHKCDNACIGSIRNGTYDHNVYRDEALNNRFQIKGVELKSGYKDWILWISFAISCFLLCVALLGFIMWACQKGNIRCNICI

SEQ ID NO: 13329 - protein, 566 aa, synthetic construct; identical to SEQ ID NO: 12441
  REGION 1..566: note = hemagglutinin__InfluenzaA__ALE31810

SEQ ID NO: 13330 - protein, 566 aa, synthetic construct; identical to SEQ ID NO: 12441
  REGION 1..566: note = hemagglutinin__InfluenzaA__ALE31812

SEQ ID NO: 13331 - protein, 566 aa, synthetic construct
  REGION 1..566: note = hemagglutinin__InfluenzaA__ALE31814
MKTIIALSYILCLVFAQKLPGNDNSTATLCLGHHAVPNGTIVKTITNDRIEVTNATELVQNSSIGEICDSPHQILDGKNCTLIDALLGDPQCDGFQNKKWDLFVERSKAHSNCYPYDVPDYASLRSLVASSGTLEFNNESFNWAGVTQNGTSSSCIRGSNSSFFSRLNWLTHLNSKYPALNVTMPNNEQFDKLYIWGVHHPGTDKDQIFLYAQPSGRITVSTKRSQQAVIPNIGSRPRIRDIPSRISIYWTIVKPGDILLINSTGNLIAPRGYFKIRSGKSSIMRSDAPIGKCKSECITPNGSIPNDKPFQNVNRITYGACPRYVKQSTLKLATGMRNVPERQTRGIFGAIAGFIENGWEGMVDGWYGFRHQNSEGRGQAADLKSTQAAIDQINGKLNRLIGKTNEKFHQIEKEFSEVEGRIQDLEKYVEDTKIDLWSYNAELLVALENQHTIDLTDSEMNKLFEKTKKQLRENAEDMGNGCFKIYHKCDNACIGSIRNGTYDHDVYRDEALNNRFQIKGVELKSGYKDWILWISFAISCFLLCVALLGFIMWACQKGNIRCNICI

SEQ ID NO: 13332 - protein, 566 aa, synthetic construct; identical to SEQ ID NO: 13331
  REGION 1..566: note = hemagglutinin__InfluenzaA__ALE31815

SEQ ID NO: 13333 - protein, 566 aa, synthetic construct; identical to SEQ ID NO: 12441
  REGION 1..566: note = hemagglutinin__InfluenzaA__ALE31818

SEQ ID NO: 13334 - protein, 566 aa, synthetic construct
  REGION 1..566: note = hemagglutinin__InfluenzaA__ALE31819
MKTIIALSYILCLVFAQKIPGNDNSTATLCLGHHAVPNGTIVKTITNDRIEVTNATELVQNSSIGEICDSPHQILDGENCTLIDALLGDPQCDGFQNKKWDLFVERSKAYSNCYPYDVPDYASLRSLVASSGTLEFNNESFNWTGVTQNGTSSACIRGSSSSFFSRLNWLTHLNYTYPALNVTMPNKEQFDKLYIWGVHHPGTDKDQIFLYAQSSGRITVSTKRSQQAVIPNIGSRPRIRDIPSRISIYWTIVKPGDILLINSTGNLIAPRGYFKIRSGKSSIMRSDAPIGKCKSECITPNGSIPNDKPFQNVNRITYGACPRYVKHSTLKLATGMRNVPEKQTRGIFGAIAGFIENGWEGMVDGWYGFRHQNSEGRGQAADLKSTQAAIDQINGKLNRLIGKTNEKFHQIEKEFSEVEGRIQDLEKYVEDTKIDLWSYNAELLVALENQHTIDLTDSEMNKLFEKTKKQLRENAEDMGNGCFKIYHKCDNACIGSIRNGTYDHNVYRDEALNNRFQIKGVELKSGYKDWILWISFAISCFLLCVALLGFIMWACQKGNIRCNICI

SEQ ID NO: 13335 - protein, 566 aa, synthetic construct; identical to SEQ ID NO: 12985
  REGION 1..566: note = hemagglutinin__InfluenzaA__ALE31820

SEQ ID NO: 13336 - protein, 566 aa, synthetic construct
  REGION 1..566: note = hemagglutinin__InfluenzaA__ALE31821
MKTIIALSYTLCLVFAQKIPGNDNSTATLCLGHHAVPNGTIVKTITNDRIEVTNATELVQNSSIGEICDSPHQILDGENCTLIDALLGDPQCDGFQNKKWDLFVERSKAHSNCYPYDVPDYASLRSLVASSGTLEFNNESFNWTGVTQNGTSSACIRRSSSSFFSRLNWLTHLNYTYPALNVTMPNNEQFDKLYIWGVHHPGTDKDQIFLYAQSSGRITVSTKRSQQAVIPNIGSRPRIRDIPSRISIYWTIVKPGDILLINSTGNLIAPRGYFKIRSGKSSIMRSDAPIGKCKSECITPNGSIPNDKPFQNVNRITYGACPRYVKHSTLKLATGMRNVPEKQTRGIFGAIAGFIENGWEGMVDGWYGFRHQNSEGRGQAADLKSTQAAIDQINGKLNRLIGKTNEKFHQIEKEFSEVEGRIQDLEKYVEDTKIDLWSYNAELLVALENQHTIDLTDSEMNKLFEKTKKQLRENAEDMGNGCFKIYHKCDNACIGSIRNGTYDHNVYRDEALNNRFQIKGVELKSGYKDWILWISFAISCFLLCVALLGFIMWACQKGNIRCNICI

SEQ ID NO: 13337 - protein, 566 aa, synthetic construct; identical to SEQ ID NO: 13077
  REGION 1..566: note = hemagglutinin__InfluenzaA__ALE31822

SEQ ID NO: 13338 - protein, 566 aa, synthetic construct; identical to SEQ ID NO: 12985
  REGION 1..566: note = hemagglutinin__InfluenzaA__ALE31823

SEQ ID NO: 13339 - protein, 566 aa, synthetic construct; identical to SEQ ID NO: 12441
  REGION 1..566: note = hemagglutinin__InfluenzaA__ALE31824

SEQ ID NO: 13340 - protein, 566 aa, synthetic construct
  REGION 1..566: note = hemagglutinin__InfluenzaA__ALE31825
MKTIIALSYILCLVFAQKIPGNDNSTATLCLGHHAVPNGTIVKTITNDRIEVTNATELVQNSSIGEICDSPHQILDGENCTLIDALLGDPQCDGFQNKKWDLFVERSKAYSNCYPYDVPDYASLRSLVASSGTLEFNNESFNWTGVTQNGTSSACIRRSSSSFFSRLNWLTHLNYRYPALNVTMPNNEQFDKLYIWGVHHPGTDKDQIFLYAQSSGRITVSTKRSQQAVIPNIGSRPRIRDIPSRISIYWTIVKPGDILLINSTGNLIAPRGYFKIRSGKSSIMRSDAPIGKCKSECITPNGSIPNDKPFQNVNRITYGACPRYVKHSTLKLATGMRNVPEKQTRGIFGAIAGFIENGWEGMVDGWYGFRHQNSEGRGQAADLKSTQAAIDQINGKLNRLIGKTNEKFHQIEKEFSEVEGRIQDLEKYVEDTKIDLWSYNAELLVALENQHTIDLTDSEMNKLFEKTKKQLRENAEDMGNGCFKIYHKCDNACIGSIRNGTYDHNVYRDEALNNRFQIKGVELKSGYKDWILWISFAISCFLLCVALLGFIMWACQKGNIRCNICI

SEQ ID NO: 13341 - protein, 566 aa, synthetic construct; identical to SEQ ID NO: 12441
  REGION 1..566: note = hemagglutinin__InfluenzaA__ALE31826

SEQ ID NO: 13342 - protein, 566 aa, synthetic construct; identical to SEQ ID NO: 12441
  REGION 1..566: note = hemagglutinin__InfluenzaA__ALE31827

SEQ ID NO: 13343 - protein, 566 aa, synthetic construct; identical to SEQ ID NO: 12441
  REGION 1..566: note = hemagglutinin__InfluenzaA__ALE31828

SEQ ID NO: 13344 - protein, 566 aa, synthetic construct; identical to SEQ ID NO: 12998
  REGION 1..566: note = hemagglutinin__InfluenzaA__ALE31829

SEQ ID NO: 13345 - protein, 566 aa, synthetic construct
  REGION 1..566: note = hemagglutinin__InfluenzaA__ALE31830
MKTIIALSYILCLVFAQKIPGNDNSTATLCLGHHAVPNGTIVKTITNDRIEVTNATELVQNSSIGEICDSPHQILDGENCTLIDALLGDPQCDGFQNKKWDLFVERSKAYSNCYPYDVPDYASLRSLVASSGTLEFNNESFNWTGVTQNGTSSACIRRSSSSFFSRLNWLTHLNYTYPALNVTMPNNEQFDKLYIWGVHHPGTDKDQIFLYAQSSGRITVSTKRSQQAVIPNIGSRPRIRDIPSRISIYWTIVKPGDILLINSTGNLIAPRGYFKIRSGKSSIMRSDAPIGKCKSECITPNGSIPNDKPFQNVNRITYGACPRYVKHSTLKLATGMRNVPEKQTRGIFGAIAGFIENGWEGMVDGWYGFRHQNSEGRGQAADLKSTQAAIDQINGKLNRLIGKTNEKFHQIEKEFSEVEGRIQDLEKYVEDTKIDLWSYNAELLVALENQHTIDITDSEMNKLFEKTKKQLRENAEDMGNGCFKIYHKCDNACIGSIRNGTYDHNVYRDEALNNRFQIKGVELKSGYKDWILWISFAISCFLLCVALLGFIMWACQKGNIRCNICI

SEQ ID NO: 13346 - protein, 566 aa, synthetic construct
  REGION 1..566: note = hemagglutinin__InfluenzaA__ALE31832
MKNIIALSYILCLVFAQKIPGNDNSTATLCLGHHAVPNGTIVKTITNDRIEVTNATELVQNSSIGEICDSPHQILDGENCTLIDALLGDPQCDGFQNKKWDLFVERSKAYSNCYPYDVPDYASLRSLVASSGTLEFNNESFNWTGVTQNGTSSACIRRSNSSFFSRLNWLTHLNYTYPALNVTMPNNEQFDKLYIWGVHHPGTDKDQIFLYAQSSGRITVSTKRSQQAVIPNIGSRPRIRDIPSRISIYWTIVKPGDILLINSTGNLIAPRGYFKIRSGKSSIMRSDAPIGKCKSECITPNGSIPNDKPFQNVNRITYGACPRYVKHSTLKLATGMRNVPEKQTRGIFGAIAGFIENGWEGMVDGWYGFRHQNSEGRGQAADLKSTQAAIDQINGKLNRLIGKTNEKFHQIEKEFSEVEGRIQDLEKYVEDTKIDLWSYNAELLVALENQHTIDLTDSEMNKLFEKTKKQLRENAEDMGNGCFKIYHKCDNACIGSIRNGTYDHNVYRDEALNNRFQIKGVELKSGYKDWILWISFAISCFLLCVALLGFIMWACQKGNIRCNICI

SEQ ID NO: 13347 - protein, 566 aa, synthetic construct
  REGION 1..566: note = hemagglutinin__InfluenzaA__ALE31833
MKTIIALSYILCLVSAQKIPGNDNSTATLCLGHHAVPNGTIVKTITNDRIEVTNATELVQNSSIGEICNSPHQILDGENCTLIDALLGDPQCDGFQNKKWDLFVERSKAYSNCYPYDVPDYASLRSLVASSGTLEFNNESFNWTGVTQNGTSSACIRRSSSSFFSRLNWLTHLNYTYPALNVTMPNNEQFDKLYIWGVHHPGTDKDQIFLYAQSSGRITVSTKRSQQAVIPNIGSRPRIRDIPSRISIYWTIVKPGDILLINSTGNLIAPRGYFKIRSGKSSIMRSDAPIGKCKSECITPNGSIPNDKPFQNVNRITYGACPRYVKHSTLKLATGMRNVPEKQTRGIFGAIAGFIENGWEGMVDGWYGFRHQNSEGRGQAADLKSTQAAIDQINGKLNRLIGKTNEKFHQIEKEFSEVEGRIQDLEKYVEDTKIDLWSYNAELLVALENQHTIDLTDSEMNKLFEKTKKQLRENAEDMGNGCFKIYHKCDNACIGSIRNGTYDHNVYRDEALNNRFQIKGVELKSGYKDWILWISFAISCFLLCVALLGFIMWACQKGNIRCNICI

SEQ ID NO: 13348 - protein, 566 aa, synthetic construct
  REGION 1..566: note = hemagglutinin__InfluenzaA__ALE31834
MKTIIALSYILCLVFAQKLPGNDNSTATLCLGHHAVPNGTIVKTITNDRIEVTNATELVQNSSIGEICDSPHQILDGENCTLIDALLGDPQCDGFQNKKWDLFVERSKAHSNCYPYDVPDYASLRSLVASSGTLEFNNESFNWAGVTQNGTSSSCIRGSNSSFFSRLNWLTHLNSKYPALNVTMPNNEQFDKLYIWGVHHPGTDKDQIFLYAQSSGRITVSTKRSQQAVIPNIGSRPRIRDIPSRISIYWTIVKPGDILLINSTGNLIAPRGYFKIRSGKSSIMRSDAPIGKCKSECITPNGSIPNDKPFQNVNRITYGACPRYVKQSTLKLATGMRNVPEKQTRGIFGAIAGFIENGWEGMVDGWYGFRHQNSEGRGQAADLKSTQAAIDQINGKLNRLIGKTNEKFHQIEKEFSEVEGRIQDLEKYVEDTKIDLWSYNAELLVALENQHTIDLTDSEMNKLFEKTKKQLRENAEDMGNGCFKIYHKCDNACIGSIRNGTYDHDVYRDEALNNRFQIKGVELKSGYKDWILWISFAISCFLLCVALLGFIMWACQKGNIRCNICI

SEQ ID NO: 13349 - protein, 566 aa, synthetic construct; identical to SEQ ID NO: 13099
  REGION 1..566: note = hemagglutinin__InfluenzaA__ALE31835

SEQ ID NO: 13350 - protein, 566 aa, synthetic construct; identical to SEQ ID NO: 12441
  REGION 1..566: note = hemagglutinin__InfluenzaA__ALE31836

SEQ ID NO: 13351 - protein, 566 aa, synthetic construct
  REGION 1..566: note = hemagglutinin__InfluenzaA__ALE31837
MKTIIALSYILCLVYAQKIPGNDNSTATLCLGHHAVPNGTIVKTITNDRIEVTNATELVQNSSIGEICDSPHQILDGENCTLIDALLGDPQCDGFQNKKWDLFVERSKAYSNCYPYDVPDYASLRSLVASSGTLEFNNESFNWTGVTQNGTSSACIRRSSSSFFSRLNWLTHLNYTYPALNVTMPNNEQFDKLYIWGVHHPGTDKDQIFLYAQSSGRITVSTKRSQQAVIPNIGSRPRIRDIPSRISIYWTIVKPGDILLINSTGNLIAPRGYFKIRSGKSSIMRSDAPIGKCKSECITPNGSIPNDKPFQNVNRITYGACPRYVKHSTLKLATGMRNVPEKQTRGIFGAIAGFIENGWEGMVDGWYGFRHQNSEGRGQAADLKSTQAAIDQINGKLNRLIGKTNEKFHQIEKEFSEVEGRIQDLEKYVEDTKIDLWSYNAELLVALENQHTIDLTDSEMNKLFEKTKKQLRENAEDMGNGCFKIYHKCDNACIGSIRNGTYDHNVYRDEALNNRFQIKGVELKSGYKDWILWISFAISCFLLCVALLGFIMWACQKGNIRCNICI

SEQ ID NO: 13352 - protein, 566 aa, synthetic construct; identical to SEQ ID NO: 12441
  REGION 1..566: note = hemagglutinin__InfluenzaA__ALE31838

SEQ ID NO: 13353 - protein, 566 aa, synthetic construct; identical to SEQ ID NO: 12441
  REGION 1..566: note = hemagglutinin__InfluenzaA__ALE31839

SEQ ID NO: 13354 - protein, 566 aa, synthetic construct
  REGION 1..566: note = hemagglutinin__InfluenzaA__ALE31840
MKTIIALSYILCLVFAQKIPGNDNSTATLCLGHHAVPNGTIVKTITNDRIEVTNATELVQNSSIGEICDSPHQILDGENCTLIDALLGDPQCDGFQNKKWDLFVERSKAYSNCYPYDVPDYASLRSLVASSGTLEFNNESFNWTGVTQNGTSSACIRRSSSSFFSRLNWLTHLNYTYPALNVTMPNNEQFDKLYIWGVHHPGTDKDQIFLYAQSSGRITVSTKRSQQAVIPNIGSRLRIRDIPSRISIYWTIVKPGDILLINSTGNLIAPRGYFKIRSGKSSIMRSDAPIGKCKSECITPNGSIPNDKPFQNVNRITYGACPRYVKHSTLKLATGMRNVPEKQTRGIFGAIAGFIENGWEGMVDGWYGFRHQNSEGRGQAADLKSTQAAIDQINGKLNRLIGKTNEKFHQIEKEFSEVEGRIQDLEKYVEDTKIDLWSYNAELLVALENQHTIDLTDSEMNKLFEKTKKQLRENAEDMGNGCFKIYHKCDNACIGSIRNGTYDHNVYRDEALNNRFQIKGVELKSGYKDWILWISFAISCFLLCVALLGFIMWACQKGNIRCNICI

SEQ ID NO: 13355 - protein, 566 aa, synthetic construct; identical to SEQ ID NO: 12441
  REGION 1..566: note = hemagglutinin__InfluenzaA__ALE31842

SEQ ID NO: 13356 - protein, 566 aa, synthetic construct
  REGION 1..566: note = hemagglutinin__InfluenzaA__ALE31843
MQTIIALSYILCLVFAQKIPGNDNSTATLCLGHHAVPNGTIVKTITNDRIEVTNATELVQNSSIGEICDSPHQILDGENCTLIDALLGDPQCDGFQNKKWDLFVERSKAYSNCYPYDVPDYASLRSLVASSGTLEFNNESFNWTGVTQNGTSSACIRKSSSSFFSRLNWLTHLNYTYPALNVTMPNNEQFDKLYIWGVHHPGTDKDQIFLYAQSSGRITVSTKRSQQAVIPNIGSRPRIRDIPSRISIYWTIVKPGDILLINSTGNLIAPRGYFKILSGKSSIMRSDAPIGKCKSECITPNGSIPNDKPFQNVNRITYGACPRYVKHSTLKLATGMRNVPEKQTRGIFGAIAGFIENGWEGMVDGWYGFRHQNSEGRGQAADLKSTQAAIDQINGKLNRLIGKTNEKFHQIEKEFSEVEGRIQDLEKYVEDTKIDLWSYNAELLVALENQHTIDLTDSEMNKLFEKTKKQLRENAEDMGNGCFKIYHKCDNACIGSIRNGTYDHNVYRDEALNNRFQIKGVELKSGYKDWILWISFAISCFLLCVALLGFIMWACQKGNIRCNICI

SEQ ID NO: 13357 - protein, 566 aa, synthetic construct; identical to SEQ ID NO: 12998
  REGION 1..566: note = hemagglutinin__InfluenzaA__ALE31844

SEQ ID NO: 13358 - protein, 566 aa, synthetic construct; identical to SEQ ID NO: 12974
  REGION 1..566: note = hemagglutinin__InfluenzaA__ALE31846

SEQ ID NO: 13359 - protein, 566 aa, synthetic construct; identical to SEQ ID NO: 12441
  REGION 1..566: note = hemagglutinin__InfluenzaA__ALE31847

SEQ ID NO: 13360 - protein, 566 aa, synthetic construct; identical to SEQ ID NO: 12441
  REGION 1..566: note = hemagglutinin__InfluenzaA__ALE31848

SEQ ID NO: 13361 - protein, 566 aa, synthetic construct
  REGION 1..566: note = hemagglutinin__InfluenzaA__ALE31850
MKTIIALSYILCLVFAQKLPGNDNSTATLCLGHHAVPNGTIVKTITNDRIEVTNATELVQNSSIGEICDSPHQILDGENCTLIDALLGDPQCDGFQNKKWDLFVERSKAYSNCYPYDVPDYASLRSLVASSGTLEFNNESFNWAGVTQNGTSSSCIRGSNSSFFSRLNWLTHLNSKYPALNVTMPNNEQFDKLYIWGVHHPGTDKDQIFLYAQPSGRITVSTKRSQQAVIPNIGSRPRIRDIPSRISIYWTIVKPGDILLINSTGNLIAPRGYFKIRSGKSSIMRSDAPIGKCKSECITPNGSIPNDKPFQNVNRVTYGACPRYVKQSTLKLATGMRNVPERQTRGIFGAIAGFIENGWEGMVDGWYGFRHQNSEGRGQAADLKSTQAAIDQINGKLNRLIGKTNEKFHQIEKEFSEVEGRIQDLEKYVEDTKIDLWSYNAELLVALENQHTIDLTDSEMNKLFEKTKKQLRENAEDMGNGCFKIYHKCDNACIGSIRNGTYDHDVYRDEALNNRFQIKGVELKSGYKDWILWISFAISCFLLCVALLGFIMWACQKGNIRCNICI

SEQ ID NO: 13362 - protein, 566 aa, synthetic construct
  REGION 1..566: note = hemagglutinin__InfluenzaA__ALE31851
MKTIIALSYILCLVFAQKIPGNDNSTATLCLGHHAVPNGTIVKTITNDRIEVTNATELVQNSSIGEICDSPHQILDGENCTLIDALLGDPQCDGFQNKKWDLFVERSKAYSNCYPYDVPDYASLRSLVASSGTLEFNNESFNWTGVTQNGTSSACIRKSSSSFFSRLNWLTHLNYTYPALNVTMPNNEQFDKLYIWGVHHPGTDKDQIFLYARSSGRITVSTKRSQQAVIPNIGSRPRIRDIPSRISIYWTIVKPGDILLINSIGNLIAPRGYFKIRSGKSSIMRSDAPIGKCKSECITPNGSIPNDKPFQNVNRITYGACPRYVKHSTLKLATGMRNVPEKQTRGIFGAIAGFIENGWEGMVDGWYGFRHQNSEGRGQAADLKSTQAAIDQINGKLNRLIGKTNEKFHQIEKEFSEVEGRIQDLEKYVEDTKIDLWSYNAELLVALENQHTIDLTDSEMNKLFEKTKKQLRENAEDMGNGCFKIYHKCDNACIGSIRNGTYDHNVYRDEALNNRFQIKGVELKSGYKDWILWISFAISCFLLCVALLGFIMWACQKGNIRCNICI

SEQ ID NO: 13363 - protein, 566 aa, synthetic construct; identical to SEQ ID NO: 12985
  REGION 1..566: note = hemagglutinin__InfluenzaA__ALE31852

SEQ ID NO: 13364 - protein, 566 aa, synthetic construct
  REGION 1..566: note = hemagglutinin__InfluenzaA__ALE31853
MKTIIALSYILCLVFTQKIPGNDNSTATLCLGHHAVPNGTIVKTITNDRIEVTNATELVQNSSIGEICDSPHQILDGENCTLIDALLGDPQCDGFQNKKWDLFVERSKAYSNCYPYDVPDYASLRSLVASSGTLEFNNESFNWTGVTQNGTSSACIRRSSSSFFSRLNWLTHLNYTYPALNVTMPNNEQFDKLYIWGVHHPGTDKDQIFLYAQSSGRITVSTKRSQQAVIPNIGSRPRIRDIPSRISIYWTIVKPGDILLINSTGNLIAPRGYFKIRSGKSSIMRSDAPIGKCKSECITPNGSIPNDKPFQNVNRITYGACPRYVKHSTLKLATGMRNVPEKQTRGIFGAIAGFIENGWEGMVDGWYGFRHQNSEGRGQAADLKSTQAAIDQINGKLNRLIGKTNEKFHQIEKEFSEVEGRIQDLEKYVEDTKIDLWSYNAELLVALENQHTIDLTDSEMNKLFEKTKKQLRENAEDMGNGCFKIYHKCDNACIGSIRNGTYDHNVYRDEALNNRFQIKGVELKSGYKDWILWISFAISCFLLCVALLGFIMWACQKGNIRCNICI

SEQ ID NO: 13365 - protein, 566 aa, synthetic construct
  REGION 1..566: note = hemagglutinin__InfluenzaA__ALE31854
MKTIIALSYILCLVFAQKIPGNDNSTATLCLGHHAVPNGTIVKTITNDRIEVTNATELVQNSSIGEICDSPHQILDGENCTLIDALLGDPQCDGFQNKKWDLFVERSKAYSNCYPYDVPDYASLRSLVASSGTLEFNNESFNWTGVTQNGTSSACIRRSSSSFFSRLNWLTHLNYTYPALNVTMPNNEQFDKLYIWGVHHPGTDKDQIFLYARSSGRITVSTKGSQQAVIPNIGSRPRIRDIPSRISIYWTIVKPGDILLINSTGNLIAPRGYFKIRSGKSSIMRSDAPIGRCKSECITPNGSIPNDKPFQNVNRITYGACPRYVKHSTLKLATGMRNVPEKQTRGIFGAIAGFIENGWEGMVDGWYGFRHQNSEGRGQAADLKSTQAAIDQINGKLNRLIGKTNEKFHQIEKEFSEVEGRIQDLEKYVEDTKIDLWSYNAELLVALENQHTIDLTDSEMNKLFEKTKKQLRENAEDMGNGCFKIYHKCDNACIGSIRNGTYDHNVYRDEALNNRFQIKGVELKSGYKDWILWISFAISCFLLCVALLGFIMWACQKGNIRCNICI

SEQ ID NO: 13366 - protein, 566 aa, synthetic construct; identical to SEQ ID NO: 13127
  REGION 1..566: note = hemagglutinin__InfluenzaA__ALE31855

SEQ ID NO: 13367 - protein, 566 aa, synthetic construct; identical to SEQ ID NO: 12441
  REGION 1..566: note = hemagglutinin__InfluenzaA__ALE31856

SEQ ID NO: 13368 - protein, 566 aa, synthetic construct; identical to SEQ ID NO: 12441
  REGION 1..566: note = hemagglutinin__InfluenzaA__ALE31857

SEQ ID NO: 13369 - protein, 566 aa, synthetic construct
  REGION 1..566: note = hemagglutinin__InfluenzaA__ALE31858
MKTIIALSYILCLVFAQKIPGNDNSTATLCLGHHAVPNGTIVKTITNDRIEVTNATELVQNSSIGEICDSPHQILDGENCTLIDALLGDPQCDGFQNKKWDLFVERSKAYSNCYPYDVPDYASLRSLVASSGTLEFNNESFNWTGVTQNGTSSACIRRSSSSFFSRLNWLTHLKYTYPALNVTMPNNEQFDKLYIWGVHHPGTDKDQIFLYAQSSGRITVSTKRSQQAVIPNIGSRPRIRDIPSRISIYWTIVKPGDILLINSTGNLIAPRGYFKIRSGKSSIMRSDAPIGKCKSECITPNGSIPNDKPFQNVNRITYGACPRYVKHSTLKLATGMRNVPEKQTRGIFGAIAGFIENGWEGMVDGWYGFRHQNSEGRGQAADLKSTQAAIDQINGKLNRLIGKTNEKFHQIEKEFSEVEGRIQDLEKYVEDTKIDLWSYNAELLVALENQHTIDLTDSEMNKLFEKTKKQLRENAEDMGNGCFKIYHKCDNACIGSIRNGTYDHNVYRDEALNNRFQIKGVELKSGYKDWILWISFAISCFLLCVALLGFIMWACQKGNIRCNICI

SEQ ID NO: 13370 - protein, 566 aa, synthetic construct
  REGION 1..566: note = hemagglutinin__InfluenzaA__ALE31859
MKTIIALSYILCLVFAQKIPGNDNSTATLCLGHHAVPNGTIVKTITNDRIEVTNATELVQNSSIGEICDSPHQILDGENCTLIDALLGDPQCDGFQNKKWDLFVERSKAYSNCYPYDVPDYASLRSLVASSGTLEFNNESFNWTGVTQNGTSSACTRRSSSSFFSRLNWLTHLNYTYPALNVTMPNNEQFDKLYIWGVHHPGTDKDQIFLYAQSSGRITVSTKRSQQAVIPNIGSRPRIRDIPSRISIYWTIVKPGDMLLINSTGNLIAPRGYFKIRSGKSSIMRSDAPIGKCKSECITPNGSIPNDKPFQNVNRITYGACPRYVKHSTLKLATGMRNVPEKQTRGIFGAIAGFIENGWEGMVDGWYGFRHQNSEGRGQAADLKSTQAAIDQINGKLNRLIGKTNEKFHQIEKEFSEVEGRIQDLEKYVEDTKIDLWSYNAELLVALENQHTIDLTDSEMNKLFEKTKKQLRENAEDMGNGCFKIYHKCDNACIGSIRNGTYDHNVYRDEALNNRFQIKGVELKSGYKDWILWISFAISCFLLCVALLGFIMWACQKGNIRCNICI

SEQ ID NO: 13371 - protein, 566 aa, synthetic construct
  REGION 1..566: note = hemagglutinin__InfluenzaA__ALE31860
MKTIIALSYILCLVFAQKIPGNDNSTATLCLGHHAVPNGTIVKTITNDRIEVTNATELVQNSSIGKICDSPHQILDGENCTLIDALLGDPQCDGFQNKKWDLFVERSKAYSNCYPYDVPDYASLRSLVASSGTLEFNNESFNWTGVTQNGTSSACIRRSSSSFFSRLNWLTHLNYTYPALNVTMPNNEQFDKLYIWGVHHPGTDKDQIFLYAQSSGRITVSTKRSQQAVIPNIGSRPRIRDIPSRISIYWTIVKPGDILLINSTGNLIAPRGYFKIRSGESSIMRSDAPIGKCKSECITPNGSIPNDKPFQNVNRITYGACPRYVKHSTLKLATGMRNVPEKQTRGIFGAIAGFIENGWEGMVDGWYGFRHQNSEGRGQAADLKSTQAAIDQINGKLNRLIGKTNEKFHQIEKEFSEVEGRIQDLEKYVEDTKIDLWSYNAELLVALENQHTIDLTDSEMNKLFEKTKKQLRENAEDMGNGCFKIYHKCDNACIGSIRNGTYDHNVYRDEALNNRFQIKGVELKSGYKDWILWISFAISCFLLCVALLGFIMWACQKGNIRCNICI

SEQ ID NO: 13372 - protein, 566 aa, synthetic construct; identical to SEQ ID NO: 12441
  REGION 1..566: note = hemagglutinin__InfluenzaA__ALE31861

SEQ ID NO: 13373 - protein, 566 aa, synthetic construct
  REGION 1..566: note = hemagglutinin__InfluenzaA__ALE31862
MKMIIALSYILCLVFAQKIPGNDNSTATLCLGHHAVPNGTIVKTITNDRIEVTNATELVQNSSIGEICDSPHQILDGENCTLIDALLGDPQCDGFQNKKWDLFVERSKAYSNCYPYDVPDYASLRSLVASSGTLEFNNESFNWTGVTQNGTSSACIRKSSSSFFSRLNWLTHLNYTYPALNVTMPNNEQFDKLYIWGVHHPGTDKDQIFLYARSSGRITVSTKRSQQAVIPNIGSRPRIRDIPSRISIYWTIVKPGDILLINSTGNLIAPRGYFKIRSGKSSIMRSDAPIGKCKSECITPNGSIPNDKPFQNVNRITYGACPRYVKHSTLKLATGMRNVPEKQTRGIFGAIAGFIENGWEGMVDGWYGFRHQNSEGRGQAADLKSTQAAIDQINGKLNRLIGKTNEKFHQIEKEFSEVEGRIQDLEKYVEDTKIDLWSYNAEFLVALENQHTIDLTDSEMNKLFEKTKKQLRENAEDMGNGCFKIYHKCDNACIGSIRNGTYDHNVYRDEALNNRFQIKGVELKSGYKDWILWISFAISCFLLCVALLGFIMWACQKGNIRCNICI

SEQ ID NO: 13374 - protein, 566 aa, synthetic construct; identical to SEQ ID NO: 13099
  REGION 1..566: note = hemagglutinin__InfluenzaA__ALE31863

SEQ ID NO: 13375 - protein, 566 aa, synthetic construct; identical to SEQ ID NO: 13099
  REGION 1..566: note = hemagglutinin__InfluenzaA__ALE31865

SEQ ID NO: 13376 - protein, 566 aa, synthetic construct; identical to SEQ ID NO: 13099
  REGION 1..566: note = hemagglutinin__InfluenzaA__ALE31866

SEQ ID NO: 13377 - protein, 566 aa, synthetic construct
  REGION 1..566: note = hemagglutinin__InfluenzaA__ALE31867
MKTIIALSYILCLVFAQKIPGNDNSTATLCLGHHAVPNGTIVKTITNDRIEVTNATELVQNSSIGEICDSPHQILDGENCTLIDALLGDPQCDGFQNKKWDLFVERSKAYSNCYPYDVPDYASLRSLVASSGTLEFNNESFNWTGVTQNGTSSACIRKSSSSFFSRLNWLTHLNYTYPALNVTMPNNEQFDKLYIWGVHHPGTDKDQIFLYARSSGRITVSTKRSQQAVIPNIGSRPRIRDIPSRISIYWTIVKPGDILLINSTGNLIAPRGYFKIRSGKSSIMRSDAPIGKCKSECITPNGSIPNDKPFQNVNRITYGACPRYVKHSTLKLATGMRNVPEKQTRGIFGAIAGFIENGWEGMVDGWYGFRHQNSEGRGQAADLKSTQAAIDQINGKLNRLIGKTNEKFHQIEKEFSEVEGRIQDLEKYVEDTKIDLWSYNAELLVALENQHTIDLTDSEMNKLFEKTKKQLRENAEDMGNGCFKIYHKCDNACIGSIRNGTYDHNVYRDEALNNRFQIKGVELKSGYKDWILWISFAISCFLLCVALLGFIMWACQNGNIRCNICI

SEQ ID NO: 13378 - protein, 566 aa, synthetic construct; identical to SEQ ID NO: 12441
  REGION 1..566: note = hemagglutinin__InfluenzaA__ALE31868

SEQ ID NO: 13379 - protein, 566 aa, synthetic construct; identical to SEQ ID NO: 13377
  REGION 1..566: note = hemagglutinin__InfluenzaA__ALE31869

SEQ ID NO: 13380 - protein, 566 aa, synthetic construct; identical to SEQ ID NO: 13377
  REGION 1..566: note = hemagglutinin__InfluenzaA__ALE31870

SEQ ID NO: 13381 - protein, 566 aa, synthetic construct
  REGION 1..566: note = hemagglutinin__InfluenzaA__ALE31871
MKTIIALSYILCLVFAQKIPGNDNSTATLCLGHHAVPNGTIVKTITNDRIEVTNATELVQNSSIGEICNSPHQILDGENCTLIDALLGDPQCDGFQNKKWDLFVERSKAYSNCYPYDVPDYASLRSLVASSGTLEFNNESFNWTGVTQNGTSSACIRKSSSSFFSRLNWLTHLNYTYPALNVTMPNNEQFDKLYIWGVHHPGTDKDQIFLYARSSGRITVSTKRSQQAVIPNIGSRPRIRDIPSRISIYWTIVKPGDILLINSTGNLIAPRGYFKIRSGKSSIMRSDAPIGKCKSECITPNGSIPNDKPFQNVNRITYGACPRYVKHSTLKLATGMRNVPEKQTRGIFGAIAGFIENGWEGMVDGWYGFRHQNSEGRGQAADLKSTQAAIDQINGKLNRLIGKTNEKFHQIEKEFSEVEGRIQDLEKYVEDTKIDLWSYNAELLVALENQHTIDLTDSEMNKLFEKTKKQLRENAEDMGNGCFKIYHKCDNACIGSIRNGTYDHNVYRDEALNNRFQIKGVELKSGYKDWILWISFAISCFLLCVALLGFIMWACQKGNIRCNICI

SEQ ID NO: 13382 - protein, 566 aa, synthetic construct; identical to SEQ ID NO: 12427
  REGION 1..566: note = hemagglutinin__InfluenzaA__ALE31872

SEQ ID NO: 13383 - protein, 566 aa, synthetic construct; identical to SEQ ID NO: 12441
  REGION 1..566: note = hemagglutinin__InfluenzaA__ALE31873

SEQ ID NO: 13384 - protein, 566 aa, synthetic construct
  REGION 1..566: note = hemagglutinin__InfluenzaA__ALE31874
MKTIIALSYILCLVFAQKLPGNDNSAATLCLGHHAVPNGTIVKTITNDRIEVTNATELVQNSSIGEICDSPHQILDGENCTLIDALLGDPQCDGFQNKKWDLFVERSKAHSNCYPYDVPDYASLRSLVASSGTLEFNNESFNWAGVTQNGTSSSCIRGSNSSFFSRLNWLTHLNSKYPALNVTMPNNEQFDKLYIWGVHHPGTDKDQIFLYAQSSGRITVSTKRSQQAVIPNIGSRPRIRDIPSRISIYWTIVKPGDILLINSTGNLIAPRGYFKIRSGKSSIMRSDAPIGKCKSECITPNGSIPNDKPFQNVNRITYGACPRYVKQSTLKLATGMRNVPEKQTRGIFGAIAGFIENGWEGMVDGWYGFRHQNSEGRGQAADLKSTQAAIDQINGKLNRLIGKTNEKFHQIEKEFSEVEGRIQDLEKYVEDTKIDLWSYNAELLVALENQHTIDLTDSEMNKLFEKTKKQLRENAEDMGNGCFKIYHKCDNACIGSIRNGTYDHDVYRDEALNNRFQIKGVELKSGYKDWILWISFAISCFLLCVALLGFIMWACQKGNIRCNICI

SEQ ID NO: 13385 - protein, 566 aa, synthetic construct; identical to SEQ ID NO: 13384
  REGION 1..566: note = hemagglutinin__InfluenzaA__ALE31875

SEQ ID NO: 13386 - protein, 566 aa, synthetic construct; identical to SEQ ID NO: 13384
  REGION 1..566: note = hemagglutinin__InfluenzaA__ALE31876

SEQ ID NO: 13387 - protein, 566 aa, synthetic construct
  REGION 1..566: note = hemagglutinin__InfluenzaA__ALE31877
MKTIIALSYILCLVFAQKLPENDNSTATLCLGHHAVPNGTIVKTITSDRIEVTNATELVQNSSIGEICDSPHQILDGKNCTLIDALLGDPQCDGFQNKKWDLFVERSKAYSNCYPYDVPDYASLRSLVASSGTLEFNDESFNWAGVTQNGTSSACIRGSNSSFFSRLNWLTHSNFKYPALNVTMPNNEQFDKLYIWGVHHPGTDKDQIFLYAQSSGRITVSTKRSQQAVIPNIGSRPRIRNIPSRISIYWTIVKPGDILLINSTGNLIAPRGYFKIRSGKSSIMRSDAPIGKCKSECITPNGSIPNDKPFQNVNRITYGACPRYVKQSTLKLATGMRNVPEKQTRGIFGAIAGFIENGWEGMKDGWYGFRHQNSEGRGQAADLKSTQAAIDQINGKLNRLIGKTNEKFHQIEKEFSEVEGRIQDLEKYVEDTKIDLWSYNAELLVALENQHTIDLTDSEINKLFEKTKKQLRENAEDMGNGCFKIYHKCDNACIGSIRNGTYDHDVYRDEALNNRFQIKGVELKSGYKDWILWISFAISCFLLCVALLGFIMWACQKGNIRCNICI

SEQ ID NO: 13388 - protein, 566 aa, synthetic construct; identical to SEQ ID NO: 12441
  REGION 1..566: note = hemagglutinin__InfluenzaA__ALE31878

SEQ ID NO: 13389 - protein, 566 aa, synthetic construct; identical to SEQ ID NO: 12441
  REGION 1..566: note = hemagglutinin__InfluenzaA__ALE31879

SEQ ID NO: 13390 - protein, 566 aa, synthetic construct; identical to SEQ ID NO: 12441
  REGION 1..566: note = hemagglutinin__InfluenzaA__ALE31880

SEQ ID NO: 13391 - protein, 566 aa, synthetic construct
  REGION 1..566: note = hemagglutinin__InfluenzaA__ALE31881
MKTIIALSHILCLVFAQKIPGNDNSTATLCLGHHAVPNGTIVKTITNDRIEVTNATELVQNSSIGEICDSPHQILDGENCTLIDALLGDPQCDGFQNKKWDLFVERSKAYSNCYPYDVPDYASLRSLVASSGTLEFNNESFNWTGVTQNGTSSACIRRSSSSFFSRLNWLTHLNYTYPALNVTMPNNEQFDKLYIWGVHHPGTDKDQIFLYAQSSGRITVSTKRSQQAVIPNIGSRPRIRDIPSRISIYWTIVKPGDILLINSTGNLVAPRGYFKIRSGKSSIMRSDAPIGKCKSECITPNGSIPNDKPFQNVNRITYGACPRYVKHSTLKLATGMRNVPEKQTRGIFGAIAGFIENGWEGMVDGWYGFRHQNSEGRGQAADLKSTQAAIDQINGKLNRLIGKTNEKFHQIEKEFSEVEGRIQDLEKYVEDTKIDLWSYNAELLVALENQHTIDLTDSEMNKLFEKTKKQLRENAEDMGNGCFKIYHKCDNACIGSIRNGTYDHNVYRDEALNNRFQIKGIELKSGYKDWILWISFAISCFLLCVALLGFIMWACQKGNIRCNICI

SEQ ID NO: 13392 - protein, 566 aa, synthetic construct; identical to SEQ ID NO: 12441
  REGION 1..566: note = hemagglutinin__InfluenzaA__ALE31882

SEQ ID NO: 13393 - protein, 566 aa, synthetic construct; identical to SEQ ID NO: 12441
  REGION 1..566: note = hemagglutinin__InfluenzaA__ALE31888

SEQ ID NO: 13394 - protein, 566 aa, synthetic construct; identical to SEQ ID NO: 12441
  REGION 1..566: note = hemagglutinin__InfluenzaA__ALE31889

SEQ ID NO: 13395 - protein, 566 aa, synthetic construct; identical to SEQ ID NO: 13099
  REGION 1..566: note = hemagglutinin__InfluenzaA__ALE31890

SEQ ID NO: 13396 - protein, 566 aa, synthetic construct; identical to SEQ ID NO: 13099
  REGION 1..566: note = hemagglutinin__InfluenzaA__ALE31891

SEQ ID NO: 13397 - protein, 566 aa, synthetic construct; identical to SEQ ID NO: 12441
  REGION 1..566: note = hemagglutinin__InfluenzaA__ALE31892

SEQ ID NO: 13398 - protein, 566 aa, synthetic construct; identical to SEQ ID NO: 12441
  REGION 1..566: note = hemagglutinin__InfluenzaA__ALE31893

SEQ ID NO: 13399 - protein, 566 aa, synthetic construct; identical to SEQ ID NO: 13047
  REGION 1..566: note = hemagglutinin__InfluenzaA__ALE31894

SEQ ID NO: 13400 - protein, 566 aa, synthetic construct; identical to SEQ ID NO: 12427
  REGION 1..566: note = hemagglutinin__InfluenzaA__ALE31895

SEQ ID NO: 13401 - protein, 566 aa, synthetic construct; identical to SEQ ID NO: 12441
  REGION 1..566: note = hemagglutinin__InfluenzaA__ALE31896

SEQ ID NO: 13402 - protein, 566 aa, synthetic construct; identical to SEQ ID NO: 12441
  REGION 1..566: note = hemagglutinin__InfluenzaA__ALE31897

SEQ ID NO: 13403 - protein, 566 aa, synthetic construct; identical to SEQ ID NO: 12441
  REGION 1..566: note = hemagglutinin__InfluenzaA__ALE31898

SEQ ID NO: 13404 - protein, 566 aa, synthetic construct
  REGION 1..566: note = hemagglutinin__InfluenzaA__ALE31899
MKTIIALSYILCLVFAQKIPGNDNSTATLCLGHHAVPNGTIVKTITNDRIEVTNATELVQNSSIGEICDSPHQILDGENCTLIDALLGDPQCDGFQNKKWDLFVERSKAYSNCYPYDVPDYASLRSLVASSGTLEFNNESFNWTGVTQNGTSSACIRKSSSSFFSRLNWLTHLNYTYPALNVTMPNNEQFDKLYIWGVHHPGTDKDQIFLYARSSGRITVSTKRSQQAVIPNIGSRPRIRDIPSRISIYWTIVKPGDILLINSTGNLIAPRGYFKIRSGKSSMMRSDAPIGKCKSECITPNGSIPNDKPFQNVNRITYGACPRYVKHSTLKLATGMRNVPEKQTRGIFGAIAGFIENGWEGMVDGWYGFRHQNSEGRGQAADLKSTQAAIDQINGKLNRLIGKTNEKFHQIEKEFSEVEGRIQDLEKYVEDTKIDLWSYNAELLVALENQHTIDLTDSEMNKLFEKTKKQLRENAEDMGNGCFKIYHKCDNACIGSIRNGTYDHNVYRDEALNNRFQIKGVELKSGYKDWILWISFAISCFLLCVALLGFIMWACQKGNIRCNICI

SEQ ID NO: 13405 - protein, 566 aa, synthetic construct; identical to SEQ ID NO: 13047
  REGION 1..566: note = hemagglutinin__InfluenzaA__ALE31901

SEQ ID NO: 13406 - protein, 566 aa, synthetic construct
  REGION 1..566: note = hemagglutinin__InfluenzaA__ALE31902
MKTIIALSYILCLVFAQKIPGNDNSTATLCLGHHAVPNGTIVKTITNDRIEVTNATELVQNSSIGEICDSPHQILDGENCTLIDALLGDPQCDGFQNKKWDLFVERSKAYSNCYPYDVPDYASLRSLVASSGTLEFNNESFNWTGVTQNGTSSACIRRSSSSFFSRLNWLTHLNYTYPALNVTMPNNEQFDKLYIWGVHHPGTDKDQIFLYAQSSGRITVSTKRSQQAVIPNIGSRPRIRDIPSRISIYWTIVKPGDILLINSTGNLIAPRGYFKIRSGKSSIMRSDAPIGKCKSECITPNGSIPNDKPFQNVNRITYGACPRYVKHSTLKLATGMRNVPEKQTRGIFGAIAGFIENGWEGMVDGWYGFRHQNSEGRGQAADLKSTQAAIDQINGKLNRLIGKTNEKFHQIEKEFSEVEGRIQDLEKYVEDTKIDLWSYNAELLVALENQHTIDLTDSEMNKLFERTKKQLRENAEDMGNGCFKIYHKCDNACIGSIRNGTYDHNVYRDEALNNRFQIKGVELKSGYKDWILWISFAISCFLLCVALLGFIMWACQKGNIRCNICI

SEQ ID NO: 13407 - protein, 566 aa, synthetic construct; identical to SEQ ID NO: 12441
  REGION 1..566: note = hemagglutinin__InfluenzaA__ALE31903

SEQ ID NO: 13408 - protein, 566 aa, synthetic construct; identical to SEQ ID NO: 12441
  REGION 1..566: note = hemagglutinin__InfluenzaA__ALE31904

SEQ ID NO: 13409 - protein, 566 aa, synthetic construct
  REGION 1..566: note = hemagglutinin__InfluenzaA__ALE31905
MKTIIALGYILCLGFAQKIPGNDNSTATLCLGHHAVPNGTIVKTITNDRIEVTNATELVQNSSIGEICDSPHKILDGENCTLIDALLGDPQCDGFQNKKWDLFVERSKAYSNCYPYDVPDYASLRSLVASSGTLEFNNESFNWTGVTQNGTSSACIRRSSSSFFSRLNWLTHLNYTYPALNVTMPNNEQFDKLYIWGVHHPGTDKDQIFLYAQSSGRITVSTKRSQQAVIPNIGSRPRIRDIPSRISIYWTIVKPGDILLINSTGNLIAPRGYFKIRSGKSSIMRSDAPIGKCKSECITPNGSIPNDKPFQNVNRITYGACPRYVKHSTLKLATGMRNVPEKQTRGIFGAIAGFIENGWEGMVDGWYGFRHQNSEGRGQAADLKSTQAAIDQINGKLNRLIGKTNEKFHQIEKEFSEVEGRIQDLEKYVEDTKIDLWSYNAELLVALENQHTIDLTDSEMNKLFEKTKKQLRENAEDMGNGCFKIYHKCDNACIGSIRNGTYDHNVYRDEALNNRFQIKGVELKSGYKDWILWISFAISCFLLCVALLGFIMWACQKGNIRCNICI

SEQ ID NO: 13410 - protein, 566 aa, synthetic construct; identical to SEQ ID NO: 12441
  REGION 1..566: note = hemagglutinin__InfluenzaA__ALE31906

SEQ ID NO: 13411 - protein, 566 aa, synthetic construct
  REGION 1..566: note = hemagglutinin__InfluenzaA__ALE31907
MKTIIALSYILCLVFAQKIPGNDNSTATLCLGHHAVPNGTIVKTITNDRIEVTNATELVQNSSIGEICDSPHQILDGENCTLIDALLGDPQCDGFQNKKWDLFVERSKAYSNCYPYDVPDYASLRSLVASSGTLEFNNESFNWTGVTQNGTSSACIRRSSSSFFSRLNWLTHLNYKYPALNVTMPNNEQFDKLYIWGVHHPGTDKDQIFLYAQSSGRITVSTKRSQQAVIPNIGSRPRIRDIPSRISIYWTIVKSGDILLINSTGNLIAPRGYFKIRSGKSSIMRSDAPIGKCKSECITPNGSIPNDKPFQNVNRITYGACPRYVKHSTLKLATGMRNVPEKQTRGIFGAIAGFIENGWEGMVDGWYGFRHQNSEGRGQAADLKSTQAAIDQINGKLNRLIGKTNEKFHQIEKEFSEVEGRIQDLEKYVEDTKIDLWSYNAELLVALENQHTIDLTDSEMNKLFEKTKKQLRENAEDMGNGCFKIYHKCDNACIGSIRNGTYDHNVYRDEALNNRFQIKGVELKSGYKDWILWISFAISCFLLCVALLGFIMWACQKGNIRCNICI

SEQ ID NO: 13412 - protein, 566 aa, synthetic construct; identical to SEQ ID NO: 12441
  REGION 1..566: note = hemagglutinin__InfluenzaA__ALE31908

SEQ ID NO: 13413 - protein, 566 aa, synthetic construct
  REGION 1..566: note = hemagglutinin__InfluenzaA__ALE31909
MKTIIALSYILCLVFAQKIPGNDNSTATLCLGHHAVPNGTIVKTITNDRIEVTNATELVQNSSIGEICDSPHQILDGENCTLIDALLGDPQCDGFQNKKWDLFVERSKAYSNCYPYDVPDYASLRSLVASSGTLEFNNESFNWTGVTQNGTSSACIRRSSSSFFSRLNWLTHLNYTYPALNVTMPNNEQFDKLYIWGVHHPGTDKDQIFLYAQSSGRITVSTKRSQQAVIPNIGSRPRIRDIPSRISIYWTIVKSGDILLINSTGNLIAPRGYFKIRSGKSSIMRSDAPIGKCKSECITPNGSIPNDKPFQNVNRITYGACPRYVKHSTLKLATGMRNVPEKQTRGIFGAIAGFIENGWEGMVDGWYGFRHQNSEGRGQAADLKSTQAAIDQINGKLNRLIGKTNEKFHQIEKEFSEVEGRIQDLEKYVEDTKIDLWSYNAELLVALENQHTIDLTDSEMNKLFEKTKKQLRENAEDMGNGCFKIYHKCDNACIGSIRNGTYDHNVYRDEALNNRFQIKGVELKSGYKDWILWISFAISCFLLCVALLGFIMWACQKGNIRCNICI

SEQ ID NO: 13414 - protein, 566 aa, synthetic construct; identical to SEQ ID NO: 12441
  REGION 1..566: note = hemagglutinin__InfluenzaA__ALE31910

SEQ ID NO: 13415 - protein, 566 aa, synthetic construct; identical to SEQ ID NO: 13364
  REGION 1..566: note = hemagglutinin__InfluenzaA__ALE31912

SEQ ID NO: 13416 - protein, 566 aa, synthetic construct
  REGION 1..566: note = hemagglutinin__InfluenzaA__ALE31913
MKTIIALGYILCLVFAQKIPGNDNSTATLCLGHHAVPNGTIVKTITNDRIEVTNATELVQNSSIGEICDSPHKILDGENCTLIDALLGDPQCDGFQNKKWDLFVERSKAYSNCYPYDVPDYASLRSLVASSGTLEFNNESFNWTGVTQNGTSSACIRRSSSSFFSRLNWLTHLNYTYPALNVTMPNNEQFDKLYIWGVHHPGTDKDQIFLYAQSSGRITVSTKRSQQAVIPNIGSRPRIRDIPSRISIYWTIVKPGDILLINSTGNLIAPRGYFKIRSGKSSIMRSDAPIGKCKSECITPNGSIPNDKPFQNVNRITYGACPRYVKHSTLKLATGMRNVPEKQTRGIFGAIAGFIENGWEGMVDGWYGFRHQNSEGRGQAADLKSTQAAIDQINGKLNRLIGKTNEKFHQIEKEFSEVEGRIQDLEKYVEDTKIDLWSYNAELLVALENQHTIDLTDSEMNKLFEKTKKQLRENAEDMGNGCFKIYHKCDNACIESIRNGTYDHNVYRDEALNNRFQIKGVELKSGYKDWILWISFAISCFLLCVALLGFIMWACQKGNIRCNICI

SEQ ID NO: 13417 - protein, 566 aa, synthetic construct; identical to SEQ ID NO: 12441
  REGION 1..566: note = hemagglutinin__InfluenzaA__ALE31914

SEQ ID NO: 13418 - protein, 566 aa, synthetic construct
  REGION 1..566: note = hemagglutinin__InfluenzaA__ALE31915
MKTIIALSYILCLVFAQKIPGNDNSTATLCLGHHAVPNGTIVKTITNDRIEVTNATELVQNSSIGEICDSPHQILDGENCTLIDALLGDPQCDGFQNKKWDLFVERSKAYSNCYPYDVPEYASLRSLVASSGTLEFNNESFNWTGVTQNGTSSACIRRSSSSFFSRLNWLTHLNYTYPALNVTMPNNEQFDKLYIWGVHHPGTDKDQIFLYAQSSGRITVSTKRSQQAVIPNIGSRPRIRDIPSRISIYWTIVKPGDILLINSTGNLIAPRGYFKIRSGKSSIMRSDAPIGKCKSECITPNGSIPNDKPFQNVNRITYGACPRYVKHSTLKLATGMRNVPEKQTRGIFGAIAGFIENGWEGMVDGWYGFRHQNSEGRGQAADLKSTQAAIDQINGKLNRLIGKTNEKFHQIEKEFSEVEGRIQDLEKYVEDTKIDLWSYNAELLVALENQHTIDLTDSEMNKLFEKTKKQLRENAEDMGNGCFKIYHKCDNACIGSIRNGTYDHNVYRDEALNNRFQIKGVELKSGYKDWILWISFAISCFLLCVALLGFIMWACQKGNIRCNICI

SEQ ID NO: 13419 - protein, 566 aa, synthetic construct; identical to SEQ ID NO: 12441
  REGION 1..566: note = hemagglutinin__InfluenzaA__ALE31916

SEQ ID NO: 13420 - protein, 566 aa, synthetic construct; identical to SEQ ID NO: 12441
  REGION 1..566: note = hemagglutinin__InfluenzaA__ALE31917

SEQ ID NO: 13421 - protein, 566 aa, synthetic construct; identical to SEQ ID NO: 12974
  REGION 1..566: note = hemagglutinin__InfluenzaA__ALE31918

SEQ ID NO: 13422 - protein, 566 aa, synthetic construct; identical to SEQ ID NO: 13099
  REGION 1..566: note = hemagglutinin__InfluenzaA__ALE31920

SEQ ID NO: 13423 - protein, 566 aa, synthetic construct; identical to SEQ ID NO: 12441
  REGION 1..566: note = hemagglutinin__InfluenzaA__ALE31921

SEQ ID NO: 13424 - protein, 566 aa, synthetic construct; identical to SEQ ID NO: 12441
  REGION 1..566: note = hemagglutinin__InfluenzaA__ALE31922

SEQ ID NO: 13425 - protein, 566 aa, synthetic construct; identical to SEQ ID NO: 12985
  REGION 1..566: note = hemagglutinin__InfluenzaA__ALE31923

SEQ ID NO: 13426 - protein, 566 aa, synthetic construct; identical to SEQ ID NO: 12441
  REGION 1..566: note = hemagglutinin__InfluenzaA__ALE31924

SEQ ID NO: 13427 - protein, 566 aa, synthetic construct; identical to SEQ ID NO: 12441
  REGION 1..566: note = hemagglutinin__InfluenzaA__ALE31925

SEQ ID NO: 13428 - protein, 566 aa, synthetic construct
  REGION 1..566: note = hemagglutinin__InfluenzaA__ALE31926
MKTIIALSYILCLVFAQKIPGNDNSTATLCLGHHAVPNGTIVKTITNDRIEVTNATELVQNSSIGEICDSPHQILDGENCTLIDALLGDPQCDGFQNKKWDLFVERSKAYSNCYPYDVPDYASLRSLVASSGTLEFNNEGFNWTGVTQNGTSSACIRRSSSSFFSRLNWLTHLNYKYPALNVTMPNNEQFDKLYIWGVHHPGTDKDQIFLYAQSSGRITVSTKRSQQAVIPNIGSRPRIRDIPSRISIYWTIVKPGDILLINSTGNLIAPRGYFKIRSGKSSIMRSDAPIGKCKSECITPNGSIPNDKPFQNVNRITYGACPRYVKHSTLKLATGMRNVPEKQTRGIFGAIAGFIENGWEGMVDGWYGFRHQNSEGRGQAADLKSTQAAIDQINGKLNRLIGKTNEKFHQIEKEFSEVEGRIQDLEKYVEDTKIDLWSYNAELLVALENQHTIDLTDSEMNKLFEKTKKQLRENAEDMGNGCFKIYHKCDNACIGSIRNGTYDHNVYRDEALNNRFQIKGVELKSGYKDWILWISFAISCFLLCVALLGFIMWACQKGNIRCNICI

SEQ ID NO: 13429 - protein, 566 aa, synthetic construct; identical to SEQ ID NO: 12441
  REGION 1..566: note = hemagglutinin__InfluenzaA__ALE31927

SEQ ID NO: 13430 - protein, 566 aa, synthetic construct
  REGION 1..566: note = hemagglutinin__InfluenzaA__ALE31928
MKTIIALSYILCLVFAQKLPGNDNSTATLCLGHHAVPNGTIVKTITNDRIEVTNATELVQNSSIGEICDSPHQILDGENCTLIDALLGDPQCDGFQNKKWDLFVERSKAYSNCYPYDVPDYASLRSLVASSGTLEFNNESFNWAGVTQNGTSSACIRGSNSSFFSRLNWLTHSNFKYPALNVTMPNNEQFDKLYIWGVHHPGTDKDQIFLYAQSSGRITVSTKRSQQAVIPNIGSRPRIRDIPSRISIYWTIVKPGDILLINSTGNLIAPRGYFKIRSGKSSIMRSDAPIGKCKSECITPNGSIPNDKPFQNVNRITYGACPRYVKQSTLKLATGMRNVPEKQTRGIFGAIAGFIENGWEGMVDGWYGFRHQNSEGRGQAADLKSTQAAIDQINGKLNRLIGKTNEKFHQIEKEFSEVEGRIQDLEKYVEDTKIDLWSYNAELLVALENQHTIDLTDSEMNKLFEKTKKQLRENAEDMGNGCFKIYHKCDNACIGSIRNGTYDHDVYRDEALNNRFQIKGVELKSGYKDWILWISFAISCFLLCVALLGFIMWACQKGNIRCNICI

SEQ ID NO: 13431 - protein, 566 aa, synthetic construct; identical to SEQ ID NO: 13077
  REGION 1..566: note = hemagglutinin__InfluenzaA__ALE31930

SEQ ID NO: 13432 - protein, 566 aa, synthetic construct; identical to SEQ ID NO: 12441
  REGION 1..566: note = hemagglutinin__InfluenzaA__ALE31931

SEQ ID NO: 13433 - protein, 566 aa, synthetic construct; identical to SEQ ID NO: 12441
  REGION 1..566: note = hemagglutinin__InfluenzaA__ALE31932

SEQ ID NO: 13434 - protein, 566 aa, synthetic construct
  REGION 1..566: note = hemagglutinin__InfluenzaA__ALE31933
MKTIIALSYILCLVYAQKIPGNDNSTATLCLGHHAVPNGTIVKTITNDRIEVTNATELVQNSSIGEICDSPHQILDGENCTLIDALLGDPQCDGFQNKKWDLFVERSKAYSNCYPYDVPDYASLRSLVASSGTLEFNNESFNWTGVTQNGTSSACIRRSSSSFFSRLNWLTHLKYTYPALNVTMPNNEQFDKLYIWGVHHPGTDKDQIFLYAQSSGRITVSTKRSQQAVIPNIGSRPRIRDIPSRISIYWTIVKPGDILLINSTGNLIAPRGYFKIRSGKSSIMRSDAPIGKCKSECITPNGSIPNDKPFQNVNRITYGACPRYVKHSTLKLATGMRNVPEKQTRGIFGAIAGFIENGWEGMVDGWYGFRHQNSEGRGQAADLKSTQAAIDQINGKLNRLIGKTNEKFHQIEKEFSEVEGRIQDLEKYVEDTKIDLWSYNAELLVALENQHTIDLTDSEMNKLFEKTKKQLRENAEDMGNGCFKIYHKCDNACIGSIRNGTYDHNVYRDEALNNRFQIKGVELKSGYKDWILWISFAISCFLLCVALLGFIMWACQKGNIRCNICI

SEQ ID NO: 13435 - protein, 566 aa, synthetic construct
  REGION 1..566: note = hemagglutinin__InfluenzaA__ALE31934
MKTIIALSYILCLVFAQKIPGNDNSTATLCLGHHAVPNGTIVKTITNDRIEVTNATELVQNSSIGEICDSPHQILDGENCTLIDALLGDPQCDGFQNKKWDLFVERSKAYSNCYPYDVPDYASLRSLVASSGTLEFNNESFNWTGVTQNGTSSACIRKSSSSFFSRLNWLTHLNYTYQALNVTMPNNEQFDKLYIWGVHHPGTDKDQIFLYARSSGRITVSTKRSQQAVIPNIGSRPRIRDIPSRISIYWTIVKPGDILLINSTGNLIAPRGYFKIRSGKSSIMRSDAPIGKCKSECITPNGSIPNDKPFQNVNRITYGACPRYVKHSTLKLATGMRNIPEKQTRGIFGAIAGFIENGWEGMVDGWYGFRHQNSEGRGQAADLKSTQAAIDQINGKLNRLIGKTNEKFHQIEKEFSEVEGRIQDLEKYVEDTKIDLWSYNAELLVALENQHTIDLTDSEMNKLFEKTKKQLRENAEDMGNGCFKIYHKCDNACIGSIRNGTYDHNVYRDEALNNRFQIKGVELKSGYKDWILWISFAISCFLLCVALLGFIMWACQKGNIRCNICI

SEQ ID NO: 13436 - protein, 566 aa, synthetic construct; identical to SEQ ID NO: 12441
  REGION 1..566: note = hemagglutinin__InfluenzaA__ALE31935

SEQ ID NO: 13437 - protein, 566 aa, synthetic construct; identical to SEQ ID NO: 13223
  REGION 1..566: note = hemagglutinin__InfluenzaA__ALE31936

SEQ ID NO: 13438 - protein, 566 aa, synthetic construct
  REGION 1..566: note = hemagglutinin__InfluenzaA__ALE31937
MKTIIALSYILCLVFAQKLPENDNSTATLCLGHHAVPNGTIVKTITNDRIEVTNATELVQNSSIGEICDSPHQILDGENCTLIDALLGDPQCDGFQNKKWDLFVERSKAYSNCYPYDVPDYASLRSLVASSGTLEFNNESFNWAGVTQNGTSSSCIRGSNSSFFSRLNWLTHLNSKYPALNVTMPNNEQFDKLYIWGVHHPGTDKDQIFLYAQPSGRITVSTKRSQQAVIPNIGSRPRIRDIPSRISIYWTIVKPGDILLINSTGNLIAPRGYFKIRSGKSSIMRSDAPIGKCKSECITPNGSIPNDKPFQNVNRITYGACPRYVKQSTLKLATGMRNVPERQTRGIFGAIAGFIENGWEGMVDGWYGFRHQNSEGRGQAADLKSTQAAIDQINGKLNRLIGKTNEKFHQIEKEFSEVEGRIQDLEKYVEDTKIDLWSYNAELLVALENQHTIDLTDSEMNKLFEKTKKQLRENAEDMGNGCFKIYHKCDNACIGSIRNGTYDHDVYRDEALNNRFQIKGVELKSGYKDWILWISFAISCFLLCVALLGFIMWACQKGNIRCNICI

SEQ ID NO: 13439 - protein, 566 aa, synthetic construct; identical to SEQ ID NO: 12441
  REGION 1..566: note = hemagglutinin__InfluenzaA__ALE31938

SEQ ID NO: 13440 - protein, 566 aa, synthetic construct; identical to SEQ ID NO: 13047
  REGION 1..566: note = hemagglutinin__InfluenzaA__ALE31939

SEQ ID NO: 13441 - protein, 566 aa, synthetic construct; identical to SEQ ID NO: 12441
  REGION 1..566: note = hemagglutinin__InfluenzaA__ALE31941

SEQ ID NO: 13442 - protein, 566 aa, synthetic construct; identical to SEQ ID NO: 12998
  REGION 1..566: note = hemagglutinin__InfluenzaA__ALE31943

SEQ ID NO: 13443 - protein, 566 aa, synthetic construct
  REGION 1..566: note = hemagglutinin__InfluenzaA__ALE31944
MKTIIALSYILCLVFAQKLPENDNSTATLCLGHHAVPNGTIVKTITSDRIEVTNATELVQNSSIGEICDSPHQILDGKNCTLIDALLGDPQCDGFQNKKWDLFVERSKAYSNCYPYDVPDYASLRSLVASSGTLEFNDESFNWAGVTQNGTSSACIRGSNSSFFSRLNWLTHSNFKYPALNVTMPNNEQFDKLYIWGVHHPGTDKDQIFLYAQSSGRITVSTKRSQQAVIPNIGSRPRIRDIPSRISIYWTIVKPGDILLINSTGNLIAPRGYFKIRSGKSSIMRSDAPIGKCKSECITPNGSIPNDKPFQNVNRITYGACPRYVKQSTLKLATGMRNVPEKQTRGIFGAIAGFIENGWEGMKDGWYGFRHQNSEGRGQAADLKSTQAAIDQINGKLNRLIGKTNEKFHQIEKEFSEVEGRIQDLEKYVEDTKIDLWSYNAELLVALENQHTIDLTDSEMNKLFEKTKKQLRENAEDMGNGCFKIYHKCDNACIGSIRNGTYDHDVYRDEALNNRFQIKGVELKSGYKDWILWISFAISCFLLCVALLGFIMWACQKGNIRCNICI

SEQ ID NO: 13444 - protein, 566 aa, synthetic construct
  REGION 1..566: note = hemagglutinin__InfluenzaA__ALE31945
MKTIIALSYILCLVFAQKIPGNDNSTATLCLGHHAVPNGTIVKTITNDRIEVTNATELVQNSSIGEICDSPHQILDGENCTLIDALLGDPQCDGFQNKKWDLFVERSKAYSNCYPYDVPDYASLRSLVASSGTLEFNNESFNWTGVTQNGTSSACIRRSSSSFFSRLNWLTHLNYTYPALNVTMPNNEQFDKLYIWGVHHPGTDKDQIFLYAQSSGRITVSTKGSQQAVIPNVGSRPRIRDIPSRISIYWTIVKPGDILLINSTGNLIAPRGYFKIRSGKSSIMRSDAPIGKCKSECITPNGSIPNDKPFQNVNRITYGACPRYVKHSTLKLATGMRNVPEKQTRGIFGAIAGFIENGWEGMVDGWYGFRHQNSEGRGQAADLKSTQAAIDQINGKLNRLIGKTNEKFHQIEKEFSEVEGRIQDIEKYVEDTKIDLWSYNAELLVALENQHTIDLTDSEMNKLFEKTKKQLRENAEDMGNGCFKIYHKCDNACIGSIRNGTYDHNVYRDEALNNRFQIKGVELKSGYKDWILWISFAISCFLLCVALLGFIMWACQKGNIRCNICI

SEQ ID NO: 13445 - protein, 566 aa, synthetic construct; identical to SEQ ID NO: 13099
  REGION 1..566: note = hemagglutinin__InfluenzaA__ALE31946

SEQ ID NO: 13446 - protein, 566 aa, synthetic construct; identical to SEQ ID NO: 13099
  REGION 1..566: note = hemagglutinin__InfluenzaA__ALE31947

SEQ ID NO: 13447 - protein, 566 aa, synthetic construct
  REGION 1..566: note = hemagglutinin__InfluenzaA__ALE31948
MKTIIALSYILCLVFAQKIPGNDNSTATLCLGHHAVPNGTIVKTITNDRIEVTNATELVQNSSIGEICDSPHQILDGENCTLIDALLGDPQCDGFQNKKWDLFVERSKAYSNCYPYDVPDYASLRSLVASSGTLEFNNESFNWTGVTQNGTSSACIRKSSSSFFSRLNWLTHLNYTYPALNVTMPNNEQFDKLYIWGVHHPGTDKDQIFLYARSSGRITVSTKRSQQAVIPNIGSRPRIRDIPSRISIYWTIVKPGDILLINSTGNLIAPRGYFKIRSGKSSIMRSDAPIGKCKSECITPNGSIPNDKPFQNVNRITYGACPRYVKHSTLKLATGMRNVPEKQTRGIFGAIAGFIENGWEGMVDGWYGFRHQNSEGRGQAADLKSTQAAIDQINGKLNRLVGKTNEKFHQIEKEFSEVEGRIQDLEKYVEDTKIDLWSYNAEFLVALENQHTIDLTDSEMNKLFEKTKKQLRENAEDMGNGCFKIYHKCDNACIGSIRNGTYDHNVYRDEALNNRFQIKGVELKSGYKDWILWISFAISCFLLCVALLGFIMWACQKGNIRCNICI

SEQ ID NO: 13448 - protein, 566 aa, synthetic construct; identical to SEQ ID NO: 13099
  REGION 1..566: note = hemagglutinin__InfluenzaA__ALE31949

SEQ ID NO: 13449 - protein, 566 aa, synthetic construct; identical to SEQ ID NO: 12441
  REGION 1..566: note = hemagglutinin__InfluenzaA__ALE31950

SEQ ID NO: 13450 - protein, 566 aa, synthetic construct; identical to SEQ ID NO: 12985
  REGION 1..566: note = hemagglutinin__InfluenzaA__ALE31951

SEQ ID NO: 13451 - protein, 566 aa, synthetic construct; identical to SEQ ID NO: 12441
  REGION 1..566: note = hemagglutinin__InfluenzaA__ALE31952

SEQ ID NO: 13452 - protein, 566 aa, synthetic construct
  REGION 1..566: note = hemagglutinin__InfluenzaA__ALE31953
MKTIIALSYILCLVFAQKIPGNDNSTATLCLGHHAVPNGTIVKTITNDRIEVTNATELVQNSSIGEICDSPHQILDGENCTLIDALLGDPQCDGFQNKKWDLFVERSKAYSNCYPYDVPDYASLRSLVASSGTLEFNNESFNWTGVTQNGTSSACIRKSSSSFFSRLNWLTHLNYTYPALNVTMPNNEQFDKLYIWGVHHPGTDKDQIFLFARSSGRITVSTKRSQQAVIPNIGSRPRIRDIPSRISIYWTIVKPGDILLINSTGNLIAPRGYFKIRSGKSSIMRSDAPIGKCKSECITPNGSIPNDKPFQNVNRITYGACPRYVKHSTLKLATGMRNVPEKQTRGIFGAIAGFIENGWEGMVDGWYGFRHQNSEGRGQAADLKSTQAAIDQINGKLNRLIGKTNEKFHQIEKEFSEVEGRIQDLEKYVEDTKIDLWSYNAELLVALENQHTIDLTDSEMNKLFEKTKKQLRENAEDMGNGCFKIYHKCDNACIGSIRNGTYDHNVYRDEALNNRFQIKGVELKSGYKDWILWISFAISCFLLCVALLGFIMWACQKGNIRCNICI

SEQ ID NO: 13453 - protein, 566 aa, synthetic construct
  REGION 1..566: note = hemagglutinin__InfluenzaA__ALE31954
MKTIIALSYILCLVFAQKLPGNDNSTATLCLGHHAVPNGTIVKTITNDRIEVTNATELVQNSSIGEICDSPHQILDGKNCTLIDALLGDPQCDGFQNKRWDLFVERSKAYSNCYPYDVPDYASLRSLVASSGTLEFNDESFNWAGVTQNGTSSACIRGSNSSFFSRLNWLTHSNFKYPALNVTMPNNEQFDKLYIWGVHHPGTDKDQIFLYAHSSGRITVSTKRSQQAVIPNVGSRPRIRNIPSRISIYWTIVKPGDILLINSTGNLIAPRGYFKIQSGKSSIMRSDAPIGKCKSECITPNGSIPNDKPFQNVNRITYGACPRYVKQSTLKLATGMRNVPEKQTRGIFGAIAGFIENGWEGMKDGWYGFRHQNSEGRGQAADLKSTQAAIDQINGKLNRLVGKTNEKFHQIEKEFSEVEGRIQDLEKYVEDTKIDLWSYNAELLVALENQHTIDLTDSEMNKLFEKTKKQLRENAEDMGNGCFKIYHKCDNACIGSIRNGTYDHYVYRDEALNNRFQIKGVELKSGYKDWILWISFAISCFLLCVALLGFIMWACQKGNIRCNICI

SEQ ID NO: 13454 - protein, 566 aa, synthetic construct; identical to SEQ ID NO: 12441
  REGION 1..566: note = hemagglutinin__InfluenzaA__ALE31955

SEQ ID NO: 13455 - protein, 566 aa, synthetic construct
  REGION 1..566: note = hemagglutinin__InfluenzaA__ALE31956
MKTIIALSYILCLVFAQKIPGNDNSTATLCLGHHAVPNGTIVKTITNDRIEVTNATELVQNSSIGEICNSPHQILDGENCTLIDALLGDPQCDGFQNKKWDLFVERSKAYSNCYPYDVPDYASLRSLVASSGTLEFNNESFNWTGVTQNGTSSACIRRSSSSFFSRLNWLTHLNYTYPALNVTMPNNEQFDKLYIWGVHHPGTDKDQIFLYAQSSGRITVSTKRSQQAVIPNIGSRPRIRDIPSRISIYWTIVKPGDILLINSTGNLIAPRGYFKIRSGKSSIMRSDAPIGKCKSECITPNGSIPNDKPFQNVNRITYGACPRYVKHSTLKLATGMRNVPEKQTRGIFGAIAGFIENGWEGMVDGWYGFRHQNSEGRGQAADLKSTQAAIDQINGKLNRLIGKTNEKFHQIEKEFSEVEGRIQDLEKYVEDTKIDLWSYNAELLVALENQHTIDLTDSEMNKLFEKTKKQLRENAEDMGNGCFKIYHKCDNACIGSIRNGTYDHNVYRDEALNNRFQIKGVELKSGYKDWILWISFAISCFLLCVALLGFIMWACQKGNIRCNICI

SEQ ID NO: 13456 - protein, 566 aa, synthetic construct; identical to SEQ ID NO: 13047
  REGION 1..566: note = hemagglutinin__InfluenzaA__ALE31957

SEQ ID NO: 13457 - protein, 566 aa, synthetic construct
  REGION 1..566: note = hemagglutinin__InfluenzaA__ALE31958
MKTIIALSYILCLVFAQKIPGNDNSTATLCLGHHAVPNGTIVKTITNDRIEVTNATELVQNSSIGEICDSPHQILDGENCTLIDALLGDPQCDGFQNKKWDLFVERSKAYSNCYPYDVPDYASLRSLVASSGTLEFNNESFNWTGVTQNGTSSACIRRSSSSFFSRLNWLTHLNYTYPALNVTMPNNEQFDKLYIWGVHHPGTDKDQIFLYAQSSGRITVSTKRSQQAVIPNIGSKPRIRDIPSRISIYWTIVKPGDILLINSTGNLIAPRGYFKIRSGKSSIMRSDAPIGKCKSECITPNGSIPNDKPFQNVNRITYGACPRYVKHSTLKLATGMRNVPEKQTRGIFGAIAGFIENGWEGMVDGWYGFRHQNSEGRGQAADLKSTQAAIDQINGKLNRLIGKTNEKFHQIEKEFSEVEGRIQDLEKYVEDTKIDLWSYNAELLVALENQHTIDLTDSEMNKLFEKTKKQLRENAEDMGNGCFKIYHKCDNACIGSIRNGTYDHNVYRDEALNNRFQIKGVELKSGYKDWILWISFAISCFLLCVALLGFIMWACQKGNIRCNICI

SEQ ID NO: 13458 - protein, 566 aa, synthetic construct
  REGION 1..566: note = hemagglutinin__InfluenzaA__ALE31959
MKTIIALSYILCLVFAQKIPGNDNSTATLCLGHHAVPNGTIVKTITNDRIEVTNATELVQNSSIGEICDSPHQILDGENCTLIDALLGDPQCDGFQNKKWDLFVERSKAYSNCYPYDVPDYASLRSLVASSGTLEFNNESFNWTGVTQNGTSSACIRKSSSSFFSRLNWLTHLNYAYPALNVTMPNNEQFDKLYIWGVHHPGTDKDQIFLYARSSGRITVSTKRSQQAVIPNIGSRPRIRDIPSRISIYWTIVKPGDILLINSTGNLIAPRGYFKIRSGKSSIMRSDAPIGKCKSECITPNGSIPNDKPFQNVNRITYGACPRYVKHSTLKLATGMRNVPEKQTRGIFGAIAGFIENGWEGMVDGWYGFRHQNSEGRGQAADLKSTQAAIDQINGKLNRLIGKTNEKFHQIEKEFSEVEGRIQDLEKYVEDTKIDLWSYNAELLVALENQHTIDLTDSEMNKLFEKTKKQLRENAEDMGNGCFKIYHKCDNACIGSIRNGTYDHNVYRDEALNNRFQIKGVELKSGYKDWILWISFAISCFLLCVALLGFIMWACQKGNIRCNICI

SEQ ID NO: 13459 - protein, 566 aa, synthetic construct; identical to SEQ ID NO: 12441
  REGION 1..566: note = hemagglutinin__InfluenzaA__ALE31960

SEQ ID NO: 13460 - protein, 566 aa, synthetic construct; identical to SEQ ID NO: 12630
  REGION 1..566: note = hemagglutinin__InfluenzaA__ALE31961

SEQ ID NO: 13461 - protein, 566 aa, synthetic construct
  REGION 1..566: note = hemagglutinin__InfluenzaA__ALE31962
MKTIIALSYILCLVFAQKIPGNDNSTATLCLGHHAVPNGTIVKTITNDRIEVTNATELVQNSSIGEICDSPHQILDGENCTLIDALLGDPQCDGFQNKKWDLFVERSKAYSNCYPYDVPDYASLRSLVASSGTLEFNNESFNWTGVTQNGTSSACIRRSSSSFFSRLNWLTHLNYTYPALNVTMPNNEQFDKLYIWGVHHPGTDKDQIFLYAQSSGRITVSTKRSQQAVIPNIGSRPRIRDIPSRMSIYWTIVKPGDILLINSTGNLIAPRGYFKIRSGKSSIMRSDAPIGKCKSECITPNGSIPNDKPFQNVNRITYGACPRYVKHSTLKLATGMRNVPEKQTRGIFGAIAGFIENGWEGMVDGWYGFRHQNSEGRGQAADLKSTQAAIDQINGKLNRLIGKTNEKFHQIEKEFSEVEGRIQDLEKYVEDTKIDLWSYNAELLVALENQHTIDLTDSEMNKLFEKTKKQLRENAEDMGNGCFKIYHKCDNACIGSIRNGTYDHNVYRDEALNNRFQIKGVELKSGYKDWILWISFAISCFLLCVALLGFIMWACQKGNIRCNICI

SEQ ID NO: 13462 - protein, 566 aa, synthetic construct
  REGION 1..566: note = hemagglutinin__InfluenzaA__ALE31963
MKTIIALSYILCLVFAQKIPGNDNSTATLCLGHHAVPNGTIVKTITNDRIEVTNATELVQNSSIGEICDSPHQILDGENCTLIDALLGDPQCDGFQNKKWDLFVERSKAYSNCYPYDVPDYASLRSLVASSGTLEFNNESFNWTGVTQNGTSSACIRRSSSSFFSRLNWLTHLNYTYPALNVTMPNNEQFDKLYIWGVHHPGTDKDQTFLYAQSSGRITVSTKRSQQAVIPNIGSRPRIRDIPSRISIYWTIVKPGDILLINSTGNLIAPRGYFKIRSGKSSIMRSDAPIGKCKSECITPNGSIPNDKPFQNVNRITYGACPRYVKHSTLKLATGMRNVPEKQTRGIFGAIAGFIENGWEGMVDGWYGFRHQNSEGRGQAADLKSTQAAIDQINGKLNRLIGKTNEKFHQIEKEFSEVEGRIQDLEKYVEDTKIDLWSYNAELLVALENQHTIDLTDSEMNKLFEKTKKQLRENAEDMGNGCFKIYHKCDNACIGSIRNGTYNHNVYRDEALNNRFQIKGVELKSGYKDWILWISFAISCFLLCVALLGFIMWACQKGNIRCNICI

SEQ ID NO: 13463 - protein, 566 aa, synthetic construct
  REGION 1..566: note = hemagglutinin__InfluenzaA__ALE31964
MKTIIALSYILCLVFAQKIPGNDNSTATLCLGHHAVPNGTIVKTITNDRIEVTNATELVQNSSIGEICDSPHQILDGENCTLIDALLGDPQCDGFQNKKWDLFVERSKAYSNCYPYYVPDYASLRSLVASSGTLEFNNESFNWTGVTQNGTSSACIRRSSSSFFSRLNWLTHLNYTYPALNVTMPNNEQFDKLYIWGVHHPGTDKDQIFLYAQSSGRITVSTKRSQQAVIPNIGSRPRIRDIPSRISIYWTIVKPGDILLINSTGNLIAPRGYFKIQSGKSSIMRSDAPIGKCKSECITPNGSIPNDKPFQNVNRITYGACPRYVKHSTLKLATGMRNVPEKQTRGIFGAIAGFIENGWEGMVDGWYGFRHQNSEGRGQAADLKSTQAAIDQINGKLNRLIGKTNEKFHQIEKEFSEVEGRIQDLEKYVEDTKIDLWSYNAELLVALENQHTIDLTDSEMNKLFEKTKKQLRENAEDMGNGCFKIYHKCDNACIGSIRNGTYDHNVYRDEALNNRFQIKGVELKSGYKDWILWISFAISCFLLCVALLGFIMWACQKGNIRCNICI

SEQ ID NO: 13464 - protein, 566 aa, synthetic construct; identical to SEQ ID NO: 12441
  REGION 1..566: note = hemagglutinin__InfluenzaA__ALE31965

SEQ ID NO: 13465 - protein, 566 aa, synthetic construct; identical to SEQ ID NO: 13099
  REGION 1..566: note = hemagglutinin__InfluenzaA__ALE31966

SEQ ID NO: 13466 - protein, 566 aa, synthetic construct; identical to SEQ ID NO: 13369
  REGION 1..566: note = hemagglutinin__InfluenzaA__ALE31967

SEQ ID NO: 13467 - protein, 566 aa, synthetic construct; identical to SEQ ID NO: 12985
  REGION 1..566: note = hemagglutinin__InfluenzaA__ALE31968

SEQ ID NO: 13468 - protein, 566 aa, synthetic construct; identical to SEQ ID NO: 13092
  REGION 1..566: note = hemagglutinin__InfluenzaA__ALE31969

SEQ ID NO: 13469 - protein, 566 aa, synthetic construct; identical to SEQ ID NO: 12441
  REGION 1..566: note = hemagglutinin__InfluenzaA__ALE31970

SEQ ID NO: 13470 - protein, 566 aa, synthetic construct
  REGION 1..566: note = hemagglutinin__InfluenzaA__ALE31971
MKTIIALSYILCLVFAQKIPGNDNSTATLCLGHHAVPNGTIVKTITNDRIEVTNATELVQNSSIGEICDSPHQILDGENCTLIDALLGDPQCDGFQNKKWDLFVERSKAYSNCYPYDVPDYASLRSLVASSGTLEFNNESFNWTGVTQNGTSSACIRRSSSSFFSRLNWLTHLNYAYPALNVTMPNNEQFDKLYIWGVHHPGTDKDQIFLYAQSSGRITVSTKGSQQAVIPNIGSRPRIRDIPSRISIYWTIVKPGDILLINSTGNLIAPRGYFKIRSGKSSIMRSDAPIGKCKSECITPNGSIPNDKPFQNVNRITYGACPRYVKHSTLKLATGMRNVPEKQTRGIFGAIAGFIENGWEGMVDGWYGFRHQNSEGRGQAADLKSTQAAIDQINGKLNRLIGKTNEKFHQIEKEFSEVEGRIQDLEKYVEDTKIDLWSYNAELLVALENQHTIDLTDSEMNKLFEKTKKQLRENAEDMGNGCFKIYHKCDNACIGSIRNGTYDHNVYRDEALNNRFQIKGVELKSGYKDWILWISFAISCFLLCVALLGFIMWACQKGNIRCNICI

SEQ ID NO: 13471 - protein, 566 aa, synthetic construct; identical to SEQ ID NO: 12985
  REGION 1..566: note = hemagglutinin__InfluenzaA__ALE31972

SEQ ID NO: 13472 - protein, 566 aa, synthetic construct; identical to SEQ ID NO: 12985
  REGION 1..566: note = hemagglutinin__InfluenzaA__ALE31973

SEQ ID NO: 13473 - protein, 566 aa, synthetic construct; identical to SEQ ID NO: 12630
  REGION 1..566: note = hemagglutinin__InfluenzaA__ALE31974

SEQ ID NO: 13474 - protein, 566 aa, synthetic construct; identical to SEQ ID NO: 12985
  REGION 1..566: note = hemagglutinin__InfluenzaA__ALE31975

SEQ ID NO: 13475 - protein, 566 aa, synthetic construct; identical to SEQ ID NO: 12441
  REGION 1..566: note = hemagglutinin__InfluenzaA__ALE31976

SEQ ID NO: 13476 - protein, 566 aa, synthetic construct; identical to SEQ ID NO: 12441
  REGION 1..566: note = hemagglutinin__InfluenzaA__ALE31977

SEQ ID NO: 13477 - protein, 566 aa, synthetic construct
  REGION 1..566: note = hemagglutinin__InfluenzaA__ALE31978
MKTIIALSYILCLVFAQKIPGNDNSTATLCLGHHAVPNGTIVKTITNDRIEVTNATELVQNSSIGEICDSPHQILDGENCTLIDALLGDPQCDGFQNKKWDLFVERSKAYSNCYPYDVPDYASLRSLVASSGTLEFNNESFNWTGVTQNGTSSACIRKSSSSFFSRLNWLTHLNYTYPALNVTMPNNEQFDKLYIWGVHHPGTDKDQIFLYARSSGRITVSTKRSQQAVIPNIGSRPRIRDIPSRISIYWTIVKPGDILLIHSTGNLIAPRGYFKIRSGKSSIMRSDAPIGKCKSECITPNGSIPNDKPFQNVNRITYGACPRYVKHSTLKLATGMRNVPEKQTRGIFGAIAGFIENGWEGMVDGWYGFRHQNSEGRGQAADLKSTQAAIDQINGKLNRLIGKTNEKFHQIEKEFSEVEGRIQDLEKYVEDTKIDLWSYNAELLVALENQHTIDLTDSEMNKLFEKTKKQLRENAEDMGNGCFKIYHKCDNACIGSIRNGTYDHNVYRDEALNNRFQIKGVELKSGYKDWILWISFAISCFLLCVALLGFIMWACQKGNIRCNICI

SEQ ID NO: 13478 - protein, 566 aa, synthetic construct; identical to SEQ ID NO: 12441
  REGION 1..566: note = hemagglutinin__InfluenzaA__ALE31979

SEQ ID NO: 13479 - protein, 566 aa, synthetic construct
  REGION 1..566: note = hemagglutinin__InfluenzaA__ALE31980
MKTIIALSYILCLVFAQKIPGNDNSTATLCLGHHAVPNGTIVKTITNDRIEVTNATELVQNSSIGEICDSPHQILDGENCTLIDALLGDPQCDGFQNKKWDLFVERSKAYSNCYPYDVPDYASLRSLVASSGTLEFNNESFNWTGVTQNGTSSACIRRSSSSFFSRLNWLTHLNYTYPALNVTMPNNEQFDKLYIWGVHHPGTDKDQIFLYAQSSGRITVSTKRSQQAVIPNIGSRPRIRDIPSRISIYWTIVKPGDILLINSTGNLIAPRGYFKIRSGKSSIMRSDAPIGKCKSECITPNGSIPNDKPFQNVNRITYGACPRYVKHSTLKLATGMRNVPEKQTRGIFGAIAGFIENGWEGMVDGWYGFRHQNSEGRGQAADLKSTQAAIDQINGKLNRLIGKTNEKFHQIEKEFSEVEGRIQDLEKYVEDTKIDLWSYNAELLVALENQHTIDLTDSEMNKLFEKTKKQLRENAEDMGNGCFKIYHKCDNACIGSIRNGTYDHNVYRDEALNNRFQIKGVELKSEYKDWILWISFAISCFLLCVALLGFIMWACQKGNIRCNICI

SEQ ID NO: 13480 - protein, 566 aa, synthetic construct; identical to SEQ ID NO: 12441
  REGION 1..566: note = hemagglutinin__InfluenzaA__ALE31981

SEQ ID NO: 13481 - protein, 566 aa, synthetic construct; identical to SEQ ID NO: 12981
  REGION 1..566: note = hemagglutinin__InfluenzaA__ALE31995

SEQ ID NO: 13482 - protein, 566 aa, synthetic construct
  REGION 1..566: note = hemagglutinin__InfluenzaA__ALE31996
MKTIIALSYILCLVFAQKIPGNDNSTATLCLGHHAVPNGTIVKTITNDRIEVTNATELVQNSSIGEICDSPHQILDGENCTLIDALLGDPQCDGFQNKKWDLFVERSKAYSNCYPYDVPDYASLRSLVASSGTLEFNNESFNWTGVTQNGTSSACIRRSSSSFFSRLNWLTHLNYTYPALNVTMPNNEQFDKLYIWGVHHPGTDKDQIFLYAQSSGRITVSTKRSQQAVIPNIGSRPRIRDIPSRISIYWTIVKPGDILLINSTGNLIAPRGYFKIRSGKSSIMRSDAPIGKCKSECITPNGSIPNDKPFQNVNRVTYGACPRYVKHSTLKLATGMRNVPEKQTRGIFGAIAGFIENGWEGMVDGWYGFRHQNSEGRGQAADLKSTQAAIDQINGKLNRLIGKTNEKFHQIEKEFSEVEGRIQDLEKYVEDTKIDLWSYNAELLVALENQHTIDLTDSEMNKLFEKTKKQLRENAEDMGNGCFKIYHKCDNACIGSIRNGTYDHNVYRDEALNNRFQIKGVELKSGYKDWILWISFAISCFLLCVALLGFIMWACQKGNIRCNICI

SEQ ID NO: 13483 - protein, 566 aa, synthetic construct
  REGION 1..566: note = hemagglutinin__InfluenzaA__ALE31997
MKTIIALSYILCLVFAQKIPGNDNSTATLCLGHHAVPNGTIVKTITNDRIEVTNATELVQNSSIGEICDSPHQILDGENCTLIDALLGDPQCDGFQNKKWDLFIERSKAYSNCYPYDVPDYASLRSLVASSGTLEFNNESFNWTGVTQNGTSSACIRRSSSSFFSRLNWLTHLNYTYPALNVTMPNNEQFDKLYIWGVHHPGTDKDQIFLYAQSSGRITVSTKRSQQAVIPNIGSRPRIRDIPSRISIYWTIVKPGDILLINSTGNLIAPRGYFKIRSGKSSIMRSDAPIGKCKSECITPNGSIPNDKPFQNVNRITYGACPRYVKHSTLKLATGMRNVPEKQTRGIFGAIAGFIENGWEGMVDGWYGFRHQNSEGRGQAADLKSTQAAIDQINGKLNRLIGKTNEKFHQIEKEFSEVEGRIQDLEKYVEDTKIDLWSYNAELLVALENQHTIDLTDSEMNKLFEKTKKQLRENAEDMGNGCFKIYHKCDNACIGSIRNGTYDHNVYRDEALNNRFQIKGVELKSGYKDWILWISFAISCFLLCVALLGFIMWACQKGNIRCNICI

SEQ ID NO: 13484 - protein, 566 aa, synthetic construct; identical to SEQ ID NO: 12441
  REGION 1..566: note = hemagglutinin__InfluenzaA__ALE31998

SEQ ID NO: 13485 - protein, 566 aa, synthetic construct
  REGION 1..566: note = hemagglutinin__InfluenzaA__ALE31999
MKTIIALSYILCLVFAQKIPGNDNSTATLCLGHHAVPNGTIVKTITNDRIEVTNATELVQNSSIGEICDSPHQILDGENCTLIDALLGDPQCDGFQNKKWDLFVERSKAYSNCYPYDVPDYASLRSLVASSGTLEFNNESFNWTGVTQNGTSSACIRRSSSSFFSRLNWLTHLHYTYPALNVTMPNNEQFDKLYIWGVHHPGTDKDQIFLYAQSSGRITVSTKRSQQAVIPNIGSRPRIRDIPSRISIYWTIVKPGDILLINSTGNLIAPRGYFKIRSGKSSIMRSDAPIGKCKSECITPNGSIPNDKPFQNVNRITYGACPRYVKHSTLKLATGMRNVPEKQTRGIFGAIAGFIENGWEGMVDGWYGFRHQNSEGRGQAADLKSTQAAIDQINGKLNRLIGKTNEKFHQIEKEFSEVEGRIQDLEKYVEDTKIDLWSYNAELLVALENQHTIDLTDSEMNKLFEKTKKQLRENAEDMGNGCFKIYHKCDNACIGSIRNGTYDHNVYRDEALNNRFQIKGVELKSGYKDWILWISFAISCFLLCVALLGFIMWACQKGNIRCNICI

SEQ ID NO: 13486 - protein, 566 aa, synthetic construct
  REGION 1..566: note = hemagglutinin__InfluenzaA__ALE32000
MKTIIALSHILCLVFAQKLPENDNSTATLCLGHHAVPNGTIVKTITSDRIEVTNATELVQNSSIGEICDSPHQILDGKNCTLIDALLGDPQCDGFQNKKWDLFVERSKAYSNCYPYDVPDYASLRSLVASSGTLEFNDESFNWAGVTQNGTSSACIRGSNSSFFSRLNWLTHSNFKYPALNVTMPNNEQFDKLYIWGVHHPGTDKDQIFLYAQSSGRITVSTKRSQQAVIPNIGSRPRIRNIPSRISIYWTIVKPGDILLINSTGNLIAPRGYFKIRSGKSSIMRSDAPIGKCKSECITPNGSIPNDKPFQNVNRITYGACPRYVKQSTLKLATGMRNVPEKQTRGIFGAIAGFIENGWEGMKDGWYGFRHQNSEGRGQAADLKSTQAAIDQINGKLNRLIGKTNEKFHQIEKEFSEVEGRIQDLEKYVEDTKIDLWSYNAELLVALENQHTIDLTDSEMNKLFEKTKKQLRENAEDMGNGCFKIYHKCDNACIGSIRNGTYDHDVYRDEALNNRFQIKGVELKSGYKDWILWISFAISCFLLCVALLGFIMWACQKGNIRCNICI

SEQ ID NO: 13487 - protein, 566 aa, synthetic construct; identical to SEQ ID NO: 12441
  REGION 1..566: note = hemagglutinin__InfluenzaA__ALE32001

SEQ ID NO: 13488 - protein, 566 aa, synthetic construct; identical to SEQ ID NO: 12441
  REGION 1..566: note = hemagglutinin__InfluenzaA__ALE32002

SEQ ID NO: 13489 - protein, 566 aa, synthetic construct; identical to SEQ ID NO: 12541
  REGION 1..566: note = hemagglutinin__InfluenzaA__ALE32003

SEQ ID NO: 13490 - protein, 566 aa, synthetic construct; identical to SEQ ID NO: 12441
  REGION 1..566: note = hemagglutinin__InfluenzaA__ALE32004

SEQ ID NO: 13491 - protein, 566 aa, synthetic construct; identical to SEQ ID NO: 12441
  REGION 1..566: note = hemagglutinin__InfluenzaA__ALE32005

SEQ ID NO: 13492 - protein, 566 aa, synthetic construct; identical to SEQ ID NO: 12985
  REGION 1..566: note = hemagglutinin__InfluenzaA__ALE32006

SEQ ID NO: 13493 - protein, 566 aa, synthetic construct; identical to SEQ ID NO: 12441
  REGION 1..566: note = hemagglutinin__InfluenzaA__ALE32007

SEQ ID NO: 13494 - protein, 566 aa, synthetic construct; identical to SEQ ID NO: 12992
  REGION 1..566: note = hemagglutinin__InfluenzaA__ALE32008

SEQ ID NO: 13495 - protein, 566 aa, synthetic construct
  REGION 1..566: note = hemagglutinin__InfluenzaA__ALE32009
MKTIIALSYILCLVFAQKLPENDNSTATLCLGHHAVPNGTIVKTITSDRIEVTNATELVQNSSIGEICDSPHQILDGKNCTLIDALLGDPQCDGFQNKKWDLFVERSKAYSNCYPYDVPDYASLRSLVASSGTLEFNDESFNWAGVTQNGTSSACIRGSNSSFFSRLNWLTHSNFKYPALNVTMPNNEQFDKLYIWGVHHPGTDKDQIFLYAQSSGRITVSTKRSQQAVIPNIGSRPRIRNIPSRISIYWTIVKPGDILLINSTGNLIAPRGYFKIRSGKSSIMRSDAPIGKCKSECITPNGSIPNDKPFQNVNRITYGACPRYVKQSTLKLATGMRNVPEKQTRGIFGAIAGFIENGWEGMKDGWYGFRHQNSEGRGQAADLKSTQAAIDQINGKLNRLIGKTNEKFHQIEKEFSEVEGRIQDLEKYVEDTKIDLWSYNAELLVALENQHTIVLTDSEMNKLFEKTKKQLRENAEDMGNGCFKIYHKCDNACIGSIRNGTYDHDVYRDEALNNRFQIKGVELKSGYKDWILWISFAISCFLLCVALLGFIMWACQEGNIRCNICI

SEQ ID NO: 13496 - protein, 566 aa, synthetic construct
  REGION 1..566: note = hemagglutinin__InfluenzaA__ALE32010
MKTIIALSYILCLAFAQKIPGNDNSTATLCLGHHAVPNGTIVKTITNDRIEVTNATELVQNSSIGEICDSPHQILDGENCTLIDALLGDPQCDGFQNKKWDLFVERSKAYSNCYPYDVPDYASLRSLVASSGTLEFNNESFNWTGVTQNGTSSACIRRSSSSFFSRLNWLTHLHYTYPALNVTMPNNEQFDKLYIWGVHHPGTDKDQIFLYAQSSGRITVSTKRSQQAVIPNIGSRPRIRDIPSRISIYWTIVKPGDILLINSTGNLIAPRGYFKIRSGKSSIMRSDAPIGKCKSECITPNGSIPNDKPFQNVNRITYGACPRYVKHSTLKLATGMRNVPEKQTRGIFGAIAGFIENGWEGMVDGWYGFRHQNSEGRGQAADLKSTQAAIDQINGKLNRLIGKTNEKFHQIEKEFSEVEGRIQDLEKYVEDTKIDLWSYNAELLVALENQHTIDLTDSEMNKLFEKTKKQLRENAEDMGNGCFKIYHKCDNACIGSIRNGTYDHNVYRDEALNNRFQIKGVELKSGYKDWILWISFAISCFLLCVALLGFIMWACQKGNIRCNICI

SEQ ID NO: 13497 - protein, 566 aa, synthetic construct; identical to SEQ ID NO: 13455
  REGION 1..566: note = hemagglutinin__InfluenzaA__ALE32011

SEQ ID NO: 13498 - protein, 566 aa, synthetic construct; identical to SEQ ID NO: 12998
  REGION 1..566: note = hemagglutinin__InfluenzaA__ALE32012

SEQ ID NO: 13499 - protein, 566 aa, synthetic construct; identical to SEQ ID NO: 12441
  REGION 1..566: note = hemagglutinin__InfluenzaA__ALE32013

SEQ ID NO: 13500 - protein, 566 aa, synthetic construct
  REGION 1..566: note = hemagglutinin__InfluenzaA__ALE32014
MKTIIALSYILCLVFAQKIPGNDNSTATLCLGHHAVPNGTIVKTITNDRIEVTNATELVQNSSIGEICDSPHQILDGENCTLIDALLGDPQCDGFQNKKWDLFVERSKAYSNCYPYDVPDYASLRSLVASSGTLEFNNESFNWTGVTQNGTSSACIRKSSSSFFSRLNWLTQLNYTYPALNVTMPNNEQFDKLYIWGVHHPGTDKDQIFLYAQSSGRITVSTKRSQQAVIPNIGSRPRIRDIPSRISIYWTIVKPGDILLINSTGNLIAPRGYFKIRSGKSSIMRSDAPIGKCKSECITPNGSIPNDKPFQNVNRITYGACPRYVKHSTLKLATGMRNVPEKQTRGIFGAIAGFIENGWEGMVDGWYGFRHQNSEGRGQAADLKSTQAAIDQINGKLNRLIGKTNEKFHQIEKEFSEVEGRIQDLEKYVEDTKIDLWSYNAELLVALENQHTIDLTDSEMNKLFEKTKKQLRENAEDMGNGCFKIYHKCDNACIGSIRNGTYDHNVYRDEALNNRFQIKGVELKSGYKDWILWISFAISCFLLCVALLGFIMWACQKGNIRCNICI

SEQ ID NO: 13501 - protein, 566 aa, synthetic construct; identical to SEQ ID NO: 13326
  REGION 1..566: note = hemagglutinin__InfluenzaA__ALE32015

SEQ ID NO: 13502 - protein, 566 aa, synthetic construct; identical to SEQ ID NO: 12441
  REGION 1..566: note = hemagglutinin__InfluenzaA__ALE32016

SEQ ID NO: 13503 - protein, 566 aa, synthetic construct; identical to SEQ ID NO: 12441
  REGION 1..566: note = hemagglutinin__InfluenzaA__ALE32017

SEQ ID NO: 13504 - protein, 566 aa, synthetic construct; identical to SEQ ID NO: 12441
  REGION 1..566: note = hemagglutinin__InfluenzaA__ALE32018

SEQ ID NO: 13505 - protein, 566 aa, synthetic construct; identical to SEQ ID NO: 12985
  REGION 1..566: note = hemagglutinin__InfluenzaA__ALE32020

SEQ ID NO: 13506 - protein, 566 aa, synthetic construct; identical to SEQ ID NO: 13092
  REGION 1..566: note = hemagglutinin__InfluenzaA__ALE32021

SEQ ID NO: 13507 - protein, 566 aa, synthetic construct; identical to SEQ ID NO: 13172
  REGION 1..566: note = hemagglutinin__InfluenzaA__ALE32022

SEQ ID NO: 13508 - protein, 566 aa, synthetic construct; identical to SEQ ID NO: 12441
  REGION 1..566: note = hemagglutinin__InfluenzaA__ALE32023

SEQ ID NO: 13509 - protein, 566 aa, synthetic construct
  REGION 1..566: note = hemagglutinin__InfluenzaA__ALE32024
MKTIIALSYILCLVFAQKLPGNDNSTATLCLGHHAVPNGTIVKTITNDRIEVTNATELVQNSSIGEICDSPHQILDGKNCTLIDALLGDPQCDGFQNKRWDLFVERSKAYSNCYPYDVPDYASLRSLVASSGTLEFNDESFNWAGVTQNGKSSACIRGSNSSFFSRLNWLTHSNFKYPALNVTMPNNEQFDKLYIWGVHHPGTDKDQIFLYAHSSGRITVSTKRSQQAVIPNIGSRPRIRNIPSRISIYWTIVKPGDILLINSTGNLIAPRGYFKIQSGKSSIMRSDAPIGKCKSECITPNGSIPNDKPFQNVNRITYGTCPRYVKQSTLKLATGMRNVPEKQTRGIFGAIAGFIENGWEGMKDGWYGFRHQNSEGRGQAADLKSTQAAIDQINGKLNRLIGKTNEKFHQIEKEFSEVEGRIQDLEKYVEDTKIDLWSYNAELLVALENQHTIDLTDSEMNKLFEKTKKQLRENAEDMGNGCFKIYHKCDNACIGSIRNGTYDHYVYRDEALNNRFQIKGVELKSGYKDWILWISFAISCFLLCVALLGFIMWACQKGNIRCNICI

SEQ ID NO: 13510 - protein, 566 aa, synthetic construct
  REGION 1..566: note = hemagglutinin__InfluenzaA__ALE32025
MKTIIALSYILCLVFAQKIPGNDNSTATLCLGHHAVPNGTIVKTITNDRIEVTNATELVQNSSIGEICDSPHQILDGENCTLIDALLGDPQCDGFQNKKWDLFVERSKAYSNCYPYDVPDYASLRSLVASSGTLEFNNESFNWTGVTQNGTSSACIRKSSSSFFSRLNWLTHLNYTYPALNVTMPNNEQFDKLYIWGVHHPGTDKDQIFLYARSSGRITVSTKRSQQAVIPNIGSRPRIRDIPSRISIYWTIVKSGDILLINSTGNLIAPRGYFKIRSGKSSIMRSDAPIGKCKSECITPNGSIPNDKPFQNVNRITYGACPRYVKHSTLKLATGMRNVPEKQTRGIFGAIAGFIENGWEGMVDGWYGFRHQNSEGRGQAADLKSTQAAIDQINGKLNRLIGKTNEKFHQIEKEFSEVEGRIQDLEKYVEDTKIDLWSYNAELLVALENQHTIDLTDSEMSKLFEKTKKQLRENAEDMGNGCFKIYHKCDNACIGSIRNGTYDHNVYRDEALNNRFQIKGVELKSGYKDWILWISFAISCFLLCVALLGFIMWACQKGNIRCNICI

SEQ ID NO: 13511 - protein, 566 aa, synthetic construct; identical to SEQ ID NO: 12441
  REGION 1..566: note = hemagglutinin__InfluenzaA__ALE32026

SEQ ID NO: 13512 - protein, 566 aa, synthetic construct; identical to SEQ ID NO: 12985
  REGION 1..566: note = hemagglutinin__InfluenzaA__ALE32027

SEQ ID NO: 13513 - protein, 566 aa, synthetic construct
  REGION 1..566: note = hemagglutinin__InfluenzaA__ALE32028
MKTIIALSHILCLVFAQKIPGNDNSTATLCLGHHAVPNGTIVKTITNDRIEVTNATELVQNSSIGEICDSPHQILDGENCTLIDALLGDPQCDGFQNKKWDLFVERSKAYSNCYPYDVPDYASLRSLVASSGTLEFNNESFNWTGVTQNGTSSACIRRSSSSFFSRLNWLTHLNYTYPALNVTMPNNEQFDKLYIWGVHHPGTDKDQIFLYAQSSGRITVSTKRSQQAVIPNIGSRPRIRDIPSRISIYWTIVKPGDILLINSTGNLIAPRGYFKIRSGKSSIMRSDAPIGKCKSECITPNGSIPNDKPFQNVNRITYGACPRYVKHSTLKLATGMRNVPEKQTRGIFGAIAGFIENGWEGMMDGWYGFRHQNSEGRGQAADLKSTQAAIDQINGKLNRLIGKTNEKFHQIEKEFSEVEGRIQDLEKYVEDTKIDLWSYNAELLVALENQHTIDLTDSEMNKLFEKTKKQLRENAEDMGNGCFKIYHKCDNACIGSIRNGTYDHNVYRDEALNNRFQIKGVELKSGYKDWILWISFAISCFLLCVALLGFIMWACQKGNIRCNICI

SEQ ID NO: 13514 - protein, 566 aa, synthetic construct; identical to SEQ ID NO: 13092
  REGION 1..566: note = hemagglutinin__InfluenzaA__ALE32029

SEQ ID NO: 13515 - protein, 566 aa, synthetic construct
  REGION 1..566: note = hemagglutinin__InfluenzaA__ALE32030
MKTIIALSHILCLVFAQKIPGNDNSTATLCLGHHAVPNGTIVKTITNDRIEVTNATELVQNSSIGEICDSPHQILDGENCTLIDALLGDPQCDGFQNKKWDLFVERSKAYSNCYPYDVPDYASLRSLVASSGTLEFNNESFNWTGVTQNGTSSACIRRSSSSFFSRLNWLTHLNYIYPALNVTMPNNEQFDKLYIWGVHHPGTDKDQIFLYAQSSGRITVSTKRSQQAVIPNIGSRPRIRDIPSRISIYWTIVKPGDILLINSTGNLIAPRGYFKIRSGKSSIMRSDAPIGKCKSECITPNGSIPNDKPFQNVNRITYGACPRYVKHSTLKLATGMRNVPEKQTRGIFGAIAGFIENGWEGMMDGWYGFRHQNSEGRGQAADLKSTQAAIDQINGKLNRLIGKTNEKFHQIEKEFSEVEGRIQDLEKYVEDTKIDLWSYNAELLVALENQHTIDLTDSEMNKLFEKTKKQLRENAEDMGNGCFKIYHKCDNACIGSIRNGTYDHNVYRDEALNNRFQIKGVELKSGYKDWILWISFAISCFLLCVALLGFIMWACQKGNIRCNICI

SEQ ID NO: 13516 - protein, 566 aa, synthetic construct
  REGION 1..566: note = hemagglutinin__InfluenzaA__ALE32031
MKTIIALSYILCLVFAQKIPGNDNSTATLCLGHHAVPNGTIVKTITNDRIEVTNATELVQNSSIGEICDSPHQILDGENCTLIDALLGDPQCDGFQNKKWDLFVERSKAYSNCYPYDVPDYASLRSLVASSGTLEFNNESFNWTGVTQNGTSSACIRRSSSSFFSRLNWLTHLNYTYPALNVTMPNNEQFDKLYIWGVHHPGTDKDQIFLYAQSSGRITVSTKRSQQAVIPNIGSRPRIRDIPSRISIYWTIVKPGDILLINSTGNLIAPRGYFKIRSGKSSIMRSDAPIGKCKSECITPNGSIPNDKPFQNVNRITYGACPRYVKHSTLKLATGMRNVPEKQTRGIFGAIAGFIENGWEGMMDGWYGFRHQNSEGRGQAADLKSTQAAIDQINGKLNRLIGKTNEKFHQIEKEFSEVEGRIQDLEKYVEDTKIDLWSYNAELLVALENQHTIDLTDSEMNKLFEKTKKQLRENAEDMGNGCFKIYHKCDNACIGSIRNGTYDHNVYRDEALNNRFQIKGVELKSGYKDWILWISFAISCFLLCVALLGFIMWACQKGNIRCNICI

SEQ ID NO: 13517 - protein, 566 aa, synthetic construct
  REGION 1..566: note = hemagglutinin__InfluenzaA__ALE32032
MKTIIALSYILCLVFAQKIPGNDNSTATLCLGHHAVPNGTIVKTITNDRIEVTNATELVQNSSIGEICDSPHQILDGENCTLIDALLGDPQCDGFQNKKWDLFVERSKAYSNCYPYDVPDYASLRSLVASSGTLEFNNESFNWTGVTQNGTSSACIRRSSSSFFSRLNWLTHLNYTYPALNVTMPNNEQFDKLYIWGVHHPGTDKDQIFLYAQSSGRIAVSTKRSQQAVIPNIGSRPRIRDIPSRISIYWTIVKPGDILLINSTGNLIAPRGYFKIRSGKSSIMRSDAPIGKCKSECITPNGSIPNDKPFQNVNRITYGACPRYVKHSTLKLATGMRNVPEKQTRGIFGAIAGFIENGWEGMMDGWYGFRHQNSEGRGQAADLKSTQAAIDQINGKLNRLIGKTNEKFHQIEKEFSEVEGRIQDLEKYVEDTKIDLWSYNAELLVALENQHTIDLTDSEMNKLFEKTKKQLRENAEDMGNGCFKIYHKCDNACIGSIRNGTYDHNVYRDEALNNRFQIKGVELKSGYKDWILWISFAISCFLLCVALLGFIMWACQKGNIRCNICI

SEQ ID NO: 13518 - protein, 566 aa, synthetic construct; identical to SEQ ID NO: 12441
  REGION 1..566: note = hemagglutinin__InfluenzaA__ALE32033

SEQ ID NO: 13519 - protein, 566 aa, synthetic construct
  REGION 1..566: note = hemagglutinin__InfluenzaA__ALE32034
MKTIIALGYILCLVFAQKIPGNDNSTATLCLGHHAVPNGTIVKTITNDRIEVTNATELVQNSSIGEICDSPHKILDGENCTLIDALLGDPQCDGFQNKKWDLFVERSKAYSNCYPYDVPDYASLRSLVASSGTLEFNNESFNWTGVTQNGTSSACIRRSSSSFFSRLNWLTHLKYTYPALNVTMPNNEQFDKLYIWGVHHPGTDKDQIFLYAQSSGRITVSTKRSQQAVIPNIGSRPRIRDIPSRISIYWTIVKPGDILLINSTGNLIAPRGYFKIRSGKSSIMRSDAPIGKCKSECITPNGSIPNDKPFQNVNRITYGACPRYVKHSTLKLATGMRNVPEKQTRGIFGAIAGFIENGWEGMVDGWYGFRHQNSEGRGQAADLKSTQAAIDQINGKLNRLIGKTNEKFHQIEKEFSEVEGRIQDLEKYVEDTKIDLWSYNAELLVALENQHTIDLTDSEMNKLFEKTKKQLRENAEDMGNGCFKIYHKCDNACIGSIRNGTYDHNVYRDEALNNRFQIKGVELKSGYKDWILWISFAISCFLLCVALLGFIMWACQKGNIRCNICI

SEQ ID NO: 13520 - protein, 566 aa, synthetic construct; identical to SEQ ID NO: 13331
  REGION 1..566: note = hemagglutinin__InfluenzaA__ALE32035

SEQ ID NO: 13521 - protein, 566 aa, synthetic construct
  REGION 1..566: note = hemagglutinin__InfluenzaA__ALE32036
MKTIIALGYILCLVFAQKIPGNDNSTATLCLGHHAVPNGTIVKTITNDRIEVTNATELVQNSSIGEICDSPHKILDGENCTLIDALLGDPQCDGFQNKKWDLFVERSKAYSNCYPYDVPDYASLRSLVASSGTLEFNNESFNWTGVTQNGTSSACIRRSSSSFFSRLNWLTHLHYTYPALNVTMPNNEQFDKLYIWGVHHPGTDKDQIFLYAQSSGRITVSTKRSQQAVIPNIGSRPRIRDIPSRISIYWTIVKPGDILLINSTGNLIAPRGYFKIRSGKSSIMRSDAPIGKCKSECITPNGSIPNDKPFQNVNRITYGACPRYVKHSTLKLATGMRNVPEKQTRGIFGAIAGFIENGWEGMVDGWYGFRHQNSEGRGQAADLKSTQAAIDQINGKLNRLIGKTNEKFHQIEKEFSEVEGRIQDLEKYVEDTKIDLWSYNAELLVALENQHTIDLTDSEMNKLFEKTKKQLRENAEDMGNGCFKIYHKCDNACIGSIRNGTYDHNVYRDEALNNRFQIKGVELKSGYKDWILWISFAISCFLLCVALLGFIMWACQKGNIRCNICI

SEQ ID NO: 13522 - protein, 566 aa, synthetic construct
  REGION 1..566: note = hemagglutinin__InfluenzaA__ALE32037
MKTIIALSYILCLVFAQKIPGNDNSTATLCLGHHAVPNGTIVKTITNDRIEVTNATELVQNSSIGEICDSPHQILDGENCTLIDALLGDPQCDGFQNKKWDLFVERSKAYSNCYPYDVPDYASLRSLVASSGTLEFNNESFNWTGVTQNGTSSACIRRSSSSFFSRLNWLTHLNYKYPALNVTMPNNEQFDKLYIWGVHHPGTDKDQIFLYAQSSGRITVSTKRSQQAVIPNIGSRPRIRDIPSRISIYWTIVKPGDILLINSTGNLIAPRGYFKILSGKSSIMRSDAPIGKCKSECITPNGSIPNDKPFQNVNRITYGACPRYVKHSTLKLATGMRNVPEKQTRGIFGAIAGFIENGWEGMVDGWYGFRHQNSEGRGQAADLKSTQAAIDQINGKLNRLIGKTNEKFHQIEKEFSEVEGRIQDLEKYVEDTKIDLWSYNAELLVALENQHTIDLTDSEMNKLFEKTKKQLRENAEDMGNGCFKIYHKCDNACIGSIRNGTYDHNVYRDEALNNRFQIKGVELKSGYKDWILWISFAISCFLLCVALLGFIMWACQKGNIRCNICI

SEQ ID NO: 13523 - protein, 566 aa, synthetic construct
  REGION 1..566: note = hemagglutinin__InfluenzaA__ALE32038
MKTIIALSYILCLVFAQKIPGNDNSTATLCLGHHAVPNGTIVKTITNDRIEVTNATELVQNSSIGEICDSPHQILDGENCTLIDALLGDPQCDGFQNKKWDLFVERSKAYSNCYPYDVPDYASLRSLVASSGTLEFNNESFNWTGVTQNGTSSACIRRSSSSFFSRLNWLTHLNYTYPALNVTMPNNEQFDKLYIWGVHHPGTDKDQIFLYAQSSGRITVSTKRSQQAVIPNIGSRPRIRDIPSRISIYWTIVKPGDILLINSKGNLIAPRGYFKIRSGKSSIMRSDAPIGKCKSECITPNGSIPNDKPFQNVNRITYGACPRYVKHSTLKLATGMRNVPEKQTRGIFGAIAGFIENGWEGMVDGWYGFRHLNSEGRGQAADLKSTQAAIDQINGKLNRLIGKTNEKFHQIEKEFSEVEGRIQDLEKYVEDTKIDLWSYNAELLVALENQHTIDLTDSEMNKLFEKTKKQLRENAEDMGNGCFKIYHKCDNACIGSIRNGTYDHNVYRDEALNNRFQIKGVELKSGYKDWILWISFAISCFLLCVALLGFIMWACQKGNIRCNICI

SEQ ID NO: 13524 - protein, 566 aa, synthetic construct; identical to SEQ ID NO: 13099
  REGION 1..566: note = hemagglutinin__InfluenzaA__ALE32039

SEQ ID NO: 13525 - protein, 566 aa, synthetic construct
  REGION 1..566: note = hemagglutinin__InfluenzaA__ALE32040
MKTIIALSYILCLVFAQKIPGNDNSTATLCLGHHAVPNGTIVKTITNDRIEVTNATELVQNSSIGEICDSPHQILDGENCTLIDALLGDPQCDGFQNKKWDLFVERSKAYSNCYPYDVPDYASLRSLVASSGTLEFNNESFNWTGVTQNGTSSACIRRSSSSFFSRLNWLTHLNYTYPALNVTMPNNEQFDKLYIWGVHHPGTDKDQIFLYAQSSGRITVSTKRSQQAVIPNIGSRPRIRDIPSRISIYWTIVKPGDILLINSTGNLIAPRGYFKIRSGTSSIMRSDAPIGKCKSECITPNGSIPNDKPFQNVNRITYGACPRYVKHSTLKLATGMRNVPEKQTRGIFGAIAGFIENGWEGMVDGWYGFRHQNSEGRGQAADLKSTQAAIDQINGKLNRLIGKTNEKFHQIEKEFSEVEGRIQDLEKYVEDTKIDLWSYNAELLVALENQHTIDLTDSEMNKLFEKTKKQLRENAEDMGNGCFKIYHKCDNACIGSIRNGTYDHNVYRDEALNNRFQIKGVELKSGYKDWILWISFAISCFLLCVALLGFIMWACQKGNIRCNICI

SEQ ID NO: 13526 - protein, 566 aa, synthetic construct; identical to SEQ ID NO: 12441
  REGION 1..566: note = hemagglutinin__InfluenzaA__ALE32041

SEQ ID NO: 13527 - protein, 566 aa, synthetic construct; identical to SEQ ID NO: 12441
  REGION 1..566: note = hemagglutinin__InfluenzaA__ALE32042

SEQ ID NO: 13528 - protein, 566 aa, synthetic construct
  REGION 1..566: note = hemagglutinin__InfluenzaA__ALE32043
MKTIIALSYILCLVFAQKIPGNDNSTATLCLGHHAVPNGTIVKTITNDRIEVTNATELVQNSSIGEICDSPHQILDGENCTLIDALLGDPQCDGFQNKKWDLFVERSKAYSNCYPYDVPDYTSLRSLVASSGTLEFNNESFNWTGVTQNGTSSACIRRSSSSFFSRLNWLTHLNYTYPALNVTMPNNEQFDKLYIWGVHHPGTDKDQIFLYAQSSGRITVSTKRSQQAVIPNIGSRPRIRDIPSRISIYWTIVKPGDILLINSTGNLIAPRGYFKIRSGKSSIMRSDAPIGKCKSECITPNGSIPNDKPFQNVNRITYGACPRYVKHSTLKLATGMRNVPEKQTRGIFGAIAGFIENGWEGMVDGWYGFRHQNSEGRGQAADLKSTQAAIDQINGKLNRLIGKTNEKFHQIEKEFSEVEGRIQDLEKYVEDTKIDLWSYNAELLVALENQHTIDLTDSEMNKLFEKTKKQLRENAEDMGNGCFKIYHKCDNACIGSIRNGTYDHNVYRDEALNNRFQIKGVELKSGYKDWILWISFAISCFLLCVALLGFIMWACQKGNIRCNICI

SEQ ID NO: 13529 - protein, 566 aa, synthetic construct; identical to SEQ ID NO: 12441
  REGION 1..566: note = hemagglutinin__InfluenzaA__ALE32044

SEQ ID NO: 13530 - protein, 566 aa, synthetic construct; identical to SEQ ID NO: 12441
  REGION 1..566: note = hemagglutinin__InfluenzaA__ALE32045

SEQ ID NO: 13531 - protein, 566 aa, synthetic construct; identical to SEQ ID NO: 12441
  REGION 1..566: note = hemagglutinin__InfluenzaA__ALE32046

SEQ ID NO: 13532 - protein, 566 aa, synthetic construct
  REGION 1..566: note = hemagglutinin__InfluenzaA__ALE32047
MKTIIALSYILCLVFAQKIPGNDNSTATLCLGHHAVPNGTIVKTITNDRIEVTNATELVQNSSIGEICDSPHQVLDGENCTLIDALLGDPQCDGFQNKKWDLFVERSKAYSNCYPYDVPDYASLRSLVASSGTLEFNNESFNWTGVTQNGTSSACIRRSSSSFFSRLNWLTHLNYTYPALNVTMPNNEQFDKLYIWGVHHPGTDKDQIFLYAQSSGRITVSTKRSQQAVIPNIGSRPRIRDIPSRISIYWTIVKPGDILLINSTGNLIAPRGYFKIRSGKSSIMISDAPIGKCKSECITPNGSIPSDKPFQNVNRITYGACPRYVKHSTLKLATGMRNVPEKQTRGIFGAIAGFIENGWEGMVDGWYGFRHQNSEGRGQAADLKSTQAAIDQINGKLNRLIGKTNEKFHQIEKEFSEVEGRIQDLEKYVEDTKIDLWSYNAELLVALENQHTIDLTDSEMNKLFEKTKKQLRENAEDMGNGCFKIYHKCDNACIGSIRNGTYDHNVYRDEALNNRFQIKGVELKSGYKDWILWISFAISCFLLCVALLGFIMWACQKGNIRCNICI

SEQ ID NO: 13533 - protein, 566 aa, synthetic construct; identical to SEQ ID NO: 12441
  REGION 1..566: note = hemagglutinin__InfluenzaA__ALE32048

SEQ ID NO: 13534 - protein, 566 aa, synthetic construct; identical to SEQ ID NO: 13099
  REGION 1..566: note = hemagglutinin__InfluenzaA__ALE32049

SEQ ID NO: 13535 - protein, 566 aa, synthetic construct
  REGION 1..566: note = hemagglutinin__InfluenzaA__ALE32050
MKTIIALSYILCLVFAQKIPGNDNSTATLCLGHHAVPNGTIVKTITNDRIEVTNATELVQNSSIGEICDSPHQILDGENCTLIDALLGDPQCDGFQNKKWDLFVERSKAYSNCYPYDVPDYASLRSLVASSGTLEFNNESFNWTGVTQDGTSSACIRRSSSSFFSRLNWLTHLNYTYPALNVTMPNNEQFDKLYIWGVHHPGTDKDQIFLYAQSSGRITVSTKRSQQAVIPNIGSRPRIRDIPSRISIYWTIVKPGDILLINSTGNLIAPRGYFKIRSGKSSIMRSDAPIGKCKSECITPNGSIPNDKPFQNVNRITYGACPRYVKHSTLKLATGMRNVPEKQTRGIFGAIAGFIENGWEGMVDGWYGFRHQNSEGRGQAADLKSTQAAIDQINGKLNRLIGKTNEKFHQIEKEFSEVEGRIQDLEKYVEDTKIDLWSYNAELLVALENQHTIDLTDSEMNKLFEKTKKQLRENAEDMGNGCFKIYHKCDNACIGSIRNGTYDHNVYRDEALNNRFQIKGVELKSGYKDWILWISFAISCFLLCVALLGFIMWACQKGNIRCNICI

SEQ ID NO: 13536 - protein, 566 aa, synthetic construct
  REGION 1..566: note = hemagglutinin__InfluenzaA__ALE32051
MKTIIALSYILCLVFAQKIPGNDNSTATLCLGHHAVPNGTIVKTITNDRIEVTNATELVQNSSIGEICDSPHQILDGENCTLIDALLGDPQCDGFQNKKWDLFVERSKAYSNCYPYDVPDYASLRSLVASSGTLEFNNESFNWTGVTQNGTSSACIRRSSSSFFSRLNWLTHLNYTYPALNVTMPNNEQFDKLYIWGVHHPGTDKDQIFLYAQSSGRITVSTKRSQQAVIPNIGSRPRIRDIPSRISIYWTIVKPGDILLINSTGNLIAPRGYFKIRSGKSSIMRSDAPIGKCKSECITPNGSIPNDKPFQNVNRVTYGACPRYVKHSTLKLATGMRNVPEKQTRGIFGAIAGFIENGWEGMVDGWYGFRHQNSEGRGQAADLKSTQAAIDQINGKLNRLIGKTNEKFHQIEKEFSEVEGRIQDLEKYVEDTKIDLWSYNAELLVALENQHTIDLTDSEMNKLFEKTKKQLRENAEDMGNGCFKIYHKCDNACIGSIRNGTYDHNVYRDEALINRFQIKGVELKSGYKDWILWISFAISCFLLCVALLGFIMWACQKGNIRCNICI

SEQ ID NO: 13537 - protein, 566 aa, synthetic construct; identical to SEQ ID NO: 12441
  REGION 1..566: note = hemagglutinin__InfluenzaA__ALE32052

SEQ ID NO: 13538 - protein, 566 aa, synthetic construct; identical to SEQ ID NO: 12441
  REGION 1..566: note = hemagglutinin__InfluenzaA__ALE32053

SEQ ID NO: 13539 - protein, 566 aa, synthetic construct
  REGION 1..566: note = hemagglutinin__InfluenzaA__ALE32054
MKTIIALSYILCLVFAQKIPGNDNSTATLCLGHHAVPNGTIVKTITNDRIEVTNATELVQNSSIGEICESPHQILDGENCTLIDALLGDPQCDGFQNKKWDLFVERSKAYSNCYPYDVPDYASLRSLVASSGTLEFNNESFNWTGVTQNGTSSACIRRSSSSFFSRLNWLTHLNYTYPALNVTMPNNEQFDKLYIWGVHHPGTDKDQIFLYAQSSGRITVSTKGSQQAVIPNIGSRPRIRDIPSRISIYWTIVKPGDILLINSTGNLIAPRGYFKIRSGKSSIMRSDAPIGKCKSECITPNGSIPNDKPFQNVNRITYGACPRYVKHSTLKLATGMRNVPEKQTRGIFGAIAGFIENGWEGMVDGWYGFRHQNSEGRGQAADLKSTQAAIDQINGKLNRLIGKTNEKFHQIEKEFSEVEGRIQDLEKYVEDTKIDLWSYNAELLVALENQHTIDLTDSEMNKLFEKTKKQLRENAEDMGNGCFKIYHKCDNACIGSIRNGTYDHNVYRDEALNNRFQIKGVELKSGYKDWILWISFAISCFLLCVALLGFIMWACQKGNIRCNHCI

SEQ ID NO: 13540 - protein, 566 aa, synthetic construct
  REGION 1..566: note = hemagglutinin__InfluenzaA__ALE32055
MKTIIALSYILCLVFAQKIPGNDNSTATLCLGHHAVPNGTIVKTITNDRIEVTNATELVQNSSIGEICDSPHQILDGENCTLIDALLGDPQCDGFQNKKWDLFVERSKAYSNCYPYDVPDYASLRSLVASSGTLEFNNESFNWTGVTQNGTSSACIRRSSSSFFSRLNWLTHLNYKYPALNVTMPNNEQFDKLYIWGVHHPGTDKDQIFLYAQSSGRITVSTKRSQQAVIPNIGSRPRIRDIPSRISIYWTIVKPGDILLINSTGNLIAPRGYFKIRSGKSSIMRSDAPIGKCKSECITPNGSIPNDKPFQNVNRITYGACPRYVKHSTLKLATGMRNVPEKQTRGIFGAIAGFIENGWEGMVDGWYGFRHQNSEGRGQAADLKSTQAAIDQINGKLNRLIGKTNEKFHQIEKEFSEVEGRIQDLEKYVEDTKIDLWSYNAELLVALENQHTIDLTDSEMNKLFEKTKKQLRENAEDMGNGCFKIYHKCDNACIGSIRNGTYDHNVYRDEALNNRFQIKGVELKSGYKDWILWISFAISCFLLCVALLGFIMWACQNGNIRCNICI

SEQ ID NO: 13541 - protein, 566 aa, synthetic construct; identical to SEQ ID NO: 13092
  REGION 1..566: note = hemagglutinin__InfluenzaA__ALE32056

SEQ ID NO: 13542 - protein, 566 aa, synthetic construct
  REGION 1..566: note = hemagglutinin__InfluenzaA__ALE32057
MKTIIALSYVLCLVFAQKIPGNDNSTATLCLGHHAVPNGTIVKTITNDRIEVTNATELVQNSSIGEICDSPHQILDGENCTLIDALLGDPQCDGFQNKKWDLFVERSKAYSNCYPYDVPDYASLRSLVASSGTLEFNNESFNWTGVTQNGTSSACIRRSSSSFFSRLNWLTHLNYTYPALNVTMPNNEQFDKLYIWGVHHPGTDKDQIFLYAQSSGRITVSTKRSQQAVIPNIGSRPRIRDIPSRISIYWTIVKPGDILLINSTGNLIAPRGYFKIRSGKSSIMRSDAPIGKCKSECITPNGSIPNDKPFQNVNRITYGACPRYVKHSTLKLATGMRNVPEKQTRGIFGAIAGFIENGWEGMVDGWYGFRHQNSEGRGQAADLKSTQAAIDQINGKLNRLIGKTNEKFHQIEKEFSEVEGRIQDLEKYVEDTKIDLWSYNAELLVALENQHTIDLTDSEMNKLFEKTKKQLRENAEDMGNGCFKIYHKCDNACIGSIRNGTYDHNVYRDEALNNRFQIKGVELKSGYKDWILWISFAISCFLLCVALLGFIMWACQKGNIRCNICI

SEQ ID NO: 13543 - protein, 566 aa, synthetic construct; identical to SEQ ID NO: 12441
  REGION 1..566: note = hemagglutinin__InfluenzaA__ALE32058

SEQ ID NO: 13544 - protein, 566 aa, synthetic construct; identical to SEQ ID NO: 12441
  REGION 1..566: note = hemagglutinin__InfluenzaA__ALE32059

SEQ ID NO: 13545 - protein, 566 aa, synthetic construct
  REGION 1..566: note = hemagglutinin__InfluenzaA__ALE32060
MKTIIALSYILCLVFAQKIPGNDNSTATLCLGHHAVPNGTIVKTITNDRIEVTNATELVQNSSIGEICDSPHQILDGENCTLIDALLGDPQCDGFQNKKWDLFVERSKAYSNCYPYDVPDYASLRSLVASSGTLEFNNESFNWTGVTQNGTSSACIRRSSSSFFSRLNWLTHLNYTYPALNVTMPNNEQFDKLYIWGVHHPGTDKDQVFLYAQSSGRITVSTKRSQQAVIPNIGSRPRIRDIPSRISIYWTIVKPGDILLIHSTGNLIAPRGYFKIRSGKSSIMRSDAPIGKCKSECITPNGSIPNDKPFQNVNRITYGACPRYVKHSTLKLATGMRNVPEKQTRGIFGAIAGFIENGWEGMVDGWYGFRHQNSEGRGQAADLKSTQAAIDQINGKLNRLIGKTNEKFHQIEKEFSEVEGRIQDLEKYVEDTKIDLWSYNAELLVALENQHTIDLTDSEMNKLFEKTKKQLRENAEDMGNGCFKIYHKCDNACIGSIRNGTYDHNVYRDEALNNRFQIKGVELKSGYKDWILWISFAISCFLLCVALLGFIMWACQKGNIRCNICI

SEQ ID NO: 13546 - protein, 566 aa, synthetic construct
  REGION 1..566: note = hemagglutinin__InfluenzaA__ALE32061
MKTIIALSYILCLVFAQKIPGNDNSTATLCLGHHAVPNGTIVKTITNDRIEVTNATELVQNSSIGEICDSPHQILDGENCTLIDALLGDPQCDGFQNKKWDLFVERSKAYSNCYPYDVPDYASLRSLVASSGTLEFNNESFNWTGVTQNGTSSACIRRSSSSFFSRLNWLTHLKYTYPALNVTMPNNEQFDKLYIWGVHHPGTDNDQIFLYARSSGRITVSTKGSQQAVIPNIGSRPRIRDIPSRISIYWTIVKPGDILLINSTGNLIAPRGYFKIRSGKSSIMRSDAPIGKCKSECITPNGSIPNDKPFQNVNRITYGACPRYVKHSTLKLATGMRNVPEKQTRGIFGAIAGFIENGWEGMVDGWYGFRHQNSEGRGQAADLKSTQAAIDQINGKLNRLIGKTNEKFHQIEKEFSEVEGRIQDLEKYVEDTKIDLWSYNAELLVALENQHTIDLTDSEMNKLFEKTKKQLRENAEDMGNGCFKIYHKCDNACIGSIRNGTYDHNVYRDEALNNRFQIKGVELKSGYKDWILWISFAISCFLLCVALLGFIMWACQKGNIRCNICI

SEQ ID NO: 13547 - protein, 566 aa, synthetic construct
  REGION 1..566: note = hemagglutinin__InfluenzaA__ALE32062
MKTIIALSYILCLVFAQKIPGNDNSTATLCLGHHAVPNGTIVKTITNDRIEVTNATELVQNSSIGEICDSPHQILDGENCTLIDALLGDPQCDGFQNKKWDLFVERSKAYSNCYPYDVPDYASLRSLVASSGTLEFNNESFNWTGVTQNGTSSACIRRSSSSFFSRLNWLTHLNYTYPALNVTMPNNEQFDKLYIWGVHHPGTDKDQIFLYAQSSGRITVSTKRSQQAVIPNIGSRPRIRDIPSRISIYWTIVKPGDILLIYSTGNLIAPRGYFKIRSGKSSIMRSDAPIGKCKSECITPNGSIPNDKPFQNVNRITYGACPRYVKHSTLKLATGMRNVPEKQTRGIFGAIAGFIENGWEGMVDGWYGFRHQNSEGRGQAADLKSTQAAIDQINGKLNRLIGKTNEKFHQIEKEFSEVEGRIQDLEKYVEDTKIDLWSYNAELLVALENQHTIDLTDSEMNKLFEKTKKQLRENAEDMGNGCFKIYHKCDNACIGSIRNGTYDHNVYRDEALNNRFQIKGVELKSGYKDWILWISFAISCFLLCVALLGFIMWACQKGNIRCNICI

SEQ ID NO: 13548 - protein, 566 aa, synthetic construct; identical to SEQ ID NO: 12441
  REGION 1..566: note = hemagglutinin__InfluenzaA__ALE32063

SEQ ID NO: 13549 - protein, 566 aa, synthetic construct
  REGION 1..566: note = hemagglutinin__InfluenzaA__ALE32064
MKTIIALSYILCLVFAQKIPGNDNSTATLCLGHHAVPNGTIVKTITNDRIEVTNATELVQNSSIGEICDSPHQILDGENCTLIDALLGDPQCDGFQNKKWDLFVERSKAYSNCYPYDVPDYASLRSLVASSGTLEFNNESFNWTGVTQNGTSSACIRRSSNSFFSRLNWLTHLNYTYPALNVTMPNNEQFDKLYIWGVHHPGTDKDQIFLYAQSSGRITVSTKRSQQAVIPNIGSRPRIRDIPSRISIYWTIVKPGDILLINSTGNLIAPRGYFKIRSGKSSIMRSDAPIGKCKSECITPNGSIPNDKPFQNVNRITYGACPRYVKHSTLKLATGMRNVPEKQTRGIFGAIAGFIENGWEGMVDGWYGFRHQNSEGRGQAADLKSTQAAIDQINGKLNRLIGKTNEKFHQIEKEFSEVEGRIQDLEKYVEDTKIDLWSYNAELLVALENQHTIDLTDSEMNKLFEKTKKQLRENAEDIGNGCFKIYHKCDNACIGSIRNGTYDHNVYRDEALNNRFQIKGVELKSGYKDWILWISFAISCFLLCVALLGFIMWACQKGNIRCNICI

SEQ ID NO: 13550 - protein, 566 aa, synthetic construct; identical to SEQ ID NO: 12441
  REGION 1..566: note = hemagglutinin__InfluenzaA__ALE32065

SEQ ID NO: 13551 - protein, 566 aa, synthetic construct
  REGION 1..566: note = hemagglutinin__InfluenzaA__ALE32066
MKTIIALSYILCLVFAQKIPGNDNSTATLCLGHHAVPNGTIVKTITNDRIEVTNATELVQNSSIGEICDSPHQILDGENCTLIDALLGDPQCDGFQNKKWDLFVERSKAYSNCYPYDVPDYASLRSLVASSGTLEFNNESFNWTGVTQNGTSSACIRRSSSSFFSRLNWLTHLNYTYPALNVSMPNNEQFDKLYIWGVHHPGTDKDQIFLYAQSSGRITVSTKRSQQAVIPNIGSRPRIRDIPSRISIYWTIVKPGDILLINSTGNLIAPRGYFKIRSGKSSIMRSDAPIGKCKSECITPNGSIPNDKPFQNVNRITYGACPRYVKHSTLKLATGMRNVPEKQTRGIFGAIAGFIENGWEGMVDGWYGFRHQNSEGRGQAADLKSTQAAIDQINGKLNRLIGKTNEKFHQIEKEFSEVEGRIQDLEKYVEDTKIDLWSYNAELLVALENQHTIDLTDSEMNKLFEKTKKQLRENAEDMGNGCFKIYHKCDNACIGSIRNGTYDHNVYRDEALNNRFQIKGVELKSGYKDWILWISFAISCFLLCVALLGFIMWACQKGNIRCNICI

SEQ ID NO: 13552 - protein, 566 aa, synthetic construct; identical to SEQ ID NO: 13223
  REGION 1..566: note = hemagglutinin__InfluenzaA__ALE32067

SEQ ID NO: 13553 - protein, 566 aa, synthetic construct; identical to SEQ ID NO: 12441
  REGION 1..566: note = hemagglutinin__InfluenzaA__ALE32068

SEQ ID NO: 13554 - protein, 566 aa, synthetic construct; identical to SEQ ID NO: 12441
  REGION 1..566: note = hemagglutinin__InfluenzaA__ALE32069

SEQ ID NO: 13555 - protein, 566 aa, synthetic construct
  REGION 1..566: note = hemagglutinin__InfluenzaA__ALE32070
MKTIIALSYILCLVFAQKIPGNDNSTATLCLGHHAVPNGTIVKTITNDRIEVTNATELVQNSSIGEICDSPHQILDGENCTLIDALLGDPQCDGFQNKKWDLFVERSKAYSNCYPYDVPDYASLRSLVASSGTLEFNNESFNWTGVTQNGTSSACIRRSSSSFFSRLNWLTHLNYTYPALNVTMPNNEQFDKLYIWGVHHPGTDKDQIFLYAQSSGRITVSTKRSQQAVIPNIGSRPRIRDIPSRISIYWTIVKPGDILLINSTGNLIAPRGYFKIRSGKSSIMRSDAPIGKCKSECITPNGSIPNDKPFQNVNRITYGVCPRYVKHSTLKLATGMRNVPEKQTRGIFGAIAGFIENGWEGMVDGWYGFRHQNSEGRGQAADLKSTQAAIDQINGKLNRLIGKTNEKFHQIEKEFSEVEGRIQDLEKYVEDTKIDLWSYNAELLVALENQHTIDLTDSEMNKLFEKTKKQLRENAEDMGNGCFKIYHKCDNACIGSIRNGTYDHNVYRDEALNNRFQIKGVELKSGYKDWILWISFAISCFLLCVALLGFIMWACQKGNIRCNICI

SEQ ID NO: 13556 - protein, 566 aa, synthetic construct; identical to SEQ ID NO: 12441
  REGION 1..566: note = hemagglutinin__InfluenzaA__ALE32071

SEQ ID NO: 13557 - protein, 566 aa, synthetic construct; identical to SEQ ID NO: 13438
  REGION 1..566: note = hemagglutinin__InfluenzaA__ALE32072

SEQ ID NO: 13558 - protein, 566 aa, synthetic construct
  REGION 1..566: note = hemagglutinin__InfluenzaA__ALE32073
MKTIIALSYILCLVFAQKIPGNDNSTATLCLGHHAVPNGTIVKTITNDRIEVTNATELVQNSSIGEICDSPHQILDGENCTLIDALLGDPQCDGFQNKKWDLFVERSKAYSNCYPYDVPDYASLRSLVASSGTLEFNNESFNWTGVTQNGTSSACIRKSSSSFFSRLNWLTHLNYTYPALNVTMPNNEQFDKLYIWGVHHPGTDKDQIFLYAQSSGRITVSTKRSQQAVIPNIGSRPRIRDIPSRISIYWTIVKPGDILLINSTGNLIAPRGYFKILSGKSSIMRSDAPIGKCKSECITPNGSIPNDKPFQNVNRITYGACPRYVKHSTLKLATGMRNVPEKQTRGIFGAIAGFIENGWEGMVDGWYGFRHQNSEGRGQAADLKSTQAAIDQINGKLNRLIGKTNEKFHQIEKEFSEVEGRIQDLEKYVEDTKIDLWSYNAELLVALENQHTIDLTDSEMNKLFEKTKKQLRENAEDMGNGCFKIYHKCDNACIGSIRNGTYDHNVYRDEALNNRFQIKGVELKSGYKDWILWISFAISCFLLCVALLGFIMWACQKGNIRCNICI

SEQ ID NO: 13559 - protein, 566 aa, synthetic construct
  REGION 1..566: note = hemagglutinin__InfluenzaA__ALE32074
MKTIIALSYILCLVFAQKIPGNDNSTATLCLGHHAVPNGTIVKTITNDRIEVTNATELVQNSSIGEICDSPHQILDGENCTLIDALLGDPQCDGFQNKKWDLFVERSKAYSNCYPYDVPDYASLRSLVASSGTLEFNNESFNWTGVTQNGTSSSCIRRSSSSFFSRLNWLTHLNYTYPALNVTMPNNEQFDKLYIWGVHHPGTDKDQIFLYAQSSGRITVSTKRSQQAVIPNIGSRPRIRDIPSRISIYWTIVKPGDILLINSTGNLIAPRGYFKILSGKSSIMRSDAPIGKCKSECITPNGSIPNDKPFQNVNRITYGACPRYVKHSTLKLATGMRNVPEKQTRGIFGAIAGFIENGWEGMVDGWYGFRHQNSEGRGQAADLKSTQAAIDQINGKLNRLIGKTNEKFHQIEKEFSEVEGRIQDLEKYVEDTKIDLWSYNAELLVALENQHTIDLTDSEMNKLFEKTKKQLRENAEDMGNGCFKIYHKCDNACIGSIRNGTYDHNVYRDEALNNRFQIKGVELKSGYKDWILWISFAISCFLLCVALLGFIMWACQKGNIRCNICI

SEQ ID NO: 13560 - protein, 566 aa, synthetic construct
  REGION 1..566: note = hemagglutinin__InfluenzaA__ALE32075
MKTIIALSYILCLVFAQKLPENDNSTATLCLGHHAVPNGTIVKTITSDRIEVTNATELVQNSSIGEICDSPHQILDGKNCTLIDALLGDPQCDGFQNKKWDLFVERSKAYSNCYPYDVPDYASLRSLVASSGTLEFNDESFNWAGVTQNGTSSSCIRGSNSSFFSRLNWLTHSNFKYPALNVTMPNNEQFDKLYIWGVHHPGTDKDQIFLYAQSSGRITVSTKRSQQAVIPNIGSRPRIRNIPSRISIYWTIVKPGDILLINSTGNLIAPRGYFKIRSGKSSIMRSDAPIGKCKSECITPNGSIPNDKPFQNVNRITYGACPRYVKQSTLKLATGMRNVPEKQTRGIFGAIAGFIENGWEGMKDGWYGFRHQNSEGRGQAADLKSTQAAIDQINGKLNRLIGKTNEKFHQIEKEFSEVEGRIQDLEKYVEDTKIDLWSYNAELLVALENQHTIDLTDSEMNKLFEKTKKQLRENAEDMGNGCFKIYHKCDNACIGSIRNGTYDHDVYRDEALNNRFQIKGVELKSGYKDWILWISFAISCFLLCVALLGFIMWACQKGNIRCNICI

SEQ ID NO: 13561 - protein, 566 aa, synthetic construct; identical to SEQ ID NO: 12998
  REGION 1..566: note = hemagglutinin__InfluenzaA__ALE32076

SEQ ID NO: 13562 - protein, 566 aa, synthetic construct
  REGION 1..566: note = hemagglutinin__InfluenzaA__ALE32077
MKTIIALSYILCLVFAQKIPGNDNSTATLCLGHHAVPNGTIVKTITNDRIEVTNATELVQNSSIGEICDSPHQILDGENCTLIDALLGDPQCDGFQNKKWDLFVERSKAHSNCYPYDVPDYASLRSLVASSGTLEFNNESFNWTGVTQNGTSSACIRRSSSSFFSRLNWLTHLNYTYPALNVTMPNNEQFDKLYIWGVHHPGTDKDQIFLYARSSGRITVSTKGSQQAVIPNIGSRPRIRDIPSRISIYWTIVKPGDILLINSTGNLIAPRGYFKIRSGKSSIMRSDAPIGKCKSECITPNGSIPNDKPFQNVNRITYGACPRYVKHSTLKLATGMRNVPEKQTRGIFGAIAGFIENGWEGMVDGWYGFRHQNSEGRGQAADLKSTQAAIDQINGKLNRLIGKTNEKFHQIEKEFSEVEGRIQDLEKYVEDTKIDLWSYNAELLVALENQHTIDLTDSEMNKLFEKTKKQLRENAEDMGNGCFKIYHKCDNACIGSIRNGTYDHNVYRDEALNNRFQIKGVELKSGYKDWILWISFAISCFLLCVALLGFIMWACQKGNIRCNICI

SEQ ID NO: 13563 - protein, 566 aa, synthetic construct; identical to SEQ ID NO: 13099
  REGION 1..566: note = hemagglutinin__InfluenzaA__ALE32078

SEQ ID NO: 13564 - protein, 566 aa, synthetic construct; identical to SEQ ID NO: 12985
  REGION 1..566: note = hemagglutinin__InfluenzaA__ALE32079

SEQ ID NO: 13565 - protein, 566 aa, synthetic construct
  REGION 1..566: note = hemagglutinin__InfluenzaA__ALE32080
MKTIIALSYILCLVFAQKIPGNDNSTATLCLGHHAVPNGTIVKTITNDRIEVTNATELVQNSSIGEICDSPHQILDGENCTLIDALLGDPQCDGFQNKKWDLFVERSKAYSNCYPYDVPDYASLRSLVASSGTLEFNNESFNWTGVTQNGTSSSCIRRSSSSFFSRLNWLTHLNYTYPALNVTMPNNEQFDKLYIWGVHHPGTDKDQIFLYAQSSGRITVSTKRSQQAVIPNIGSRPRIRDIPSRISIYWTIVKPGDILLINSTGNLIAPRGYFKIRSGKSSIMRSDAPIGKCKSECITPNGSIPNDKPFQNVNRITYGACPRYVKHSTLKLATGMRNVPEKQTRGIFGAIAGFIENGWEGMVDGWYGFRHQNSEGRGQAADLKSTQAAIDQINGKLNRLIGKTNEKFHQIEKEFSEVEGRIQDLEKYVEDTKIDLWSYNAELLVALENQHTIDLTDSEMNKLFEKTKKQLRENAEDMGNGCFKIYHKCDNACIGSIRNGTYDHNVYRDEALNNRFQIKGVELKSGYKDWILWISFAISCFLLCVALLGFIMWACQKGNIRCNICI

SEQ ID NO: 13566 - protein, 566 aa, synthetic construct; identical to SEQ ID NO: 13099
  REGION 1..566: note = hemagglutinin__InfluenzaA__ALE32081

SEQ ID NO: 13567 - protein, 566 aa, synthetic construct; identical to SEQ ID NO: 13099
  REGION 1..566: note = hemagglutinin__InfluenzaA__ALE32082

SEQ ID NO: 13568 - protein, 566 aa, synthetic construct
  REGION 1..566: note = hemagglutinin__InfluenzaA__ALE32083
MKTIIALSYILCLVFAQKIPGNDNSTATLCLGHHAVPNGTIVKTITNDRIEVTNATELVQNSSIGEICDSPHQILDGENCTLIDALLGDPQCDGFQNKKWDLFVERSKAYSNCYPYDVPDYASLRSLVASSGTLEFNNESFNWTGVTQNGTSSACIRRSSSSFFSRLNWLTHLNYKYPALNVTMPNNEQFDKLYIWGVHHPGTDKDQIFLYARSSGRITVSTKGSQQAVIPNIGSRPRIRDIPSRISIYWTIVKPGDILLINSTGNLIAPRGYFKIRSGKSSIMRSDAPIGKCKSECITPNGSIPNDKPFQNVNRITYGACPRYVKHSTLKLATGMRNVPEKQTRGIFGAIAGFIENGWEGMVDGWYGFRHQNSEGRGQAADLKSTQAAIDQINGKLNRLIGKTNEKFHQIEKEFSEVEGRIQDLEKYVEDTKIDLWSYNAELLVALENQHTIDLTDSEMNKLFERTKKQLRENAEDMGNGCFKIYHKCDNACIGSIRNGTYDHNVYRDEALNNRFQIKGVELKSGYKDWILWISFAISCFLLCVALLGFIMWACQKGNIRCNICI

SEQ ID NO: 13569 - protein, 566 aa, synthetic construct; identical to SEQ ID NO: 13056
  REGION 1..566: note = hemagglutinin__InfluenzaA__ALE32084

SEQ ID NO: 13570 - protein, 566 aa, synthetic construct; identical to SEQ ID NO: 13099
  REGION 1..566: note = hemagglutinin__InfluenzaA__ALE32085

SEQ ID NO: 13571 - protein, 566 aa, synthetic construct
  REGION 1..566: note = hemagglutinin__InfluenzaA__ALE32086
MKTIIALSYILCLVFAQKIPGNDNSTATLCLGHHAVPNGTIVKTITNDRIEVTNATELVQNSSIGEICDSPHQILDGENCTLIDALLGDPQCDGFQNKKWDLFVERSKAYSNCYPYDVPDYASLRSLVASSGTLEFNNESFNWTGVTQNGTSSACIRKSSSSFFSRLNWLTHLNYTYPALNVTMPNNEQFDKLYIWGVHHPGTDKDQIFLYARSSGRITVSTKRSQQAVIPNIGSRPRIRDIPSRISIYWTIVKPGDILLINSTGNLIAPRGYFKIRSGKSSIMRSDAPISKCKSECITPNGSIPNDKPFQNVNRITYGACPRYVKHSTLKLATGMRNVPEKQTRGIFGAIAGFIENGWEGMVDGWYGFRHQNSEGRGQAADLKSTQAAIDQINGKLNRLIGKTNEKFHQIEKEFSEVEGRIQDLEKYVEDTKIDLWSYNAELLVALENQHTIDLTDSEMNKLFEKTKKQLRENAEDMGNGCFKIYHKCDNACIGSIRNGTYDHNVYRDEALNNRFQIKGVELKSGYKDWILWISFAISCFLLCVALLGFIMWACQKGNIRCNICI

SEQ ID NO: 13572 - protein, 566 aa, synthetic construct
  REGION 1..566: note = hemagglutinin__InfluenzaA__ALE32087
MKTIIALSYILCLVFAQKIPGNDNSTATLCLGHHAVPNGTIVKTITNDRIEVTNATELVQNSSIGEICDSPHQILDGENCTLIDALLGDPQCDGFQNKKWDLFVERSKAYSNCYPYDVPDYASLRSLVASSGTLEFNNESFNWTGVTQNGTSSACIRKSSSSFFSRLNWLTHLDYTYPALNVTMPNNEQFDKLYIWGVHHPGTDKDQIFLYARSSGRITVSTKRSQQAVIPNIGSRPRIRDIPSRISIYWTIVKPGDILLINSTGNLIAPRGYFKIRSGKSSIMRSDAPIGKCKSECITPNGSIPNDKPFQNVNRITYGACPRYVKHSTLKLATGMRNVPEKQTRGIFGAIAGFIENGWEGMVDGWYGFRHQNSEGRGQAADLKSTQAAIDQINGNLNRLIGKTNEKFHQIEKEFSEVEGRIQDLEKYVEDTKIDLWSYNAELLVALENQHTIDLTDSEMNKLFEKTKKQLRENAEDMGNGCFKIYHKCDNACIGSIRNGTYDHNVYRDEALNNRFQIKGVELKSGYKDWILWISFAISCFLLCVALLGFIMWACQKGNIRCNICI

SEQ ID NO: 13573 - protein, 566 aa, synthetic construct
  REGION 1..566: note = hemagglutinin__InfluenzaA__ALE32088
MKTIIALSYILCLVFAQKIPGNDNSTATLCLGHHAVPNGTIVKTITNDRIEVTNATELVQNSSIGEICDSPHQILDGENCTLIDALLGDPQCDGFQNKKWDLFVERSKAYSNCYPYDVPDYASLRSLVASSGTLEFNNESFNWTGVTQNGTSSACIRKSSSSFFSRLNWLTHLNYTYPALNVTMPNNEQFDKLYIWGVLHPGTDKDQIFLYARSSGRITVSTKRSQQAVIPNIGSRPRIRDIPSRISIYWTIVKPGDILLINSTGNLIAPRGYFKIRSGKSSIMRSDAPIGKCKSECITPNGSIPNDKPFQNVNRITYGACPRYVKHSTLKLATGMRNVPEKQTRGIFGAIAGFIENGWEGMVDGWYGFRHQNSEGRGQAADLKSTQAAIDQINGKLNRLIGKTNEKFHQIEKEFSEVEGRIQDLEKYVEDTKIDLWSYNAELLVALENQHTVDLTDSEMNKLFEKTKKQLRENAEDMGNGCFKIYHKCDNACIGSIRNGTYDHNVYRDEALNNRFQIKGVELKSGYKDWILWISFAISCFLLCVALLGFIMWACQKGNIRCNICI

SEQ ID NO: 13574 - protein, 566 aa, synthetic construct; identical to SEQ ID NO: 12441
  REGION 1..566: note = hemagglutinin__InfluenzaA__ALE32089

SEQ ID NO: 13575 - protein, 566 aa, synthetic construct; identical to SEQ ID NO: 12441
  REGION 1..566: note = hemagglutinin__InfluenzaA__ALE32090

SEQ ID NO: 13576 - protein, 566 aa, synthetic construct; identical to SEQ ID NO: 12441
  REGION 1..566: note = hemagglutinin__InfluenzaA__ALE32091

SEQ ID NO: 13577 - protein, 566 aa, synthetic construct
  REGION 1..566: note = hemagglutinin__InfluenzaA__ALE32092
MKTIIALSYILCLVFAQKIPGNDNSTATLCLGHHAVPNGTIVKTITNDRIEVTNATELVQNSSIGEICDSPHQILDGENCTLIDALLGDPQCDGFQNKKWDLFVERSKAYSNCYPYDVPDYASLRSLVASSGTLEFNNESFNWTGVTQNGTSSACIRRSSSSFFSRLNWLTHLNYTYPALNVTMPNNEQFDKLYIWGVHHPGTDKDQIFLYAQSSGRITVSTKRSQQAVIPNIGSRPRIRDIPSRISIYWTIVKPGDILLINSTGNLIAPRGYFKIRSGKSSIMRSDAPIGKCRSECITPNGSIPNDKPFQNVNRITYGACPRYVKHSTLKLATGMRNVPEKQTRGIFGAIAGFIENGWEGMVDGWYGFRHQNSEGRGQAADLKSTQAAIDQINGKLNRLIGKTNEKFHQIEKEFSEVEGRIQDLEKYVEDTKIDLWSYNAELLVALENQHTIDLTDSEMNKLFEKTKKQLRENAEDMGNGCFKIYHKCDNACIGSIRNGTYEHNVYRDEALNNRFQIKGVELKSGYKDWILWISFAISCFLLCVALLGFIMWACQKGNIRCNICI

SEQ ID NO: 13578 - protein, 566 aa, synthetic construct; identical to SEQ ID NO: 13047
  REGION 1..566: note = hemagglutinin__InfluenzaA__ALE32093

SEQ ID NO: 13579 - protein, 566 aa, synthetic construct
  REGION 1..566: note = hemagglutinin__InfluenzaA__ALE32094
MKTIIALSYILCLVFAQKIPGNDNSTATLCLGHHAVPNGTIVKTITNDRIEVTNATELVQNSSIGEICDSPHQILDGENCTLIDALLGDPQCDGFQNKKWDLFVERSKAYSNCYPYDVPDYASLRSLVASSGTLEFNNESFNWTGVTQNGTSSACIRRSSSSFFSRLNWLTHLNYTYPALNVTMPNNEQFDKLYIWGVHHPGTDKDQIFLYAQSSGRITVSTKRSQQAVIPNIGSRPRIRDIPSRISIYWTIVKPGDILLITSTGNLIAPRGYFKIRSGKSSIMRSDAPIGKCKSECITPNGSIPNDKPFQNVNRITYGACPRYVKHSTLKLATGMRNVPEKQTRGIFGAIAGFIENGWEGMVDGWYGFRHQNSEGRGQAADLKSTQAAIDQINGKLNRLIGKTNEKFHQIEKEFSEVEGRIQDLEKYVEDTKIDLWSYNAELLVALENQHTIDLTDSEMNKLFEKTKKQLRENAEDMGNGCFKIYHKCDNACIGSIRNGTYDHNVYRDEALNNRFQIKGVELKSGYKDWILWISFAISCFLLCVALLGFIMWACQKGNIRCNICI

SEQ ID NO: 13580 - protein, 566 aa, synthetic construct; identical to SEQ ID NO: 12441
  REGION 1..566: note = hemagglutinin__InfluenzaA__ALE32095

SEQ ID NO: 13581 - protein, 566 aa, synthetic construct
  REGION 1..566: note = hemagglutinin__InfluenzaA__ALE32096
MKTIIALSYILCLVFAQKIPGNDNSTATLCLGHHAVPNGTIVKTITNDRIEVTNATELVQNSSIGEICDSPHQILDGENCTLIDALLGDPQCDGFQNKKWDLFVERSKAYSNCYPYDVPDYASLRSLVASSGTLEFNNESFNWTGVTQNGTSSACIRRSSSSFFSRLNWLTHLSYTYPALNVTMPNNEQFDKLYIWGVHHPGTDKDQIFLYAQSSGRITVSTKRSQQAVIPNIGSRPRIRDIPSRISIYWTIVKPGDILLINSTGNLIAPRGYFKIRSGKSSIMRSDAPIGKCKSECITPNGSIPNDKPFQNVNRITYGACPRYVKHSTLKLATGMRNVPEKQTRGIFGAIAGFIENGWEGMVDGWYGFRHQNSEGRGQAADLKSTQAAIDQINGKLNRLIGKTNEKFHQIEKEFSEVEGRIQDLEKYVEDTKIDLWSYNAELLVALENQHTIDLTDSEMNKLFEKTKKQLRENAEDMGNGCFKIYHKCDNACIGSIRNGTYDHNVYRDEALNNRFQIKGVELKSGYKDWILWISFAISCFLLCVALLGFIMWACQKGNIRCNICI

SEQ ID NO: 13582 - protein, 566 aa, synthetic construct; identical to SEQ ID NO: 12441
  REGION 1..566: note = hemagglutinin__InfluenzaA__ALE32097

SEQ ID NO: 13583 - protein, 566 aa, synthetic construct; identical to SEQ ID NO: 13047
  REGION 1..566: note = hemagglutinin__InfluenzaA__ALE32099

SEQ ID NO: 13584 - protein, 566 aa, synthetic construct
  REGION 1..566: note = hemagglutinin__InfluenzaA__ALE32100
MKTIIALSYILCLVFAQKIPGNDNSTATLCLGHHAVPNGTIVKTITNDRIEVTNATELVQNSSIGEICDSPHQILDGENCTLIDALLGDPQCDGFQNKKWDLFVERSKAYSNCYPYDVPDYASLRSLVASSGTLEFNNESFNWTGVTQNGTSSACIRRSSSSFFSRLNWLTHLNYTYPALNVTMPNNEQFDKLYIWGVHHPGTDKDQIFLYAQSSGRITVSTKRSQQAVIPNIGSRPRIRDIPSRISIYWTIVKPGDILLINSTGNLIAPRGYFKIRSGKSSIMRSDAPIGKCKSECITPNGSIPNDKPFQNVNRITYGACPRYVKHSTLKLATGMRNVPEKQTRGIFGAIAGFIENGWEGMVDGWYGFRHQNSEGRGQAADLKSTQAAIDQINGKLNRLIGKTNEKFHQIEKEFSEVEGRIQDLEKYVEDTKIDLWSYNADLLVALENQHTIDLTDSEMNKLFEKTKKQLRENAEDMGNGCFKIYHKCDNACIGSIRNGTYDHNVYRDEALNNRFQIKGVELKSGYKDWILWISFAISCFLLCVALLGFIMWACQKGNIRCNICI

SEQ ID NO: 13585 - protein, 566 aa, synthetic construct
  REGION 1..566: note = hemagglutinin__InfluenzaA__ALE32101
MKTIIALSYILCLVFAQKIPGNDNSTATLCLGHHAVPNGTIVKTITNDRIEVTNATELVQNSSIGEICDSPHQILDGENCTLIDALLGDPQCDGFQNKKWDLFVERSKAYSQCYPYDVPDYASLRSLVASSGTLEFNNESFNWTGVTQNGTSSACIRKSSGSFFSRLNWLTHLKYTYPALNVTMPNNEQFDKLYIWGVHHPGTDKDQIFLYARSSGRITVSTKRSQQAVIPNIGSRPRIRDIPSRISIYWTIVKPGDILLINSTGNLIAPRGYFKIRSGKSSIMRSDAPIGKCKSECITPNGSIPNDKPFQNVNRITYGACPRYVKHSTLKLATGMRNVPEKQTRGIFGAIAGFIENGWEGMVDGWYGFRHQNSEGRGQAADLKSTQAAIDQINGKLNRLIGKTNEKFHQIEKEFSEVEGRIQDLEKYVEDTKIDLWSYNAELLVALENQHTIDLTDSEMNKLFEKTKKQLRENAEDMGNGCFKIYHKCDNACIGSIRNGTYDHNVYRDEALNNRFQIKGVELKSGYKDWILWISFAISCFLLCVALLGFIMWACQKGNIRCNICI

SEQ ID NO: 13586 - protein, 566 aa, synthetic construct
  REGION 1..566: note = hemagglutinin__InfluenzaA__ALE32102
MKTIIALSYILCLVFAQKIPGNDNSTATLCLGHHAVPNGTIVKTITNDRIEVTNATELVQNSSIGEICDSPHQILDGENCTLIDALLGDPQCDGFQNKKWDLFVERSKAYSNCYPYDVPDYASLRSLVASSGTLEFNNESFNWTGVTQNGTSSACIRKSSSSFFSRLNWLTHLKYTYPALNVTMPNNEQFDKLYIWGVHHPGTDKDQIFLYARSSGRITVSTKRSQQAVIPNIGSRPRIRDIPSRISIYWTIVKPGDILLINSTGNLIAPRGYFKIRSGKSSIMRSDAPIGKCKSECITPNGSIPNDKPFQNVNRITYGACPRYVKHSTLKLATGMRNVPEKQTRGIFGAIAGFIENGWEGMVDGWYGFRHQNSEGRGQAADLKSTQAAIDQINGKLNRLIGKTNEKFHQIEKEFSEVEGRIQDLEKYVEDTKIDLWSYNAELLVALENQHTIDLTDSEMNKLFEKTKKQLRENAEDMGNGCFKIYHKCDNACIGSIRNGTYDHNVYRDEALSNRFQIKGVELKSGYKDWILWISFAISCFLLCVALLGFIMWACQKGNIRCNICI

SEQ ID NO: 13587 - protein, 566 aa, synthetic construct; identical to SEQ ID NO: 13154
  REGION 1..566: note = hemagglutinin__InfluenzaA__ALE32103

SEQ ID NO: 13588 - protein, 566 aa, synthetic construct
  REGION 1..566: note = hemagglutinin__InfluenzaA__ALE32104
MKTIIALSYILCLVFAQKIPGNDNSTATLCLGHHAVPNGTIVKTITNDQIEVTNATELVQNSSIGEICDSPHQILDGENCTLIDALLGDPQCDGFQNKKWDLFVERSKAYSNCYPYDVPDYASLRSLVASSGTLEFNNESFNWTGVTQNGTSSACIRRSSSSFFSRLNWLTHLNYTYPALNVTMPNNEQFDKLYIWGVHHPGTDKDQIFLYAQSSGRITVSTKRSQQAVIPNIGSRPRIRDIPSRISIYWTIVKPGDILLINSTGNLIAPRGYFKIRSGKSSIMRSDAPIGKCKSECITPNGSIPNDKPFQNVNRITYGACPRYVKHSTLKLATGMRNVPEKQTRGIFGAIAGFIENGWEGMVDGWYGFRHQNSEGRGQAADLKSTQAAIDQINGKLNRLIGKTNEKFHQIEKEFSEVEGRIQDLEKYVEDTKIDLWSYNAELLVALENQHTIDLTDSEMNKLFEKTKKQLRENAEDMGNGCFKIYHKCDNACIGSIRNGTYDHNVYRDEALNNRFQIKGVELKSGYKDWILWISFAISCFLLCVALLGFIMWACQKGNIRCNICI

SEQ ID NO: 13589 - protein, 566 aa, synthetic construct; identical to SEQ ID NO: 13099
  REGION 1..566: note = hemagglutinin__InfluenzaA__ALE32105

SEQ ID NO: 13590 - protein, 566 aa, synthetic construct; identical to SEQ ID NO: 13099
  REGION 1..566: note = hemagglutinin__InfluenzaA__ALE32106

SEQ ID NO: 13591 - protein, 566 aa, synthetic construct; identical to SEQ ID NO: 13154
  REGION 1..566: note = hemagglutinin__InfluenzaA__ALE32107

SEQ ID NO: 13592 - protein, 566 aa, synthetic construct; identical to SEQ ID NO: 13384
  REGION 1..566: note = hemagglutinin__InfluenzaA__ALE32108

SEQ ID NO: 13593 - protein, 566 aa, synthetic construct; identical to SEQ ID NO: 12998
  REGION 1..566: note = hemagglutinin__InfluenzaA__ALE32109

SEQ ID NO: 13594 - protein, 566 aa, synthetic construct; identical to SEQ ID NO: 12985
  REGION 1..566: note = hemagglutinin__InfluenzaA__ALE32110

SEQ ID NO: 13595 - protein, 566 aa, synthetic construct; identical to SEQ ID NO: 12441
  REGION 1..566: note = hemagglutinin__InfluenzaA__ALE32111

SEQ ID NO: 13596 - protein, 566 aa, synthetic construct
  REGION 1..566: note = hemagglutinin__InfluenzaA__ALE32112
MKTIIALSYILCLVFAQKIPGNDNSTATLCLGHHAVPNGTIVKTITNDRIEVTNATELVQNSSIGEICDSPHQILDGENCTLIDALLGDPQCDGFQNKKWDLFVERSKAYSNCYPYDVPDYASLRSLVASSGTLEFNNESFNWTGVTQNGTSSACIRRSSSSFFSRLNWLTHLNYAYPALNVTMPNNEQFDKLYIWGVHHPGTDKDQIFLYAQSSGRITVSTKRSQQAVIPNIGSRPRIRDIPSRISIYWTIVKPGDILLINSTGNLIAPRGYFKIRSGKSSIMRSDAPIGKCKSECITPNGSIPNDKPFQNVNRITYGACPRYVKHSTLKLATGMRNVPEKQTRGIFGAIAGFIENGWEGMVDGWYGFRHQNSEGRGQAADLKSTQAAIDQINGKLNRLIGKTNEKFHQIEKEFSEVEGRIQDLEKYVEDTKIDLWSYNAELLVALENQHTIDLTDSEMNKLFEKTKKQLRENAEDMGNGCFKIYHKCDNACIGSIRNGTYDHNVYRDEALNNRFQIKGVELKSGYKDWILWISFAISCFLLCVALLGFIMWACQKGNIRCNICI

SEQ ID NO: 13597 - protein, 566 aa, synthetic construct
  REGION 1..566: note = hemagglutinin__InfluenzaA__ALE32113
MKTIIALSYILCLVFAQKIPGNDNSTATLCLGHHAVPNGTVVKTITNDRIEVTNATELVQNSSIGEICDSPHQILDGENCTLIDALLGDPQCDGFQNKKWDLFVERSKAYSNCYPYDVPDYASLRSLVASSGTLEFNNESFNWTGVTQNGTSSACIRGSSSSFFSRLNWLTHLNYTYPALNVTMPNNEQFDKLYIWGVHHPGTDKDQIFLYAQSSGRITVSTKRSQQAVIPNIGSRPRIRDIPSRISIYWTIVKPGDILLINSTGNLIAPRGYFKMRSGKSSIMRSDAPIGKCKSECITPNGSIPNDKPFQNVNRITYGACPRYVKHSTLKLATGMRNVPEKQTRGIFGAIAGFIENGWEGMVDGWYGFRHQNSEGRGQAADLKSTQAAIDQINGKLNRLIGKTNEKFHQIEKEFSEVEGRIQDLEKYVEDTKIDLWSYNAELLVALENQHTIDLTDSEMNKLFEKTKKQLRENAEDMGNGCFKIYHKCDNACIGSIRNGTYDHNVYRDEALNNRFQIKGVELKSGYKDWILWISFAISCFLLCVALLGFIMWACQKGNIRCNICI

SEQ ID NO: 13598 - protein, 566 aa, synthetic construct; identical to SEQ ID NO: 12985
  REGION 1..566: note = hemagglutinin__InfluenzaA__ALE32114

SEQ ID NO: 13599 - protein, 566 aa, synthetic construct; identical to SEQ ID NO: 12985
  REGION 1..566: note = hemagglutinin__InfluenzaA__ALE32115

SEQ ID NO: 13600 - protein, 566 aa, synthetic construct
  REGION 1..566: note = hemagglutinin__InfluenzaA__ALE32116
MKTIIALSYILCLVFAQKIPGNDNSTATLCLGHHAVPNGTIVKTITNDRIEVTNATELVQNSSIGEICDSPHQILDGENCTLIDALLGDPQCDGFQNKKWDLFVERSKAYSNCYPYDVPDYASLRSLVASSGTLEFNNESFNWTGVTQNGTSSACIRRSSSSFFSRLNWLTHLNYTYPALNVTMPNNEQFDKLYIWGVHHPGTDKDQIFLYAQSSGRITVSTKRSQQAVIPNIGSRPRIRDIPSRISIYWTIVKPGDILLINSTGNLIAPRGYFKIRSGKSSIMRSDAPIGKCKSECITPNGSIPNDKPFQNVNRITYGACPRYVKHSTLKLATGMRNVPEKQTRGIFGAIAGFIENGWEGMVDGWYGFRHQNSEGRGQAADLKSTQAAIDQINGKLNRLIGKTNEKFHQIEKEFSEVEGRIQDLEKYVEDTKIDLWSYNAELLVALENQHTIDLTDSEMNKLFEKTKKQLRENAEDMGNGCFKIYHKCDNACIGSIRNGTYDHNVYRDEALNNRFQIKGVELKSGYKDWILWISFAISCFLLCVALLGFIMWACQKGNVRCNICI

SEQ ID NO: 13601 - protein, 566 aa, synthetic construct
  REGION 1..566: note = hemagglutinin__InfluenzaA__ALE32117
MKTIIALSYILCLVFAQKIPGNDNSTATLCLGHHAVPNGTIVKTITNDRIEVTNATELVQNSSIGEICDSPHQILDGENCTLIDALLGDPQCDGFQNKKWDLFVERSKAYSNCYPYDVPDYASLRSLVASSGTLEFNNESFNWTGVTQNGTSSACIRRSSSSFFSRLNWLTHLNYTYPALNVTMPNNEQFDKLYIWGVHHPGTDKDQIFLYAQSSGRITVSTKRSQQAVIPNIGSRPRIRDIPSRISIYWTIVKPGDILLINSTGNLIAPRGYFKIRSGKSSIMRSDAPIGKCKSECITPNGSIPNDKPFQNVNRITYGACPRYVKHSTLKLATGMRNVPEKQTRGIFGAIAGFIENGWEGMVDGWYGFRHQNSEGRGQAADFKSTQAAIDQINGKLNRLIGKTNEKFHQIEKEFSEVEGRIQDLEKYVEDTKIDLWSYNAELLVALENQHTIDLTDSEMNKLFEKTKKQLRENAEDMGNGCFKIYHKCDNACIGSIRNGTYDHNVYRDEALNNRFQIKGVELKSEYKDWILWISFAISCFLLCVALLGFIMWACQKGNIRCNICI

SEQ ID NO: 13602 - protein, 566 aa, synthetic construct; identical to SEQ ID NO: 13047
  REGION 1..566: note = hemagglutinin__InfluenzaA__ALE32118

SEQ ID NO: 13603 - protein, 566 aa, synthetic construct; identical to SEQ ID NO: 2669
  REGION 1..566: note = hemagglutinin__InfluenzaA__ALM06086

SEQ ID NO: 13604 - protein, 566 aa, synthetic construct; identical to SEQ ID NO: 10040
  REGION 1..566: note = hemagglutinin__InfluenzaA__ALM06087

SEQ ID NO: 13605 - protein, 566 aa, synthetic construct
  REGION 1..566: note = hemagglutinin__InfluenzaA__ALM06088
MKAILVVLLYTFATANADTLCIGYHANNSTDTVDTVLEKNVTVTHSVNLLEDKHNGKLCKLRGVAPLHLGKCNIAGWILGNPECESLSTASSWSYIVETSSSDNGTCYPGDFINYEELREQLSSVSSFERFEIFPKTSSWPNHDSNKGVTAACPHAGAKSFYKNLIWLVKKGNSYPKLSQSYINDKGKEVLVLWGIHHPSTTADQQSLYQNADAYVFVGTSRYSKKFKPEIAIRPKVRGQEGRMNYYWTLVEPGDKITFEATGNLVVPRYAFTMERNAGSGIIISDTPVHDCNTTCQTPEGAINTSLPFQNIHPITIGKCPKYVKSTKLRLATGLRNVPSIQSRGLFGAIAGFIEGGWTGMVDGWYGYHHQNEQGSGYAADLKSTQNAIDKITNKVNSVIEKMNTQFTAVGKEFNHLEKRIENLNKKVDDGFLDIWTYNAELLVLLENERTLDYHDSNVKNLYEKVRNQLKNNAKEIGNGCFEFYHKCDNTCMESVKNGTYDYPKYSEEAKLNREKIDGVKLESTRIYQILAIYSTVASSLVLVVSLGAISFWMCSNGSLQCRICI

SEQ ID NO: 13606 - protein, 566 aa, synthetic construct; identical to SEQ ID NO: 10040
  REGION 1..566: note = hemagglutinin__InfluenzaA__ALM06089

SEQ ID NO: 13607 - protein, 566 aa, synthetic construct
  REGION 1..566: note = hemagglutinin__InfluenzaA__ALN39661
MKTIIALSYILCLVFAQKIPGNDNSTATLCLGHHAVPNGTIVKTITNDRIEVTNATELVQNSSIGEICDSPHQILDGENCTLIDALLGDPQCDGFQNKKWDLFVERSKAYSNCYPYDVPDYASLRSLVASSGTLEFNNESFNWTGVTQNGTSSACIRRSSSSFFSRLNWLTHLNYTYPALNVTMPNNEQFDKLYIWGVHHPGTDKDQIFLYAQSSGRITVSTKRSQQAVIPNIGSRPRIRDIPSRISIYWTIVKPGDILLINSTGNLIAPRGYFKIRSGKSSIMRSDAPIGKCKSECITPNGSIPNDKPFQNVNRITYGACPRYVKHSTLKLATGMRNVPEKQTRGIFGAIAGFIENGWEGMVDGWYGFRHQNSEGRGQAADLKSTQAAIDQINGKLNRLIGKTNEKFHQIEKEFSEVEGRIQDLEKYVEDTKIDLWSYNAELLVALENQHTIDLTDSEMNKLFEKTKKQLRENAEDMGNGCFKIYHKCDNACIGSIRNGTYDHNVYRDEALNNRFQIKGVELKSGYKDWILWISFAISCFLLCIALLGFIMWACQKGNIRCNICI

SEQ ID NO: 13608 - protein, 566 aa, synthetic construct; identical to SEQ ID NO: 12974
  REGION 1..566: note = hemagglutinin__InfluenzaA__ALN39662

SEQ ID NO: 13609 - protein, 566 aa, synthetic construct; identical to SEQ ID NO: 12441
  REGION 1..566: note = hemagglutinin__InfluenzaA__ALN39663

SEQ ID NO: 13610 - protein, 566 aa, synthetic construct
  REGION 1..566: note = hemagglutinin__InfluenzaA__ALN39664
MKTIIALSYILCLVFAQKLPGNDNSTATLCLGHHAVPNGTIVKTITNDRIEVTNATELVQNSSIGEICDSPHQILDGENCTLIDALLGDPQCDGFQNKKWDLFVERSKAYSNCYPYDVPDYASLRSLVASSGTLEFNNESFNWAGVTQNGTSSSCIRGSNSSFFSRLNWLTHLNSKYPALNVTMPNNEQFDKLYIWGVHHPGTDKDQIFLYAQPSGRVTVSTKRSQQAVIPNIGSRPRIRDIPSRISIYWTIVKPGDILLINSTGNLIAPRGYFKIRSGKSSIMRSDAPIGKCKSECITPNGSIPNDKPFQNVNRITYGACPRYVKQSTLKLATGMRNVPERQTRGIFGAIAGFIENGWEGMVDGWYGFRHQNSEGRGQAADLKSTQAAIDQINGKLNRLIGKTNEKFHQIEKEFSEVEGRIQDLEKYVEDTKIDLWSYNAELLVALENQHTIDLTDSEMNKLFEKTKKQLRENAEDMGNGCFKIYHKCDNACIGSIRNGTYDHDVYRDEALNNRFQIKGVELKSGYKDWILWISFAISCFLLCVALLGFIMWACQKGNIRCNICI

SEQ ID NO: 13611 - protein, 566 aa, synthetic construct; identical to SEQ ID NO: 12441
  REGION 1..566: note = hemagglutinin__InfluenzaA__ALN39665

SEQ ID NO: 13612 - protein, 566 aa, synthetic construct; identical to SEQ ID NO: 13047
  REGION 1..566: note = hemagglutinin__InfluenzaA__ALN39666

SEQ ID NO: 13613 - protein, 566 aa, synthetic construct
  REGION 1..566: note = hemagglutinin__InfluenzaA__ALN39667
MKTIIALSYILCLVFAQKLPGNDNSTATLCLGHHAVPNGTIVKTITNDRIEVTNATELVQNSSIGEICNSPHQILDGENCTLIDALLGDPQCDGFQNKKWDLFVERSKAYSNCYPYDVPDYASLRSLVASSGTLEFNNESFNWAGVTQNGTSSACIRGSNSSFFSRLNWLTHSNFKYPALNVTMPNNEQFDKLYIWGVHHPGTDKDQIFLYAQSSGRITVSTKRSQQAVTPNIGSRPRIRNIPSRISIYWTIVKPGDILLINSTGNLIAPRGYFKIRSGKSSIMRSDAPIGKCKSECITPNGSIPNDKPFQNVNRITYGACPRYVKQSTLKLATGMRNVPEKQTRGIFGAIAGFIENGWEGMKDGWYGFRHQNSEGRGQAADLKSTQAAIDQINGKLNRLIGKTNEKFHQIEKEFSEVEGRIQDLEKYVEDTKIDLWSYNAELLVALENQHTIDLTDSEMNKLFEKTKKQLRENAEDMGNGCFKIYHKCDNACIGSIRNGTYDHDVYRNEALNNRFQIKGVELKSGYKDWILWISFAISCFLLCVALLGFIMWACQKGNIRCNICI

SEQ ID NO: 13614 - protein, 566 aa, synthetic construct; identical to SEQ ID NO: 13516
  REGION 1..566: note = hemagglutinin__InfluenzaA__ALN39668

SEQ ID NO: 13615 - protein, 566 aa, synthetic construct
  REGION 1..566: note = hemagglutinin__InfluenzaA__ALN39669
MKTIIALSYILCLVFAQKIPGNDNSTATLCLGHHAVPNGTIVKTITNDRIEVTNATELVQNSSIGEICDSPHQILDGENCTLIDALLGDPQCDGFQNKKWDLFVERSKAYSNCYPYDVPDYASLRSLVASSGTLEFNNESFNWTGVTQNGTSSACIRRSSSSFFSRLNWLTHLNYTYPALNVTMPNNEQFDKLYIWGVHHPGTDKDQIFLYAQLSGRITVSTKRSQQAVIPNIGSRPRIRDIPSRISIYWTIVKPGDILLINSTGNLIAPRGYFKIRSGKSSIMRSDAPIGKCKSECITPNGSIPNDKPFQNVNRITYGACPRYVKHSTLKLATGMRNVPEKQTRGIFGAIAGFIENGWEGMVDGWYGFRHQNSEGRGQAADLKSTQAAIDQINGKLNRLIGKTNEKFHQIEKEFSEVEGRIQDLEKYVEDTKIDLWSYNAELLVALENQHTIDLTDSEMNKLFEKTKKQLRENAEDMGNGCFKIYHKCDNACIGSIRNGTYDHNVYRDEALNNRFQIKGVELKSGYKDWILWISFAISCFLLCVALLGFIMWACQKGNIRCNICI

SEQ ID NO: 13616 - protein, 566 aa, synthetic construct; identical to SEQ ID NO: 12441
  REGION 1..566: note = hemagglutinin__InfluenzaA__ALN39670

SEQ ID NO: 13617 - protein, 566 aa, synthetic construct
  REGION 1..566: note = hemagglutinin__InfluenzaA__ALN39671
MKTIIALSYILCLVFAQKIPGNDNSTATLCLGHHAVPNGTIVKTITNDRIEVTNATELVQNSSIGEICDSPHQILDGENCTLIDALLGDPQCDGFQNKKWDLFVERSKAYSNCYPYDVPDYASLRSLVASSGTLEFNNESFNWTGVTQNGTSSACIRRSSSSFFSRLNWLTHLNYTYPALNVTMPNNEQFDKLYIWGVHHPGTDKDQIFLYAQSSGRITVSTKRSQQAVIPNIGSRPRIRDIPSRISIYWTIVKPGDILLINSTGNLIAPRGYFKIRSGKSSIMRSDAPIGKCKSECITPNGSIPNDKPFQNVNRITYGACPRYVKHSTLKLATGMRNVPEKQTRGIFGAIAGFIENGWEGMVDGWYGFRHQNSEGRGQAADLKSTQAAIDQINGKLNRLIGKTNEKFHQIEKEFSEVEGRIQDLEKYVEDTKIDLWSYNAELLVALENQHTIDLTDSEMNKLFEKTRKQLRENAEDMGNGCFKIYHKCDNACIGSIRNGTYDHNVYRDEALNNRFQIKGVELKSGYKDWILWISFAISCFLLCVALLGFIMWACQKGNIRCNICI

SEQ ID NO: 13618 - protein, 566 aa, synthetic construct; identical to SEQ ID NO: 12441
  REGION 1..566: note = hemagglutinin__InfluenzaA__ALN39672

SEQ ID NO: 13619 - protein, 566 aa, synthetic construct
  REGION 1..566: note = hemagglutinin__InfluenzaA__ALN39673
MKTIIALSYILCLVFAQKIPGNDNSTATLCLGHHAVPNGTIVKTITNDRIEVTNATELVQNSSIGEICDSPHQILDGENCTLIDALLGDPQCDGFQNKKWDLFVERSKAYSNCYPYDVPDYASLRSLVASSGTLEFNNESFNWTGVTQNGTSSACIRRSSSSFFSRLNWLTHLNYTYPALNVTMPNNEQFDKLYIWGVHHPGTDKDQIFLYAQSSGRITVSTKRSQQAVIPDIGSRPRIRDIPSRISIYWTIVKPGDILLINSTGNLIAPRGYFKIRSGKSSIMRSDAPIGKCKSECITPNGSIPNDKPFQNVNRITYGACPRYVKHSTLKLATGMRNVPEKQTRGIFGAIAGFIENGWEGMVDGWYGFRHQNSEGRGQAADLKSTQAAIDQINGKLNRLIGKTNEKFHQIEKEFSEVEGRIQDLEKYVEDTKIDLWSYNAELLVALENQHTIDLTDSEMNKLFEKTKKQLRENAEDMGNGCFKIYHKCDNACIGSIRNGTYDHNVYRDEALNNRFQIKGVELKSGYKDWILWISFAISCFLLCVALLGFIMWACQKGNIRCNICI

SEQ ID NO: 13620 - protein, 566 aa, synthetic construct; identical to SEQ ID NO: 12981
  REGION 1..566: note = hemagglutinin__InfluenzaA__ALN39674

SEQ ID NO: 13621 - protein, 566 aa, synthetic construct; identical to SEQ ID NO: 12441
  REGION 1..566: note = hemagglutinin__InfluenzaA__ALN39675

SEQ ID NO: 13622 - protein, 566 aa, synthetic construct
  REGION 1..566: note = hemagglutinin__InfluenzaA__ALN39676
MKTIIALSCILCLVFAQKLPGNDNSTATLCLGHHAVPNGTIVKTITNDRIEVTNATELVQNSSIGEICDSPHQILDGENCTLIDALLGDPQCDGFQNKKWDLFVERSKAYSNCYPYDVPDYASLRSLVASSGTLEFNNENFNWAGVTQNGTSSSCIRGSNSSFFSRLNWLTHLNSKYPALNVTMPNNEQFDKLYIWGVHHPGTDKDQIFLYAQSSGRITVSTKRSQQAVIPNIGSRPRIRDIPSRISIYWTIVKPGDILLINSTGNLIAPRGYFRIRSGKSSIMRSDAPIGKCKSECITPNGSIPNDKPFQNVNRITYGACPRYVKQNTLKLATGMRNVPERQTRGIFGAIAGFIENGWEGMVDGWYGFRHQNSEGRGQAADLKSTQSAIDQINGKLNRLIGKTNEKFHQIEKEFSEVEGRIQDLEKYVEDTKIDLWSYNAELLVALENQHTIDLTDSEMNKLFEKTKKQLRENAEDMGNGCFKIYHKCDNACIGSIRNGTYDHDVYRDEALNNRFQIKGVELKSGYKDWILWISFAISCFLLCVALLGFIMWACQKGNIRCNICI

SEQ ID NO: 13623 - protein, 566 aa, synthetic construct
  REGION 1..566: note = hemagglutinin__InfluenzaA__ALN39677
MKTIIALGYILCLVFAQKIPGNDNSTATLCLGHHAVPNGTIVKTITNDRIEVTNATELVQNSSIGEICDSPHKILDGENCTLIDALLGDPQCDGFQNKKWDLFVERSKAYSNCYPYDVPDYASLRSLVASSGTLEFNNESFNWTGVTQNGTSSACIRRSSSSFFSRLNWLTHLNYAYPALNVTMPNNEQFDKLYIWGVHHPGTDKDQIFLYAQSSGRITVSTKRSQQAVIPNIGSRPRIRDIPSRISIYWTIVKPGDILLINSTGNLIAPRGYFKIRSGKSSIMRSDAPIGKCKSECITPNGSIPNDKPFQNVNRITYGACPRYVKHSTLKLATGMRNVPEKQTRGIFGAIAGFIENGWEGMVDGWYGFRHQNSEGRGQAADLKSTQAAIDQINGKLNRLIGKTNEKFHQIEKEFSEVEGRIQDLEKYVEDTKIDLWSYNAELLVALENQHTIDLTDSEMNKLFEKTKKQLRENAEDMGNGCFKIYHKCDNACIGSIRNGTYDHNVYRDEALNNRFQIKGVELKSGYKDWILWISFAISCFLLCVALLGFIMWACQKGNIRCNICI

SEQ ID NO: 13624 - protein, 566 aa, synthetic construct; identical to SEQ ID NO: 13328
  REGION 1..566: note = hemagglutinin__InfluenzaA__ALN39678

SEQ ID NO: 13625 - protein, 566 aa, synthetic construct
  REGION 1..566: note = hemagglutinin__InfluenzaA__ALN39679
MKTIIALGYILCLVFAQKIPGNDNSTATLCLGHHAVPNGTVVKTITNDRIEVTNATELVQNSSIGEICDSPHKILDGENCTLIDALLGDPQCDGFQNKKWDLFVERSKAYSNCYPYDVPDYASLRSLVASSGTLEFNNESFNWTGVTQNGTSSACIRRSSSSFFSRLNWLTHLNYTYPALNVTMPNNEQFDKLYIWGVHHPGTDKDQIFLYAQSSGRITVSTKRSQQAVIPNIGSRPRIRDIPSRISIYWTIVKPGDILLINSTGNLIAPRGYFKIRSGKSSIMRSDAPIGKCKSECITPNGSIPNDKPFQNVNRITYGACPRYVKHSTLKLATGMRNVPEKQTRGIFGAIAGFIENGWEGMVDGWYGFRHQNSEGRGQAADLKSTQAAIDQINGKLNRLIGKTNEKFHQIEKEFSEVEGRIQDLEKYVEDTKIDLWSYNAELLVALENQHTIDLTDSEMNKLFEKTKKQLRENAEDMGNGCFKIYHKCDNACIGSIRNGTYDHNVYRDEALNNRFQIKGVELKSGYKDWILWISFAISCFLLCVALLGFIMWACQKGNIRCNICI

SEQ ID NO: 13626 - protein, 566 aa, synthetic construct; identical to SEQ ID NO: 13328
  REGION 1..566: note = hemagglutinin__InfluenzaA__ALN39680

SEQ ID NO: 13627 - protein, 566 aa, synthetic construct; identical to SEQ ID NO: 13328
  REGION 1..566: note = hemagglutinin__InfluenzaA__ALN39681

SEQ ID NO: 13628 - protein, 566 aa, synthetic construct; identical to SEQ ID NO: 13328
  REGION 1..566: note = hemagglutinin__InfluenzaA__ALN39682

SEQ ID NO: 13629 - protein, 566 aa, synthetic construct; identical to SEQ ID NO: 13328
  REGION 1..566: note = hemagglutinin__InfluenzaA__ALN39683

SEQ ID NO: 13630 - protein, 566 aa, synthetic construct; identical to SEQ ID NO: 13328
  REGION 1..566: note = hemagglutinin__InfluenzaA__ALN39684

SEQ ID NO: 13631 - protein, 566 aa, synthetic construct; identical to SEQ ID NO: 13328
  REGION 1..566: note = hemagglutinin__InfluenzaA__ALN39685

SEQ ID NO: 13632 - protein, 566 aa, synthetic construct
  REGION 1..566: note = hemagglutinin__InfluenzaA__ALN39686
MKTIIALGYILCLAFAQKIPGNDNSTATLCLGHHAVPNGTIVKTITNDRIEVTNATELVQNSSIGEICDSPHKILDGENCTLIDALLGDPQCDGFQNKKWDLFVERSKAYSNCYPYDVPDYTSLRSLVASSGTLEFNNESFNWTGVTQNGTSSACIRRSSSSFFSRLNWLTHLNYTYPALNVTMPNNEQFDKLYIWGVHHPGTDKDQIFLYAQSSGRITVSTKRSQQAVIPNIGSRPRIRDIPSRISIYWTIVKPGDILLINSTGNLIAPRGYFKIRSGKSSIMRSDAPIGKCKSECITPNGSIPNDKPFQNVNRITYGACPRYVKHSTLKLATGMRNVPEKQTRGIFGAIAGFIENGWEGMVDGWYGFRHQNSEGRGQAADLKSTQAAIDQINGKLNRLIGKTNEKFHQIEKEFSEVEGRIQDLEKYVEDTKIDLWSYNAELLVALENQHTIDLTDSEMNKLFEKTKKQLRENAEDMGNGCFKIYHKCDNACIGSIRNGTYDHNVYRDEALNNRFQIKGVELKSGYKDWILWISFAISCFLLCVALLGFIMWACQKGNIRCNICI

SEQ ID NO: 13633 - protein, 566 aa, synthetic construct; identical to SEQ ID NO: 13328
  REGION 1..566: note = hemagglutinin__InfluenzaA__ALN39687

SEQ ID NO: 13634 - protein, 566 aa, synthetic construct
  REGION 1..566: note = hemagglutinin__InfluenzaA__ALN39688
MKTIIALGYILCLVFAQKIPGNDNSTATLCLGHHAVPNGTIVKTITNDRIEVTNATELVQNSSIGEICDSPHKILDGENCTLIDALLGDPQCDGFQNKKWDLFVERSKAYSNCYPYDVPDYASLRSLVASSGTLEFNNESFNWTGVTQNGTSSACIRRSSSSFFSRLNWLTHLNYIYPALNVTMPNNEQFDKLYIWGVHHPGTDKDQIFLYAQSSGRITVSTKRSQQAVIPNIGSRPRIRDIPSRISIYWTIVKPGDILLINSTGNLIAPRGYFKIRSGKSSIMRSDAPIGKCKSECITPNGSIPNDKPFQNVNRITYGACPRYVKHSTLKLATGMRNVPEKQTRGIFGAIAGFIENGWEGMVDGWYGFRHQNSEGRGQAADLKSTQAAIDQINGKLNRLIGKTNEKFHQIEKEFSEVEGRIQDLEKYVEDTKIDLWSYNAELLVALENQHTIDLTDSEMNKLFEKTKKQLRENAEDMGNGCFKIYHKCDNACIGSIRNGTYDHNVYRDEALNNRFQIKGVELKSGYKDWILWISFAISCFLLCVALLGFIMWACQKGNIRCNICI

SEQ ID NO: 13635 - protein, 566 aa, synthetic construct
  REGION 1..566: note = hemagglutinin__InfluenzaA__ALN39689
MKTIIALGYILCLVFAQKIPGNDNSTATLCLGHHAVPNGTIVKTITNDRIEVTNATELVQNSSIGEICDSPHKILDGENCTLIDALLGDPQCDGFQNKKWDLFVERSKAYSNCYPYDVPDYASLRSLVASSGTLEFNNESFNWTGVTQNGTSSACIRRSSSSFFSRLNWLTHLNYTYPALNVTMPNNEQFDKLYIWGVHHPGTDKDQIFLYAQSSGRITVSTKRSQQAVIPNIGSRPRIRDIPSRISIYWTIVKPGDILLIHSTGNLIAPRGYFKIRSGKSSIMRSDAPIGKCKSECITPNGSIPNDKPFQNVNRITYGACPRYVKHSTLKLATGMRNVPEKQTRGIFGAIAGFIENGWEGMVDGWYGFRHQNSEGRGQAADLKSTQAAIDQINGKLNRLIGKTNEKFHQIEKEFSEVEGRIQDLEKYVEDTKIDLWSYNAELLVALENQHTIDLTDSEMNKLFEKTKKQLRENAEDMGNGCFKIYHKCDNACIGSIRNGTYDHNVYRDEALNNRFQIKGVELKSGYKDWILWISFAISCFLLCVALLGFIMWACQKGNIRCNICI

SEQ ID NO: 13636 - protein, 566 aa, synthetic construct
  REGION 1..566: note = hemagglutinin__InfluenzaA__ALN39690
MKTIIALSYILCLVFAQKLPGNDNSTATLCLGHHAVPNGTIVKTITNDRIEVTNATELVQNSSIGEICDSPHQILDGKNCTLIDALLGDPQCDGFQNKKWDLFVERSKAHSNCYPYDVPDYASLRSLVASSGTLEFNNESFNWAGVTQNGTSSSCIRGSNSSFFSRLNWLTHLNSIYPALNVTMPNNEQFDKLYIWGVHHPGTDKDQIFLYAQSSGRITVSTKRSQQAVIPNIGSRPRIRDIPSRISIYWTIVKPGDILLINSTGNLIAPRGYFKIRSGKSSIMRSDAPIGKCKSECITPNGSIPNDKPFQNVNRITYGACPRYVKQSTLKLATGMRNVPERQTRGIFGAIAGFIENGWEGMVDGWYGFRHQNSEGRGQAADLKSTQAAIDQINGKLNRLIGKTNEKFHQIEKEFSEVEGRIQDLEKYVEDTKIDLWSYNAELLVALENQHTIDLTDSEMNKLFEKTKKQLRENAEDMGNGCFKIYHKCDNACIGSIRNGTYDHNVYRDEALNNRFQIKGVELKSGYKDWILWISFAISCFLLCVALLGFIMWACQKGNIRCNICI

SEQ ID NO: 13637 - protein, 566 aa, synthetic construct
  REGION 1..566: note = hemagglutinin__InfluenzaA__ALN39691
MKTIIALSYILCLVFAQKLPGNDNSTATLCLGHHAVPNGTIVKTITNDRIEVTNATELVQNSSIGEICDSPHQILDGKNCTLIDALLGDPQCDGFQNKKWDLFVERSKAHSNCYPYDVPDYASLRSLVASSGTLEFNNESFNWAGVTQNGTSSSCIRGSNSSFFSRLNWLTHLNSKYPALNVTMPNNEQFDKLYIWGVHHPGTDKDQIFLYAQPSGRITVSTKRSQQAVIPNIGSRPRIRDIPSRISIYWTIVKPGDILLINSTGNLIAPRGYFKIRSGKSSIMRSDAPIGKCKSECITPNGSIPNDKPFQNVNRITYGACPRYVKQSTLKLATGMRNVPEKQTRGIFGAIAGFIENGWEGMKDGWYGFRHQNSEGRGQAADLKSTQAAIDQINGKLNRLIGKTNEKFHQIEKEFSEVEGRIQDLEKYVEDTKIDLWSYNAELLVALENQHTIDLTDSEMNKLFEKTKKQLRENAEDMGNGCFKIYHKCDNACIGSIRNGTYDHDVYRDEALNNRFQIKGVELKSGYKDWILWISFAISCFLLCVALLGFIMWACQKGNIRCNICI

SEQ ID NO: 13638 - protein, 566 aa, synthetic construct; identical to SEQ ID NO: 13328
  REGION 1..566: note = hemagglutinin__InfluenzaA__ALN39692

SEQ ID NO: 13639 - protein, 566 aa, synthetic construct; identical to SEQ ID NO: 13328
  REGION 1..566: note = hemagglutinin__InfluenzaA__ALN39693

SEQ ID NO: 13640 - protein, 566 aa, synthetic construct; identical to SEQ ID NO: 13328
  REGION 1..566: note = hemagglutinin__InfluenzaA__ALN39694

SEQ ID NO: 13641 - protein, 566 aa, synthetic construct; identical to SEQ ID NO: 13328
  REGION 1..566: note = hemagglutinin__InfluenzaA__ALN39695

SEQ ID NO: 13642 - protein, 566 aa, synthetic construct; identical to SEQ ID NO: 13328
  REGION 1..566: note = hemagglutinin__InfluenzaA__ALN39696

SEQ ID NO: 13643 - protein, 566 aa, synthetic construct; identical to SEQ ID NO: 12998
  REGION 1..566: note = hemagglutinin__InfluenzaA__ALN39697

SEQ ID NO: 13644 - protein, 566 aa, synthetic construct
  REGION 1..566: note = hemagglutinin__InfluenzaA__ALN39698
MKTIIALSHILCLVFAQKIPGNDNSTATLCLGHHAVPNGTIVKTITNDRIEVTNATELVQNSSIGEICDSPHQILDGENCTLIDALLGDPQCDGFQNKKWDLFVERSKAYSNCYPYDVPDYASLRSLVASSGTLEFNNESFNWTGVTQNGTSSACIRRSSSSFFSRLNWLTHLNYTYPALNVTMPNNEQFDKLYIWGVHHPGTDKDQIFLYAQSSGRITVSTKRSQQAVIPNIGSRPRIRDIPSRISIYWTIVKPGDILLINSTGNLIAPRGYFKIRSGKSSIMRSDAPIGKCKSECITPNGSIPNDKPFQNVNRITYGACPRYVKHSTLKLATGMRNVPEKQTRGIFGAIAGFIENGWEGMMDGWYGFRHQNSEGRGQAADLKSTQAAIDQINGKLNRLIGKTNEKFHQIEKEFSEVEGRIQDLEKYVEDTKIDLWSYNAELLVALENQHTIDLTDSEMNKLFEKTKKQLRENAEDMGNGCFKIYHKCDNACMGSIRNGTYDHNVYRNEALNNRFQIKGVELKSGYKDWILWISFAISCFLLCVALLGFIMWACQKGNIRCNICI

SEQ ID NO: 13645 - protein, 566 aa, synthetic construct
  REGION 1..566: note = hemagglutinin__InfluenzaA__ALN39700
MKTIIALSYILCLVFAQKIPGNDNSTATLCLGHHAVPNGTIVKTITNDRIEVTNATELVQNSSIGEICDSPHQILDGENCTLIDALLGDPQCDGFQNKKWDLFVERSKAYSNCYPYDVPDYASLRSLVASSGTLEFNNESFNWTGVTQNGTSSACIRRSSSSFFSRLNWLTHLNYTYPALNVTMPNNEQFDKLYIWGVHHPGTDKDQIFLYAQSSGRITVSTKRSQQAVIPNIGSRPRIRDIPSRISIYWTIVKPGDILLINSTGNLIAPRGYFKIRSGKSSIMRSDAPIGKCKSECITPNGSIPNDKPFQNVNRITYGACPRYVKHSTLKLATGMRNVPEKQTRGIFGAIAGFIENGWEGMVDGWYGFRHQNSEGRGQAADLKSTQAAIDQINGKLNRLIGKTNEKFHQIEKEFSEVEGRIQDLEKYVEDTKIDLWSYNAELLVALENQHTIDLTDSEMNKLFEKTKKQLRENAEDMGNGCFKIYHKCDNACIGSIRNGTYDHNVYRDEALNNRFQIKGVELKSGYKDWILWISFAISCFLLCVALLGFIMWACQKGNIKCNICI

SEQ ID NO: 13646 - protein, 566 aa, synthetic construct; identical to SEQ ID NO: 13047
  REGION 1..566: note = hemagglutinin__InfluenzaA__ALN39701

SEQ ID NO: 13647 - protein, 566 aa, synthetic construct
  REGION 1..566: note = hemagglutinin__InfluenzaA__ALN39702
MKTIIALSYILCLVFAQKIPGNDNSTATLCLGHHAVPNGTIVKTITNDRIEVTNATELVQNSSIGEICDSPHQILDGENCTLIDALLGDPQCDGFQNKKWDLFVERSKAYSNCYPYDVPDYASLRSLVASSGTLEFNNESFNWTGVTQNGTSSACIRKSSSSFFSRLNWLTHLNYTYPALNVTMPNNEQFDKLYIWGVHHPGTDKDQIFLYARSSGRITVSTKRSQQAVIPNIGSRPRIRDIPSRISIYWTIVKPGDILLINSTGNLIAPRGYFKIRSGKSSIMRSDAPIGKCKSECITPNGSIPNDKPFQNVNRITYGACPRYVKHSTLKLATGMRNVPEKQTRGIFGAIAGFIENGWEGMVDGWYGFRHQNSEGRGQAADLKSTQAAIDQINGKLNRLIGKTNEKFHQIEKEFSEVEGRIQDLEKYVEDTKIDLWSYNAELLVALENQHTIDLTDSEMNKLFEKTKKQLRENAEDMGNGCFKIYHKCDNACIGSIRNGTYDHNVYRDEALNNRFQIKGVELKSGYKDWILWISFAISCFLLCVALLGFIMWACQKGNIRCSICI

SEQ ID NO: 13648 - protein, 566 aa, synthetic construct
  REGION 1..566: note = hemagglutinin__InfluenzaA__ALN39703
MKTIIALSYILCLVFAQKIPGNDDSTATLCLGHHAVPNGTIVKTITNDRIEVTNATELVQNSSIGEICDSPHQILDGENCTLIDALLGDPQCDGFQNKKWDLFVERSKAYSNCYPYDVPDYASLRSLVASSGTLEFNNESFNWTGVTQNGTSSACIRRSSSSFFSRLNWLTHLNYTYPALNVTMPNNEQFDKLYIWGVHHPGTDKDQIFLYAQSSGRITVSTKRSQQAVIPNIGSRPRIRDIPSRISIYWTIVKPGDILLINSTGNLIAPRGYFKIRSGKSSIMRSDAPIGKCKSECITPNGSIPNDKPFQNVNRITYGACPRYVKHSTLKLATGMRNVPEKQTRGIFGAIAGFIENGWEGMVDGWYGFRHQNSEGRGQAADLKSTQAAIDQINGKLNRLIGKTNEKFHQIEKEFSEVEGRIQDLEKYVEDTKIDLWSYNAELLVALENQHTIDLTDSEMNKLFEKTKKQLRENAEDMGNGCFKIYHKCDNACIGSIRNGTYDHNVYRDEALNNRFQIKGVELKSGYKDWILWISFAISCFLLCVALLGFIMWACQKGNIRCNICI

SEQ ID NO: 13649 - protein, 566 aa, synthetic construct; identical to SEQ ID NO: 13047
  REGION 1..566: note = hemagglutinin__InfluenzaA__ALN39704

SEQ ID NO: 13650 - protein, 566 aa, synthetic construct; identical to SEQ ID NO: 12441
  REGION 1..566: note = hemagglutinin__InfluenzaA__ALN39705

SEQ ID NO: 13651 - protein, 566 aa, synthetic construct
  REGION 1..566: note = hemagglutinin__InfluenzaA__ALN39706
MKTIIALSYILCLVFAQKLPGNDNSTATLCLGHHAVPNGMIVKTITNDRIEVTNATELVQNSSIGEICDSPHQILDGKNCTLIDALLGDPQCDDFQNKRWDLFVERSKAYSNCYPYDVPDYASLRSLVASSGTLEFNDESFNWAGVTQNGTSSACIRGSNSSFFSRLNWLTHSNFKYPALNVTMPNNEQFDKLYIWGVHHPGTDKDQIFLYAQSSGRITVSTKRSQQAVIPNIGSRPRIRNIPSRISIYWTIVKPGDILLINSTGNLIAPRGYFKIQSGKSSIMRSDAPIGKCKSECITPNGSIPNDKPFQNVNRITYGACPRYVKQSTLKLATGMRNVPEKQTRGIFGAIAGFIENGWEGMKDGWYGFRHQNSEGRGQAADLKSTQAAIDQINGKLNRLIGKTNEKFHQIEKEFSEVEGRIQDLEKYVEDTKIDLWSYNAELLVALENQHTIDLTDSEMNKLFEKTKKQLRENAEDMGNGCFKIYHKCDNACIGSIRNGTYDHDVYRDEALNNRFQIKGVELKSGYKDWILWISFAISCFLLCVALLGFIMWACQKGNIRCNICI

SEQ ID NO: 13652 - protein, 566 aa, synthetic construct; identical to SEQ ID NO: 12441
  REGION 1..566: note = hemagglutinin__InfluenzaA__ALN39707

SEQ ID NO: 13653 - protein, 566 aa, synthetic construct; identical to SEQ ID NO: 13047
  REGION 1..566: note = hemagglutinin__InfluenzaA__ALN39708

SEQ ID NO: 13654 - protein, 566 aa, synthetic construct
  REGION 1..566: note = hemagglutinin__InfluenzaA__ALN39709
MKTIIALSYILCLVFAQKLPGNDNSTATLCLGHHAVPNGTIVKTITNDRIEVTNATELVQNSSIGEICDSPHQILDGENCTLIDALLGDPQCDGFQNKKWDLFVERSKAYSNCYPYDVPDYASLRSLVASSGTLEFNNESFNWAGVTQNGTSSSCMRGSNSSFFSRLNWLTHLNSKYPALNVTMPNNEQFDKLYIWGVHHPGTDKDQIFLYAQSSGRITVSTKRSQQAVTPNIGSRPRIRDIPSRISIYWTIVKPGDILLINSTGNLIAPRGYFKIRSGKSSIMRSDAPIGKCKSECITPNGSIPNDKPFQNVNRITYGACPRYVKQSTLKLATGMRNVPERQTRGIFGAIAGFIENGWEGMVDGWYGFRHQNSEGRGQAADLKSTQAAIDQINGKLNRLIGKTNEKFHQIEKEFSEVEGRIQDLEKYVEDTKIDLWSYNAELLVALENQHTIDLTDSEMNKLFEKTKKQLRENAEDMGNGCFKIYHKCDNACIGSIRNGTYDHDVYRDEALNNRFQIKGVELKSGYKDWILWISFAISCFLLCVALLGFIMWACQKGNIRCNICI

SEQ ID NO: 13655 - protein, 566 aa, synthetic construct; identical to SEQ ID NO: 13371
  REGION 1..566: note = hemagglutinin__InfluenzaA__ALN39710

SEQ ID NO: 13656 - protein, 566 aa, synthetic construct; identical to SEQ ID NO: 13047
  REGION 1..566: note = hemagglutinin__InfluenzaA__ALN39711

SEQ ID NO: 13657 - protein, 566 aa, synthetic construct; identical to SEQ ID NO: 12441
  REGION 1..566: note = hemagglutinin__InfluenzaA__ALN39712

SEQ ID NO: 13658 - protein, 566 aa, synthetic construct
  REGION 1..566: note = hemagglutinin__InfluenzaA__ALN39713
MKTIIALSYILCLVFAQKIPGNDNSTATLCLGHHAVPNGTIVKTITNDRIEVTNATELVQNSSIGEICDSPHQILDGENCTLIDALLGDPQCDGFQNKKWDLFVERSKAYSNCYPYDVPDYASLRSLVASSGTLEFNNESFNWTGVTQNGTSSACIRGSSSSFFSRLNWLTHLNYTYPALNVTMPNNEQFDKLYIWGVHHPGTDKDQIFLYAQSSGRITVSTKRSQQAVIPNIGSRPRIRDIPSRISIYWTIVKPGDILLINSTGNLIAPRGYFKIRSGKSSIMRSDAPIGKCKSECITPNGSIPNDKPFQNVNRITYGACPRYVKHSTLKLATGMRNVPEKQTRGIFGAIAGFIENGWEGMVDGWYGFRHQNSEGRGQAADLKSTQAAIDQINGKLNRLIGKTNEKFHQIEKEFSEVEGRIQDLEKYVEDTKIDLWSYNAELLVALENQHTIDLTDSEMNKLFEKTKKQLRENAEDMGNGCFKIYHKCDNACIGSIRNGTYDHNVYRDEALNNRFQIKGVELKSGYKDWILWISFAISCFLLCVALLGFIMWACQKGNIRCNICI

SEQ ID NO: 13659 - protein, 566 aa, synthetic construct
  REGION 1..566: note = hemagglutinin__InfluenzaA__ALN39714
MKTIIALSYILCLVFAQKIPGNDNSTATLCLGHHAVPNGTIVKTITNDRIEVTNATELVQNSSIGEICDSPHQILDGENCTLIDALLGDPQCDGFQNKKWDLFVERSKAYSNCYPYDVPDYASLRSLVASSGTLEFNNESFNWAGVTQNGTSSSCIRGSNSSFFSRLNWLTHLNSKYPALNVTMPNNEQFDKLYIWGVHHPGTDKDQTFLYAQPSGRITVSTKRSQQAVIPNIGSRPRIRDIPSRISIYWTIVKPGDILLINSTGNLIAPRGYFKIRSGKSSIMRSDAPIGKCKSECITPNGSIPNDKPFQNVNRITYGACPRYVKQSTLKLATGMRNVPERQTRGIFGAIAGFIENGWEGMVDGWYGFRHQNSEGRGQAADLKSTQAAIDQINGKLNRLIGKTNEKFHQIEKEFSEVEGRIQDLEKYVEDTKIDLWSYNAELLVALENQHTIDLTDSEMNKLFEKTKKQLRENAEDMGNGCFKIYHKCDNACIGSIRNGTYDHDVYRDEALNNRFQIKGVELKSGYKDWILWISFAISCFLLCVALLGFIMWACQKGNIRCNICI

SEQ ID NO: 13660 - protein, 566 aa, synthetic construct; identical to SEQ ID NO: 13099
  REGION 1..566: note = hemagglutinin__InfluenzaA__ALN39715

SEQ ID NO: 13661 - protein, 566 aa, synthetic construct; identical to SEQ ID NO: 12441
  REGION 1..566: note = hemagglutinin__InfluenzaA__ALN39716

SEQ ID NO: 13662 - protein, 566 aa, synthetic construct; identical to SEQ ID NO: 12441
  REGION 1..566: note = hemagglutinin__InfluenzaA__ALN39717

SEQ ID NO: 13663 - protein, 566 aa, synthetic construct; identical to SEQ ID NO: 13479
  REGION 1..566: note = hemagglutinin__InfluenzaA__ALN39718

SEQ ID NO: 13664 - protein, 566 aa, synthetic construct; identical to SEQ ID NO: 12441
  REGION 1..566: note = hemagglutinin__InfluenzaA__ALN39734

SEQ ID NO: 13665 - protein, 566 aa, synthetic construct
  REGION 1..566: note = hemagglutinin__InfluenzaA__ALN39735
MKTIIALSYILCLVFAQKIPGNDNSTATLCLGHHAVPNGTIVKTITDDRIEVTNATELVQNSSIGEICDSPHQILDGENCTLIDALLGDPQCDGFQNKKWDLFVERSKAYSNCYPYDVPDYASLRSLVASSGTLEFNNESFNWTGVTQNGTSSACIRRSSSSFFSRLNWLTHLNYTYPALNVTMPNNEQFDKLYIWGVHHPGTDKDQIFLYAQSSGRITVSTKRSQQAVIPNIGSRPRIRDIPSRISIYWTIVKPGDILLINSTGNLIAPRGYFKIRSGKSSIMRSDAPIGKCKSECITPNGSIPNDKPFQNVNRITYGACPRYVKHSTLKLATGMRNVPEKQTRGIFGAIAGFIENGWEGMVDGWYGFRHQNSEGRGQAADLKSTQAAIDQINGKLNRLIGKTNEKFHQIEKEFSEVEGRIQDLEKYVEDTKIDLWSYNAELLVALENQHTIDLTDSEMNKLFEKTKKQLRENAEDMGNGCFKIYHKCDNACIGSIRNGTYDHNVYRDEALNNRFQIKGVELKSGYKDWILWISFAISCFLLCVALLGFIMWACQKGNIRCNICI

SEQ ID NO: 13666 - protein, 566 aa, synthetic construct
  REGION 1..566: note = hemagglutinin__InfluenzaA__ALN39736
MKTIIALSYILCLVFAQKIPGNDNSTATLCLGHHAVPNGTIVKTITNDRIEVTNATELVQNSSIGEICDSPHQILDGENCTLIDALLGDPQCDGFQNKKWDLFVERSKAYSNCYPYDVPDYASLRSLVASSGTLEFNNESFNWTGVTQNGTSSACIRRSSSSFFSRLNWLTHLNYTYPALNVTMPNNEQFDKLYIWGVHHPGTDKDQIFLYAQPSGRITVSTKRSQQAVIPNIGSRPRIRDIPSRISIYWTIVKPGDILLINSTGNLIAPRGYFKIRGGKSSIMRSDAPIGKCKSECITPNGSIPNDKPFQNVNRITYGACPRYVKHSTLKLATGMRNVPEKQTRGIFGAIAGFIENGWEGMVDGWYGFRHQNSEGRGQAADLKSTQAAIDQINGKLNRLIGKTNEKFHQIEKEFSEVEGRIQNLEKYVEDTKIDLWSYNAELLVALENQHTIDLTDSEMNKLFEKTKKQLRENAEDMGNGCFKIYHKCDNACIGSIRNGTYDHNVYRDEALNNRFQIKGVELKSGYKDWILWISFAISCFLLCVALLGFIMWACQKGNIRCNICI

SEQ ID NO: 13667 - protein, 566 aa, synthetic construct; identical to SEQ ID NO: 13047
  REGION 1..566: note = hemagglutinin__InfluenzaA__ALN39737

SEQ ID NO: 13668 - protein, 566 aa, synthetic construct
  REGION 1..566: note = hemagglutinin__InfluenzaA__ALN39738
MKTIIALSYILCLVFAQKIPGNDNSTATLCLGHHAVPNGTIVKTITNDRIEVTNATELVQNSSIGEICDSPHQILDGENCTLIDALLGDPLCDGFQNKKWDLFVERSKAYSNCYPYDVPDYASLRSLVASSGTLEFNNESFNWTGVTQNGTSSACIRRSSSSFFSRLNWLTHLNYTYPALNVTMPNNEQFDKLYIWGVHHPGTDKDQIFLYAQSSGRITVSTKRSQQAVIPNIGSRPRIRDIPSRISIYWTIVKPGDILLINSTGNLIAPRGYFKIRSGKSSIMRSDAPIGKCKSECITPNGSIPNDKPFQNVNRITYGACPRYVKHSTLKLATGMRNVPEKQTRGIFGAIAGFIENGWEGMVDGWYGFRHQNSEGRGQAADLKSTQAAIDQINGKLNRLIGKTNEKFHQIEKEFSEVEGRIQDLEKYVEDTKIDLWSYNAELLVALENQHTIDLTDSEMNKLFEKTKKQLRENAEDMGNGCFKIYHKCDNACIGSIRNGTYDHNVYRDEALNNRFQIKGVELKSGYKDWILWISFAISCFLLCVALLGFIMWACQKGNIRCNICI

SEQ ID NO: 13669 - protein, 566 aa, synthetic construct
  REGION 1..566: note = hemagglutinin__InfluenzaA__ALN39739
MKTIIALGYILCLVFAQKIPGNDNSTATLCLGHHAVPNGTIVKTITNDRIEVTNATELVQNSSIGEICDSPHKILDGENCTLIDALLGDPQCDGFQNKKWDLFVERSKAYSNCYPYDVPDYASLRSLVASSGTLEFNNESFNWTGVTQNGTSSACIRRSSSSFFSRLNWLTHLDYTYPALNVTMPNNEQFDKLYIWGVHHPGTDKDQIFLYAQSSGRITVSTKRSQQAVIPNIGSRPRIRDIPSRISIYWTIVKPGDILLINSTGNLIAPRGYFKIRSGKSSIMRSDAPIGKCKSECITPNGSIPNDKPFQNVNRITYGACPRYVKHSTLKLATGMRNVPEKQTRGIFGAIAGFIENGWEGMVDGWYGFRHQNSEGRGQAADLKSTQAAIDQINGKLNRLIGKTNEKFHQIEKEFSEVEGRIQDLEKYVEDTKIDLWSYNAELLVALENQHTIDLTDSEMNKLFEKTKKQLRENAEDMGNGCFKIYHKCDNACIGSIRNGTYDHNVYRDEALNNRFQIKGVELKSGYKDWILWISFAISCFLLCVALLGFIMWACQKGNIRCNICI

SEQ ID NO: 13670 - protein, 566 aa, synthetic construct
  REGION 1..566: note = hemagglutinin__InfluenzaA__ALN39740
MKTIIALSYILCLVFAQKIPGNDNSTATLCLGHHAVPNGTIVKTITNDRIEVTNATELVQNSSIGEICDSPHQILDGENCTLIDALLGDPQCDGFQNKKWDLFVERSKAYSNCYPYDVPDYASLRSLVASSGTLEFNNESFNWTGVTQNGTSSACIRKSSSSFFSRLNWLTHLNYTYPALNVTVPNNEQFDKLYIWGVHHPGTDKDQIFLYARSSGRITVSTKRSQQAVIPNIGYRPRIRDIPSRISIYWTIVKPGDILLINSTGNLIAPRGYFKIRSGKSSIMRSDAPIGKCKSECITPNGSIPNDKPFQNVNRITYGACPRYVKHSTLKLATGMRNVPEKQTRGIFGAIAGFIENGWEGMVDGWYGFRHQNSEGRGQAADLKSTQAAIDQINGKLNRLIGKTNEKFHQIEKEFSEVEGRIQDLEKYVEDTKIDLWSYNAELLVALENQHTIDLTDSEMNKLFEKTKKQLRENAEDMGNGCFKIYHKCDNACIGSIRNGTYDHNVYRDEALNNRFQIKGVELKSGYKDWILWISFAISCFLLCVALLGFIMWACQKGNIRCNICI

SEQ ID NO: 13671 - protein, 566 aa, synthetic construct; identical to SEQ ID NO: 12441
  REGION 1..566: note = hemagglutinin__InfluenzaA__ALN39741

SEQ ID NO: 13672 - protein, 566 aa, synthetic construct
  REGION 1..566: note = hemagglutinin__InfluenzaA__ALN39742
MKTIIALSYILCLVFAQKIPGNDNSTATLCLGHHAVPNGTIVKTITNDRIEVTNATELVQNSSIGEICDSPHQILDGENCTLIDALLGDPQCDGFQNKKWDLFVERSKAYSNCYPYDVPDYASLRSLVASSGTLEFNNESFNWTGVTQNGTSSACIRRSSSSFFSRLNWLTHLNYTYPALNVTMPNNEQFDKLYIWGVHHPGTDKDQIFLYAQSSGRITVSTKRSQQAVIPNIGSRPRIRDIPSRISIYWTIVKPGDILLINSTGNLIAPRGYFKIRSGKSSIMRSDAPIGKCKSECITPNGSIPNDKPFQNVNRITYGDCPRYVKHSTLKLATGMRNVPEKQTRGIFGAIAGFIENGWEGMVDGWYGFRHQNSEGRGQAADLKSTQAAIDQINGKLNRLIGKTNEKFHQIEKEFSEVEGRIQDLEKYVEDTKIDLWSYNAELLVALENQHTIDLTDSEMNKLFEKTKKQLRENAEDMGNGCFKIYHKCDNACIGSIRNGTYDHNVYRDEALNNRFQIKGVELKSGYKDWILWISFAISCFLLCVALLGFIMWACQKGNIRCNICI

SEQ ID NO: 13673 - protein, 566 aa, synthetic construct
  REGION 1..566: note = hemagglutinin__InfluenzaA__ALN39743
MKTIIALSYILCLVFAQKIPGNDNSTATLCLGHHAVPNGTIVKTITNDRIEVTNATELVQNSSIGEICDSPHQILDGENCTLIDALLGDPQCDGFQNKKWDLFVERSKAYSNCYPYDVPDYASLRSLVASSGTLEFNNESFNWTGVTQNGTSSACIRKSSSSFFSRLNWLTHLNYIYPALNVTMPNNEQFDKLYIWGVHHPGTDKDQIFLYAQSSGRITVSTKRSQQAVIPNIGSRPRIRDIPSRISIYWTIVKPGDILLINSTGNLIAPRGYFKIRSGKSSIMRSDAPIGKCKSECITPNGSIPNDKPFQNVNRITYGACPRYVKHSTLKLATGMRNVPEKQTRGIFGAIAGFIENGWEGMVDGWYGFRHQNSEGRGQAADLKSTQAAIDQINGKLNRLIGKTNEKFHQIEKEFSEVEGRIQDLEKYVEDTKIDLWSYNAELLVALENQHTIDLTDSEMNKLFEKTKKQLRENAEDMGNGCFKIYHKCDNACIGSIRNGTYDHNVYRDEALNNRFQIKGVELKSGYKDWILWISFAISCFLLCVALLGFIMWACQKGNIRCNICI

SEQ ID NO: 13674 - protein, 566 aa, synthetic construct
  REGION 1..566: note = hemagglutinin__InfluenzaA__ALN39744
MKTIIALSYILCLVFAQKIPGNDNSTATLCLGHHAVPNGTIVKTITNDRIEVTNATELVQNSSIGEICDSPHQILDGENCTLIDALLGDPQCDGFQNKKWDLFVERSKAYSNCYPYDVPDYASLRSLVASSGTLEFNNESFNWTGVTQNGTSSACIRKSSSSFFSRLNWLTHLNYTYPALNVTMPNNEQFDKLYIWGVHHPGTDKDQIFLYAQSSGRITVSTKRSQQAVIPNIGSRPRIRDIPSRISIYWTIVKPGDILLINSTGNLIAPRGYFKIRSGKSSIMRSDAPIGKCKSECITPNGSIPNDKPFQNVNRITYGACPRYVKHSTLKLATGMRNVPEKQTRGIFGAIAGFIENGWEGMVDGWYGFRHQNSEGRGQAADLKSTQAAIDQINGKLNRLIGKTNEKFHQIEKEFSEVEGRIQDLEKYVEDTKIDLWSYNAELLVALENQHTIDLTDSEMNKLFEKTKKQLRENAEDMGNGCFKIYHKCDNACIGSIRNGTYDHNVYRDEALNNRFQIKGVELKSGYKDWILWISFAISCFLLCVALLGFIMWACQKGNIRCNICI

SEQ ID NO: 13675 - protein, 566 aa, synthetic construct
  REGION 1..566: note = hemagglutinin__InfluenzaA__ALN39745
MKTIIALSYILCLVFAQKIPGNDNSTATLCLGHHAVPNGTIVKTITNDRIEVTNATELVQNSSIGEICDSPHQILDGENCTLIDALLGDPQCDGFQNKKWDLFVERSKAYSNCYPYDVPDYASLRSLVASSGTLEFNNESFNWTGVTQNGTSSACIRKSSSSFFSRLNWLTHLNYKYPALNVTMPNNEQFDKLYIWGVHHPGTDKDQIFLYAQSSGRITVSTKRSQQAVIPNIGSRPRIRDIPSRISIYWTIVKPGDILLINSTGNLIAPRGYFKIRSGKSSIMRSDAPIGKCKSECITPNGSIPNDKPFQNVNRITYGACPRYVKHSTLKLATGMRNVPEKQTRGIFGAIAGFIENGWEGMVDGWYGFRHQNSEGRGQAADLKSTQAAIDQINGKLNRLIGKTNEKFHQIEKEFSEVEGRIQDLEKYVEDTKIDLWSYNAELLVALENQHTIDLTDSEMNKLFEKTKKQLRENAEDMGNGCFKIYHKCDNACIGSIRNGTYDHNVYRDEALNNRFQIKGVELKSGYKDWILWISFAISCFLLCVALLGFIMWACQKGNIRCNICI

SEQ ID NO: 13676 - protein, 566 aa, synthetic construct; identical to SEQ ID NO: 13674
  REGION 1..566: note = hemagglutinin__InfluenzaA__ALN39746

SEQ ID NO: 13677 - protein, 566 aa, synthetic construct; identical to SEQ ID NO: 13369
  REGION 1..566: note = hemagglutinin__InfluenzaA__ALN39747

SEQ ID NO: 13678 - protein, 566 aa, synthetic construct
  REGION 1..566: note = hemagglutinin__InfluenzaA__ALN39748
MKTIIALSYILCLVFAQKIPGNDNSTATLCLGHHAVPNGTIVKTITNDRIEVTNATELVQNSSIGEICDSPHQILDGENCTLIDALLGDPQCDGFQNKKWDLFVERSKAYSNCYPYDVPDYASLRSLVASSGTLEFNNESFNWTGVTQNGTSSACIRRSSSSFFSRLNWLTHLNYAYPALNVTMPNNEQFDKLYIWGVHHPGTDKDQIFLYAQSSGRITVSTKRSQQAVIPNIGSRPRIRDIPSRISIYWTIVKPGDILLINSTGNLIAPRGYFKILSGKSSIMRSDAPIGKCKSECITPNGSIPNDKPFQNVNRITYGACPRYVKHSTLKLATGMRNVPEKQTRGIFGAIAGFIENGWEGMVDGWYGFRHQNSEGRGQAADLKSTQAAIDQINGKLNRLIGKTNEKFHQIEKEFSEVEGRIQDLEKYVEDTKIDLWSYNAELLVALENQHTIDLTDSEMNKLFEKTKKQLRENAEDMGNGCFKIYHKCDNACIGSIRNGTYDHNVYRDEALNNRFQIKGVELKSGYKDWILWISFAISCFLLCVALLGFIMWACQKGNIRCNICI

SEQ ID NO: 13679 - protein, 566 aa, synthetic construct
  REGION 1..566: note = hemagglutinin__InfluenzaA__ALN39749
MKTIIALSYILCLVFAQKLPGNDNSTATLCLGHHAVPNGTIVKTITNDRIEVTNATELVQNSSIGEICNSPHQILDGENCTLIDALLGDPQCDGFQNKKWDLFVERSKAYSNCYPYDVPDYASLRSLVASSGTLEFNNESFNWAGVTQNGTSSSCIRGSNSSFFSRLNWLTHLNSKYPALNVTMPNNEQFDKLYIWGVHHPGTDKDQIFLYAQPSGRITVSTKRSQQAVIPNIGSRPRIRDIPSRISIYWTIVKPGDILLINSTGNLIAPRGYFKIRSGKSSIMRSDAPIGKCKSECITPNGSIPNDKPFQNVNRITYGACPRYVKQSTLKLATGMRNVPERQTRGIFGAIAGFIENGWEGMVDGWYGFRHQNSEGRGQAADLKSTQAAIDQINGKLNRLIGKTNEKFHQIEKEFSEVEGRIQDLEKYVEDTKIDLWSYNAELLVALENQHTIDLTDSEMNKLFEKTKKQLRENAEDMGNGCFKIYHKCDNACIGSIRNGTYDHDVYRDEALNNRFQIKGVELKSGYKDWILWISFAISCFLLCVALLGFIMWACQKGNIRCNICI

SEQ ID NO: 13680 - protein, 566 aa, synthetic construct; identical to SEQ ID NO: 12441
  REGION 1..566: note = hemagglutinin__InfluenzaA__ALN39750

SEQ ID NO: 13681 - protein, 566 aa, synthetic construct; identical to SEQ ID NO: 12441
  REGION 1..566: note = hemagglutinin__InfluenzaA__ALN39789

SEQ ID NO: 13682 - protein, 566 aa, synthetic construct; identical to SEQ ID NO: 12971
  REGION 1..566: note = hemagglutinin__InfluenzaA__ALO75895

SEQ ID NO: 13683 - protein, 566 aa, synthetic construct
  REGION 1..566: note = hemagglutinin__InfluenzaA__ALO75907
MEKIVLLLAIVSLVKGDQICIGYHANNSTEQVDTIMEKNVTVTHAQDILEKTHNGKLCDLNGVKPLILKDCSVAGWFLGNRMCDEFIRVPEWSYIVERANPANDLCYPGNLNDYEELKHLLSRINHFEKTLIIPKSSWPNHTSSGVSAACPYQGMPSFFRNVVWLTKKNDAYPTIKMSYNNTYREDLLILWGIHHSNNAAEQTNLYKNPTTYVSVGTSTLNQRLEPKIATRSQVNGQRGRMDFFWTILKPNDAIHFESNGNFIAPEYAYKIVKKGDSTIMKSEMEYGHCNTKCQTPIGAINSSMPFHNIHPLTIGECPKYVKSNKLVLATGLRNSPLRERRRKRGLFGAIAGFIEGGWQGMVDGWYGYHHSNEQGSGYAADRESTQKAIDGVTNKVNSIIDKMNTQFEAVGREFNNLERRIENLNKKMEDGFLDVWTYNAELLVLMENERTLDFHDSNVKNLYDKVRLQLRDNAKELGNGCFEFYHKCDNECMESVRNGTYDYPLYSEEARLKREEISGVKLESIGTYQILSNYSTVASSLALAIIVAGLSLWMCSNGSLQCRICI

SEQ ID NO: 13684 - protein, 566 aa, synthetic construct
  REGION 1..566: note = hemagglutinin__InfluenzaA__ALO75919
MEKIVLLLAIVSLVKGDQICIGYHANNSTEQVDTIMEKNVTVTHAQDILEKTHNGKLCDLNGVKPLILKDCSVAGWLHGNRMCDEFIRVPEWSYIVERANPANDLCYPGNLNDYEELKHLLSRINHFEKTLIIPKSSWPNHTSSGVSAACPYQGMPSFFRNVVWLTKKNDAYPTIKMSYNNTYREDLLILWGIHHSNNAAEQTNLYKNPTTYVSVGTSTLNQRLEPKIATRSQVNGQRGRMDFFWTILKPNDAIHFESNGNFIAPEYAYKIVKKGDSTIMKSEMEYGHCNTKCQTPIGAINSSMPFHNIHPLTIGECPKYVKSNKLVLATGLRNSPLRERRRKRGLFGAIAGFIEGGWQGMVDGWYGYHHSNEQGSGYAADRESTQKAIDGVTNKVNSIIDKMNTQFEAVGREFNNLERRIENLNKKMEDGFLDVWTYNAELLVLMENERTLDFHDSNVKNLYDKVRLQLRDNAKELGNGCFEFYHKCDNECMESVRNGTYDYPLYSEEASLKREEISGVKLESIGTYQILSIYSTVASSLALAIIVAGLSLWMCSNGSLQCRICI

SEQ ID NO: 13685 - protein, 560 aa, synthetic construct
  REGION 1..560: note = hemagglutinin__InfluenzaA__ALT20080
METVSLITILLVATVSNADKICIGYQSTNSTETVDTLTENNVPVTHAKELLHTEHNGMLCATSLGQPLILDTCTIEGLIYGNPSCDLSLEGREWSYIVERPSAVNGLCYPGNVENLEELRSLFSSARSYQRIQIFPDTIWNVSYDGTSTACSGSFYRSMRWLTRKNGDYPIQDAQYTNNQGKNILFMWGINHPPTDTTQRDLYTRTDTTTSVATEEINRIFKPLIGPRPLVNGLMGRIDYYWSVLKPGQTLRIKSDGNLIAPWFGHILSGESHGRILKTNLKRGSCTVQCQTEKGGLNTTLPFQNVSKYAFGNCSKYIGIKSLKLAVGLRNVPSRSSRGLFGAIAGFIEGGWSGLVAGWYGFQHSNDQGVGMAADRDSTQKAIDKITSKVNNIVDKMNKQYEIIDHEFSEVETRLNMINNKIDDQIQDIWAYNAELLVLLENQKTLDEHDANVNNLYNKVKRALGSNAVEDGKGCFELYHKCDDQCMETIRNGTYNRRKYQEESKLERQKIEGVKLESEGTYKILTIYSTVASSLVIAMGFAAFLFWAMSNGSCRCNICI

SEQ ID NO: 13686 - protein, 566 aa, synthetic construct
  REGION 1..566: note = hemagglutinin__InfluenzaA__ALT66860
MKAILVVLLYTFTTANADTLCIGYHANNSTDTVDTVLEKNVTVTHSVNLLEDKHNGKLCKLRGVAPLHLGKCNIAGWILGNPECESLSTASSWSYIVETSNSDNGTCYPGDFINYEELREQLSSVSSFERFEIFPKTSSWPNHDSNKGVTAACPHAGAKSFYKNLIWLVKKGNSYPKLNQSYINDKGKEVLVLWGIHHPSTTADQQSLYQNADAYVFVGTSRYSKKFKPEIATRPKVRDQEGRMNYYWTLVEPGDKITFEATGNLVVPRYAFTMERNAGSGIIISDTPVHDCNTTCQTPEGAINTSLPFQNIHPITIGKCPKYVKSTKLRLATGLRNVPSIQSRGLFGAIAGFIEGGWTGMVDGWYGYHHQNEQGSGYAADLKSTQNAIDKITNKVNSVIEKMNTQFTAVGKEFNHLEKRIENLNKKVDDGFLDIWTYNAELLVLLENERTLDYHDSNVKNLYEKVRNQLKNNAKEIGNGCFEFYHKCDNTCMESVKNGTYDYPKYSEEAKLNREKIDGVKLESTRIYQILAIYSTVASSLVLVVSLGAISFWMCSNGSLQCRICI

SEQ ID NO: 13687 - protein, 566 aa, synthetic construct
  REGION 1..566: note = hemagglutinin__InfluenzaA__AMA65391
MKAILVVLLYTFTTANADTLCIGYHANNSTDTVDTVLEKNVTVTHSVNLLEDKHNGKLCKLRGVAPLHLGKCNIAGWILGNPECESLSTASSWSYIVETSNSDNGTCYPGDFINYEELREQLSSVSSFERFEIFPKTSSWPNHDSNKGVTAACPHAGAKSFYKNLIWLVKKGNSYPKLNQSYINDKGKEVLVLWGIHHPSTTADQQSLYQNADAYVFVGTSRYSKKFKPEIATRPKVRGQEGRMNYYWTLVEPGDKITFEATGNLVVPRYAFTMERNAGSGIIISDTPVHDCNTTCQTPEGAINTSLPFQNIHPITIGKCPKYVKSTKLRLATGLRNVPSIQSRGLFGAIAGFIEGGWTGMVDGWYGYHHQNEQGSGYAADLKSTQNAIDKITNKVNSVIEKMNTQFTAVGKEFNHLEKRIENLNKKVDDGFLDIWTYNAELLVLLENERTLDYHDSNVKNLYEKVRNQLKNNAKEIGNGCFEFYHKCDNTCMESVKNGTYDYPKYSEEAKLNREKIDGVKLESTRIYQILAIYSTVASSLVLVVFLGAISFWMCSNGSLQCRICI

SEQ ID NO: 13688 - protein, 566 aa, synthetic construct
  REGION 1..566: note = hemagglutinin__InfluenzaA__AMA65393
MKAILVVLLYTFTTANADTLCIGYHANNSTDTVDTVLEKNVTVTHSVNLLEDKHNGKLCKLRGVAPLHLGKCNIAGWILGNPECESLSTASSWSYIVETSNSDNGTCYPGDFINYEELREQLSSVSSFERFEIFPKTSSWPNHDSNKGVTAACPHAGAKSFYKNLIWLVKKGNSYPKLNQSYINDKGKEVLVLWGIHHPSTTADQQSLYQNADAYVFVGTSRYSKKFKPEIATRPKVRDQEGRMNYYWTLVEPGDKITFEATGNLVVPRYAFTMERNAGSGIIISDTPVHDCNTTCQTPEGAINTSLPFQNIHPITIGKCPKYVKSTKLRLATGLRNVPSIQSRGLFGAIAGFIEGGWTGMVDGWYGYHHQNEQGSGYAADLKSTQNAIDKITNKVNSVIEKMNTQFTAVGKEFNHLEKRIENLNKKVDDGFLDIWTYNAELLVLLENERTLDYHDSNVKNLYEKVRNQLKNNAKEIGNGCFEFYHKCDNTCMESVKNGTYDYPKYSEEAKLNREKIDGVKLESTRIYQILAIYSPVASSLVLVVFLGAISFWMCSNGSLQCRICI

SEQ ID NO: 13689 - protein, 566 aa, synthetic construct
  REGION 1..566: note = hemagglutinin__InfluenzaA__BAA02768
MKAKLLVLLCAFTATDADTICIGYHANNSTDTVDTVLEKNVTVTHSVNLLEDSHNGKLCRLKGIAPLQLGNCSIAGWILGNPECESLFSKESWSYIAETPNSENGTCYPGYFADYEELREQLSSVSSFERFEIFPKESSWPNHTVTKGVTASCSHNGKSSFYRNLLWLTGKNGLYPNLSKSYVNNKEKEVLVLWGVHHPSNIGDQRAIYHTENAYVSVVSSHYSRRFTPEIAKRPKVRGQEGRINYYWTLLEPGDTIIFEANGNLIAPWYAFALSRGFGSGIITSNASMDECDAKCQTPQGAINSSLPFQNVHPVTIGECPKYVRSTKLRMVTGLRNIPSIQSRGLFGAIAGFIEGGWTGMIDGWYGYHHQNEQGSGYAADQKSTQNAINGITNKVNSVIEKMNTQFTAVGKEFNKLERRMEYLNKKVDDGFLDIWTYNAELLVLLENERTLDFHDSNVKNLYEKVKSQLKNNAKEIGYGCFEFYHKCNNECMESVKNGTYDYPKYSEESKLNREKIDGVKLESMGVYQILAIYSTVASSLVLLVSLGAISFWMCSNGSLQCRICI

SEQ ID NO: 13690 - protein, 566 aa, synthetic construct
  REGION 1..566: note = hemagglutinin__InfluenzaA__BAA02769
MKAKLLVLLCAFTATDADTICIGYHANNSTDTVDTVLEKNVTVTHSVNLLEDSHNGKLCRLKGIAPLQLGNCSIAGWILGNPECESLFSKESWSYIAETPNSENGTCYPGYFADYEELREQLSSVSSFERFEIFPKESSWPNHTVTKGVTASCSHNGKSSFYRNLLWLTGKNGLYPNLSKSYVNNKEKEVLVLWGVHHPSNIRDQRAIYHTENAYVSVVSSHYSRRFTPEIAKRPKVRDQEGRINYYWTLLEPGDTIIFEANGNLIAPWYAFALSRGFGSGIITSNASMDECDAKCQTPQGAINSSLPFQNVHPVTIGECPKYVRSTKLRMVKGLRNIPSIQSRGLFGAIAGFIEGGWTGMIDGWYGYHHQNEQGSGYAADQKSTQNAINGITNKVNSVIEKMNTQFTAVGKEFNKLERRMEYLNKKVDDGFLDIWTYNAELLVLLENERTLDFHDSNVKNLYEKVKSQLKNNAKEIGYGCFEFYHKCNNECMESVKNGTYDYPKYSEESKLNREKIDGVKLESMGVYQILAIYSTVASSLVLLVSLGAISFWMCSNGSLQCRICI

SEQ ID NO: 13691 - protein, 562 aa, synthetic construct
  REGION 1..562: note = hemagglutinin__InfluenzaA__BAC43764
MAIIYLILLFTAVRGDQICIGYHANNSTEKVDTILERNVTVTHAKNILEKTHNGKLCKLNGIPPLELGDCSIAGWLLGNPECDRLLIVPEWSYIMEKENPRDGLCYPGSFNDYEELKHLLSSVKHFEKVKILPKDRWTQHTTTGGSRACAVSGNPSFFRNMVWLTKKGSNYPVAKGSYNNTSGEQMLIIWGVHHPIDETEQITLYQNVGTYVSVGTSTLNKRSTPEIATRPKVNGLGSRMEFSWTLLDMWDTINFESTGNLIAPEYGFKISKRGSSGIMKTEGTLENCETKCQTPLGAINTTLPFHNVHPLTIGECPKYVKSEKLVLATGLRNVPQIESRGLFGAIAGFIEGGWQGMVDGWYGYHHSNDQGSGYAADKESTQKAFDGITNKVNSVIEKMNTQFEAVGKEFSNLERRLENLNKKMEDGFLDVWTYNAELLVLMENERTLDFHDSNVKNLYDKVRMQLRDNVKELGNGCFEFYHKCDDECMNSVKNGTYDYPKYEEESKLNRNEIKGVKLSSMGVYQILAIYATVAGSLSLAIMMAGISFWMCSNGSLQFRICI

SEQ ID NO: 13692 - protein, 568 aa, synthetic construct
  REGION 1..568: note = hemagglutinin__InfluenzaA__BAE07201
MEKIVLLFAIVSLVKSDQICIGYHANNSTEQVDTIMEKNVTVTHAQDILEKTHNGKLCDLDGVKPLILRDCSVAGWLLGNPMCDEFINVPEWSYIVEKANPANDLCYPGDFNDYEELKHLLSRINHFEKIQIIPKNSWSSHEASLGVSSACPYQGKSSFFRNVVWLIKKNNAYPTIKRSYNNTNQEDLLVLWGIHHPNDAAEQTRLYQNPTTYISVGTSTLNQRLVPKIATRSKVNGQNGRMEFFWTILKPNDAINFESNGNFIAPEYAYKIVKKGDSAIMKSELEYGNCNTKCQTPMGAINSSMPFHNIHPLTIGECPKYVKSNRLVLATGLRNSPQRERRRKKRGLFGAIAGFIEGGWQGMVDGWYGYHHSNEQGSGYAADKESTQKAIDGVTNKVNSIIDKMNTQFEAVGREFNNLERRIENLNKKMEDGFLDVWTYNAELLVLMENERTLDFHDSNVKNLYDKVRLQLRDNAKELGNGCFEFYHKCDNECMESVRNGTYDYPQYSEEARLKREEISGVKLESIGTYQILSIYSTVASSLALAIMVAGLSLWMCSNGSLQCRICI

SEQ ID NO: 13693 - protein, 566 aa, synthetic construct
  REGION 1..566: note = hemagglutinin__InfluenzaA__BAH95823
MKAILVVLLYTFATANADTLCIGYHANNSTDTVDTVLEKNVTVTHSVNLLEDKHNGKLCKLRGVAPLHLGKCNIAGWILGNPECESLSTASSWSYIVETSSSDNGTCYPGDFIDYEELREQLSSVSSFERFEIFPKTSSWPNHDSNKGVTAACPHAGAKSFYKNLIWLVKKGNSYPKLSKSYINDKGKEVLVLWGIHHPSTSADQQSLYQNADAYVFVGSSRYSKKFKPEIAIRPKVRDQEGRMNYYWTLVEPGDKITFEATGNLVVPRYAFAMERNAGSGIIISDTPVHDCNTTCQTPKGAINTSLPFQNIHPITIGKCPKHVKSTKLRLATGLRNVPSIQSRGLFGAIAGFIEGGWTGMVDGWYGYHHQNEQGSGYAADLKSTQNAIDEITNKVNSVIEKMNTQFTAVGKEFNHLEKRIENLNKKVDDGFLDIWTYNAELLVLLENERTLDYHDSNVKNLYEKVRSQLKNNAKEIGNGCFEFYHKCDNTCMESVKNGTYDYPKYSEEAKLNREEIDGVKLESTRIYQILAIYSTVASSLVLVVSLGAISFWMCSNGSLQCRICI

SEQ ID NO: 13694 - protein, 566 aa, synthetic construct; identical to SEQ ID NO: 2656
  REGION 1..566: note = hemagglutinin__InfluenzaA__BAH95824

SEQ ID NO: 13695 - protein, 568 aa, synthetic construct
  REGION 1..568: note = hemagglutinin__InfluenzaA__BAJ07997
MEKIVLLFAIVSLVKSDQICIGYHANNSTEQVDTIMEKNVTVTHAQDILEKTHNGKLCDLDGVKPLILRDCSVAGWLLGNPMCDEFINVPEWSYIVEKANPANDLCYPGDFNDYEELKHLLSRINHFEKIQIIPKNSWSSHEASLGVSSACPYQGKSSFFRNVVWLIKKNNAYPTIKRSYNNTNQEDLLVLWGIHHPNDAAEQTRLYQNPTTYISVGTSTLNQRLVPKIATRSKVNGQSGRMEFFWTILKPNDAINFESNGNFIAPEYAYKIVKKGDSAIMKSELEYGNCNTKCQTPMGAINSSMPFHNIHPLTIGECPKYVKSNRLVLATGLRNSPQRERRRKKRGLFGAIAGFIEGGWQGMVDGWYGYHHSNEQGSGYAADKESTQKAIDGVTNKVNSIIDKMNTQFEAVGREFNNLERRIENLNKKMEDGFLDVWTYNAELLVLMENERTLDFHDSNVKNLYDKVRLQLRDNAKELGNGCFEFYHKCDNECMESVRNGTYDYPQYSEEARLKREEISGVKLESIGTYQILSIYSTVASSLALAIMVAGLSLWMCSNGSLQCRICI

SEQ ID NO: 13696 - protein, 566 aa, synthetic construct
  REGION 1..566: note = hemagglutinin__InfluenzaA__BAJ39949
MKAILVVLLYTFATANADTLCIGYHANNSTDTVDTVLEKNVTVTHSVNLLEDKHNGKLCKLRGVAPLHLGKCNIAGWILGNPECESLSTASSWSYIVETSSSDNGTCYPGDFIDYEELREQLSSVSSFERFEIFPKTSSWPNHDSNKGVTAACPHAGAKSFYKNLIWLVKKGNSYPKLSKSYINDKGKEVLVLWGIHHPSTSADQQSLYQNADTYVFVGTSRYSKKFKPEIAIRPKVRDQEGRMNYYWTLVEPGDKITFEATGNLVVPRYAFAMERNAGSGIIISDTPVHDCNTTCQTPKGAINTSLPFQNIHPITIGKCPKYVKSTKLRLATGLRNVPSIQSRGLFGAIAGFIEGGWTGMVDGWYGYHHQNEQGSGYAADLKSTQNAIDEITNKVNSVIEKMNTQFTAVGKEFNHLEKRIENLNKKVDDGFLDIWTYNAKLLVLLKNERTLDYHDSNVKNLYEKVRSQLKNNAKEIGNGCFEFYHKCDNTCMESVKNGTYDYPKYSEEAKLNREEIDGVKLESTRIYQILAIYSTVASSLVLVVSLGAISFWMCSNGSLQCRICI

SEQ ID NO: 13697 - protein, 566 aa, synthetic construct
  REGION 1..566: note = hemagglutinin__InfluenzaA__BAJ39950
MKAILVVLLYTFATANADTLCIGYHANNSTDTVDTVLEKNVTVTHSVNLLEDKHNGKLCKLRGVAPLHLGKCNIAGWILGNPECESLSTASSWSYIAETSSSDNGTCYPGDFIDYEELREQLSSVSSFERFEIFPKTSSWPNHDSNKGVTAACPHAGAKSFYKNLIWLVKKGNSYPKLSKSYINDKGKEVLVLWGIHHPSTSADQQSLYQNADAYVFVGTSRYSKKFKPEIAIRPKVRDQEGRMNYYWTLVEPGDKITFEATGNLVVPRYAFAMERNAGSGIIISDTPVHDCNTTCQTPKGAINTSLPFQNIHPITIGKCPKYVKSTKLRLATGLRNVPSIQSRGLFGAIAGFIEGGWTGMVDGWYGYHHQNEQGSGYAADLKSTQNAIDEITNKVNSVIEKMNTQFTAVGKEFNHLEKRIENLNKKVDDGFLDIWTYNAELLVLLENERTLDYHDSNVKNLYEKVRSQLKNNAKEIGNGCFEFYHKCDNTCMESVKNGTYDYPKYSEEAKLNREEIDGVKLESTRIYQILAIYSTVASSLVLVVSLGAISFWMCSNGSLQCRICI

SEQ ID NO: 13698 - protein, 566 aa, synthetic construct
  REGION 1..566: note = hemagglutinin__InfluenzaA__BAJ39951
MKAILVVLLYTFATANADTLCIGYHANNSTDTVDTVLEKNVTVTHSVNLLEDKHNGKLCKLRGVAPLHLGKCNIAGWILGNPECESLSTASSWSYIVETSSSDNGTCYPGDFIDYEELREQLSSVSSFERFEIFPKTSSWPNHDSNKGVTAACPHAGAKSFYKNLIWLVKKGNSYPKLSKSYINDKGKEVLVLWGIHHPSTSADQQSLYQNADTYVFVGTSRYSKKFKPEIAIRPKVRDQEGRMNYYWTLVEPGDKITFEATGNLVVPRYAFAMERNAGSGIIISDTPVHDCNTTCQTPKGAINTSLPFQNIHPITIGKCPKYVKSTKLRLATGLRNVPSFQSRGLFGAIAGFIEGGWTGMVDGWYGYHHQNEQGSGYAADLKSTQNAIDEITNKVNSVIEKMNTQFTAVGKEFNHLEKRIENLNKKVDDGFLDIWTYNAELLVLLENERTLDYHDSNVKNLYEKVRSQLKNNAKEIGNGCFEFYHKCDNTCMESVKNGTYDYPKYSEEAKLNREEIDGVKLESTRIYQILAIYSTVASSLVLVVSLGAISFWMCSNGSLQCRICI

SEQ ID NO: 13699 - protein, 566 aa, synthetic construct; identical to SEQ ID NO: 9272
  REGION 1..566: note = hemagglutinin__InfluenzaA__BAJ39952

SEQ ID NO: 13700 - protein, 566 aa, synthetic construct
  REGION 1..566: note = hemagglutinin__InfluenzaA__BAJ39953
MKAILVVLLYTFATANADTLCIGYHANNSTDTVDTVLEKNVTVTHSVNLLEDKHNGKLCKLRGVAPLHLGKCNIAGWILGNPECESLSTASSWSYIVETSSSDNGTCYPGDFIDYEELREQLSSVSSFERFEIFPKTSSWPNHDSNKGVTAACPHAGAKSFYKNLIWLVKKGNSYPKLSKSYINDKGKEVLVLWGIHHPSTSADQQSLYQNADTYVFVGTSRYSKKFKPEIAIRPKVRDQEGRMNYYWTLVEPGDKITFEATGNLVVPRYAFAMERNAGSGIIISDTPVHDCNTTCQTPKGAINTSLPFQNIHPITIGKCPKYVKSTKLRLATGLRNVPSIQSRGLFGAIAGFIEGGWTGMVDGWYGYHHQNEQGSGYAADLKSTQNAIDEITNKVNSVIEKMNTQFTAVGKEFNHLEKRIENLNKKVDDGFLDIWTYNAKLLVLLENERTLDYHDSNVKNLYEKVRSQLKNNAKEIGNGCFEFYHKCDNTCMESVKNGTYDYPKYSEEAKLNREEIDGVKLESTRIYQILAIYSTVASSLVLVVSLGAISFWMCSNGSLQCRICI

SEQ ID NO: 13701 - protein, 566 aa, synthetic construct; identical to SEQ ID NO: 9272
  REGION 1..566: note = hemagglutinin__InfluenzaA__BAJ39954

SEQ ID NO: 13702 - protein, 566 aa, synthetic construct
  REGION 1..566: note = hemagglutinin__InfluenzaA__BAJ39955
MKAILVVLLYTFATANADTLSIGYHANNSTDTVDTVLEKNVTVTHSVNLLEDKHNGKLCKLRGVAPLHLGKCNIAGWILGNPECESLSTASSWSYIVETSSSDNGTCYPGDFIDYEELREQLSSVSSFERFEIFPKTSSWPNHDSNKGVTAACPHAGAKSFYKNLIWLVKKGNSYPKLSKSYINDKGKEVLVLWGIHHPSISADQQSLYQNADTYVFVGTSRYSKKFKPEIAIRPKVRDQEGRMNYYWTLVEPGDKITFEATGNLVVPRYAFAMERNAGSGIIISDTPVHDCNTTCQTPKGAINTSLPFQNIHPITIGKCPKYVKSTKLRLATGLRNVPSIQSRGLFGAIAGFIEGGWTGMVDGWYGYHHQNEQGSGYAADLKSTQNAIDEITNKVNSVIEKMNTQFTAVGKEFNHLEKRIENLNKKVDDGFLDIWTYNAELLVLLENERTLDYHDSNVKNLYEKVRSQLKNNAKEIGNGCFEFYHKCDNTCMESVKNGTYDYPKYSEEAKLNREEIDGVKLESTRIYQILAIYSTVASSLVLVVSLGAISFWMCSNGSLQCKICI

SEQ ID NO: 13703 - protein, 566 aa, synthetic construct; identical to SEQ ID NO: 13697
  REGION 1..566: note = hemagglutinin__InfluenzaA__BAJ39956

SEQ ID NO: 13704 - protein, 566 aa, synthetic construct; identical to SEQ ID NO: 9272
  REGION 1..566: note = hemagglutinin__InfluenzaA__BAJ39957

SEQ ID NO: 13705 - protein, 566 aa, synthetic construct
  REGION 1..566: note = hemagglutinin__InfluenzaA__BAJ39958
MKAILVVLLYTFATANADTLCIGYHANNSTDTVDTVLEKNVTVTHSVNLLEDKHNGKLCKLRGVAPLHLGKCNIAGWILGNPECESLSTASSWSYIVETSSSDNGTCYPGDFIDYEELREQLSSVSSFERFEIFPKTSSWPNHDSNKGVTAACPHAGAKSFYKNLIWLVKKGNSYPKLSKSYINDKGKEVLVLWGIHHPSTSADQQSLYQNADAYVFVGTSRYSKKFKPEIAIRPKVRDQEGRMNYYWTLVEPGDKITFEATGNLVVPRYAFAMERNAGSGIIISDTPVHDCNTTCQTPKGAINTSLPFQNIHPITIGKCPKYVKSTKLRLATGLRNVPSIQSRGLFGAIAGFIEGGWTGMVDGWYGYHHQNEQGSGYAADLKSTQNAIDEITNKVNSVIEKMNTQFTAVGKEFNHLEKRIENLNKKVDDGFLDIWTYNAELLVLLENERTLDYHDSNVKNLYEKVKSQLKNNAKEIGNGCFEFYHKCDNTCMESVKNGTYDYPKYSKEAKLNREKIDGVKLESTRIYQILAIYSTVASSLVLVVSLGAISFWMCSNGSLQCRICI

SEQ ID NO: 13706 - protein, 566 aa, synthetic construct
  REGION 1..566: note = hemagglutinin__InfluenzaA__BAJ39959
MKAILVVLLYTFATANADTLCIGYHANNSTDTVDTVLEKNVTVTHSVNLLEDKHNGKLCKLRGVAPLHLGKCNIAGWILGNPECESLSTASSWSYIVETSSSDNGTCYPGDFIDYEELREQLSSVSSFERFEIFPKTSSWPNHDSNKGVTAACPHAGAKSFYKNLIWLVKKGNSYPKLSKSYINDKGKEVLVLWGIHHPSTSADQQSLYQNADAYVFVGTSRYSKKFKPEIAIRPKVRDQEGRMNYYWTLVEPGDKITFEATGNLVVPRYAFAMERNAGSGIIISDTPVHDCNTTCQTPKGAINTSLPFQNIHPITIGKCPKYVKSTKLRLATGLRNVPFIQSRGLFGAIAGFIEGGWTGMVDGWYGYHHQNEQGSGYAADLKSTQNAIDEITNKVNSVIEKMNTQFTAVGKEFNHLEKRIENLNKKVDDGFLDIWTYNAELLVLLENERTLDYHDSNVKNLYEKVKSQLKNNAKEIGNGCFEFYHKCDNTCMESVKNGTYDYPKYSKEAKLNREEIDGVKLESTRIYQILAIYSTVASSLVLVVSLGAISFWMCSNGSLQCRICI

SEQ ID NO: 13707 - protein, 566 aa, synthetic construct; identical to SEQ ID NO: 2669
  REGION 1..566: note = hemagglutinin__InfluenzaA__BAJ39960

SEQ ID NO: 13708 - protein, 566 aa, synthetic construct; identical to SEQ ID NO: 3298
  REGION 1..566: note = hemagglutinin__InfluenzaA__BAJ39961

SEQ ID NO: 13709 - protein, 566 aa, synthetic construct
  REGION 1..566: note = hemagglutinin__InfluenzaA__BAJ39962
MKAILVVLLYTFATANADTLCIGYHANNSTDTVDTVLEKNVTVTHSVNLLEDKHNGKLCKLRGVAPLHLGKCNIAGWILGNPECESLSTASSWSYIAETSSSDNGTCYPGDFIDYEELREQLSSVSSFERFEIFPKTSSWPNHDSNKGVTAACPHAGAKSFYKNLTWLVKKGNSYPKLSKSYINDKGKEVLVLWGIHHPSTSADQQSLYQNADAYVFVGTSRYSKKFKPEIAIRPKVRDQEGRMNYYWTLVEPGDKITFEATGNLVVPRYAFAMERNAGSGIIISDTPVHDCNTTCQTPKGAINTSLPFQNIHPITIGKCPKYVKSTKLRLATGLRNVPFIQSRGLFGAIAGFIEGGWTGMVDGWYGYHHQNEQGSGYAADLKSTQNAIDEITNKVNSVIEKMNTQFTAVGKEFNHLEKRIENLNKKVDDGFLDIWTYNAELLVLLENERTLDYHDSNVKNLYEKVKSQLKNNAKEIGNGCFEFYHKCDNTCMESVKNGTYDYPKYSKEAKLNREEIDGVKLESTRIYQILAIYSTVASSLVLVVSLGAISFWMCSNGSLQCRICI

SEQ ID NO: 13710 - protein, 566 aa, synthetic construct; identical to SEQ ID NO: 2669
  REGION 1..566: note = hemagglutinin__InfluenzaA__BAJ39963

SEQ ID NO: 13711 - protein, 566 aa, synthetic construct; identical to SEQ ID NO: 9272
  REGION 1..566: note = hemagglutinin__InfluenzaA__BAJ39964

SEQ ID NO: 13712 - protein, 566 aa, synthetic construct; identical to SEQ ID NO: 2669
  REGION 1..566: note = hemagglutinin__InfluenzaA__BAJ39965

SEQ ID NO: 13713 - protein, 566 aa, synthetic construct; identical to SEQ ID NO: 2669
  REGION 1..566: note = hemagglutinin__InfluenzaA__BAJ39966

SEQ ID NO: 13714 - protein, 566 aa, synthetic construct
  REGION 1..566: note = hemagglutinin__InfluenzaA__BAJ39967
MKAILVVLLYTFATANADTLCIGYHANNSTDTVDTVLEKNVTVTHSVNLLEDKHNGKLCKLRGVAPLHLGKCNIAGWILGNPECELLSTASSWSYIVETSSSDNGTCYPGDFIDYEELREQLSSVSSFERFEIFPKTSSWPNHDSDKGVTAACPHAGAKSFYKNLIWLVKKGNSYPKLSKSYINDKGKEVLVLWGIHHPSTSADQQSLYQNADAYVFVGTSRYSKKFKPEIAIRPKVRDQEGRMNYYWTLVEPGDKITFEATGNLVVPRYAFAMERNAGSGIIISDTPVHDCNTTCQTPKGAINTSLPFQNIHPITIGKCPKYVKSTKLRLATGLRNVPSIQSRGLFGAIAGFIEGGWTGMVDGWYGYHHQNEQGSGYAADLKSTQNAIDEITNKVNSVIEKMNTQFTALGKEFNHLEKKIENLNKKVDDGFLDIWTYNAELLVLLENERTLDYHDSNVKNLYEKVRSQLKNNAKEIGNGCFEFYHKCDNTCMESVKNGTYDYPKYSEEAKLNREEIDGVKLESTRIYQILAIYSTVASSLVLVVSLGAISFWMCSNGSLQCRICI

SEQ ID NO: 13715 - protein, 566 aa, synthetic construct; identical to SEQ ID NO: 8197
  REGION 1..566: note = hemagglutinin__InfluenzaA__BAJ39968

SEQ ID NO: 13716 - protein, 566 aa, synthetic construct; identical to SEQ ID NO: 9272
  REGION 1..566: note = hemagglutinin__InfluenzaA__BAJ39969

SEQ ID NO: 13717 - protein, 566 aa, synthetic construct; identical to SEQ ID NO: 2669
  REGION 1..566: note = hemagglutinin__InfluenzaA__BAJ39970

SEQ ID NO: 13718 - protein, 566 aa, synthetic construct; identical to SEQ ID NO: 2669
  REGION 1..566: note = hemagglutinin__InfluenzaA__BAJ39971

SEQ ID NO: 13719 - protein, 566 aa, synthetic construct; identical to SEQ ID NO: 3298
  REGION 1..566: note = hemagglutinin__InfluenzaA__BAJ39972

SEQ ID NO: 13720 - protein, 566 aa, synthetic construct
  REGION 1..566: note = hemagglutinin__InfluenzaA__BAJ39973
MKAILVVLLYTFATANADTLCIGYHANNSTDTVDTVLEKNVTVTHSVNLLEDKHNGKLCKLRGVAPLHLGKCNIAGWILGNPECESLSTASSWSYIVETSSSDNGTCYPGDFIDYEELREQLSSVSSFERFEIFPKTSSWPNHDSNKGVTAACPHAGAKSFYKNLIWLVKKGNSYPKLSKSYINDKGKEVLVLWGIHHPSTSADQQSLYQNADTYVFVGTSRYSKKFKPEIAIRPKVRDQEGRMNYYWTLVEPGDKITFEATGNLVVPRYAFAMERNAGSGIIISDTPVHDCNTTCQTPKGAINTSLPFQNIHPITIGKCPKYVKSTKLRLATGLRNVPSIQSRGLFGAIAGFIEGGWTGMVDGWYGYHHQNEQGSGYAADLKSTQNAIDEITNKVNSVIEKMNTQFTAVGKEFNHLEKRIENLNKKVDDGFLDIWTYNAELLVLLENERTLDYHDSNVKNLYEKVKSQLKNNAKEIGNGCFEFYHKCDNTCMESVKNGTYDYPKYSEEAKLNREEIDGVKLESTRIYQILAIYSTVASSLVLVVSLGAISFWMCSNGSLQCRICI

SEQ ID NO: 13721 - protein, 566 aa, synthetic construct; identical to SEQ ID NO: 2669
  REGION 1..566: note = hemagglutinin__InfluenzaA__BAJ39974

SEQ ID NO: 13722 - protein, 566 aa, synthetic construct; identical to SEQ ID NO: 3238
  REGION 1..566: note = hemagglutinin__InfluenzaA__BAJ39975

SEQ ID NO: 13723 - protein, 566 aa, synthetic construct
  REGION 1..566: note = hemagglutinin__InfluenzaA__BAJ39976
MKAILVVLLYTFATANADTLCIGYHANNSTDTVDTVLEKNVTVTHSVNLLEDKHNEKLCKLRGVAPLHLGKCNIAGWILGNPECESLSTASSWSYIVETSSSDNGTCYPGDFIDYEELREQLSSVSSFERFEIFPKTSSWPNHDSNKGVTAACPHAGAKSFYKNLIWLVKKGNSYPKLSKSYINDKGKEVLVLWGIHHPSTSADQQSLYQNADAYVFVGTSRYSKKFKPEIAIRPKVRDQEGRMNYYWTLVEPGDKITFEATGNLVVPRYAFAMERNAGSGIIISDTPVHDCNTTCQTPKGAINTSLPFQNIHPITIGKCPKYVKSTKLRLATGLRNVPSIQSRGLFGAIAGFIEGGWTGMVDGWYGYHHQNEQGSGYAADLKSTQNAIDKITNKVNSVIEKMNTQFTAVGKEFNHLEKRIENLNKKVDDGFLDIWTYNAELLVLLENERTLDYHDSNVKNLYEKVRSQLKNNAKEIGNGCFEFYHKCDNTCMESVKNGTYDYPKYSEEAKLNREEIDGVKLESTRIYQILAIYSTVASSLVLVVSLGAINFWMCSNGSLQCRICI

SEQ ID NO: 13724 - protein, 566 aa, synthetic construct; identical to SEQ ID NO: 2669
  REGION 1..566: note = hemagglutinin__InfluenzaA__BAJ39977

SEQ ID NO: 13725 - protein, 566 aa, synthetic construct
  REGION 1..566: note = hemagglutinin__InfluenzaA__BAJ39978
MKAILVVLLYTFATANADTLCIGYHANNSTDTVDTVLEKNVTVTHSVNLLEDKHNGKLCKLRGVAPLHLGKCNIAGWILGNPECESLSTASSWSYIVETSSSDNGTCYPGDFIDYEELREQLSSVSSFERFEIFPKTSSWPNHDSNKGVTAACPHAGAKSFYKNLIWLVKKGNSYPKLSKSYINDKGKEVLVLWGIHHPSTSADQQSLYQNADAYVFVGTSRYSKKFKPEIAIRPKVREQEGRMNYYWTLVEPGDKITFEATGNLVVPRYAFAMERNAGSGIIISDTPVHDCNTTCQTPKGAINTSLPFQNIHSITIGKCPKYVKSTKLRLATGLRNVPSIQSRGLFGAIAGFIEGGWTGMVDGWYGYHHQNEQGSGYAADLKSTQNAIDEITNKVNSVIEKMNTQFTAVGKEFNHLEKRIENLNKKVDDGFLDIWTYNAELLVLLENERTLDYHDSNVKNLYEKVKSQLKNNAKEIGNGCFEFYHKCDNTCMESVKNGTYDYPKYSEEAKLNREKIDGVKLESTRIYQILAIYSTVASSLVLVVSLGAISFWMCSNGSLQCRICI

SEQ ID NO: 13726 - protein, 566 aa, synthetic construct
  REGION 1..566: note = hemagglutinin__InfluenzaA__BAJ39979
MKAILVVLLYTFATANADTLCIGYHANNSTDTVDTVLEKNVTVTHSVNLLEDKHNGKLCKLRGVAPLHLGKCNIAGWILGNPECELLSTASSWSYIVETSSSDNGTCYPGDFIDYEELREQLSSVSSFERFEIFPKTSSWPNHDSDKGVTAACPHAGAKSFYKNLIWLVKKGNSYPKLSKSYINDKGKEVLVLWGIHHPSTSADQQSLYQNADAYVFVGTSRYSKKFKPEIAIRPKVRDQEGRMDYYWTLVEPGDKITFEATGNLVVPRYAFAMERNAGSGIIISDTPVHNCNTTCQTPKGAINTSLPFQNIHPITIGKCPKYVKSTKLRLATGLRNVPSIQSRGLFGAIAGFIEGGWTGMVDGWYGYHHQNEQGSGYAADLKSTQNAIDKITNKVNSVIEKMNTQFTAVGKEFNHLENRIENLNKKVDDGFLDIWTYNAELLVLLENERTLDYHDSNVKNLYEKVRSQLKNNAKEIGNGCFEFYHKCDNTCMESVKNGTYDYPKYSEEAKLNREEIDGVKLESTRIYQILAIYSTVASSLVLVVSLGAISFWMCSNGSLQCRICI

SEQ ID NO: 13727 - protein, 566 aa, synthetic construct; identical to SEQ ID NO: 9272
  REGION 1..566: note = hemagglutinin__InfluenzaA__BAJ39980

SEQ ID NO: 13728 - protein, 566 aa, synthetic construct
  REGION 1..566: note = hemagglutinin__InfluenzaA__BAJ39981
MKAILVVLLYTFATANADTLCIGYHANNSTDTVDTVLEKNVTVTHSVNLLEDKHNGKLCKLRGVAPLHLGKCNIAGWILGNPECESLSTASSWSYIVETSSSDNGTCYPGDFIDYEELREQLSSVSSFERFEIFPKTSSWPNHDSNKGVTAACPHAGAKSFYKNLIWLVKKGNSYPKLSKSYINDKGKEVLVLWGIHHPSTSADQQSLYQNADAYVFVGTSRYSKKFKPEIAIRPKVRDQEGRMNYYWTLVEPGDKITFEATGNLVVPRYAFAMERNAGSGIIISDTPVHDCNTTCQTPKGAINTSLPFQNIHPITIGKCSKYVKSTKLRLATGLRNVPSIQSRGLFGAIAGFIEGGWTGMVDGWYGYHHQNEQGSGYAADLKSTQNAIDEITNKVNSVIEKMNTQFTAVGKEFNHLEKRIENLNKKVDDGFLDIWTYNAELLVLLENERTLDYHDSNVKNLYEKVKSQLKNNAKEIGNGCFEFYHKCDNTCMESVKNGTYDYPKYSKEAKLNREKIDGVKLESTRIYQILAIYSTVASSLVLVVSLGAISFWMCSNGSLQCRICI

SEQ ID NO: 13729 - protein, 566 aa, synthetic construct
  REGION 1..566: note = hemagglutinin__InfluenzaA__BAJ39982
MKAILVVLLYTFATANAATLCIGYHANNSTDTVDTLLEKNVTVTHSVNLLEDKHNGKLCKLRGVAPLHLGKCNIAGWILGNPECESLSTASSWSYIVETSSSDNGTCYPGDFIDYEELREQLSSVSSFERFEIFPKTSSWPNHDSNKGVTAACPHAGAKSFYKNLIWLVKKGNSYPKLSKSYINDKGKEVLVLWGIHHPSTSADQQSLYQNADAYVFVGTSRYSKKFKPEIAIRPKVRDQEGRMNYYWTLVEPGDKITFEATGNLVVPRYAFAMERNAGSGIIISDTPVHDCNTTCQTPKGAINTSLPFQNIHPITIGKCPKYVKSTKLRLATGLRNVPSIQSRGLFGAIAGFIEGGWTGMVDGWYGYHHQNEQGSGYAADLKSTQNAIDEITNKVNSVIEKMNTQFTAVGKEFNHLEKRIENLNKKVDDGFLDIWTYNAELLVLLENERTLDYHDSNVKNLYEKVRSQLKNNAKEIGNGCFEFYHKCDNTCMESVKNGTYDYPKYSEEAKLNREEIDGVKLESTRIYQILAIYSTVASSLVLVVSLGAISFWMCSNGSLQCRICI

SEQ ID NO: 13730 - protein, 566 aa, synthetic construct; identical to SEQ ID NO: 13697
  REGION 1..566: note = hemagglutinin__InfluenzaA__BAJ39983

SEQ ID NO: 13731 - protein, 566 aa, synthetic construct
  REGION 1..566: note = hemagglutinin__InfluenzaA__BAJ39984
MKAILVVLLYTFATANADTLCIGYHANNSTDTVDTVLEKNVTVTHSVNLLEDKHNGKLCKLRGVAPLHLGKCNIAGWILGNPECELLSTASSWSYIVETSSSDNGTCYPGDFIDYEELREQLSSVSSFERFEIFPKTSSWPNHDSNKGVTAACPHAGAKSFYKNLIWLVKKGNSYPKLSKSYINDKGKEVLVLWGIHHPSTSADQQSLYQNADAYVFVGTSRYSKKFKPEIAIRPKVRDQEGRMNYYWTLVEPGDKITFEATGNLVVPRYAFAMERNAGSGIIISDTPVHNCNTTCQTPKGAINTSLPFQNIHPITIGKCPKYVKSTKLRLATGLRNVPSIQSRGLFGAIAGFIEGGWTGMVDGWYGYHHQNEQGSGYAADLKSTQNAIDKITNKVNSVIEKMNTQFTAVGKEFNHLEKRIENLNKKVDDGFLDIWTYNAELLVLLENERTLDYHDSNVKNLYEKVRSQLKNNAKEIGNGCFEFYHKCDNTCMESVKNGTYDYPKYSEEAKLNREEIDGVKLESTRIYQILAIYSTVASSLVLVVSLGAISFWMCSNGSLQCRICI

SEQ ID NO: 13732 - protein, 566 aa, synthetic construct; identical to SEQ ID NO: 2669
  REGION 1..566: note = hemagglutinin__InfluenzaA__BAJ39985

SEQ ID NO: 13733 - protein, 566 aa, synthetic construct
  REGION 1..566: note = hemagglutinin__InfluenzaA__BAJ39987
MKTILVVLLYTFATANADTLCIGYHANNSTDTVDTVLEKNVTVTHSVNLLEDKHNGKLCKLRGVAPLHLGKCNIAGWILGNPECESLSTASSWSYIVETSSSDNGTCYPGDFIDYEELREQLSSVSSFERFEIFPKTSSWPNHDSNKGVTAACPHAGAKSFYKNLIWLVKKGNSYPKLSKSYINDKGKEVLVLWGIHHPSTSADQQSLYQNADTYVFVGTSRYSKKFKPEIAIRPKVRDQEGRMNYYWTLVEPGDKITFEATGNLVVPRYAFAMERNAGSGIIISDTPVHDCNTTCQTPKGAINTSLPFQNIHPITIGKCPKYVKSTKLRLATGLRNVPSIQSRGLFGAIAGFIEGGWTGMVDGWYGYHHQNEQGSGYAADLKSTQNAIDEITNKVNSVIEKMNTQFTAVGKEFNHLEKRIENLNKKVDDGFLDIWTYNAELLVLLENERTLDYHDSNVKNLYEKVRSQLKNNAKEIGNGCFEFYHKCDNTCMESVKNGTYDYPKYSKEAKLNREEIDGVKLESTRIYQILAIYSTVASSLVLVVSLGAISFWMCSNGSLQCRICI

SEQ ID NO: 13734 - protein, 566 aa, synthetic construct
  REGION 1..566: note = hemagglutinin__InfluenzaA__BAJ39988
MKAILVVLLYTFATANADTLCIGYHANNSTDTVDTVLEKNVTVTHSVNLLEDKHNGKLCKLRGVAPLHLGKCNIAGWILGNPECESLSTASSWSYIVETSSSDNGTCYPGDFIDYEELREQLSSVSSFERFEIFPKTSSWPNHDSNKGVTAACPHAGAKSFYKNLIWLVKKGNSYPKLSKSYINDKGKEVLVLWGIHHPSTSADQQSIYQNADAYVFVGTSRYSKKFKPEIAIRPKVRDQEGRMNYYWTLVEPGDKITFEATGNLVVPRYAFAMERNAGSGIIISDTPVHDCNTTCQTPKGAINTSLPFQNIHPITIGKCSKYVKSTKLRLATGLRNVPSIQSRGLFGAIAGFIEGGWTGMVDGWYGYHHQNEQGSGYAADLKSTQNAIDEITNKVNSVIEKMNTQFTAVGKEFNHLEKRIENLNKKVDDGFLDIWTYNAELLVLLENERTLDYHDSNVKNLYEKVRSQLKNNAKEIGNGCFEFYHKCDNTCMESVKNGTYDYPKYSEEAKLNREEIDGVKLESTRIYQILAIYSTVASSLVLVVSLGAISFWMCSNGSLQCRICI

SEQ ID NO: 13735 - protein, 566 aa, synthetic construct; identical to SEQ ID NO: 3983
  REGION 1..566: note = hemagglutinin__InfluenzaA__BAJ39989

SEQ ID NO: 13736 - protein, 566 aa, synthetic construct; identical to SEQ ID NO: 2669
  REGION 1..566: note = hemagglutinin__InfluenzaA__BAJ39990

SEQ ID NO: 13737 - protein, 566 aa, synthetic construct; identical to SEQ ID NO: 2669
  REGION 1..566: note = hemagglutinin__InfluenzaA__BAJ39993

SEQ ID NO: 13738 - protein, 566 aa, synthetic construct
  REGION 1..566: note = hemagglutinin__InfluenzaA__BAJ39994
MKAILVVLLYTFATANADTLCIGYHANNSTDTVDTVLEKNVTVTHSVNLLEDKHNGKLCKLRGVAPLHLGKCNIAGWILGNPECESLSTASSWSYIVETSSSDNGTCYPGDFIDYEELREQLSSVSSFERFEIFPKTSSWPNHDSNKGVTAACPHAGAKSFYKNLIWLVKKGNSYPKLSKSYINDKGKEVLVLWGIHHPSTSADQQSLYQNADTYVFVGTSRYSKKFKPEIAIRPKVRDQEGRMNYYWTLVEPGDKITFEATGNLVVPRYAFAMERNAGSGIIISDTPVHDCNTTCQTPKGAINTSLPFQNIHPTTIGKCPKYVKSTKLRLATGLRNVPSIQSRGLFGAIAGFIEGGWTGMVDGWYGYHHQNEQGSGYAADLKSTQNAIDEITNKVNSVIEKMNTQFTAVGKEFNHLEKRIENLNKKVDDGFLDIWTYNAELLVLLENERTLDYHDSNVKNLYEKVKSQLKNNAKEIGNGCFEFYHKCDNTCLESVKNGTYDYPKYSEEAKLNREKIDGVKLESTRIYQILAIYSTVASSLVLVVSLGAISFWMCSNGSLQCRICI

SEQ ID NO: 13739 - protein, 566 aa, synthetic construct; identical to SEQ ID NO: 2669
  REGION 1..566: note = hemagglutinin__InfluenzaA__BAJ39996

SEQ ID NO: 13740 - protein, 566 aa, synthetic construct
  REGION 1..566: note = hemagglutinin__InfluenzaA__BAJ39997
MKAILVVLLYTFATANADTLCIGYHANNSTDTVDTVLEKNVTVTHSVNLLEDKHNGKLCKLRGVAPLHLGKCNIAGWILGNPECESLSTASSWSYIVETSSSDNGTCYPGDFIDYEELREQLSSVSSFERFEIFPKTSSWPNHDSNKGVTAACPHAGAKSFYKNLIWLVKKGNSYPKLSKSYINDKGKEVLVLWGIHHPSTSADQQSLYQNADTYVFVGTSRYSKKFKPEIAIRPKVRDQEGRMNYYWTLVEPGDKITFEATGNLVVPRYAFAMERNAGSGIIISDTPVHDCNTTCQTPKGAINTSLPFQNIHPTTIGKCPKYVKSTKLRLATGLRNVPSIQSRGLFGAIAGFIEGGWTGMVDGWYGYHHQNEQGSGYAADLKSTQNAIDEITNKVNSVIEKMNTQFTAVGKEFNHLEKRIENLNKKVDDGFLDIWTYNAELLVLLENERTLDYHDSNVKNLYEKVRSQLKNNAKEIGNGCFEFYHKCDNTCMESVKNGTYDYPKYSEEAKLNREEIDGVKLESTRIYQILAIYSTVASSLVLVVSLGAISFWMCSNGSLQCRICI

SEQ ID NO: 13741 - protein, 566 aa, synthetic construct; identical to SEQ ID NO: 2669
  REGION 1..566: note = hemagglutinin__InfluenzaA__BAJ39998

SEQ ID NO: 13742 - protein, 566 aa, synthetic construct
  REGION 1..566: note = hemagglutinin__InfluenzaA__BAJ39999
MKAILVVLLYTFATANADTLCIGYHANNSTDTVDTVLERNVTVTHSVNLLEDKHNGKLCKLRGVAPLHLGKCNIAGWILGNPECESLSTASSWSYIVETSSSDNGTCYPGDFIDYEELREQLSSVSSFERFEIFPKTSSWPNHDSNKGVTAACPHAGAKSFYKNLIWLVKKGNSYPKLSKSYINDKGKEVLVLWGIHHPSTSADQQSLYQNADTYVFVGTSRYSKKFKPEIAIRPKVRDQEGRMNYYWTLVEPGDKITFEATGNLVVPRYAFAMERNAGSGIIISDTPVHDCNTTCQTPKGAINTSLPFQNIHPITIGKCPKYVKSTKLRLATGLRNVPSIQSRGLFGAIAGFIEGGWTGMVDGWYGYHHQNEQGSGYAADLKSTQNAIDEITNKVNSVIEKMNTQFTAVGKEFNHLEKRIENLNKKVDDGFLDIWTYNAELLVLLENERTLDYHDSNVKNLYEKVRSQLKNNAKEIGNGCFEFYHKCDNTCMESVKNGTYDYPKYSEEAKLNREEIDGVKLESTRIYQILAIYSTVASSLVLVVSLGAISFWMCSNGSLQCRICI

SEQ ID NO: 13743 - protein, 566 aa, synthetic construct
  REGION 1..566: note = hemagglutinin__InfluenzaA__BAJ40000
MKTILVVLLYTFATANADTLCIGYHANNSTDTVDTVLEKNVTVTHSVNLLEDKHNGKLCKLRGVAPLHLGKCNIAGWILGNPECESLSTASSWSYIVETSSSDNGTCYPGDFIDYEELREQLSSVSSFERFEIFPKTSSWPNHDSNKGVTAACPHAGAKSFYKNLIWLVKKGNSYPKLSKSYINDKGKEVLVLWGIHHPSTSADQQSLYQNADTYVFVGTSRYSKKFKPEIAIRPKVRDQEGRMNYYWTLVEPGDKITFEATGNLVVPRYAFAMERNAGSGIIISDTPVHDCNTTCQTPKGAINTSLPFQNIHPITIGKCPKYVKSTKLRLATGLRNVPSIQSRGLFGAIAGFIEGGWTGMVDGWYGYHHQNEQGSGYAADLKSTQNAIDEITNKVNSVIEKMNTQFTAVGKEFNHLEKRIENLNKKVDDGFLDIWTYNAELLVLLENERTLDYHDSNVKNLYEKVRSQLKNNAKEIGNGCFEFYHKCDNTCMESVKNGTYDYPKYSEEAKLNREEIDGVKLESTRIYQILAIYSTVASSLVLVVSLGAISFWMCSNGSLQCRICI

SEQ ID NO: 13744 - protein, 566 aa, synthetic construct; identical to SEQ ID NO: 7679
  REGION 1..566: note = hemagglutinin__InfluenzaA__BAJ40001

SEQ ID NO: 13745 - protein, 566 aa, synthetic construct; identical to SEQ ID NO: 2669
  REGION 1..566: note = hemagglutinin__InfluenzaA__BAJ40002

SEQ ID NO: 13746 - protein, 566 aa, synthetic construct; identical to SEQ ID NO: 7679
  REGION 1..566: note = hemagglutinin__InfluenzaA__BAJ40003

SEQ ID NO: 13747 - protein, 566 aa, synthetic construct
  REGION 1..566: note = hemagglutinin__InfluenzaA__BAJ40004
MKAILVVLLYTFATANADTLCIGYHANNSTDTVDTVLEKNVTVTHSVNLLEDKHNGKLCKLRGVAPLHLGKCNIAGWILGNPECESLSTASSWSYIVETSSSDNGTCYPGDFIDYEELREQLSSVSSFERFEIFPKTSSWPNHDSNKGETAACPHAGAKSFYKNLIWLVKKGNSYPKLSKSYINDKGKEVLVLWGIHHPSTSADQQSLYQNADAYVFVGTSRYSKKFKPEIAIRPKVRDQEGRMNYYWTLVEPGDKITFEATGNLVVPRYAFAMERNAGSGIIISDTPVHDCNTTCQTPKGAINTSLPFQNIHPITIGKCPKYVKSTKLRLATGLRNVPSIQSRGLFGAIAGFIEGGWTGMVDGWYGYHHQNEQGSGYAADLKSTQNAIDKITNKVNSVIEKMNTQFTAVGKEFNHLEKRIENLNKKVDDGFLDIWTYNAELLVLLENERTLDYHDSNVKNLYEKVKSQLKNNAKEIGNGCFEFYHKCDNTCMESVKNGTYDYPKYSEEAKLNREKIDGVKLESTRIYQILAIYSTVASSLVLVVSLGAISFWMCSNGSLQCRICI

SEQ ID NO: 13748 - protein, 566 aa, synthetic construct
  REGION 1..566: note = hemagglutinin__InfluenzaA__BAJ40006
MKAILVVLLYTFATANADTLCIGYHANNSTDTVDTVLEKNVTVTHSVNLLEDKHNGKLCKLRGVAPLHLGKCNIAGWILGNPECESLSTASSWSYIVETSSSDNGTCYPGDFIDYEELREQLSSVSSFERFEIFPKTSSWPNHDSNKGVTAACPHAGAKSFYKNLIWLVKKGNSYPKLSKSYINDKGREVLVLWGIHHPSTSADQQSLYQNADTYVFVGTSRYSKKFKPEIAIRPKVRDQEGRMNYYWTLVEPGDKITFEATGNLVVPRYAFAMERNAGSGIIISDTPVHDCNTTCQTPKGAINTSLPFQNIHPITIGKCPKYVKSTKLRLATGLRNVPSIQSRGLFGAIAGFIEGGWTGMVDGWYGYHHQNEQGSGYAADLKSTQNAIDEITNKVNSVIEKMNTQFTAVGKEFNHLEKRIENLNKKVDDGFLDIWTYNAELLVLLENERTLDYHDSNVKNLYEKVRSQLKNNAKEIGNGCFEFYHKCDNTCMESVKNGTYDYPKYSEEAKLNREEIDGVKLESTRIYQILAIYSTVASSLVLVVSLGAISFWMCSNGSLQCRICI

SEQ ID NO: 13749 - protein, 566 aa, synthetic construct; identical to SEQ ID NO: 2669
  REGION 1..566: note = hemagglutinin__InfluenzaA__BAJ40007

SEQ ID NO: 13750 - protein, 566 aa, synthetic construct
  REGION 1..566: note = hemagglutinin__InfluenzaA__BAJ40008
MKAILVVLLYTFATANADTLCIGYHANNSTDTVDTVLEKNVTVTHSVNLLEDKHNGKLCKLRGVAPLHLGKCNIAGWILGNPECESLSTASSWSYIVETSSSDNGTCYPGDFIDYEELREQLSSVSSFERFEIFPKTSSWPNHDSNKGVTAACPHAGAKSFYKNLIWLVKKGNSYPKLSKSYINDKGKEVLVLWGIHHPSTSADQQSLYQNADAYVFVGTSRYSKKFKPEIAIRPKVRDQEGRMNYYWTLVEPGDKITFEATGNLVVPRYAFAMERNAGSGIIISDTPVHDCNTTCQTPKGAINTSLPFQNIHPITIGKCPKYVKSTKLRLATGLRNVPSIQSRGLFGAIAGFIEGGWTGMVDGWYGYHHQNEQGSGYAADLKSTQNAIDEITNKVNSVIEKMNTQFTAVGKEFNHLEKRIENLNKKVDDGFLDIWTYIAELLVLLENERTLDYHDSNVKNLYEKVRSQLKNNAKEIGNGCFEFYHKCDNTCMESVKNGTYDYPKYSEEAKLNREEIDGVKLESTRIYQILAIYSTVASSLVLVVSLGAISFWMCSNGSLQCRICI

SEQ ID NO: 13751 - protein, 566 aa, synthetic construct
  REGION 1..566: note = hemagglutinin__InfluenzaA__BAJ40009
MKAILVVLLYTFATANADTLCIGYHANNSTDTVDTVLEKNVTVTHSVNLLEDKHNGKLCKLRGVAPLHLGKCNIAGWILGNPECESLSTASSWSYIVETSSSDNGTCYPGDFIDYEELREQLSSVSSFERFEIFPKTSSWPNHDSDKGVTAACPHAGAKSFYKNLIWLVKKGNSYPKLSKSYINDKGKEVLVLWGIHHPSTSADQQSLYQNADAYVFVGTSRYSKKFKPEIAIRPKVRDQEGRMDYYWTLVEPGDKITFEATGNLVVPRYAFAMERNAGSGIIISDTPVHNCNTTCQTPKGAINTSLPFQNIHPITIGKCPKYVKSTKLRLATGLRNVPSIQSRGLFGAIAGFIEGGWTGMVDGWYGYHHQNEQGSGYAADLKSTQNAIDKITNKVNSVIEKMNTQFTAVGKEFNHLENRIENLNKKVDDGFLDIWTYNAELLVLLENERTLDYHDSNVKNLYEKVRSQLKNNAKEIGNGCFEFYHKCDNTCMESVKNGTYDYPKYSEEAKLNREEIDGVKLESTRIYQILAIYSTVASSLVLVVSLGAISFWMCSNGSLQCRICI

SEQ ID NO: 13752 - protein, 566 aa, synthetic construct
  REGION 1..566: note = hemagglutinin__InfluenzaA__BAJ40010
MKAILVVLLYTFATANADTLCIGYHANNSTDTVDTVLEKNVTVTHSVNLLEDKHNGKLCKLRGVAPLHLGKCNIAGWILGNPECELLSTASSWSYIVETSSSDNGTCYPGDFIDYEELREQLSSVSSFERFEIFPKTSSWPNHDSDKGVTAACPHAGAKSFYKNLIWLVKKGNSYPKLSKSYINDKGKEVLVLWGIHHPSTSADQQSLYQNADAYVFVGTSRYSKKFKPEIAIRPKVRDQEGRMDYYWTLVEPGDKITFEATGNLVVPRYAFAMERNAGSGIIISDTPVHNCNTTCQTPKGAINTSLPFQNIHPITIGKCPKYVKSTKLRLATGLRNVPSIQSRGLFGAIAGFIEGGWTGMVDGWYGYHHQNEQGSGYAADLKSTQNAIDKITNKVNSVIEKMNTQFTAVGKEFNHLEKRIENLNKKVDDGFLDIWTYNAELLVLLENERTLDYHDSNVKNLYEKVRSQLKNNAKEIGNGCFEFYHKCDNTCMESVKNGTYDYPKYSEEAKLNREEIDGVKLESTRIYQILAIYSTVASSLVLVVSLGAISFWMCSNGSLQCRICI

SEQ ID NO: 13753 - protein, 566 aa, synthetic construct; identical to SEQ ID NO: 13742
  REGION 1..566: note = hemagglutinin__InfluenzaA__BAJ40011

SEQ ID NO: 13754 - protein, 566 aa, synthetic construct
  REGION 1..566: note = hemagglutinin__InfluenzaA__BAJ40012
MKAILVVLLYTFATANADTLCIGYHANNSTDTVDTVLEKNVTVTHSVNLLEDKHNGKLCKLRGVAPLHLGKCNIAGWILGNPECESLSTASSWSYIVETSSSDNGTCYPGDFIDYEELREQLSSVSSFERFEIFPKTSSWPNHDSNKGVTAACPHAGAKSFYKNLIWLVKKGNSYPKLSKSYINDKGKEVLVLWGIHHPSTSADQQSLYQNADAYVFVGTSRYSKKFKPEIAIRPKVRDQEGRMNYYWTLVEPGDKITFEATGNLVVPRYAFAMERNAGSGIIISDTPVHDCNTTCQTPKGAINTSLPFQNIHPITIGKCPKYVKSTKLRLATGLRNVPSIQSRGLFGAIAGFIEGGWTGMVDGWYGYHHQNEQGSGYAADLKSTQNAIDEITNKVNSVIEKMNTQFTAVGKEFNHLEKRIENLNKKVDDGFLDIWTYNAELLVLLENERTLDYHDSNVKNLYEKVRSQLKNNAKEIGNGCFEFYHKCDNTCMESVKNGTYDYPKYSEEAKLNREEIDGIKLESTRIYQILAIYSTVASSLVLVVSLGAISFWMCSNGSLQCRICI

SEQ ID NO: 13755 - protein, 566 aa, synthetic construct; identical to SEQ ID NO: 13742
  REGION 1..566: note = hemagglutinin__InfluenzaA__BAJ40013

SEQ ID NO: 13756 - protein, 566 aa, synthetic construct; identical to SEQ ID NO: 13742
  REGION 1..566: note = hemagglutinin__InfluenzaA__BAJ40014

SEQ ID NO: 13757 - protein, 566 aa, synthetic construct
  REGION 1..566: note = hemagglutinin__InfluenzaA__BAJ40015
MKAILVVLLYTFATANADTLCIGYHANNSTDTVDTVLEKNVTVTHSVNLLEDKHNGKLCKLRGVAPLHLGKCNIAGWILGNPECESLSTASSWSYIVETSSSDNGTCYPGDFIDYEELREQLSSVSSFERFEIFPNTSSWPNHDSNKGVTAACPHAGAKSFYKNLIWLVKKGNSYPKLSKSYINDKGKEVLVLWGIHHPSTSADQQSLYQNADTYVFVGTSRYSKKFKPEIAIRPKVRDQEGRMNYYWTLVEPGDKITFEATGNLVVPRYAFAMERNAGSGIIISDTPVHDCNTTCQTPKGAINTSLPFQNIHPITIGKCPKYVKSTKLRLATGLRNVPSIQSRGLFGAIAGFIEGGWTGMVDGWYGYHHQNEQGSGYAADLKSTQNAIDEITNKVNSVIEKMNTQFTAVGKEFNHLEKRIENLNKKVDDGFLDIWTYNAELLVLLENERTLDYHDSNVKNLYEKVRSQLKNNAKEIGNGCFEFYHKCDNTCMESVKNGTYDYPKYSEEAKLNREEIDGVKLESTRIYQILAIYSTVASSLVLVVSLGAISFWMCSNGSLQCRICI

SEQ ID NO: 13758 - protein, 566 aa, synthetic construct; identical to SEQ ID NO: 13742
  REGION 1..566: note = hemagglutinin__InfluenzaA__BAJ40016

SEQ ID NO: 13759 - protein, 566 aa, synthetic construct
  REGION 1..566: note = hemagglutinin__InfluenzaA__BAJ40017
MKAILVVLLYTFATANADTLCIGYHANNSTDTVDTVLEKNVTVTHSVNLLEDKHNGKLCKLRGVAPLHLGKCNIAGWILGNPECESLSTASSWSYIVETSNSDNGTCYPGDFIDYEELREQLSSVSSFERFEIFPKTSSWPNHDSNKGVTAACPHAGAKSFYKNLIWLVKKGNSYPKLSKSYINDKGKEVLVLWGIHHPSTSADQQSLYQNADAYVFVGTSRYSKKFKPEIAIRPKVRDQEGRMNYYWTLVEPGDKITFEATGNLVVPRYAFAMERNAGSGIIISDTPVHDCNTTCQTPKGAINTSLPFQNIHPITIGKCPKYVKSTKLRLATGLRNVPSIQSRGLFGAIAGFIEGGWTGMVDGWYGYHHQNEQGSGYAADLKSTQKAIDEITNKVNSVIEKMNTQFTAVGKEFNHLEKRIENLNKKVDDGFLDIWTYNAELLVLLENERTLDYHDSNVKNLYEKVRSQLKNNAKEIGNGCFEFYHKCDNTCMESVKNGTYDYPKYSEEAKLNREEIDGVKLESTRIYQILAIYSTVASSLVLVVSLGAISFWMCSNGSLQCRICI

SEQ ID NO: 13760 - protein, 566 aa, synthetic construct; identical to SEQ ID NO: 3833
  REGION 1..566: note = hemagglutinin__InfluenzaA__BAJ40018

SEQ ID NO: 13761 - protein, 566 aa, synthetic construct; identical to SEQ ID NO: 13748
  REGION 1..566: note = hemagglutinin__InfluenzaA__BAJ40019

SEQ ID NO: 13762 - protein, 566 aa, synthetic construct; identical to SEQ ID NO: 13748
  REGION 1..566: note = hemagglutinin__InfluenzaA__BAJ40020

SEQ ID NO: 13763 - protein, 566 aa, synthetic construct
  REGION 1..566: note = hemagglutinin__InfluenzaA__BAJ40021
MKAILVVLLYTFATANADTLCIGYHANNSTDTVDTVLEKNVTVTHSVNLLEDKHNGKLCKLRGVAPLHLGKCNIAGWILGNPECESLSTASSWSYIVETSSSDNGTCYPGDFIDYEELREQLSSVSSFERFEIFPKTSSWPNHDSNKGETAACPHAGAKSFYKNLIWLVKKGNSYPKLSKSYINDKGKEVLVLWGIHHPSTSADQQSLYQNADAYVFVGTSRYSKKFKPEIAIRPKVRDQEGRMNYYWTLVEPGDKITFEATGNLVVPRYAFAMERNAGSGIIISDTPVHDCNTTCQTPKGAINTSLPFQNIHPITIGKCPKYVKSTKLRLATGLRNVPSIQSRGLFGAIAGFIEGGWTGMVDGWYGYHHQNEQGSGYAADLKSTQNAIDKITNKVNSVIEKMNTQFTAVGKEFNHLEKRIENLNKKVDDGFLDIWTYNAELLVLLENERTLDYHDSNVKNLYEKVRSQLKNNAKEIGNGCFEFYHKCDNTCMESVKNGTYDYPKYSEEAKLNREEIDGVKLESTRIYQILAIYSTVASSLVLVVSLGAISFWMCSNGSLQCRICI

SEQ ID NO: 13764 - protein, 566 aa, synthetic construct; identical to SEQ ID NO: 3833
  REGION 1..566: note = hemagglutinin__InfluenzaA__BAJ40023

SEQ ID NO: 13765 - protein, 566 aa, synthetic construct
  REGION 1..566: note = hemagglutinin__InfluenzaA__BAJ40024
MKAILVVLLYTFATANADTLCIGYHANNSTDTVDTVLEKNVTVTHSVNLLEDKHNGKLCKLRGVAPLHLGKCNIAGWILGNPECESLSTASSWSYIVETSSSDNGTCYPGDFIDYEELREQLSSVSSFERFEIFPKTSSWPNHDSNKGVTAACPHAGAKSFYKNLIWLVKKGNSYPKLSKSYINDKGKEVLVLWGIHHPSTSADQQSLYQNADTYVFVGTSRYSKKFKPEIAIRPKVRDQEGRMNYYWTLVEPGDKITFEATGNLVVPRYAFAMERNAGSGIIISDTPVHDCNTTCQTPKGAINTSLPFQNIHPITIGKCPKYVKSTKLRLATGLRNVPSIQSRGLFGAIAGFIEGGWTGMVDGWYGYHHQNEQGSGYAADLKSTQNAIDEITNKVNSVIEKMNTQFTAVGKEFNHLEKRIENLNKKVDDGFLDIWTYNAELLVLLENERTLDYHDSNVKNLYEKVRSQLKNNAKEIGNGCFEFYHKCDNTCMESVKNGTYDYPKYSEEAKLNREKIDGVKLESTRIYQILAIYSTVASSLVLVVSLGAISFWMCSNGSLQCRICI

SEQ ID NO: 13766 - protein, 566 aa, synthetic construct; identical to SEQ ID NO: 13742
  REGION 1..566: note = hemagglutinin__InfluenzaA__BAJ40025

SEQ ID NO: 13767 - protein, 566 aa, synthetic construct; identical to SEQ ID NO: 3833
  REGION 1..566: note = hemagglutinin__InfluenzaA__BAJ40026

SEQ ID NO: 13768 - protein, 566 aa, synthetic construct
  REGION 1..566: note = hemagglutinin__InfluenzaA__BAJ40027
MKAILVVLLYTFATANADTLCIGYHANNSTDTVDTVLEKNVTVTHSVNLLEDKHNGKLCKLRGVAPLHLGKCNIAGWILGNPECESLSTASSWSYIVETSSSDNGTCYPGDFIDYEELREQLSSVSSFERFEIFPKTSSWPNHDSNKGETAACPHAGAKSFYKNLIWLVKKGNSYPKLSKSYINDKGKEVLVLWGIHHPSTSADQQSLYQNADAYVFVGTSRYSKKFKPEIAIRPKVRDQEGRMNYYWTLVEPGDKITFEATGNLVVPRYAFAMERNAGSGIIISDTPVHDCNTTCQTPKGAINTSLPFQNIHPITIGKCPKYVKSTKLRLATGLRNVPSIQSRGLFGAIAGFIEGGWTGMVDGWYGYHHQNEQGSGYAADLKSTQNAIDKITNKVNSVIEKMNTQFTAVGKEFNHLEKRIENLNKKVDDGFLDIWTYNAELLVLLENERTLDYHDSNVKNLYEKVKSQLKNNAKEIGNGCFEFYHKCDNTCMESVKNGTYDYPKYSEEAKLNREEIDGVKLESTRIYQILAIYSTVASSLVLVVSLGAISFWMCSNGSLQCRICI

SEQ ID NO: 13769 - protein, 566 aa, synthetic construct
  REGION 1..566: note = hemagglutinin__InfluenzaA__BAJ40028
MKAILVVLLYTFATANADTLCIGYHANNSTDTVDTVLEKNVTVTHSVNLLEDKHNGKLCKLRGVAPLHLGKCNIAGWILGNPECESLSTASSWSYIVETSSSDNGTCYPGDFIDYEELREQLSSVSSFERFEIFPKTSSWPNHDSNKGVTAACPHAGAKSFYKNLIWLVKKGNSYPKLSKSYINDKGKEVLVLWGIHHPSTSADQQSLYQNADAYVFVGTSRYSKKFKPEIAIRPKVRDQEGRMNYYWTLVEPGDKITFEATGNLVVPRYAFAMERNAGSGIIISDTPVHDCNTTCQTPKGAINTSLPFQNIHPITIGKCPKYVKSTKLRLATGLRNVPSIQSRGLFGAIAAFIEGGWTGMVDGWYGYHHQNEQGSGYAADLKSTQNAIDKITNKVNSVIEKMNTQFTAVGKEFNHLEKRIENLNKKVDDGFLDIWTYNAELLVLLENERTLDYHDSNVKNLYEKVRSQLKNNAKEIGNGCFEFYHKCDNTCMESVKNGTYDYPKYSEEAKLNREEIDGVKLESTRIYQILAIYSTVASSLVLVVSLGAISFWMCSNGSLQCRICI

SEQ ID NO: 13770 - protein, 566 aa, synthetic construct; identical to SEQ ID NO: 13742
  REGION 1..566: note = hemagglutinin__InfluenzaA__BAJ40029

SEQ ID NO: 13771 - protein, 566 aa, synthetic construct
  REGION 1..566: note = hemagglutinin__InfluenzaA__BAJ40030
MKAILVVLLYTFATANADTLCIGYHANNSTDTVDTVLEKNVTVTHSVNLLEDKHNGKLCKLRGVAPLHLGKCNIAGWILGNPECESLSTASSWSYIVETSSSDNGTCYPGDFIDYEELKEQLSSVSSFERFEIFPKTSSWPNHDSNKGVTAACPHAGAKSFYKNLIWLVKKGNSYPKLSKSYINDKGREVLVLWGIHHPSTSADQQSLYQNADTYVFVGTSRYSKKFKPEIAIRPKVRDQEGRMNYYWTLVEPGDKITFEATGNLVVPRYAFAMERNAGSGIIISDTPVHDCNTTCQTPKGAINTSLPFQNIHPITIGKCPKYVKSTKLRLATGLRNVPSIQSRGLFGAIAGFIEGGWTGMVDGWYGYHHQNEQGSGYAADLKSTQNAIDEITNKVNSVIEKMNTQFTAVGKEFNHLEKRIENLNKKVDDGFLDIWTYNAELLVLLENERTLDYHDSNVKNLYEKVRSQLKNNAKEIGNGCFEFYHKCDNTCMESVKNGTYDYPKYSEEAKLNREEIDGVKLESTRIYQILAIYSTVASSLVLVVSLGAISFWMCSNGSLQCRICI

SEQ ID NO: 13772 - protein, 566 aa, synthetic construct; identical to SEQ ID NO: 2669
  REGION 1..566: note = hemagglutinin__InfluenzaA__BAJ40031

SEQ ID NO: 13773 - protein, 566 aa, synthetic construct; identical to SEQ ID NO: 13742
  REGION 1..566: note = hemagglutinin__InfluenzaA__BAJ40032

SEQ ID NO: 13774 - protein, 566 aa, synthetic construct; identical to SEQ ID NO: 13771
  REGION 1..566: note = hemagglutinin__InfluenzaA__BAJ40033

SEQ ID NO: 13775 - protein, 566 aa, synthetic construct
  REGION 1..566: note = hemagglutinin__InfluenzaA__BAJ40034
MKAILVVLLYTFATANADTLCIGYHANNSTDTVDTVLERNVTVTHSVNLLEDKHNGKLCKLRGVAPLHLGKCNIAGWILGNPECESLSTASSWSYIVETSSSDNGTCYPGDFIDYEELREQLSSVSSFERFEIFPKTSSWPNHDSNKGVTAACPHAGAKSFYKNLIWLVKKGNSYPKLSKSYINDKGKEVLVLWGIHHPSTSADQQSLYQNADTYVFVGTSRYSKKFKPEIAIRPKVRDQEGRMNYYWTLVEPGDKITFEATGNLVVPRYAFAMERNAGSGIIISDTPVHDCNTTCQTPKGAINTSLPFQNIHPITIGKCPKYVKSTKLRLATGLRNVPSIQSRGLFGAIAGFIEGGWTGMVDGWYGYHHQNEQGSGYAADLKSTQNAIDEITNKVNSVIEKMNTQFTAVGKEFNHLEKRIENLNKKVDDGFLDIWTYNAELLVLLENERTLDYHDSNVKNLYEKVRSQLKNNAKEIGNGCFEFYHKCDNTCMESVKNGTYDYPKYSEEAKLNREKIDGVKLESTRIYQILAIYSTVASSLVLVVSLGAISFWMCSNGSLQCRICI

SEQ ID NO: 13776 - protein, 566 aa, synthetic construct
  REGION 1..566: note = hemagglutinin__InfluenzaA__BAJ40035
MKAILVVLLYTFATANADTLCIGYHANNSTDTVDTVLEKNVTVTHSVNLLEDKHNGKLCKLRGVAPLHLGKCNIAGWILGNPECESLSTASSWSYIVETSSSDNGTCYPGDFIDYEELREQLSSVSSFERFEIFPKTSSWPNHDSNKGVTAACPHAGAKSFYKNLIWLVKKGNSYPKLSKSYINDKGKEVLVLWGIHHPSTSADQQSLYQNADTYVFVGTSRYSKKFKPEIAIRPKVRDQEGRMNYYWTLVEPGDKIKFEATGNLVVPRYAFAMERNAGSGIIISDTPVHDCNTTCQTPKGAINTSLPFQNIHPITIGKCPKYVKSTKLRLATGLRNVPSIQSRGLFGAIAGFIEGGWTGMVDGWYGYHHQNEQGSGYAADLKSTQNAIDEITNKVNSVIEKMNTQFTAVGKEFNHLEKRIENLNKKVDDGFLDIWTYNAELLVLLENERTLDYHDSNVKNLYEKVRNQLKNNAKEIGNGCFEFYHKCDNTCMESVKNGTYDYPKYSEEAKLNREEIDGVKLESTRIYQILAIYSTVASSLVLVVSLGAISFWMCSNGSLQCRICI

SEQ ID NO: 13777 - protein, 566 aa, synthetic construct
  REGION 1..566: note = hemagglutinin__InfluenzaA__BAJ40036
MKAILVVLIYTFATANADTLCIGYHANNSTDTVDTVLEKNVTVTHSVNLLEDKHNGKLCKLRGVAPLHLGKCNIAGWILGNPECESLSTASSWSYIVETSSSDNGTCYPGDFIDYEELREQLSSVSSFERFEIFPKTSSWPNHDSNKGVTAACPHAGAKSFYKNLIWLVKKGNSYPKLSKSYINDKGKEVLVLWGIHHPSTSADQQSLYQNADAYVFVGTSRYSKKFKPEIAIRPKVRDQEGRMNYYWTIVEPGDKITFEATGNLVVPRYAFAMERNAGSGIIISDTPVHDCNTTCQTPKGAINTSLPFQNIHPITIGKCPKYVKSTKLRLATGLRNVPSIQSRGLFGAIAGFIEGGWTGMVDGWYGYHHQNEQGSGYAADLKSTQNAIDEITNKVNSVIEKMNTQFTAVGKEFNHLEKRIENLNKKVDDGFLDIWTYNAELLVLLENERTLDYHDSNVKNLYEKVKSQLKNNAKEIGNGCFEFYHKCDNTCMESVKNGTYDYPKYSEEAKLNREEIDGVKLESTRIYQILAIYSTVASSLVLVVSLGAISFWMCSNGSLQCRICI

SEQ ID NO: 13778 - protein, 566 aa, synthetic construct; identical to SEQ ID NO: 9272
  REGION 1..566: note = hemagglutinin__InfluenzaA__BAJ40037

SEQ ID NO: 13779 - protein, 566 aa, synthetic construct
  REGION 1..566: note = hemagglutinin__InfluenzaA__BAJ40038
MKAILLVLLYTFATANADTLCIGYHANNSTDTVDTVLEKNVTVTHSVNLLEDKHNGKLCKLRGVAPLHLGKCNIAGWILGNPECESLSTASSWSYIVETSSSDNGTCYPGDFIDYEELREQLSSVSSFERFEIFPKTSSWPNHDSNKGVTAACPHAGAKSFYKNLIWLVKKGNSYPKLSKSYINDKGKEVLVLWGIHHPSTSADQQSLYQNADTYVFVGTSRYSKKFKPEIAIRPKVRDQEGRMNYYWTIVEPGDKITFEATGNLVVPRYAFAMERNAGSGIIISDTPVHDCNTTCQTPKGAINTSLPFQNIHPITIGKCPKYVKSTKLRLATGLRNVPSIQSRGLFGAIAGFIEGGWTGMVDGWYGYHHQNEQGSGYAADLKSTQNAIDEITNKVNSVIEKMNTQFTAVGKEFNHLEKRIENLNKKVDDGFLDIWTYNAELLVLLENERTLDYHDSNVKNLYEKVRSQLKNNAKEIGNGCFEFYHKCDNTCMESVKNGTYDYPKYSEEAKLNREEIDGVKLESTRIYQILAIYSTVASSLVLVVSLGAISFWMCSNGSLQCRICI

SEQ ID NO: 13780 - protein, 566 aa, synthetic construct; identical to SEQ ID NO: 2669
  REGION 1..566: note = hemagglutinin__InfluenzaA__BAJ40039

SEQ ID NO: 13781 - protein, 566 aa, synthetic construct
  REGION 1..566: note = hemagglutinin__InfluenzaA__BAJ40040
MKAILVVLLYTFATANADTLCIGYHANNSTDTVDTVLEKNVTVTHSVNLLEDKHNGKLCKLRGVAPLHLGKCNIAGWILGNPECESLSTASSWSYIVETSSSDNGTCYPGDFIDYEELREQLSSVSSFERFEIFPKTSSWPNHDSNKGVTAACPHAGAKSFYKNLIWLVKKGNSYPKLSKSYINDKGREVLVLWGIHHPSTSADQQSLYQNADTYVFVGTSRYSKKFKPEIAIRPKVRDQEGRMNYYWTLVEPGDKITFEATGNLVVPRYAFAMERNAGYGIIISDTPVHDCNTTCQTPKGAINTSLPFQNIHPITIGKCPKYVKSTKLRLATGLRNVPSIQSRGLFGAIAGFIEGGWTGMVDGWYGYHHQNEQGSGYAADLKSTQNAIDEITNKVNSVIEKMNTQFTAVGKEFNHLEKRIENLNKKVDDGFLDIWTYNAELLVLLENERTLDYHDSNVKNLYEKVRSQLKNNAKEIGNGCFEFYHKCDNTCMESVKNGTYDYPKYSEEAKLNREEIDGVKLESTRIYQILAIYSTVASSLVLVVSLGAISFWMCSNGSLQCRICI

SEQ ID NO: 13782 - protein, 566 aa, synthetic construct; identical to SEQ ID NO: 9272
  REGION 1..566: note = hemagglutinin__InfluenzaA__BAJ40041

SEQ ID NO: 13783 - protein, 566 aa, synthetic construct
  REGION 1..566: note = hemagglutinin__InfluenzaA__BAJ40042
MKAILVVLLYTFATANADTLCIGYHANNSTDTVDTVLEKNVTVTHSVNLLEDKHNGKLCKLRGVAPLHLGKCNIAGWILGNPECESLSTASSWSYIVETSSSDNGTCYPGDFIDYEELKEPLSSVSSFERFEIFPKTSSWPNHDSNKGVTAACPHAGAKSFYKNLIWLVKKGNSYPKLSKSYINDKGREVLVLWGIHHPSTSADRQSLYQNADTYVFVGTSRYSKKFKPEIAIRPKVRDQEGRMNYYWTLVEPGDKITFEATGNLVVPRYAFAMERNAGSGIIISDTPVHDCNTTCQTPKGAINTSLPFQNIHPITIGKCPKYVKSTKLRLATGLRNVPSIQSRGLFGAIAGFIEGGWTGMVDGWYGYHHQNEQGSGYAADLKSTQNAIDEITNKVNSVIEKMNTQFTAVGKEFNHLEKRIENLNKKVDDGFLDIWTYNAELLVLLENERTLDYHDSNVKNLYEKVRSQLKNNAKEIGNGCFEFYHKCDNTCMESVKNGTYDYPKYSEEAKLNREEIDGVKLESTRIYQILAIYSTVASSLVLVVSLGAISFWMCSNGSLQCRICI

SEQ ID NO: 13784 - protein, 566 aa, synthetic construct; identical to SEQ ID NO: 9272
  REGION 1..566: note = hemagglutinin__InfluenzaA__BAJ40043

SEQ ID NO: 13785 - protein, 566 aa, synthetic construct
  REGION 1..566: note = hemagglutinin__InfluenzaA__BAJ40044
MKAILVVLLYTFATANADTLCIGYHANNSTDTVDTVLEKNVTVTHSVNLLEDKHNGKLCKLRGVAPLHLGKCNIAGWILGNPECESLSTASSWSYIVETSSSDNGTCYPGDFIDYEEQKEQLSSVSSFERFEIFPKTSSWPNHDSNKGVTAACPHAGAKSFYKNLIWLVKKGNSYPKLSKSYINDKGKEVLVLWGIHHPSTSADQQSLYQNADAYVFVGTSRYSKKFKPEIAIRPKVRDQEGRMNYYWTLVEPGDKITFEATGNLVVPRYAFAMEINAGSGIIISDTPVHDCNTTCQTPKGAINTSLPFQNIHPITIGKCPKYVKSTKLRLATGLRNVPSIQSRGLFGAIAGFIEGGWTGMVDGWYGYHHQNEQGSGYAADLKSTQNAIDKITNKVNSVIEKMNTQFTAVGKEFNHLEKRIENLNKKVDDGFLDIWTYNAELLVLLENERTLDYHDSNVKNLYEKVRSQLKNNAKEIGNGCFEFYHKCDNTCMESVKNGTYDYPKYSEEAKLNREEIDGVKLESTRIYQILAIYSTVASSLVLVVSLGAISFWMCSNGSLQCRICI

SEQ ID NO: 13786 - protein, 566 aa, synthetic construct; identical to SEQ ID NO: 13748
  REGION 1..566: note = hemagglutinin__InfluenzaA__BAJ40045

SEQ ID NO: 13787 - protein, 566 aa, synthetic construct
  REGION 1..566: note = hemagglutinin__InfluenzaA__BAJ40046
MKAILVVLLYTFATANADTLCIGYHANNSTDTVDTVLEKNVTVTHSVNLLEDKHNGKLCKLRGVAPLHLGRCNIAGWILGNPECESLSTASSWSYIVETSISDNGTCYPGDFIDYEELKEQLSSVSSFERFEIFPKTSSWPNHDSNKGVTAACPHAGAKSFYKNLIWLVKKGNSYPKLSKSYINDKGKEVLVLWGIHHPSTSADQQSLYQNADAYVFVGTSRYSKKFKPEIAIRPKVRDQEGRMNYYWTLVEPGDKITFEATGNLVVPRYAFAMERNAGSGIIISDTPVHDCNTTCQTPKGAINTSLPFQNIHPITIGKCPKYVKSTKLRLATGLRNVPSIQSRGLFGAIAGFIEGGWTGMVDGWYGYHHQNEQGSGYAADLKSTQNAIDKITNKVNSVIEKMNTQFTAVGKEFNHLEKKIENLNKKVDDGFLDIWTYNAKLLVLLENERTLDYHDSNVKNLYEKVRSQLKNNAKEIGNGCFEFYHKCDNTCMESVKNGTYDYPKYSEEAKLNREEIDGVKLESTRIYQILAIYSTVASSLVLVVSLGAISFWMCSNGSLQCRICI

SEQ ID NO: 13788 - protein, 566 aa, synthetic construct; identical to SEQ ID NO: 13771
  REGION 1..566: note = hemagglutinin__InfluenzaA__BAJ40047

SEQ ID NO: 13789 - protein, 566 aa, synthetic construct; identical to SEQ ID NO: 13742
  REGION 1..566: note = hemagglutinin__InfluenzaA__BAJ40048

SEQ ID NO: 13790 - protein, 566 aa, synthetic construct
  REGION 1..566: note = hemagglutinin__InfluenzaA__BAJ40050
MKAILVVLLYTFATANADTLCIGYHANNSTDTVDTVLEKNVTVTHSVNLLEDKHNGKLCKLRGVAPLHLGKCNIAGWILGNPECESLSTASSWSYIVETSSSDNGTCYPGDFIDYEELKEQLSSVSSFERFEIFPKTSSWPNHDSNKGVTAACPHAGAKSFYKNLIWLVKKGNSYPKLSKSYINDKGKEVLVLWGIHHPSTSADQQSLYQNADAYVFVGTSRYSKKFKPEIAIRPKVRDQEGRMNYYWTLVEPGDKITFEATGNLVVPRYAFAMERNAGSGIIISDTPVHDCNTTCQTPKGAINTSLPFQNIHPITIGKCPKYVKSTKLRLATGLRNVPSIQSRGLFGAIAGFIEGGWTGMVDGWYGYHHQNEQGSGYAADLKSTQNAIDKITNKVNSVIEKMNTQFTAVGKEFNHLEKRIENLNKKVDDGFLDIWTYNAELLVLLENERTLDYHDSNVKNLYEKVRSQLKNNAKEIGNGCFEFYHKCDNTCMESVKNGTYDYPKYSEEAKLNREEIDGVKLESTRIYQILAIYSTVASSLVLVVSLGAISFWMCSNGSLQCRICI

SEQ ID NO: 13791 - protein, 566 aa, synthetic construct; identical to SEQ ID NO: 3833
  REGION 1..566: note = hemagglutinin__InfluenzaA__BAJ40051

SEQ ID NO: 13792 - protein, 566 aa, synthetic construct
  REGION 1..566: note = hemagglutinin__InfluenzaA__BAJ40052
MKAILVVLLYTFATANADTLCIGYHANNSTDTVDTVLEKNVTVTHSVNLLEDKHNGKLCKLRGVAPLHLGKCNIAGWILGNPECESLSTASSWSYIVETSSSDNGTCYPGDFIDYEELREQLSSVSSFERFEIFPKTSSWPNHDSNKGVTAACPHAGAKSFYKNLIWLVKKGNSYPKLSKSYINDKGREVLVLWGIHHPSTTADQQSLYQNADTYVFVGTSRYSKKFKPEIAIRPKVRDQEGRMNYYWTLVEPGDKITFEATGNLVVPRYAFAMERNAGSGIIISDTPVHDCNTTCQTPKGAINTSLPFQNIHPITIGKCPKYVKSTKLRLATGLRNVPSIQSRGLFGAIAGFIEGGWTGMVDGWYGYHHQNEQGSGYAADLKSTQNAIDEITNKVNSVIEKMNTQFTAVGKEFNHLEKRIENLNKKVDDGFLDIWTYNAELLVLLENERTLDYHDSNVKNLYEKVRSQLKNNAKEIGNGCFEFYHKCDNTCMESVKNGTYDYPKYSEEAKLNREEIDGVKLESTRIYQILAIYSTVASSLVLVVSLGAISFWMCSNGSLQCRICI

SEQ ID NO: 13793 - protein, 566 aa, synthetic construct
  REGION 1..566: note = hemagglutinin__InfluenzaA__BAJ40053
MKAILVVLLYTFATANADTLCIGYHANNSTDTVDTVLEKNVTVTHSVNLLEDKHNGKLCKLRGVAPLHLGKCNIAGWILGNPECESLSTASSWSYIVETSSSDNGTCYPGDFIDYEELREQLSSVSSFERFEIFPKTSSWPNHDSNKGVTAACPHAGAKSFYKNLIWLVKKGNSYPKLSKSYINDKGKEVLVLWGIHHPSTSADQQSLYQNADTYVFVGTSRYSKKFKPEIAIRPKVRDQEGRMNYYWTLVEPGDKITFEATGNLVVPRYAFAMERNAGSGIIISDTPVHDCNTTCQTPKGAINTSLPFQNIHPITIGKCPKYVKSTKLRLATGLRNVPSIQSRGLFGAIAGFIEGGWTGMVDGWYGYHHQNEQGSGYAADLKSTQNAIDEITNKVNSVIEKMNTQFTAVGKEFNHLEKRIENLNKKVDDGFLDIWTYNAELLVLLENERTLDYHDSNVKNLYEKVRNQLKNNAKEIGNGCFEFYHKCDNTCMESVKNGTYDYPKYSEEAKLNREEIDGVKLESTRIYQILAIYSTVASSLVLVVSLGAISFWMCSNGSLQCRICI

SEQ ID NO: 13794 - protein, 566 aa, synthetic construct; identical to SEQ ID NO: 3833
  REGION 1..566: note = hemagglutinin__InfluenzaA__BAJ40054

SEQ ID NO: 13795 - protein, 566 aa, synthetic construct
  REGION 1..566: note = hemagglutinin__InfluenzaA__BAJ40055
MKAILVVLLYTFATANADTLCIGYHANNSTDTVDTVLEKNVTVTHSVNLLEDKHNGKLCKLRGVAPLHLGKCNIAGWILGNPECESLSTASSWSYIVETSSSDNGTCYPGDFIDYEELREQLSSVSSFERFEIFPKTSSWPNHDSNKGVTAACPHAGAKSFYKNLIWLVKKGNSYPKLSKSYINDKGKEVLVLWGIHHPSTSTDQQSLYQNADTYVFVGTSRYSKKFKPEIAIRPKVRDQEGRMNYYWTLVEPGDKITFEATGNLVVPRYAFAMERNAGSGIIISDTPVHDCNTICQTPKGAINTSLPFQNIHPITIGKCPKYVKSTKLRLATGLRNVPSVQSRGLFGAIAGFIEGGWTGMVDGWYGYHHQNEQGSGYAADLKSTQNAIDEITNKVNSVIEKMNTQFTAVGKEFNHLEKRIENLNKKVDDGFLDIWTYNAELLVLLENERTLDYHDSNVKNLYEKVRSQLKNNAKEIGNGCFEFYHKCDNTCMESVKNGTYDYPKYSEEAKLNREEIDGVKLESTRIYQILAIYSTVASSLVLVVSLGAISFWMCSNGSLQCRICI

SEQ ID NO: 13796 - protein, 566 aa, synthetic construct
  REGION 1..566: note = hemagglutinin__InfluenzaA__BAJ40056
MKAILVVLLYTFATANADTLCIGYHANNSTDTVDTVLEKNVTVTHSVNLLEDKHNGKLCKLRGVAPLHLGKCNIAGWILGNPECELLSTASSWSYIVETSSSDNGTCYPGDFIDYEELREQLSSVSSFERFEIFPKTSSWPNHDSNKGVTAACPHAGAKSFYKNLIWQVKKGNSYPKLSKSYINDKGKEVLVLWGIHHPSTSADQQSLYQNADAYVFVGTSRYSKKFKPEIAIRPKVRDQEGRMNYYWTLVEPGDKITFEATGNLVVPRHAFAMERNAGSGIIISDTPVHNCNTTCQTPKGAINTSLPFQNIHPITIGKCPKYVKSPKLRLATGLRNVPSIQSRGLFGAIAGFIEGGWTGMVDGWYGYHHQNEQGSGYAADLKSTQNAIDKITNKVNSVIEKMNTQFTAVGKEFNHLEKRIENLNKKVDDGFLDIWTYNAELLVLLENERTLDYHDSYVKNLYEKVRSQLKNNAKEIGNGCFEFYHKCDNTCMESVKNGTYDYPKYSEEAKLNREEIDGVKLESTRIYQILAIYSTVASSLVLVVSLGAISFWMCSNGSLQCRICI

SEQ ID NO: 13797 - protein, 566 aa, synthetic construct
  REGION 1..566: note = hemagglutinin__InfluenzaA__BAJ40057
MKAILVVLLYTFATANADTLCIGYHANNSTDTVDTVLERNVTVTHSVNLLEDKHNGKLCKLRGVAPLHLGKCNIAGWILGNPECESLSTASSWSYIVETSSSDNGTCYPGDFIDYEELREQLSSVSSFERFEIFPKTSSWPNHDSNKGVTAACPHAGAKSFYKNLIWLVKKGNSYPKLSKSYINDKGKEVLVLWGIHHPSTSADQQSLYQNADTYVFVGTSRYSKKFKPEIAIRPKVRDQEGRMNYYWTLVEPGDKITFEATGNLVVPRYAFAMERNAGSGIIISDTPVHDCNTTCQTPKGAINTSLPFQNIHPITIGKCPKYVKSTKLRLATGLRNVPSIQSRGLFGAIAGFIEGGWTGMVDGWYGYHHQNEQGSGYAADLKSTQNAIDEITNEVNSVIEKMNTQFTAVGKEFNHLEKRIENLNKKVDDGFLDIWTYNAELLVLLENERTLDYHDSNVKNLYEKVRSQLKNNAKEIGNGCFEFYHKCDNTCMESVKNGTYDYPKYSEEAKLNREEIDGVKLESTRIYQILAIYSTVASSLVLVVSLGAISFWMCSNGSLQCRICI

SEQ ID NO: 13798 - protein, 566 aa, synthetic construct; identical to SEQ ID NO: 9272
  REGION 1..566: note = hemagglutinin__InfluenzaA__BAJ40058

SEQ ID NO: 13799 - protein, 566 aa, synthetic construct; identical to SEQ ID NO: 13742
  REGION 1..566: note = hemagglutinin__InfluenzaA__BAJ40059

SEQ ID NO: 13800 - protein, 566 aa, synthetic construct; identical to SEQ ID NO: 3833
  REGION 1..566: note = hemagglutinin__InfluenzaA__BAJ40060

SEQ ID NO: 13801 - protein, 566 aa, synthetic construct
  REGION 1..566: note = hemagglutinin__InfluenzaA__BAJ40061
MKAILVVLLYTFATANADTLCIGYHANNSTDTVDTVLEKNVTVTHSVNLLEDKHNGKLCKLRGVAPLHLGKCNIAGWILGNPECESLSTASSWSYIVETSSSDNGTCYPGDFIDYEELREQLSSVSSFERFEIFPKASSWPNHDSNKGVTAACPHAGAKSFYKNLIWLVKKGNSYPKLSKSYINDKGKEVLVLWGIHHPSTSADQQSLYQNADAYVFVGTSRYSKKFKPEIAIRPKVRDQEGRMNYYWTLVEPGDKITFEATGNLVVPRYAFAMERNAGSGIIISDTPVHDCNTTCQTPKGAINTSLPFQNIHPITIGKCPKYVKSTKLRLATGLRNVPSIQSRGLFGAIAGFIEGGWTGMVDGWYGYHHQNEQGSGYAADLKSTQNAIDKITNKVNSVIEKMNTQFTAVGKEFNHLEKRIENLNKKVDDGFLDIWTYNAELLVLLENERTLDYHDSNVKNLYEKVRSQLKNNAKEIGNGCFEFYHKCDNTCMESVKNGTYDYPKYSEEAKLNREEIDGVKLESTRIYQILAIYSTVASSLVLVVSLGAISFWMCSNGSLQCRICI

SEQ ID NO: 13802 - protein, 566 aa, synthetic construct
  REGION 1..566: note = hemagglutinin__InfluenzaA__BAJ40062
MKAILVVLLYTFATANADTLCIGYHANNSTDTVDTVLEKNVTVTHSVNLLEDKHNGKLCKLRGVAPLHLGKCNIAGWILGNPECESLSTASSWSYIVETSSSDNGTCYPGDFIDYEELREQLSSVSSFERFEIFPKTSSWPNHDSNKGVTAACPHAGAKSFYKNLIWLVKKGNSYPKLSKSYINDKGKEVLVLWGIHHPSTSADQQSLYQNADTYVFVGTSRYSKKFKPEIAIRPKVRDQEGRMNYYWTLVEPGDKITFEATGNLVVPRYAFAMERNAGSGIIISDTPVHDCNTTCQTPKGAINTSLPFQNIHPITIGKCPKYVKSTKLRLATGLRNVPSIQSRGLFGAIAGFIEGGWTGMVDGWYGYHHQNEQGSGYAADLKSTQNAIDEITNKVNSVIEKMNTQFTAVGKEFNHLEKKIENLNKKVDDGFLDIWTYNAELLVLLENERTLDYHDSNVKNLYEKVRSQLKNNAKEIGNGCFEFYHKCDNTCMESVKNGTYDYPKYSEEAKLNREEIDGVKLESTRIYQILAIYSTVASSLVLVVSLGAISFWMCSNGSLQCKICI

SEQ ID NO: 13803 - protein, 566 aa, synthetic construct; identical to SEQ ID NO: 13801
  REGION 1..566: note = hemagglutinin__InfluenzaA__BAJ40063

SEQ ID NO: 13804 - protein, 566 aa, synthetic construct; identical to SEQ ID NO: 9272
  REGION 1..566: note = hemagglutinin__InfluenzaA__BAJ40064

SEQ ID NO: 13805 - protein, 568 aa, synthetic construct
  REGION 1..568: note = hemagglutinin__InfluenzaA__BAK23398
MEKIVLLLAIVSLVKSDQICIGYHANNSTEQVDTIMEKNVTVTHAQDILEKTHNGKLCDLDGVKPLILRDCSVAGWLLGNPMCDEFLNVPEWSYIVEKINPVNDLCYPGNFNDYEELKHLLSRINHFEKIQIFPKSSWSDHEASSGVSSACPYQGRSSFFRNVVWLVKKDNAYPTIKKSYNNTNQEDLLILWGIHHPNDAAEQTRLYQNPTTYISVGTSTLNQRLVPKIATRSKVNGQSGRIEFFWTILKSNDVINFESNGNFIAPENAYKIVKKGDSTIMKSELEYGNCNTKCQTPIGAINSSMPFHNIHPLTIGECPKYVKSNRLVLATGLRNSPRGERRRKKRGLFGAIAGFIEGGWQGMVDGWYGYHHSNEQGSGYAADKESTQKAIDGVTNKVNSIIDKMNTQFEAVGREFNNLERRIENLNKKMEDGFLDVWTYNAELLVLMENERTLDFHDSNVKNLYDKVRLQLRDNAKELGNGCFEFYHRCDNECMESVKNGTYDYPQYSEEARLKREEISGVKLESIGTYQILSIYSTVASSLALAIMMAGLFLWMCSNGSLQCRICI

SEQ ID NO: 13806 - protein, 568 aa, synthetic construct
  REGION 1..568: note = hemagglutinin__InfluenzaA__BAK23400
MEKIVLLLAIVSLVKSDQICIGYHANNSTEQVDTIMEKNVTVTHAQDILEKTHNGKLCDLNGVKPLILRDCSVAGWLLGNPMCDEFLNVPEWSYIVEKINPANDLCYPGDFNDYEELKHLLSRINHFEKIQIIPKSSWSDHEASSGVSSACPYQGRSSFFRNVVWLIKKDNAYPTIKRSYNNTNQEDLLVLWGIHHPNDAAEQTRLYHNPTTYISVGTSTLNQRLVPKIATRSKVNGQSGRMEFFWTILKPNDAINFESNGNFIAPENAYKIVKKGDSTIMKSELEYGNCNTKCQTPIGAINSSMPFHNIHPLTIGECPKYVKSSRLVLATGLRNSPQGKSRRKKRGLFGAIAGFIEGGWQGMVDGWYGYHHSNEQGSGYAADKESTQRAIDGVTNKVNSIIDKMNTQFEAVGREFNNLERRIENLNKKMEDGFLDVWTYNAELLVLMENERTLDFHDSNVKNLYDKVRLQLRDNAKELGNGCFEFYHRCDNECMESVRNGTYDYPQYSEEARLKREEISGVKLESIGIYQILSIYSTVASSLALAIMVAGLFLWMCSNGSLQCRICI

SEQ ID NO: 13807 - protein, 568 aa, synthetic construct
  REGION 1..568: note = hemagglutinin__InfluenzaA__BAK23401
MEKIVLLLAIVSLVKSDQICIGYHANNSTEQVDTIMEKNVTVTHAQDILEKTHNGKLCDLDGVKPLILRDCSVAGWLLGNPMCDEFLNVSEWSYIVEKINPANDLCYPGNFNNYEELKHLLSRINRFEKIQIIPKSSWPDHEASLGVSSACPYQGGPSFYRNVVWLIKKNNTYPIIKKSYHNTNQEDLLVLWGIHHPNDEEEQTRIYKNPTTYISVGTSTLNQRLVPKIATRSKVNGQSGRVEFFWTILKSNDTINFESNGNFIAPENAYKIVKKGDSTIMKSELEYGNCNTKCQTPIGAINSSMPFHNIHPLTIGECPKYVKSNRLVLATGLRNSPQGERRRKKRGLFGAIAGFIEGGWQGMVDGWYGYHHSNEQGSGYAADKESTQKAIDGVTNKVNSIIDKMNIQFEAVGREFNNLERRIENLNKKMEDGFLDVWTYNAELLVLMENERTLDFHDSNVKNLYDKVRLQLRDNAKELGNGCFEFYHRCDNECMESVRNGTYDYPQYSEEARLKREEISGVKLESIGTYQILSIYSTVASSLALAIMVAGLFLWMCSNGSLQCRICI

SEQ ID NO: 13808 - protein, 568 aa, synthetic construct
  REGION 1..568: note = hemagglutinin__InfluenzaA__BAK23402
MEKIVLLLAIVSLVKSDQICIGYHANNSTEQVDTIMEKNVTVTHAQDILEKTHNGKLCDLDGVKPLILRDCSVAGWLLGNPMCDEFLNVPEWSYIVEKINPANDLCYPGNFNDYEELKHLLSRINHFEKIQIIPKSSWSNHEASSGVSSACPYQGRSSFFRNVVWLIKKDNAYPTIKISYNNTNQEDLLVLWGIHHPNDAAEQTRLYQNPTTYISVGTSTLNQRLVPKIATRSKVNGQSGRMEFFWTILKSNDAINFESNGNFIAPENAYKIVKKGDSTIMKSELEYGNCNTKCQTPIGAINSSMPFHNTHPLTIGECPKYVKSNRLVLATGLRNSPHGERRRKKRGLFGAIAGFIEGGWQGMVDGWYGYHHSNEQGSGYAADKESTQKAIDGVTNKVNSIIDKMNTQFEAVGREFNNLERRIENLNKKMEDGFLDVWTYNAELLVLMENERTLDFHDSNVKNLYDKVRLQLRDNAKELGNGCFEFYHRCDNECMESVRNGTYDYPQYSEEARLKREEISGVKLESIGTYQILSIYSTVASSLALAIMVAGLFLWMCSNGSLQCRICI

SEQ ID NO: 13809 - protein, 568 aa, synthetic construct
  REGION 1..568: note = hemagglutinin__InfluenzaA__BAK23403
MEKIVLLLAIVSLVKSDQICIGYHANNSTEQVDTIMEKNVTVTHAQDILEKTHNGKLCDLDGVKPLILRDCSVAGWLLGNPMCDEFLNVPEWSYIVEKINPANDLCYPGNFNDYEELKHLLSRINHFEKIQIIPKSSWSNHEASSGVSSACPYQGRSSFFRNVVWLIKKDNAYPTIKISYNNTNQEDLLVLWGIHHPNDAAEQTRLYQNPTTYISVGTSTLNQRLVPKIATRSKVNGQSGRMEFFWTILKSNDAINFESNGNFIAPENAYKIVKKGDSTIMKSELEYGNCNTKCQTPIGAINSSMPFHNIHPLTIGECPKYVKSNRLVLATGLRNSPQGERRRKKRGLFGAIAGFIEGGWQGMVDGWYGYHHSNEQGSGYAADKESTQKAIDGVTNKVNSIIDKMNTQFEAVGREFNNLERRIENLNKKMEDGFLDVWTYNAELLVLMENERTLDFHDSNVKNLYDKVRLQLRDNAKELGNGCFEFYHRCDNECMESVRNGTYDYPQYSEEARLKREEISGVKLESIGTYQILSIYSTVASSLALAIMVAGLFLWMCSNGSLQCRICI

SEQ ID NO: 13810 - protein, 568 aa, synthetic construct
  REGION 1..568: note = hemagglutinin__InfluenzaA__BAK23404
MEKIVLLLAIVSLVKSDQICIGYHANNSTEQVDTIMEKNVTVTHAQDILEKTHNGKLCDLDGVKPLILRDCSVAGWLLGNPMCDEFLNVPEWSYIVEKINPANDLCYPGNFNDYEELKHLLSRINHFEKIQIIPKSSWSDHEASSGVSSACPYQGRSSFFRNVVWLIKKDNAYPTIKRSYNNTNQEDLLVLWGIHHPNDAAEQTRLYQNPTTYISVGTSTLNQRLVPKIATRSKVNGQSGRMEFFWTILKSNDAINFESNGNFIAPENAYKIVKKGDSTIMKSELEYGNCNTKCQTPIGAINSSMPFHNIHPLTIGECPKYVKSNRLVLATGLRNSPQGERRRKKRGLFGAIAGFIEGGWQGMVDGWYGYHHSNEQGSGYAADKESTQKAIDGVTNKVNSIIDKMNTQFEAVGREFNNLERRIENLNKKMEDGFLDVWTYNAELLVLMENERTLDFHDSNVKNLYDKVRLQLRDNAKELGNGCFEFYHRCDNECMESVRNGTYDYPQYSEEARLKREEISGVKLESIGTYQILSIYSTVASSLALAIMVAGLFLWMCSNGSLQCRICI

SEQ ID NO: 13811 - protein, 568 aa, synthetic construct; identical to SEQ ID NO: 13810
  REGION 1..568: note = hemagglutinin__InfluenzaA__BAK23405

SEQ ID NO: 13812 - protein, 568 aa, synthetic construct
  REGION 1..568: note = hemagglutinin__InfluenzaA__BAK23406
MEKIVLLLAIVSLVKSDQICIGYHANNSTEQVDTIMEKNVTVTHAQDILEKTHNGKLCDLDGVKPLILRDCSVAGWLLGNPMCDEFLNVPEWSYIVEKINPVNDLCYPGNFNDYEELKHLLSRINHFEKIQIFPKSSWSDHEASSGVSSACPYQGRSSFFRNVVWLVKKDNAYPTIKKSYNNTNQEDLLILWGIHHPNDAAEQTRLYQNPTTYISVGTSTLNQRLVPKIATRSKVNGQSGRIEFFWTILKSNDVINFESNGNFIAPENAYKIVKKGDSTIMKSELEYGNCNTKCQTPIGAINSSMPFHNIHPLTIGECPKYVKSNRLVLATGLRNSPQGERRRKKRGLFGAIAGFIEGGWQGMVDGWYGYHHSNEQGSGYAADKESTQKAIDGVTNKVNSIIDKMNTQFEAVGREFNNLERRIENLNKKMEDGFLDVWTYNAELLVLMENERTLDFHDSNVKNLYDKVRLQLRDNAKELGNGCFEFYHRCDNECMESVKNGTYDYPQYSEEARLKREEISGVKLESIGTYQILSIYSTVASSLALAIMMAGLFLWMCSNGSLQCRICI

SEQ ID NO: 13813 - protein, 568 aa, synthetic construct
  REGION 1..568: note = hemagglutinin__InfluenzaA__BAK23407
MEKIVLLLAIVSLVKSGQICIGYHANNSTEQVDTIMEKNVTVTHAQDILEKTHNGKLCDLDGVKPLILRDCSVAGWLLGNPMCDEFLNVSEWSYIVEKINPANDLCYPGNFNNYEELKHLLSRINRFEKIQIIPKSSWPDHEASLGVSAACPYQGGPSFYRNVVWLIKKNNTYPTIEKSYHNTNQEDLLVLWGIHHPNDEAEQTRIYKNPTTYISVGTSTLNQRLVPKIATRSKVNGQSGRVEFFWTILKSNDTINFESNGNFIAPENAYKIVKKGDSTIMKSELEYGNCNTRCQTPIGAINSSMPFHNIHPLTIGECPKYVKSNRLVLATGLRNSPQGERRRKKRGLFGAIAGFIEGGWQGMVDGWYGYHHSNEQGSGYAADKESTQKAIDGVTNKVNSIIDKMNTQFEAVGREFNNLERRIENLNKKMEDGFLDVWTYNAELLVLMENERTLDFHDSNVKNLYDKVRLQLRDNAKELGNGCFEFYHRCDNECMESVRNGTYDYPQYSEEARLKREEISGVKLESIGTYQILSIYSTVASSLALAIMVAGLFLWMCSNGSLQCRICI

SEQ ID NO: 13814 - protein, 568 aa, synthetic construct
  REGION 1..568: note = hemagglutinin__InfluenzaA__BAK23408
MEKIVLLLAIVSLVKSDQICIGYHANNSTEQVDTIMEKNVTVTHAQDILEKTHNGKLCDLDGVKPLILRDCSVAGWLLGNPMCDEFPNVSEWSYIVEKINPANDLCYPGNFNNYEELKHLLSRINRFEKIQIIPKSSWPDHEASLGVSSACQYQGGPSFYRNVVWLIKKDNAYPTIKKSYHNTNKEDLLVLWGIHHPNNEEEQTKLYQNPTTYISVGTSTLNQRLVPKIATRSKVNGQSGRVEFFWTILKSNDAINFESNGNFIAPENAYKIVKKGDSTIMKSELEYGNYNTKCQTPIGAINSSMPFHNIHPLTIGECPKYVKSNRLVLATGLRNSPQGERRRKKRGLFGAIAGFIEGGWQGMVDGWYGYHHSNEQGSGYAADKESTQKAIDGVTNKVNSIIDKMNTQFEAVGKEFNNLERRIENLNKKMEDGFLDVWTYNAELLVLMENERTLDFHDSNVKNLYDKVRLQLRDNAKELGNGCFEFYHRCDNECMESVRNGTYDYPQYSEEARLKREEISGVKLESIGTYQILSIYSTVASSLALAIMVAGLFLWMCSNGSLQCRICI

SEQ ID NO: 13815 - protein, 568 aa, synthetic construct
  REGION 1..568: note = hemagglutinin__InfluenzaA__BAK23411
MEKIVLLLAIVSLVKSDQICIGYHANNSTEQVDTIMEKNVTVTHAQDILEKTHNGKLCDLDGVKPLILRDCSVAGWLLGNPMCDEFLNVSEWSYIVEKINPANDLCYPGNFNNYEELKHLLSRINRFEKIQIIPKSSWPDHEASLGVSSACQYQGGPSFYRNVVWLIKKDNAYPTIKKSYHNTNKEDLLVLWGIHHPNNEEEQTKLYQNPTTYISVGTSTLNQRLVPKIATRSKVNGQSGRVEFFWTILKSNDAINFESNGNFIAPENAYKIVKKGDSTIMKSELEYGNCNTKCQTPIGAINSSMPFHNIHPLTIGECPKYVKSNRLVLATGLRNSPQGERRRKKRGLFGAIAGFIEGGWQGMVDGWYGYHHSNEQGSGYAADKESTQKAIDGVTNKVNSIIDKMNTQFEAVGKEFNNLERRIENLNKKMEDGFLDVWTYNAELLVLMENERTLDFHDSNVKNLYDKVRLQLRDNAKELGNGCFEFYHRCDNECMESVRNGTYDYPQYSEEARLKREEISGVKLESIGTYQILSIYSTVASSLALAIMVAGLFLWMCSNGSLQCRICI

SEQ ID NO: 13816 - protein, 568 aa, synthetic construct
  REGION 1..568: note = hemagglutinin__InfluenzaA__BAK23412
MEKIVLLLAIVSLVKSDQICIGYHANNSTEQVDTIMEKNVTVTHAQDILEKTHKGKLCDLDGVKPLILRDCSVAGWLLGNPMCDEFLNVSEWSYIVEKINPANDLCYPGNFNNYEELKHLLSRINRFEKIQIIPKSSWPDHEASLGVSSACQYQGGPSFYRNVVWLIKKDNTYPTIKKSYHNTNKEDLLVLWGIHHPNNEEEQTKLYQNPTTYISVGTSTLNQRLVPKIATRSKVNGQSGRVEFFWTILKSNDAINFESNGNFIAPENAYKIVKKGDSTIMKSELEYGNCNTKCQTPIGAINSSMPFHNIHPLTIGECPKYVKSNRLVLATGLRNSPQGERRRKKRGLFGAIAGFIEGGWQGMVDGWYGYHHSNEQGSGYAADKESTQKAIDGVTNKVNSIIDKMNTQFEAVGKEFNNLERRIENLNKKMEDGFLDVWTYNAELLVLMENERTLDFHDSNVKNLYDKVRLQLRDNAKELGNGCFEFYHRCDNECMESVRNGTYDYPQYSEEARLKREEISGVKLESTGTYQILSIYSTVASSLALAIMVAGLFLWMCSNGSLQCRICI

SEQ ID NO: 13817 - protein, 568 aa, synthetic construct
  REGION 1..568: note = hemagglutinin__InfluenzaA__BAK23413
MEKIVLLLAIVSLVKSDQICIGYHANNSTEQVDTIMEKNVTVTHAQDILEKTHNGKLCDLDGVKPLILRDCSVAGWLLGNPMCDEFLNVSEWSYIVEKINPANDLCYPGNFNNYEELKHLLSRINRFEKIQIIPKSSWPDHEASLGVSSACQYQGGPSFYRNVVWLIKKDNTYPTIKKSYHNTNKEDLLVLWGIHHPNNEEEQTKLYQNPTTYISVGTSTLNQRLVPKIATRSKVNGQSGRVEFFWTILKSNDAINFESNGNFIAPENAYKIVKKGDSTIMKSELEYGNCNTKCQTPIGAINSSMPFHNIHPLTIGECPKYVKSNRLVLATGLRNSPQGERRRKKRGLFGAIAGFIEGGWQGMVDGWYGYHHSNEQGSGYAADKESTQKAIDGVTNKVNSIIDKMNTQFEAVGKEFNNLERRIENLNKKMEDGFLDVWTYNAELLVLMENERTLDFHDSNVKNLYDKVRLQLRDNAKELGNGCFEFYHRCDNECMESVRNGTYDYPQYSEEARLKREEISGVKLESIGTYQILSIYSTVASSLALAIMVAGLFLWMCSNGSLQCRICI

SEQ ID NO: 13818 - protein, 568 aa, synthetic construct; identical to SEQ ID NO: 13815
  REGION 1..568: note = hemagglutinin__InfluenzaA__BAK23414

SEQ ID NO: 13819 - protein, 565 aa, synthetic construct
  REGION 1..565: note = hemagglutinin__InfluenzaA__BAM65746
MEVKLLVLLCTFTATYADTICIGYHANNSTDTVDTLPEKNVTVTHSVNLLEDTHNGKLCLLKGIAPLQLGNCSVAGWILGNPECELLISRESWSYIVEKPNPENGICYPGHFADYEELREQLSSVSSFERFEIFPKESSWPNHTATGVSASCSHNGKSSFYKNLLWLTVKNGLYPNLSKSYANNKEKEVLVLWGVHHPTNIGDQRALYHTENAYVSVVSSHYSRRFTPEIAKRPKVRDQEGRINYYWTLLEPGDTIIFEANGNLIAPRYAFALSRGFGSGIIKSNAPMDECNAKCQTPQGAINSSLPFQNVHPVTIGECPKYVRSTKLRMVTGLRNTPSIQSRGLFGAIAGFIEGGWTGMVDGWYGYHHQNEQGSGYAADQKSTQNAINGITNKVNSVIEKMNTQFTAVDKEFNKLERRMENFNKKVDDGFIDIWTYNAELLILLENERTLDFHDSNVKNLYEKVKSQLKNNAKEIGNGCFEFYHKCNDECMESVKNGTYDYPKYSEESKLNREKIDGVKLESMGVYQILAIYSTVASSMVLLVSLGAISFWMCSNGSLQCRICI

SEQ ID NO: 13820 - protein, 566 aa, synthetic construct; identical to SEQ ID NO: 12566
  REGION 1..566: note = hemagglutinin__InfluenzaA__BAO79716

SEQ ID NO: 13821 - protein, 560 aa, synthetic construct
  REGION 1..560: note = Hemagglutinin__InfluenzaA__CAB95856
METISLITILLVVTASNADKICIGHQSTNSTETVDTLTETNVPVTHAKELLHTEHNGMLCATSLGHPLILDTCTIEGLVYGNPSCDLLLGGREWSYIVERSSAVNGTCYPGNVENLEELRTLFSSASSYQRIQIFPDTTWNVTYTGTSRACSGSFYRSMRWLTQKSGFYPVQDAQYTNNRGKSILFVWGIHHPPTYTEQTNLYIRNDTTTSVTTEDLNRTFKPVIGPRPLVNGLQGRIDYYWSVLKPGQTLRVRSNGNLIAPWYGHVLSGGSHGRILKTDLKGGNCVVQCQTEKGGLNSTLPFHNISKYAFGTCPKYVRVNSLKLAVGLRNVPARSSRGLFGAIAGFIEGGWPGLVAGWYGFQHSNDQGVGMAADRDSTQKAIDKITSKVNNIVDKMNKQYEIIDHEFSEVETRLNMINNKIDDQIQDVWAYNAELLVLLENQKTLDEHDANVNNLYNKVKRALGSNAMEDGKGCFELYHKCDDQCMETIRNGTYNRRKYREESRLERQKIEGVKLESEGTYKILTIYSTVASSLVLAMGFAAFLFWAMSNGSCRCNICI

SEQ ID NO: 13822 - protein, 560 aa, synthetic construct
  REGION 1..560: note = Hemagglutinin__InfluenzaA__CAB95857
METISLITILLVVTASNADKICIGHQSTNSTETVDTLTETNVPVTHAKELLHTEHNGMLCATSLGHPLILDTCTIEGLVYGNPSCDLLLEGREWSYIVERSSAVNGTCYPGNVENLEELRTLFSSASSYQRIQIFPDTTWNVTYTGTSRACSGSFYRSMRWLTQKSGFYPVQDAQYTNNRGKSILFVWGIHHPPTYTEQTNLYIRNDTTTSVTTEDLNRTFKPVIGPRPLVNGLQGRIDYYWSVLKPGQTLRVRSNGNLIAPWYGHVLSGGSHGRILKTDLKSGNCVVQCQTEKGGLNSTLPFHNISKYAFGTCPKYVRVNSLKLAVGLRNVPARSSRGLFGAIAGFIEGGWPGLVAGWYGFQHSNDQGVGMAADRDSTQKAIDKITSKVNNIVDKMNKQYEIIDHEFSEVETRLNMINNKIDDQIQDVWAYNAELLVLLENQKTLDEHDANVNNLYNKVKRALGSNAMEDGKGCFELYHKCDDQCMETIRNGTYNRRKYREESRLERQKIEGVKLESEGAYKILTIYSTVASSLVLAMGFAAFLFWAMSNGSCRCNICI

SEQ ID NO: 13823 - protein, 568 aa, synthetic construct
  REGION 1..568: note = hemagglutinin__InfluenzaA__CBW54815
MEKIVLLLAIVSLVKSDQICIGYHANNSTEQVDTIMEKNVTVTHAQDILEKTHNGKLCDLDGVKPLILRDCSVAGWLLGNPMCDEFPNVSEWSYIVEKTNPANDLCYPGNFDNYEELKHLLSRINRFEKIQIIPKSSWPDHEASLGVSSACPYQGGPSFYRNVVWLIKKNNTYPTIKESYHNTNQEDLLVLWGIHHPNDEEEQTRIYKNPTTYISVGTSTLNQRLVPKIATRSKVNGQSGRVEFFWTILKSNDTINFESNGNFIAPENAYKIVKKGDSTIMKSELEYGNCSTKCQTPIGAINSSMPFHNIHPLTIGECPKYVKSNRLVLATGLRNSPQGEGRRKKRGLFGAIAGFIEGGWQGMVDGWYGYHHSNEQGSGYAADKESTQKAIDGVTNKVNSIIDKMNTQFEAVGREFNNLEKRIENLNKKMEDGFLDVWTYNAELLVLMENERTLDFHDSNVKNLYDKVRLQLRDNAKELGNGCFEFYHRCDNECMESVRNGTYDYPQYSEEARLKREEISGVKLESIGTYQILSIYSTVASSLALAIMVAGLFLWMCSNGSLQCRICI

SEQ ID NO: 13824 - protein, 568 aa, synthetic construct
  REGION 1..568: note = hemagglutinin__InfluenzaA__CBW54817
MEKIVLLLAIVSLVKSDQICIGYHANNSTEQVDTIMEKNVTVTHAQDILEKTHNGKLCDLDGVKPLILRDCSVAGWLLGNPMCDEFPNVSEWSYIVEKINPANDLCYPGNFNNYEELKHLLSRINRFEKIQIIPKSSWPDHEASLGVSSACPYQRGPSFYRNVVWLIKKNDTYPTIKESYHNTNQEDLLVLWGIHHPNDEEEQKRIYKNPTTYISVGTSTLNQRLVPKIATRSKVNGQSGRVEFFWTILKSNDTINFESNGNFIAPENAYKIVKKGDSTIMKSELEYGNCSTKCQTPIGAINTSMPFHNIHPLTIGECPKYVKSNRLVLATGLRNSPQGEGRRKKRGLFGAIAGFIEGGWQGMVDGWYGYHHSNEQGSGYAADKESTQKAIDGVTNKVNSIIDKMNTQFEAVGREFNNLEKRIENLNKKMEDGFLDVWTYNAELLVLMENERTLDFHDSNVRNLYDKVRLQLRDNAKELGNGCFEFYHRCDNECMESVRNGTYDYPQYSEEARLKREEISGVKLESIGTYQILSIYSTVASSLALAIMVAGLFLWMCSNGSLQCRICI

SEQ ID NO: 13825 - protein, 568 aa, synthetic construct
  REGION 1..568: note = hemagglutinin__InfluenzaA__CBW54818
MEKIVLLLAIVSLVKSDQICIGYHANNSTEQVDTIMEKNVTVTHAQDILEKTHNGKLCDLDGVKPLILRDCSVAGWLLGNPMCDEFPNVSEWSYIVEKTNPANDLCYPGNFNNYEELKHLLSRINRFEKIKIIPKSSWPDHEASLGVSSACPYQGGPSFYRNVVWLIKKNNTYPTIKESYHNTNQEDLLVLWGIHHPNDEEEQTRIYKNPTTYISVGTSTLNQRLVPKIATRSKVNGQSGRVEFFWTILKSNDTINFESNGNFIAPENAYKIVKKGDSTIMKSELEYGNCSTKCQTPVGAINSSMPFHNIHPLTIGECPKYVKSNRLVLATGLRNSPQGEGRRKKRGLFGAIAGFIEGGWQGMVDGWYGYHHSNEQGSGYAADRESTQKAIDGVTNKVNSIIDKMNTQFEAVGREFNNLEKRIENLNKKMEDGFLDVWTYNAELLVLMENERTLDFHDSNVKNLYDKVRLQLRDNAKELGNGCFEFYHRCDNECMESVRNGTYDYPQYSEEARLKREEISGVKLESIGTYQILSIYSTVASSLALAIIVAGLLLWMCSNGSLQCRICI

SEQ ID NO: 13826 - protein, 566 aa, synthetic construct
  REGION 1..566: note = hemagglutinin__InfluenzaA__CCG47908
MKTVIALSYVFCLGFGQGLPGKGNNTATLCLGHHAVPNGTLVKTITDDQIEVTNATELVQNFSMGKICKNPHRILDGANCTLIDSLLGDPHCDGFQDEKWDLFIERSKAFSNCYPYDVPEYTSLRSIIASSGTLEFTNEDFNWTGVTQNGGSSACKRGPNNSFFSRLNWLYKSGNTYPMLNVTMPNSDDFDKLYIWGVHHPSTDREQTNLYIQASGKIIVSTKRSQQTIIPNIGSRPWVRGLSSRISIYWTIVKPGDILIINSNGNLIAPRGYFKIQTGKSSVMRSDAPIDTCNSECITPNGSIPNDKPFQNVNRITYGACPKYIKQNTLKLATGMRNIPERQTRGIFGAIAGFIENGWEGMVNGWYGFRHQNSEGIGQAADLKSTQAAINQINGKLNRVIEKTNEKFHQIEKEFSEVEGRIQDLERYVEDTKIDLWSYNAELLVALENQHTIDLTDSEMNKLFEKTRKQLRENAEDMGNGCFKIYHKCDNSCMESIRNGTYDHNEYRDEAVNNRFQIKSVELKSGYKDWILWISFAISCFLLCAVWLGFIIWACQKGNIRCNICI

SEQ ID NO: 13827 - protein, 566 aa, synthetic construct
  REGION 1..566: note hemagglutinin_precursor_(high_yield_phenotype)__InfluenzaA_ _AAB39851
MKAILLVLLCTFAATNADTLCIGYHANNSTDTVDTVLEKNVTVTHSVNLLEDRHNGKLCKLGGIAPLHLGKCNIAGRLLGNPECELLLTVSSWSYIVETSKSDNGTCYPGDFINYEELREQLSSVSSFERFEIFPKTSSWPNHETNRGVTAACPYAGANSFYRNLIWLVKKENSYPKLSKSYVNNKGKEVLVLWGIHHPPTSTDQQSLYQNADAYVFVGSSKYNRKFKPEIAARPKVRGQAGRMSYYWTLIEPGDTITFEATGNLVVPRYAFAMNRGSGSGIIIWDAPVHDCNTKCQTPKGAINTSLPFQNIHPVTIGECPKYVKSTKLRMATGLRNVPSIQSRGLFGAIAGFIEGGWTGMIDGWYGYHHQNEQGSGYAADQRSTQNAIDGITNKVNSVIEKMNTQFTAVGKEFNHLEKRIENLNKKVDDGFLDIWTYNAELLVLLENERTLDFHDSNVKNLYEKVRSQLRNNAKEIGNGCFEFYHKCDDTCMESVKNGTYDYPKYSEESKLNREEIDGVKLESTRIYQILAIYSTVASSLVLLVSLGAISFWMCSNGSLQCRICI

SEQ ID NO: 13828 - protein, 566 aa, synthetic construct
  REGION 1..566: note = hemagglutinin_precursor__InfluenzaA__AAA43178
MKTIIALSYIFCLALGQDLPGNDNSTATLCLGHHAVPNGTLVKTITDDQIEVTNATELVQSSSTGKICNNPHRILDGIDCTLIDALLGDPHCDVFQNETWDLFVERSKAFSNCYPYDVPDYASLRSLVASSGTLEFITEGFTWTGVTQNGGSNACKRGPGSGFFSRLNWLTKSGSTYPVLNVTMPNNDNFDKLYIWGIHHPSTNQEQTSLYVQASGRVTVSTRRSQQTIIPNIGSRPWVRGLSSRISIYWTIVKPGDVLVINSNGNLIAPRGYFKMRTGKSSIMRSDAPIDTCISECITPNGSIPNDKPFQNVNKITYGACPKYVKQNTLKLATGMRNVPEKQTRGLFGAIAGFIENGWEGMIDGWYGFRHQNSEGTGQAADLKSTQAAIDQINGKLNRVIEKTNEKFHQIEKEFSEVEGRIQDLEKYVEDTKIDLWSYNAELLVALENQHTIDLTDSEMNKLFEKTRRQLRENAEEMGNGCFKIYHKCDNACIESIRNGTYDHDVYRDEALNNRFQIKGVELKSGYKDWILWISFAISCFLLCVVLLGFIMWACQRGNIRCNICI

SEQ ID NO: 13829 - protein, 562 aa, synthetic construct
  REGION 1..562: note = hemagglutinin_precursor__InfluenzaA__AAA43185
MAIIYLILLFTAVRGDQICIGYHANNSTEKVDTNLERNVTVTHAKDILEKTHNGKLCKLNGIPPLELGDCSIAGWLLGNPECDRLLSVPEWSYIMEKENPRDGLCYPGSFNDYEELKHLLSSVKHFEKVKILPKDRWTQHTTTGGSRACAVSGNPSFFRNMVWLTKEGSDYPVAKGSYNNTSGEQMLIIWGVHHPIDETEQRTLYQNVGTYVSVGTSTLNKRSTPEIATRPKVNGQGGRMEFSWTLLDMWDTINFESTGNLIAPEYGFKISKRGSSGIMKTEGTLENCETKCQTPLGAINTTLPFHNVHPLTIGECPKYVKSEKLVLATGLRNVPQIESRGLFGAIAGFIEGGWQGMVDGWYGYHHSNDQGSGYAADKESTQKAFDGITNKVNSVIEKMNTQFEAVGKEFGNLERRLENLNKRMEDGFLDVWTYNAELLVLMENERTLDFHDSNVKNLYDKVRMQLRDNVKELGNGCFEFYHKCDDECMNSVKNGTYDYPKYEEESKLNRNEIKGVKLSSMGVYQILAIYATVAGSLSLAIMMAGISFWMCSNGSLQCRICI

SEQ ID NO: 13830 - protein, 566 aa, synthetic construct
  REGION 1..566: note = hemagglutinin_precursor__InfluenzaA__AAA43187
MKTIIALSHIFCLVLGQYLPGNDNSTATLCLGHHAVPNGTLVKTITNDQIEVTNATELVQSSSTGKICNNPHRILDGIDCTLIDALLGDPHCDGFQNETWDLFVERSKAFSNCYPYDVPDYASLRSLVASSGTLEFITEGFTWTGVTQNGGSNACKRGPGSGFFSRLNWLTKSESTYPVLNVTMPNNDNFDKLYIWGVHHPSTNQEQTSLYVQASGRVTVSTRRSQQTIIPNIGSRPWVRGLSSRISIYWTIVKPGDVLVINSNANLIAPRGYFKMRTGKSSIMRSDAPIDTCISECITPNGSIPNDKPFQNVNKITYGACPKYVKQNTLKLATRMRNVPEKQTRGLFGAIAGFIENGWEGMIDGWYGFRHQNSEGTGQAADLKSTQAAIDQINGKLNRVIEKTNEKFHQIEKEFSEVEGRIQDLEKYVEDTKIDLWSYNAELLVALENQHTIDLTDSEMNKLFEKTRRQLRENAEDMGNGCFKIYDKCDNACIESIRNGTYDHDVYRDEALNNRFQIKGVELKSGYKDWILWISFAISCFLLCVVLLGFIMWACQRGNIRCNICI

SEQ ID NO: 13831 - protein, 565 aa, synthetic construct
  REGION 1..565: note = hemagglutinin_precursor__InfluenzaA__AAA43209
MKAKLLVLLYAFVATDADTICIGYHANNSTDTVDTIFEKNVAVTHSVNLLEDRHNGKLCKLKGIAPLQLGKCNITGWLLGNPECDSLLPARSWSYIVETPNSENGACYPGDFIDYEELREQLSSVSSLERFEIFPKESSWPNHTFNGVTVSCSHRGKSSFYRNLLWLTKKGDSYPKLTNSYVNNKGKEVLVLWGVHHPSSSDEQQSLYSNGNAYVSVASSNYNRRFTPEIAARPKVKDQHGRMNYYWTLLEPGDTIIFEATGNLIAPWYAFALSRGFESGIITSNASMHECNTKCQTPQGSINSNLPFQNIHPVTIGECPKYVRSTKLRMVTGLRNIPSIQYRGLFGAIAGFIEGGWTGMIDGWYGYHHQNEQGSGYAADQKSTQNAINGITNKVNSVIEKMNTQFTAVGKEFNNLEKRMENLNKKVDDGFLDIWTYNAELLVLLENERTLDFHDLNVKNLYEKVKSQLKNNAKEIGNGCFEFYHKCDNECMESVRNGTYDYPKYSEESKLNREKIDGVKLESMGVYQILAIYSTVASSLVLLVSLGAISFWMCSNGSLQCRICI

SEQ ID NO: 13832 - protein, 560 aa, synthetic construct
  REGION 1..560: note = hemagglutinin_precursor__InfluenzaA__AAC40998
MNTQILILALVAIIPTNADKICLGHHAVSNGAKVNTLTERGVEVVNATETVERTNVPRICSKGKRTVDLGQCGLLGTITGPPQCDQFLEFSADLIIERREGNDVCYPGKFVNEEALRQILRKSGGIDKETMGFTYSGIRTNGATSACRRSGSSFYAEMKWLLSNTDNAAFPQMTKSYKNIRKDPALIIWGIHHSGSTAEQTKLYGSGNKLITVGSSNYQQSFVPSPGARPQVNGQSGRIDFHWLMLNPNDTVTFSFNGAFIAPDRASFLRGKSMGIQSEVQVDANCEGDCYHSGGTILSSLPFQNINSRTVGECPRYVKQESLLLATGMKNVPEIPKGRGLFGAIAGFIENGWEGLVDGWYGFRHQNAQGEGTAADYKSTQSAIDQITGKLNRLIEKTNQQFELIDNEFTEVEKQIGNVINWTRDSLTEMWSYNAELLVAMENQHTIDLADSEMNKLYERVRRQLRENAEEDGTGCFEIFHKCDDDCMASIRNNTYDHSKYREEAIQNRIQIDPVKLSSGYKDVILWFSFGASCFILLAIAMGLVFICVKNGNMRCTICI

SEQ ID NO: 13833 - protein, 560 aa, synthetic construct
  REGION 1..560: note = hemagglutinin_precursor__InfluenzaA__AAC40999
MNTQILILALVAIIPTNADKICLGHHAVSNGTKVNTLTERGVEVVNATETVERTNVPRICSKGKRTVDLGQCGLLGTITGPPQCDQFLEFSADLIIERREGDDVCYPGKFVNEEALRQILRESGGIDKETMGFTYSGIRTNGATSACRRSGSSFYAEMKWLLSNTDNAAFPQMTKSYKNIRKDPALIIWGIHHSGSTAEQTKLYGSGNKLITVGSSNYQQSFVPIPGARPQVNGQSGRIDFHWLMLNPNDTVTFSFNGAFIAPDRASFLRGKSMGIQSEVQVDANCEGDCYHSGGTILNNLPFQNINGRAVGKCPRYVKQESLLLATGMKNVPEIPKGRGLFGAIAGFIENGWEGLVDGWYGFRHQNAQGEGTAADYKSTQSAIDQITGKLNRLIEKTNQQFELIDNEFTEVEKQIGNVINWTRDSMTEVWSYNAELLVAMENQHTIDLADSEMNKLYERVRRQLRENAEEDGTGCFEIFHKCDDDCMASIRNNTYDHSKYREEAIQNRIQIDPVKLSSGYKDVILWFSFGASCFILLAIAMGLVFICVKNGNMRCTICI

SEQ ID NO: 13834 - protein, 565 aa, synthetic construct; identical to SEQ ID NO: 2488
  REGION 1..565: note = hemagglutinin__InfluenzaA__ACA28844

SEQ ID NO: 13835 - protein, 565 aa, synthetic construct; identical to SEQ ID NO: 7793
  REGION 1..565: note = hemagglutinin__InfluenzaA__ACA28844/m1

SEQ ID NO: 13836 - protein, 566 aa, synthetic construct; identical to SEQ ID NO: 9150
  REGION 1..566: note = hemagglutinin__InfluenzaA__ACV82259

SEQ ID NO: 13837 - protein, 566 aa, synthetic construct; identical to SEQ ID NO: 9150
  REGION 1..566: note = hemagglutinin__InfluenzaA__ACV82259/m1

SEQ ID NO: 13838 - protein, 566 aa, synthetic construct; identical to SEQ ID NO: 9150
  REGION 1..566: note = hemagglutinin__InfluenzaA__ACV82259/m2

SEQ ID NO: 13839 - protein, 566 aa, synthetic construct; identical to SEQ ID NO: 2667
  REGION 1..566: note = hemagglutinin__InfluenzaA__ACP41953

SEQ ID NO: 13840 - protein, 566 aa, synthetic construct; identical to SEQ ID NO: 12241
  REGION 1..566: note = hemagglutinin__InfluenzaA__AFM72832

SEQ ID NO: 13841 - protein, 566 aa, synthetic construct
  REGION 1..566: note = hemagglutinin__InfluenzaA__EPI516528
MKAILVVLLYTFATANADTLCIGYHANNSTDTVDTVLEKNVTVTHSVNLLEDKHNGKLCKLRGVAPLHLGKCNIAGWILGNPECESLSTASSWSYIVETPSSDNGTCYPGDFIDYEELREQLSSVSSFERFEIFPKTSSWPNHDSNKGVTAACPHAGAKSFYKNLIWLVKKGNSYPKLSKSYINDKGKEVLVLWGIHHPSTSADQQSLYQNADAYVFVGSSRYSKKFKPEIAIRPKVRDQEGRMNYYWTLVEPGDKITFEATGNLVVPRYAFAMERNAGSGIIISDTPVHDCNTTCQTPKGAINTSLPFQNIHPITIGKCPKYVKSTKLRLATGLRNIPSIQSRGLFGAIAGFIEGGWTGMVDGWYGYHHQNEQGSGYAADLKSTQNAIDEITNKVNSVIEKMNTQFTAVGKEFNHLEKRIENLNKKVDDGFLDIWTYNAELLVLLENERTLDYHDSNVKNLYEKVRSQLKNNAKEIGNGCFEFYHKCDNTCMESVKNGTYDYPKYSEEAKLNREEIDGVKLESTRIYQILAIYSTVASSLVLVVSLGAISFWMCSNGSLHCRICV

SEQ ID NO: 13842 - protein, 566 aa, synthetic construct
  REGION 1..566: note = hemagglutinin__InfluenzaA__AGM53850
MKAILVVLLYTFATANADTLCIGYHANNSTDTVDTVLEKNVTVTHSVNLLEDKHNGKLCKLRGVAPLHLGKCNIAGWILGNPECESLSTASSWSYIVETPSSDNGTCYPGDFIDYEELREQLSSVSSFERFEIFPKTSSWPNHDSNKGVTAACPHAGAKSFYKNLIWLVKKGNSYPKLSKSYINDKGKEVLVLWGIHHPPTSADQQSLYQNADAYVFVGSSRYSKKFKPEIAIRPKVRDQEGRMNYYWTLVEPGDKITFEATGNLVVPRYAFAMERNAGSGIIISDTPVHDCNTTCQTPKGAINTSLPFQNIHPITIGKCPKYVKSTKLRLATGLRNIPSIQSRGLFGAIAGFIEGGWTGMVDGWYGYHHQNEQGSGYAADLKSTQNAIDEITNKVNSVIEKMNTQFTAVGKEFNHLEKRIENLNKKVDDGFLDIWTYNAELLVLLENERTLDYHDSNVKNLYEKVRSQLKNNAKEIGNGCFEFYHKCDNTCMESVKNGTYDYPKYSEEAKLNREEIDGVKLESTRIYQILAIYSTVASSLVLVVSLGAISFWMCSNGSLQCRICI

SEQ ID NO: 13843 - protein, 566 aa, synthetic construct
  REGION 1..566: note = hemagglutinin__InfluenzaA__EPI731463
MKAILVVLLYTFATANADTLCIGYHANNSTDTVDTVLEKNVTVTHSVNLLEDKHNGKLCKLRGVAPLHLGKCNIAGWILGNPECESLSTASSWSYIVETPSSDNGTCYPGDFIDYEELREQLSSVSSFERFEIFPNTSSWPNHDSNKGVTAACPHAGAKSFYKNLIWLVKKGNSYPKLSKSYINDKGKEVLVLWGIHHPSTSADQQSLYQNADAYVFVGSSRYSKKFKPEIAIRPKVRGQEGRMNYYWTLVEPGDKITFEATGNLVVPRYAFAMERNAGSGIIISDTPVHDCNTTCQTPKGAINTSLPFQNIHPITIGKCPKYVKSTKLRLATGLRNIPSIQSRGLFGAIAGFIEGGWTGMVDGWYGYHHQNEQGSGYAADLKSTQNAIDEITNKVNSVIEKMNTQFTAVGKEFNHLEKRIENLNKKVDDGFLDIWTYNAELLVLLENERTLDYHDSNVKNLYEKVRSQLKNNAKEIGNGCFEFYHKCDNTCMESVKNGTYDYPKYSEEAKLNREEIDGVKLESTRIYQILAIYSTVASSLVLVVSLGAISFWMCSNGSLQCRICI

SEQ ID NO: 13844 - protein, 566 aa, synthetic construct; identical to SEQ ID NO: 4498
  REGION 1..566: note = hemagglutinin__InfluenzaA__EPI696972

SEQ ID NO: 13845 - protein, 566 aa, synthetic construct; identical to SEQ ID NO: 13686
  REGION 1..566: note = hemagglutinin__InfluenzaA__EPI662594

SEQ ID NO: 13846 - protein, 566 aa, synthetic construct
  REGION 1..566: note = hemagglutinin__InfluenzaA__EPI685579
MKAILVVLLYTFTTANADTLCIGYHANNSTDTVDTVLEKNVTVTHSVNLLEDKHNGKLCKLRGVAPLHLGKCNIAGWILGNPECESLSTASSWSYIVETSNSDNGTCYPGDFINYEELREQLSSVSSFERFEIFPKTSSWPNHDSNKGVTAACPHAGAKSFYKNLIWLVKKGNSYPKLNQSYINDKGKEVLVLWGIHHPSTTADQQSLYQNADAYVFVGTSRYSKKFKPEIATRPKVRDREGRMNYYWTLVEPGDKITFEATGNLVVPRYAFTMERNAGSGIIISDTPVHDCNTTCQTPEGAINTSLPFQNIHPITIGKCPKYVKSTKLRLATGLRNVPSIQSRGLFGAIAGFIEGGWTGMVDGWYGYHHQNEQGSGYAADLKSTQNAIDKITNKVNSVIEKMNTQFTAVGKEFNHLEKRIENLNKKVDDGFLDIWTYNAELLVLLENERTLDYHDSNVKNLYEKVRNQLKNNAKEIGNGCFEFYHKCDNTCMESVKNGTYDYPKYSEEAKLNREKIDGVKLESTRIYQILAIYSTVASSLVLVVSLGAISFWMCSNGSLQCRICI

SEQ ID NO: 13847 - protein, 566 aa, synthetic construct
  REGION 1..566: note = hemagglutinin__InfluenzaA__EPI830230
MKAILVVLLYTFTTANADTLCIGYHANNSTDTVDTVLEKNVTVTHSVNLLEDKHNGKLCKLRGVAPLHLGKCNIAGWILGNPECESLSTASSWSYIVETSNSDNGTCYPGDFINYEELREQLSSVSSFERFEIFPKTSSWPNHDSNKGVTAACPHAGAKSFYKNLIWLVKKGNSYPKLNQSYINDKGKEVLVLWGIHHPSTTADQQSLYQNADAYVFVGTSRYSKMFKPEIATRPKVRDREGRMNYYWTLVEPGDKITFEATGNLVVPRYAFTMERNAGSGIIISDTPVHDCNTTCQTPEGAINTSLPFQNIHPITIGKCPKYVKSTKLRLATGLRNVPSIQSRGLFGAIAGFIEGGWTGMVDGWYGYHHQNEQGSGYAADLKSTQNAIDKITNKVNSVIEKMNTQFTAVGKEFNHLEKRIENLNKKVDDGFLDIWTYNAELLVLLENERTLDYHDSNVKNLYEKVRNQLKNNAKEIGNGCFEFYHKCDNTCMESVKNGTYDYPKYSEEAKLNREKIDGVKLESTRIYQILAIYSTVASSLVLVVSLGAISFWMCSNGSLQCRICI

SEQ ID NO: 13848 - protein, 566 aa, synthetic construct; identical to SEQ ID NO: 2656
  REGION 1..566: note = hemagglutinin__InfluenzaA__ACQ45338

SEQ ID NO: 13849 - protein, 566 aa, synthetic construct; identical to SEQ ID NO: 2656
  REGION 1..566: note = hemagglutinin__InfluenzaA__ACQ45338/m1

SEQ ID NO: 13850 - protein, 566 aa, synthetic construct; identical to SEQ ID NO: 2656
  REGION 1..566: note = hemagglutinin__InfluenzaA__ACQ45338/m2

SEQ ID NO: 13851 - protein, 566 aa, synthetic construct; identical to SEQ ID NO: 2318
  REGION 1..566: note = hemagglutinin__InfluenzaA__ACU79871

SEQ ID NO: 13852 - protein, 566 aa, synthetic construct
  REGION 1..566: note = hemagglutinin__InfluenzaA__ACU79871/m1
MKTIIALSYIFCLALGQDLPGNDNSTATLCLGHHAVPNGTLVKTITDDQIEVTNATELVQSSSTGKICNNPHRILDGIDCTLIDALLGDPHCDVFQNETWDLFVERSKAFSNCYPYDVPDYASLRSLVASSGTLEFITEGFTWTGVTQNGGSNACKRGPGSGFFSRLNWLTKSGSTYPVLNVTMPNNDNFDKLYIWGVHHPSTNQEQTSLYVQASGRVTVSTRRSQQTIIPNIESRPWVRGQSSRISIYWTIVKPGDVLVINSNGNLIAPRGYFKMRTGKSSIMRSDAPIDTCISECITPNGSIPNDKPFQNVNKITYGACPKYVKQNTLKLATGMRNVPEKQTRGLFGAIAGFIENGWEGMIDGWYGFRHQNSEGTGQAADLKSTQAAIDQINGKVNRIIEKTNEKFHQIEKEFSEVEGRIQDLEKYVEDTKIDLWSYNAELLVALENQHTIDLTDSEMNKLFEKTRRQLRENAEDMGNGCFKIYHKCDNACIESIRSGTYDHDVYRDEALNNRFQIKGVELKSGYKDWILWISFAISCFLLCVVLLGFIMWACQRGNIRCNICI

SEQ ID NO: 13853 - protein, 566 aa, synthetic construct
  REGION 1..566: note = hemagglutinin__InfluenzaA__EPI643118
MKTIIALSYILCLVFAQKIPGNDNSTATLCLGHHAVPNGTIVKTITNDRIEVTNATELVQNSSIGEICDSPHQILDGENCTLIDALLGDPQCDGFQNKKWDLFVERSKAYSNCYPYDVPDYASLRSLVASSGTLEFNNESFNWTGVTQNGTSSACIRRSSSSFFSRLNWLTHLNYKYPALNVTMPNNEQFDKLYIWGVHHPGTDKDQIFPYAQSSGRIIVSTKRSQQAVIPNIGSRPRIRDIPSRISIYWTIVKPGDILLINSTGNLIAPRGYFKLRSGKSSIMRSDAPIGKCKSECITPNGSIPNDKPFQNVNRITYGACPRYVKHSTLKLATGMRNVPEKQTRGIFGAIAGFIENGWEGMVDGWYGFRHQNSEGRGQAADLKSTQAAIDQINGKLNRLIGKTNEKFHQIEKEFSEVEGRIQDLEKYVEDTKIDLWSYNAELLVALENQHTIDLTDSEMNKLFEKTKKQLRENAEDMGNGCFKIYHKCDNACIGSIRNGTYDHNVYRDEALNNRFQIKGVELKSGYKDWILWISFAISCFLLCVALLGFIMWACQKGNIRCNICI

SEQ ID NO: 13854 - protein, 566 aa, synthetic construct; identical to SEQ ID NO: 12441
  REGION 1..566: note = hemagglutinin__InfluenzaA__EPI675798

SEQ ID NO: 13855 - protein, 566 aa, synthetic construct
  REGION 1..566: note = hemagglutinin__InfluenzaA__EPI578430
MKTIIALSYILCLVFAQKIPGNDNSTATLCLGHHAVPNGTIVKTITNDRIEVTNATELVQNSSIGEICDSPHQILDGENCTLIDALLGDPQCDGFQNKKWDLFVERSKAYSSCYPYDVPDYASLRSLVASSGTLEFNNESFNWTGVTQNGTSSACIRRSSSSFFSRLNWLTHLNYKYPALNVTMPNNEQFDKLYIWGVHHPGTDKDQIFPYAQSSGRITVSTKRSQQAVIPNIGSRPRIRDIPSRISIYWTIVKPGDILLINSTGNLIAPRGYFKIRSGKSSIMRSDAPIGKCKSECITPNGSIPNDKPFQNVNRITYGACPRYVKHSTLKLATGMRNVPEKQTRGIFGAIAGFIENGWEGMVDGWYGFRHQNSEGRGQAADLKSTQAAIDQINGKLNRLIGKTNEKFHQIEKEFSEVEGRIQDLEKYVEDTKIDLWSYNAELLVALENQHTIDLTDSEMNKLFEKTKKQLRENAEDMGNGCFKIYHKCDNACIGSIRNGTYDHNVYRDEALNNRFQIKGVELKSGYKDWILWISFAISCFLLCVALLGFIMWACQKGNIRCNICI

SEQ ID NO: 13856 - protein, 566 aa, synthetic construct
  REGION 1..566: note = hemagglutinin__InfluenzaA__EPI614406
MKTIIALSYILCLVFAQKIPGNDNSTATLCLGHHAVPNGTIVKTITNDRIEVTNATELVQNSSIGEICDSPHQILDGENCTLIDALLGDPQCDGFQNKKWDLFVERSKAYSSCYPYDVPDYASLRSLVASSGTLEFNNESFNWTGVTQNGTSSACIRRSSSSFFSRLNWLTHLNYKYPALNVTMPNNEQFDKLYIWGVHHPGTDKDQIFPYAQSSGRITVSTKRSQQAVIPNIGSRPRIRNIPSRISIYWTIVKPGDILLINSTGNLIAPRGYFKIRSGKSSIMRSDAPIGKCKSECITPNGSIPNDKPFQNVNRITYGACPRYVKHSTLKLATGMRNVPEKQTRGIFGAIAGFIENGWEGMVDGWYGFRHQNSEGRGQAADLKSTQAAIDQINGKLNRLIGKTNEKFHQIEKEFSEVEGRIQDLEKYVEDTKIDLWSYNAELLVALENQHTIDLTDSEMNKLFEKTKKQLRENAEDMGNGCFKIYHKCDNACIGSIRNGTYDHNVYRDEALNNRFQIKGVELKSGYKDWILWISFAISCFLLCVALLGFIMWACQKGNIRCNICI

SEQ ID NO: 13857 - protein, 564 aa, synthetic construct
  REGION 1..564: note = hemagglutinin__InfluenzaA__ACU65077/m1
MEKIVLLFAIVSLVKSDQICIGYHANNSTEQVDTIMEKNVTVTHAQDILEKTHNGKLCDLDGVKPLILRDCSVAGWLLGNPMCDEFINVPEWSYIVEKANPVNDLCYPGDFNDYEELKHLLSRINHFEKIQIIPKSSWSSHEASLGVSSACPYQGKSSFFRNVVWLIKKNSTYPTIKRSYNNTNQEDLLVLWGIHHPNDAAEQTKLYQNPTTYISVGTSTLNQRLVPRIATRSKVNGQSGRMEFFWTILKPNDAINFESNGNFIAPEYAYKIVKKGDSTIMKSELEYGNCNTKCQTPMGAINSSMPFHNIHPLTIGECPKYVKSNRLVLATGLRNSPQRETRGLFGAIAGFIEGGWQGMVDGWYGYHHSNEQGSGYAADKESTQKAIDGVTNKVNSIIDKMNTQFEAVGREFNNLERRIENLNKKMEDGFLDVWTYNAELLVLMENERTLDFHDSNVKNLYDKVRLQLRDNAKELGNGCFEFYHKCDNECMESVRNGTYDYPQYSEEARLKREEISGVKLESIGIYQILSIYSTVASSLALAIMVAGLSLWMCSNGSLQCRICI

SEQ ID NO: 13858 - protein, 564 aa, synthetic construct; identical to SEQ ID NO: 13857
  REGION 1..564: note = hemagglutinin__InfluenzaA__ACU65077/m2

SEQ ID NO: 13859 - protein, 568 aa, synthetic construct; identical to SEQ ID NO: 28
  REGION 1..568: note = hemagglutinin__InfluenzaA__ABP51976

SEQ ID NO: 13860 - protein, 568 aa, synthetic construct; identical to SEQ ID NO: 28
  REGION 1..568: note = hemagglutinin__InfluenzaA__ABP51976/m1

SEQ ID NO: 13861 - protein, 564 aa, synthetic construct
  REGION 1..564: note = hemagglutinin__InfluenzaA__ABW90125
MEKIVLLFAIVSLVKSDQICIGYHANNSTEQVDTIMEKNVTVTHAQDILEKKHNGKLCDLDGVKPLILRDCSVAGWLLGNPMCDEFINVPEWSYIVEKANPVNDLCYPGDFNDYEELKHLLSRINHFEKIQIIPKSYWSSHEASLGVSSACPYQGKSSFFRNVVWLTKKNSTYPTIKRSYNNTNQEDLLVLWGIHHPNDAAEQTKLYQNPTTYISVGTSTLNQRLVPRIATRSKVNGQSGRMEFFWTILKPNDAINFESNGNFIAPEYAYKIVKKGDSTIMKSELEYGNCNTKCQTPMGAINSSMPFHNIHPLTIGECPKYVKSNRLVLATGLRNSPQRETRGLFGAIAGFIEGGWQGMVDGWYGYHHSNEQGSGYAADKESTQKAIDGVTNKVNSIIDKMNTQFEAVGREFNNLERRIENLNKKMEDGFLDVWTYNAELLVLMENERTLDFHDSNVKNLYDKVRLQLRDNAKELGNGCFEFYHKCDNECMESVRNGTYDYPQYSEEARLKREEISGVKLESIGIYQILSIYSTVASSLALAIMVAGLSLWMCSNGSLQCRICI

SEQ ID NO: 13862 - protein, 564 aa, synthetic construct
  REGION 1..564: note = hemagglutinin__InfluenzaA__ABW90126
MEKIVLLFAIVSLVKSDQICIGYHANNSTEQVDTIMEKNVTVTHAQDILEKKHNGKLCDLDGVKPLILRDCSVAGWLLGNPMCDEFINVPEWSYIVEKANPVNDLCYPGDFNDYEELKHLLSRINHFEKIQIIPKSSWSSHEASLGVSSACPYQGKSSFFRNVVWLIKKNSTYPTIKGSYNNTNQEDLLVLWGIHHPNDAAEQTKLYQNPTTYISVGTSTLNQRLVPRIATRSKVNGQSGRMEFFWTILKPNDAINFESNGNFIAPEYAYKIVKKGDSTIMKSELEYGNCNTKCQTPMGAINSSMPFHNIHPLTIGECPKYVKSNRLVLATGLRNSPQRETRGLFGAIAGFIEGGWQGMVDGWYGYHHSNEQGSGYAADKESTQKAIDGVTNKVNSIIDKMNTQFEAVGREFNNLERRIENLNKKMEDGFLDVWTYNAELLVLMENERTLDFHDSNVKNLYDKVRLQLRDNAKELGNGCFEFYHKCDNECMESVRNGTYDYPQYSEEARLKREEISGVKLESIGIYQILSIYSTVASSLALAIMVAGLSLWMCSNGSLQCRICI

SEQ ID NO: 13863 - protein, 564 aa, synthetic construct
  REGION 1..564: note = hemagglutinin__InfluenzaA__ABW90127
MEKIVLLFAIVSLVKSDQICIGYHANNSTEQVDTIMEKNVTVTHAQDILEKKHNGKLCDLDGVKPLILRDCSVAGWLLGNPMCDEFINVPEWSYIVEKANPVNDLCYPGDFNDYEELKHLLSRINHFEKIQIIPKSSWSSHEASLGVSSACPYQGESSFFRNVVWLIKKNSTYPTIKRSYNNTNQEDLLVLWGIHHPNDAAEQTKLYQNPTTYISVGTSTLNQRLVPRIATRSKVNGQSGRMEFFWTILKPNDAINFESNGNFIAPEYAYKIVKKGDSTIMKSELEYGNCNTKCQTPMGAINSSMPFHNIHPLTIGECPKYVKSNRLVLATGLRNSPQRETRGLFGAIAGFIEGGWQGMVDGWYGYHHSNEQGSGYAADKESTQKAIDGVTNKVNSIIDKMNTQFEAVGREFNNLERRIENLNKKMEDGFLDVWTYNAELLVLMENERTLDFHDSNVKNLYDKVRLQLRDNAKELGNGCFEFYHKCDNECMESVRNGTYDYPQYSEEARLKREEISGVKLESIGIYQILSIYSTVASSLALAIMVAGLSLWMCSNGSLQCRICI

SEQ ID NO: 13864 - protein, 564 aa, synthetic construct
  REGION 1..564: note = hemagglutinin__InfluenzaA__ABW90128
MEKIVLLFAIVSLVKSDQICIGYHANNSTEQVDTIMEKNVTVTHAQDILEKKHNGKLCDLDGVKPLILRDCSVAGWLLGNPMCDEFINVPEWSYIVEKANPVNDLCYPGDFNDYEELKHLLSRINHFEKIQIIPKSSWSSHEASLGVSSACPYQGKSSFFRNVVWLIEKNSTYPTIKRSYNNTNQEDLLVLWGIHHPNDAAEQTKLYQNPTTYISVGTSTLNQRLVPRIATRSKVNGQSGRMEFFWTILKPNDAINFESNGNFIAPEYAYKIVKKGDSTIMKSELEYGNCNTKCQTPMGAINSSMPFHNIHPLTIGECPKYVKSNRLVLATGLRNSPQRETRGLFGAIAGFIEGGWQGMVDGWYGYHHSNEQGSGYAADKESTQKAIDGVTNKVNSIIDKMNTQFEAVGREFNNLERRIENLNKKMEDGFLDVWTYNAELLVLMENERTLDFHDSNVKNLYDKVRLQLRDNAKELGNGCFEFYHKCDNECMESVRNGTYDYPQYSEEARLKREEISGVKLESIGIYQILSIYSTVASSLALAIMVAGLSLWMCSNGSLQCRICI

SEQ ID NO: 13865 - protein, 564 aa, synthetic construct
  REGION 1..564: note = hemagglutinin__InfluenzaA__ABW90129
MEKIVLLFAIVSLVKSDQICIGYHANNSTEQVDTIMEKNVTVTHAQDILEKKHNGKLCDLDGVKPLILRDCSVAGWLLGNPMCDEFINVPEWSYIVEKANPVNDLCYPGDFNDYEELKHLLSRINHFEKIQIIPKSSWSSHEASLGVSSACPYQGKSSFFRNVVWLIKKNSAYPTIKRSYNNTNQEDLLVLWGIHHPNDAAEQTELYQNPTTYISVGTSTLNQRLVPRIATRSKVNGQSGRMEFFWTILKPNDAINFESNGNFIAPEYAYKIVKKGDSTIMKSELEYGNCNTKCQTPMGAINSSMPFHNIHPLTIGECPKYVKSNRLVLATGLRNSPQRETRGLFGAIAGFIEGGWQGMVDGWYGYHHSNEQGSGYAADKESTQKAIDGVTNKVNSIIDKMNTQFEAVGREFNNLERRIENLNKKMEDGFLDVWTYNAELLVLMENERTLDFHDSNVKNLYDKVRLQLRDNAKELGNGCFEFYHKCDNECMESVRNGTYDYPQYSEEARLKREEISGVKLESIGIYQILSIYSTVASSLALAIMVAGLSLWMCSNGSLQCRICI

SEQ ID NO: 13866 - protein, 564 aa, synthetic construct
  REGION 1..564: note = hemagglutinin__InfluenzaA__ABW90130
MEKIVLLFAIVSLVKSDQICIGYHANNSTEQVDTIMEKNVTVTHAQDILEKKHNGKLCDLDGVKPLILRDCSVAGWLLGNPMCDEFINVPEWSYIVEKANPVNDLCYPGDFNDYEELKHLLSRINHFEKIQIIPKSSWSSHEASLGVSSACPYQGKFSFFRNVVWLIKKNSTYPTIKRSYNNTNQEDLLVLWGIHHPNDAAEQTKLYQNPTTYISVGTSTLNQRLVPRIATRSKVNGQSGRMEFFWTILKPNDAINFESNGNFIAPEYAYKIVKKGDSTIMKSELEYGNCNTKCQTPMGAINSSMPFHNIHPLTIGECPKYVKSNRLVLATGLRNSPQRETRGLFGAIAGFIEGGWQGMVDGWYGYHHSNEQGSGYAADKESTQKAIDGVTNKVNSIIDKMNTQFEAVGREFNNLERRIENLNKKMEDGFLDVWTYNAELLVLMENERTLDFHDSNVKNLYDKVRLQLRDNAKELGNGCFEFYHKCDNECMESVRNGTYDYPQYSEEARLKREEISGVKLESIGIYQILSIYSTVASSLALAIMVAGLSLWMCSNGSLQCRICI

SEQ ID NO: 13867 - protein, 564 aa, synthetic construct
  REGION 1..564: note = hemagglutinin__InfluenzaA__ABW90132
MEKIVLLFAIVSLVKSDQICIGYHANNSTEQVDTIMEKNVTVTHAQDILEKKHNGKLCDLDGVKPLILRDCSVAGWLLGNPMCDEFINVPEWSYIVEKANPVNDLCYPGDFNDYEELKHLLSRINHFEKIQIIPKSSWSSHEASLGVSSACPYQGKSSFFRNVVWLIKKNSTYPTIKRSYNNTNQEDLLVLWGIHHPNNAAEQTELYQNPTTYISVGTSTLNQRLVPRIATRSKVNGQSGRMEFFWTILKPNDAINFESNGNFIAPEYAYKIVKKGDSTIMKSELEYGNCNTKCQTPMGAINSSMPFHNIHPLTIGECPKYVKSNRLVLATGLRNSPQRETRGLFGAIAGFIEGGWQGMVDGWYGYHHSNEQGSGYAADKESTQKAIDGVTNKVNSIIDKMNTQFEAVGREFNNLERRIENLNKKMEDGFLDVWTYNAELLVLMENERTLDFHDSNVKNLYDKVRLQLRDNAKELGNGCFEFYHKCDNECMESVRNGTYDYPQYSEEARLKREEISGVKLESIGIYQILSIYSTVASSLALAIMVAGLSLWMCSNGSLQCRICI

SEQ ID NO: 13868 - protein, 564 aa, synthetic construct
  REGION 1..564: note = hemagglutinin__InfluenzaA__ABW90133
MEKIVLLFAIVSLVKSDQICIGYHANNSTEQVDTIMEKNVTVTHAQDILEKKHNGKLCDLDGVKPLILRDCSVAGWLLGNPMCDEFINVPEWSYIVEKANPVNDLCYPGDFNDYEELKHLLSRINHFEKIQIIPKSSWSSHEASLGVSSACPYQGKPSFFRNVVWLIKKNSTYPTIKRSYNNTNQEDLLVLWGIHHPNDAAEQTKLYQNPTTYISVGTSTLNQRLVPRIATRSKVNGQSGRMEFFWTILKPNDAINFESNGNFIAPEYAYKIVKKGDSTIMKSELEYGNCNTKCQTPMGAINSSMPFHNIHPLTIGECPKYVKSNRLVLATGLRNSPQRETRGLFGAIAGFIEGGWQGMVDGWYGYHHSNEQGSGYAADKESTQKAIDGVTNKVNSIIDKMNTQFEAVGREFNNLERRIENLNKKMEDGFLDVWTYNAELLVLMENERTLDFHDSNVKNLYDKVRLQLRDNAKELGNGCFEFYHKCDNECMESVRNGTYDYPQYSEEARLKREEISGVKLESIGIYQILSIYSTVASSLALAIMVAGLSLWMCSNGSLQCRICI

SEQ ID NO: 13869 - protein, 564 aa, synthetic construct
  REGION 1..564: note = hemagglutinin__InfluenzaA__ABW90134
MEKIVLLFAIVSLVKSDQICIGYHANNSTEQVDTIMEKNVTVTHAQDILEKKHNGKLCDLDGVKPLILRDCSVAGWLLGNPMCDEFINVPEWSYIVEKANPVNDLCYPGDFNDYEELKHLLSRINHFEKIQIIPKSSWSSHEASLGVSSACPYQEKSSFFRNVVWLIKKNSTYPTIKRSYNNTNQEDLLVLWGIHHPNDAAEQTKLYQNPTTYISVGTSTLNQRLVPRIATRSKVNGQSGRMEFFWTILKPNDAINFESNGNFIAPEYAYKIVKKGDSTIMKSELEYGNCNTKCQTPMGAINSSMPFHNIHPLTIGECPKYVKSNRLVLATGLRNSPQRETRGLFGAIAGFIEGGWQGMVDGWYGYHHSNEQGSGYAADKESTQKAIDGVTNKVNSIIDKMNTQFEAVGREFNNLERRIENLNKKMEDGFLDVWTYNAELLVLMENERTLDFHDSNVKNLYDKVRLQLRDNAKELGNGCFEFYHKCDNECMESVRNGTYDYPQYSEEARLKREEISGVKLESIGIYQILSIYSTVASSLALAIMVAGLSLWMCSNGSLQCRICI

SEQ ID NO: 13870 - protein, 564 aa, synthetic construct
  REGION 1..564: note = hemagglutinin__InfluenzaA__ABW90135
MEKIVLLFAIVSLVKSDQICIGYHANNSTEQVDTIMEKNVTVTHAQDILEKKHNGKLCDLDGVKPLILRDCSVAGWLLGNPMCDEFINVPEWSYIVEKANPVNDLCYPGDFNDYEELKHLLSRINHFEKIQIIPKSSWSSHEASLGVSSACPYQGKSSFFRNVVWLINKNSTYPTIKRSYNNTNQEDLLVLWGIHHPNDAAEQTKLYQNPTTYISVGTSTLNQRLVPRIATRSKVNGQSGRMEFFWTILKPNDAINFESNGNFIAPEYAYKIVKKGDSTIMKSELEYGNCNTKCQTPMGAINSSMPFHNIHPLTIGECPKYVKSNRLVLATGLRNSPQRETRGLFGAIAGFIEGGWQGMVDGWYGYHHSNEQGSGYAADKESTQKAIDGVTNKVNSIIDKMNTQFEAVGREFNNLERRIENLNKKMEDGFLDVWTYNAELLVLMENERTLDFHDSNVKNLYDKVRLQLRDNAKELGNGCFEFYHKCDNECMESVRNGTYDYPQYSEEARLKREEISGVKLESIGIYQILSIYSTVASSLALAIMVAGLSLWMCSNGSLQCRICI

SEQ ID NO: 13871 - protein, 564 aa, synthetic construct
  REGION 1..564: note = hemagglutinin__InfluenzaA__HB649491
MEKIVLLFAIVSLVKSDQICIGYHANNSTEQVDTIMEKNVTVTHAQDILEKKHNGKLCDLDGVKPLILRDCSVAGWLLGNPMCDEFINVPEWSYIVEKANPVNDLCYPGDFNDYEELKHLLSRINHFEKIQIIPKSSWSSHEASLGVSSACPYQGKSSFFRNVVWLIKKNSTYPTIKRSYNNTNQEDLLVLWGIHHPNDAAEQTKLYQNPTTYISVGTSTLNQRLVPRIATRSKVNGQSGRMEFFWTILKPNDAINFESNGNFIAPEYAYKIVKKGDSTIMKSELEYGNCNTKCQTPMGAINSSMPFHNIHPLTIGECPKYVKSNRLVLATGLRNSPQRETRGLFGAIAGFIEGGWQGMVDGWYGYHHSNEQGSGYAADKESTQKAIDGVTNKVNSIIDKMNTQFEAVGREFNNLERRIENLNKKMEDGFLDVWTYNAELLVLMENERTLDFHDSNVKNLYDKVRLQLRDNAKELGNGCFEFYHKCDNECMESVRNGTYDYPQYSEEARLKREEISGVKLESIGIYQILSIYSTVASSLALAIMVAGLSLWMCSNGSLQCRICI

SEQ ID NO: 13872 - protein, 560 aa, synthetic construct; identical to SEQ ID NO: 9988
  REGION 1..560: note = hemagglutinin__InfluenzaA__EPI439507

SEQ ID NO: 13873 - protein, 566 aa, synthetic construct
  REGION 1..566: note = hemagglutinin__InfluenzaA__EPI482777
MKAILVVLLYTFTTANADTLCIGYHANNSTDTVDTVLEKNVTVTHSVNLLENRHNGKLCKLRGVAPLHLGKCNIAGWLLGNPECESLSTASSWSYIVETSNSDNGTCYPGDFINYEELREQLSSVSSFERFEIFPKTSSWPNHDTNRGVTAACPHAGANSFYRNLVWLVKKGNSYPKINKSYINNKEKEVLVLWAIHHPSTSADQQSLYQNADAYVFVGSSRYSRKFEPEIATRPKVRDQAGRMNYYWTLVEPGDKITFEATGNLVAPRYAFALKRNSGSGIIISDTSVHDCDTTCQTPNGAINTSLPFQNIHPVTIGECPKYVKSTKLRMATGLRNIPSIQSRGLFGAIAGFIEGGWTGMIDGWYGYHHQNEQGSGYAADLKSTQNAIDGITNKVNSVIEKMNTQFTAVGKEFSHLERRIENLNKKVDDGFLDIWTYNAELLVLLENERTLDYHDSNVKNLYEKVRSQLKNNAKEIGNGCFEFYHKCDDMCMESVKNGTYDYPKYSEEAKLNREEIDGVKLESTRIYQILAIYSTVASSLVLVVSLGAISFWMCSNGSLQCRICI

SEQ ID NO: 13874 - protein, 566 aa, synthetic construct; identical to SEQ ID NO: 5584
  REGION 1..566: note = hemagglutinin__InfluenzaA__EPI745532

SEQ ID NO: 13875 - protein, 566 aa, synthetic construct
  REGION 1..566: note = hemagglutinin__InfluenzaA__EPI278594
MKAILVVLLYTFATANADTLCIGYHANNSTDTVDTVLEKNVTVTHSVNLLEDKHNGKLCKLRGVAPLHLGKCNIAGWILGNPECESLSTASSWSYIVETSSSDNGTCYPGDFIDYEELREQLSSVSSFERFEIFPKTSSWPDHESNKGVTAACPHAGAKSFYKNLIWLVKKGNSYPKLSKSYINDKGKEVLVLWGIHHPSTSADQQSLYQNADAYVFVGTSRYSKKFKPEIAIRPKVRDQEGRMNYYWTLVEPGDKITFEATGNLVVPRYAFAMERNAGSGIIISDTPVHDCNTTCQTPKGAINTSLPFQNIHPITIGKCPKYVKSTKLRLATGLRNVPSIQSRGLFGAIAGFIEGGWTGMVDGWYGYHHQNEQGSGYAADLKSTQNAIDKITNKVNSVIEKMNTQFTAVGKEFNHLEKRIENLNKKVDDGFLDIWTYNAELLVLLENERTLDYHDSNVKNLYEKVRSQLKNNAKEIGNGCFEFYHKCDNTCMESVKNGTYDYPKYSEEAKLNREEIDGVKLESTRIYQILAIYSTVASSLVLVVSLGAISFWMCSNGSLQCRICI

SEQ ID NO: 13876 - protein, 566 aa, synthetic construct
  REGION 1..566: note = hemagglutinin__InfluenzaA__AEE69009
MKAILVVLLYTFATANADTLCIGYHANNSTDTVDTVLEKNVTVTHSVNLLEDKHNGKLCKLRGVAPLHLGKCNIAGWILGNPECESLSTASSWSYIVETPSSDNGTCYPGDFIDYEELREQLSSVSSFERFEIFPKTSSWPNHDSNKGVTAACPHAGAKSFYKNLIWLVKKGNSYPKLSKSYINDKGKEVLVLWGIHHPPTSADQQSLYQNADTYVFVGSSRYSKKFKPEIAIRPKVRDQEGRMNYYWTLVEPGDKITFEATGNLVVPRYAFAMERNAGSGIIISDTPVHDCNTTCQTPKGAINTSLPFQNIHPITIGKCPKYVKSTKLRLATGLRNIPSIQSRGLFGAIAGFIEGGWTGMVDGWYGYHHQNEQGSGYAADLKSTQNAIDEITNKVNSVIEKMNTQFTAVGKEFNHLEKRIENLNKKVDDGFLDIWTYNAELLVLLENERTLDYHDSNVKNLYEKVRSQLKNNAKEIGNGCFEFYHKCDNTCMESVKNGTYDYPKYSEEAKLNREEIDGVKLESTRIYQILAIYSTVASSLVLVVSLGAISFWMCSNGSLQCRICI

SEQ ID NO: 13877 - protein, 566 aa, synthetic construct; identical to SEQ ID NO: 2951
  REGION 1..566: note = hemagglutinin__InfluenzaA__GQ280797

SEQ ID NO: 13878 - protein, 566 aa, synthetic construct; identical to SEQ ID NO: 2684
  REGION 1..566: note = hemagglutinin__InfluenzaA__EPI178457

SEQ ID NO: 13879 - protein, 566 aa, synthetic construct; identical to SEQ ID NO: 2684
  REGION 1..566: note = hemagglutinin__InfluenzaA__EPI176470

SEQ ID NO: 13880 - protein, 566 aa, synthetic construct
  REGION 1..566: note = hemagglutinin__InfluenzaA__EPI280341
MKAILVVLLHTFATANADTLCIGYHANNSTDTVDTVLEKNVTVTHSVNLLEDKHNGKLCKLRGVAPLHLGKCNIAGWILGNPECESLSTASSWSYIVETSSSDNGTCYPGNFIDYEELREQLSSVSSFERFEIFPKTSSWPDHDSNKGVTAACPHAGAKSFYKNLIWLVKKGNSYPTLSKSYINDKGKEVLVLWGIHHPSTSADQQSLYQNADAYVFVGTSRYSKKFKPEIAIRPKVRNQEGRMNYYWTLVEPGDKITFEATGNLVAPRYAFAMERNAGSGIIISDTPVHDCNTTCQTPKGAINTSLPFQNIHPITIGKCPKYVKSTKLRLATGLRNVPSIQSRGLFGAIAGFIEGGWTGMVDGWYGYHHQNEQGSGYAADLKSTQNAIDKITNKVNSVIEKMNTQFTAVGKEFNHLEKRIENLNKKVDDGFLDIWTYNAELLVLLENERTLDYHDSNVKNLYEKVRSQLKNNAKEIGNGCFEFYHKCDNTCMESVKNGTYDYPKYSEEAKLNREEIDGVKLESTRIYQILAIYSTVASSLVLVVSLGAISFWMCSNGSLQCRICI

SEQ ID NO: 13881 - protein, 566 aa, synthetic construct
  REGION 1..566: note = hemagglutinin__InfluenzaA__EPI240319
MKAILVVLLYTFATANADTLCIGYHANNSTDTVDTVLEKNVTVTHSVNILEDKHNGKLCKLRGVAPLHLGKCNIAGWILGNPECESLSTASSWSYIVETSSSDNGTCYPGDFIDYEELREQLSSVSSFERFEIFPKTSSWPNHDSNKGVTAACPHAGAKSFYKNLIWLVKKGNSYPKLSKSYINDKGKEVLVLWGIHHPSTSADQQSLYQNADAYVFVGSSRYSKKFKPEIAIRPKVRDREGRMNYYWTLVEPGDKITFEATGNLVVPRYAFAMERNAGSGIIISDTPVHDCNTTCQTPKGAINTSLPFQNIHPITIGKCPKYVKSTKLRLATGLRNVPSIQSRGLFGAIAGFIEGGWTGMVDGWYGYHHQNEQGSGYAADLKSTQNAIDEITNKVNSVIEKMNTQFTAVGKEFNHLEKRIENLNKKVDDGFLDIWTYNAELLVLLENERTLDYHDSNVKNLYEKVRSQLKNNAKEIGNGCFEFYHKCDNTCMESVKNGTYDYPKYSEEAKLNREEIDGVKLESTRIYQILAIYSTVASSLVLVVSLGAISFWMCSNGSLQCRICI

SEQ ID NO: 13882 - protein, 566 aa, synthetic construct; identical to SEQ ID NO: 2849
  REGION 1..566: note = hemagglutinin__InfluenzaA__EPI183134

SEQ ID NO: 13883 - protein, 566 aa, synthetic construct
  REGION 1..566: note = hemagglutinin__InfluenzaA__EPI368693
MKAILVVLLYTFATANADTLCIGYHANNSTDTVDTVLEKNVTVTHSVNILEDKHNGKLCKLRGVAPLHLGKCNIAGWILGNPECESLSTASSWSYIVETSSSDNGTCYPGDFIDYEELREQLSSVSSFERFEIFPKTSSWPNHDSNKGVTASCPHAGAKSFYKNLIWLVKKGNSYPKLSKSYINDKGKEVLVLWGIHHPSTSADQQSLYQNADAYVFVGSSRYSKKFKPEIAIRPKVRGQEGRMNYYWTLVEPGDKITFEATGNLVVPRYAFAMERNAGSGIIISDTPVHDCNTTCQTPKGAINTSLPFQNIHPITIGKCPKYVKSTKLRLATGLRNVPSIQSRGLFGAIAGFIEGGWTGMVDGWYGYHHQNEQGSGYAADLKSTQNAIDEITNKVNSVIEKMNTQFTAVGKEFNHLEKRIENLNKKVDDGFLDIWTYNAELLVLLENERTLDYHDSNVKNLYEKVRSQLKNNAKEIGNGCFEFYHKCDNTCMESVKNGTYDYPKYSEEAKLNREEIDGVKLESTRIYQILAIYSTVASSLVLVVSLGAISFWMCSNGSLQCRICI

SEQ ID NO: 13884 - protein, 566 aa, synthetic construct
  REGION 1..566: note = hemagglutinin__InfluenzaA__EPI291788
MKAILVVLLYTFTTANADTLCIGYHANNSTDTVDTVLEKNVTVTHSVNLLENRHNGKLCKLRGVAPLHLGKCNIAGWLLGNPECESLSTASSWSYIVETSNSDNGTCYPGDFINYEELREQLSSVSSFERFEIFPKTSSWPNHDTNRGVTAACPHAGTNSFYRNLIWLVKKGNSYPKINKSYINNKEKEVLVLWAIHHPSTSADQQSLYQNADAYVFVGSSRYSRKFEPEIATRPKVRDQAGRMNYYWTLVEPGDKITFEATGNLVVPRYAFALKRNSGSGIIISDTSVHDCDTTCQTPNGAINTSLPFQNIHPVTIGECPKYVKSTKLRMATGLRNIPSIQSRGLFGAIAGFIEGGWTGMIDGWYGYHHQNEQGSGYAADLKSTQNAIDGITNKVNSVIEKMNTQFTAVGKEFSHLERRIENLNKKVDDGFLDIWTYNAELLVLLENERTLDYHDSNVKNLYEKVRSQLKNNAKEIGNGCFEFYHKCDDTCMESVKNGTYDYPKYSEEAKLNREEIDGVKLESTRIYQILAIYSTVASSLVLVVSLGAISFWMCSNGSLQCRICI

SEQ ID NO: 13885 - protein, 566 aa, synthetic construct
  REGION 1..566: note = hemagglutinin__InfluenzaA__EPI482788
MKAILVVLLYTFTTANADTLCIGYHANNSTDTVDTVLEKNVTVTHSVNLLENRHNGKLCKLRGVAPLHLGKCNIAGWLLGNPECESLSTASSWSYIVETSNSDNGTCYPGDFINYEELREQLSSVSSFERFEIFPKTSSWPNHDTNRGVTAACPHAGTNSFYRNLIWLVKKGNSYPKINKSYINNKEKEVLVLWAIHHPSTSADQQSIYQNADAYVFVGSSRYSRKFEPEIATRPKVRDQAGRMNYYWTLVEPGDKITFEATGNLVVPRYAFALKRNSGSGIIISDTSVHDCDTTCQTPNGAINTSLPFQNIHPVTIGECPKYVKSTKLRMATGLRNIPSIQSRGLFGAIAGFIEGGWTGMIDGWYGYHHQNEQGSGYAADLKSTQNAIDGITNKVNSVIEKMNTQFTAVGKEFSHLERRIENLNKKVDDGFLDIWTYNAELLVLLENERTLDYHDSNVKNLYEKVRSQLKNNAKEIGNGCFEFYHKCDDTCMESVKNGTYDYPKYSEEAKLNREEIDGVKLESTRIYQILAIYSTVASSLVLVVSLGAISFWMCSNGSLQCRICI

SEQ ID NO: 13886 - protein, 566 aa, synthetic construct
  REGION 1..566: note = hemagglutinin__InfluenzaA__EPI178946/m1
MKAIIVVLLYTFATADADTLCIGYHANNSTDTVDTVLEKNVTVTHSVNLLENKHDGKLCKLRGVAPLHLGKCNIAGWLLGNPECESLFTASSWSYIVETPNSDNGTCYPGDFINYEELREHLSSVSSFERFEIFPKANSWPNHDTNKGVTAACPYAGANSFYRNLIWLVKKGNSYPKLSKSYINNKKKEVLVIWGIHHPPTSTDQQTLYQNADAYVFVGSSKYSKRFKPEIAARPKVRNQAGRMNYYWTLIEPGDTITFEATGNLVVPRYAFAMKRGSGSGIIVSDAPVHDCNTTCQTPKGAINTSLPFQNIHPVTIGECPKYVKSTKLRMATGLRNIPSIQSRGLFGAIAGFLEGGWTGMIDGWYGYHHQNEQGSGYAADQKSTQNAIDGITNKVNSIIEKMNTQFTAVGKEFNQLEKRIESLNNKVDDGFLDIWTYNAEMLVLLENERTLDYHDSNVKNLYEKVRSQLKNNAKEIGNGCFEFYHKCDNTCMESVKNGTYDYPKYSEEAKLNREEIDGVKLESARIYQILAIYSTVASSLVLLVSLGAVSFWMCSNGSLQCRICI

SEQ ID NO: 13887 - protein, 566 aa, synthetic construct
  REGION 1..566: note = hemagglutinin__InfluenzaA__EPI482791/m2
MKAIIVVLLYTFATADADTLCIGYHANNSTDTVDTVLEKNVTVTHSVNLLENKHDGKLCKLRGVAPLHLGKCNIAGWLLGNPECESLFTASSWSYIVETPNSDNGTCYPGDFINYEELREHLSSVSSFERFEIFPKANSWPNHETNKGVTAACPYAGANSFYRNLIWLVKKGNSYPKLSKSYINNKKKEVLVIWGIHHPPTSTDQQTLYQNADAYVFVGSSKYSKRFKPEIAARPKVRNQAGRMNYYWTLIEPGDTITFEATGNLVVPRYAFAMKRGSGSGIIVSDAPVHDCNTTCQTPKGAINTSLPFQNIHPVTIGECPKYVKSTKLRMATGLRNIPSIQSRGLFGAIAGFLEGGWTGMIDGWYGYHHQNEQGSGYAADQKSTQNAIDGITNKVNSIIEKMNTQFTAVGKEFNQLEKRIESLNNKVDDGFLDIWTYNAEMLVLLENERTLDYHDSNVKNLYEKVRSQLKNNAKEIGNGCFEFYHKCDNTCMESVKNGTYDYPKYSEEAKLNREEIDGVKLESARIYQILAIYSTVASSLVLLVSLGAVSFWMCSNGSLQCRICI

SEQ ID NO: 13888 - protein, 566 aa, synthetic construct
  REGION 1..566: note = hemagglutinin__InfluenzaA__EPI291799
MKAILVVLLYTFTTANADTLCIGYHANNSTDTVDTVLEKNVTVTHSVNLLENRHNGKLCKLRGVAPLHLGKCNIAGWLLGNPECESLSTASSWSYIVETSNSDNGTCYPGDFINYEELREQLSSVSSFERFEIFPKTSSWPNHDTNRGVTAACPHAGTNSFYRNLIWLVKKGNSYPKINKSYINNKEKEVLVLWAIHHPSTSADQQSLYQNADAYVFVGSSRYSRKFEPEIATRPKVRDQAGRMNYYWTLVEPGDKITFEATGNLVVPRYAFALKRTSGSGIIISDTSVHDCDTTCQTPNGAINTSLPFQNIHPVTIGECPKYVKSTKLRMATGLRNIPSIQSRGLFGAIAGFIEGGWTGMIDGWYGYHHQNEQGSGYAADLKSTQNAIDGITNKVNSVIEKMNTQFTAVGKEFSHLERRIENLNKKVDDGFLDIWTYNAELLVLLENERTLDYHDSNVKNLYEKVRSQLKNNAKEIGNGCFEFYHKCDDTCMESVKNGTYDYPKYSEEAKLNREEIDGVKLESTRIYQILAIYSTVASSLVLVVSLGAISFWMCSNGSLQCRICI

SEQ ID NO: 13889 - protein, 566 aa, synthetic construct
  REGION 1..566: note = hemagglutinin__InfluenzaA__EPI482799
MKAILVVLLYTFTTANADTLCIGYHANNSTDTVDTVLEKNVTVTHSVNLLENRHNGKLCKLRGVAPLHLGKCNIAGWLLGNPECESLSTASSWSYIVETSNSDNGTCYPGDFINYEELREQLSSVSSFERFEIFPKTSSWPNHETNRGVTAACPHAGTNSFYRNLIWLVKKGNSYPKINKSYINNKEKEVLVLWAIHHPSTSADQQSLYQNADAYVFVGSSRYSRKFEPEIATRPKVRDQAGRMNYYWTLVEPGDKITFEATGNLVVPRYAFALKRTSGSGIIISDTSVHDCDTTCQTPNGAINTSLPFQNIHPVTIGECPKYVKSTKLRMATGLRNIPSIQSRGLFGAIAGFIEGGWTGMIDGWYGYHHQNEQGSGYAADLKSTQNAIDGITNKVNSVIEKMNTQFTAVGKEFSHLERRIENLNKKVDDGFLDIWTYNAELLVLLENERTLDYHDSNVKNLYEKVRSQLKNNAKEIGNGCFEFYHKCDDTCMESVKNGTYDYPKYSEEAKLNREEIDGVKLESTRIYQILAIYSTVASSLVLVVSLGAISFWMCSNGSLQCRICI

SEQ ID NO: 13890 - protein, 566 aa, synthetic construct
  REGION 1..566: note = hemagglutinin__InfluenzaA__EPI291807
MKAIIVVLLYTFATADADTLCIGYHANNSTDTVDTVLEKNVTVTHSVNLLENKHDGKLCKLRGVAPLHLGKCNIAGWLLGNPECESLFAASSWSYIVETPNSDNGTCYPGDFINYEELREHLSSVSSFERFEIFPKANSWPNHDTNKGVTAACPYAGANSFYRNLIWLVKKGNSYPKLSKSYINNKKKEVLVIWGIHHPPTSTDQQTLYQNADAYVFVGSSKYSKRFKPEIAARPKVRDQAGRMDYYWTLIEPGDTITFEATGNLVVPRYAFAMKRGSGSGIIVSDAPVHDCNTTCQTPKGAINTSLPFQNIHPVTIGECPKYVKSTKLRMATGLRNIPSIQSRGLFGAIAGFIEGGWTGMIDGWYGYHHQNEQGSGYAADQKSTQNAIDGITNKVNSIIEKMNTQFTAVGKEFSQLEKRIESLNNKVDDGFLDIWTYNAELLVLLENERTLDYHDSNVKNLYEKVRSQLKNNAKEIGNGCFEFYHKCDNTCMESVKNGTYDYPKYSEEAKLNREEIDGVKLESARIYQILAIYSTVASSLVLLVSLGAVSFWMCSNGSLQCRICI

SEQ ID NO: 13891 - protein, 566 aa, synthetic construct
  REGION 1..566: note = hemagglutinin__InfluenzaA__EPI638970
MKAILVVLLYTFTTANADTLCIGYHANNSTDTVDTVLEKNVTVTHSVNLLENRHNGKLCKLRGVAPLHLGKCNIAGWILGNPECESLSTASSWSYIVETSNSENGTCYPGDFINYEELREQLSSVSSFERFEIFPKTSSWPNHDTNKGVTAACPHSGTNSFYRNLVWLVQKGNSYPKINKSYINNKENEVLVLWAIHHPSTSADQQSLYKNADAYVFVGSSRYSRKFEPEIATRPKVRDQAGRMNYYWTLVEPGDKITFEATGNLVAPRYAFTLKRNSGSGIIISDTSVHDCDTTCQTPNGAINTSLPFQNIHPVTIGECPKYVKSTKLRMATGLRNIPSIQSRGLFGAIAGFIEGGWTGMIDGWYGYHHQNEQGSGYAADLKSTQNAIDGITNKVNSVIEKMNTQFTAVGKEFSHLERRIENLNKKVDDGFLDIWTYNAELLVLLENERTLDYHDSNVKNLYEKVRSQLKNNAKEIGNGCFEFYHKCDDMCMESVKNGTYDYPKYSEEAKLNREEIDGVKLESTKIYQILAIYSTVASSLVLVVSLGAISFWMCSNGSLQCRICI

SEQ ID NO: 13892 - protein, 566 aa, synthetic construct
  REGION 1..566: note = hemagglutinin__InfluenzaA__ABI19015
MKAIIVVLLYTFATADADTLCIGYHANNSTDTVDTVLEKNVTVTHSVNLLENKHDGKLCKLRGIAPLHLGKCNIAGWILGNPECESLFTTSSWSYIVETPNSDNGTCYPGDFINYEELREHLSSVSSFERFEIFPKANSWPYHDTNKGVTAACPYAGANSFYRNLIWLVKKGNSYPKLSKSYINNKKKEVLVIWGIHHPPTSTDQQTLYQNADAYVFVGSSKYSKRFKPEIAARPKVRDQAGRMDYYWTLIEPGDTITFEATGNLVVPRYAFTMKRGSGSGIIVSDAPVHDCNTTCQTPKGAINTSLPFQNIHPVTIGECPKYVKSTKLRMATGLRNIPSIQSRGLFGAIAGFIEGGWTGMIDGWYGYHHQNEQGSGYAADQKSTQNAIDGITNKVNSIIEKMNTQFTAVGKEFSQLEKRIESLNNKVDDGFLDIWTYNAELLVLLENERTLDYHDSNVKNLYEKVRSQLKNNAKEIGNGCFEFYHKCDDTCMESVKNGTYDYPKYSEEAKLNRQEIDGVKLESARIYQILAIYSTVASSLVLLVSLGAVSFWMCSNGSLQCRICI

SEQ ID NO: 13893 - protein, 566 aa, synthetic construct
  REGION 1..566: note = hemagglutinin__InfluenzaA__EPI687790
MKAILVVLLYTFTTANADTLCIGYHANNSTDTVDTVLEKNVTVTHSVNLLEDKHNGKLCKLGGVAPLHLGKCNIAGWILGNPECESLSTASSWSYIVETSNSDNGTCYPGDFINYEELREQLSSVSSFERFEIFPKTSSWPNHDSNKGVTAACPHAGAKSFYKNLIWLVKKGNSYPKLNQSYINDKGKEVLVLWGIHHPSTTADQQSLYQNADAYVFVGTSRYSKKFKPEIATRPKVRDQEGRMNYYWTLVEPGDKITFEATGNLVVPRYAFTMERNAGSGIIISDTPVHDCNTTCQTPEGAINTSLPFQNIHPITIGKCPKYVKSTKLRLATGLRNVPSIQSRGLFGAIAGFIEGGWTGMVDGWYGYHHQNEQGSGYAADLKSTQNAIDKITNKVNSVIEKMNTQFTAVGKEFNHLEKRIENLNKKVDDGFLDIWTYNAELLVLLENERTLDYHDSNVKNLYEKVRNQLKNNAKEIGNGCFEFYHKCDNTCMESVKNGTYDYPKYSEEAKLNREKIDGVKLESTRIYQILAIYSTVASSLVLVVSLGAISFWMCSNGSLQCRICI

SEQ ID NO: 13894 - protein, 566 aa, synthetic construct
  REGION 1..566: note = hemagglutinin__InfluenzaA__EPI841265
MKAILVVLLYTFTTANADTLCIGYHANNSTDTVDTVLEKNVTVTHSVNLLEDKHNGKLCKLGGVAPLHLGKCNIAGWILGNPECESLSTASSWSYIVETSNSDNGTCYPGDFINYEELREQLSSVSSFERFEIFPKTSSWPNHDSNKGVTAACPHAGAKSFYKNLIWLVKKGNSYPKLNQSYINDKGKEVLVLWGIHHPSTTADQQSIYQNADAYVFVGTSRYSKKFKPEIATRPKVRDQEGRINYYWTLVEPGDKITFEATGNLVVPRYAFTMERNAGSGIIISNTPVHDCNTTCQTPEGAINTSLPFQNIHPITIGKCPKYVKSTKLRLATGLRNVPSIQSRGLFGAIAGFIEGGWTGMVDGWYGYHHQNEQGSGYAADLKSTQNAIDKITNKVNSVIEKMNTQFTAVGKEFNHLEKRIENLNKKVDDGFLDIWTYNAELLVLLENERTLDYHDSNVKNLYEKVRNQLKNNAKEIGNGCFEFYHKCDNTCMESVKNGTYDYPKYSEEAKLNREKIDGVKLESTRIYQILAIYSTVASSLVLVVSLGAISFWMCSNGSLQCRICI

SEQ ID NO: 13895 - protein, 566 aa, synthetic construct
  REGION 1..566: note = hemagglutinin__InfluenzaA__EPI291846
MKAIIVVLLYTFATADADTLCIGYHANNSTDTVDTVLEKNVTVTHSVNLLENKHDGKLCNLKGVAPLHLGKCNIAGWLLGNPECESLFTASSWSYIVETPNSDNGTCYPGDFINYEELREHLSSVSSFERFEIFPKVNSWPNHDTNKGVTAACPYAGANSFYRNLIWLVKKGNSYPKLSKSYINNKKKEVLVIWGIHHPPTSTDQQTLYQNADAYVFVGSSKYSKRFEPEIAARPKVRNQAGRMNYYWTLIEPGDTITFEATGNLVVPRYAFAMRRGSGSGIIVSDAPVHDCNTTCQTPKGAINTSLPFQNIHPVTIGECPKYVKSTKLRMATGLRNIPSIQSRGLFGAIAGFLEGGWTGMIDGWYGYHHQNEQGSGYAADQKSTQNAIDGITNKVNSIIEKMNTQFTAVGKEFSQLEKRIESLNNKVDDGFLDIWTYNAEMLVLLENERTLDYHDSNVKNLYEKVRSQLKNNAKEIGNGCFEFYHKCDNTCMESVRNGTYDYPKYSEEAKLNREEIDGVKLESARIYQILAIYSTVASSLVLLVSLGAVSFWMCSNGSLQCRICI

SEQ ID NO: 13896 - protein, 564 aa, synthetic construct
  REGION 1..564: note = hemagglutinin__InfluenzaA__EPI558121
MKAILVVLLYTFTTANADTLCIGYHANNSTDTVDTVLEKNVTVTHSVNLLENRHNGKLCKLRGVAPLHLGKCNIAGWLLGNPECESLSTASSWSYIVETSNSDNGTCYPGDFINYEELREQLSSVSSFERFEIFPQTSSWPNHDTNRGVTAACPHAGTNSFYRNLVWLVKKGNSYSKINKSYINNKEKEVLVLWAIHHPSTSADQQSLYQNADAYVFVGSSRYSRKFEPEIATRPKVRDQAGRMNYYWTLVEPGDKITFEATGNLVAPRYAFALKRNSGSGIIISDTSVHDCDTTCQTPNGAINTSLPFQNIHPVTIGECPKYVKSTKLRMATGLRNIPSIQSRGLFGAIAGFIEGGWTGMIDGWYGYHHQNEQGSGYAADLKSTQNAIDGITNKVNSVIEKMNTQFTAVGKEFSHLERRIENLNKKVDDGFLDIWTYNAELLVLLENERTLDYHDSNVKNLYEKVRSQLKNNAKEIGNGCFEFYHKCDDMCMESVKNGTYDYPKYSEEAKLNREEIDGVKLESTRIYQILAIYSTVASSLVLVVSLGAISFWMCSNGSLQCRI

SEQ ID NO: 13897 - protein, 566 aa, synthetic construct; identical to SEQ ID NO: 12441
  REGION 1..566: note = hemagglutinin__InfluenzaA__EPI564139

SEQ ID NO: 13898 - protein, 566 aa, synthetic construct; identical to SEQ ID NO: 13686
  REGION 1..566: note = hemagglutinin__InfluenzaA__EPI786706

SEQ ID NO: 13899 - protein, 566 aa, synthetic construct
  REGION 1..566: note = hemagglutinin__InfluenzaA__EPI395313
MKAILIVLLYTFTTANADTLCIGYHANNSTDTVDTVLEKNVTVTHSVNLLENRHNGKLCKLRGVAPLHLGKCNIAGWLLGNPECESLSTASSWSYIVETSNSDNGTCYPGDFINYEELREQLSSVSSFERFEIFPKTSSWPNHDTNRGVTAACPHAGTKSFYKNLIWIAKKGNSYPKINKSYINNKEKEVLVLWAIHHPSTSADQQSLYQNADAYVFVGSSRYSRKFEPEIATRPKVRDQAGRMNYYWTLVEPGDKITFEATGNLVAPRYAFALKRNSGSGIIISDTSVHDCDTTCQTPNGAINTSLPFQNIHPVTIGECPKYVKSTKLRMATGLRNIPSIQSRGLFGAIAGFIEGGWTGMIDGWYGYHHQNEQGSGYAADLKSTQNAIDGITNKVNSVIEKMNTQFTAVGKEFSHLERRIENLNKKVDDGFLDIWTYNAELLVLLENERTLDYHDSNVKNLYEKVRSQLKNNAKEIGNGCFEFYHKCDDMCMESVKNGTYDYPKYSEEAKLNREVIDGVKLESTRIYQILAIYATVASSLVLVVSLGAISFWMCSNGSLQCRICI

SEQ ID NO: 13900 - protein, 566 aa, synthetic construct
  REGION 1..566: note = hemagglutinin__InfluenzaA__EPI291696
MKAILLVLLYTFTAANADTLCIGYHANNSTDTVDTVLEKNVTVTHSVNLLENRHNGKLCKLRGVPPLHLGKCNIAGWLLGNPECELLFTASSWSYIVETSNSDNGTCYPGDFINYEELREQLSSVSSFERFEIFPKASSWPDHETNRGVTAACPYAGANSFYRNLIWLVKKGNSYPKLSKSYVNNKEKEVLVLWGIHHPPTSTDQQSLYQNADAYVFVGSSKYNKKFKPEMAARPKVRGQAGRMNYYWTLVAPGDTITFEATGNLVVPRYAFAMKRGSGSGIIISDTPVHDCNTTCQTPKGAINTSLPFQNIHPVTIGECPKYVKSTKLRMATGLRNIPSIQSRGLFGAIAGFIEGGWTGMIDGWYGYHHQNEQGSGYAADRKSTQNAIDGITNKVNSVIEKMNTQFTAVGKEFNHLEKRIENLNKKVDDGFLDVWTYNAELLVLLENERTLDYHDSNVKNLYEKVRSQLKNNAKEIGNGCFEFYHKCDDTCMESVKNGTYDYPKYSEESKLNREEIDGVKLESTRIYQILAIYSTVASSLVLSVSLGAISFWMCSNGSLQCRICI

SEQ ID NO: 13901 - protein, 566 aa, synthetic construct; identical to SEQ ID NO: 9831
  REGION 1..566: note = hemagglutinin__InfluenzaA__ACU80014

SEQ ID NO: 13902 - protein, 566 aa, synthetic construct; identical to SEQ ID NO: 2669
  REGION 1..566: note = hemagglutinin__InfluenzaA__EPI177400

SEQ ID NO: 13903 - protein, 566 aa, synthetic construct; identical to SEQ ID NO: 3112
  REGION 1..566: note = hemagglutinin__InfluenzaA__ACT36512

SEQ ID NO: 13904 - protein, 567 aa, synthetic construct
  REGION 1..567: note = hemagglutinin__InfluenzaA__AJE30344
MEKIVLLLAVISLVKSDQICIGYHANNSTKQVDTIMEKNVTVTHAQDILEKTHNGKLCDLNGVKPLILKDCSVAGWLLGNPMCDEFIRVPEWSYIVERANPANDLCYPGTLNDYEELKHLLSRINHFEKNLIIPRSSWPNHETSLGVSAACPYQGASSFFRNVVWLIKKNDAYPTIKISYNNTNREDLLILWGIHHSNNAAEQTNLYKNPDTYVSVGTSTLNQRLVPKIATRSQVNGQSGRMDFFWTILKPNDAIHFESNGNFIAPEYAYKIVKKGDSTIMKSEMEYGHCNTKCQTPIGAINSSMPFHNIHPLTIGECPKYVKSNKLVLATGLRNSPLRERRRKRGLFGAIAGFIEGGWQGMVDGWYGYHHSNEQGSGYAADKESTQKAIDGVTNKVNSIIDKMNTQFEAVGREFNNLERRIENLNKKMEDGFLDVWTYNAELLVLMENERTLDFHDSNVKNLYDKVRLQLRDNAKELGNGCFEFYHKCDNECMESVRNGTYDYPKYSEEAILKREEISGVKLESIGTYQILSIYSTVASSLALAIIVAGLSLWMCSNGSLQCRICI

SEQ ID NO: 13905 - protein, 566 aa, synthetic construct; identical to SEQ ID NO: 13884
  REGION 1..566: note = hemagglutinin__InfluenzaA__EPI178948

SEQ ID NO: 13906 - protein, 566 aa, synthetic construct; identical to SEQ ID NO: 13884
  REGION 1..566: note = hemagglutinin__InfluenzaA__EPI178949

SEQ ID NO: 13907 - protein, 566 aa, synthetic construct
  REGION 1..566: note = hemagglutinin__InfluenzaA__EPI590132
MKAILIVLLYTFTTANADKICIGYHANNSTDTVDTVLEKNVTVTHSVNLLENKHNGKLCKLRGVAPLHLGKCNIAGWLLGNPECESLATASSWSYIVETSSSNNGTCYPGDFINYEELREQLSSVSSFEKFEIFPKTSSWPNHETNKGVTAACPHAGTNSFYKNLIWLVKKENSYPKINISYTNNRGKEVLVLWAIHHPPTSTDQQSLYQNANSYVFVGSSRYSRKFEPEIATRPKVRGQAGRMNYYWTLVEPGDKITFEATGNLVVPRYAFALKRNSGSGIIISETPVHDCDTTCQTPNGAINTSLPFQNIHPVTIGECPKYVKSTKLRMATGLRNIPSIQSRGLFGAIAGFIEGGWTGMIDGWYGYHHQNEQGSGYAADLKSTQNAIDGITNKVNSVIEKMNTQFTAVGKEFSHLERRIENLNKKVDDGFIDIWTYNAELLVLLENERTLDYHDSNVKTLYEKVRSQLKNNAKEIGNGCFEFYHKCDDTCMESVKNGTYDYPKYSEEAKLNREEIDGIKLESTRIYQILAIYSTVASSLVLVVSLGAISFWMCSNGSLQCRVCI

SEQ ID NO: 13908 - protein, 566 aa, synthetic construct; identical to SEQ ID NO: 1736
  REGION 1..566: note = hemagglutinin__InfluenzaA__ABU80400

SEQ ID NO: 13909 - protein, 565 aa, synthetic construct
  REGION 1..565: note = hemagglutinin__InfluenzaA__ABO21709
MKANLLVLLCALAAADADTICIGYHANNSTDTVDTVLEKNVTVTHSVNLLEDSHNGKLCRLKGIAPLQLGKCNIAGWLLGNPECDPLLPVRSWSYIVETPNSENGICYPGDFIDYEELREQLSSVSSFERFEIFPKESSWPNHNTNGVTAACSHEGKSSFYRNLLWLTEKEGSYPKLKNSYVNKKGKEVLVLWGIHHPPNSKEQQNLYQNENAYVSVVTSNYNRRFTPEIAERPKVRDQAGRMNYYWTLLKPGDTIIFEANGNLIAPMYAFALSRGFGSGIITSNASMHECNTKCQTPLGAINSSLPYQNIHPVTIGECPKYVRSAKLRMVTGLRNNPSIQSRGLFGAIAGFIEGGWTGMIDGWYGYHHQNEQGSGYAADQKSTQNAINGITNKVNTVIEKMNIQFTAVGKEFNKLEKRMENLNKKVDDGFLDIWTYNAELLVLLENERTLDFHDSNVKNLYEKVKSQLKNNAKEIGNGCFEFYHKCDNECMESVRNGTYDYPKYSEESKLNREKVDGVKLESMGIYQILAIYSTVASSLVLLVSLGAISFWMCSNGSLQCRICI

SEQ ID NO: 13910 - protein, 566 aa, synthetic construct; identical to SEQ ID NO: 2656
  REGION 1..566: note = hemagglutinin__InfluenzaA__CAZ65588

SEQ ID NO: 13911 - protein, 566 aa, synthetic construct; identical to SEQ ID NO: 13686
  REGION 1..566: note = hemagglutinin__InfluenzaA__EPI697744

SEQ ID NO: 13912 - protein, 566 aa, synthetic construct; identical to SEQ ID NO: 13846
  REGION 1..566: note = hemagglutinin__InfluenzaA__EPI768525

SEQ ID NO: 13913 - protein, 566 aa, synthetic construct
  REGION 1..566: note = hemagglutinin__InfluenzaA__EPI726930
MKAILVVLLYTFTTANADTLCIGYHANNSTDTVDTVLEKNVTVTHSVNLLEDKHNGKLCKLRGVAPLHLGKCNIAGWILGNPECESLSTASSWSYIVETSNSDNGTCYPGDFINYEELREQLSSVSSFERFEIFPKASSWPNHDSNKGVTAACPHAGAKSFYKNLIWLVKKGNSYPKLNQSYINDKGKEVLVLWGIHHPSTTADQQSLYQNADAYVFVGTSRYSKKFKPEIATRPKVRDQEGRMNYYWTLVEPGDKITFEATGNLVVPRYAFTMERNAGSGIIISDTPVHDCNTTCQTPEGAINTSLPFQNIHPITIGKCPKYVKSTKLRLATGLRNVPSIQSRGLFGAIAGFIEGGWTGMVDGWYGYHHQNEQGSGYAADLKSTQNAIDKITNKVNSVIEKMNTQFTAVGKEFNHLEKRIENLNKKVDDGFLDIWTYNAELLVLLENERTLDYHDSNVKNLYEKVRNQLKNNAKEIGNGCFEFYHKCDNTCMESVKNGTYDYPKYSEEAKLNREKIDGVKLESTRIYQILAIYSTVASSLVLVVSLGAISFWMCSNGSLQCRICI

SEQ ID NO: 13914 - protein, 566 aa, synthetic construct
  REGION 1..566: note = hemagglutinin__InfluenzaA__EPI813817
MKAILVVLLYTFTTANADTLCIGYHANNSTDTVDTVLEKNVTVTHSVNLLEDKHNGKLCKLRGVAPLHLGKCNIAGWILGNPECESLSTASSWSYIVETSNSDNGTCYPGDFINYEELREQLSSVSSFERFEIFPKASSWPNHDSNKGVTAACPHAGAKSFYKNLIWLVKKGNSYPKLNQSYINDKGKEVLVLWGIHHPSTTADQQSLYQNADAYVFVGTSRYSKKFKPEIATRPKVRDQEARMNYYWTLVEPGDKITFEATGNLVVPRYAFTMERNAGSGIIISDTPVHDCNTTCQTPEGAINTSLPFQNIHPITIGKCPKYVKSTKLRLATGLRNVPSIQSRGLFGAIAGFIEGGWTGMVDGWYGYHHQNEQGSGYAADLKSTQNAIDKITNKVNSVIEKMNTQFTAVGKEFNHLEKRIENLNKKVDDGFLDIWTYNAELLVLLENERTLDYHDSNVKNLYEKVRNQLKNNAKEIGNGCFEFYHKCDNTCMESVKNGTYDYPKYSEEAKLNREKIDGVKLESTRIYQILAIYSTVASSLVLVVSLGAISFWMCSNGSLQCRICI

SEQ ID NO: 13915 - protein, 566 aa, synthetic construct
  REGION 1..566: note = hemagglutinin__InfluenzaA__EPI466626
MKAILVVLLYTFATANADTLCIGYHANNSTDTVDTVLEKNVTVTHSVNLLEDKHNGKLCKLRGVAPLHLGKCNIAGWILGNPECESLSTASSWSYIVETSSSDNGTCYPGDFINYEELREQLSSVSSFERFEIFPKTSSWPNHDSNKGVTAACPHAGAKSFYKNLIWLVKKGNSYPKLSQSYINDKGKEVLVLWGIHHPSTTADQQSLYQNADAYVFVGTSRYSKKFKPEIAIRPKVRDQEGRMNYYWTLVEPGDKITFEATGNLVVPRYAFTMERNAGSGIIISDTPVHDCNTTCQTPEGAINTSLPFQNIHPITIGKCPKYVKSTKLRLATGLRNVPSIQSRGLFGAIAGFIEGGWTGMVDGWYGYHHQNEQGSGYAADLKSTQNAIDKITNKVNSVIEKMNTQFTAVGKEFNHLEKRIENLNKKVDDGFLDIWTYNAELLVLLENERTLDYHDSNVKNLYEKVRNQLKNNAKEIGNGCFEFYHKCDNTCMESVKNGTYDYPKYSEEAKLNREKIDGVKLESTRIYQILAIYSTVASSVVLVVSLGAISFWMCSNGSLQCRICI

SEQ ID NO: 13916 - protein, 566 aa, synthetic construct
  REGION 1..566: note = hemagglutinin__InfluenzaA__EPI541966
MKAILVVLLYTFATANADTLCIGYHANNSTDTVDTVLEKNVTVTHSVNLLEDKHNGKLCKLRGVAPLHLGKCNIAGWILGNPECESLSTASSWSYIVETSSSDNGTCYPGDFINYEELREQLSSVSSFERFEIFPKTSSWPNHESNKGVTAACPHAGAKSFYKNLIWLVKKGNSYPKLSQSYINDKGKEVLVLWGIHHPSTTADQQSLYQNADAYVFVGTSRYSKKFKPEIAIRPKVRDQEGRMNYYWTLVEPGDKITFEATGNLVVPRYAFTMERNAGSGIIISDTPVHDCNTTCQTPEGAINTSLPFQNIHPITIGKCPKYVKSTKLRLATGLRNVPSIQSRGLFGAIAGFIEGGWTGMVDGWYGYHHQNEQGSGYAADLKSTQNAIDKITNKVNSVIEKMNTQFTAVGKEFNHLEKRIENLNKKVDDGFLDIWTYNAELLVLLENERTLDYHDSNVKNLYEKVRNQLKNNAKEIGNGCFEFYHKCDNTCMESVKNGTYDYPKYSEEAKLNREKIDGVKLESTRIYQILAIYSTVASSVVLVVSLGAISFWMCSNGSLQCRICI

SEQ ID NO: 13917 - protein, 566 aa, synthetic construct
  REGION 1..566: note = hemagglutinin__InfluenzaA__EPI652003
MKAILVVLLYTFATANADTLCIGYHANNSTDTVDTVLEKNVTVTHSVNLLEDKHNGKLCKLRGVAPLHLGKCNIAGWILGNPECESLSTASSWSYIVETSSSDNGTCYPGDFINYEELREQLSSVSSFERFEIFPKTSSWPNHESNKGVTAACPHAGAKSFYKNLIWLVKKGNSYPKLSQSYINDKGKEVLVLWGIHHPPTTADQQSLYQNADAYVFVGTSRYSKKFKPEIAIRPKVRDQEGRMNYYWTLVEPGDKITFEATGNLVVPRYAFTMERNAGSGIIISDTPVHDCNTTCQTPEGAINTSLPFQNIHPITIGKCPKYVKSTKLRLATGLRNVPSIQSRGLFGAIAGFIEGGWTGMVDGWYGYHHQNEQGSGYAADLKSTQNAIDKITNKVNSVIEKMNTQFTAVGKEFNHLEKRIENLNKKVDDGFLDIWTYNAELLVLLENERTLDYHDSNVKNLYEKVRNQLKNNAKEIGNGCFEFYHKCDNTCMESVKNGTYDYPKYSEEAKLNREKIDGVKLESTRIYQILAIYSTVASSVVLVVSLGAISFWMCSNGSLQCRICI

SEQ ID NO: 13918 - protein, 566 aa, synthetic construct
  REGION 1..566: note = hemagglutinin__InfluenzaA__EPI291877
MKAIIVVLLYTFATADADTLCIGYHANNSTDTVDTVLEKNVTVTHSVNILENKHDGKLCKLRGVAPLHLGKCNIAGWLLGNPECESLFAASSWSYIVETPNSDNGTCYPGDFINYEELREHLSSVSSFERFEIFPKANSWPNHDTNKGVTAACPYAGANSFYRNLIWLVKKGNSYPKLSKSYINNKKKEVLVIWGIHHPPTSIDQQTLYQNADAYVFVGSSKYSKRFKPEIAARPKVRDQAGRMDYYWTLIEPGDTITFEATGNLVVPRYAFAMKRGSGSGIIVSDAPVHDCNTTCQTPKGAINTSLPFQNIHPVTIGECPKYVKSTKLRMATGLRNIPSIQSRGLFGAIAGFIEGGWTGMIDGWYGYHHQNEQGSGYAADQKSTQNAIDGITNKVNSIIEKMNTQFTAVGKEFSQLEKRIESLNNKVDDGFLDIWTYNAELLVLLENERTLDYHDSNVKNLYEKVRSQLKNNAKEIGNGCFEFYHKCDNTCMESVKNGTYDYPKYSEEAKLNREEIDGIKLESARIYQILAIYSTVASSLVLLVSLGAVSFWMCSNGSLQCRICI

SEQ ID NO: 13919 - protein, 566 aa, synthetic construct
  REGION 1..566: note = hemagglutinin__InfluenzaA__ABR29595
MKAILLVLLYTFTAANADTLCIGYHANNSTDTVDTVLEKNVTVTHSVNLLEDRHNGKLCKLRGVAPLHLGKCNIAGWLLGNPECELLFTASSWSYIVETSNSDNGTCYPGDFINYEELREQLSSVSSFERFEIFPKASSWPNHETNRGVTAACPYAGANSFYRNLIWLVKKGNSYPKLSKSYVNNKEKEVLVLWGIHHPPTSTDQQSLYQNADAYVFVGSSKYNKKFKPEIATRPKVRGQAGRMNYYWTLVEPGDTITFEATGNLVVPRYAFAMKRGSGSGIIISDTPVHDCNTTCQTPKGAINTSLPFQNIHPVTIGECPKYVKSTKLRMATGLRNIPSIQSRGLFGAIAGFIEGGWTGMIDGWYGYHHQNEQGSGYAADRKSTQNAIDGITNKVNSVIEKMNTQFTAVGKEFNHLEKRIENLNKKVDDGFLDVWTYNAELLVLLENERTLDYHDSNVKNLYEKVRSQLKNNAKEIGNGCFEFYHKCDDTCMESVKNGTYDYPKYSEESKLNREEIDGVKLESTRIYQILAIYSTVASSLVLLVSLGAISFWMCSNGSLQCRICI

SEQ ID NO: 13920 - protein, 566 aa, synthetic construct
  REGION 1..566: note = hemagglutinin__InfluenzaA__EPI291885
MKAIIVVLLHTFATADADTLCIGYHANNSTDTVDTVLEKNVTVTHSVNLLETKHDGKLCNLKGVAPLHLGKCNIAGWLLGNPECESLFTASSWSYIVETPNSDNGTCYPGNFINYEELREHLSSVSSFERFEIFPKANSWPNHDTNKGVTAACPYAGANSFYRNLIWLVKKGNSYPKLSKSYINNKKKEVLVIWGIHHPPTSTDQQTLYQNADAYVFVGSSKYSKRFEPEIAARPKVRNQAGRMNYYWTLIEPGDTITFEATGNLVVPRYAFAMRRGSGSGIIVSDAPVHDCNTTCQTPKGAINTSLPFQNIHPVTIGECPKYVKSTKLRMATGLRNIPSIQSRGLFGAIAGFLEGGWTGMIDGWYGYHHQNEQGSGYAADQKSTQNAIDGITNKVNSIIEKMNTQFTAVGKEFSQLEKRIESLNNKVDDGFLDIWTYNAEMLVLLENERTLDYHDSNVKNLYEKVRSQLKNNAKEIGNGCFEFYHKCDNTCMESVKNGTYDYPKYSEEAKLNREEIDGVKLESARIYQILAIYSTVASSLVLLVSLGAVSFWMCSNGSLQCRICI

SEQ ID NO: 13921 - protein, 566 aa, synthetic construct; identical to SEQ ID NO: 2656
  REGION 1..566: note = hemagglutinin__InfluenzaA__EPI176515

SEQ ID NO: 13922 - protein, 566 aa, synthetic construct; identical to SEQ ID NO: 3112
  REGION 1..566: note = hemagglutinin__InfluenzaA__EPI189182

SEQ ID NO: 13923 - protein, 566 aa, synthetic construct; identical to SEQ ID NO: 2904
  REGION 1..566: note = hemagglutinin__InfluenzaA__EPI180574

SEQ ID NO: 13924 - protein, 566 aa, synthetic construct; identical to SEQ ID NO: 8709
  REGION 1..566: note = hemagglutinin__InfluenzaA__EPI377499

SEQ ID NO: 13925 - protein, 566 aa, synthetic construct
  REGION 1..566: note = hemagglutinin__InfluenzaA__EPI346916
MKAILVVLLYTFTTATADTLCIGYHANNSTDTVDTVLEKNVTVTHSVNLLENRHNGKLCKLRGVAPLHLGKCNIAGWLLGNPECESLSTASSWSYIVETSNSDNGTCYPGDFINYEELREQLSSVSSFERFEIFPKTSSWPNHDTNRGVTAACPHDGTNSFYRNLIWLVKKGNSYPKINKSYINNKEKEILVLWAIHHPSTSADQQSLYQNADAYVFVGSSRYSRKFEPEVATRPKVRDQAGRMNYYWTLVEPGDKITFEATGNLVVPRYAFALKRNSGSGIIISDTSVHDCDTNCQTPNGAINTSLPFQNIHPVTIGECPKYVKSTKLRMATGLRNIPSIQSRGLFGAIAGFIEGGWTGMIDGWYGYHHQNEQGSGYAADLKSTQNAIDGITNKVNSVIEKMNTQFTAVGKEFSHLERRIENLNKKVDDGFLDIWTYNAELLVLLENERTLDYHDSNVKNLYEKVRSQLKNNAKEIGNGCFEFYHKCDDMCMESVKNGTYDYPKYSEEAKLNREEIDGVKLESTRIYQILAIYSTVASSLVLVVSLGAISFWMCSNGSLQCRICI

SEQ ID NO: 13926 - protein, 562 aa, synthetic construct; identical to SEQ ID NO: 3283
  REGION 1..562: note = hemagglutinin__InfluenzaA__ACV49600

SEQ ID NO: 13927 - protein, 566 aa, synthetic construct; identical to SEQ ID NO: 2329
  REGION 1..566: note = hemagglutinin__InfluenzaA__BAF48361

SEQ ID NO: 13928 - protein, 566 aa, synthetic construct
  REGION 1..566: note = hemagglutinin__InfluenzaA__EPI507594
MKTIIALSYILCLVFAQKLPGNDNSTATLCLGHHAVPNGTIVKTITNDRIEVTNATELVQNSSIGEICDSPHQILDGENCTLIDALLGDPQCDGFQNKKWDLFVERSKAYSNCYPYDVPDYASLRSLVASSGTLEFNNESFNWAGVTQNGTSSACKRGSNSSFFSRLNWLTHLNFKYPALNVTMPNNEQFDKLYIWGVHHPVTDKDQIFLYAQSSGRITVSTKRSQQAVIPNIGFRPRIRNIPSRISIYWTIVKPGDILLINSTGNLIAPRGYFKIRSGKSSIMRSDAPIGKCKSECITPNGSIPNDKPFQNVNRITYGACPRYVKQSTLKLATGMRNVPEKQTRGIFGAIAGFIENGWEGMVDGWYGFRHQNFEGRGQAADLKSTQAAIDQINGKLNRLIGKTNEKFHQIEKEFSEVEGRIQDLEKYVEDTKIDLWSYNAELLVALENQHTIDLTDSEMNKLFEKTKKQLRENAEDMGNGCFKIYHKCDNACIGSIRNGTYDHDVYRDEALNNRFQIKGVELKSGYKDWILWISFAISCFLLCVALLGFIMWACQKGNIRCNICI

SEQ ID NO: 13929 - protein, 566 aa, synthetic construct
  REGION 1..566: note = hemagglutinin__InfluenzaA__EPI461953
MKTIIALSYILCLVFAQKLPGNDNSTATLCLGHHAVPNGTIVKTITNDRIEVTNATELVQNSSIGEICDSPHQILDGENCTLIDALLGDPQCDGFQNKKWDLFVERSKAYSNCYPYDVPDYASLRSLVASSGTLEFNNESFNWAGVTQNGTSSACIRGSNSSFFSRLNWLTHLNFKYPALNVTMPNNEQFDKLYIWGVHHPGTDKDQIFLYAQSSGRITVSTKRSQQAVIPNIGSRPRIRNIPSRISIYWTIVKPGDILLINSTGNLIAPRGYFKIRSGKSSIMRSDAPIGKCKSECITPNGSIPNDKPFQNVNRITYGACPRYVKQSTLKLATGMRNVPEKQTRGIFGAIAGFIENGWEGMVDGWYGFRHQNFEGRGQAADLKSTQAAIDQINGKLNRLIGKTNEKFHQIEKEFSEVEGRIQDLEKYVEDTKIDLWSYNAELLVALENQHTIDLTDSEMNKLFEKTKKQLRENAEDMGNGCFKIYHKCDNACIGSIRNGTYDHDVYRDEALNNRFQIKGVELKSGYKDWILWISFAISCFLLCVALLGFIMWACQKGNIRCNICI

SEQ ID NO: 13930 - protein, 566 aa, synthetic construct
  REGION 1..566: note = hemagglutinin__InfluenzaA__EPI461953/m1
MKTIIALSYILCLVFAQKLPGNDNSTATLCLGHHAVPNGTIVKTITNDRIEVTNATELVQNSSIGEICDSPHQILDGENCTLIDALLGDPQCDGFQNKKWDLFVERSKAYSNCYPYDVPDYASLRSLVASSGTLEFNNESFNWAGVTQNGTSSACKRGSNSSFFSRLNWLTHLNFKYPALNVTMPNNEQFDKLYIWGVHHPVTDKDQIFLYAQSSGRITVSTKRSQQAVIPNIGYRPRIRNIPSRISIYWTIVKPGDILLINSTGNLIAPRGYFKIRSGKSSIMRSDAPIGKCKSECITPNGSIPNDKPFQNVNRITYGACPRYVKQSTLKLATGMRNVPEKQTRGIFGAIAGFIENGWEGMVDGWYGFRHQNFEGRGQAADLKSTQAAIDQINGKLNRLIGKTNEKFHQIEKEFSEVEGRIQDLEKYVEDTKIDLWSYNAELLVALENQHTIDLTDSEMNKLFEKTKKQLRENAEDMGNGCFKIYHKCDNACIGSIRNGTYDHDVYRDEALNNRFQIKGVELKSGYKDWILWISFAISCFLLCVALLGFIMWACQKGNIRCNICI

SEQ ID NO: 13931 - protein, 566 aa, synthetic construct
  REGION 1..566: note = hemagglutinin__InfluenzaA__EPI668105
MKTIIALSYILCLVFAQKIPGNDNSTATLCLGHHAVPNGTIVKTITNDRIEVTNATELVQNSSIGEICDSPHQILDGENCTLIDALLGDPQCDGFQNKKWDLFVERSKAYSNCYPYDVPDYASLRSLVASSGTLEFNNESFNWTGVTQNGTSSACIRGSSSSFFSRLNWLTHLNYKYPALNVTMPNNEQFDKLYIWGVHHPGTDKDQIFPYAQSSGRITVSTKRSQQAVIPNIGSRPRIRGIPSRISIYWTIVKPGDILLINSTGNLIAPRGYFKIRSGKSSIMRSDAPIGKCKSECITPNGSIPNDKPFQNVNRITYGACPRYVKHSTLKLATGMRNVPEKQTRGIFGAIAGFIENGWEGMVDGWYGFRHQNSEGRGQAADLKSTQAAIDQINGKLNRLIGKTNEKFHQIEKEFSEVEGRIQDLEKYVEDTKIDLWSYNAELLVALENQHTIDLTDSEMNKLFEKTKKQLRENAEDMGNGCFKIYHKCDNACIGSIRNGTYDHNVYRDEALNNRFQIKGVELKSGYKDWILWISFAISCFLLCVALLGFIMWACQKGNIRCNICI

SEQ ID NO: 13932 - protein, 566 aa, synthetic construct
  REGION 1..566: note = hemagglutinin__InfluenzaA__EPI578446
MKTIIALSYILCLVFAQKIPGNDNSTATLCLGHHAVPNGTIVKTITNDRIEVTNATELVQNSSIGEICDSPHQILDGENCTLIDALLGDPQCDGFQNKKWDLFVERSKAYSNCYPYDVPDYASLRSLVASSGTLEFNNESFNWTGVTQNGTSSACIRRSSSSFFSRLNWLTHLNYKYPALNVTMPNNEQFDKLYIWGVHHPGTDKDQIFPYAQSSGRITVSTKRSQQAVIPNIGSRPRIRGIPSRISIYWTIVKPGDILLINSTGNLIAPRGYFKIRSGKSSIMRSDAPIGKCKSECITPNGSIPNDKPFQNVNRITYGACPRYVKHSTLKLATGMRNVPEKQTRGIFGAIAGFIENGWEGMVDGWYGFRHQNSEGRGQAADLKSTQAAIDQINGKLNRLIGKTNEKFHQIEKEFSEVEGRIQDLEKYVEDTKIDLWSYNAELLVALENQHTIDLTDSEMNKLFEKTKKQLRENAEDMGNGCFKIYHKCDNACIGSIRNGTYDHNVYRDEALNNRFQIKGVELKSGYKDWILWISFAISCFLLCVALLGFIMWACQKGNIRCNICI

SEQ ID NO: 13933 - protein, 566 aa, synthetic construct; identical to SEQ ID NO: 12441
  REGION 1..566: note = hemagglutinin__InfluenzaA__EPI551882

SEQ ID NO: 13934 - protein, 566 aa, synthetic construct
  REGION 1..566: note = hemagglutinin__InfluenzaA__EPI344389
MKTIIAFSCILCLIFAQKLPGSDNSMATLCLGHHAVPNGTLVKTITDDQIEVTNATELVQSSSTGRICNSPHQILDGKNCTLIDALLGDPHCDDLQNKEWDLFVERSTAYSNCYPYYVPDYATLRSLVASSGNLEFTQESFNWTGVAQDGSSYACRRGSVNSFFSRLNWLYNLNYKYPEQNVTMPNNDKFDKLYIWGVHHPGTDKDQTNLYVQASGRVIVSTKRSQQTVIPNIGSRPWVRGVSSIISIYWTIVKPGDILLINSTGNLIAPRGYFKIQSGKSSIMRSDAHIDECNSECITPNGSIPNDKPFQNVNKITYGACPRYVKQNTLKLATGMRNVPEKQTRGIFGAIAGFIENGWEGMVDGWYGFRHQNSEGTGQAADLKSTQAAINQITGKLNRVIKKTNEKFHQIEKEFSEVEGRIQDLEKYVEDTKIDLWSYNAELLVALENQHTIDLTDSEMSKLFERTRRQLRENAEDMGNGCFKIYHKCDNACIGSIRNGTYDHDIYRNEALNNRFQIKGVQLKSGYKDWILWISFAISCFLLCVVLLGFIMWACQKGNIRCNICI

SEQ ID NO: 13935 - protein, 566 aa, synthetic construct
  REGION 1..566: note = hemagglutinin__InfluenzaA__EPI348782
MKTIIAFSCILCLIFAQKLPGSDNSMATLCLGHHAVPNGTLVKTITDDQIEVTNATELVQSSSTGRICNSPHQILDGKNCTLIDALLGDPHCDDLQNKEWDLFVERSTAYSNCYPYYVPDYATLRSLVASSGNLEFTQESFNWTGVAQDGSSYACRRGSVNSFFSRLNWLYKLNYKYPEQNVTMPNNDKFDKLYIWGVHHPGTDKDQTNIYVQASGRVIVSTKRSQQTVIPNIGSRPWVRGVSSIISIYWTIVKPGDILLINSTGNLIAPRGYFKIQSGKSSIMRSDAHIDECNSECITPNGSIPNDKPFQNVNKITYGACPRYVKQNTLKLATGMRNVPEKQTRGIFGAIAGFIENGWEGMVDGWYGFRHQNSEGTGQAADLKSTQAAINQITGKLNRVIKKTNEKFHQIEKEFSEVEGRIQDLEKYVEDTKIDLWSYNAELLVALENQHTIDLTDSEMSKLFERTRRQLRENAEDMGNGCFKIYHKCDNACIGSIRNGTYDHDIYRNEALNNRFQIKGVQLKSGYKDWILWISFAISCFLLCVVLLGFIMWACQKGNIRCNICI

SEQ ID NO: 13936 - protein, 566 aa, synthetic construct
  REGION 1..566: note = hemagglutinin__InfluenzaA__EPI642513
MKTIIAFSCILCLIFAQKLPGSDKSMATLCLGHHAVPNGTLVKTITDDQIEVTNATELVQSSSTSRICNSPHQILDGKNCTLIDALLGDPHCDDFQNKKWDLFVERSTAYSNCYPYYVPDYATLRSLIASSGNLEFTQESFNWTGVAQDGSSYACRRGSVNSFFSRLNWLYNLNYKYPEQNVTMPNNDKFDKLYIWGVHHPGTDKDQTNLYVQASGRVIVSTKRSQQTVIPNIGSRPWVRGVSSIISIYWTIVKPGDILLINSTGNLIAPRGYFKIQSGKSSIMRSDAHIDECNSECITPNGSIPNDKPFQNVNKITYGACPRYVKQNTLKLATGMRNVPEKQTRGIFGAIAGFIENGWEGMVDGWYGFRHQNSEGTGQAADLKSTQAAINQITGKLNRVIKKTNEKFHQIEKEFSEVEGRIQDLEKYVEDTKIDLWSYNAELLVALENQHTIDLTDSEMSKLFERTRRQLRENAEDMGNGCFKIYHKCDNACIGSIRNGTYDHDIYRNEALNNRFQIKGVQLKSGYKDWILWISFAISCFLLCVVLLGFIMWACQKGNIRCNICI

SEQ ID NO: 13937 - protein, 566 aa, synthetic construct
  REGION 1..566: note = hemagglutinin__InfluenzaA__EPI293965
MKTIIAFSCILCLIFAQKLPGSDNSMATLCLGHHAVPNGTLVKTITDDQIEVTNATELVQSSSTGRICNSPHQILDGKNCTLIDALLGDPHCDDFQNKEWDLFVERSTAYSNCYPYYVPDYATLRSLVASSGNLEFTQESFNWTGVAQDGSSYACRRGSVNSFFSRLNWLYNLNYKYPEQNVTMPNNDKFDKLYIWGVHHPGTDKDQTNLYVQASGRVIVSTKRSQQTVIPNIGSRPWVRGVSSIISIYWTIVKPGDILLINSTGNLIAPRGYFKIQSGKSSIMRSDAHIDECNSECITPNGSIPNDKPFQNVNKITYGACPRYVKQNTLKLATGMRNVPEKQTRGIFGAIAGFIENGWEGMVDGWYGFRHQNSEGTGQAADLKSTQAAINQITGKLNRVIKKTNEKFHQIEKEFSEVEGRIQDLEKYVEDTKIDLWSYNAELLVALENQHTIDLTDSEMSKLFERTRRQLRENAEDMGNGCFKIYHKCDNACIGSIRNGTYDHDIYRNEALNNRFQIKGVQLKSGYKDWILWISFAISCFLLCVVLLGFIMWACQKGNIRCNICI

SEQ ID NO: 13938 - protein, 566 aa, synthetic construct
  REGION 1..566: note = hemagglutinin__InfluenzaA__EPI465400
MKTIIAFSCILCLIFAQKLPGSDNSMATLCLGHHAVPNGTLVKTITDDQIEVTNATELVQSSSTGRICNSPHQILDGKNCTLIDALLGDPHCDDFQNKEWDLFVERSTAYSNCYPYYVPDYATLRSLVASSGNLEFTQESFNWTGVAQDGSSYACRRGSVNSFFSRLNWLYNLNYKYPEQNVTMPNNDKFDKLYIWGVHHPGTDKDQTKLYVQASGRVIVSTKRSQQTVIPNIGSRPWVRGVSSIISIYWTIVKPGDILLINSTGNLIAPRGYFKIQSGKSSIMRSDAHIDECNSECITPNGSIPNDKPFQNVNKITYGACPRYVKQNTLKLATGMRNVPEKQTRGIFGAIAGFIENGWEGMVDGWYGFRHQNSEGTGQAADLKSTQAAINQITGKLNRVIKKTNEKFHQIEKEFSEVEGRIQDLEKYVEDTKIDLWSYNAELLVALENQHTIDLTDSEMSKLFERTRRQLRENAEDMGNGCFKIYHKCDNACIGSIRNGTYDHDIYRNEALNNRFQIKGVQLKSGYKDWILWISFAISCFLLCVVLLGFIMWACQKGNIRCNICI

SEQ ID NO: 13939 - protein, 566 aa, synthetic construct
  REGION 1..566: note = hemagglutinin__InfluenzaA__EPI328898
MKTIIAFSCILCLIFAQKLPGSDNSMATLCLGHHAVPNGTLVKTITDDQIEVTNATELVQSSSTGRICNSPHQILDGKNCTLIDALLGDPHCDDFQNKEWDLFVERSTAYSNCYPYYVPDYATLRSLVASSGNLEFTQESFNWTGVAQDGSSYACRRGSVNSFFSRLNWLYNLNYKYPEQNVTMPNNDKFDKLYIWGVHHPGTDKDQTKIYVQASGRVIVSTKRSQQTVIPNIGSRPWVRGVSSIISIYWTIVKPGDILLINSTGNLIAPRGYFKIQSGKSSIMRSDAHIDECNSECITPNGSIPNDKPFQNVNKITYGACPRYVKQNTLKLATGMRNVPEKQTRGIFGAIAGFIENGWEGMVDGWYGFRHQNSEGTGQAADLKSTQAAINQITGKLNRVIKKTNEKFHQIEKEFSEVEGRIQDLEKYVEDTKIDLWSYNAELLVALENQHTIDLTDSEMSKLFERTRRQLRENAEDMGNGCFKIYHKCDNACIGSIRNGTYDHDIYRNEALNNRFQIKGVQLKSGYKDWILWISFAISCFLLCVVLLGFIMWACQKGNIRCNICI

SEQ ID NO: 13940 - protein, 566 aa, synthetic construct; identical to SEQ ID NO: 13939
  REGION 1..566: note = hemagglutinin__InfluenzaA__EPI328900

SEQ ID NO: 13941 - protein, 566 aa, synthetic construct
  REGION 1..566: note = hemagglutinin__InfluenzaA__EPI574644
MKTIIALSYILCLVFAQKLPGNDNSTATLCLGHHAVPNGTIVKTITNDRIEVTNATELVQNSSIGEICDSPHQILDGKNCTLIDALLGDPQCDGFQNKRWDLFVERSKAYSNCYPYDVPDYASLRSLVASSGTLEFNDESFNWAGVTQNGTSSACIRGSNSSFFSRLNWLTHSNFKYPALNVTMPNNEQFDKLYIWGVHHPGTDKDQIFLYAHSSGRITVSTKRSQQAVIPNIGSRPRIRNIPSRISIYWTIVKPGDILLINSTGNLIAPRGYFKIQSGKSSIMRSDAPIGKCKSECITPNGSIPNDKPFQNVNRITYGACPRYVKQSTLKLATGMRNVPEKQTRGIFGAIAGFIENGWEGMKDGWYGFRHQNSEGRGQAADLKSTQAAIDQINGKLNRLIGKTNEKFHQIEKEFSEVEGRIQDLEKYVEDTKIDLWSYNAELLVALENQHTIDLTDSEMNKLFEKTKKQLRENAEDMGNGCFKIYHKCDNACIGSIRNGTYDHDVYRDEALNNRFQIKGVELKSGYKDWILWISFAISCFLLCVALLGFIMWACQKGNIRCNICI

SEQ ID NO: 13942 - protein, 566 aa, synthetic construct
  REGION 1..566: note = hemagglutinin__InfluenzaA__EPI563212
MKTIIALSYILCLVFAQKIPGNDNNTATLCLGHHAVPNGTIVKTITNDRIEVTNATELVQNSSIGEICDSPHQILDGENCTLIDALLGDPQCDGFQNKKWDLFVERSKAYSNCYPYDVPDYASLRSLVASSGTLEFNNESFNWTGVTQNGTSSACIRRSSSSFFSRLNWLTHLNYKYPALNVTMPNNEQFDKLYIWGVHHPGTDKDQIFPYAQSSGRITVSTKRSQQAVIPNIGSRPRIRGIPSRISIYWTIVKPGDILLINSTGNLIAPRGYFKIRSGKSSIMRSDAPIGKCKSECITPNGSIPNDKPFQNVNRITYGACPRYVKHSTLKLATGMRNVPEKQTRGIFGAIAGFIENGWEGMVDGWYGFRHQNSEGRGQAADLKSTQAAIDQINGKLNRLIGKTNEKFHQIEKEFSEVEGRIQDLEKYVEDTKIDLWSYNAELLVALENQHTIDLTDSEMNKLFEKTKKQLRENAEDMGNGCFKIYHKCDNACIGSIRNGTYDHNVYRDEALNNRFQIKGVELKSGYKDWILWISFAISCFLLCVALLGFIMWACQKGNIRCNICI

SEQ ID NO: 13943 - protein, 566 aa, synthetic construct; identical to SEQ ID NO: 13942
  REGION 1..566: note = hemagglutinin__InfluenzaA__EPI553999

SEQ ID NO: 13944 - protein, 566 aa, synthetic construct
  REGION 1..566: note = hemagglutinin__InfluenzaA__EPI551570
MKTIIALSYILCLVFAQKIPGNDNNTATLCLGHHAVPNGTIVKTITNDRIEVTNATELVQNSSIGEICDSPHQILDGENCTLIDALLGDPQCDGFQNKKWDLFVERSKAYSNCYPYDVPDYASLRSLVASSGTLEFNNESFNWTGVTQNGTSSACIRRSSSSFFSRLNWLTHLNYTYPALNVTMPNNEQFDKLYIWGVHHPGTDKDQIFLYAQSSGRITVSTKRSQQAVIPNIGSRPRIRDIPSRISIYWTIVKPGDILLINSTGNLIAPRGYFKIRSGKSSIMRSDAPIGKCKSECITPNGSIPNDKPFQNVNRITYGACPRYVKHSTLKLATGMRNVPEKQTRGIFGAIAGFIENGWEGMVDGWYGFRHQNSEGRGQAADLKSTQAAIDQINGKLNRLIGKTNEKFHQIEKEFSEVEGRIQDLEKYVEDTKIDLWSYNAELLVALENQHTIDLTDSEMNKLFEKTKKQLRENAEDMGNGCFKIYHKCDNACIGSIRNGTYDHNVYRDEALNNRFQIKGVELKSGYKDWILWISFAISCFLLCVALLGFIMWACQKGNIRCNICI

SEQ ID NO: 13945 - protein, 566 aa, synthetic construct
  REGION 1..566: note = hemagglutinin__InfluenzaA__EPI629738
MKTIIALSYILCLVFAQKIPGNDNNTATLCLGHHAVPNGTIVKTITNDRIEVTNATELVQNSSIGEICDSPHQILDGENCTLIDALLGDPQCDGFQNKKWDLFVERSKAYSNCYPYDVPDYASLRSLVASSGTLEFNNESFNWTGVTQNGTSSACIRRSSSSFFSRLNWLTHLNYKYPALNVTMPNNEQFDKLYIWGVHHPGTDKDQIFPYAQSSGRIIVSTKRSQQAVIPNIGSRPRIRDIPSRISIYWTIVKPGDILLINSTGNLIAPRGYFKIRSGKSSIMRSDAPIGKCKSECITPNGSIPNDKPFQNVNRITYGACPRYVKHSTLKLATGMRNVPEKQTRGIFGAIAGFIENGWEGMVDGWYGFRHQNSEGRGQAADLKSTQAAIDQINGKLNRLIGKTNEKFHQIEKEFSEVEGRIQDLEKYVEDTKIDLWSYNAELLVALENQHTIDLTDSEMNKLFEKTKKQLRENAEDMGNGCFKIYHKCDNACIGSIRNGTYDHNVYRDEALNNRFQIKGVELKSGYKDWILWISFAISCFLLCVALLGFIMWACQKGNIRCNICI

SEQ ID NO: 13946 - protein, 566 aa, synthetic construct
  REGION 1..566: note = hemagglutinin__InfluenzaA__EPI631887
MKTIIALSYILCLVFAQKIPGNDNNTATLCLGHHAVPNGTIVKTITNDRIEVTNATELVQNSSIGEICDSPHQILDGENCTLIDALLGDPQCDGFQNKKWDLFVERSKAYSNCYPYDVPDYASLRSLVASSGTLEFNNESFNWTGVTQNGTSSACIRRSSSSFFSRLNWLTHLNYKYPALNVTMPNNEQFDKLYIWGVHHPGTDKDQIFPYAQSSGRIIVSTKRSQQAVIPNIGSRPRIRDSPSRISIYWTIVKPGDILLINSTGNLIAPRGYFKIRSGKSSIMRSDAPIGKCKSECITPNGSIPNDKPFQNVNRITYGACPRYVKHSTLKLATGMRNVPEKQTRGIFGAIAGFIENGWEGMVDGWYGFRHQNSEGRGQAADLKSTQAAIDQINGKLNRLIGKTNEKFHQIEKEFSEVEGRIQDLEKYVEDTKIDLWSYNAELLVALENQHTIDLTDSEMNKLFEKTKKQLRENAEDMGNGCFKIYHKCDNACIGSIRNGTYDHNVYRDEALNNRFQIKGVELKSGYKDWILWISFAISCFLLCVALLGFIMWACQKGNIRCNICI

SEQ ID NO: 13947 - protein, 566 aa, synthetic construct
  REGION 1..566: note = hemagglutinin__InfluenzaA__EPI577026
MKTIIALSYILCLVFAQKIPGNDNNTATLCLGHHAVPNGTIVKTITNDRIEVTNATELVQNSSIGEICDSPHQILDGENCTLIDALLGDPQCDGFQNKKWDLFVERSKAYSNCYPYDVPDYASLRSLVASSGTLEFNNESFNWTGVTQNGTSSACIRRSSSSFFSRLNWLTHLNYKYPALNVTMPNNEQFDKLYIWGVHHPGTDKDQIFPYAQSSGRITVSTKRSQQAVIPNIGSRPRIRGIPSRISIYWTIVKPGDILLINSTGNLIAPRGYFKIRSGKSSIMRSDAPIGKCKSECITPNGSIPNDKPFQNVNRITYGACPRYVKHSTLKLATGMRNVPEKQTRGIFGAIAGFIENGWEGMVDGWYGFRHQNSEGRGQAADLKSTQAAIDQINGKLNRLIGKTNEKFHQIEKEFSEVEGRIQDLEKYVEDTKIDLWSYNAELLVALENQHTIDLTDSEMNKLFEKTKKQLRENAEDMGNGCFKIYHKCDNACIESIRNGTYDHNVYRDEALNNRFQIKGVELKSGYKDWILWISFAISCFLLCVALLGFIMWACQKGNIRCNICI

SEQ ID NO: 13948 - protein, 566 aa, synthetic construct; identical to SEQ ID NO: 9994
  REGION 1..566: note = hemagglutinin__InfluenzaA__EPI404927

SEQ ID NO: 13949 - protein, 566 aa, synthetic construct
  REGION 1..566: note = hemagglutinin__InfluenzaA__EPI489319
MKTIIALSYILCLVFAQKLPGNDNSTATLCLGHHAVPNGTIVKTITNDRIEVTNATELVQNSSIGEICDSPHQILDGENCTLIDALLGDPQCDGFQNKKWDLFVERSKAYSNCYPYDVPDYASLRSLVASSGTLEFNNESFNWAGVTQNGTSSACKRGSNSSFFSRLNWLTHLNFKYPALNVTMPNNEQFDKLYIWGVHHPGTDKDQIFPYAQSSGRITVSTKRSQQAVIPNIGSRPRIRNIPSRISIYWTIVKPGDILLINSTGNLIAPRGYFKIRSGKSSIMRSDAPIGKCKSECITPNGSIPNDKPFQNVNRITYGACPRYVKQSTLKLATGMRNVPEKQTRGIFGAIAGFIENGWEGMVDGWYGFRHQNSEGRGQAADLKSTQAAIDQINGKLNRLIGKTNEKFHQIEKEFSEVEGRIQDLEKYVEDTKIDLWSYNAELLVALENQHTIDLTDSEMNKLFEKTKKQLRENAEDMGNGCFKIYHKCDNACIGSIRNGTYDHDVYRDEALNNRFQIKGVELKSGYKDWILWISFAISCFLLCVALLGFIMWACQKGNIRCNICI

SEQ ID NO: 13950 - protein, 566 aa, synthetic construct; identical to SEQ ID NO: 12427
  REGION 1..566: note = hemagglutinin__InfluenzaA__EPI530647

SEQ ID NO: 13951 - protein, 566 aa, synthetic construct; identical to SEQ ID NO: 12441
  REGION 1..566: note = hemagglutinin__InfluenzaA__EPI541083

SEQ ID NO: 13952 - protein, 566 aa, synthetic construct
  REGION 1..566: note = hemagglutinin__InfluenzaA__EPI684315
MKTIIALSYILCLVFAQKIPGNDNSTATLCLGHHAVPNGTIVKTITNDRIEVTNATELVQNSSIGEICDSPHQILDGENCTLIDALLGDPQCDGFQNKKWDLFVERSKAYSNCYPYDVPDYASLRSLVASSGTLEFNNESFNWTGVTQNGTSSACIRRSSSSFFSRLNWLTHLNYKYPALNVTMPNNEQFDKLYIWGVHHPGTDKDQIFPYAQSSGRIIVSTKRSQQAVIPNIGSRPRIRDIPSRISIYWTIVKPGDILLINSTGNLIAPRGYFKIRSGKSSIMRSDAPIGKCKSECITPNGSIPNDKPFQNVNRITYGACPRYVKHSTLKLATGMRNVPEKQTRGIFGAIAGFIENGWEGMVDGWYGFRHQNSEGRGQAADLKSTQAAIDQINGKLNRLIGKTNEKFHQIEKEFSEVEGRIQDLEKYVEDTKIDLWSYNAELLVALENQHTIDLTDSEMNKLFEKTKKQLRENAEDMGNGCFKIYHKCDNACIGSIRNGTYDHNVYRDEALNNRFQIKGVELKSGYKDWILWISFAISCFLLCVALLGFIMWACQKGNIRCNICI

SEQ ID NO: 13953 - protein, 566 aa, synthetic construct
  REGION 1..566: note = hemagglutinin__InfluenzaA__EPI614462
MKTIIALSYILCLVFAQKLPGNDNSTATLCLGHHAVPNGTIVKTITNDRIEVTNATELVQNSSIGEICDSPHQILDGENCTLIDALLGDPQCDGFQNKKWDLFVERSKAYSNCYPYDVPDYASLRSLVASSGTLEFNNESFNWAGVTQNGTSSSCIRGSNSSFFSRLNWLTHLNSKYPALNVTMPNNEQFDKLYIWGVHHPGTDKDQIFLYAQSSGRITVSTRRSQQAVIPNIGSRPRIRDIPSRISIYWTIVKPGDILLINSTGNLIAPRGYFKIRSGKSSIMRSDAPIGKCKSECITPNGSIPNDKPFQNVNRITYGACPRYVKQSTLKLATGMRNVPERQTRGIFGAIAGFIENGWEGMVDGWYGFRHQNSEGRGQAADLKSTQAAIDQINGKLNRLIGKTNEKFHQIEKEFSEVEGRIQDLEKYVEDTKIDLWSYNAELLVALENQHTIDLTDSEMNKLFEKTKKQLRENAEDMGNGCFKIYHKCDNACIGSIRNGTYDHDVYRDEALNNRFQIKGVELKSGYKDWILWISFAISCFLLCVALLGFIMWACQKGNIRCNICI

SEQ ID NO: 13954 - protein, 566 aa, synthetic construct
  REGION 1..566: note = hemagglutinin__InfluenzaA__EPI541465
MKTIIALSYILCLVFAQKLPGNDNSTATLCLGHHAVPNGTIVKTITNDRIEVTNATELVQNSSIGEICDSPHQILDGENCTLIDALLGDPQCDGFQNKKWDLFVERSKAYSNCYPYDVPDYASLRSLVASSGTLEFNNESFNWAGVTQNGTSSSCIRGSNNSFFSRLNWLTHLNSKYPALNVTMPNNEQFDKLYIWGVHHPGTDKDQIFLYAQSSGRITVSTRRSQQAVIPNIGSRPRIRGIPSRISIYWTIVKPGDILLINSTGNLIAPRGYFKIRSGKSSIMRSDAPIGKCKSECITPNGSIPNDKPFQNVNRITYGACPRYVKQSTLKLATGMRNVPERQTRGIFGAIAGFIENGWEGMVDGWYGFRHQNSEGRGQAADLKSTQAAIDQINGKLNRLIGKTNEKFHQIEKEFSEVEGRIQDLEKYVEDTKIDLWSYNAELLVALENQHTIDLTDSEMNKLFEKTKKQLRENAEDMGNGCFKIYHKCDNACIGSIRNGTYDHDVYRDEALNNRFQIKGVELKSGYKDWILWISFAISCFLLCVALLGFIMWACQKGNIRCNICI

SEQ ID NO: 13955 - protein, 566 aa, synthetic construct
  REGION 1..566: note = hemagglutinin__InfluenzaA__EPI696967
MKTIIALSYILCLVFAQKLPGNDNSTATLCLGHHAVPNGTIVKTITNDRIEVTNATELVQNSSIGEICDSPHQILDGENCTLIDALLGDPQCDGFQNKKWDLFVERSKAYSNCYPYDVPDYASLRSLVASSGTLEFNNESFNWAGVTQNGTSSSCIRGSNSSFFSRLNWLTRLNSKYPALNVTMPNNEQFDKLYIWGVHHPETDKDQIFLYAQSSGRITVSTRRSQQAVIPNIGSRPRIRGIPSRISIYWTIVKPGDILLINSTGNLIAPRGYFKIRSGKSSIMRSDAPIGKCKSECITPNGSIPNDKPFQNVNRITYGACPRYVKQSTLKLATGMRNVPERQTRGIFGAIAGFIENGWEGMVDGWYGFRHQNSEGRGQAADLKSTQAAIDQINGKLNRLIGKTNEKFHQIEKEFSEVEGRIQDLEKYVEDTKIDLWSYNAELLVALENQHTIDLTDSEMNKLFEKTKKQLRENAEDMGNGCFKIYHKCDNACIGSIRNGTYDHDVYRDEALNNRFQIKGVELKSGYKDWILWISFAISCFLLCVALLGFIMWACQKGNIRCNICI

SEQ ID NO: 13956 - protein, 566 aa, synthetic construct
  REGION 1..566: note = hemagglutinin__InfluenzaA__EPI674597
MKTIIALSYILCLVFAQKLPGNDNSTATLCLGHHAVPNGTIVKTITNDRIEVTNATELVQNSSIGEICDSPHQILDGENCTLIDALLGDPQCDGFQNKKWDLFVERSKAYSNCYPYDVPDYASLRSLVASSGTLEFNNESFNWAGVTQNGTSSSCIRGSNNSFFSRLNWLTHLNSKYPALNVTMPNNEQFDKLYIWGVHHPVTDKDQIFLYAQSSGRITVSTRRSQQAVIPNIGSRPRIRGIPSRISIYWTIVKPGDILLINSTGNLIAPRGYFKIRSGKSSIMRSDAPIGKCKSECITPNGSIPNDKPFQNVNRITYGACPRYVKQSTLKLATGMRNVPERQTRGIFGAIAGFIENGWEGMVDGWYGFRHQNSEGRGQAADLKSTQAAIDQINGKLNRLIGKTNEKFHQIEKEFSEVEGRIQDLEKYVEDTKIDLWSYNAELLVALENQHTIDLTDSEMNKLFEKTKKQLRENAEDMGNGCFKIYHKCDNACIGSIRNGTYDHDVYRDEALNNRFQIKGVELKSGYKDWILWISFAISCFLLCVALLGFIMWACQKGNIRCNICI

SEQ ID NO: 13957 - protein, 566 aa, synthetic construct
  REGION 1..566: note = hemagglutinin__InfluenzaA__EPI530677
MKTIIALSYILCLVFAQKLPGNDNSTATLCLGHHAVPNGTIVKTITNDRIEVTNATELVQNSSIGEICDSPHQILDGENCTLIDALLGDPQCDGFQNKKWDLFVERSKAYSNCYPYDVPDYASLRSLVASSGTLEFNNESFNWAGVTQNGTSSSCIRGSNSSFFSRLNWLTHLNSKYPALNVTMPNNEQFDKLYIWGVHHPGTDKDQIFLYAQSSGRITVSTKRSQQAVIPNIGSRPRIRDIPSRISIYWTIVKPGDILLINSTGNLIAPRGYFKIRSGKSSIMRSDAPIGKCKSECITPNGSIPNDKPFQNVNRITYGACPRYVKQSTLKLATGMRNVPEKQTRGIFGAIAGFIENGWEGMVDGWYGFRHQNSEGRGQAADLKSTQAAIDQINGKLNRLIGKTNEKFHQIEKEFSEVEGRIQDLEKYVEDTKIDLWSYNAELLVALENQHTIDLTDSEMNKLFEKTKKQLRENAEDMGNGCFKIYHKCDNACIGSIRNGTYDHDVYRDEALNNRFQIKGVELKSGYKDWILWISFAISCFLLCVALLGFIMWACQKGNIRCNICI

SEQ ID NO: 13958 - protein, 566 aa, synthetic construct
  REGION 1..566: note = hemagglutinin__InfluenzaA__EPI530679
MKTIIALSYILCLVFAQKLPGNDNSTATLCLGHHAVPNGTIVKTITNDRIEVTNATELVQNSSIGEICDSPHQILDGENCTLIDALLGDPQCDGFQNKKWDLFVERSKAYSNCYPYDVPDYASLRSLVASSGTLEFNNESFNWAGVTQNGTSSSCIRGSNSSFFSRLNWLTHLNFKYPALNVTMPNNEQFDKLYIWGVHHPGTDKDQIFLYAQSSGRITVSTKRSQQAVIPNIGSRPRIRDIPSRISIYWTIVKPGDILLINSTGNLIAPRGYFKIRSGKSSIMRSDAPIGKCKSECITPNGSIPNDKPFQNVNRITYGACPRYVKQSTLKLATGMRNVPEKQTRGIFGAIAGFIENGWEGMVDGWYGFRHQNSEGRGQAADLKSTQAAIDQINGKLNRLIGKTNEKFHQIEKEFSEVEGRIQDLEKYVEDTKIDLWSYNAELLVALENQHTIDLTDSEMNKLFEKTKKQLRENAEDMGNGCFKIYHKCDNACIGSIRNGTYDHDVYRDEALNNRFQIKGVELKSGYKDWILWISFAISCFLLCVALLGFIMWACQKGNIRCNICI

SEQ ID NO: 13959 - protein, 566 aa, synthetic construct; identical to SEQ ID NO: 22
  REGION 1..566: note = hemagglutinin__InfluenzaA__AAG01785

SEQ ID NO: 13960 - protein, 566 aa, synthetic construct; identical to SEQ ID NO: 12427
  REGION 1..566: note = hemagglutinin__InfluenzaA__EPI814528

SEQ ID NO: 13961 - protein, 566 aa, synthetic construct
  REGION 1..566: note = hemagglutinin__InfluenzaA__EPI674736
MKTIIALSYILCLVFAQKLPGNDNSTATLCLGHHAVPNGTIVKTITNDRIEVTNATELVQNSSIGEICDSPHQILDGENCTLIDALLGDPQCDGFQNKKWDLFVERSKAYSNCYPYDVPDYASLRSLVASSGTLEFNNESFNWAGVTQNGTSSSCRRGSNSSFFSRLNWLTHLNSKYPALNVTMPNNEQFDKLYIWGVHHPVTDKDQIFLYAQSSGRITVSTKRSQQAVIPNIGSRPRIRDIPSRISIYWTIVKPGDILLINSTGNLIAPRGYFKIRSGKSSIMRSDAPIGKCKSECITPNGSIPNDKPFQNVNRITYGACPRYVKQSTLKLATGMRNVPERQTRGIFGAIAGFIENGWEGMVDGWYGFRHQNSEGRGQAADLKSTQAAIDQINGKLNRLIGKTNEKFHQIEKEFSEVEGRIQDLEKYVEDTKIDLWSYNAELLVALENQHTIDLTDSEMNKLFEKTKKQLRENAEDMGNGCFKIYHKCDNACIGSIRNGTYDHDVYRDEALNNRFQIKGVELKSGYKDWILWISFAISCFLLCVALLGFIMWACQKGNIRCNICI

SEQ ID NO: 13962 - protein, 566 aa, synthetic construct; identical to SEQ ID NO: 12427
  REGION 1..566: note = hemagglutinin__InfluenzaA__EPI614444

SEQ ID NO: 13963 - protein, 566 aa, synthetic construct
  REGION 1..566: note = hemagglutinin__InfluenzaA__EPI551814
MKTIIALSYILCLVFAQKLPGNDNSTATLCLGHHAVPNGTIVKTITNDRIEVTNATELVQNSSIGEICDSPHQILDGENCTLIDALLGDPQCDGFQNKKWDLFVERSKAYSNCYPYDVPDYASLRSLVASSGTLEFNNESFNWAGVTQNGTSSSCRRGSNSSFFSRLNWLTRLNSKYPALNVTMPNNEQFDKLYIWGVHHPVTDKDQIFLYAQSSGRITVSTKRSQQAVIPNIGSRPRIRDIPSRISIYWTIVKPGDILLINSTGNLIAPRGYFKIRSGKSSIMRSDAPIGKCKSECITPNGSIPNDKPFQNVNRITYGACPRYVKQSTLKLATGMRNVPERQTRGIFGAIAGFIENGWEGMVDGWYGFRHQNSEGRGQAADLKSTQAAIDQINGKLNRLIGKTNEKFHQIEKEFSEVEGRIQDLEKYVEDTKIDLWSYNAELLVALENQHTIDLTDSEMNKLFEKTKKQLRENAEDMGNGCFKIYHKCDNACIGSIRNGTYDHDVYRDEALNNRFQIKGVELKSGYKDWILWISFAISCFLLCVALLGFIMWACQKGNIRCNICI

SEQ ID NO: 13964 - protein, 566 aa, synthetic construct
  REGION 1..566: note = hemagglutinin__InfluenzaA__EPI696955
MKTIIALSYILCLVFAQKLPGNDNSTATLCLGHHAVPNGTIVKTITNDRIEVTNATELVQNSSIGEICDSPHQILDGENCTLIDALLGDPQCDGFQNKKWDLFVERSKAYSNCYPYDVPDYASLRSLVASSGTLEFNNESFNWAGVTQNGTSSSCRRGSNSSFFSRLNWLTHLNSKYPALNVTMPNNEQFDKLYIWGVHHPVTDKDQIFLYAQSSGRITVSTKRSQQAVIPNIGYRPRIRDIPSRISIYWTIVKPGDILLINSTGNLIAPRGYFKIRSGKSSIMRSDAPIGKCKSECITPNGSIPNDKPFQNVNRITYGACPRYVKQSTLKLATGMRNVPERQTRGIFGAIAGFIENGWEGMVDGWYGFRHQNSEGRGQAADLKSTQAAIDQINGKLNRLIGKTNEKFHQIEKEFSEVEGRIQDLEKYVEDTKIDLWSYNAELLVALENQHTIDLTDSEMNKLFEKTKKQLRENAEDMGNGCFKIYHKCDNACIGSIRNGTYDHDVYRDEALNNRFQIKGVELKSGYKDWILWISFAISCFLLCVALLGFIMWACQKGNIRCNICI

SEQ ID NO: 13965 - protein, 566 aa, synthetic construct
  REGION 1..566: note = hemagglutinin__InfluenzaA__EPI740790
MKTIIALSYILCLVFAQKLPGNDNSTATLCLGHHAVPNGTIVKTITNDRIEVTNATELVQNSSIGEICDSPHQILDGENCTLIDALLGDPQCDGFQNKKWDLFVERSKAYSNCYPYDVPDYASLRSLVASSGTLEFNNESFNWAGVTQNGTSSSCRRGSNSSFFSRLNWLTHLNSKYPALNVTMPNNEQFDKLYIWGVHHPVTDKDQIFLYAQSSGRITVSTKRSQQAVIPNIGFRPRIRDIPSRISIYWTIVKPGDILLINSTGNLIAPRGYFKIRSGKSSIMRSDAPIGKCKSECITPNGSIPNDKPFQNVNRITYGACPRYVKQSTLKLATGMRNVPERQTRGIFGAIAGFIENGWEGMVDGWYGFRHQNSEGRGQAADLKSTQAAIDQINGKLNRLIGKTNEKFHQIEKEFSEVEGRIQDLEKYVEDTKIDLWSYNAELLVALENQHTIDLTDSEMNKLFEKTKKQLRENAEDMGNGCFKIYHKCDNACIGSIRNGTYDHDVYRDEALNNRFQIKGVELKSGYKDWILWISFAISCFLLCVALLGFIMWACQKGNIRCNICI

SEQ ID NO: 13966 - protein, 566 aa, synthetic construct; identical to SEQ ID NO: 8709
  REGION 1..566: note = hemagglutinin__InfluenzaA__EPI377499

SEQ ID NO: 13967 - protein, 566 aa, synthetic construct
  REGION 1..566: note = hemagglutinin__InfluenzaA__EPI391247
MKTIIALSYILCLVFAQKLPGNDNSTATLCLGHHAVPNGTIVKTITNDRIEVTNATELVQNSSIGEICDSPHQILDGENCTLIDALLGDPQCDGFQNKKWDLFVERSKAYSNCYPYDVPDYASLRSLVASSGTLEFNNESFNWNGVTQNGTSSACIRRSNNSFFSRLNWLTHLNFKYPALNVTMPNNEQFDKLYIWGVHHPVTDKDQIFLYAQPSGRITVSTKRSQQAVIPNIGFRPRIRNIPSRISIYWTIVKPGDILLINSTGNLIAPRGYFKIRSGKSSIMRSDAPIGKCKSECITPNGSIPNDKPFQNVNRITYGACPRYVKQSTLKLATGMRNVPEKQTRGIFGAIAGFIENGWEGMVDGWYGFRHQNSEGRGQAADLKSTQAAIDQINGKLNRLIGKTNEKFHQIEKEFSEVEGRIQDLEKYVEDTKIDLWSYNAELLVALENQHTIDLTDSEMNKLFEKTKKQLRENAEDMGNGCFKIYHKCDNACIGSIRNGTYDHDVYRDEALNNRFQIKGVELKSGYKDWILWISFAISCFLLCVALLGFIMWACQKGNIRCNICI

SEQ ID NO: 13968 - protein, 566 aa, synthetic construct
  REGION 1..566: note = hemagglutinin__InfluenzaA__EPI407123
MKTIIALSYILCLVFAQKLPGNDNSTATLCLGHHAVPNGTIVKTITNDRIEVTNATELVQNSSIGEICDSPHQILDGENCTLIDALLGDPQCDGFQNKKWDLFVERSKAYSNCYPYDVPDYASLRSLVASSGTLEFNNESFNWNGVTQNGTSSACIRRSNNSFFSRLNWLTHLNFKYPALNVTMPNNEQFDKLYIWGVHHPVTDKDQIFLYAQPSGRITVSTKRSQQAVIPNIGFRPRIRNNPSRISIYWTIVKPGDILLINSTGNLIAPRGYFKIRSGKSSIMRSDAPIGKCKSECITPNGSIPNDKPFQNVNRITYGACPRYVKQSTLKLATGMRNVPEKQTRGIFGAIAGFIENGWEGMVDGWYGFRHQNSEGRGQAADLKSTQAAIDQINGKLNRLIGETNEKFHQIEKEFSEVEGRIQDLEKYVEDTKIDLWSYNAELLVALENQHTIDLTDSEMNKLFEKTKKQLRENAEDMGNGCFKIYHKCDNACIGSIRNGTYDHDVYRDEALNNRFQIKGVELKSGYKDWILWISFAISCFLLCVALLGFIMWACQKGNIRCNICI

SEQ ID NO: 13969 - protein, 566 aa, synthetic construct
  REGION 1..566: note = hemagglutinin__InfluenzaA__EPI407126
MKTIIALSYILCLVFAQKLPGNDNSTATLCLGHHAVPNGTIVKTITNDRIEVTNATELVQNSSIGEICDSPHQILDGENCTLIDALLGDPQCDGFQNKKWDLFVERSKAYSNCYPYDVPDYASLRSLVASSGTLEFNNESFNWNGVTQNGTSSACIRRSNNSFFSRLNWLTHLNFKYPALNVTMPNNEQFDKLYIWGVHHPVTDKDQIFLYAQPSGRITVSTKRSQQAVIPNIGFRPRIRNNPSRISIYWTIVKPGDILLINSTGNLIAPRGYFKIRSGKSSIMRSDAPIGKCKSECITPNGSIPNDKPFQNVNRITYGACPRYVKQSTLKLATGMRNVPEKQTRGIFGAIAGFIENGWEGMVDGWYGFRHQNSEGRGQAADLKSTQAAIDQINGKLNRLIGKTNEKFHQIEKEFSEVEGRIQDLEKYVEDTKIDLWSYNAELLVALENQHTIDLTDSEMNKLFEKTKKQLRENAEDMGNGCFKIYHKCDNACIGSIRNGTYDHDVYRDEALNNRFQIKGVELKSGYKDWILWISFAISCFLLCVALLGFIMWACQKGNIRCNICI

SEQ ID NO: 13970 - protein, 566 aa, synthetic construct; identical to SEQ ID NO: 13855
  REGION 1..566: note = hemagglutinin__InfluenzaA__EPI562037

SEQ ID NO: 13971 - protein, 566 aa, synthetic construct; identical to SEQ ID NO: 12441
  REGION 1..566: note = hemagglutinin__InfluenzaA__EPI562034

SEQ ID NO: 13972 - protein, 566 aa, synthetic construct
  REGION 1..566: note = hemagglutinin__InfluenzaA__EPI653140
MKTIIALSYILCLVFAQKIPGNDNSTATLCLGHHAVPNGTIVKTITNDRIEVTNATELVQNSSIGEICDSPHQILDGENCTLIDALLGDPQCDGFQNKKWDLFVERSKAYSSCYPYDVPDYASLRSLVASSGTLEFNNESFNWTGVTQNGTSSACIRRSSSSFFSRLNWLTHLNYKYPALNVTMPNNEQFDKLYIWGVHHPGTDKDQIFPYAQSSGRITVSTKRSQQAVIPNIGSRPRIRGIPSRISIYWTIVKPGDILLINSTGNLIAPRGYFKIRSGKSSIMRSDAPIGKCKSECITPNGSIPNDKPFQNVNRITYGACPRYVKHSTLKLATGMRNVPEKQTRGIFGAIAGFIENGWEGMVDGWYGFRHQNSEGRGQAADLKSTQAAIDQINGKLNRLIGKTNEKFHQIEKEFSEVEGRIQDLEKYVEDTKIDLWSYNAELLVALENQHTIDLTDSEMNKLFEKTKKQLRENAEDMGNGCFKIYHKCDNACIGSIRNGTYDHNVYRDEALNNRFQIKGVELKSGYKDWILWISFAISCFLLCVALLGFIMWACQKGNIRCNICI

SEQ ID NO: 13973 - protein, 568 aa, synthetic construct
  REGION 1..568: note = hemagglutinin__InfluenzaA__ACR48873/m
MEKIVLLFAIVSLVKSDQICIGYHANNSTEQVDTIMEKNVTVTHAQDILEKTHNGKLCDLDGVKPLILRDCSVAGWLLGNPMCDEFINVPEWSYIVEKANPVNDLCYPGDFNDYEELKHLLSRINHFEKIQIIPKSSWSSHEASLGVSSACPYQGKSSFFRNVVWLIEKNSTYPTIKRSYNNTNQEDLLVLWGIHHPNDAAEQTKLYQNPTTYISVGTSTLNQRLVPRIATRSKVNGQSGRMEFFWTILKPNDAINFESNGNFIAPEYAYKIVKKGDSTIMKSELEYGNCNTKCQTPMGAINSSMPFHNIHPLTIGECPKYVKSNRLVLATGLRNSPQRERRRKKRGLFGAIAGFIEGGWQGMVDGWYGYHHSNEQGSGYAADKESTQKAIDGVTNKVNSIIDKMNTQFEAVGREFNNLERRIENLNKKMEDGFLDVWTYNAELLVLMENERTLDFHDSNVKNLYDKVRLQLRDNAKELGNGCFEFYHKCDNECMESVRNGTYDYPQYSEEARLKREEISGVKLESIGIYQILSIYSTVASSLALAIMVAGLSLWMCSNGSLQCRICI

SEQ ID NO: 13974 - protein, 568 aa, synthetic construct
  REGION 1..568: note = hemagglutinin__InfluenzaA__ACR48874/m
MEKIVLLFAIVSLVKSDQICIGYHANNSTEQVDTIMEKNVTVTHAQDILEKTHNGKLCDLDGVKPLILRDCSVAGWLLGNPMCDEFINVPEWSYIVEKANPVNDLCYPGDFNDYEELKHLLSRINHFEKIQIIPKSSWSSHEASLGVSSACPYQGKSSFFRNVVWLIKKNSTYPTIKRSYNNTNQEDLLVLWGIHHPKDAAEQTKLYQNPTTYISVGTSTLNQRLVPRIATRSKVNGQSGRMEFFWTILKPNDAINFESNGNFIAPEYAYKIVKKGDSTIMKSELEYGNCNTKCQTPMGAINSSMPFHNIHPLTIGECPKYVKSNRLVLATGLRNSPQRERRRKKRGLFGAIAGFIEGGWQGMVDGWYGYHHSNEQGSGYAADKESTQKAIDGVTNKVNSIIDKMNTQFEAVGREFNNLERRIENLNKKMEDGFLDVWTYNAELLVLMENERTLDFHDSNVKNLYDKVRLQLRDNAKELGNGCFEFYHKCDNECMESVRNGTYDYPQYSEEARLKREEISGVKLESIGIYQILSIYSTVASSLALAIMVAGLSLWMCSNGSLQCRICI

SEQ ID NO: 13975 - protein, 566 aa, synthetic construct; identical to SEQ ID NO: 9146
  REGION 1..566: note = hemagglutinin__InfluenzaA__ACD47234

SEQ ID NO: 13976 - protein, 568 aa, synthetic construct
  REGION 1..568: note = hemagglutinin__InfluenzaA__ACZ36881
MEKIVLLLAIVSLVKSDQICIGYHANNSTEQVDTIMEKNVTVTHAQDILEKTHNGKLCDLDGVKPLILRDCSVAGWLLGNPMCDEFLNVPEWSYIVEKINPANDLCYPGNFNDYEELKHLLSRINHFEKIQIIPKSSWSDHEASSGVSSACPYQGRSSFFRNVVWLIKKDNAYPTIKRSYNNTNQEDLLVLWGIHHPNDAAEQTRLYQNPTTYISVGTSTLNQRLVPKIATRSKVNGQSGRMEFFWTILKPNDAINFESNGNFIAPENAYKIVKKGDSTIMKSELEYGNCNTKCQTPIGAINSSMPFHNIHPLTIGECPKYVKSNRLVLATGLRNSPQGERRRRKRGLFGAIAGFIEGGWQGMVDGWYGYHHSNEQGSGYAADKESTQKAIDGVTNKVNSIIDKMNTQFEAVGREFNNLERRIENLNKKMEDGFLDVWTYNAELLVLMENERTLDFHDSNVKNLYDKVRLQLRDNAKELGNGCFEFYHRCDNECMESVRNGTYDYPQYSEEARLKREEISGVKLESIGTYQILSIYSTVASSLALAIMVAGLSLWMCSNGSLQCRICI

SEQ ID NO: 13977 - protein, 567 aa, synthetic construct
  REGION 1..567: note = hemagglutinin__InfluenzaA__EPI500771
MEKIVLLFATISLVKSDHICIGYHANNSTEQVDTIMEKNVTVTHAQDILEKTHNGKLCDLNGVKPLILKDCSVAGWLLGNPLCDEFTNVPEWSYIVEKANPANDLCYPGNFNDYEELKHLLSRINHFEKIQIIPKDSWSDHEASLGVSAACSYQGNSSFFRNVVWLIKKDNAYPTIKKGYNNTNREDLLILWGIHHPNDEAEQTKLYQNPTTYISIGTSTLNQRLVPKIATRSKINRQSGRIDFFWTILKPNDAIHFESNGNFIAPEYAYKIVKKGDSTIMRSEVEYGNCNTRCQTPIGAINSSMPFHNIHPLTIGECPKYVKSNKLVLATGLRNSPQRERRRKRGLFGAIAGFIEGGWQGMVDGWYGYHHSNEQGSGYAADKESTQKAIDGVTNKVNSIIDKMNTQFEAVGREFNNLERRIENLNKKMEDGFLDVWTYNAELLVLMENERTLDFHDSNVKNLYDKVRLQLKDNAKELGNGCFEFYHKCNNECMESVRNGTYDYPQYSEEARLKREEISGVKLESIGIYQILSIYSTVASSLVLAIMMAGLSLWMCSNGSLQCRICI

SEQ ID NO: 13978 - protein, 564 aa, synthetic construct
  REGION 1..564: note = hemagglutinin__InfluenzaA__ABF93441
MEKIVLLLAIVSLVKSDQICIGYHANNSTEQVDTIMEKNVTVTHAQDILEKTHNGKLCDLDGVKPLILRDCSVAGWLLGNPMCDEFLNVPEWSYIVEKINPANDLCYPGNFNDYEELKHLLSRINHFEKIQIIPKSSWSDHEASSGVSSACPYQGRSSFFRNVVWLIKKNNAYPTIKRSYNNTNQEDLLVLWGIHHPNDAAEQTRLYQNPTTYISVGTSTLNQRLVPKIATRSKVNGQSGRMEFFWTILKPNDAINFESNGNFIAPENAYKIVKKGDSTIMKSELEYGNCNTKCQTPIGAINSSMPFHNIHPLTIGECPKYVKSNRLVLATGLRNSPQIETRGLFGAIAGFIEGGWQGMVDGWYGYHHSNEQGSGYAADKESTQKAIDGVTNKVNSIIDKMNTQFEAVGREFNNLERRIENLNKKMEDGFLDVWTYNAELLVLMENERTLDFHDSNVKNLYDKVRLQLRDNAKELGNGCFEFYHRCDNECMESVRNGTYDYPQYSEEARLKREEISGVKLESIGTYQILSIYSTVASSLALAIMVAGLSLWMCSNGSLQCRICI

SEQ ID NO: 13979 - protein, 568 aa, synthetic construct
  REGION 1..568: note = hemagglutinin__InfluenzaA__AGG12577
MEKIVLLFAIISLVKSDHICIGYHANNSTEQVDTIMEKNVTVTHAQDILEKTHNGKLCDLNGVKPLILKDCSVAGWLLGNPMCDEFIDVPEWSYIVEKANPANDLCYPGNFNDYEELKHLLSRINHFEKIRIIPKDSWPDHEASLGVSAACSYQGNSSFFRNVVWLLKKDNAYPIIKKSYNNTNKEDLLVLWGIHHPNDEAEQTRLYQNPTTYVSIGTSTLNQRLVPRIATRSKVNGQSGRIDFFWTILKPNDAINFESNGNFIAPEYAYKIVKKGDSTIMRSEVEYGNCSTRCQTPMGAINSSMPFHNIHPLTIGECPKYVKSNKLVLATGLRNSPQIERRRRKRGLFGAIAGFIEGGWQGMVDGWYGYHHSNEQGSGYAADKESTQKAIDGVTNKVNSIIDKMNTQFEAVGREFNNLERRIENLNKKMEDGFLDVWTYNAELLVLMENERTLDFHDSNVKNLYDKVRLQLRDNAKELGNGCFEFYHKCDNECMESVRNGTYDYPQYSEEARLKREEISGVKLESIGTYQILSIYSTVASSLVLAIMVAGLSLWMCSNGSLQCRICI

SEQ ID NO: 13980 - protein, 568 aa, synthetic construct; identical to SEQ ID NO: 13979
  REGION 1..568: note = hemagglutinin__InfluenzaA__AGC13463

SEQ ID NO: 13981 - protein, 568 aa, synthetic construct; identical to SEQ ID NO: 5843
  REGION 1..568: note = hemagglutinin__InfluenzaA__ACI06178/m1

SEQ ID NO: 13982 - protein, 568 aa, synthetic construct
  REGION 1..568: note = hemagglutinin__InfluenzaA__AHF20402
MEKIVLLFAIVSLVKSDQICIGYHANNSTEQVDTIMEKNVTVTHAQDILEKTHNGKLCDLDGVRPLILRDCSVAGWLLGNPMCDEFINVPEWSYIVEKANPVNDLCYPGVFNDYEELKHLLSRINHFEKIQIIPKNSWPSHEASLGVSAACPYQGQSSFFRNVVWLIKKNNTYPTIKRSYNNTNQEDLLVMWGIHHPNDAVEQTKLYQNPTTYISVGTSTLNQRLTPRIATRSKVKGLSGRMEFFWTILKPNDAINFESNGNFIAPEYAYKIVKKGDSTIMRSELEYGNCNTKCQTPMGAINSSMPFHNIHPLTIGECPKYVKSTRLVLATGLRNSPQREERRKKRGLFGAIAGFIEGGWQGMVDGWYGYHHSNEQGSGYAADKESTQKAIDGVTNKVNSIIDKMNTQFEAVGREFNNLERRIENLNKKMEDGFLDVWTYNAELLVLMENERTLDFHDSNVKNLYDKVRLQLRDNAKELGNGCFEFYHKCDNKCMESVRNGTYDYPQYSEEARLKREEISGVKLESIGVYQILSIYSTVASSLALAIMVAGLSLWMCSNGSLQCRICI

SEQ ID NO: 13983 - protein, 568 aa, synthetic construct
  REGION 1..568: note = hemagglutinin__InfluenzaA__ABQ45850
MEKIVLLLAIVSLVKSDQICIGYHANNSTEQVDTIMEKNVTVTHAQDILEKTHNGKLCDLDGVKPLILRDCSVAGWLLGNPMCDEFLNVPEWSYIVEKINPANDLCYPGNFNDYEELKHLLSRINHFEKIQIIPKSSWSDHEASSGVSSACPYQGRSSFFRNVVWLIKKNDAYPTIKRSYNNTNQEDLLVLWGIHHPNDAAEQTRLYQNPTTYISVGTSTLNQRLVPKIATRSKVNGQSGRMEFFWTILKPNDAINFESNGNFIAPENAYKIVKKGDSTIMKSELEYGNCNTKCQTPIGAINSSMPFHNIHPLTIGECPKYVKSNRLVLATGLRNSPQGERRRKKRGLFGAIAGFIEGGWQGMVDGWYGYHHSNEQGSGYAADKESTQKAIDGVTNKVNSIIDKMNTQFEAVGREFNNLERRIENLNKKMEDGFLDVWTYNAELLVLMENERTLDFHDSNVKNLYDKVRLQLRDNAKELGNGCFEFYHRCDNECMESVRNGTYDYPQYSEEARLKREEISGVKLESIGTYQILSIYSTVASSLALAIMVAGLSLWMCSNGSLQCRICI

SEQ ID NO: 13984 - protein, 570 aa, synthetic construct
  REGION 1..570: note = hemagglutinin__InfluenzaA__AKI82373
MEKIVPLLAIIGLVKSDQICIGYHANNSTEQVDTIMEKNVTVTHAQDILEKTHNGKLCNLDGVKPLILKDCSVAGWLLGNPMCDEFLNVSEWSYIVEKASPANGLCYPGDFNDYEELKHLLNRITHLKKIKIIPKSYWSNHEASSGVSAACSYMGEPSFFRNVVWLIKKNNTYPPIKVNYTNTNQEDLLVLWGIHHPNNEAEQIQIYQNLITHISVGTSTLNQRLIPKIATRSKVNGQSGRMEFFWTILKPNDSINFDSNGNFIAPEYAYIVKKGDSAIMKSELEYGNCNTKCQTPMGAINSSMPFHNIHPLTIGECPKYVKSNRLVLATGLRNAPQREREGGRRRKRGLFGAIAGFIEGGWQGMVDGWYGYHHSNEQGSGYAADKESTQKAIDGITNKVNSIIDKMNTQFEAVGREFNNLERRIENLNKKMEDGFLDVWTYNAELLVLMENERTLDFHDSNVKNLYEKVRLQLRDNAKELGNGCFEFYHKCDNECMESVRNGTYDYSQYSEEARLSREEINGVKLESMVTYQILSIYSTVASSLALAIMVAGLSLWMCSNGSLQCRICI

SEQ ID NO: 13985 - protein, 570 aa, synthetic construct
  REGION 1..570: note = hemagglutinin__InfluenzaA__EPI284473
MEKIVLLLAIISLVKSDQICIGYHANNSTEQVDTIMEKNVTVTHAQDILEKTHNGKLCNLDGVKPLILKDCSVAGWLLGNPMCDEFLNVSEWSYIVEKASPANGLCYPGDFNDYEELKHLLNRITHLKKIKIIPKSYWSNHEASSGVSAACSYMGEPSFFRNVVWLIKKNNTYPPIKVNYTNTNQEDLLVLWGIHHPNNEAEQIQIYQNLITHISVGTSTLNQRLIPKIATRSKVNGQSGRMEFFWTILKPNDSINFDSNGNFIAPEYAYIVKKGDSAIMKSELEYGNCNTKCQTPMGAINSSMPFHNIHPLTIGECPKYVKSNRLVLATGLRNAPQREREGGRRRKRGLFGAIAGFIEGGWQGMVDGWYGYHHSNEQGSGYAADKESTQKAIDGITNKVNSIIDKMNTQFEAVGREFNNLERRIENLNKKMEDGFLDVWTYNAELLVLMENERTLDFHDSNVKNLYEKVRLQLRDNAKELGNGCFEFYHKCDNECMESVRNGTYDYSQYSEEARLSREEINGVKLESMVTYQILSIYSTVASSLALAIMVAGLSLWMCSNGSLQCRICI

SEQ ID NO: 13986 - protein, 569 aa, synthetic construct
  REGION 1..569: note = hemagglutinin__InfluenzaA__ACO07033
MEKIVLLLAMIGLVKSDQICIGYHANNSTEQVDTIMEKNVTVTHAQDILEKTHNGKLCNLDGVKPLILKDCSVAGWLLGNPMCDEFLNVSEWSYIVEKASPANGLCYPGDFNDYEELKHLLSRINHLKKIKIIPKSYWSNHEASSGVSAACSYLGEPSFFRNVVWLIKKNNTYPPIKVNYTNTNQEDLLVLWGIHHPNDEKEQIRIYQNPNTSISVGTSTLNQRLVPKIATRPKVNGQSGRMEFFWTILKPNDSINFDSNGNFIAPEYAYKIAKKGDSVIMKSELEYGNCNTKCQTPMGAINSSMPFHNIHPLTIGECPKYVKSNRLVLATGLRNAPQREGGRRRKRGLFGAIAGFIEGGWQGMVDGWYGYHHSNEQGSGYAADKESTQKAIDGITNKVNSIIDKMNTQFEIVGREFNNLERRIENLNKKMEDGFLDVWTYNAELLVLMENERTLDFHDSNVKNLYEKVRLQLRDNAKELGNGCFEFYHKCDNECMESVRNGTYDYPQYSEEARLSREEISGVKMESMVTYQILSIYSTVASSLALAIMVAGLSLWMCSNGSLQCRICI

SEQ ID NO: 13987 - protein, 564 aa, synthetic construct
  REGION 1..564: note = hemagglutinin__InfluenzaA__EPI174803
MEKIVLLLAMIGLVKSDQICIGYHANNSTEQVDTIMEKNVTVTHAQDILEKTHNGKLCNLDGVKPLILKDCSVAGWLLGNPMCDEFLNVSEWSYIVEKASPANGLCYPGDFNDYEELKHLLSRINHLKKIKIIPKSYWSNHEASSGVSAACSYLGEPSFFRNVVWLIKKNNTYPPIKVNYTNTNQEDLLVLWGIHHPNDEKEQIRIYQNPNTSISVGTSTLNQRLVPKIATRPKVNGQSGRMEFFWTILKPNDSINFDSNGNFIAPEYAYKIAKKGDSVIMKSELEYGNCNTKCQTPMGAINSSMPFHNIHPLTIGECPKYVKSNRLVLATGLRNAPQTETRGLFGAIAGFIEGGWQGMVDGWYGYHHSNEQGSGYAADKESTQKAIDGITNKVNSIIDKMNTQFEIVGREFNNLERRIENLNKKMEDGFLDVWTYNAELLVLMENERTLDFHDSNVKNLYEKVRLQLRDNAKELGNGCFEFYHKCDNECMESVRNGTYDYPQYSEEARLSREEISGVKMESMVTYQILSIYSTVASSLALAIMVAGLSLWMCSNGSLQCRICI

SEQ ID NO: 13988 - protein, 567 aa, synthetic construct
  REGION 1..567: note = hemagglutinin__InfluenzaA__AGZ62382
MEKIVLLFAAISLVKSDHICIGYHANNSTKQVDTIMEKNVTVTHAQDILEKTHNGKLCDLNGVKPLILKDCSVAGWLLGNPMCDEFINVPEWSYIVEKANPANGLCYPGNFNDYEELKHLLSRINHFEKIRIIPKDSWSDHEASLGVSAACPYQGNSSFFRNVVWLIKKDNTYPTIKKSYNNTNQEDLLILWGIHHPNDEAEQTRLYQNPTTYISIGTSTLNQRLVPKIATRSKINGQSGRIDFFWTILKPNDAIHFESNGNFIAPEYAYKIVKKGDSTIMKSEVEYGNCNTRCQTPIGAINSSMPFHNIHPLTIGECPKYVKSNKLVLATGLRNSPQRERRRKRGLFGAIAGFIEGGWQGMVDGWYGYHHSNEQGSGYAADKESTQKAIDGVTNKVNSIIDKMNTQFEAVGREFNNLERRIENLNKKMEDGFLDVWTYNAELLVLMENERTLDFHDSNVRNLYDKVRLQLKDNAKELGNGCFEFYHKCNNECMESVRNGTYDYPQYSEEARLRREEISGVKLESIGIYQILSIYSTVASSLVLAIMMAGLSLWMCSNGSLQCRICI

SEQ ID NO: 13989 - protein, 567 aa, synthetic construct
  REGION 1..567: note = hemagglutinin__InfluenzaA__ABG67978/m
MEKIVLLLAIVSLVKSDQICIGYHANNSTEQVDTIMEKNVTVTHAQDILEKTHNGKLCDLDGVKPLILRDCSVAGWLLGNPMCDEFINVPEWSYIVEKANPANDLCYPGNFNDYEELKHLLSRINHFEKIQIIPKSSWSDHEASSGVSSACPYQGTPSFFRNVVWLIKKNNTYPTIKRSYNNTNQEDLLILWGIHHSNDAAEQTKLYQNPTTYISVGTSTLNQRLVPKIATRSKVNGQSGRMDFFWTILKPNDAINFESNGNFIAPEYAYKIVKKGDSAIIKSEVEYGNCNTKCQTPIGAINSSMPFHNIHPLTIGECPKYVKSNKLVLATGLRNSPLRERRRKRGLFGAIAGFIEGGWQGMVDGWYGYHHSNEQGSGYAADKESTQKAIDGVTNKVNSIIDKMNTQFEAVGREFNNLERRIENLNKKMEDGFLDVWTYNAELLVLMENERTLDFHDSNVKNLYDKVRLQLRDNAKELGNGCFEFYHKCDNECMESVRNGTYDYPQYSEEARLKREEISGVKLESIGTYQILSIYSTVASSLALAIMVAGLSLWMCSNGSLQCRICI

SEQ ID NO: 13990 - protein, 564 aa, synthetic construct
  REGION 1..564: note = hemagglutinin__InfluenzaA__EPI827075
MEKIVLLFATISLVKSDHICIGYHANNSTEQVDTIMEKNVTVTHAQDILEKTHNGKLCDLNGVKPLILKDCSVAGWLLGNPLCDEFTNVPEWSYIVEKANPANDLCYPGNFNDYEELKHLLSRINHFEKIQIIPKDSWSDHEASLGVSAACSYQGNSSFFRNVVWLIKKDNAYPTIKKGYNNTNREDLLILWGIHHPNDEAEQTRLYQNPTTYISIGTSTLNQRLVPKIATRSKINGQSGRIDFFWTILKPNDAIHFESNGNFIAPEYAYKIVKKGDSTIMRSEVEYGNCNTRCQTPIGAINSSMPFHNIHPLTIGECPKYVKSNKLVLATGLRNSPQRETRGLFGAIAGFIEGGWQGMVDGWYGYHHSNEQGSGYAADKESTQKAIDGVTNKVNSIIDKMNTQFEAVGREFNNLERRIENLNKKMEDGFLDVWTYNAELLVLMENERTLDFHDSNVKNLYDKVRLQLKDNAKELGNGCFEFYHKCNNECMESVRNGTYDYPQYSEEARLKREEISGVKLESIGIYQILSIYSTVASSLVLAIMMAGLSLWMCSNGSLQCRICI

SEQ ID NO: 13991 - protein, 568 aa, synthetic construct
  REGION 1..568: note = hemagglutinin__InfluenzaA__ABP96850
MEKIVLLLAIVSLVKSDQICIGYHANNSTEQVDTIMEKNVTVTHAQDILEKTHNGKLCDLDGVKPLILRDCSVAGWLLGNPMCDEFLNVPEWSYIVEKINPANDLCYPGDFNDYEELKHLLSRINHFEKIQIIPKSSWSDYEASSGVSSACPYQGRSSFFRNVVWLIKKNNAYPTIKRSYNNTNQEDLLVLWGIHHPNDAAEQIRLYQNPTTYISVGTSTLNQRLVPKIATRSKVNGQSGRMEFFWTILKSNDAINFESNGNFIAPEYAYKIVKKGDSTIMKSELEYGNCNTKCQTPIGAINSSMPFHNIHPLTIGECPKYVKSNRLVLATGLRNSPQGERRRRKRGLFGAIAGFIEGGWQGMVDGWYGYHHSNEQGSGYAADKESTQKAIDGVTNKVNSIINKMNTQFEAVGREFNNLERRIENLNKKMEDGFLDVWTYNAELLVLMENERTLDFHDSNVKNLYDKVRLQLRDNAKELGNGCFEFYHRCDNECMESVRNGTYDYPQYSEEARLKREEISGVKLESIGIYQILSIYSTVASSLALAIMVAGLFLWMCSNGSLQCRICI

SEQ ID NO: 13992 - protein, 563 aa, synthetic construct
  REGION 1..563: note = hemagglutinin__InfluenzaA__EPI827077
MEKIVLLLAIVSIVKSDQICIGYHANNSTEQVDTIMEKNVTVTHAQDILEKTHNGKLCNLDGVKPLILRDCSVAGWLLGNPMCDEFLNVPEWSYIVEKINPANDLCYPGNFNDYEELKHLLSRINHFEKIQIIPKDSWSDHEASGVSSACPYQGRSSFFRNVVWLTKKNDAYPTIKKSYNNTNQEDLLVLWGIHHPNDAAEQTRLYQNPTTYISVGTSTLNQRLVPKIATRSKVNGQSGRMEFFWTILKSNDAINFESNGNFIAPENAYKIVKKGDSTIMKSELEYSNCNTKCQTPIGAINSSMPFHNIHPLTIGECPKYVKSNRLVLATGLRNSPQRETRGLFGAIAGFIEGGWQGMVDGWYGYHHSNEQGSGYAADKESTQRAIDGVTNKVNSIIDKMNTQFEAVGREFNNLERRIENLNKKMEDGFLDVWTYNAELLVLMENERTLDFHDSNVKNLYDKVRLQLRDNAKELGNGCFEFYHRCDNECMESVRNGTYDYPQYSEEARLKREEISGVKLESIGTYQILSIYSTVASSLALAIMVAGLSLWMCSNGSLQCRICI

SEQ ID NO: 13993 - protein, 567 aa, synthetic construct
  REGION 1..567: note = hemagglutinin__InfluenzaA__EPI594523
MEKIILLLAIIGLVKSDQICVGYHANNSTERVDTIMEKNVTVTHAQDILEKTHNGKLCNLNGVKPLILEDCSVAGWLLGNPMCDKFLNVSEWSYIVEKAGPANGLCYPGDFNDYEELKHLLSRINHFEKIEIIPKNHWSNHNTSGVSSACSYLENPSFFRNVVWLTKKNNTYPTIKVNYTNANQKDLLVLWGIHHPNNEAEQKMIYQNSNTYVSVGTSTLNQRLVPKIATRSKVNGQSGRIDFFWTILKPNDTINFDSNGNFIAPKYAYKIVKKGDSAIMKSELKYDNCNTKCQTPIGAINSSMPFHNIHPLTIGECPKYVKSNRLVLATGLRNAPQIEGRRRKRGLFGAIAGFIEGGWQGMVDGWYGYHHSNEQGSGYAADKESTQKAVDGITNKINSIIDKMNNQFEAVGREFNNLERRIENLNKKMEDGFLDVWTYNAELLVLMENERTLDFHDSNVKNLYEKVRLQLRDNAKELGNGCFEFYHKCDNECMESVKNGTYDYPQYSEEARLNREEISGVKLESTVTYQILSIYSTVASSLVLAIMVAGLSLWMCSNGSLQCRICI

SEQ ID NO: 13994 - protein, 568 aa, synthetic construct
  REGION 1..568: note = hemagglutinin__InfluenzaA__AAD37782
MERIVLLLAIVSLVKSDQICIGYHANNSTEQVDTIMEKNVTVTHAQDILEKTHNGKLCDLNGVKPLILRDCSVAGWLLGNPMCDEFINVPEWSYIVEKASPANDLCYPGDFNDYEELKHLLSRTNHFEKIQIIPPSSWSNHDASSGVSSACPYHGRSSFFRNVVWLIKKNSAYPTIKRSYNNTNQEDLLVLWGIHHPNDAAEQTKLYQNPTTYISVGTSTLNQRLVPEIATRPKVNGQSGRMEFFWTILKPNDAINFESNGNFIAPEYAYKIVKKGDSAIMKSELEYGNCNTKCQTPMGAINSSMPFHNIHPLTIGECPKYVKSNRLVLATGLRNTPQRERRRKKRGLFGAIAGFIEGGWQGMVNGWYGYHHSNEQGSGYAADKESTQKAIDGVTNKVNSIIDKMNTQFEAVGREFNNLERRIENLNKQMEDGFLDVWTYNAELLVLMENERTLDFHDSNVKHLYDKVRLQLRDNAKELGNGCFEFYHKCDNECMESVKNGTYDYPQYSEEARLNREEISGVKLESMGTYQILSIYSTVASSLALAIMVAGLSLWMCSNGSLQCRICI

SEQ ID NO: 13995 - protein, 568 aa, synthetic construct
  REGION 1..568: note = hemagglutinin__InfluenzaA__AAD51927
MEKIVLLLAIVSLVKSDQICIGYHANNSTEQVDTIMEKNVTVTHAQDILEKTHNGKLCDLNGVKPLILRDCSVAGWLLGNPMCDEFINVPEWSYIVEKASPANDLCYPGDFNDYEELKHLLSRTNHFEKIQIIPKSSWSNHDASSGVSSACPYHGRSSFFRNVVWLIKKNSAYPTIKRSYNNTNQEDLLVLWGIHHPNDAAEQTKLYQNPTTYISVGTSTLNQRLVPEIATRPKVNGQSGRMEFFWTILKPNDAINFESNGNFIAPEYAYKIVKKGDSAIMKSELEYGNCNTKCQTPMGAINSSMPFHNIHPLTIGECPKYVKSNRLVLATGLRNTPQRERRRKKRGLFGAIAGFIEGGWQGMVDGWYGYHHSNEQGSGYAADKESTQKAIDGVTNKVNSIIDKMNTQFEAVGREFNNLERRIENLNKQMEDGFLDVWTYNAELLVLMENERTLDFHDSNVKNLYDKVRLQLRDNAKELGNGCFEFYHKCDNECMESVKNGTYDYPQYSEEARLNREEISGVKLESMGTYQILSIYSTVASSLALAIMVAGLSLWMCSNGSLQCRICI

SEQ ID NO: 13996 - protein, 567 aa, synthetic construct; identical to SEQ ID NO: 7717
  REGION 1..567: note = hemagglutinin__InfluenzaA__AEO89181

SEQ ID NO: 13997 - protein, 568 aa, synthetic construct; identical to SEQ ID NO: 9171
  REGION 1..568: note = hemagglutinin__InfluenzaA__AFM78567

SEQ ID NO: 13998 - protein, 568 aa, synthetic construct
  REGION 1..568: note = hemagglutinin__InfluenzaA__ACR48872
MEKIVLLLAIVSLVKSDQICIGYHANNSTEQVDTIMEKNVTVTHAQDILEKTHNGKLCDLDGVKPLILRDCSVAGWLLGNPMCDEFINVPEWSYIVEKANPTNDLCYPGSFNDYEELKHLLSRINHFEKIQIIPKSSWSDHEASSGVSSACPYLGSPSFFRNVVWLIKKNSTYPTIKKSYNNTNQEDLLVLWGIHHPNDAAEQTMLYQNPTTYISIGTSTLNQRLVPKIATRSKVNGQSGRMEFFWTILKPNDAINFESNGNFIAPEYAYKIVKKGDSAIMKSELEYGNCNTKCQTPMGAINSSMPFHNIHPLTIGECPKYVKSNRLVLATGLRNSPQRESRRKKRGLFGAIAGFIEGGWQGMVDGWYGYHHSNEQGSGYAADKESTQKAIDGVTNKVNSIIDKMNTQFEAVGREFNNLERRIENLNKKMEDGFLDVWTYNAELLVLMENERTLDFHDSNVKNLYDKVRLQLRDNAKELGNGCFEFYHKCDNECMESIRNGTYNYPQYSEEARLKREEISGVKLESIGTYQILSIYSTVASSLALAIMMAGLSLWMCSNGSLQCRICI

SEQ ID NO: 13999 - protein, 568 aa, synthetic construct; identical to SEQ ID NO: 9171
  REGION 1..568: note = hemagglutinin__InfluenzaA__ABW06108

SEQ ID NO: 14000 - protein, 568 aa, synthetic construct
  REGION 1..568: note = hemagglutinin__InfluenzaA__EPI341633
MEKITLLLSIVSLVKSDQICIGYHANNSTEQVDTIMEKNVTVTHAQDILEKTHNGKLCDLDGVKPLILKDCSVAGWLLGNPMCDEFINVPEWSYIVEKANPTNDLCYPGSFNDYEELKHLLSRINHFEKIQIIPKSSWSDHEASSGVSSACPYLGSPSFFRNVVWLIKKNSTYPTIKKTYNNTNQEDLLILWGIHHPNNGAEQTMLYQNPTTYISIGTSTLNQRLVPKIATRSKVNGQSGRMEFFWTILKPNDAINFESNGNFIAPEYAYKIVKKGDSAIMKSELEYGNCNTKCQTPMGAINSSMPFHNIHPITIGECPKYVKSNRLVLATGLRNSPQRESRRKKRGLFGAIAGFIEGGWQGMVDGWYGYHHSNEQGSGYAADKESTQKAIDGVTNKVNSIIDKMNTQFEAVGREFSNLERRIENLNKKMEDGFLDVWTYNAELLVLMENERTLDFHDSNVKNLYDKVRLQLRDNAKELGNGCFEFYHKCDNECMESIRNGTYNYPQYSEEARLKREEISGVKLESIGTYQILSIYSTVASSLALAIMIAGLSLWMCSNGSLQCRICI

SEQ ID NO: 14001 - protein, 568 aa, synthetic construct
  REGION 1..568: note = hemagglutinin__InfluenzaA__ABD95991
MEKIMLLLAIVSLVKSDQICIGYHANNSTEQVDTIMEKNVTVTHAQDILEKTHNGKLCDLDGVKPLILRDCSVAGWLLGNPMCDEFLNVPEWSYIVEKINPANDLCYPGNFNDYEELKHLLSRINHFEKIQIIPKSSWSDHEASSGVSSACPYQGRSSFFRNVVWLIKKDNAYPTIKRSYNNTNQEDLLVLWGIHHPNDAAEQTRLYQNPTTYISVGTSTLNQRLVPKIATRSKVNGQSGRMEFFWTILKPNDAINFESNGNFIAPENAYKIVKKGDSTIMKSELEYGNCNTKCQTPIGAINSSMPFHNIHPLTIGECPKYVKSNRLVLATGLRNSPQGERRRKKRGLFGAIAGFIEGGWQGMVDGWYGYHHSNEQGSGYAADKESTQKAIDGVTNKVNSIIDKMNTQFEAVGREFNNLERRIENLNKKMEDGFLDVWTYNAELLVLMENERTLDFHDSNVKNLYDKVRLQLRDNAKELGNGCFEFYHRCDNECMESVRNGTYDYPQYSEEARLKREEISGVKLESIGTYQILSIYSTVASSLALAIMVAGLSLWMCSNGSLQCRICI

SEQ ID NO: 14002 - protein, 568 aa, synthetic construct
  REGION 1..568: note = hemagglutinin__InfluenzaA__AGN69453
MEKIVLLLAIVSLVKSDQICIGYHANNSTEQVDTIMEKNVTVTHAQDILEKTHNGKLCDLDGVKPLILRDCSVAGWLLGNPMCDEFLNVPEWSYIVEKINPANDLCYPGNFNDYEELKHLLSRINHFEKIQIIPKSSWSDHEASAGVSSACPYQGMSSFFRNVVWLIKKDNAYPTIKRSYNNTNQEDLLVLWGIHHPNDAAEQTKLYQNSTTYISVGTSTLNQRLVPKIATRSKVNGQSGRIEFFWTILKPNDTINFESNGNFIAPENAYKIVKKGDSTIMKSELEYGNCNTKCQTPIGAINSSMPFHNIHPLTIGECPKYVKSSRLVLATGLRNSPQGERRRKKRGLFGAIAGFIEGGWQGMVDGWYGYHHSNEQGSGYAADKESTQKAIDGVTNKVNSIIDKMNTQFEAVGREFNNLERRIENLNKKMEDGFLDVWTYNAELLVLMENERTLDFHDSNVKNLYDKVRLQLRDNAKELGNGCFEFYHRCDNECMESVRNGTYDYPQYSEEARLKREEISGVKLESIGTYQILSIYSTVASSLALAIMVAGLSLWMCSNGSLQCRICI

SEQ ID NO: 14003 - protein, 568 aa, synthetic construct
  REGION 1..568: note = hemagglutinin__InfluenzaA__AGN69452
MEKIVLLLAIVSLVKSDQICIGYHANNSTEQVDTIMEKNVTVTHAQDILEKTHNGKLCDLDGVKPLILRDCSVAGWLLGNPMCDEFLNVPEWSYIVEKINPANDLCYPGNFNDYEELKHLLSRINHFEKIQIIPKSSWSDHEASAGVSSACPYQGRSSFFRNVVWLIKKDNAYPTIKRSYNNTNQEDLLVLWGIHHPNDAAEQTRLYQNSTTYISVGTSTLNQRLVPKIATRSKVNGQSGRIEFFWTILKPNDTINFESNGNFIAPENAYKIVKKGDSTIMKSELEYGNCNTKCQTPIGAINSSMPFHNIHPLTIGECPKYVKSSRLVLATGLRNSPQGERRRKKRGLFGAIAGFIEGGWQGMVDGWYGYHHSNEQGSGYAADKESTQKAIDGVTNKVNSIIDKMNTQFEAVGREFNNLERRIENLNKKMEDGFLDVWTYNAELLVLMENERTLDFHDSNVKNLYDKVRLQLRDNAKELGNGCFEFYHRCDNECMESVRNGTYDYPQYSEEARLKREEISGVKLESIGTYQILSIYSTVASSLALAIMVAGLSLWMCSNGSLQCRICI

SEQ ID NO: 14004 - protein, 568 aa, synthetic construct
  REGION 1..568: note = hemagglutinin__InfluenzaA__ABD73284
MEKIVLLLAIVSLVKSDQICIGYHANNSTEQVDTIMEKNVTVTHAQDILEKTHNGKLCDLDGVKPLILRDCSVAGWLLGNPMCDEFLNVPEWSYIVEKINPANDLCYPGNFNDYEELKHLLSRINHFEKIQIIPKSSWSDHEASAGVSSACPYQGRSSFFRNVVWLIKKDNAYPTIKRSYNNTNQEDLLVLWGIHHPNDAAEQTRLYQNPTTYISVGTSTLNQRLVPKIATRSKVNGQSGRMEFFWTILKPNDAINFESNGNFIAPENAYKIVKKGDSTIMKSELEYGNCNTKCQTPIGAINSSMPFHNIHPLTIGECPKYVKSSRLVLATGLRNSPQGERRRKKRGLFGAIAGFIEGGWQGMVDGWYGYHHSNEQGSGYAADKESTQKAIDGVTNKVNSIIDKMNTQFEAVGREFNNLERRIENLNKKMEDGFLDVWTYNAELLVLMENERTLDFHDSNVKNLYDKVRLQLRDNAKELGNGCFEFYHRCDNECMESVRNGTYDYPQYSEEARLKREEISGVKLESIGTYQILSIYSTVASSLALAIMVAGLSLWMCSNGSLQCRICI

SEQ ID NO: 14005 - protein, 564 aa, synthetic construct
  REGION 1..564: note = hemagglutinin__InfluenzaA__ABF93440
MEKIVLLLAIVSLVKSDQICIGYHANNSTEQVDTIMEKNVTVTHAQDILEKTHNGKLCDLDGVKPLILRDCSVAGWLLGNPMCDEFLNVPEWSYIVEKINPANDLCYPGNFNDYEELKHLLSRINHFEKIQIIPKSSWSDHEASSGVSSACPYQGRSSFFRNVVWLIKKDNAYPTIKRSYNNTNQEDLLVLWGIHHPNDAAEQTRLYQNPTTYISVGTSTLNQRLVPKIATRSKVNGQSGRMEFFWTILKPNDAINFESNGNFIAPENAYKIVKKGDSTIMKSELEYGNCNTKCQTPIGAINSSMPFHNIHPLTIGECPKYVKSNRLVLATGLRNSPQIETRGLFGAIAGFIEGGWQGMVDGWYGYHHSNEQGSGYAADKESTQKAIDGVTNKVNSIIDKMNTQFEAVGREFNNLERRIENLNKKMEDGFLDVWTYNAELLVLMENERTLDFHDSNVKNLYDKVRLQLRDNAKELGNGCFEFYHRCDNECMESVRNGTYDYPQYSEEARLKREEISGVKLESIGTYQILSIYSTVASSLALAIMVAGLSLWMCSNGSLQCRICI

SEQ ID NO: 14006 - protein, 566 aa, synthetic construct
  REGION 1..566: note = hemagglutinin__InfluenzaA__AKC45369
MEKIVLLLAVVSLVKSDQICIGYHANNSTEQVDTIMEKNVTVTHAQDILEKTHNGRLCDLNGVKPLILKDCSVAGWLLGNPMCDEFIRVPEWSYIVERANPANDLCYPGNLNDYEELKHLLSRINHFEKTLIIPKSSWPNHTSSGVSAACPYQGTPSFFRNVVWLTKKNDAYPTIKMSYNNTNREDLLILWGIHHSNNAAEQTNLYKNPTTYVSVGTSTLNQRLVPKIATRSQVNGQRGRMDFFWTILKPNDAIHFESNGNFIAPEYAYKIVKKGDSTIMKSEMEYGHCNTKCQTPIGAINSSMPFHNIHPLTIGECPKYVKSNKLVLATGLRNSPLRERRRKRGLFGAIAGFIEGGWQGMVDGWYGYHHSNEQGSGYAADRESTQKAIDGVTNKVNSIIDKMNTQFEAVGREFNNLERRIENLNKKMEDGFLDVWTYNAELLVLMENERTLDFHDSNVKNLYDKVRLQLRDNAKELGNGCFEFYHKCDNECMESVRNGTYDYPQYSEEARLKREEISGVKLESIGTYQILSIYSTVASSLALAIIVAGLSLWMCSNGSLQCRICI

SEQ ID NO: 14007 - protein, 567 aa, synthetic construct; identical to SEQ ID NO: 12958
  REGION 1..567: note = hemagglutinin__InfluenzaA__AJS18479

SEQ ID NO: 14008 - protein, 567 aa, synthetic construct
  REGION 1..567: note = hemagglutinin__InfluenzaA__EPI691378
MEKIVLLLAVVSLVKSDQICIGYHANNSTEQVDTIMEKNVTVTHAQDILEKTHNGRLCDLNGVKPLILKDCSVAGWLLGNPMCDEFIRVPEWSYIVERANPANDLCYPGNLNDYEELKHLLSRINHFEKTLIIPKSSWPNHETSLGVSAACPYQGVPSFFRNVVWLTKKNDAYPTIKMSYNNTNREDLLILWGIHHSNNAAEQTNLYKNPTTYVSVGTSTLNQRLVPKIATRSQVNGQRGRMDFFWTILKPNDAIHFESNGNFIAPEYAYKIVKKGDSTIMKSEMEYGHCNTKCQTPIGAINSSMPFHNIHPLTIGECPKYVKSNKLVLATGLRNSPLRERRRKRGLFGAIAGFIEGGWQGMVDGWYGYHHSNEQGSGYAADRESTQKAIDGVTNKVNSIIDKMNTQFEAVGREFNNLERRIENLNKKMEDGFLDVWTYNAELLVLMENERTLDFHDSNVKNLYDKVRLQLRDNAKELGNGCFEFYHKCDNECMESVRNGTYDYPQYSEEARLKREEISGVKLESIGTYQILSIYSTVASSLALAIIVAGLSLWMCSNGSLQCRICI

SEQ ID NO: 14009 - protein, 567 aa, synthetic construct
  REGION 1..567: note = hemagglutinin__InfluenzaA__EPI533583
MEKIVLLLAIVSLVKGDQICIGYHANNSTEQVDTIMEKNVTVTHAQDILEKTHNGKLCDLNGVKPLILKDCSVAGWLLGNPMCDEFIRVPEWSYIVERANPANDLCYPGNLNDYEELKHLLSRINHFEKILIIPKSSWTNHETSLGVSAACPYQGTPSFFRNVVWLIKKNDAYPTIKISYNNTNQEDLLILWGVHHSNNAAEQTNLYKNPTTYISVGTSTLNQRLVPKIATRSQVNGQRGRMDFFWTILKPNDAIHFESNGNFIAPEYAYKIVKKGDSTIMKSEMEYGHCNTKCQTPIGAINSSMPFHNIHPLTIGECPKYVKSNKLVLATGLRNSPLREKRRKRGLFGAIAGFIEGGWQGMVDGWYGYHHSNEQGSGYAADKESTQKAIDGVTNKVNSIIDKMNTQFEAVGREFNNLERRIENLNKKMEDGFLDVWTYNAELLVLMENERTLDFHDSNVKNLYDKVRLQLRDNAKELGNGCFEFYHKCDNKCMESVRNGTYDYPQYSEEARLKREEISGVKLESIGTYQILSIYSTVASSLALAIIVAGLSLWMCSNGSLQCRICI

SEQ ID NO: 14010 - protein, 566 aa, synthetic construct; identical to SEQ ID NO: 12971
  REGION 1..566: note = hemagglutinin__InfluenzaA__AKS48023

SEQ ID NO: 14011 - protein, 566 aa, synthetic construct
  REGION 1..566: note = hemagglutinin__InfluenzaA__EPI587621
MEKMVLLLAAVSLVKSDQICIGYHANNSTEQVDTIMEKNVTVTHAQDILEKTHNGRLCDLNGVKPLILKDCSVAGWLLGNPMCDEFIRVPEWSYIVERANPANDLCYPGNLNDYEELKHLLSRINHFEKTLIIPKSSWPNHTSSGVSAACPYQGMPSFFRNVVWLTKKNDAYPTIKMSYNNTYREDLLILWGIHHSNNAAEQTNLYKNPTTYVSVGTSTLNQRLEPKIATRSQVNGQRGRMDFFWTILKPNDAIHFESNGNFIAPEYAYKIVKKGDSTIMKSEMEYGHCNTKCQTPIGAINSSMPFHNIHPLTIGECPKYVKSNKLVLATGLRNSPLRERRRKRGLFGAIAGFIEGGWQGMVDGWYGYHHSNEQGSGYAADRESTQKAIDGVTNKVNSIIDKMNTQFEAVGREFNNLERRIENLNKKMEDGFLDVWTYNAELLVLMENERTLDFHDSNVKNLYDKVRLQLRDNAKELGNGCFEFYHKCDNECMESVRNGTYDYPQYSEEARLKREEISGVKLESIGTYQILSIYSTVASSLALAIIVAGLSLWMCSNGSLQCRICI

SEQ ID NO: 14012 - protein, 567 aa, synthetic construct
  REGION 1..567: note = hemagglutinin__InfluenzaA__AJE30333
MEKIVLLLAVISLVKSDQICIGYHANNSTKQVDTIMEKNVTVTHAQDILEKTHNGKLCDLNGVKPLILKDCSVAGWLLGNPMCDEFIRVPEWSYIVERANPANDLCYPGTLNDYEELKHLLSRINHFEKTLIIPRSSWPNHETSLGVSAACPYQGASSFFRNVVWLIKKNDAYPTIKISYNNTNREDLLILWGIHHSNNAAEQTNLYKNPDTYVSVGTSTLNQRLVPKIATRSQVNGQSGRMDFFWTILKPNDAIHFESNGNFIAPEYAYKIVKKGDSTIMKSEMEYGHCNTKCQTPIGAINSSMPFHNIHPLTIGECPKYVKSNKLVLATGLRNSPLRERRRKRGLFGAIAGFIEGGWQGMVDGWYGYHHSNEQGSGYAADKESTQKAIDGVTNKVNSIIDKMNTQFEAVGREFNNLERRIENLNKKMEDGFLDVWTYNAELLVLMENERTLDFHDSNVKNLYDKVRLQLRDNAKELGNGCFEFYHKCDNECMESVRNGTYDYPKYSEEAILKREEISGVKLESIGTYQILSIYSTVASSLALAIIVAGLSLWMCSNGSLQCRICI

SEQ ID NO: 14013 - protein, 567 aa, synthetic construct
  REGION 1..567: note = hemagglutinin__InfluenzaA__EPI459855
MIAIVVIAILASAGKSDKICIGYHANNSTTQVDTLLEKNVTVTHSVELLENQKEKRFCKIMNKAPLDLKDCTIEGWILGNPKCDLLLGDQSWSYIVERPNAQNGICYPGVLNELEELKAFIGSGERVERFEMFPKSTWAGVDTSRGVTNACPSYTIDSSFYRNLVWIVKTDSATYPVIKGTYNNTGTQPILYFWGVHHPLDTTVQDNLYGSGDKYVRMGTESMNFAKSPEIAARPAVNGQRSRIDYYWSVLRPGETLNVESNGNLIAPWYAYKFVSTNKKGAVFKSDLPIENCDATCQTITGVLRTNKTFQNVSPLWIGECPKYVKSESLRLATGLRNVPQIATRGIFGAIAGFIEGGWTGMIDGWYGYHHENSQGSGYAADRESTQKAIDGITNKVNSIINKMNTQFEAVDHEFSNLERRIGNLNKRMEDGFLDVWTYNAELLVLLENERTLDLHDANVKNLYEKVKSQLRDNANDLGNGCFEFWHKCDNECMESVKNGTYDYPKYQKESKLNRQGIESVKLENLGVYQILAIYSTVSSSLVLVGLIMAIGLWMCSNGSMQCRICI

SEQ ID NO: 14014 - protein, 567 aa, synthetic construct; identical to SEQ ID NO: 14013
  REGION 1..567: note = hemagglutinin__InfluenzaA__EPI459855/m1

SEQ ID NO: 14015 - protein, 563 aa, synthetic construct
  REGION 1..563: note = hemagglutinin__InfluenzaA__ACZ36872
MNTQILVFALVAVIHTNADKICLGHHAVSNGTKVNTLTERGVEVVNATETVERTNIPKICSKGKRTVDLGQCGLLGTITGPPQCDQFLEFSADLIIERRDGNDVCYPGKFVNGEALRQILRKSGGINKETMGFTYSGIRTNGTTSACRRSGSSFYAEMKWLLSDTDNAAFPQMTKSYKNTRREPALIVWGIHHSGSTTEQTKLYGSGNKLVTVGSSKYQQSFVPSPGTRPQVNGQSGRIDFHWLILDSNDTVTFSFNGAFIAPDRASFLKGKSMGIQSDVQVDANCEGECYHSGGTITSSLPFQNINSRAVGKCPRYVKQESLLLATGMKNVPELPKKRRKRGLFGAIAGFIENGWEGLVDGWYGFRHQNAQGEGTAADYKSTQSAIDQITGKLNRLIEKTNQQFELIDNEFTEVEKQIGNVINWTRDSITEVWSYNAELLVAMENQHTIDLADSEMNKLYERVRKQLRENAEEDGTGCFEIFHKCDDDCMASIRNNTYDHSKYREEAMQNRIQIDPVKLSGGYKDVILWFSFGASCFLLLAIAMGLVFICVKNGNMRCTICI

SEQ ID NO: 14016 - protein, 563 aa, synthetic construct
  REGION 1..563: note = hemagglutinin__InfluenzaA__AGB51388
MNTQILVFALVAVIHTNADKICLGHHAVSNGTKVNTLTERGVEVVNATETVERTNIPKICSKGKRTVDLGQCGLLGTITGPPQCDQFLEFSADLIIERRDGNDVCYPGKFVNGEALRQILRKSGGINKETMGFTYSGIRTNGTTSACRRSGSSFYAEMKWLLSDTDNAAFPQMTKSYKNTRREPALIVWGIHHSGSTTEQTKLYGSGNKLVTVGSSKYQQSFVPNPETRPQVNGQSGRIDFHWLILDSNDTVTFSFNGAFIAPDRASFLKGKSMGIQSDVQVDANCEGECYHSGGTITSSLPFQNINSRAVGKCPRYVKQESLLLATGMKNVPELPKKRRKRGLFGAIAGFIENGWEGLVDGWYGFRHQNAQGEGTAADYKSTQSAIDQITGKLNRLIEKTNQQFELIDNEFTEVEKQTGNVINWTRDSITEVWSYNAELLVAMENQHTIDLADSEMNKLYERVRKQLRENAEEDGTGCFEIFHKCDDDCMASIRNNTYDHSKYREEAMQNRIQIDPVKLSGGYKDVILWFSFGASCFLLLAIAMGLVFICVKNGNMRCTICI

SEQ ID NO: 14017 - protein, 560 aa, synthetic construct; identical to SEQ ID NO: 9988
  REGION 1..560: note = hemagglutinin__InfluenzaA__EPI439507

SEQ ID NO: 14018 - protein, 567 aa, synthetic construct
  REGION 1..567: note = hemagglutinin__InfluenzaA__EPI164216
MEKIVLLLAIVSLVKSDQICIGYHANNSTEQVDTIMEKNVTVTHAQDILEKTHNGKLCDLDGVKPLILRDCSVAGWLLGNPMCDEFINVPEWSYIVEKANPANDLCYPGNFNDYEELKHLLSRINHFEKIQIIPKSSWSDHEASSGVSSACPYQGTPSFFRNVVWLIKKNNTYPTIKRSYNNTNQEDLLILWGIHHSNDAAEQTKLYQNPTTYISVGTSTLNQRLVPKIATRSKVNGQSGRMDFFWTILKPNDAINFESNGNFIAPEYAYKIVKKGDSAIVKSEVEYGNCNTKCQTPIGAINSSMPFHNIHPLTIGECPKYVKSNKLVLATGLRNSPLRERRRKRGLFGAIAGFIEGGWQGMVDGWYGYHHSNEQGSGYAADKESTQKAIDGVTNKVNSIIDKMNTQFEAVGREFNNLERRIENLNKKMEDGFLDVWTYNAELLVLMENERTLDFHDSNVKNLYDKVRLQLRDNAKELGNGCFEFYHKCDNECMESVRNGTYDYPQYSEEARLKREEISGVKLESIGTYQILSIYSTVASSLALAIMVAGLSLWMCSNGSLQCRICI

SEQ ID NO: 14019 - protein, 560 aa, synthetic construct; identical to SEQ ID NO: 12351
  REGION 1..560: note = hemagglutinin__InfluenzaA__EPI486492

SEQ ID NO: 14020 - protein, 560 aa, synthetic construct
  REGION 1..560: note = hemagglutinin__InfluenzaA__EPI740738
MNTQILVFALIAIIPTNADKICLGHHAVSNGTKVNTLTERGVEVVNATETVERTNIPRICSKGKRTVDLGQCGLLGTITGPPQCDQFLEFSADLIIERREGSDVCYPGKFVNEEALRQILRESGGIDKETMGFTYSGIRTNGVTSACKRSGSSFYAEMKWLLSNTDNAAFPQMTKSYKNTRKSPAIIVWGIHHSVSTAEQTKLYGSGNKLVTVGSSNYQQSFVPSPGARPQVNGLSGRIDFHWLILNPNDTVTFSFNGAFIAPDRASFLRGKSMGIQSGVQVDANCEGDCYHSGGTIISNLPFQNIDSRAVGKCPRYVKQRSLLLATGMKNVPEIPKGRGLFGAIAGFIENGWEGLIDGWYGFRHQNAQGEGTAADYKSTQSAIDQITGKLNRLIAKTNQQFELIDNEFNEVEKQIGNVINWTRDSITEVWSYNAELLIAMENQHTIDLADSEMDKLYERVKRQLRENAEEDGTGCFEIFHKCDDDCMASIRNNTYDHRKYREEAMQNRIQIDPVKLSSGYKDVILWFSFGASCFILLAIVMGLVFICVKNGNMRCTICI

SEQ ID NO: 14021 - protein, 560 aa, synthetic construct
  REGION 1..560: note = hemagglutinin__InfluenzaA__EPI730495
MNIQILVFALIAIIPTDADKICLGHHAVSNGTKVNTLTERGVEVVNATETVERTNIPRICSKGKRTVDLGQCGLLGTITGPPQCDQFLEFSADLIIERREGSDVCYPGKFVNEEALRQILRKSGGIDKEAMGFTYSGIRTNGATSACRRSGSSFYAEMKWLLSNTDNAAFPQMTKSYKNTRKSPAIIVWGIHHSVSTAEQTKLYGSGSKLVTVGSSNYQQSFVPSPGARPQVNGLSGRIDFHWLILNPNDTVTFSFNGAFIAPDRASFLRGKSMGIQSGVQVDADCEGDCYHSGGTIISNLPFQNIDSRAVGKCPRYVKQRSLLLATGMKNVPEIPKGRGLFGAIAGFIENGWEGLIDGWYGFRHQNAQGEGTAADYKSTQSAIDQITGKLNRLIEKTNQQFELIDNEFIEVEKQIGNVINWTRDSITEVWSYNAELLVAMENQHTIDLADSEMDKLYERVKRQLRENAEEDGTGCFEIFHKCDDDCMASIRNNTYDHSKYREEAMQNRIQIDPVKLSSGYKDVILWFSFGASCFILPAIVMGLVFMCVKNGNMRCTICI

SEQ ID NO: 14022 - protein, 560 aa, synthetic construct
  REGION 1..560: note = hemagglutinin__InfluenzaA__EPI712926
MNTQILVFALIAIIPTNADKICLGHHAVSNGTKVNTLTERGVEVVNATETVERTNIPRICSKGKRTVDLGQCGLLGTITGPPQCDQFLEFSADLIIERREGSDVCYPGKFVNEEALRQILRESGGIDKETMGFTYNGIRINGVTSACKRSGSSFYAEMKWLLSNTDNAAFPQMTKSYKNTRKSPAIIVWGIHHSVSTAEQTKLYGSGNKLVTVGSSNYQQSFVPSPGARPQVNGLSGRIDFHWLILNPNDTVTFSFNGAFIAPDRASFLRGKSIGIQSGVQVDANCEGDCYHSGGTIISNLPFQNIDSRAVGKCPRYVKQRSLLLATGMKNVPEIPKGRGLFGAIAGFIENGWEGLIDGWYGFRHQNAQGEGTAADYKSTQSAIDQITGKLNRLIAKTNQQFELIDNEFNEVEKQIGNVINWTRDSITEVWSYNAELLIAMENQHTIDLADSEMDKLYERVKRQLRENAEEDGTGCFEIFHKCDDDCMASIRNNTYDHRKYREEAMQNRIQIDPVKLSSGYKDVILWFSFGASCFILLAIVMGLVFICVKNGNMRCTICI

SEQ ID NO: 14023 - protein, 560 aa, synthetic construct; identical to SEQ ID NO: 9988
  REGION 1..560: note = hemagglutinin__InfluenzaA__AGL44438

SEQ ID NO: 14024 - protein, 560 aa, synthetic construct
  REGION 1..560: note = hemagglutinin__InfluenzaA__EPI445996
METVSLMTILLLVTTSNADKICIGHQSTNSTETVDTLTETNVPVTHAKELLHTDHNGMLCATNLGHPLILDTCNVEGLIYGNPSCDLLLGGREWSYIVERPSAVNGTCYPGNVENLEELRTLFSSSSSYQRIQIFPDTIWNVTYTGTSKSCSDSFYRNMRWLTQKNGLYPVQDAQFTNNRGKDILFVWGIHHPPTDTAQTNLYTRTDTTTSVTTENLDRTFKPLIGPRPLVNGLIGRINYYWSVLKPGQTLRVRSNGNLIAPWYGHVLSGESHGRILKTNLNSGNCVVQCQTEKGGLNSTLPFHNISKYAFGNCPKYIGVKSLKLAIGLRNVPAKSSRGLFGAIAGFIEGGWPGLVAGWYGFQHSNDQGVGIAADRVSTQKAVDKITSKVNNIVDKMNKQYEIIDHEFSEVETRLNMINNKIDDQIQDVWAYNAELLVLLENQKTLDEHDANVNNLYNKVKRALGSNALEDGKGCFELYHKCDDQCMETIRNGTYNRRKYQEESRLERQKIEGIKLESEGTYKILTIYSTVASSLVLAMGFAAFLFWAMSNGSCRCNICI

SEQ ID NO: 14025 - protein, 564 aa, synthetic construct
  REGION 1..564: note = hemagglutinin__InfluenzaA__EPI433309
MEKIVLLLAIASLVKSDQICIGYHANNSTEQVDTIMEKNVTVTHAQDILEKTHNGKLCDLDGVKPLILRDCSVAGWLLGNPMCDKFNDVPEWSYIVEKANPANDLCYPGNLNDYEELKHLLSRINHFEKIQTFPKSSWSDHEASLGVSAACPYQGMPSFFRNVVWLIKKNNTYPTIKSSYNNTNQEDLLILWGIHHSNDEAEQTRLYQNSNTYISVGTSTLNQRLVPKIATRSKVNGQSGRMDFFWTILKPNDAINFESNGNFIAPEYAYKIVKKGDSAIMKSEVGYGDCNTKCQTPIGAINSSMPFHNIHPLTIGECPKYVKSNKLVLATGLRNSPQIETRGLFGAIAGFIEGGWQGMVDGWYGYHHSNEQGSGYAADKESTQKAIDGVTNKVNSIIDKMNTQFEAVEREFNNLERRIENLNKKMEDGFLDVWTYNAELLVLMENERTLDFHDSNVKNLYDKVRLQLRDNAKELGNGCFEFYHKCDNECMESVRNGTYDYPQYSEEARLKREEISGVKLESIGTYQILSIYSTVASSLALAIMVAGLSLWMCSNGSLQCRICI

SEQ ID NO: 14026 - protein, 560 aa, synthetic construct
  REGION 1..560: note = hemagglutinin__InfluenzaA__EPI470859
MEAIPLITILLVVTASNADKICIGYQSTNSTETVDTLTENNVPVTHAKELLHTEHNGMLCATNLGRPLILDTCTIEGLIYGNPSCDLLLGGREWSYIVERPSAVNGMCYPGNVENLEELRSFFSSASSYQRIQIFPDTIWNVSYSGTSKACSDSFYRSMRWLTQKNNAYPIQDAQYTNNRGKSILFMWGINHPPTDTAQTNLYTRTDTTTSVATEDINRTFKPVIGPRPLVNGLQGRIDYYWSVLKPGQTLRVRSNGNLIAPWYGHILSGESHGRILKTDLNSGSCVVQCQTERGGLNTTLPFHNVSKYAFGNCPKYVGVKSLKLAVGLRNVPARSSRGLFGAIAGFIEGGWSGLVAGWYGFQHSNDQGVGIAADRDSTQRAIDKITSKVNNIVDKMNKQYEIIDHEFSEVENRLNMINNKIDDQIQDIWAYNAELLVLLENQKTLDEHDANVNNLYNKVKRALGSNAMEDGKGCFELYHKCDDQCMETIRNGTYNRRKYKEESRLERQKIEGVKLESEGTYKILTIYSTVASSLVIAMGFAAFLFWAMSNGSCRCNICI

SEQ ID NO: 14027 - protein, 560 aa, synthetic construct
  REGION 1..560: note = hemagglutinin__InfluenzaA__EPI498037
METVSLITILLVATVSNADKICIGYQSTNSTETVDTLTENNVPVTHAKELLHTEHNGMLCATSLGQPLILDTCTIEGLIYGNPSCDLLLEGREWSYIVERPSAVNGLCYPGNVENLEELRSLFSSARSYQRIQIFPDTIWNVSYNGTSKACSGSFYRSMRWLTRKNGDYPIQDVQYTNNQGKNILFMWGINHPPTDTTQRDLYTRTDTTTSVATEEINRIFKPLIGPRPLVNGLMGRIDYYWSVLKPGQTLRIKSDGNLIAPWYGHILSGESHGRILKTDLKRGSCTVQCQTEKGGLNTTLPFQNVSKYAFGNCSKYIGIKSLKLAVGLRNVPSRSSRGLFGAIAGFIEGGWSGLVAGWYGFQHSNDQGVGMAADRDSTQKAIDKITSKVNNIVDKMNKQYEIIDHEFSEVETRLNMINNKIDDQIQDIWAYNAELLVLLENQKTLDEHDANVNNLYNKVKRALGSNAVEDGKGCFELYHKCDNQCMETIRNGTYNKRKYQEESKLERQKIEGVKLESEGTYKILTIYSTVASSLVIAMGFAAFLFWAMSNGSCRCNICI

SEQ ID NO: 14028 - protein, 560 aa, synthetic construct
  REGION 1..560: note = hemagglutinin__InfluenzaA__AGO17847
METISLMTILLITTASNADKICIGHQSTNSTETVDTLTETNVPVTHAKELLQTEHNGMLCATNLGHPLILDTCTIEGLIYGNPSCDLLLEGREWSYIVERPSAVNGTCYPGNVENLEELRTLFSSASSYQRIQIFPDTTWNVTYTGTSRSCSGSFYRSMRWLTQKSGFYPVQDAKYTNNRGKNILFVWGIHHPHTYTDQTTLYIRNDTTTSVTTEELNRIFKPVIVPRLLVNGQQGRIDYYWSVLKPGQTLRVRSNGNLIAPWYGHVLSGGSHGRILKTDLKSGNCVVQCQTEKGGLNSTLPFHNISKYAFGTCPKYVKVNSLKLAIGLRNVPARSNRGLFGAIAGFIEGGWPGLVAGWYGFQHSNDQGVGMAADRDSTQKAVDKITSKVNNIVDKMNKQYEIIDHEFSEVETRLNMINNKIDDQIQDVWAYNAELLVLLENQKTLDEHDANVNNLYNKVKRALGSNAMEDGKGCFELYHKCDDQCMETIRNGTYDRRKYREESRLERQRIEGVKLESEGTYKILTIYSTVASSLVIAMGFAAFLFWAMSNGSCRCNICI

SEQ ID NO: 14029 - protein, 560 aa, synthetic construct
  REGION 1..560: note = hemagglutinin__InfluenzaA__ANZ03807
METVSLITILLVATVSNADKICIGYQSTNSTETVDTLTENNVPVTHAKELLHTEHNGMLCATSLGQPLILDTCTIEGLIYGNPSCDLSLEGREWSYIVERPSAVNGLCYPGNVENLEELRSLFSSARSYQRIQIFPDTIWNVSYDGTSTACSGSFYRSMRWLTRKNGDYPTQDAQYTNNQGKNILFMWGINHPPTDDTQRNLYTRTDTTTSVATEEINRIFKPLIGPRPLVNGLMGRIDYYWSVLKPGQTLRIKSDGNLIAPWYGHILSGESHGRILKTDLKRGSCTVQCQTEKGGLNTTLPFQNVSKYAFGNCSKYIGIKSLKLAVGLRNVPSRSSRGLFGAIAGFIEGGWSGLVAGWYGFQHSNDQGVGMAADRDSTQKAIDKITSKVNNIVDKMNKQYEIIDHEFSEVETRLNMINNKIDDQIQDIWAYNAELLVLLENQKTLDEHDANVNNLYNKVKRALGSNAVEDGKGCFELYHKCNDQCMETIRNGTYNRRKYQEESKLERQKIEGVKLESEGTYKILTIYSTVASSLVIAMGFAAFLFWAMSNGSCRCNICI

SEQ ID NO: 14030 - protein, 560 aa, synthetic construct; identical to SEQ ID NO: 14029
  REGION 1..560: note = hemagglutinin__InfluenzaA__EPI680526

SEQ ID NO: 14031 - protein, 560 aa, synthetic construct; identical to SEQ ID NO: 13685
  REGION 1..560: note = hemagglutinin__InfluenzaA__ALT20080

SEQ ID NO: 14032 - protein, 469 aa, synthetic construct
  REGION 1..469: note = neuraminidase__InfluenzaA__AAA43084
MNPNQKIITIGSVSLTIATVCFLMQIAILATTVTLHFKQHECDSPASNQVMPCEPIIIERNITEIVYLNNTTIEKEICPEVVEYRNWSKPQCQITGFAPFSKDNSIRLSAGGDIWVTREPYVSCDPGKCYQFALGQGTTLDNKHSNGTIHDRIPHRTLLMNELGVPFHLGTKQVCVAWSSSSCHDGKAWLHVCVTGDDRNATASFIYDGRLVDSIGSWSQNILRTQESECVCINGTCTVVMTDGSASGRADTRILFIKEGKIVHISPLSGSAQHIEECSCYPRYPDVRCICRDNWKGSNRPVIDINMEDYSIDSGYVCSGLVGDTPRNDDSSSNSNCRDPNNERGNPGVKGWAFDNGDDVWMGRTINKESRSGYETFKVIGGWSTPNSKSQVNRQVIVDNNNWSGYSGIFSVEGKSCINRCFYVELIRGRPQETRVWWTSNSIVVFCGTSGTYGTGSWPDGANINFMPI

SEQ ID NO: 14033 - protein, 453 aa, synthetic construct
  REGION 1..453: note = neuraminidase__InfluenzaA__AAA43397
MNPNQKIITIGSICMVVGIISLILQIGNIISIWISHSIQTGNQNHTGICNQGSITYKVVAGQDSTSVILTGNSSLCPIRGWAIHSKDNGIRIGSKGDVFVIREPFISCSHLECRTFFLTQGALLNDKHSRGTFKDRSPYRALMSCPVGEAPSPYNSRFESVAWSASACHDGVGWLTIGISGPDDGAVAVLKYNRIITETIKSWRKNILRTQESECTCVNGSCFTIMTDGPSDGLASYKIFKIEKGKVTKSIELNAPNSHYEECSCYPDTGKVMCVCRDNWHGSNRPWVSFDQNLDYKIGYICSGVFGDNPRPKDGTGSCGPVSADGANGVKGFSYKYGNGVWIGRTKSDSSRHGFEMIWDPNGWTETDSRFSMRQDVVAITNRSGYSGSFVQHPELTGLDCMRPCFWVELIRGLPEEDAIWTSGSIISFCGVNSDTVDWSWPDGAELPFTIDK

SEQ ID NO: 14034 - protein, 454 aa, synthetic construct
  REGION 1..454: note = neuraminidase__InfluenzaA__AAA43412
MNPNQKIITIGSICLVVGLISLILQIGNIISIWISHSIQTGSQNHTGICNQNIITYKNSTWVKDTTSVILTGNSSLCPIRGWAIYSKDNSIRIGSKGDVFVIREPFISCSHLECRTFFLTQGALLNDRHSNGTVKDRSPYRALMSCPVGEAPSPYNSRFESVAWSASACHDGMGWLTIGISGPDNGAVAVLKYNGIITETIKSWRKKILRTQESECACVNGSCFTIMTDGPSDGLASYKIFKIEKGKVTKSIELNAPNSHYEECSCYPDTGKVMCVCRDNWHGSNRPWVSFDQNLDYQIGYICSGVFGDNPRPKDGTGSCGPVYVDGANGVKGFSYRYGNGVWIGRTKSHSSRHGFEMIWDPNGWTETDSKFSVRQDVVAMTDWSGYSGSFVQHPELTGLDCIRPCFWVELIRGRPKEKTIWTSASSISFCGVNSDTVDWSWPDGAELPFTIDK

SEQ ID NO: 14035 - protein, 469 aa, synthetic construct
  REGION 1..469: note = neuraminidase__InfluenzaA__AAG01743
MNPNQKIITLGSVSLTIATICFLMQIAILVTTVTLHFKQYECDYPANNQAMPCEPIIIERNITEIVYLTNTTIEKEVCPKLVEYRNWSKPQCKITGFAPFSKDNSIRLSAGGDIWVTREPYVSCDPGKCYQFALGQGTTLDNKHSNDTIHDRTPHRTLLMNELGVPFHLGTRQVCIAWSSSSCHDGKAWLHVCVTGYDKNATASFIYDGRLVDSIGSWSQNILRTQESECVCINGTCTVVMTDGSASGRADTKILFIEEGKIVHTSPLSGSAQHVEECSCYPRYPGVRCICRDNWKGSNRPVVDINVKDYSINSSYVCSGLVGDTPRNNDRSSSSYCQNPNNEKGTHGVKGWAFDDGNDVWMGRTISEDSRSGYETFKVIGGWSTPNSKLQINRQVIVDSDNRSGYSGIFSVEGKSCINRCFYVELIRGREQETRVWWTSNSIVVFCGTSGTYGTGSWPDGADINIMPI

SEQ ID NO: 14036 - protein, 469 aa, synthetic construct
  REGION 1..469: note = neuraminidase__InfluenzaA__AAG01759
MNPNQKIITIGSVSLTIATMCFLMQIAILVTTVTLHFKQYECNSPPNNQVILCEPTIIERNITEIVYLTNTTIEKEICPKLAEYKNWSKPQCKITGFAPFSKDNSIRLSAGGDIWVTREPYVSCDPDKCYQFALGQGTTLNNRHSNDTVHDRTPYRTLLMNELGVPFHLGTKQVCIAWSSSSCHDGKAWLHVCVTGHDENATASFIYDGRLVDSIGSWSKKILRTQESECVCINGTCTVVMTDGSASGRADTKILFIEEGKIVHISPLLGSAQHVEECSCYPRYPGVRCVCRDNWKGSNRPIVDINVKDYSIVSSYVCSGLVGDTPRKNDRSSSSNCLNPNNEEGGHGVKGWAFDDGNDVWMGRTISEKLRSGYETFKVIEGWSKPNSKLQINRQVIVDRGNRSGYSGIFSVEGKSCINRCFYVELIRGRKQETEVWWTSNSIVVFCGTSGTYGTGSWPDGADINLMPI

SEQ ID NO: 14037 - protein, 469 aa, synthetic construct
  REGION 1..469: note = neuraminidase__InfluenzaA__AAG01777
MNPNQKIITIGSVSLTIATICFLMQIAILVTTVTLHFKQYECNSPPNNQVILCEPTIIERNITEIVYLTNTTIEKEICPKLAEYKNWSKPQCKITGFAPFSKDNSIRLSAGGDIWVTREPYVSCDPDKCYQFALGQGTTLNNRHSNDTVHDRTPYRTLLMNELGVPFHLGTKQVCIAWSSSSCHDGKAWLHVCVTGHDENATASFIYDGRLVDSIGSWSKKILRTQESECVCINGTCTVVMTDGSASGRADTKILFIEEGKIVHISPLLGSAQHVEECSCYPRYPGVRCVCRDNWKGSNRPIVDINVKDYSIVSSYVCSGLVGDTPRKNDRSSSSNCLNPNNEEGGHGVKGWAFDDGNDVWMGRTISEKLRSGYETFKVIEGWSKPNSKLQINRPVIVDRGDRSGYSGIFSVEGKSCINRCFYVELIRGRKQETEVWWTSNSIVVFCGTSGTYGTGSWPDGADINLMPI

SEQ ID NO: 14038 - protein, 469 aa, synthetic construct
  REGION 1..469: note = neuraminidase__InfluenzaA__AAG01786
MNPNQKIITIGSVSLTIATMCFLMQIAILVTTVTLHFKQYECNSPPNNQVILCEPTIIERNITEIVYLTNTTIEKEICPKLAEYKNWSKPQCKITGFAPFSKDNSIRLSAGGDIWVTREPYVSCDPDKCYQFALGQGTTLNNRHSNDTVHDRTPYRTLLMNELGVPFHLGTKQVCIAWSSSSCHDGKAWLHVCVTGHDENATASFIYDGRLVDSIGSWSKKILRTQESECVCINGTCTVVMTDGSASGRADTKILFIEEGKIVHISPLLGSAQHVEECSCYPRYPGVRCVCRDNWKGSNRPIVDINVKDYSIVSSYVCSGLVGDTPRKNDRSSSSNCLNPNNEEGGHGVKGWAFDDGNDVWMGRTISEKLRSGYETFKVIEGWSKPNSKLQINRQVIVDRGDRSGYSGIFSVEGKSCINRCFYVELIRGRKQETEVWWTSNSIVVFCGTSGTYGTGSWPDGADINLMPI

SEQ ID NO: 14039 - protein, 469 aa, synthetic construct
  REGION 1..469: note = neuraminidase__InfluenzaA__AAK71688
MNPNQKIITIGSVSLTIATMCFLMQIAILVTTVTLHFKQYECNSPPNNQVILCEPTIIERNITEIVYLTNATIEKEICPKLAEYRNWSKPQCKITGFAPFSKDNSIRLSAGGDIWVTREPYVSCDPDKCYQFALGQGTTLNNRHSNDTVHDRTPYRTLLMNELGVPFHLGTKQVCIAWSSSSCHDGKAWLHVCVTGHDENATASFIYDGRLVDSIGSWSKKILRTQESECVCINGTCTVVMTDGSASGRADTKILFIEEGKIVHISPLLGSAQHVEECSCYPRYPGVRCVCRDNWKGSNRPIVDINVKDYSIVSSYVCSGLVGDTPRKNDRSSSSNCLNPNNEEGGHGVKGWAFDDGNDVWMGRTISEELRSGYETFKVIEGWSKPNSKLQINRQVIVDRGDRSGYSGIFSVEGKSCINRCFYVELIRGRKQETEVWWTSNSIVVFCGTSGTYGTGSWPDGADINLMPI

SEQ ID NO: 14040 - protein, 469 aa, synthetic construct
  REGION 1..469: note = neuraminidase__InfluenzaA__AAN01169
MNPNQKIITIGSVSLTIATICFLMQIAILVTTVTLHFKQYECNSLPNNQVMLCEPTIIERNITEIVYLTNTTIEKEICPKLAEYRNWSKPQCKITGFAPFSKDNSIRLSAGGDIWVTREPYVSCDPDKCYQFALGQGTTLNNRHSNDTVHDRTPYRTLLMNELGVPFHLGTKQVCIAWSSSSCHDGKAWLHVCVTGHDENATASFIYDGRLVDSIGSWSKKILRTQESECVCINGTCTVVMTDGSASGRADTKILFIEEGKIIHISQLSGSAQHVEECSCYPRYPGVRCVCRDNWKGSNRPIVDINVKDYSIVSSYVCSGLVGDTPRKNDSSSSSHCLNPNNEEGGHGVKGWAFDDGNDVWMGRTISEKFRSGYETFKVIEGWSKPNSKLQINRQVIVDRDNRSGYSGIFSVEGKSCINRCFYVELIRGRKQETEVWWTSNSIVVFCGTSGTYGTGSWPDGADINLMPI

SEQ ID NO: 14041 - protein, 469 aa, synthetic construct; identical to SEQ ID NO: 14040
  REGION 1..469: note = neuraminidase__InfluenzaA__AAN01170

SEQ ID NO: 14042 - protein, 469 aa, synthetic construct
  REGION 1..469: note = neuraminidase__InfluenzaA__AAN01171
MNPNQKIITIGSVSLTIATICFLMQIAILVTTVTLHFKQYECNSLPNNQVMLCEPTIIERNITEIVYLTNTTIEKEICPKLAEYRNWSKPQCKITGFAPFSKDNSIRLSAGGDIWVTREPYVSCDPDKCYQFALGQGTTLNNRHSNDTVHGRTPYRTLLMNELGVPFHLGTKQVCIAWSSSSCHDGKAWLHVCVTGHDENATASFIYDGRLVDSIGSWSKKILRTQESECVCINGTCTVVMTDGSASGRADTKILFIEEGKIIHISQLSGSAQHVEECSCYPRYPGVRCVCRDNWKGSNRPIVDINVKDYSIVSSYVCSGLVGDTPRKNDSSSSSHCLNPNNEEGGHGVKGWAFDDGNDVWMGRTISEKFRSGYETFKVIEGWSKPNSKLQINRQVIVDRDNRSGYSGIFSVEGKSCINRCFYVELIRGRKQETEVWWTSNSIVVFCGTSGTYGTGSWPDGADINLMPI

SEQ ID NO: 14043 - protein, 469 aa, synthetic construct; identical to SEQ ID NO: 14040
  REGION 1..469: note = neuraminidase__InfluenzaA__AAN01172

SEQ ID NO: 14044 - protein, 469 aa, synthetic construct
  REGION 1..469: note = neuraminidase__InfluenzaA__AAN01173
MNPNQKIITIGSVSLTIATICFLMQIAILVTTVTLHFKQYECNSLPNNQVMLCEPTIIERNITEIVYLTNTTIEKEMCPKLAEYRNWSKPQCKITGFAPFSKDNSIRLSAGGDIWVTREPYVSCDPDKCYQFALGQGTTLNNRHSNDTVHDRTPYRTLLMNELGVPFHLGTKQVCIAWSSSSCHDGKAWLHVCVTGHDENATASFIYDGRLVDSIGSWSKKILRTQESECVCINGTCTVVMTDGSASGRADTKILFIEEGKIIHISQLSGSAQHVEECSCYPRYPGVRCVCRDNWKGSNRPIVDINVKDYSIVSSYVCSGLVGDTPRKNDSSSSSHCLNPNNEEGGHGVKGWAFDDGNDVWMGRTISEKFRSGYETFKVIEGWSKPNSKLQINRQVIVDRDNRSGYSGIFSVEGKSCINRCFYVELIRGRKQETEVWWTSNSIVVFCGTSGTYGTGSWPDGADINLMPI

SEQ ID NO: 14045 - protein, 469 aa, synthetic construct; identical to SEQ ID NO: 14040
  REGION 1..469: note = neuraminidase__InfluenzaA__AAN01174

SEQ ID NO: 14046 - protein, 469 aa, synthetic construct; identical to SEQ ID NO: 14040
  REGION 1..469: note = neuraminidase__InfluenzaA__AAN01175

SEQ ID NO: 14047 - protein, 469 aa, synthetic construct; identical to SEQ ID NO: 14040
  REGION 1..469: note = neuraminidase__InfluenzaA__AAN01176

SEQ ID NO: 14048 - protein, 469 aa, synthetic construct; identical to SEQ ID NO: 14040
  REGION 1..469: note = neuraminidase__InfluenzaA__AAN01177

SEQ ID NO: 14049 - protein, 469 aa, synthetic construct; identical to SEQ ID NO: 14040
  REGION 1..469: note = neuraminidase__InfluenzaA__AAN01178

SEQ ID NO: 14050 - protein, 469 aa, synthetic construct; identical to SEQ ID NO: 14040
  REGION 1..469: note = neuraminidase__InfluenzaA__AAN01179

SEQ ID NO: 14051 - protein, 469 aa, synthetic construct; identical to SEQ ID NO: 14040
  REGION 1..469: note = neuraminidase__InfluenzaA__AAN01180

SEQ ID NO: 14052 - protein, 469 aa, synthetic construct
  REGION 1..469: note = neuraminidase__InfluenzaA__AAN01181
MNPNQKIITIGSVSLTIATICFLMQIAILVTTVTLHFKQYECNSLPNNQVMLCEPTIIERNITEIVYLTNTTIEKEICPKLAEYRNWSKPQCKITGFAPFSKDNSIRLSAGGDIWVTREPYVSCDPDKCYQFALGQGTTLNNRHSNDTVHDRTPYRTLLMNELGVPFHLGTKQVCIAWSSSSCHDGKAWLHVCVTGHDENATASFIYDGRLVDSIGSWSKKILRTQESECVCINGTCTVVMTDGSASGRADTKILFIEEGKIIHISQLSGSAQHVEECSCYPRYPGVRCVCRDNWKGSNRPIVDINVKDYSIVSSYVCSGLVGDTPRKNDSSSSSHCLNPNNEEGGHGVKGWAFDDGNDVWMGRTIGEKFRSGYETFKVIEGWSKPNSKLQINRQVIVDRDNRSGYSGIFSVEGKSCINRCFYVELIRGRKQETEVWWTSNSIVVFCGTSGTYGTGSWPDGADINLMPI

SEQ ID NO: 14053 - protein, 469 aa, synthetic construct; identical to SEQ ID NO: 14040
  REGION 1..469: note = neuraminidase__InfluenzaA__AAN01182

SEQ ID NO: 14054 - protein, 469 aa, synthetic construct; identical to SEQ ID NO: 14040
  REGION 1..469: note = neuraminidase__InfluenzaA__AAN01183

SEQ ID NO: 14055 - protein, 469 aa, synthetic construct; identical to SEQ ID NO: 14040
  REGION 1..469: note = neuraminidase__InfluenzaA__AAN01184

SEQ ID NO: 14056 - protein, 469 aa, synthetic construct; identical to SEQ ID NO: 14040
  REGION 1..469: note = neuraminidase__InfluenzaA__AAN01185

SEQ ID NO: 14057 - protein, 469 aa, synthetic construct
  REGION 1..469: note = neuraminidase__InfluenzaA__AAN01186
MNPNQKIITIGSVSLTIATICFLMQIAILVTTVTLHFKQYECNSLPNNQVMLCEPTIIERNITEIVYLTNTTIEKEICPKLAEYRNWSKPQCKITGFAPFSKDNSIRLSAGGDIWVTREPYVSCDPDKCYQFALGQGTTLNNRHSNDTVHDRTPYRTLLMNELGVPFHLGTKQVCIAWSSSSCHDGKAWLHVCVTGHDENATASFIYDGRLVDSIGSWSKKILRTQESECVCINGTCTVVMTDGSASGRADTKILFIEEGKIIHISQLSGSAQHVEECSCYPRYPGVRCVCRDNWKGSNRPIVDINVKDYSIVSSYVCSGLVGDTPRKNDSSSSSHCLNPNNEEGGHGVKGWAFDDGNDVWMGRTISEKFRLGYETFKVIEGWSKSNSKLQINRQVIVDRDNRSGYSGIFSVEGKSCINRCFYVELIRGRKQETEVWWTSNSIVVFCGTSGTYGTGSWPDGADINLMPI

SEQ ID NO: 14058 - protein, 469 aa, synthetic construct
  REGION 1..469: note = neuraminidase__InfluenzaA__AAN01187
MNPNQKIITIGSVSLTIATICFLMQIAILVTTVTLHFKQYECDSLPNNQVMLCEPTIIERNITEIVYLTNTTIEKEMCPKLAEYRNWSKPQCKITGFAPFSKDNSIRLSAGGDIWVTREPYVSCDPDKCYQFALGQGTTLNNRHSNDTVHDRTPYRTLLMNELGVPFHLGTKQVCIAWSSSSCHDGKAWLHVCVTGHDENATASFIYDGRLVDSIGSWSKKILRTQESECVCINGTCTVVMTDGSASGRADTKILFIEEGKIIHISQMSGSAQHVEECSCYPRYPGVRCVCRDNWKGSNRPIVDINVKDYSIVSSYVCSGLVGDTPRKNDSSSSSHCLNPNNEEGGHGVKGWAFDDGNDVWMGRTISEKFRSGYETFKVIEGWSKPNSKLQINRQVIVDRDNRSGYSGIFSVEGKSCINRCFYVELIRGRKQETEVWWTSNSIVVFCGTSGTYGTGSWPDGADINLMPI

SEQ ID NO: 14059 - protein, 469 aa, synthetic construct; identical to SEQ ID NO: 14040
  REGION 1..469: note = neuraminidase__InfluenzaA__AAN01188

SEQ ID NO: 14060 - protein, 469 aa, synthetic construct
  REGION 1..469: note = neuraminidase__InfluenzaA__AAN64883
MNPNQKIITIGSVSLTIATICFLMQIAILVTTVTLHFKQYECNSPPNNQVMLCEPTIIERNITEIVYLTNTTIEKEICPKLAEYRNWSKPQCNITGFAPFSKDNSIRLSAGGDIWVTREPYVSCDPDKCYQFALGQGTTLNNGHSNDTVHDRTPYRTLLMNELGVPFHLGTKQVCIAWSSSSCHDGKAWLHVCVTGDDENATASFIYNGRLVDSIGSWSKKILRTQESECVCINGTCTVVMTDGSASGKADTKILFIEEGKIVHTSLLSGSAQHVEECSCYPRYPGVRCVCRDNWKGSNRPIVDINVKDYSIVSSYVCSGLVGDTPRKNDSSSSSHCLDPNNEEGGHGVKGWAFDDGDDVWMGRTISEKLRSGYETFKVIEGWSKPNSKLQINRQVIVDRGNRSGYSGIFSVEGKSCINRCFYVELIRGRKQETEVLWTSNSIVVFCGTSGTYGTGSWPDGADINLMPI

SEQ ID NO: 14061 - protein, 469 aa, synthetic construct
  REGION 1..469: note = neuraminidase__InfluenzaA__AAN64884
MNPNQKIITIGSVSLTIATICFLMQIAILVTTVTLHFKQYECNSPPNNQVMLCEPTIIERNITEIVYLTNTTIEKEICPKLAEYRNWSKPQCNITGFAPFSKDNSIRLSAGGDIWVTREPYVSCDPDKCYQFALGQGTTLNNGHSNDTVHDRTPYRTLLMNELGVPFHLGTKQVCIAWSSSSCHDGKAWLHVCVTGDDENATASFIYNGRLVDSIGSWSKKILRTQESECVCINGTCTVVMTDGSASGKADTKILFIEEGKIVHTSLLSGSAQHVEECSCYPRYPGVRCVCRDNWKGSNRPIVDINVKDYSIVSSYVCSGLVGDTPRKNDSSSSSHCLDPNNEEGGHGVKGWAFDDGNDVWMGRTISEKLRSGYETFKVIEGWSKPNSKLQINRQVIVDRGNRSGYSGIFSVEGKSCINRCFYVELIRGRKQETEVLWTSNSIVVFCGTSGTYGTGSWPDGADINLMPI

SEQ ID NO: 14062 - protein, 469 aa, synthetic construct; identical to SEQ ID NO: 14061
  REGION 1..469: note = neuraminidase__InfluenzaA__AAN64885

SEQ ID NO: 14063 - protein, 469 aa, synthetic construct; identical to SEQ ID NO: 14061
  REGION 1..469: note = neuraminidase__InfluenzaA__AAN64886

SEQ ID NO: 14064 - protein, 469 aa, synthetic construct; identical to SEQ ID NO: 14061
  REGION 1..469: note = neuraminidase__InfluenzaA__AAN64887

SEQ ID NO: 14065 - protein, 469 aa, synthetic construct
  REGION 1..469: note = neuraminidase__InfluenzaA__AAN64888
MNPNQKIITIGSVSLTIATICFLMQIVILVTTVTLHFKQYECNSPPNNQVMLCEPTIIERNITEIVYLTNTTIEKEICPKLAEYRNWSKPQCNITGFAPFSKDNSIRLSAGGDIWVTREPYVSCDPDKCYQFALGQGTTLNNGHSNDTVHDRTPYRTLLMNELGVPFHLGTKQVCIAWSSSSCHDGKAWLHVCVTGDDKNATASFIYNGRLVDSIGSWSKKILRTQESECVCINGTCTVVMTDGSASGKADTKILFIEEGKIVHTSLLSGSAQHVEECSCYPRYPGVRCVCRDNWKGSNRPIVDINVKDYSIVSSYVCSGLVGDTPRKNDSSSSSHCLDPNNEEGGHGVKGWAFDDGNDVWMGRTISEKLRSGYETFKVIEGWSKPNSKLQINRQVIVDRGNRSGYSGIFSVEGKSCINRCFYVELIRGRNQETEVLWTSNSIVVFCGTSGTYGTGSWPDGADINLMPI

SEQ ID NO: 14066 - protein, 469 aa, synthetic construct; identical to SEQ ID NO: 14061
  REGION 1..469: note = neuraminidase__InfluenzaA__AAN64889

SEQ ID NO: 14067 - protein, 469 aa, synthetic construct
  REGION 1..469: note = neuraminidase__InfluenzaA__AAN64890
MNPNQKIITIGSVSLTIATICFLMQIAILVTTVTLHFKQYECNSPPNNQEMLCEPTIIERNITEIVYLTNTTIEKEICPKLAEYRNWSKPQCNITGFAPFSKDNSIRLSAGGDIWVTREPYVSCDPDKCYQFALGQGTTLNNGHSNDTVHDRTPYRTLLMNELGVPFHLGTKQVCIAWSSSSCHDGKAWLHVCVTGDDENATASFIYNGRLVDSIGSWSKKILRTQESECVCINGTCTVVMTDGSASGKADTKILFIEEGKIVHTSLLSGSAQHVEECSCYPRYPGVRCVCRDNWKGSNRPIVDINVKDYSIVSSYVCSGLVGDTPRKNDSSSSSHCLDPNNEEGGHGVKGWAFDDGNDVWMGRTISEKLRSGYETFKVIEGWSKPNSKLQINRQVIVDRGNRSGYSGIFSVEGKSCINRCFYVELIRGRKQETEVLWTSNSIVVFCGTSGTYGTGSWPDGADINLMPI

SEQ ID NO: 14068 - protein, 469 aa, synthetic construct; identical to SEQ ID NO: 14061
  REGION 1..469: note = neuraminidase__InfluenzaA__AAN64891

SEQ ID NO: 14069 - protein, 469 aa, synthetic construct
  REGION 1..469: note = neuraminidase__InfluenzaA__AAO46212
MNPNQKIITIGSVSLTIETVCFLMQIAILATTVTLHFKQHECDSPASNQVMPCEPIIIERNITEIVYLNNTTIEKEICPEVVEYRNWSKPQCQITGFAPFSKDNSIRLSAGGDIWVTREPYVSCDTGKCYQFALGQGTTLDNKHSNGTIHDRIPHRTLLMNELGVPFHLGTKQVCVAWSSSSCHDGKAWLHVCVTGDDRNATASFIYDGRLVDSIGSWSQNILRTQESECVCINGTCTVVMTDGSASGRADTRILFIKEGKIVHISPLSGSAQHIEECSCYPRYPDVRCICRDNWKGSNRPVIDINMEDYSIDSSYVCSGLVGDTPRNDDSSSNSNCRDPNNERGNPGVKGWAFDNGDDVWMGRTISKDLRSGYETFKVIGGWSTPNSKSQVNRQVIVDNNNWSGYSGIFSVEGKSCINRCFYVELIRGRPQETRVWWTSNSIVVFCGTSGTYGTGSWPDGANINFMPI

SEQ ID NO: 14070 - protein, 469 aa, synthetic construct
  REGION 1..469: note = neuraminidase__InfluenzaA__AAO46213
MNPNQKIITIDSVSLTIATVCFLMQIAILATTVTLHFKQHECDSPASNQVMPCEPIIIERNITEIVYLNNTTIEKEICPEVVEYRNWSKPQCQITGFAPFSKDNSIRLSAGGDIWVTREPYVSCDTGKCYQFALGQGTTLDNKHSNGTIHDRIPHRTLLMNELGVPFHLGTKQVCVAWSSSSCHDGKAWLHVCVTGDDRNATASFIYDGRLVDSIGSWSQNILRTQESECVCINGTCTVVMTDGSASGRADTRILFIKEGKIVHISPLSGSAQHIEECSCYPRYPDVRCICRDNWKGSNRPVIDINMEDYSIDSSYVCSGLVGDTPRNDDSSSNSNCRDPNNERGNPGVKGWAFDNGDDVWMGRTISKDLRSGYETFKVIGGWSTPNSKSQVNRQVIVDNNNWSGYSGIFSVEGKSCINRCFYVELIRGRPQETRVWWTSNSIVVFCGTSGTYGTGSWPDGANINFMPI

SEQ ID NO: 14071 - protein, 469 aa, synthetic construct
  REGION 1..469: note = neuraminidase__InfluenzaA__AAO46214
MNPNQKIITIGSVSLTIATVCFLMQIAILATTVTLHFKQHECDSPASNQVMPCEPIIIERNITEIVYLNNTTIEKEICPEAVEYRNWSKPQCQITGFAPFSKDNSIRLSAGGDIWVTREPYVSCDPGKCYQFALGQGTTLDNKHSNGTIHDRIPHRTLLMNELGVPFHLGTKQVCVAWSSSSCHDGKAWLHVCVTGDDRNATASFIYDGRLVDSIGSWSQNILRTQESECVCINGICTVVMTDGSASGRADTRILFIEEGKIVHISPLSGSAQHVEECSCYPRYPDVRCICRDNWKGSNRPVIDINMEDYSIDSSYVCSGLVGDTPRNDDRSSNSNCRDPNNERGNPGVKGWAFDNGDDVWMGRTISKDLRSGYETFKVIGGWSTPNSKSQVNRQVIVDNNNWSGYSGIFSVEGKSCINRCFYVELIRGRQQETRVWWTSNSIVVFCGTSGTYGTGSWPDGANINFMPI

SEQ ID NO: 14072 - protein, 469 aa, synthetic construct
  REGION 1..469: note = neuraminidase__InfluenzaA__AAO46215
MNPNQKIITIGSVSLTIATVCFLMQIAILATTVTLHFKQHECDSPTSNQVMPCEPIIIERNITEIVYLNNTTIEKEICPEVVEYRNWSKPQCQITGFAPFSKDNSIRLSAGGDIWVTREPYVSCDPGKCYQFALGQGTTLDNKHSNGTIHDRIPHRTLLMNELGVPFHLGTKQVCVAWSSSSCHDGKAWLHVCVTGDDRNATASFIYDGRLVDSIGSWSQNILRTQESECVCINGTCTVVMTDGSASGRADTRILFIKEGKIVHISPLSGSAQHIEECSCYPRYPDVRCICRDNWKGSNRPVIDINMEDYSIDSSYVCSGLVGDTPRNGDSSSNSNCRDPNNERGNPGVKGWAFDNGDDVWMGRTISKESRSGYETFKVIGGWSTPNSKSQVNRQVIVDNNNWSGYSGIFSVEGKSCINRCFYVELIRGRPQETRVWWTSNSIVVFCGTSGTYGTGSWPDGANINFMPI

SEQ ID NO: 14073 - protein, 469 aa, synthetic construct
  REGION 1..469: note = neuraminidase__InfluenzaA__AAO46216
MNPNQKIITIGSVSLTIATVCFLMQIAILATTVTLHFKQHECDSPASNQVMPCEPIIIERNITEIVYLNNTTIEKEICPEVVEYRNWSKPQCQITGFAPFSKDNSIRLSAGGDIWVTREPYVSCDPSKCYQFALGQGTTLENKHSNGTKHDRIPHRTLLMNELGVPFHLGTKQVCVAWSSSSCHDGKAWLHVCVTGDDRNATASFIYEGRLVDSIVSWSQNILRTQESECVCINGTCTVVMTDGSASGRADTRILFIKEGKIVHISPLSGSAQHIEECSCYPRYPDVRCICRDNWKGSNRPVIDINMEDYSIDSSYVCSGLVGDTPRNDDSSSNSNCRDPNNERGNPGVKGWAFDNGDDVWMGRTISKDSRSGYETFKVIGGWSTPNSKSQVNRQVIVDSNNWSGYSGIFSVEGKSCINRCFYVELIRGRPQETRVWWTSNSIVVFCGTSGTYGTGSWPDGANINFMPI

SEQ ID NO: 14074 - protein, 469 aa, synthetic construct
  REGION 1..469: note = neuraminidase__InfluenzaA__AAO46217
MNPNQKIITIGSVSLTIATVCFLMQIAILATTVTLHFKQHECDSPASNQVMPCEPIIIERNITEIVYLNNTTIEKEICPEVVEYRNWSKPQCQITGFAPFSKDNSIRLSAGGDIWVTREPYVSCDPSKCYQFALGQGTTLDNKHSNGTIHDRIPHRTLLMNELGVPFHLGTKQVCVAWSSSSCHDGKAWLHVCVTGDDRNATASFIYDGRLEDSIGSWSQNILRTQESECVCINGTCTVVMTDGSASGRADTRILFIKEGKIVHISPLSGSAQHIEECSCYPRYPDVRCICRDNWKGSNRPVLDISMEDYSIDSSYVCSGLVGDTPRNDDSSSNSNCRDPNNERGNPGVKGWAFDNGDDVWMGRTISKDLRSGYETFKVIGGWSTPNSKSQVNRQVIVDNNNWSGYSGIFSVEGKSCINRCFYVELIRGRSQETRVWWTSNSIVVFCGTSGTYGTGSWPDGANINFMPI

SEQ ID NO: 14075 - protein, 469 aa, synthetic construct
  REGION 1..469: note = neuraminidase__InfluenzaA__AAO46218
MNPNQKIITIGSVSLTIATVCFLMQIAILATTVTLHFKQHECDSPASNQVMPCEPIIIERNITEIVYLNNTTIEKEICPEVVEYRNWSKPQCQITGFAPFSKDNSIRLSAGGDIWVTREPYVSCDPGKCYQFALGQGTTLDNKHSNGTIHDRIPHRTLLMNELGVPFHLGTKQVCVAWSSSSCHDGKAWLHVCVTGDDRNATASFIYDGRLEDSIGSWSQNILRTQESECVCINGTCTVVMTDGSASGRADTRILFIKEGKIVHISPLSGSAQHIEECSCYPRYPDVRCICRDNWKGSNRPVLDISMEDYSIGSSYVCSGLVGDTPRNDDSSSNSNCRDPNNERGNPGVKGWAFDNGDDVWMGRTISKDLRSGYETFKVIGGWSTPNSKSQVNRQVIVDNNNWSGYSGIFSVEGKSCINRCFYVELIRGRSQETRVWWTSNSIVVFCGTSGTYGTGSWPDGANINFMPI

SEQ ID NO: 14076 - protein, 469 aa, synthetic construct
  REGION 1..469: note = neuraminidase__InfluenzaA__AAO46220
MNPNQKIITIGSVSLTIATVCFLMQIAILATTVTLHFKQHECDSPASNQVMPCEPIIIERNITEIVYLNNTTIEKEICPEAVEYRNWSKPQCQITGFAPFSKDNSIRLSAGGDIWVTREPYVSCDPGKCYQFALGQGTTLDNKHSNDTIHDRIPHRTLLMNELGVPFHLGTRQVCVAWSSSSCHDGKAWLHVCVTGDDRNATASFIYDGRLVDSIGSWSQNILRTQESECVCINGICTVVMTDGSASGRADTRILFIEEGKIVHISPLSGSAQHVEECSCYPRYPDVRCICRDNWKGSNRPVIDINMEDYSIDSSYVCSGLVGDTPRNDDRSSNSNCRDPNNERGNPGVKGWAFDNGDDVWMGRTISKDLRSGYETFKVIGGWSTPNSKSQVNRQVIVDNNNWSGYSGIFSVEGKSCINRCFYVELIRGRQQETRVWWTSNSIVVFCGTSGTYGTGSWPDGANINFMPI

SEQ ID NO: 14077 - protein, 469 aa, synthetic construct
  REGION 1..469: note = neuraminidase__InfluenzaA__AAO46221
MNPNQKIITIGSVSLTIATVCFLMQIAILATTVTLHFKQHECDSPASNQVMPCEPIIIERNITEIVYLNNTTIEKEICPEAAEYRNWSKPQCQITGFAPFSKDNSIRLSAGGDIWVTREPYVSCDPGKCYQFALGQGTTLDNKHSNDTIHDRIPHRTLLMNELGVPFHLGTRQVCVAWSSSSCHDGKAWLHVCVTGDDRNATASFIYDGRLVDSIGSWSQNILRTQESECVCINGICTVVMTDGSASGRADTRILFIEEGKIVHISPLSGSAQHVEECSCYPRYPDVRCICRDNWKGSNRPVIDINMEDYSIDSSYVCSGLVGDTPRNDDRSSNSNCRDPNNERGNPGVKGWAFDNGDDVWMGRTISKDLRSGYETFKVIGGWSTPNSKSQVNRQVIVDNNNWSGYSGIFSVEGKSCINRCFYVELIRGRQQETRVWWTSNSIVVFCGTSGTYGTGSWPDGANINFMPI

SEQ ID NO: 14078 - protein, 469 aa, synthetic construct
  REGION 1..469: note = neuraminidase__InfluenzaA__AAO46223
MNPNQKIITIGSVSLTIATVCFLMQIAILVTTVTLHFKQHECDSPASNQVMPCEPIIIERNITEIVYLNNTTIEKEICPEVVEYRNWSKPQCQITGFAPFSKDNSIRLSAGGDIWVTREPYVSCDPGKCYQFALGQGTTLDNKHSNDTIHDRIPHRTLLMNELGVPFHLGTRQVCVAWSSSSCHDGKAWLHVCVTGDDKNATASFIYDGRLVDSIGSWSQNILRTQESECVCINGTCTVVMTDGSASGRADTRILFIEEGKIVHISPLSGSAQHVEECSCYPRYPDVRCICRDNWKGSNRPVIDINMEDYSIDSSYVCSGLVGDTPRNDDRSSNSNCRDPNNERGNPGVKGWAFDNGDDVWMGRTISKDLRSGYETFKVIGGWSTPNSKSQINRQVIVDSNNWSGYSGIFSVEGKSCINRCFYVELIRGRKQETRVWWTSNSIVVFCGTSGTYGTGSWPDGANINFMPI

SEQ ID NO: 14079 - protein, 469 aa, synthetic construct; identical to SEQ ID NO: 14078
  REGION 1..469: note = neuraminidase__InfluenzaA__AAO46224

SEQ ID NO: 14080 - protein, 469 aa, synthetic construct
  REGION 1..469: note = neuraminidase__InfluenzaA__AAO46225
MNPNQKIITIGFVSLIIATVCFLMQIAILATTVTLHFKQHECDSPASNQVMPCEPIIIERNITKIVYLNNTTIEKEICPEVVEYRNWSKPQCHITGFAPFSKDNSIRLSAGGDIWVTREPYVSCDPGKCYQFALGQGTTLDNKHSNDTIHDRIPHRTLLMNELGVPFHLGTRQVCVAWSSSSCHDGKAWLHVCVTGDDKNATASFIYDGRLVDSIGSWSHNILRTQESECVCINGTCTVVMTDGSASGRADTRILFIKEGKIVHISPLSGSAQHVEECSCYPRYPDVRCICRDNWKGSNRPVIDINMEDYSIDSSYVCSGLVGDTPRNNDGSSNSNCRDPNNERGNPGVKGWAFDNGDDVWMGRTISKDLRSGYETFKVIGGWSTPNSKSQVNRQVIVDNNNWSGYSGIFSVEGKSCINRCFYVELIRGRQQETRVWWTSNSIVVFCGTSGTYGTGSWPDGANINFMPI

SEQ ID NO: 14081 - protein, 469 aa, synthetic construct
  REGION 1..469: note = neuraminidase__InfluenzaA__AAO46226
MNPNQKIITIGSVSLTIATVCFLMQIAILVTTVTLHFKQHECDSPASNQVMPCEPIIIERNITEIVYLNNTTIEKEICPEVVEYRNWSKPQCQITGFAPFSKDNSIRLSAGGDIWVTREPYVSCDPGKCYQFALGQGTTLDNKHSNDTIHDRIPHRTLLMNELGVPFHLGTRQVCVAWSSSSCHDGKAWLHVCVTGDDENATASFIYDGRLVDSIGSWSQNILRTQESECVCINGTCTVVMTDGSASGRADTRILFIEEGKIVHISPLSGSAQHVEECSCYPRYPDVRCICRDNWKGSNRPVIDINMEDYSIDSSYVCSGLVGDTPRNDDRSSNSNCRDPNNERGNPGVKGWAFDNGDDVWMGRTISKDLRSGYETFKVIGGWSTPNSKSQINRQVIVDSNNWSGYSGIFSVEGKSCINRCFYVELIRGRQQETRVWWTSNSIVVFCGTSGTYGTGSWPDGANINFMPI

SEQ ID NO: 14082 - protein, 469 aa, synthetic construct
  REGION 1..469: note = neuraminidase__InfluenzaA__AAO46229
MNPNQKIITIGSVSLTIATVCFLMQIAILVTTVTLHFKQHECDSPASNQVMPCEPIIIERNITEIMYLNNTTIEKEICPEVVEYRNWSKPQCQITGFAPFSKDNSIRLSAGGDIWVTREPYVSCDPGKCYQFALGQGTTLDNKHSNDTIHDRIPHRTLLMNELGVPFHLGTRQVCVAWSSSSCHDGKAWLHVCVTGDDKNATASFIYDGRLVDSIGSWSQNILRTQESECVCINGTCTVVMTDGSASGRADTRILFIEEGKIVHISPLSGSAQHVEECSCYPRYPDVRCICRDNWKGSNRPIIDINMEDYSIDSSYVCSGLVGDTPRNDDRSSNSNCRNPNNERGNPGVKGWAFDNGDDVWMGRTISKDLRSGYETFKVIGGWSTPNSKSQINRQVIVDSNNWSGYSGIFSVEGKSCINRCFYVELIRGRQQETRVWWTSNSIVVFCGTSGTYGTGSWPDGANINFMPI

SEQ ID NO: 14083 - protein, 469 aa, synthetic construct
  REGION 1..469: note = neuraminidase__InfluenzaA__AAO46230
MNPNQKIITIGSVSLTIATVCFLMQIAILVTTVTLHFKQHECDSPASNQVMPCEPIIIERNLTEIVYLNNTTIEKEICPEVVEYRNWSKPQCQITGFAPFSKDNSIRLSAGGDIWVTREPYVSCDPGKCYQFALGQGTTLDNKHSNDTIHDRIPHRTLLMNELGVPFHLGTRQVCVAWSSSSCHDGKAWLHVCVTGDDKNATASFIYDGRLVDSIGSWSQNILRTQESECVCINGTCTVVMTDGSASGRADTRILFIEEGKIVHISPLSGSAQHVEECSCYPRYPDVRCICRDNWKGSNRPVIDINMEDYSIDSSYVCSGLVGDTPRNDDRSSNSNCRDPNNERGNPGVKGWAFDNGDDVWMGRTISKDLRSGYETFKVIGGWSTPNSKSQINRQVIVDSNNWSGYSGIFSVEGKSCINRCFYVELIRGRQQETRVWWTSNSIVVFCGTSGTYGTGSWPDGANINFMPI

SEQ ID NO: 14084 - protein, 469 aa, synthetic construct
  REGION 1..469: note = neuraminidase__InfluenzaA__AAO46231
MNPNQKIITIGSVSLTIATVCFLMQIAILVTTVTLHFKQHDCDSPASNQVMPCEPIIIERNITEIVYLNNTTIEKEICPKVVEYRNWSKPQCQITGFAPFSKDNSIRLSAGGDIWVTREPYVSCDPVKCYQFALGQGTTLDNKHSNDTVHDRIPHRTLLMNELGVPFHLGTRQVCIAWSSSSCHDGKAWLHVCVTGDDKNATASFIYDGRLVDSIGSWSQNILRTQESECVCINGTCTVVMTDGSASGRADTRILFIEEGKIVHISPLSGSAQHVEECSCYPRYPDVRCICRDNWKGSNRPVIDINMEDYSIDSSYVCSGLVGDTPRNDDRSSNSNCRNPNNERGNPGVKGWAFDNGDDVWMGRTISKDLRSGYETFKVIGGWSTPNSKSQINRQVIVDSNNWSGYSGIFSVEGKSCINRCFYVELIRGRQQETRVWWTSNSIVVFCGTSGTYGTGSWPDGANINFMPI

SEQ ID NO: 14085 - protein, 469 aa, synthetic construct
  REGION 1..469: note = neuraminidase__InfluenzaA__AAO46232
MNPNQKIITIGSVSLTIATVCFLMQIAILVTTVTLHFKQHECDSPASNQVMPCEPTIIERNITEIVYLNNTTIEKEICPKVVEYRNWSKPQCQITGFAPFSKDNSIRLSAGGDIWVTREPYVSCDPGKCYQFALGQGTTLDNKHSNDTIHDRIPHRTLLMNELGVPFHLGTRQVCIAWSSSSCHDGKAWLHVCVTGDDKNATASFIYDGRLVDSIGSWSQNILRTQESECVCINGTCTVVMTDGSASGRADTRILFIEEGKIVHISPLSGSAQHVEECSCYPRYPDVRCICRDNWKGSNRPIIDINMEDYSIDSSYVCSGLVGDTPRNDDRSSNSNCRNPNNERGNPGVKGWAFDNGDDVWMGRTISKDLRSGYETFKVIGGWSTPNSKSQINRQVIVDSNNWSGYSGIFSVEGKSCINRCFYVELIRGRQQETRVWWTSNSIVVFCGTSGTYGTGSWPDGANINFMPI

SEQ ID NO: 14086 - protein, 469 aa, synthetic construct
  REGION 1..469: note = neuraminidase__InfluenzaA__AAO46233
MNPNQKIITIGSVSLTIAAVCFLMQIAILVTTVTLHFKQHECDSPASNQVMPCEPIIIERNITEIVYLNNTTIEKEICPKVVEYRNWSKPQCQITGFAPFSKDNSIRLSAGGDIWVTREPYVSCDPGKCYQFALGQGTTLDNKHSNDTIHDRIPHRTLLMNELGVPFHLGTRQVCIAWSSSSCHDGKAWLHVCVTGDDKNATASFIYDGRLVDSIGSWSQNILRTQESECVCINGTCTVVMTDGSASGRADTRILFIEEGKIVHISPLSGSAQHVEECSCYPRYPDVRCICRDNWKGSNRPVVDINMEDYSIDSSYVCSGLVGDTPRNDDRSSNSNCRNPNNERGNPGVKGWAFDNGDDVWMGRTISKDLRSGYETFKVIGGWSTPNSKSQINRQVIVDSNNRSGYSGIFSVEGKGCINRCFYVELIRGRQQETRVWWTSNSIVVFCGTSGTYGTGSWPDGANINFMPI

SEQ ID NO: 14087 - protein, 469 aa, synthetic construct
  REGION 1..469: note = neuraminidase__InfluenzaA__AAO46235
MNPNQKIITIGSVSLTIATVCFLMQIAILVTTVTLHFKQHECDSPASNQVMPCEPIIIERNITEIVYLNNTTIEKEICPKVVEYRNWSKPQCQITGFAPFSKDNSIRLSAGGDIWVTREPYVSCDPGKCYQFALGQGTTLDNKHSNDTIHDRIPHRTLLMNELGVPFHLGTRQVCIAWSSSSCHDGKAWLHVCITGDDKNATASFIYDGRLVDSIGSWSQNILRTQESECVCINGTCTVVMTDGSASGRADTRILFIEEGKIVHISPLSGSAQHVEECSCYPRYPGVRCICRDNWKGSNRPVVDINMEDYSIDSSYVCSGLVGDTPRNDDRSSNSNCRNPNNERGNQGVKGWAFDNGDDVWMGRTISKDLRSGYETFKVIGGWSTPNSKSQINRQVIVDSDNRSGYSGIFSVEGKSCINRCFYVELIRGRKQETRVWWTSNSIVVFCGTSGTYGTGSWPDGANINFMPI

SEQ ID NO: 14088 - protein, 469 aa, synthetic construct
  REGION 1..469: note = neuraminidase__InfluenzaA__AAO46236
MNPNQKIITIGSVSLTIATVCFLMHIAILVTTVTLHFKQHECDSPASNQVMPCEPIIIERNITEIVYLNNTTIEKEICPKVVEYRNWSKPQCQITGFAPFSKDNSIRLSAGGDIWVTREPYVSCDPGKCYQFALGQGTTLDNKHSNDTIHDRIPHRTLLMNELGVPFHLGTRQVCIAWSSSSCHDGKAWLHVCITGDDKNATASFIYDGRLVDSIGSWSQNILRTQESECVCINGTCTVVMTDGSASGRADTRILFIEEGKIVHISPLSGSAQHVEECSCYPRYPGVRCICRDNWKGSNRPVVDINMEDYSIDSSYVCSGLVGDTPRNDDRSSNSNCRNPNNERGNQGVKGWAFDNGDDVWMGRTISKDLRSGYETFKVIGGWSTPNSKSQINRQVIVDSDNRSGYSGIFSVEGKSCINRCFYVELIRGRKQETRVWWTSNSIVVFCGTSGTYGTGSWPDGANINFMPI

SEQ ID NO: 14089 - protein, 469 aa, synthetic construct
  REGION 1..469: note = neuraminidase__InfluenzaA__AAO46237
MNPNQKIITIGSVSLTIATVCFLMQIAILVTTVTLHFKQHECDSPASNQVMPCEPIIIERNITEIVYLNNTTIEKEICPKIVEYRNWSKPQCQITGFAPFSKDNSIRLSAGGDIWVTREPYVSCDPGKCYQFALGQGTTLDNKHSNDTIHDRIPHRTLLMNELGVPFHLGTRQVCIAWSSSSCHDGKAWLHVCITGDDKNATASFIYDGRLVDSIGSWSQNILRTQESECVCINGTCTVVMTDGSASGRADTRILFIEEGKIVHISPLSGSAQHVEECSCYPRYPGVRCICRDNWKGSNRPVVDINMEDYSIDSSYVCSGLVGDTPRNDDRSSNSNCRNPNNERGNQGVKGWAFDNGDDVWMGRTISKDLRSGYETFKVIGGWSTPNSKSQINRQVIVDSDNRSGYSGIFSVEGKSCINRCFYVELIRGRKQETRVWWTSNSIVVFCGTSGTYGTGSWPDGANINFMPI

SEQ ID NO: 14090 - protein, 469 aa, synthetic construct
  REGION 1..469: note = neuraminidase__InfluenzaA__AAO46238
MNPNQKIITIGSASLTIATVCFLMQIAILVTTVTLHFKQHECDSPASNQVMPCEPIIIERNITEIVYLNNTTIEKEICPKIVEYRNWSKPQCKITGFAPFSKDNSIRLSAGGDIWVTREPYVSCDPGKCYQFALGQGTTLDNKHSNDTIHDRIPHRTLLMNELGVPFHLGTRQVCIAWSSSSCHDGKAWLHVCVTGDDKNATASFIYDGRLVDSIGSWSQNILRTQESECVCINGTCTVVMTDGSASGRADTRILFIEEGKIVHISPLSGSAQHVEECSCYPRYPDVRCICRDNWKGSNRPVVDINMEDYSIDSSYVCSGLVGDTPRNDDRSSNSNCRNPNNEKGNQGVKGWAFDNGDDVWMGRTISKDLRSGYETFKVIGGWSTPNSKSQINRQVIVDSDNRSGYSGIFSVEGKSCINRCFYVELIRGRKQETRVWWTSNSIVVFCGTSGTYGTGSWPDGANINLMPI

SEQ ID NO: 14091 - protein, 469 aa, synthetic construct
  REGION 1..469: note = neuraminidase__InfluenzaA__AAO46241
MNPNQKIITIGSVSLTIATVCFLMQIAILVTTVTLHFKQHECDSPASNQVMPCEPIIIERNITEIVYLNNTTIEKEICPKVVGYRNWSKPQCQITGFAPFSKDNSIRLSAGGDIWVTREPYVSCDPGKCYQFALGQGTTLDNKHSNDTIHDRIPHRTLLMNELGVPFHLGTRQVCIAWSSSSCHDGKAWLHVCITGDDKNATASFIYDGRLVDSIGSWSQNILRTQESECVCINGTCTVVMTDGSASGRADTRILFIEEGKIVHISPLSGSAQHVEECSCYPRYPGVRCICRDNWKGSNRPVVDINMEDYSIDSSYVCSGLVGDTPRNDDRSSNSNCRNPNNERGNQGVKGWAFDNGDDVWMGRTISKDLRSGYETFKVIGGWSTPNSKSQINRQVIVDSDNRSGYSGIFSVEGKSCINRCFYVELIRGRKQETRVWWTSNSIVVFCGTSGTYGTGSWPDGANINFMPI

SEQ ID NO: 14092 - protein, 469 aa, synthetic construct
  REGION 1..469: note = neuraminidase__InfluenzaA__AAO46245
MNPNQKIITIGSVSLTIATVCFLMQIAILVTTVTLHFKQHDCDSPASNQVMPCEPIIIERNITEIVYLNNTTIEKEICPKVVEYRNWSKPQCQITGFAPFSKDNSIRLSAGGDIWVTREPYVSCDPVKCYQFALGQGTTLDNKHSNDTVHDRIPHRTLLMNELGVPFHLGTRQVCIAWSSSSCHDGKAWLHVCITGDDKNATASFIYDGRLVDSIGSWSQNILRTQESECVCINGTCTVVMTDGSASGRADTRILFIEEGKIVHISPLAGSAQHVEECSCYPRYPGVRCICRDNWKGSNRPVVDINMEDYSIDSSYVCSGLVGDTPRNDDRSSNSNCRNPNNERGTQGVKGWAFDNGNDLWMGRTISKDLRSGYETFKVIGGWSTPNSKSQINRQVIVDSDNRSGYSGIFSVEGKSCINRCFYVELIRGRKQETRVWWTSNSIVVFCGTSGTYGTGSWPDGANINFMPI

SEQ ID NO: 14093 - protein, 469 aa, synthetic construct
  REGION 1..469: note = neuraminidase__InfluenzaA__AAO46246
MNPNQKIITIGSVSLTIATVCFLMQIAILATTVTLHFKQHECDSPASNQVMPCEPIIIERNITEIVYLNNTIIEKEICPKVVEYRNWSKPQCQITGFAPFSKDNSIRLSAGGDIWVTREPYVSCDPGKCYQFALGQGTTLDNKHSNDTIHDRTPHRTLLMNELGVPFHLGTRQVCIAWSSSSCHDGKAWLHVCITGDDKNATASFIYDGRLVDSIGSWSQNILRTQESECVCINGTCTVVMTDGSASGRADTRILFIEEGKIVHISPLSGSAQHVEECSCYPRYPGVRCICRDNWKGSNRPVVDINMEDYSIDSSYVCSGLVGDTPRNDDRSSNSNCRNPNNERGNQGVKGWAFDNGDDVWMGRTISKDLRSGYETFKVIGGWSTPNSKSQINRQVIVDSDNRSGYSGIFSVEGKSCINRCFYVELIRGRKQETRVWWTSNSIAVFCGTSGTYGTGSWPDGANINFMPI

SEQ ID NO: 14094 - protein, 469 aa, synthetic construct
  REGION 1..469: note = neuraminidase__InfluenzaA__AAO46247
MNPNQKIITIGSVSLTIATVCFLMQIAILVTTVTLHFKQHECDSPASNQVMPCEPIIIERNITEIVYLNNTTIEKEICPKVVEYRNWSKPQCQITGFAPFSKDNSIRLSAGGDIWVTREPYVSCDPGKCYQFALGQGTTLDNKHSNDTIHDRIPHRTLLMNELGVPFHLGTRQVCIAWSSSSCHDGKAWLHVCITGDDKNATASFIYDGRLVDSIGSWSQNILRTQESECVCINGTCTVVMTDGSASGRADTRILFIEEGKIVHISPLSGSAQHVEECSCYPRYPGVRCICRDNWKGSNRPVIDINMEDYSIDSSYVCSGLVGDTPRNDDRSSNSNCRNPNNERGNQGVKGWAFDNGDDVWMGRTISKDLRSGYETFKVIGGWSTPNSKSQINRQVIVDSDNRSGYSGIFSVEGKSCINRCFYVELIRGRKQETRVWWTSNSIVVFCGTSGTYGTGSWPDGANINFMPI

SEQ ID NO: 14095 - protein, 469 aa, synthetic construct
  REGION 1..469: note = neuraminidase__InfluenzaA__AAO46462
MNPNQKIITIGSVSLTIATVCFLMQIAILVTTVTLHFKQYECDSPASNQVMPCEPIIIERNITEIVYLNNTTIEKEICPKVVEYRNWSKPQCQITGFAPFSKDNSIRLSAGGDIWVTREPYVSCDHGKCYQFALGQGTTLDNKHSNDTIHDRIPHRTLLMNELGVPFHLGTRQVCIAWSSSSCHDGKAWLHVCITGDDKNATASFIYDGRLVDSIGSWSQNILRTQESECVCINGTCTVVMTDGSASGRADTRILFIEEGKIVHISPLSGSAQHVEECSCYPRYPGVRCICRDNWKGSNRPVVDINMEDYSIDSSYVCSGLVGDTPRNDDRSSNSNCRNPNNERGNQGVKGWAFDNGDDVWMGRTISKDLRSGYETFKVIGGWSTPNSKSQINRQVIVDSDNRSGYSGIFSVEGKSCINRCFYVELIRGRKQETRVWWTSNSIVVFCGTSGTYGTGSWPDGANINFMPI

SEQ ID NO: 14096 - protein, 469 aa, synthetic construct; identical to SEQ ID NO: 14095
  REGION 1..469: note = neuraminidase__InfluenzaA__AAO46463

SEQ ID NO: 14097 - protein, 469 aa, synthetic construct; identical to SEQ ID NO: 14095
  REGION 1..469: note = neuraminidase__InfluenzaA__AAO46464

SEQ ID NO: 14098 - protein, 469 aa, synthetic construct; identical to SEQ ID NO: 14095
  REGION 1..469: note = neuraminidase__InfluenzaA__AAO46465

SEQ ID NO: 14099 - protein, 469 aa, synthetic construct; identical to SEQ ID NO: 14095
  REGION 1..469: note = neuraminidase__InfluenzaA__AAO46466

SEQ ID NO: 14100 - protein, 469 aa, synthetic construct
  REGION 1..469: note = neuraminidase__InfluenzaA__AAO46467
MNPNQKIITIGSVSLTIATVCFLMQIAILVTTVTLHFKQYECDSPASNQVMPCEPIIIERNITEIVYLNNTTIEKEICPKVVEYRNWSKPQCQITGFAPFSKDNSIRLSAGGDIWVTREPYVSCDHGKCYQFALGQGTTLDNKHSNDTIHDRIPHRTLLMNELGVPFHLGTRQVCIAWSSSSCHDGKAWLHVCITGDDKNATASFIYDGRLVDSIGSWSQNILRTQESECVCINGTCTVVMTDGSASGRADTRILFIEEGKIVHISPLTGSAQHVEECSCYPRYPGVRCICRDNWKGSNRPVVDINMEDYSIDSSYVCSGLVGDTPRNDDRSSNSNCRNPNNERGNQGVKGWAFDNGDDVWMGRTISKDLRSGYETFKVIGGWSTPNSKSQINRQVIVDSDNRSGYSGIFSVEGKSCINRCFYVELIRGRKQETRVWWTSNSIVVFCGTSGTYGTGSWPDGANINFMPI

SEQ ID NO: 14101 - protein, 469 aa, synthetic construct
  REGION 1..469: note = neuraminidase__InfluenzaA__AAO46468
MNPNQKIITIGSVSLTIATVCFLMQIAILVTTVTLHFKQYECDFPASNQVMPCEPIIIERNITEIVYLNNTTIEKEICPKVVEYRNWSKPQCQITGFAPFSKDNSIRLSAGGDIWVTREPYVSCDHGKCYQFALGQGTTLDNKHSNDTIHDRIPHRTLLMNELGVPFHLGTRQVCIAWSSSSCHDGKAWLHVCITGDDKNATASFIYDGRLVDSIGSWSQNILRTQESECVCINGTCTVVMTDGSASGRADTRILFIEEGKIVHISPLSGSAQHVEECSCYPRYPGVRCICRDNWKGSNRPVVDINMEDYSIDSSYVCSGLVGDTPRNDDRSSNSNCRNPNNERGNQGVKGWAFDNGDDVWMGRTISKDLRSGYETFKVIGGWSTPNSKSQINRQVIVDSDNRSGYSGIFSVEGKSCINRCFYVELIRGRKQETRVWWTSNSIVVFCGTSGTYGTGSWPDGANINFMPI

SEQ ID NO: 14102 - protein, 469 aa, synthetic construct; identical to SEQ ID NO: 14095
  REGION 1..469: note = neuraminidase__InfluenzaA__AAO46469

SEQ ID NO: 14103 - protein, 469 aa, synthetic construct
  REGION 1..469: note = neuraminidase__InfluenzaA__AAO46471
MNPNQKIITIGSVSLTIATVCFLMQIAILVTTVTLHFKQYECDSPASNQVMPCEPIIIERNITEIVYLNNTTIEKEICPKVVEYRNWSKPQCQITGFAPFSKDNSIRLSAGGDIWVTREPYVSCDPGKCYQFALGQGTTLDNKHSNDTIHDRIPHRTLLMNELGVPFHLGTRQVCIAWSSSSCHDGKAWLHVCITGDDKNATASFIYDGRLVDSIGSWSQNILRTQESECVCINGTCTVVMTDGSASGRADTRILFIEEGKIVHISPLSGSAQHVEECSCYPRYPGVRCICRDNWKGSNRPVVDINMEDYSIDSSYVCSGLVGDTPRNDDRSSNSNCRNPNNERGNQGVKGWAFDNGDDVWMGRTISKDLRSGYETFKVIGGWSTPNSKSQINRQVIVDSDNRSGYSGIFSVEGKSCINRCFYVELIRGRKQETRVWWTSNSIVVFCGTSGTYGTGSWPDGANINFMPI

SEQ ID NO: 14104 - protein, 469 aa, synthetic construct
  REGION 1..469: note = neuraminidase__InfluenzaA__AAO46472
MNPNQKIITIGSVSLTIATVCFLMQIAILVTTVTLHFKQYECDSPASNQVMPCEPITIERNITEIVYLNNTTIEKEICPKVVEYRNWSKPQCQITGFAPFSKDNSIRLSAGGDIWVTREPYVSCDPGKCYQFALGQGTTLDNKHSNDTIHDRIPHRTLLMNELGVPFHLGTRQVCIAWSSSSCHDGKAWLHVCITGDDKNATASFIYDGRLVDSIGSWSQNILRTQESECVCINGTCTVVMTDGSASGRADTRILFIEEGKIVHISPLSGSAQHVEECSCYPRYPGVRCICRDNWKGSNRPVVDINMEDYSIDSSYVCSGLVGDTPRNDDRSSNSNCRNPNNERGNQGVKGWAFDNGDDVWMGRTISKDLRSGYETFKVISGWSTPNSKSQINRQVIVDSDNRSGYSGIFSVEGKSCINRCFYVELIRGRKQETRVWWTSNSIVVFCGTSGTYGTGSWPDGANINFMPI

SEQ ID NO: 14105 - protein, 469 aa, synthetic construct; identical to SEQ ID NO: 14095
  REGION 1..469: note = neuraminidase__InfluenzaA__AAO46473

SEQ ID NO: 14106 - protein, 469 aa, synthetic construct; identical to SEQ ID NO: 14095
  REGION 1..469: note = neuraminidase__InfluenzaA__AAO46474

SEQ ID NO: 14107 - protein, 469 aa, synthetic construct; identical to SEQ ID NO: 14095
  REGION 1..469: note = neuraminidase__InfluenzaA__AAO46475

SEQ ID NO: 14108 - protein, 469 aa, synthetic construct
  REGION 1..469: note = neuraminidase__InfluenzaA__AAO46476
MNPNQKIITIGSVSLTIATVCFLMQIAILVTTVTLHFRQYECDSPANNQVMPCEPTIIERNITEIVYLNNTTIEKEICPKLVEYRNWSKPQCKITGFAPFSKDNSIRLSAGGDIWVTREPYVSCDPGKCYQFALGQGTTLDNKHSNDTIHDRIPHRTLLMNELGVPFHLGTRQVCIAWSSSSCHDGKAWLHVCVTGDDKNATASFIYDGRLVDSIGSWSQNILRTQESECVCINGTCTVVMTDGSASGRADTRILFIEEGKIVHISPLSGSAQHVEECSCYPRYPGVRCICRDNWKGSNRPVVDINVEDYSIDSSYVCSGLVGDTPRNNDRSSNSNCRNPNNERGNHGVKGWAFDDGNDVWMGRTISKDLRSGYETFKVIGGWSTPNSKSQINRQVIVDSDNRSGYSGIFSVEGKSCINRCFYVELIRGREQETRVWWTSNSIVVFCGTSGTYGTGSWPDGADINLMPI

SEQ ID NO: 14109 - protein, 469 aa, synthetic construct; identical to SEQ ID NO: 14095
  REGION 1..469: note = neuraminidase__InfluenzaA__AAO46477

SEQ ID NO: 14110 - protein, 469 aa, synthetic construct
  REGION 1..469: note = neuraminidase__InfluenzaA__AAO46478
MNPNQKIITIGSVSLIIATVCFLMQIAILVTTVTLHFKQHECDSPSSNQVMPCEPIIIERNITEIVYLNNTTIEKETCPKLVEYRNWSKPQCKITGFAPFSKDNSIRLSAGGDIWVTREPYVSCDPGKCYQFALGQGTTLDNKHSNDTIHDRIPHRTLLMNELGVPFHLGTRQVCIAWSSSSCHDGKAWLHVCVTGDDKNATASFIYDGRLVDSIGSWSQNILRTQESECVCINGTCTVVMTDGNASGRADTRILFIEEGKIVHISPLSGSAQHVEECSCYPRYPDVRCICRDNWKGSNRPIVDINMKDYSIDSSYVCSGLVGDTPRNDDRSSKSNCRNPNNERGNHGVKGWAFDNGNDVWMGRTISKDLRSGYETFKVIGGWSTPNSKSQINRQVIVDSDNRSGYSGIFSVEGKSCINRCFYVELIRGREQETRVWWTSNSIVVFCGTSGTYGTGSWPDGANINFMPI

SEQ ID NO: 14111 - protein, 469 aa, synthetic construct
  REGION 1..469: note = neuraminidase__InfluenzaA__AAO46479
MNPNQKIITIGSVSLTIATVCFLMQIAILVTTVTLHFKQYECDSPASNRVMPCEPIIIERNITEIVYLNNTTIEKEICPKVVEYRNWSKPQCQITGFAPFSKDNSIRLSAGGDIWVTREPYVSCDPGKCYQFALGQGTTLDNKHSNDTIHDRIPHRTLLMNELGVPFHLGTRQVCIAWSSSSCHDGKAWLHVCITGDDKNATASFIYDGRLVDSIGSWSQNILRTQESECVCINGTCTVVMTDGSASGRADTRILFIEEGKIVHISPLSGSAQHVEECSCYPRYPGVRCICRDNWKGSNRPVVDINMEDYSIDSSYVCSGLVGDTPRNDDRSSNSNCRNPNNERGNQGVKGWAFDNGDDVWMGRTISKDLRSGYETFKVIGGWSTPNSKSQINRQVIVDSGNRSGYSGIFSVEGKSCINRCFYVELIRGRKQETRVWWTSNSIVVFCGTSGTYGTGSWPDGANINFMPI

SEQ ID NO: 14112 - protein, 469 aa, synthetic construct
  REGION 1..469: note = neuraminidase__InfluenzaA__AAO46481
MNPNQKIITIGSVSLTIATVCFLMQIAILVTTVTLHFKQYECDSPANNQVMPCEPIIIERNITEIVYLTNTTIEKEICPKLVEYRNWSKPQCKITGFAPFSKDNSIRLSAGGDIWVTREPYVSCDPGKCYQFALGQGTTLDNKHSNDTIHDRIPHRTLLMNELGVPFHLGTRQVCIAWSSSSCHDGKAWLHVCVTGDDKNATASFIYDGRLVDSIGSWSQNILRTQESECVCINGTCTVVMTDGSASGRADTRILFIEEGKIVHISPLSGSAQHVEECSCYPRYPGVRCICRDNWKGSNRPVVDINVKDYSIDSRYVCSGLVGDTPRNNDRSSNSNCRNPNNERGNHGVKGWAFDDGNDVWMGRTISKDSRSGYETFKVIGGWSTPNSKSQINRQVIVDSDNRSGYSGIFSVESKSCINRCFYVELIRGREQETRVWWTSNSIVVFCGTSGTYGTGSWPDGADINLMPI

SEQ ID NO: 14113 - protein, 469 aa, synthetic construct
  REGION 1..469: note = neuraminidase__InfluenzaA__AAO46482
MNPNQKIITIGSVSLTIATVCFLMQIAILVTTVTLHFKQYECDSPANNQVMPCEPMIIERNITEIVYLTNTTIEKEICPKLVEYRNWSKPQCKITGFAPFSKDNSIRLSAGGDIWVTREPYVSCDPGKCYQFALGQGTTLDNKHSNDTIHDRIPHRTLLMNELGVPFHLGTRQVCIAWSSSSCHDGKAWLHVCVTGDDKNATASFIYDGRLVDSIGSWSQNILRTQESECVCINGTCTVVMTDGSASGRADTRILFIEEGKIVHISPLSGSAQHVEECSCYPRYPGVRCICRDNWKGSNRPVVDINVKDYSIDSRYVCSGLVGDTPRNNDRSSNSNCRNPNNDKGNHGVKGWAFDDGNDVWMGRTISKDSRSGYETFKVIGGWSTPNSKSQINRQVIVDSDNRSGYSGIFSVEGKSCINRCFYVELIRGREQETRVWWTSNSIVVFCGTSGTYGTGSWPDGADINLMPI

SEQ ID NO: 14114 - protein, 469 aa, synthetic construct
  REGION 1..469: note = neuraminidase__InfluenzaA__AAO46483
MNPNQKIITIGSVSLTIATVCFLMQIAILVTTVTLHFRQYECDSPANNQVMPCEPIIIERNITEIVYLNNTTIEKEICPKLVEYRNWSKPQCKITGFAPFSKDNSIRLSAGGDIWVTREPYVSCDPGKCYQFALGQGTTLDNKHSNDTIHDRIPHRTLLMNELGVPFHLGTRQVCIAWSSSSCHDGKAWLHVCVTGDDKNATASFIYDGRLVDSIGSWSQNILRTQESECVCINGTCTVVMTDGSASGRADTRILFIEEGKIVHISPLSGSAQHVEECSCYPRYPGVRCICRDNWKGSNRPVVDINVEDYSIDSSYVCSGLVGDTPRNNDRSSNSNCRNPNNERGNHGVKGWAFDDGNDVWMGRTISKDLRSGYETFKVIGGWSTPNSKSQINRQVIVDSDNRSGYSGIFSVEGKSCINRCFYVELIRGREQETRVWWTSNSIVVFCGTSGTYGTGSWPDGADINLMPI

SEQ ID NO: 14115 - protein, 469 aa, synthetic construct
  REGION 1..469: note = neuraminidase__InfluenzaA__AAO46485
MNPNQKIITIGSVSLTIATVCFLMQIAILVTTVTLHFKQYECDSPANNQVMPCEPIIIERNITEIVYLTNTTIEKEICPKLVEYRNWSKPQCKITGFAPFSKDNSIRLSAGGDIWVTREPYVSCDPGKCYQFALGQGTTLDNKHSNDTIHDRIPHRTLLMNELGVPFHLGTRQVCIAWSSSSCHDGKAWLHVCVTGDDKNATASFIYDGRLVDSIGSWSQNILRTQESECVCINGTCTVVMTDGSASGRADTRILFIEEGKIVHISPLSGSAQHVEECSCYPRYPGVRCICRDNWKGSNRPVVDINVKDYSIDSRYVCSGLVGDTPRNNDRSSNSNCRNPNNDKGNHGVKGWAFDDGNDVWMGRTISKDSRSGYETFKVIGGWSTPNSKSQINRQVIVDSDNRSGYSGIFSVEGKSCINRCFYVELIRGREQETRVWWTSNSIVVFCGTSGTYGTGSWPDGADINLMPI

SEQ ID NO: 14116 - protein, 469 aa, synthetic construct
  REGION 1..469: note = neuraminidase__InfluenzaA__AAO46486
MNPNQKIITIGSVSLTIATICFLMQIAILVTTVTLHFKQYECDSPANNQVMPCEPIIIERNITEIVYLTNTTIEKEICPKLVEYRNWSKPQCKITGFAPFSKDNSIRLSAGGDIWVTREPYVSCDPGKCYQFALGQGTTLDNKHSNDTIHDRIPHRTLLMNELGVPFHLGTRQVCIAWSSSSCHDGKAWLHVCVTGDDKNATASFIYDGRLVDSIGSWSQNILRTQESECVCINGTCTVVMTDGSASGRADTRILFIEEGKIVHISPLSGSAQHVEECSCYPRYPGVRCICRDNWKGSNRPVVDINVKDYSIDSSYVCSGLVGDTPRNNDRSSNSYCRNPNNERGNHGVKGWAFDDGNDVWMGRTISKDSRSGYETFKVIGGWSTPNSKSQINRQVIVDSDNRSGYSGIFSVEGKSCINRCFYVELIRGREQETRVWWTSNSIVVFCGTSGTYGTGSWPDGADINLMPI

SEQ ID NO: 14117 - protein, 469 aa, synthetic construct
  REGION 1..469: note = neuraminidase__InfluenzaA__AAO46489
MNPNQKIITIGSVSLTIATICFLMQIAILVTTVTLHFKQYECDSPANNQVMPCEPIIIERNITEIVYLTNTTIEKEICPKLVEYRNWSKPQCKITGFAPFSKDNSIRLSAGGDIWVTREPYVSCDPGKCYQFALGQGTTLNNKHSNDTIHDRIPHRTLLMNELGVPFHLGTRQVCIAWSSSSCHDGKAWLHVCVTGDDKNATASFIYDGRLVDSIGSWSQNILRTQESECVCINGTCTVVMTDGSASGKADTRILFIEEGKIVHISPLSGSAQHVEECSCYPRYPGVRCICRDNWKGSNRPVVDINVKDYSIDSSYVCSGLVGDTPRNNDRSSSSYCRNPNNERGNHGVKGWAFDDGNDVWMGRTISKDSRSGYETFKVIGGWSTPNSKSQINRQVIVDSDNRSGYSGIFSVEGKSCINRCFYVELIRGREQETRVWWTSNSIVVFCGTSGTYGTGSWPDGADINLMPI

SEQ ID NO: 14118 - protein, 469 aa, synthetic construct
  REGION 1..469: note = neuraminidase__InfluenzaA__AAO46491
MNPNQKIITIGSVSLTIATICFLMQIAILVTTVTLHFKQYECDSPANNQVMPCEPIIIERNITEIVYLTNTTIEKEICPKLVEYRNWSKPQCKITGFAPFSKDNSIRLSAGGDIWVTREPYVSCDPGKCYQFALGQGTTLDNKHSNDTIHDRTPHRTLLMNELGVPFHLGTRQVCIAWSSSSCHDGKAWLHVCVTGYDKNATASFIYDGRLVDSIGSWSQNILRTQESECVCINGTCTVVMTDGSASGRADTKILFIEEGKIVHISPLSGSAQHVEECSCYPRYPGVRCICRDNWKGSNRPVVDINVKDYSIDSSYVCSGLVGDTPRNNDRSSNSYCRNPNNEKGNHGVKGWAFDDGNDVWMGRTISEDSRSGYETFKVIGGWSTPNSKLQINRQVIVDSDNRSGYSGIFSVEGKSCINRCFYVELIRGREQETRVWWTSNSIVVFCGTSGTYGTGSWPDGADINLMPI

SEQ ID NO: 14119 - protein, 469 aa, synthetic construct; identical to SEQ ID NO: 14118
  REGION 1..469: note = neuraminidase__InfluenzaA__AAO46492

SEQ ID NO: 14120 - protein, 469 aa, synthetic construct
  REGION 1..469: note = neuraminidase__InfluenzaA__AAO88264
MNTNQRIITIGTVCLIVGIVSLLLQIGNIVSLWISHSIQTGKKNYSKICSKSVITYENNTWVNQTYVNISNINIADGQGVNSIILAGNSSLCPISGWAIYSKDNSIRIGSKGDIFVIREPFISCSHLECRTFFLTQGALLNDRHSNGTVKDRSPYRTLMSCPIGEAPSPYNSRFESVAWSASACHDGMGWLTIGISGPDNGAVAVLKYNGIITDTIKSWRNKILRTQESECVCINGSCFTIMTDGPSNGQASYKIFKMEKGKIIKSVELDAPNYHYEECSCYPDTGKVVCVCSDNWHASNRPWVSFDQNLDYQIGYICSGVFGDNPRSNDGRGNCGPVLSNGANGVKGFSFRYGNGVWIGRTKSISSRSGFEMIWDPNGWTETDSSFSIKQDVIALTDWSGYSGSFVQHPELTGMNCIRPCFWVELIRGQPKESTIWTSGSSISFCGVDSETASWSWPDGADLPFTIDK

SEQ ID NO: 14121 - protein, 469 aa, synthetic construct
  REGION 1..469: note = neuraminidase__InfluenzaA__AAQ10334
MNPNQKIITIGSVSLTIATICFLMQIAILVTTVTLHFKQYECNPPPNNQVMLCEPTIIERNITEIVYLTNTTIEKEICPKLAEYRNWSKPQCKITGFAPFSKDNSIRLSAGGDIWVTREPYVSCDPGKCYQFALGQGTTLNNRHSNDTVHDRTPYRTLLMNELGVPFHLGTKQVCIAWSSSSCHDGKAWLHVCVTGHNENATASFIYNGRLVDSIGSWSKNILRTQESECVCINGTCTVVMTDGSASGRADTKILFIEEGKIVHISPLSGSAQHVEECSCYPRYPGVRCVCRDNWKGSNRPIVDINVKDYSIVSSYVCSGLVGDTPRKNDSSSSSYCLNPNNEEGGHGVKGWAFDDGNDVWMGRTISEKLRSGYETFKVIGGWSKPNSKLQINRQVIVDRGNRSGYSGIFSVEGKSCINRCFYVELIRGRKQETEVWWTSNSIVVFCGTSGTYGTGSWPDGADINLMPI

SEQ ID NO: 14122 - protein, 469 aa, synthetic construct; identical to SEQ ID NO: 14121
  REGION 1..469: note = neuraminidase__InfluenzaA__AAQ10335

SEQ ID NO: 14123 - protein, 469 aa, synthetic construct
  REGION 1..469: note = neuraminidase__InfluenzaA__AAQ10336
MNPNQKIITIGSVSLTIATICFLMQIAILVTTVTLHFKQYECNPPPNNQVMLCEPTIIERNITEIVYLTNTTIEKEICPKLAEYRNWSKPQCKITGFAPFSKDNSIRLSAGGDIWVTREPYVSCDPGKCYQFALGQGTTLNNRHSNDTVHDRTPYRTLLMNELGVPFHLGTKQVCIAWSSSSCHDGKAWLHVCVTGHNENATASFIYNGRLVDSIGSWSKNILRTQESECVCINGTCTVVMTDGSASGRADTKILFIEEGKIVHISPLSGSAQHVEECSCYPRYPGVRCVCRDNWKGSNRPIVDINVKDYSIVSSYVCSGLVGDTPRKNDSSSSSYCLNPNNEEGGHGVKGWAFDDGNDVWMGRTISEKLRSGYETFKVIGGWSKPNSKLQINRQVIVDRGNRSGYSGIFSVEGKSCINRCFYVELIRGRKQETEVWWTSNSIVVFCGTSGTYGTGSWPDGAEINLMPI

SEQ ID NO: 14124 - protein, 469 aa, synthetic construct; identical to SEQ ID NO: 14121
  REGION 1..469: note = neuraminidase__InfluenzaA__AAQ10337

SEQ ID NO: 14125 - protein, 469 aa, synthetic construct
  REGION 1..469: note = neuraminidase__InfluenzaA__AAQ10339
MNPNQKIITIGSVSLTIATICFLMQIAILVTTVTLHFKQYECNSPPNNQVMLCEPTIIERNITEIVYLTNTTIEKEICPKLAEYRNWSKPQCKITGFAPFSKDNSIRLSAGGDIWVTREPYVSCDPDKCYQFALGQGTTLNNRHSNDTVHDRTPYRTLLMNELGVPFHLGTKQVCIAWSSSSCHDGKAWLHVCVTGHDENATASFIYDGRLVDSIGSWSKKILRTQESECVCINGTCTVVMTDGSASGRADTKILFIEEGKIVHISPLSGSAQHVEECSCYPRYPGVRCVCRDNWKGSNRPIVDINVKDYSIVSSYVCSGLVGDTPRKNDSSSSSHCLNPNNEEGGHGVKGWAFDDGNDVWMGRTISETLRSGYETFKVIEGWSKPNSKLQINRQVIVDRGNRSGYSGIFSVEGKSCINRCFYVELIRGRKQETEVWWTSNSIVVFCGTSGTYGTGSWPDGADINLMPI

SEQ ID NO: 14126 - protein, 469 aa, synthetic construct
  REGION 1..469: note = neuraminidase__InfluenzaA__AAQ10341
MNPNQKIITIGSVSLTIATICFLMQIAILVTTVTLHFKQYECNSPPNNQVMLCEPTIIERNITEIVYLTNTTIEKEICPKLAEYRNWSKPQCKITGFAPFSKDNSIRLSAGGDIWVTREPYVSCDPDKCYQFALGQGTTLNNRHSNDTVHDRTPYRTLLMNELGVPFHLGTKQVCIAWSSSSCHDGKAWLHVCVTGHDENATASFIYDGRLVDSIGSWSKKILRTQESECVCINGTCTVVMTDGSASGRADTKILFIEEGKIVHISPLSGSAQHVEECSCYPRYPGVRCVCRDNWKGSNRPIVDINVKDYSIVSSYVCSGLVGDTPRKNDSSSSSHCLNPNNEEGGHGVKGWAFDDGNDVWMGRTISEKLRSGYETFKVIEGWSKPNSKLQINRQVIVDRGNRSGYSGIFSVEGKSCINRCFYVELIRGRKQETEVWWTSNSIVVFCGTSGTYGTGSWPDGADINLMPI

SEQ ID NO: 14127 - protein, 469 aa, synthetic construct
  REGION 1..469: note = neuraminidase__InfluenzaA__AAQ10343
MNPNQKIITIGSVSLTIATICFLMQIAILVTTVTLHFKQYECSSPPNNQVMLCEPTIIERNITEIVYLTNTTIEKEICPKLAEYRNWSKPQCKITGFAPFSKDNSIRLSAGGDIWVTREPYVSCDPDKCYQFALGQGTTLNNRHSNDTVHDRTPYRTLLMNELGVPFHLGTKQVCIAWSSSSCHDGKAWLHVCVTGHDENATASFIYDGRLVDSIGSWSKKILRTQESECVCINGTCTVVMTDGSASGRADTKILFIEEGKIVHISPLSGSAQHVEECSCYPRYPGVRCVCRDNWKGSNRPIVDINVKDYSIVSSYVCSGLVGDTPRKNDSSSSSHCLNPNNEEGGHGVKGWAFDDGNDVWMGRTISEKFRSGYETFKVIEGWSKPNSKLQINRQVIVDRGNRSGYSGIFSVEGKSCINRCFYVELIRGRKQETEVWWTSNSIVAFCGTSGTYGTGSWPDGADINLMPI

SEQ ID NO: 14128 - protein, 396 aa, synthetic construct
  REGION 1..396: note = neuraminidase__InfluenzaA__AAQ10344
MNPNQKIITIGSVSLTIATICFLMQIAILVTTVTLHFKQYECNSPPNNQAMLCEPTIIERNITEIVYLTNTTIEKEICPKLAEYRNWSKPQCKITGFAPFSKDNSIRLSAGGDIWVTREPYVSCDPDKCYQFALGQGTTLNNRHSNDTVHDRTPYRTLLMNELGVPFHLGTKQVCIAWSSSSCHDGKAWLHVCVTGHDENATASFIYDGRLVDSIGSWSKKILRTQESECVCINGTCTVVMTDGSASGRADTKILFIEEGKIVHTSKLSGSAQHVEECSCYPRYPGVRCVCRDNWKGSNRPIVDINVKDYSIVSSYVCSGLVGDTPRKNDSSSSSHCLNPNNEEGGHGVKGWAFDDGNDVWMGRTISEKFRSGYETFKVIEGWSKPNSKLQINSKS

SEQ ID NO: 14129 - protein, 471 aa, synthetic construct
  REGION 1..471: note = neuraminidase__InfluenzaA__AAR11366
MNPNQKLFALSGVAIALSVLNLLIGISNVGLNVSLHLKEKGPKQEENLTCTTINQNNTTVVENTYVNNTTIITKGTDLKTPSYLLLNKSLCNVEGWVVIAKDNAVRFGESEQIIVTREPYVSCDPTGCKMYALHQGTTIRNKHSNGTIHDRTAFRGLISTPLGTPPTVSNSDFMCVGWSSTTCHDGIARMTICIQGNNDNATATVYYNRRLTTTIKTWARNILRTQESECVCHNGTCAVVMTDGSASSQAYTKVMYFHKGLVVKEEELRGSARHIEECSCYGHNQKVTCVCRDNWQGANRPIIEIDMNTLEHTSRYVCTGILTDTSRPGDKSSGDCSNPITGSPGAPGVKGFGFLNGDNTWLGRTISPRSRSGFEMLKIPNAGTDPNSRIAERQEIVDNNNWSGYSGSFIDYWNDNSECYNPCFYVELIRGRPEEAKYVWWTSNSLIALCGSPFPVGPGSFPDGAQIQYFS

SEQ ID NO: 14130 - protein, 449 aa, synthetic construct
  REGION 1..449: note = neuraminidase__InfluenzaA__AAS89005
MNPNKKIITIGSICMVTGMVSLMLQIGNLISIWVSHSIHTGNQQKAEPISNTNFLTEKAVASVKLAGNSSLCPINGWAVYSKDNSIRIGSKGDVFVIREPFISCSHLECRTFFLTQGALLNDKHSNGTVKDRSPHRTLMSCPVGEAPSPYNSRFESVAWSASACHDGTSWLTIGISGPDSGAVAVLKYNGIITDTIKSWRNNILRTQESECACVNGSCFTVMTDGPSNGQASHKIFKMEKGKVVKSVELDAPNYHYEECSCYPDAGEITCVCRDNWHGSNRPWVSFNQNLEYQIGYICSGVFGDNPRPNDGTGSCGPVSSNGAYGVKGFSFKYGNGVWIGRTKSTNSRSGFEMIWDPNGWIETDSSFSVKQDIVAITDWSGYSGSFVQHPELTGLDCIRPCFWVELIRGRPKESTIWTSGSSISFCGVNSDTVGWSWPDGAELPFTIDK

SEQ ID NO: 14131 - protein, 449 aa, synthetic construct
  REGION 1..449: note = neuraminidase__InfluenzaA__AAS89006
MNPNKKIITIGSICMVTGMVSLMLQIGNLISIWVSHSIHTGNQHKAEPISNTNFLTEKAVASVKLAGNSSLCPINGWAVYSKDNSIRIGSKGDVFVIREPFISCSHLECRTFFLTQGALLNDKHSNGTVKDRSPHRTLMSCPVGEAPSPYNSRFESVAWSASACHDGTSWLTIGISGPDNGAVAVLKYNGIITDTIKSWRNNILRTQESECACVNGSCFTVMTDGPSNGQASHKIFKMEKGKVVKSVELDAPNYHYEECSCYPDAGEITCVCRDNWHGSNRPWVSFNQNLEYQIGYICSGVFGDNPRPNDGTGSCGPVSSNGAYGVKGFSFKYGNGVWIGRTKSTNSRSGFEMIWDPNGWTETDSSFSVKQDIVAITDWSGYSGSFVQHPELTGLDCIRPCFWVELIRGRPKESTIWTSGSSISFCGVNSDTVGWSWPDGAELPFTIDK

SEQ ID NO: 14132 - protein, 469 aa, synthetic construct
  REGION 1..469: note = neuraminidase__InfluenzaA__AAT38822
MNPNQKIITIGVVNTTLSTIALFIGVGNLVFNTVIHEKIGDHQIVTHPTIMTPEVPNCSDTIITYNNTVINNITTTIITEAERPFKSPLPLCPFRGFFPFHKDNAIRLGENKDVIVTREPYVSCDNDNCWSFALAQGALLGTKHSNGTIKDRTPYRSLIRFPIGTAPVLGNYKEICIAWSSSSCFDGKEWMHVCMTGNDNDASAQIIYGGRMTDSIKSWRKDILRTQESECQCIDGTCVVAVTDGPAANSADHRVYWIREGRIIKYENVPKTKIQHLEECSCYVDIDVYCICRDNWKGSNRPWMRINNETILETGYVCSKFHSDTPRPADPSIMSCDSPSNVNGGPGVKGFGFKAGNDVWLGRTVSTSGRSGFEIIKVTEGWINSPNHVKSITQTLVSNNDWSGYSGSFIVKAKDCFQPCFYVELIRGRPNKNDDVSWTSNSIVTFCGLDNEPGSGNWPDGSNIGFMPK

SEQ ID NO: 14133 - protein, 449 aa, synthetic construct; identical to SEQ ID NO: 14131
  REGION 1..449: note = neuraminidase__InfluenzaA__AAV65827

SEQ ID NO: 14134 - protein, 469 aa, synthetic construct
  REGION 1..469: note = neuraminidase__InfluenzaA__AAX11488
MNPNQKIITIGSVSLTIAAICFLMQIAILVTTVTLHFKQHECNSPPNNQVMLCEPTIIERNITEIVYLTNTTIEKEICPKLAEYRNWSKPQCNITGFAPFSKDNSIRLSAGGDIWVTREPYVSCDPDKCYQFALGQGTTLNNGHSNDTVHDRTPYRTLLMNELGVPFHLGTRQVCIAWSSSSCHDGKAWLHVCVTGDDKNATASFIYNGRLVDSIGSWSKKILRTQESECVCINGTCTVVMTDGSASGKADTKILFIEEGKIVHISALSGSAQHVEECSCYPRYPGVRCVCRDNWKGSNRPIVDINVKDYSIVSSYVCSGLVGDTPRKNDSFSSSHCLDPNNEEGGHGVKGWAFDDGNDVWMGRTISEKLRSGYETFKVIEGWSKPNSKLQINRQVIVERGNRSGYSGIFSVEGKSCINRCFYVELIRGRKEETEVWWTSNSIVVFCGTSGTYGTGSWPDGADINLMPI

SEQ ID NO: 14135 - protein, 469 aa, synthetic construct
  REGION 1..469: note = neuraminidase__InfluenzaA__AAX11508
MNPNQKIITIGSVSLTIATICFLMQIAILVTTVTLHFKQHECNSPPNNQVMLCEPTIIERNITEIVYLTNTTIEKEICPKLAEYRNWSKPQCNITGFAPFSKDNSIRLSAGGDIWVTREPYVSCDPDKCYQFALGQGTTLNNGHSNNTVHDRTPYRTLLMNELGVPFHLGTRQVCIAWSSSSCHDGKAWLHVCVTGDDKNATASFIYNGRLVDSIGSWSKKILRTQESECVCINGTCTVVMTDGSASGKADTKILFIEEGKIVHISTLSGSAQHVEECSCYPRYPGVRCVCRDNWKGSNRPIVDINVKDYSIVSSYVCSGLVGDTPRKNDSFSSSHCLDPNNEEGGHGVKGWAFDDGNDVWMGRTISEKLRSGYETFKVIEGWSKPNSKLQINRQVIVERGNRSGYSGIFSVEGKSCINRCFYVELIRGRKEETEVWWTSNSIVVFCGTSGTYGTGSWPDGADINLMPI

SEQ ID NO: 14136 - protein, 469 aa, synthetic construct
  REGION 1..469: note = neuraminidase__InfluenzaA__AAX11538
MNPNQKIITIGSVSLTIATICFLMQIAILVTTVTLHFKQHECNSPPNNQVMLCEPTIIERNITEIVYLTNTTIEKEICPKLAEYRNWSKPQCNITGFAPFSKDNSIRLSAGGDIWVTREPYVSCDPDKCYQFALGQGTTLNNGHSNDTVHERTPYRTLLMNELGVPFHLGTRQVCIAWSSSSCHDGKAWLHVCVTGDDKNATASFIYNGRLVDSIGSWSKKILRTQESECVCINGTCTVVMTDGSASGKADTKILFIEEGKIVHISTLSGSAQHVEECSCYPRYPGVRCVCRDNWKGSNRPIVDINVKDYSIVSSYVCSGLVGDTPRKNDSSSSSHCLDPNNEEGGHGVKGWAFDDGNDVWMGRTISEKLRSGYETFKVIEGWSKPNSKLQINRQVIVERGNRSGYSGIFSVEGKSCINRCFYVELIRGRKEETEVWWTSNSIVVFCGTSGTYGTGSWPDGADINLMPI

SEQ ID NO: 14137 - protein, 469 aa, synthetic construct
  REGION 1..469: note = neuraminidase__InfluenzaA__AAX11548
MNPNQKIITIGSVSLTIATICFLMQIAILVTTVTLHFKQHECNSPPNNQVMLCEPTIIERNITEIVYLTNTTIEKEICPKLAEYRNWSKPQCNITGFAPFSKDNSIRLSAGGDIWVTREPYVSCDPDKCYQFALGQGTTLNNGHSNDTVHDRTPYRTLLMNELGVPFHLGTRQVCIAWSSSSCHDGKAWLHVCVTGDDKNATASFIYNGRLVDSIGSWSKKILRTQESECVCINGTCTVVMTDGSASGKADTKILFIEEGKIVHISTLSGSAQHVEECSCYPRYPGVRCVCRDNWKGSNRPIVDINVKDYSIVSSYVCSGLVGDTPRKNDSSSSSHCLDPNNEEGGHGVKGWAFDDGNDVWMGRTISEKLRSGYETFKVIEGWSKPNSKLQINRQVIVERGNRSGYSGIFSVEGKSCINRCFYVELIRGRKEETEVWWTSNSIVVFCGTSGTYGTGSWPDGADINLMPI

SEQ ID NO: 14138 - protein, 469 aa, synthetic construct; identical to SEQ ID NO: 14135
  REGION 1..469: note = neuraminidase__InfluenzaA__AAX11558

SEQ ID NO: 14139 - protein, 469 aa, synthetic construct
  REGION 1..469: note = neuraminidase__InfluenzaA__AAX11568
MNPNQKIITIGSVSLTIATICFLMQIAILVTTVTLHFKQHECYSPPNNQVMLCEPTIIERNITEIVYLTNTTIEKEICPKLAEYRNWSKPQCNITGFAPFSKDNSIRLSAGGDIWVTREPYVSCDPDKCYQFALGQGTTLNNGHSNDTVHDRTPYRTLLMNELGVPFHLGTRQVCIAWSSSSCHDGKAWLHVCVTGDDKNATASFIYNGRLVDSIGSWSKKILRTQESECVCINGTCTVVMTDGSASGKADTKILFIEEGKIVHISTLSGSAQHVEECSCYPRYPGVRCVCRDNWKGSNRPIVDINVKDYSIVSSYVCSGLVGDTPRKNDSFSSSHCLDPNNEEGGHGVKGWAFDDGNDVWMGRTISEKLRSGYETFKVIEGWSKPNSKLQINRQVIVERGNRSGYSGIFSVEGKSCINRCFYVELIRGRKEETEVWWTSNSIVVFCGTSGTYGTGSWPDGADINLMPI

SEQ ID NO: 14140 - protein, 469 aa, synthetic construct; identical to SEQ ID NO: 14135
  REGION 1..469: note = neuraminidase__InfluenzaA__AAX11578

SEQ ID NO: 14141 - protein, 469 aa, synthetic construct
  REGION 1..469: note = neuraminidase__InfluenzaA__AAX11588
MNPNQKIITIGSVSLTIAAICFLMQIAILVTTVTLHFKQHECNSPPNNQVMLCEPTIIERNITEIVYLTNTTIEKEICPKLAEYRNWSKPQCNITGFAPFSKDNSIRLSAGGDIWVTREPYVSCDPDKCYQFALGQGTTLNNGHSNDTVHDRTPYRTLLMNELGVPFHLGTRQVCIAWSSSSCHDGKAWLHVCVTGDDKNATASFIYNGRLVDSIGSWSKKILRTQESECICINGTCTVVMTDGSASGKADTKILFIEEGKIVHISTLSGSAQHVEECSCYPRYPGVRCVCRDNWKGSNRPIVDINVKDYSIVSSYVCSGLVGDTPRKNDSFSSSHCLDPNNEEGGHGVKGWAFDDGNDVWMGRTISEKLRSGYETFKVIEGWSKPNSKLQINRQVIVERGNRSGYSGIFSVEGKSCINRCFYVELIRGRKEKTEVWWTSNSIVVFCGTSGTYGTGSWPDGADINLMPI

SEQ ID NO: 14142 - protein, 469 aa, synthetic construct; identical to SEQ ID NO: 14137
  REGION 1..469: note = neuraminidase__InfluenzaA__AAX11598

SEQ ID NO: 14143 - protein, 469 aa, synthetic construct; identical to SEQ ID NO: 14137
  REGION 1..469: note = neuraminidase__InfluenzaA__AAX11608

SEQ ID NO: 14144 - protein, 469 aa, synthetic construct
  REGION 1..469: note = neuraminidase__InfluenzaA__AAX11618
MNPNQKIITIGSVSLTIATICFLMQIAILVTTVTLHFKQHECNSPPNNQVMLCEPTIIERNITEIVYLTNTTIEKEICPKLAEYRNWSKPQCNITGFAPFSKDNSIRLSAGGDIWVTREPYVSCDPDKCYQFALGQGTTLNNGHSNDTVHDRTPYRTLLMNELGVPFHLGTRQVCIAWSSSSCHDGKAWLHVCVTGDDKNATASFIYNGRLVDSIGSWSKKILRTQESECVCINGTCTVVMTDGSASGKADTKILFIEEGKIVHISALSGSAQHVEECSCYPRYPGVRCVCRDNWKGSNRPIVDINVKDYSIVSSYVCSGLVGDTPRKNDSSSSSHCLDPNNEEGGHGVKGWAFDDGNDVWMGRTISEKLRSGYETFKVIEGWSKPNSKLQINRQVIVERGNRSGYSGIFSVEGKSCINRCFYVELIRGRKEETEVWWTSNSIVVFCGTSGTYGTGSWPDGADINLMPI

SEQ ID NO: 14145 - protein, 469 aa, synthetic construct
  REGION 1..469: note = neuraminidase__InfluenzaA__AAX12744
MNPNQKIITIGSVSLTIATICFLMQIAILVTTVTLHFKQHECNSPPNNQVMLCEPTIIERNITEIVYLTNTTIEKEICPKLAEYRNWSKPQCNITGFAPFSKDNSIRLSAGGDIWVTREPYVSCDPDKCYQFALGQGTTLNNGHSNDTVHDRTPYRTLLMNELGVPFHLGTRQVCIAWSSSSCHDGKAWLHVCVTGDDKNATASFIYNGRLVDSIGSWSKKILRTQESECVCINGTCTVVMTDGSASGKADTKILFIEEGKIVHISTLSGSAQHVEECSCYPRYPGVRCVCRDNWKGSNRPIVDINVKDYSIVSSYVCSGLVGDTPRKNDSFSSSHCLDPNNEEGGHGVKGWAFDDGNDVWMGRTISEKLRSGYETFKVIEGWSKPNSKLQINRQVIVERGNRSGYSGIFSVEGKSCINRCFYVELIRGRKEETEVWWTSNSIVVFCGTSGTYGTGSWPDGADINLMPI

SEQ ID NO: 14146 - protein, 469 aa, synthetic construct; identical to SEQ ID NO: 14137
  REGION 1..469: note = neuraminidase__InfluenzaA__AAX12754

SEQ ID NO: 14147 - protein, 469 aa, synthetic construct
  REGION 1..469: note = neuraminidase__InfluenzaA__AAX12774
MNPNQKIITIGSVSLTIATICFLMQIAILVTTVTLHFKQYECNSPPNNQVMLCEPAIIERNITEIVYLTNTTIEKEICPKLAEYRNWSKPQCNITGFAPFSKDNSIRLSAGGDIWVTREPYVSCDPDKCYQFALGQGTTLNNGHSNDTVHDRTPYRTLLMNELGVPFHLGTRQVCIAWSSSSCHDGKAWLHVCVTGDDKNATASFIYNGRLVDSIGSWSKKILRTQESECVCINGTCTVVMTDGSASGKADTKILFIEEGKIVNISTLSGSAQHVEECSCYPRYPGVRCVCRDNWKGSNRPIVDINVKDYSIVSSYVCSGLVGDTPRKNDSFSSSHCLDPNNEEGGHGVKGWAFDDGNDVWMGRTISEKLRSGYETFKVIEGWSKPNSKLQINRQVIVERGNRSGYSGIFSVEGKSCINRCFYVELIRGRKEETEVWWTSNSIVVFCGTSGTYGTGSWPDGADINLMPI

SEQ ID NO: 14148 - protein, 469 aa, synthetic construct
  REGION 1..469: note = neuraminidase__InfluenzaA__AAX12804
MNPNQKIITIGSVSLTIATICFLMQIAILVTTVTLHFKQYECNSPPNNQVMLCEPTIIERNITEIVYLTNTTIEKEICPKLAEYRNWSKPQCNITGFAPFSKDNSIRLSAGGDIWVTREPYVSCDPDKCYQFALGQGTTLNNGHSNDTVHDRTPYRTLLMNELGVPFHLGTRQVCIAWSSSSCHDGKAWLHVCVTGDDENATASFIYNGRLVDSIGSWSKKILRTQESECVCINGTCTVVMTDGSASGKADTKILFIEEGKIVHISTLSGSAQHVEECSCYPRYPGVRCVCRDNWKGSNRPIVDINVKDYSIVSSYVCSGLVGDTPRKNDNFSSSHCLDPNNEEGGHGVKGWAFDDGNDVWMGRTISEKLRSGYETFKVIEGWSKPNSKLQTNRQVIVERGNRSGYSGIFSVEGKSCINRCFYVELIRGRKEETEVWWTSNSIVVFCGTSGTYGTGSWPDGADINLMPI

SEQ ID NO: 14149 - protein, 469 aa, synthetic construct
  REGION 1..469: note = neuraminidase__InfluenzaA__AAX12814
MNPNQKIITIGSVSLTIATICFLMQIAILVTTVTLHFKQYECNSPPNNQVMLCEPAIIERNITEIVYLTNTTIEKEICPKLAEYRNWSKPQCNITGFAPFSKDNSIRLSAGGDIWVTREPYVSCDPDKCYQFALGQGTTLNNGHSNDTVHDRTPYRTLLMNELGVPFHLGTRQVCIAWSSSSCHDGKAWLHVCVTGDDENATASFIYNGRLVDSIGSWSKKILRTQESECVCINGTCTVVMTDGSASGKADTKILFIEEGKIVNISTLSGSAQHVEECSCYPRYPGVRCVCRDNWKGSNRPIVDINVKDYSIVSSYVCSGLVGDTPRKNDSFSSSHCLDPNNEEGGHGVKGWAFDDGNDVWMGRTISEKLRSGYETFKVIEGWSKPNSKLQINRQVIVERGNRSGYSGIFSVEGKSCINRCFYVELIRGRKEETEVWWTSNSIVVFCGTSGTYGTGSWPDGADINLMPI

SEQ ID NO: 14150 - protein, 469 aa, synthetic construct
  REGION 1..469: note = neuraminidase__InfluenzaA__AAX34064
MNPNQKIITIGSVSLTIATICFLMQIAILVTTVTLHFKQHECNSPPNNQVMLCEPTIIERNITEIVYLTNTTIEREICPKLAEYRNWSKPQCNITGFAPFSKDNSIRLSAGGDIWVTREPYVSCDPDKCYQFALGQGTTLNNGHSNDTVHDRTPYRTLLMNELGVPFHLGTRQVCIAWSSSSCHDGKAWLHVCVTGDDKNATASFIYNGRLVDSIGSWSKKILRTQESECVCINGTCTVVMTDGSASGKADTKILFIEEGKIVHISTLSGSAQHVEECSCYPRYPGVRCVCRDNWKGSNRPIVDINVKDYSIVSSYVCSGLVGDTPRKNDSSSSSHCLDPNNEEGGHGVKGWAFDDGNDVWMGRTISEKLRSGYETFKVIEGWSKPNSKLQINRQVIVERGNRSGYSGIFSVEGKSCINRCFYVELIRGRKEETEVWWTSNSIVVFCGTSGTYGTGSWPDGADINLMPI

SEQ ID NO: 14151 - protein, 469 aa, synthetic construct
  REGION 1..469: note = neuraminidase__InfluenzaA__AAX35824
MNPNQKIITIGSVSLTIATICFLMQIAILVTTVTLHFKQYECNSPPNNQVMLCEPTIIERNITEIVYLANTTIEKEICPKLAEYRNWSKPQCNITGFAPFSKDNSIRLSAGGDIWVTREPYVSCDPDKCYQFALGQGTTLNNGHSNDTVHDRTPYRTLLMNELGVPFHLGTRQVCIAWSSSSCHDGKAWLHVCVTGDDKNATASFIYNGRLVDSIGSWSKKILRTQESECVCINGTCTVVMTDGSASGKADTKILFIEEGKIIHISTLSGSAQHVEECSCYPRYPGVRCVCRDNWKGSNRPIVDINVKDYSIVSSYVCSGLVGDTPRKNDSSSSSHCLDPNNEEGGHGVKGWAFDDGNDVWMGRTISEKLRSGYETFKVIEGWSKPNSKLQINRQVIVERGNRSGYSGIFSVEGKSCINRCFYVELIRGRKEETEVWWTSNSIVVFCGTSGTYGTGSWPDGADINLMPI

SEQ ID NO: 14152 - protein, 469 aa, synthetic construct; identical to SEQ ID NO: 14135
  REGION 1..469: note = neuraminidase__InfluenzaA__AAX35834

SEQ ID NO: 14153 - protein, 469 aa, synthetic construct
  REGION 1..469: note = neuraminidase__InfluenzaA__AAX35844
MNPNQKIITIGSVSLTIATICFLMQIAILVTTVTLHFKQYECNSPPNNQVMLCEPTIIERNITEIVYLTNTTIEKEICPKLAEYRNWSKPQCNITGFAPFSKDNSIRLSAGGDIWVTREPYVSCDPDKCYQFALGQGTTLNNGHSNDTVHDRTPYRTLLMNELGVPFHLGTRQVCIAWSSSSCHDGKAWLHVCVTGDDENATASFIYNGRLVDSIGSWSKKILRTQESECVCINGTCTVVMTDGSASGKADTKILFIEEGKIVHISTLSGSAQHVEECSCYPRYPGVRCVCRDNWKGSNRPIVDINVKDYSIVSSYVCSGLVGDTPRKNDSFSNSHCLDPNNEEGGHGVKGWAFDDGNDVWMGRTISEKLRSGYETFKVIEGWFKPNSKLQINRQVIVERGNRSGYSGIFSVEGKSCINRCFYVELIRGRKEETEVWWTSNSIVVFCGTSGTYGTGSWPDGADINLMPI

SEQ ID NO: 14154 - protein, 469 aa, synthetic construct
  REGION 1..469: note = neuraminidase__InfluenzaA__AAX35854
MNPNQKIITIGSVSLTIATICFLMQIAILVTTVTLHFKQYECNSPPNNQVMLCEPTIIERNITEIVYLTNTTIEKEICPKLAEYRNWSKPQCNITGFAPFSKDNSIRLSAGGDIWVTREPYVSCDPDKCYQFALGQGTTLNNGHSNDTVHDRTPYRTLLMNELGVPFHLGTRQVCIAWSSSSCHDGKAWLHVCVTGDDENATASFIYNGRLVDSIGSWSKKILRTQESECVCINGTCTVVMTDGSASGKADTKILFIEEGKIVHISTLSGSAQHVEECSCYPRYPGVRCVCRDNWKGSNRPIVDINVKDYSIVSSYVCSGLVGDTPRKNDSFSSSHCLDPNNEEGGHGVKGWAFDDGNDVWMGRTISEKLRSGYETFKVIEGWSKPNSKLQINRQVIVERGNRSGYSGIFSVEGKSCINRCFYVELIRGRKEETEVWWTSNSIVVFCGTSGTYGTGSWPDGADINLMPI

SEQ ID NO: 14155 - protein, 469 aa, synthetic construct
  REGION 1..469: note = neuraminidase__InfluenzaA__AAX35864
MNPNQKIITIGSVSLTIATICFLMQIAILVTTVTLHFKQYECNSPPNNQVMLCEPAIIERNITEIVYLTNTTIEKEICPKLAEYRNWSKPQCNITGFAPFSKDNSIRLSAGGDIWVTREPYVSCDPDKCYQFALGQGTTLNNGHSNDTVHDRTPYRTLLMNELGVPFHLGTRQVCIAWSSSSCHDGKAWLHVCVTGDDENATASFIYNGRLVDSIGSWSKNILRTQESECVCINGTCTVVMTDGSASGKADTKILFIEEGKIVNISTLSGSAQHVEECSCYPRYPGVRCVCRDNWKGSNRPIVDINVKDYSIVSSYVCSGLVGDTPRKNDSFSSSHCLDPNNEEGGHGVKGWAFDDGNDVWMGRTISEKLRSGYETFKVIEGWSKPNSKLQINRQVIVERGNRSGYSGIFSVEGKSCINRCFYVELIRGRKEETEVWWTSNSIVVFCGTSGTYGTGSWPDGADINLMPI

SEQ ID NO: 14156 - protein, 469 aa, synthetic construct
  REGION 1..469: note = neuraminidase__InfluenzaA__AAX47538
MNPNQKIITIGSVSLTIATICFLMQIAILVTTVTLHFKQYECNSPPNNQVMLCEPAIIERNITEIVYLTNTTIEEEICPKLAEYRNWSKPQCNITGFAPFSKDNSIRLSAGGDIWVTREPYVSCDPDKCYQFALGQGTTLNNGHSNDTVHDRTPYRTLLMNELGVPFHLGTRQVCIAWSSSSCHDGKAWLHVCVTGDDKNATASFIYNGRLVDSIGSWSKKILRTQESECVCINGTCTVVMTDGSASGKADTKILFIEEGKIVNISTLSGSAQHVEECSCYPRYPGVRCVCRDNWKGSNRPIVDINVKDYSIVSSYVCSGLVGDTPRKNDSFSSSHCLDPNNEEGGHGVKGWAFDDGNDVWMGRTISEKLRSGYETFKVIEGWSKPNSKLQINRQVIVERGNRSGYSGIFSVEGKSCINRCFYVELIRGRKEETEVWWTSNSIVVFCGTSGTYGTGSWPDGADINLMPI

SEQ ID NO: 14157 - protein, 469 aa, synthetic construct; identical to SEQ ID NO: 14135
  REGION 1..469: note = neuraminidase__InfluenzaA__AAX56383

SEQ ID NO: 14158 - protein, 469 aa, synthetic construct
  REGION 1..469: note = neuraminidase__InfluenzaA__AAX56393
MNPNQKIITIGSVSLTIATICFLMQIAILVTTVTLHFKQHECNSPPNNQVMLCEPTIIERNITEIVYLTNTTIEKEICPKLAEYRNWSKPQCNITGFAPFSKDNSIRLSAGGDIWVTREPYVSCDPDKCYQFALGKGTTLNNGHSNNTVHDRTPYRTLLMNELGVPFHLGTRQVCIAWSSSSCHDGKAWLHVCVTGDDKNATASFIYNGRLVDSIGSWSKKILRTQESECVCINGTCTVVMTDGSASGKADTKILFIEEGKIVHISTLSGSAQHVEECSCYPRYPGVRCVCRDNWKGSNRPIVDINVKDYSIVSSYVCSGLVGDTPRKNDSFSSSHCLDPNNEEGGHGVKGWAFDDGNDVWMGRTISEKLRSGYETFKVIEGWSKPNSKLQINRQVIVERGNRSGYSGIFSVEGKSCINRCFYVELIRGRKEETEVWWTSNSIVVFCGTSGTYGTGSWPDGADINLMPI

SEQ ID NO: 14159 - protein, 469 aa, synthetic construct; identical to SEQ ID NO: 14135
  REGION 1..469: note = neuraminidase__InfluenzaA__AAX56413

SEQ ID NO: 14160 - protein, 469 aa, synthetic construct; identical to SEQ ID NO: 14137
  REGION 1..469: note = neuraminidase__InfluenzaA__AAX56423

SEQ ID NO: 14161 - protein, 469 aa, synthetic construct; identical to SEQ ID NO: 14135
  REGION 1..469: note = neuraminidase__InfluenzaA__AAX56433

SEQ ID NO: 14162 - protein, 469 aa, synthetic construct; identical to SEQ ID NO: 14154
  REGION 1..469: note = neuraminidase__InfluenzaA__AAX56443

SEQ ID NO: 14163 - protein, 469 aa, synthetic construct
  REGION 1..469: note = neuraminidase__InfluenzaA__AAX56473
MNPNQKIITIGSVSLTIATICFLMQIAILVTTVTLHFKQYECNSPPNNQVMLCEPTIIERNITEIVYLTNTTIEKEICPKLAEYRNWSKPQCNITGFAPFSKDNSIRLSAGGDIWVTREPYVSCDPDKCYQFALGQGTTLNNGHSNDTVHDRTPYRTLLMNELGVPFHLGTRQVCIAWSSSSCHDGKAWLHVCVTGDDENATASFIYNGRLVDSIGSWSKKILRTQESECVCINGTCTVVMTDGSASGKADTKILFIEEGKIVHISTLSGSAQHVEECSCYPRYPGVRCVCRDNWKGSNRPIVDINVKDYSIVSSYVCSGLVGDTPRKNDSFSSSHCLDPNNEEGGHGVKGWAFDDGNDVWMGRTISEKLRSGYETFKVIEGWSKPNSKLQINRQVIVERGNRSGYSGIFSVEGKNCINRCFYVELIRGRKEETEVWWTSNSIVVFCGTSGTYGTGSWPDGADINLMPI

SEQ ID NO: 14164 - protein, 469 aa, synthetic construct
  REGION 1..469: note = neuraminidase__InfluenzaA__AAX56483
MNPNQKIITIGSVSLTIATICFLMQIAILVTTVTLHFKQYECDSPPNNQVMLCEPTIIERNITEIVYLTNTTIEKEICPKLAEYRNWSKPQCNITGFAPFSKDNSIRLSAGGDIWVTREPYVSCDPDKCYQFALGQGTTLNNGHSNDTVHDRTPYRTLLMNELGVPFHLGTRQVCIAWSSSSCHDGKAWLHVCVTGDDENATASFIYNGRLVDSIGSWSKKILRTQESECVCINGTCTVVMTDGSASGKADTKILFIEEGKIVHISTLSGSAQHVEECSCYPRYPGVRCVCRDNWKGSNRPIVDINVKDYSIVSSYVCSGLVGDTPRKNDSFSSSHCLDPNNEEGGHGVKGWAFDDGNDVWMGRTISEKLRSGYETFKVIEGWSKPNSKLQINRQVIVERGNRSGYSGIFSVEGKSCINRCFYVELIRGRKEETEVWWTSNSIVVFCGTSGTYGTGSWPDGADINLMPI

SEQ ID NO: 14165 - protein, 469 aa, synthetic construct; identical to SEQ ID NO: 14164
  REGION 1..469: note = neuraminidase__InfluenzaA__AAX56503

SEQ ID NO: 14166 - protein, 469 aa, synthetic construct
  REGION 1..469: note = neuraminidase__InfluenzaA__AAX56513
MNPNQKIITIGSVSLTIATICFLMQIAILVTTVTLHFKQYECNSPPNNQVMLCEPTIIERNITEIVYLTNTTIEKEICPKLAEYRNWSKPQCNITGFAPFSKDNSIRLSAGGDIWVTREPYVSCDPDKCYQFALGQGTTLNNGHSNDTVHDRTPYRTLLMNELGVPFHLGTRQVCIAWSSSSCHDGKAWLHVCVTGDDENATASFIYNGRLVDSIGSWSKKILRTQESECVCINGTCTVVMTDGSASGKADTKILFIEEGKIVHISTLSGSAQHVEECSCYPRYPGVRCVCRDNWKGSNRPIVDINVKDYSIVSSYVCSGLVGDTPRKNDSFSSSHCLDPNNEEGGHGVKGWAFDDGNDVWMGRTISEKLRSGYETFKVIEGWSKPNSKLQTNRQVIVERGNRSGYSGIFSVEGKSCINRCFYVELIRGRKEETEVWWTSNSIVVFCGTSGTYGTGSWPDGADINLMPI

SEQ ID NO: 14167 - protein, 470 aa, synthetic construct
  REGION 1..470: note = neuraminidase__InfluenzaA__AAX56533
MNPNQKIITIGSISVAIGIISLILQIGNIISIWASHSIQTGSQNYTGICNQRIITYENRTWVNQTYVNINNTNVVAGKDKTSMTLAGNSSLCPIRGWAIYTKDNSIRIGSKGDVFVIREPFISCSHLECRTFFLTQGALLNDKHSNGTIKDRSPFRALMSCPLGEAPSPYNSRFESVAWSASACHDGLGWLTIGISGPDNGAVAVLKYNGIITETIKSWKKQILRTQESECVCVNGSCFTIMTDGPSNRAASYRIFKIEKGRVTKSIELDAPNYHYEECSCYPDTGTVMCVCRDNWHGSNRPWVSFNQNLDYQIGYICSGVFGDNPRPKDGEGSCNPVTVDGADGVKGFSYRYGNGVWIGRTKSNRLRKGFEMIWDPNGWTDTDSDFSMKQDVVAMNDWSGYSGSFVQHPELTGLDCMRPCFWVELVRGLPRENTTIWTSGSSISFCGVNSETANWSWPDGAELPFTIDK

SEQ ID NO: 14168 - protein, 469 aa, synthetic construct
  REGION 1..469: note = neuraminidase__InfluenzaA__AAX56543
MNPNQKIITIGSVSLTIATICFLMQIAILVTTVTLHFKQYECNSPPNNQVMLCEPTIIERNITEIVYLTNTTIEKEICPKLAEYRNWSKPQCNITGFAPFSKDNSIRLSASGDIWVTREPYVSCDPDKCYQFALGQGTTLNNGHSNDTVHDRTPYRTLLMNELGVPFHLGTKQVCIAWSSSSCHDGKAWLHVCVTGDDENATASFIYNGRLVDSIGSWSKKILRTQESECVCINGTCTVVMTDGSASGKADTKILFIEEGKIVHTSSLSGSAQHVEECSCYPRYPGVRCVCRDNWKGSNRPIVDINVKDYSIVSSYVCSGLVGDTPRKNDSSSSSHCLDPNNEEGGHGVKGWAFDDGNDVWMGRTISEELRSGYETFKVIEGWSKPNSKLQINRQVIVDRGNRSGYSGIFSVEGKSCINRCFYVELIRGRKQETEVLWTSNSIVVFCGTSGTYGTGSWPDGADINLMPI

SEQ ID NO: 14169 - protein, 469 aa, synthetic construct; identical to SEQ ID NO: 14061
  REGION 1..469: note = neuraminidase__InfluenzaA__AAX56553

SEQ ID NO: 14170 - protein, 469 aa, synthetic construct
  REGION 1..469: note = neuraminidase__InfluenzaA__AAX56563
MNPNQKIITIGSVSLTIAAICFLMQIAILVTTVTLHFKQHECNSPPNNQVMLCEPTIIERNITEIVYLTNTTIEKEICPKLAEYRNWSKPQCNITGFAPFSKDNSIRLSAGGDIWVTREPYVSCDPDKCYQFALGQGTTLNNGHSNDTVHDRTPYRTLLMNELGVPFHLGTRQVCIAWSSSSCHDGKAWLHVCVTGDDKNATASFIYNGRLVDSIGSWSKKILRTQESECVCINGTCTVVMTDGSASGKADTKILFIEEGKIVHISALSGSAQHVEECSCYPRYPGVRCVCRDNWKGSNRPIVDINVKDYSIVSSYVCSGLVGDTPRKNDSFSSSHCLDPNNEEGGHGVKGWAFDDGNDVWMGRTISEKLRSGYETFKVIEGWSKPNSKLQINRQVIVERDNRSGYSGIFSVEGKSCINRCFYVELIRGRKEETEVWWTSNSIVVFCGTSGTYGTGSWPDGADINLMPI

SEQ ID NO: 14171 - protein, 469 aa, synthetic construct
  REGION 1..469: note = neuraminidase__InfluenzaA__AAX56573
MNPNQKIITIGSVSLTIATICFLMQIAILVTTVTLHFKQYECNSPPNNQVMLCEPAIIERNITEIVYLTNTTIEKEICPKLAEYRNWSKPQCNITGFAPFSKDNSIRLSAGGDIWVTREPYVSCDPDKCYQFALGQGTTLNNGHSNDTVHDRTPYRTLLMNELGVPFHLGTRQVCIAWSSSSCHDGKAWLHVCVTGDDENATASFIYNGRLVDSIGSWSKKILRTQESECVCINGTCTVVMTDGSASGKADTKILFIEEGKIVHISTLSGSAQHVEECSCYPRYPGVRCVCRDNWKGSNRPIVDINVKDYSIVSSYVCSGLVGDTPRKNDSFSSSHCLDPNNEEGGHGVKGWAFDDGNDVWMGRTISEKLRSGYETFKVIEGWSKPNSKLQINRQVIVERGNRSGYSGIFSVEGKSCINRCFYVELIRGRKEETEVWWTSNSIVVFCGTSGTYGTGSWPDGADINLMPI

SEQ ID NO: 14172 - protein, 469 aa, synthetic construct
  REGION 1..469: note = neuraminidase__InfluenzaA__AAX56583
MNPNQKIITIGSVSLTIATICFLMQIAILVTTVTLHFKQYECNSPPNNQVMLCEPTIIERNITEIVYLTNTTIEKEICPKLAEYRNWSKPQCNITGFAPFSKDNSIRLSAGGDIWVTREPYVSCDPDKCYQFALGQGTTLNNGHSNDTVHDRTPYRTLLMNELGVPFHLGTRQVCIAWSSSSCHDGKAWLHVCVTGDDENATASFIYNGRLVDSIGSWSKKILRTQESECVCINGTCTVVMTDGSASGKADTKILFIEEGKIVHISTLSGSAQHVEECSCYPRYPGVRCVCRDHWKGSNRPIVDINVKDYSIVSSYVCSGLVGDTPRKNDSFSSSHCLDPNNEEGGHGVKGWAFDDGNDVWMGRTISEKLRSGYETFKVIEGWSKPNSKLQTNRQVIVERGNRSGYSGIFSVEGKSCINRCFYVELIRGRKEETEVWWTSNSIVVFCGTSGTYGTGSWPDGADINLMPI

SEQ ID NO: 14173 - protein, 469 aa, synthetic construct
  REGION 1..469: note = neuraminidase__InfluenzaA__AAX56593
MNPNQKIITIGSVSLTIATICFLMQIAILVTTVTLHFKQYECNSPPNNQVMLCEPAIIERNITEIVYLTNTTIEKEICPKLAEYRNWSKPQCNITGFAPFSKDNSIRLSAGGDIWVTREPYVSCDPDKCYQFALGQGTTLNNGHSNDTVHDRTPYRTLLMNELGVPFHLGTRQVCIAWSSSSCHDGKAWLHVCVTGDDENATASFIYNGRLVDSIGSWSKKILRTQESECVCINGTCTVVMTDGSASGKADTKILFIEEGKIVNISTLSGSAQHVEECSCYPRYPGVRCVCRDNWKGSNRPIVDINVKDYSIVSSYVCSGLVGDTPRKNDSFSSSHCLDPNNEEGGHGVKGWAFDDGNDVWMGRTISEKFRSGYETFKVIEGWSKPNSKLQINRQVIVERGNRSGYSGIFSVEGKSCINRCFYVELIRGRKEETEVWWTSNSIVVFCGTSGTYGTGSWPDGADINLMPI

SEQ ID NO: 14174 - protein, 469 aa, synthetic construct
  REGION 1..469: note = neuraminidase__InfluenzaA__AAX56603
MNPNQKIITIGSVSLTIAAICFLMQIAILVTTVTLHFKQHECNSPPNNQVMLCEPTIIERNITEIVYLTNTTIEKEICPKLAEYRNWSKPQCNITGFAPFSKDNSIRLSAGGDIWVTREPYVSCDPDKCYQFALGQGTTLNNGHSNDTAHDRTPYRTLLMNELGVPFHLGTRQVCIAWSSSSCHDGKAWLHVCVTGDDKNATASFIYNGRLVDSIGSWSKKILRTQESECVCINGTCTVVMTDGSASGKADTKILFIEEGKIVHISTLSGSAQHVEECSCYPRYPGVRCVCRDNWKGSNRPIVDINVKDYSIVSSYVCSGLVGDTPRKNDSFSSSHCLDPNNEEGGHGVKGWAFDDGNDVWMGRTISEKLRSGYETFKVIEGWSKPNSKLQINRQVIVERGNRSGYSGIFSVEGKSCINRCFYVELIRGRKEETEVWWTSNSIVVFCGTSGTYGTGSWPDGADINLMPI

SEQ ID NO: 14175 - protein, 469 aa, synthetic construct; identical to SEQ ID NO: 14145
  REGION 1..469: note = neuraminidase__InfluenzaA__AAX57647

SEQ ID NO: 14176 - protein, 469 aa, synthetic construct; identical to SEQ ID NO: 14135
  REGION 1..469: note = neuraminidase__InfluenzaA__AAX57657

SEQ ID NO: 14177 - protein, 469 aa, synthetic construct; identical to SEQ ID NO: 14173
  REGION 1..469: note = neuraminidase__InfluenzaA__AAX57667

SEQ ID NO: 14178 - protein, 469 aa, synthetic construct; identical to SEQ ID NO: 14154
  REGION 1..469: note = neuraminidase__InfluenzaA__AAX57677

SEQ ID NO: 14179 - protein, 469 aa, synthetic construct
  REGION 1..469: note = neuraminidase__InfluenzaA__AAX57687
MNPNQKIITIGSVSLTIATICFLMQIAILVTTVTLHFKQYECNSPPNNQVMLCEPAIIERNITEIVYLTNTTIEKEICPKLAEYRNWSKPQCNITGFAPFSKDNSIRLSAGGDIWVTREPYVSCDPDKCYQFALGQGTTLNNGHSNDTVHDRTPYRTLLMNELGVPFHLGTRQVCIAWSSSSCHDGKAWLHVCVTGDDENATASFIYDGRLVDSIGSWSKKILRTQESECVCINGTCTVVMTDGSASGKADTKILFIEEGKIVNISTLSGSAQHVEECSCYPRYPGVRCVCRDNWKGSNRPIVDINVKDYSIVSSYVCSGLVGDTPRKNDSFSSSHCLDPNNEEGGHGVKGWAFDDGNDVWMGRTISEKLRSGYETFKVIEGWSKPNSKLQINRQVIVERGNRSGYSGIFSVEGKSCINRCFYVELIRGRKEETEVWWTSNSIVVFCGTSGTYGTGSWPDGADINLMPI

SEQ ID NO: 14180 - protein, 469 aa, synthetic construct
  REGION 1..469: note = neuraminidase__InfluenzaA__AAX57697
MNPNQKIITIGSVSLTIATICFLMQIAILVTTVTLHFKQYECNSPPNNQVMLCEPTIIERNITEIVYLTNTTIEKEICPKLAEYRNWSKPQCNITGFAPFSKDNSIRLSAGGDIWVTREPYVSCDPDKCYQFALGQGTTLNNGHSNDTVHDRTPYRTLLMNELGVPFHLGTRQVCIAWSSSSCHDGKAWLHVCVTGDDENATASFIYNGRLVDSIGSWSKKILRTQESECVCINGTCTVVMTDGSASGKADTKILFIEEGKIVHISTLSGSAQHVEECSCYPRYPGVRCVCRDNWKGSNRPIVDINVKDHSIVSSYVCSGLVGDTPRKNDSFSSSHCLDPNNEEGGHGVKGWAFDDGNDVWMGRTISEKLRSGYETFKVIEGWSKPNSKLQINRQVIVERGNRSGYSGIFSVEGKSCINRCFYVELIRGRKEETEVWWTSNSIVVFCGTSGTYGTGSWPDGADINLMPI

SEQ ID NO: 14181 - protein, 469 aa, synthetic construct
  REGION 1..469: note = neuraminidase__InfluenzaA__AAX57707
MNPNQKIITIGSVSLTIAAICFLMQIAILVTTVTLHFKQHECNSPPNNQVMLCEPTIIERNITEIVYLTNTTIEKEICPKLAEYRNWSKPQCNITGFAPFSKDNSIRLSAGGDIWVTREPYVSCDPDKCYQFALGQGTTLNNGHSNDTVHDRTPYRTLLMNELGVPFHLGTRQVCIAWSSSSCHDGKAWLHVCVTGDDKNATASFIYNGRLVDSIGSWSKKILRTQESECVCINGTCTVVMTDGSASGKADTKILFIEEGKIVHISTLSGSAQHVEECSCYPRYPGVRCVCRDNWKGSNRPIVDINVKDYSIVSSYVCSGLVGDTPRKNDRFSSSHCLDPNNEEGGHGVKGWAFDDGNDVWMGRTISEKLRSGYETFKVIEGWSKPNSKLQINRQVIVERGNRSGYSGIFSVEGKSCINRCFYVELIRGRKEETEVWWTSNSIVVFCGTSGTYGTGSWPDGADINLMPI

SEQ ID NO: 14182 - protein, 469 aa, synthetic construct; identical to SEQ ID NO: 14154
  REGION 1..469: note = neuraminidase__InfluenzaA__AAX57717

SEQ ID NO: 14183 - protein, 469 aa, synthetic construct; identical to SEQ ID NO: 14173
  REGION 1..469: note = neuraminidase__InfluenzaA__AAX57726

SEQ ID NO: 14184 - protein, 469 aa, synthetic construct; identical to SEQ ID NO: 14173
  REGION 1..469: note = neuraminidase__InfluenzaA__AAX57737

SEQ ID NO: 14185 - protein, 469 aa, synthetic construct; identical to SEQ ID NO: 14061
  REGION 1..469: note = neuraminidase__InfluenzaA__AAX57747

SEQ ID NO: 14186 - protein, 469 aa, synthetic construct; identical to SEQ ID NO: 14061
  REGION 1..469: note = neuraminidase__InfluenzaA__AAX57757

SEQ ID NO: 14187 - protein, 469 aa, synthetic construct
  REGION 1..469: note = neuraminidase__InfluenzaA__AAX57767
MNPNQKIITIGSVSLTIATICFLMQIAILVTTVTLHFKQYECNPPPNNQVMLCEPTIIERNITEIVYLTNTTIEKEICPKLAEYRNWSKPQCNITGFAPFSKDNSIRLSAGGDIWVTREPYVSCDPDKCYQFALGQGTTLNNGHSNDTVHDRTPYRTLLMNELGVPFHLGTKQVCIAWSSSSCHDGKAWLHVCVTGDDENATASFIYNGRLVDSIGSWSKKILRTQESECVCINGTCTVVMTDGSASGKADTKILFIEEGKIVHTSLLSGSAQHVEECSCYPRYPGVRCVCRDNWKGSNRPIVDINVKDYSIVSSYVCSGLVGDTPRKNDSSSSSHCLDPNNEEGGHGVKGWAFDDGNDVWMGRTISEKLRSGYETFKVIEGWSKPNSKLQINRQVIVDRGNRSGYSGIFSVEGKSCINRCFYVELIRGRKQETEVLWTSNSIVVFCGTSGTYGTGSWPDGADINLMPI

SEQ ID NO: 14188 - protein, 469 aa, synthetic construct
  REGION 1..469: note = neuraminidase__InfluenzaA__AAX57777
MNPNQKIITIGSVSLIIATICFLMQIAILVTTVTLHFKQYECNSPPNNQVMLCEPTIIERNITEIVYLTNTTIEKEICPKLAEYRNWSKPQCNITGFAPFSKDNSIRLSAGGDIWVTREPYVSCDPDKCYQFALGQGTTLNNGHSNDTVHDRTPYRTLLMNELGVPFHLGTKQVCIAWSSSSCHDGKAWLHVCVTGDDENATASFIYNGRLVDSIGSWSKKILRTQESECVCINGTCTVVMTDGSASGKADTKILFIEEGKIVHTSSLSGSAQHVEECSCYPRYPGVRCVCRDNWKGSNRPIVDINVKDYSIVSSYVCSGLVGDTPRKNDSSSSSHCLDPNNEEGGHGVKGWAFDDGNDVWMGRTISEKLRSGYETFKVIEGWSKPNSKLQINRQVIVDRGNRSGYSGIFSVEGKSCINRCFYVELIRGRKQETEVLWTSNSIVVFCGTSGTYGTGSWPDGADINLMPI

SEQ ID NO: 14189 - protein, 469 aa, synthetic construct
  REGION 1..469: note = neuraminidase__InfluenzaA__AAX57787
MNPNQKIITIGSVSLTIATICFLMQIAILVTTVTLHFKQYECNSPPNNQVMLCEPAIIERNITEIVYLTNTTIEKEICPKLAEYRNWSKPQCNITGFAPFSKDNSIRLSAGGDIWVTREPYVSCDPDKCYQFALGQGTTLNNGHSNDTVHDRTPYRTLLMNELGVPFHLGTRQVCIAWSSSSCHDGKAWLHVCVTGDDENATASFIYNGRLVDSIGSWSKKILRTQESECVCINGTCTVVMTDGSASGKANTKILFIEEGKIVNISTLSGSAQHVEECSCYPRYPGVRCVCRDNWKGSNRPIVDINVKDYSIVSSYVCSGLVGDTPRKNDSFSSSHCLDPNNEEGGHGVKGWAFDDGNDVWMGRTISEKFRSGYETFKVIEGWSKPNSKLQINRQVIVERGNRSGYSGIFSVEGKSCINRCFYVELIRGRKEETEVWWTSNSIVVFCGTSGTYGTGSWPDGADINLMPI

SEQ ID NO: 14190 - protein, 469 aa, synthetic construct; identical to SEQ ID NO: 14061
  REGION 1..469: note = neuraminidase__InfluenzaA__AAX57797

SEQ ID NO: 14191 - protein, 469 aa, synthetic construct; identical to SEQ ID NO: 14061
  REGION 1..469: note = neuraminidase__InfluenzaA__AAX57807

SEQ ID NO: 14192 - protein, 469 aa, synthetic construct
  REGION 1..469: note = neuraminidase__InfluenzaA__AAX57817
MNPNQKIITIGSVSLTIATICFLMQIAILVTTVTLHFKQYECNSPPNNQVMLCEPTIIERNITEIVYLTNTTIEKEICPKLAEYRNWSKPQCNITGFAPFSKDNSIRLSAGGDIWVTREPYVSCDPDKCYQFALGQGTTLNNGHSNDTVHDRTPYRTLLMNELGVPFHLGTKQVCIAWSSSSCHDGKAWLHVCVTGDDENATASFIYNGRLVDSISSWSKKILRTQESECVCINGTCTVVMTDGSASGKADTKILFIEEGKIVHTSSLSGSAQHVEECSCYPRYPGVRCVCRDNWKGSNRPIVDINVKDYSIVSSYVCSGLVGDTPRKNDSSSSSHCLDPNNEEGGHGVKGWAFDDGNDVWMGRTISEKLRSGYETFKVIEGWSKPNSKLQINRQVIVDRGNRSGYSGIFSVEGKSCINRCFYVELIRGRKQETEVLWTSNSIVVFCGTSGTYGTGSWPDGADINLMPI

SEQ ID NO: 14193 - protein, 469 aa, synthetic construct; identical to SEQ ID NO: 14061
  REGION 1..469: note = neuraminidase__InfluenzaA__AAX57837

SEQ ID NO: 14194 - protein, 469 aa, synthetic construct
  REGION 1..469: note = neuraminidase__InfluenzaA__AAX57847
MNPNQKIITIGSVSLTIATICFLMQIAILVTTVTLHFKQYECNSPPNNQVMLCEPTIIERNITEIVYLTNTTIEKEICPKLAEYRNWSKPQCNITGFAPFSKDNSIRLSAGGDIWVTREPYVSCDPDKCYQFALGQGTTLNNGHSNDTVHDRTPYRTLLMNELGVPFHLGTKQVCIAWSSSSCHDGKAWLHVCVTGDDENATASFIYNGRLVDSIGSWSKKILRTQESECVCINGTCTVVMTDGSASGKADTKILFIEEGKIVHTSLLSGSAQHVEECSCYPRYPGVRCVCRDNWKGSNRPIVDINVKDYSIVSSYVCSGLVGDTPRKNDSSSSSHCLDPNNEEGGHGVKGWAFDDGNDVWMGRTISEKLRSGYETFKVIEGWSKPNSKLQINRQVIVDRGNRSGYSGIFSVESKSCINRCFYVELIRGRKQETEVLWTSNSIVVFCGTSGTYGTGSWPDGADINLMPI

SEQ ID NO: 14195 - protein, 469 aa, synthetic construct
  REGION 1..469: note = neuraminidase__InfluenzaA__AAX57857
MNPNQKIITIGSVSLTIATICFLMQIAILVTTVTLHFKQYECNSPPNNQVMLCEPTTIERNITEIVYLTNTTIEKEICPKLAEYRNWSKPQCNITGFAPFSKDNSIRLSAGGDIWVTREPYVSCDPDKCYQFALGQGTTLNNGHSNDTVHDRTPYRTLLMNELGVPFHLGTKQVCIAWSSSSCHDGKAWLHVCVTGDDENATASFIYNGRLVDSIGSWSKKILRTQESECVCINGTCTVVMTDGSASGKADTKILFIEEGKIVHTSSLSGSAQHVEECSCYPRYPGVRCVCRDNWKGSNRPIVDINVKDYSIVSSYVCSGLVGDTPRKNDSSSSSHCLDPNNEEGGHGVKGWAFDDGNDVWMGRTISEKLRSGYETFKVIEGWSKPNSKLQINRQVIVDRGNRSGYSGIFSVEGKSCINRCFYVELIRGRKQETEVLWTSNSIVVFCGTSGTYGTGSWPDGADINLMPI

SEQ ID NO: 14196 - protein, 469 aa, synthetic construct; identical to SEQ ID NO: 14061
  REGION 1..469: note = neuraminidase__InfluenzaA__AAX57867

SEQ ID NO: 14197 - protein, 469 aa, synthetic construct
  REGION 1..469: note = neuraminidase__InfluenzaA__AAX57877
MNPNQKIITIGSVSLTIATICFLMQIAILVTTVTLHFKQYECNSPPNNQVMLCEPTIIERNITEIVYLTNTTIEKEICPKLAEYRNWSKPQCNITGFAPFSKDNSIRLSAGGDIWVTREPYVSCDPDKCYQFALGQGTTLNNGHSNDTVHDRTPYRTLLMNELGVPFHLGTKQVCIAWSSSSCHDGKAWLHVCVTGDDENATASFIYNGRLVDSIGSWSKKILRTQESECVCINGTCTVVMTDGSASGKADTKILFIEEGKIVHTSSLSGSAQHVEECSCYPRYPGVRCVCRDNWKGSNRPIVDINVKDYSIVSSYVCSGLVGDTPRKNDSSSSSHCLDPNNEEGGHGVKGWAFDDGNDVWMGRTISEKLRSGYETFKVIEGWSKPNSKLQINRQVIVDRGNRSGYSGIFSVEGKSCINRCFYVELIRGRKQETEVLWTSNSIVVFCGTSGTYGTGSWPDGADINLMHI

SEQ ID NO: 14198 - protein, 469 aa, synthetic construct; identical to SEQ ID NO: 14061
  REGION 1..469: note = neuraminidase__InfluenzaA__AAX57887

SEQ ID NO: 14199 - protein, 469 aa, synthetic construct
  REGION 1..469: note = neuraminidase__InfluenzaA__AAX57897
MNPNQKIITIGSVSLTIATICFLMQIAILVTTVTLHFKQYECNSPPNNQVMLCEPTIIERNITEIVYLTNTTIEKEICPKLAEYRNWSKPQCNITGFAPFSKDNSIRLSAGGDIWVTREPYVSCDPDKCYQFALGQGTTLNNGHSNDTVHDRTPYRTLLMNELGVPFHLGTKQVCIAWSSSSCHDGKAWLHVCVTGDDENATASFIYNGRLVDSIGSWSKKILRTQESECVCINGTCTVVMTDGSASGKADTKILFIEEGKIVHTSSLSGSAQHVEECSCYPRYPGVRCVCRDNWKGSNRPIVDINVKDYSIVSSYVCSGLVGDTPRKNDSSSSSHCLDPNNEEGGHGVKGWAFDSGNDVWMGRTISEKLRSGYETFKVIEGWSKPNSKLQINRQVIVDRGNRSGYSGIFSVEGKSCINRCFYVELIRGRKQETEVLWTSNSIVVFCGTSGTYGTGSWPDGADINLMPI

SEQ ID NO: 14200 - protein, 469 aa, synthetic construct
  REGION 1..469: note = neuraminidase__InfluenzaA__AAX57907
MNPNQKIITIGSVSLTIATICFLMQIAILVTTVTLHFKQYECNSPPNNQVMLCEPTIIERNITEIVYLTNTTIEKEICPKLAEYRNWSKPQCNITGFAPFSKDNSIRLSAGGDIWVTREPYVSCDPDKCYQFALGQGTTLNNGHSNDTVHDRTPYRTLLMNELGVPFHLGTKQVCIAWSSSSCHDGKAWLHVCVTGDDENATASFIYNGRLVDSIGSWSKKILRTQESECVCINGTCTVVMTDGSASGKADTKILFIEEGKIVHTSSLSGSAQHVEECSCYPRYPGVRCVCRDNWKGSNRPIVDINVKDYSIVSSYVCSGLVGDTPRKNDSSSSSHCLDPNNEEGGHGVKGWAFDDGNDVWMGRTISEKLRSGYETFKVIEGWSKPNSKLQMNRQVIVDRGNRSGYSGIFSVEGKSCINRCFYVELIRGRKQETEVLWTSNSIVVFCGTSGTYGTGSWPDGADINLMPI

SEQ ID NO: 14201 - protein, 469 aa, synthetic construct; identical to SEQ ID NO: 14061
  REGION 1..469: note = neuraminidase__InfluenzaA__AAX57917

SEQ ID NO: 14202 - protein, 469 aa, synthetic construct; identical to SEQ ID NO: 14061
  REGION 1..469: note = neuraminidase__InfluenzaA__AAX57927

SEQ ID NO: 14203 - protein, 469 aa, synthetic construct
  REGION 1..469: note = neuraminidase__InfluenzaA__AAX57937
MNPNQKIITIGSVSLTIATICFLMQIAILVTTVTLHFKQYECNSPPNNQVMLCEPTIIERNITEMVYLTNTTIEKEICPKLAEYRNWSKPQCNITGFAPFSKDNSIRLSAGGDIWVTREPYVSCDPDKCYQFALGQGTTLNNGHSNDTVHDRTPYRTLLMNELGVPFHLGTKQVCIAWSSSSCHDGKAWLHVCVTGDDENATASFIYNGRLVDSIGSWSKKILRTQESECVCINGTCTVVMTDGSASGKADTKILFIEEGKIVHTSLLSGSAQHVEECSCYPRYPGVRCVCRDNWKGSNRPIVDINVKDYSIVSSYVCSGLVGDTPRKNDSSSSSHCLDPNNEEGGHGVKGWAFDDGNDVWMGRTISEKLRSGYETFKVIEGWSKPNSKLQINRQVIVDRGNRSGYSGIFSVEGKSCINRCFYVELIRGRKQETEVLWTSNSIVVFCGTSGTYGTGSWPDGADINLMRI

SEQ ID NO: 14204 - protein, 469 aa, synthetic construct
  REGION 1..469: note = neuraminidase__InfluenzaA__AAX57947
MNPNQKIITIGSVSLTIATICFLMQIAILVTTVTLHFKQYECNSPPNNQVMLCEPTIIERNITEIVYLTNTTIEKEICPKLAEYRNWSKPQCNITGFAPFSKDNSIRLSAGGDIWVTREPYVSCDPDKCYQFALGQGTTLNNGHSNDTVHDRTPYRTLLMNELGVPFHLGTRQVCIAWSSSSCHDGKAWLHVCVTGDDENATASFIYNGRLVDSIGSWSRKILRTQESECVCINGTCTVVMTDGSASGKADTKILFIEEGKIVHISTLSGSAQHVEECSCYPRYPGVRCVCRDNWKGSNRPIVDINVKDYSIASSYMCSGLVGDTPRKNDSFSSSHCLDPNNEEGGHGVKGWAFDDGNDVWMGRTISEKLRSGYETFKVIEGWSKPNSKLQINRQVIVERGNRSGYSGIFSVEGKSCINRCFYVELIRGRKEETEVWWTSNSIVVFCGTSGTYGTGSWPDGADINLMPI

SEQ ID NO: 14205 - protein, 469 aa, synthetic construct; identical to SEQ ID NO: 14145
  REGION 1..469: note = neuraminidase__InfluenzaA__AAX76626

SEQ ID NO: 14206 - protein, 469 aa, synthetic construct
  REGION 1..469: note = neuraminidase__InfluenzaA__AAX76646
MNPNQKIITIGSVSLTIATICFLMQIAILVTTVTLHFKQHECNSPPNNQVMLCEPTIIERNITEIVYLTNTTIEKEICPKLAEYRNWSKPQCNITGFAPFSKDNSIRLSAGGDIWVTREPYVSCDPDKCYQFALGQGTTLNNGHSNNTVHDRTPYRTLLMNELGVPFHLGTRQVCIAWSSSGCHDGKAWLHVCVTGDDKNATASFIYNGRLVDSIGSWSKKILRTQESECVCINGTCTVVMTDGSASGKADTKILFIEEGKIVHISTLSGSAQHVEECSCYPRYPGVRCVCRDNWKGSNRPIVDINVKDYSIVSSYVCSGLVGDTPRKNDSFSSSHCLDPNNEEGGHGVKGWAFDDGNDVWMGRTISEKLRSGYETFKVIEGWSKPNSKLQINRQVIVERGNRSGYSGIFSVEGKSCINRCFYVELIRGRKEETEVWWTSNSIVVFCGTSGTYGTGSWPDGADINLMPI

SEQ ID NO: 14207 - protein, 469 aa, synthetic construct; identical to SEQ ID NO: 14135
  REGION 1..469: note = neuraminidase__InfluenzaA__AAX76656

SEQ ID NO: 14208 - protein, 469 aa, synthetic construct; identical to SEQ ID NO: 14180
  REGION 1..469: note = neuraminidase__InfluenzaA__AAX76666

SEQ ID NO: 14209 - protein, 469 aa, synthetic construct; identical to SEQ ID NO: 14061
  REGION 1..469: note = neuraminidase__InfluenzaA__AAX76696

SEQ ID NO: 14210 - protein, 469 aa, synthetic construct
  REGION 1..469: note = neuraminidase__InfluenzaA__AAX76736
MNPNQKIITIGSVSLTIATICFLMQIAILVTTVTLHFKQYECNSPPNNQVMLCEPTIIERNITEIVYLTNTTIEKEICPKLSEYRNWSKPQCNITGFAPFSKDNSIRLSAGGDIWVTREPYVSCDPDKCYQFALGQGTTLNNGHSNDTVHDRTPYRTLLMNELGVPFHLGTKQVCIAWSSSSCHDGKAWLHVCVTGDDENATASFIYNGRLVDSIGSWSKKILRTQESECVCINGTCTVVMTDGSASGKADTKILFIEEGKIVHISTLSRSAQHVEECSCYPRYPGVRCVCRDNWKGSNRPIVDINVKDHSIVSSYVCSGLVGDTPRKNDSFSSSHCLDPNNEEGGHGVKGWAFDDGNDVWMGRTISEKLRSGYETFKVIEGWSKPNSKLQINRQVIVERGNRSGYSGIFSVEGKSCINRCFYVELIRGRKEETEVWWTSNSIVVFCGTSGTYGTGSWPDGADINLMPI

SEQ ID NO: 14211 - protein, 469 aa, synthetic construct
  REGION 1..469: note = neuraminidase__InfluenzaA__AAX76766
MNPNQKIITIGSVSLTIATICFLMQIAILVTTVTLHFKQHECNSPPNNQVMLCEPTIIERNITEIVYLTNTTIEKEICPKLAEYRNWSKPQCNITGFAPFSKDNSIRLSVGGDIWVTREPYVSCDPDKCYQFALGQGTTLNNGHSNDTVHDRTPYRTLLMNELGVPFHLGTRQVCIAWSSSSCHDGKAWLHVCVTGDDKNATASFIYNGRLVDSIGSWSKKILRTQESECVCINGTCTVVMTDGSASGKADTKILFIEEGKIVHISTLSGSAQHVEECSCYPRYPGVRCVCRDNWKGSNRPIVDINVKDYSIVSSYVCSGLVGDTPRKNDSFSSSHCLDPNNEEGGHGVKGWAFDDGNDVWMGRTISEKLRSGYETFKVIEGWSKPNSKLQINRQVIVERGNRSGYSGIFSVEGKSCINRCFYVELIRGRKEETEVWWTSNSIVVFCGTSGTYGTGSWPDGADINLMPI

SEQ ID NO: 14212 - protein, 469 aa, synthetic construct; identical to SEQ ID NO: 14137
  REGION 1..469: note = neuraminidase__InfluenzaA__AAY18089

SEQ ID NO: 14213 - protein, 469 aa, synthetic construct
  REGION 1..469: note = neuraminidase__InfluenzaA__AAY18099
MNPNQKIITIGSVSLTIATICFLMQIAILVTTVTLHFKQHECNSPPNNQVMLCEPTIIERNITEIVYLTNTTIEKEICPKLAEYRNWSKPQCNITGFAPFSKDNSIRLSAGGDIWVTREPYVSCDPDKCYQFALGQGTTLNNGHSNNTVHDRTPYRTLLMNELGVPFHLGTRQVCIAWSSSSCHDGKAWLHVCVTGDDKNATASFIYNGRLVDSIGSWSKKILRTQESECVCINGTCTVVMTDGSASGKADTKILFVEEGKIVHISTLSGSAQHVEECSCYPRYPGVRCVCRDNWKGSNRPIVDINVKDYSIVSSYVCSGLVGDTPRKNDSFSSSHCLDPNNEEGGHGVKGWAFDDGNDVWMGRTISEKLRSGYETFKVIEGWSKPNSKLQINRQVIVERGNRSGYSGIFSVEGKSCINRCFYVELIRGRKEETEVWWTSNSIVVFCGTSGTYGTGSWPDGADINLMPI

SEQ ID NO: 14214 - protein, 469 aa, synthetic construct
  REGION 1..469: note = neuraminidase__InfluenzaA__AAY18109
MNPNQKIITIGSVSLTIATICFLMQIAILVTTLTLHFKQYECNSPPNNQVMLCEPAIIERNITEIVYLTNTTIEKEKCPKLAEYRNWSKPQCNITGFAPFSKDNSIRLSAGGDIWVTREPYVSCDPDKCYQFALGQGTTLNNGHSNDTVHDRTPYRTLLMNELGVPFHLGTRQVCIAWSSSSCHDGKAWLHVCVTGDDENATASFIYNGRLVDSIGSWSKKILRTQESECVCINGTCTVVMTDGSASGKADTKILFIEEGKIVNISTLSGSAQHVEECSCYPRYPGVRCVCRDNWKGSNRPIVDINVKDYSIVSSYVCSGLVGDTPRKNDSFSSSHCLDPNNEEGGHGVKGWAFDDGNDVWMGRTISEKLRSGYETFKVIEGWSKPNSKLQINRQVIVERGNRSGYSGIFSVEGKSCINRCFYVELIRGRKEETEVWWTSNSIVVFCGTSGTYGTGSWPDGADINLMPI

SEQ ID NO: 14215 - protein, 469 aa, synthetic construct; identical to SEQ ID NO: 14173
  REGION 1..469: note = neuraminidase__InfluenzaA__AAY18119

SEQ ID NO: 14216 - protein, 469 aa, synthetic construct
  REGION 1..469: note = neuraminidase__InfluenzaA__AAY18129
MNPNQKIITIGSVSLTIATICFLMQITILVTTVTLHFKQYECNSPPNNQVMLCEPTIIERNITEIVYLTNTTIEKEICPKLAEYRNWSKPQCNITGFAPFSKDNSIRLSAGGDIWVTREPYVSCDPDKCYQFALGQGTTLNNGHSNDTVHDRTPYRTLLMNELGVPFHLGTRQVCIAWSSSSCHDGKAWLHVCVTGDDKNATASFIYNGRLVDSIGSWSKKILRTQESECVCINGTCTVVMTDGSASGKADTKILFIEEGKIIHISTLSGSAQHVEECSCYPRYPGVRCVCRDNWKGSNRPIVDINVKDYSIVSSYVCSGLVGDTPRKNDSSSSSHCLDPNNEEGGHGVKGWAFDDGNDVWMGRTISEKLRSGYETFKVIEGWSKSNSKLQINRQVIVERGNRSGYSGIFSVEGKSCINRCFYVELIRGRKEETEVWWTSNSIVVFCGTSGTYGTGSWPDGADINLMPI

SEQ ID NO: 14217 - protein, 469 aa, synthetic construct
  REGION 1..469: note = neuraminidase__InfluenzaA__AAY18139
MNPNQKIITIGSVSLTIATICFLMQIAILVTTVTLHFKQHECNSPPNNQVMLCEPTIIERNITEIVYLTNTTIEREICPKLAEYRNWSKPQCNITGFAPFSKDNSIRLSAGGDIWVTREPYVSCDPDKCYQFALGQGTTLNNRHSNDTVHDRTPYRTLLMNELGVPFHLGTRQVCIAWSSSSCHDGKAWLHVCVTGDDKNATASFIYNGRLVDSIGSWSKKILRTQESECVCINGTCTVVMTDGSASGKADTKILFIEEGKIVHISTLSGSAQHVEECSCYPRYPGVRCVCRDNWKGSNRPIVDINVKDYSIVSSYVCSGLVGDTPRKNDSSSSSHCLDPNNEEGGHGVKGWAFDDGNDVWMGRTISEKLRSGYETFKVIEGWSKPNSKLQINRQVIVERGNRSGYSGIFSVEGKSCINRCFYVELIRGRKEETEVWWTSNSIVVFCGTSGTYGTGSWPDGADINLMPI

SEQ ID NO: 14218 - protein, 469 aa, synthetic construct
  REGION 1..469: note = neuraminidase__InfluenzaA__AAY18149
MNPNQKIITIGSVSLTIATICFLMQIAILVTTVTLHFKQHECNSPPNNQVMLCEPTIIERNITEIVYLTNTTIEKEICPKLAEYRNWSKPQCNITGFAPFSKDNSIRLSAGGDIWVTREPYVSCDPDKCYQFALGQGTTLNNGHSNDTVHDRTPYRTLLMNELGVPFHLGTRQVCIAWSSSSCHDGKAWLHVCVTGDDKNATASFIYNGRLVDSIGSWSKKILRTQESECVCINGTCTVVMTDGSASGKADTKILFIEEGKIVHISTLSGSAQHVEECSCYPRYPGVRCVCRDNWKGSNRPTVDINVKDYSIVSSYVCSGLVGDTPRKNDSSSSSHCLDPNNEEGGHGVKGWAFDDGNDVWMGRTISEKLRSGYETFKVIEGWSKPNSKLQINRQVIVERGNRSGYSGIFSVEGKSCINRCFYVELIRGRKEETEVWWTSNSIVVFCGTSGTYGTGSWPDGADINLMPI

SEQ ID NO: 14219 - protein, 469 aa, synthetic construct
  REGION 1..469: note = neuraminidase__InfluenzaA__AAY18159
MNPNQKIITIGSVSLIIATICFLMQIAILVTTVTLHFKQYECNSPPNNQVMLCEPTIIERNITEIVYLTNTTIEKEICPKLAEYRNWSKPQCNITGFAPFSKDNSIRLSAGGDIWVTREPYVSCDPDKCYQFALGQGTTLNNGHSNDTVHDRTPYRTLLMNELGVPFHLGTKQVCIAWSSSSCHDGKAWLHVCVTGDDENATASFIYNGRLVDSIGSWSKKILRTQESECVCINGTCTVVMTDGSASGKADTKILFIEEGKIVHTSSLSGSAQHVEECSCYPRYPGVRCVCRDNWKGSNRPIVDINVKDYSIVSSYVCSGLVGDTPRKNDSSSSSHCLDPNNEEGGHGVKGWAFDDGNDVWMGRTISEKLRSGYETFKVIEGWSKPNSKLQINRQVIVDRGNRSGYSGIFSVEGKNCINRCFYVELIRGRKQETEVLWTSNSIVVFCGTSGTYGTGSWPDGADINLMPI

SEQ ID NO: 14220 - protein, 469 aa, synthetic construct; identical to SEQ ID NO: 14061
  REGION 1..469: note = neuraminidase__InfluenzaA__AAY18179

SEQ ID NO: 14221 - protein, 469 aa, synthetic construct; identical to SEQ ID NO: 14061
  REGION 1..469: note = neuraminidase__InfluenzaA__AAY18189

SEQ ID NO: 14222 - protein, 469 aa, synthetic construct
  REGION 1..469: note = neuraminidase__InfluenzaA__AAY18199
MNPNQKIITIGSVSLTISTICFFMQIAILITTVTLHFKQYEFNSPPNNQVMLCEPTIIERNITEIVYLTNTTIEKEICPKLAEYRNWSKPQCNITGFAPFSKDNSIRLSAGGDIWVTREPYVSCDPDKCYQFALGQGTTLNNVHSNDTVHDRTPYRTLLMNELGVPFHLGTKQVCIAWSSSSCHDGKAWLHVCVTGDDENATASFIYNGRLVDSIVSWSKKILRTQESECVCINGTCTVVMTDGSASGKADTKILFIEEGKIVHTSTLSGSAQHVEECSCYPRYPGVRCVCRDNWKGSNRPIVDINIKDYSIVSSYVCSGLVGDTPRKNDSSSSSHCLDPNNEEGGQGVKGWAFDDGNDVWMGRTISEKLHSGYETFKVIEGWSNPNSKLQINRQVIVDRGNRSGYSGIFSVEGKSCINRCFYVELIRGRKQETEVLWTSNSIVVFCGTSGTYGTGSWPDGADINLMPI

SEQ ID NO: 14223 - protein, 469 aa, synthetic construct; identical to SEQ ID NO: 14164
  REGION 1..469: note = neuraminidase__InfluenzaA__AAY18588

SEQ ID NO: 14224 - protein, 469 aa, synthetic construct; identical to SEQ ID NO: 14145
  REGION 1..469: note = neuraminidase__InfluenzaA__AAY18614

SEQ ID NO: 14225 - protein, 469 aa, synthetic construct
  REGION 1..469: note = neuraminidase__InfluenzaA__AAY27846
MNPNQKIITIGSVSLTIAAICFLMQIAILVTTVTLHFKQHECNSPPNNQVMLCEPTIIERNITEIVYLTNTTIEKEICPKLAEYRNWSKPQCNITGFAPFSKDNSIRLSAGGDIWVTREPYVSCDPDKCYQFALGQGTTLNNGHSNDTVHDRTPYRTLLMNELGVPFHLGTRQVCIAWSSSSCHDGKAWLHVCVTGDDKNATASFIYNGRLVDSIGSWSKKILRTQESECVCINGTCTVVMTDGSASGKADTKILFIEEGKIVHISTLSGSAQHVEECSCYPRYPGVRCVCRDNWKGSNRPIVDINVKDYSIVSSYVCSGLVGDTPRKNDSFSSSHCLDPNNEEGGHGVKGWAFDDGNDVWMGRTISEKLRSGYETFKVIEGWSKPNSKLQINRQVIVERGNRSGYSGIFSVEGKSCINRCFYVELIRGRKEETEVWWTSNSIVVFCGTSGTYGTGSWPDGADINLMPI

SEQ ID NO: 14226 - protein, 469 aa, synthetic construct
  REGION 1..469: note = neuraminidase__InfluenzaA__AAY27856
MNPNQKIITIGSVSLTIATICFLMQIAILVTTVTLHFKQHECNSPPNNQVMLCEPTIIERNITEIVYLTNTTIEKEICPKLAEYRNWSKPQCNITGFAPFSKDNSIRLSAGGDIWVTREPYVSCDPGKCYQFALGQGTTLNNGHSNDTVHDRTPYRTLLMNELGVPFHLGTRQVCIAWSSSSCHDGKAWLHVCVTGDDKNATASFIYNGRLVDSIGSWSKKILRTQESECVCINGTCTVVMTDGSASGKADTKILFIEEGKIVHISTLSGSAQHVEECSCYPRYPGVRCVCRDNWKGSNRPIVDINVKDYSIVSSYVCSGLVGDTPRKNDSSSSSHCLDPNNEEGGHGVKGWAFDDGNDVWMGRTISEKLRSGYETFKVIEGWSKPNSKLQINRQVIVERGNRSGYSGIFSVEGKSCINRCFYVELIRGRKEETEVWWTSNSIVVFCGTSGTYGTGSWPDGADINLMPI

SEQ ID NO: 14227 - protein, 469 aa, synthetic construct; identical to SEQ ID NO: 14137
  REGION 1..469: note = neuraminidase__InfluenzaA__AAY27866

SEQ ID NO: 14228 - protein, 469 aa, synthetic construct
  REGION 1..469: note = neuraminidase__InfluenzaA__AAY27962
MNPNQKIITIGSVSLTIATICFLMQIAILVTTVTLHFKQYECNSPPNNQVMLCEPTIIERNITEIVYLTNTTIEKEICPKLAEYRNWSKPQCNITGFAPFSKDNSIRLSAGGDIWVTREPYVSCDPDKCYQFALGQGTTLNNGHSNDTVHDRTPYRTLLMNELGVPFHLGTRQVCIAWSSSSCHDGKAWLHVCVTGDDENATASFIYNGRLVDSIGSWSKKILRTQESECVCINGTCTVVMTDGSASGKADTKILFIEEGKIVHISTLSGSAQHVEECSCYPRYPGVRCVCRDNWKGSNRPIVDINVKDYSIVSSYVCSGLVGDTPRKNDSFSSSHCLDPNNEEGGHGVKGWAFDDGNNVWMGRTISEKLRSGYETFKVIEGWSKPNSKLQTNRQVIVERGNRSGYSGIFSVEGKSCINRCFYVELIRGRKEETEVWWTSNSIVVFCGTSGTYGTGSWPDGADINLMPI

SEQ ID NO: 14229 - protein, 469 aa, synthetic construct
  REGION 1..469: note = neuraminidase__InfluenzaA__AAY27997
MNPNQKIITIGSVSLTIATICFLMQIAILVTTVTLHFKQHECNSPPNNQVMLCEPTIIERNITEIVYLTNTTIEKEICPKLAEYRNWSKPQCNITGFAPFSKDNSIRLSAGGDIWVTREPYVSCDPDKCYQFALGQGTTLNNGHSNNTVHDRTPYRTLLMNEMGVPFHLGTRQVCIAWSSSSCHDGKAWLHVCVTGDDKNATASFIYNGRLVDSIGSWSKKILRTQESECVCINGTCTVVMTDGSASGKADTKILFIEEGKIVHISTLSGSAQHVEECSCYPRYPGVRCVCRDNWKGSNRPIVDINVKDYSIVSSYVCSGLVGDTPRKNDSFSSSHCLDPNNEEGGHGVKGWAFDDGNDVWMGRTISEKLRSGYETFKVIEGWSKPNSKLQINRQVIVERGNRSGYSGIFSVEGKSCINRCFYVELIRGRKEETEVWWTSNSIVVFCGTSGTYGTGSWPDGADINLMPI

SEQ ID NO: 14230 - protein, 469 aa, synthetic construct; identical to SEQ ID NO: 14135
  REGION 1..469: note = neuraminidase__InfluenzaA__AAY28007

SEQ ID NO: 14231 - protein, 469 aa, synthetic construct; identical to SEQ ID NO: 14180
  REGION 1..469: note = neuraminidase__InfluenzaA__AAY28017

SEQ ID NO: 14232 - protein, 469 aa, synthetic construct; identical to SEQ ID NO: 14135
  REGION 1..469: note = neuraminidase__InfluenzaA__AAY28268

SEQ ID NO: 14233 - protein, 469 aa, synthetic construct
  REGION 1..469: note = neuraminidase__InfluenzaA__AAY28278
MNPNQKIITIGSVSLTIATICFLMQIAILVTTVTLHFKQYECNSPPNNQVMLCEPTIIERNITEIVYLTNTTIEKEICPKLAEYRNWSKPQCKITGFAPFSKDNSIRLSAGGDIWVTREPYVSCDPDKCYQFALGQGTTLNNRHSNDTVHDRTPYRTLLMNELGVPFHLGTKQVCIAWSSSSCHDGKAWLHVCVTGHDENATASFIYDGRLVDSIGSWSKKILRTQESECVCINGTCTVVMTDGSASGRADTKILFIEEGKIVHTSKLSGSAQHVEECSCYPRYPGVRCVCRDNWKGSNRPIVDINVKDYSIVSSYVCSGLVGDTPRKNDSSSSSHCLDPNNEEGGHGVKGWAFDDGNDVWMGRTISEKSRSGYETFKVIEGWSKPNSKLQINRQVIVERGNRSGYSGIFSVEGKSCINRCFYVELIRGRKPETEVWWTSNSIVVFCGTSGTYGTGSWPDGADINLMPI

SEQ ID NO: 14234 - protein, 469 aa, synthetic construct; identical to SEQ ID NO: 14149
  REGION 1..469: note = neuraminidase__InfluenzaA__AAY28288

SEQ ID NO: 14235 - protein, 469 aa, synthetic construct
  REGION 1..469: note = neuraminidase__InfluenzaA__AAY28298
MNPNQKIITIGSVSLTIATICFLMQIAILVTTVTLHFKQHECNSPPNNQVMLCEPTIIERNITEIVYLTNTTIEKEICPKLAEYRNWSKPQCNITGFAPFSKDNSIRLSAGGDIWVTREPYVSCDPDKCYQFALGQGTTLNNGHSNDTVHDRTPYRTLLMNELGVPFHLGTRQVCIAWSSSSCHDGKAWLHVCVTGDDKNATASFIYNGRLVDSIGSWSKKILRTQESECVCINGTCTVVMTDGSASGKADTKILFIEEGKIVHISTLSGSAQHVEECSCYPRYPGVRCVCRDNWKGSNRPIVDINVKDYSIVSSYVCSGLVGDTPRKNDSSSSSHCLDPNNEEGGHGVKGWAFDDGNDVWMGRTISEKLRSGYETFKVIEGWSRPNSKLQINRQVIVERGNRSGYSGIFSVEGKSCINRCFYVELIRGRKEETEVWWTSNSIVVFCGTSGTYGTGSWPDGADINLMPI

SEQ ID NO: 14236 - protein, 469 aa, synthetic construct; identical to SEQ ID NO: 14166
  REGION 1..469: note = neuraminidase__InfluenzaA__AAY28308

SEQ ID NO: 14237 - protein, 469 aa, synthetic construct
  REGION 1..469: note = neuraminidase__InfluenzaA__AAY28318
MNPNQKIITIGSVSLTIATICFLMQIAILVTTVTLHFKQYECNSPPNNQVMLCEPTIIERNITEIVYLTNTTIEKEICPKLAEYRNWSKPQCNITGFAPFSKDNSIRLSAGGDIWVTREPYVSCDPDKCYQFALGQGTTLNNGHSNDTVHDRTPYRTLLMNELGVPFHLGTRQVCIAWSSSSCHDGKAWLHVCVTGDDENATASFIYNGRLVDSIGSWSKKILRTQESECVCINGTCAVVMTDGSASGKADTKILFIEEGKIVHISTLSGSAQHVEECSCYPRYPGVRCVCRDNWKGSNRPIVDINVKDYSIVSSYVCSGLVGDTPRKNDSFSSSHCLDPNNEEGGHGVKGWAFDDGNDVWMGRTISEKLRSGYETFKVIEGWSKPNSKLQTNRQVIVERGNRSGYSGIFSVEGKSCINRCFYVELIRGRKEETEVWWTSNSIVVFCGTSGTYGTGSWPDGADINLMPI

SEQ ID NO: 14238 - protein, 469 aa, synthetic construct
  REGION 1..469: note = neuraminidase__InfluenzaA__AAY28338
MNPNQKIITIGSVSLTIATICFLMQIAILVTTVTLHFKQYECNSPPNNQVMLCEPAIIERNITEIVYLTNTTIEKEIRPKLAEYRNWSKPQCNITGFAPFSKDNSIRLSAGGDIWVTREPYVSCDPDKCYQFALGQGTTLNNGHSNDTVHDRTPYRTLLMNELGVPFHLGTRQVCIAWSSSSCHDGKAWLHVCVTGDDENATASFIYNGRLVDSIGSWSKKILRTQESECVCINGTCTVVMTDGSASGKADTKILFIEEGKIVNISTLSGSAQHVEECSCYPRYPGVRCVCRDNWKGSNRPIVDINVKDYSIVSSYVCSGLVGDTPRKNDSFSSSHCLDPNNEEGGHGVKGWAFDDGNDVWMGRTISEKLRSGYETFKVIEGWSKPNSKLQINRQVIVERGNRSGYSGIFSVEGKSCINRCFYVELIRGRKEETEVWWTSNSIVVFCGTSGTYGTGSWPDGADINLMPI

SEQ ID NO: 14239 - protein, 469 aa, synthetic construct; identical to SEQ ID NO: 14145
  REGION 1..469: note = neuraminidase__InfluenzaA__AAY28348

SEQ ID NO: 14240 - protein, 469 aa, synthetic construct; identical to SEQ ID NO: 14061
  REGION 1..469: note = neuraminidase__InfluenzaA__AAY28358

SEQ ID NO: 14241 - protein, 469 aa, synthetic construct; identical to SEQ ID NO: 14145
  REGION 1..469: note = neuraminidase__InfluenzaA__AAY28388

SEQ ID NO: 14242 - protein, 469 aa, synthetic construct; identical to SEQ ID NO: 14150
  REGION 1..469: note = neuraminidase__InfluenzaA__AAY28398

SEQ ID NO: 14243 - protein, 469 aa, synthetic construct; identical to SEQ ID NO: 14164
  REGION 1..469: note = neuraminidase__InfluenzaA__AAY28408

SEQ ID NO: 14244 - protein, 469 aa, synthetic construct; identical to SEQ ID NO: 14137
  REGION 1..469: note = neuraminidase__InfluenzaA__AAY28505

SEQ ID NO: 14245 - protein, 469 aa, synthetic construct
  REGION 1..469: note = neuraminidase__InfluenzaA__AAY28524
MNPNQKIITIGSVSLTIATICFLMQIAILVTTVTLHFKQHECNSPPNNQVMLCEPTIIERNITEIVYLTNTTIEKEICPKLAEYRNWSKPQCNITGFAPFSKDNSIRLSAGGDIWVTREPYVSCDPDKCYQFALGQGTTLNNGHSNYTVHDRTPYRTLLMNELGVPFHLGTRQVCIAWSSSSCHDGKAWLHVCVTGDDKNATASFIYNGRLVDSIGSWSKKILRTQESECVCINGTCTVVMTDGSASGKADTKILFIEEGKIVHISTLSGSAQHVEECSCYPRYPGVRCVCRDNWKGSNRPIVDINVKDYSIVSSYVCSGLVGDTPRKNDSSSSSHCLDPNNEEGGHGVKGWAFDDGNDVWMGRTISEKLRSGYETFKVIEGWSKPNSKLQINRQVIVERGNRSGYSGIFSVEGKSCINRCFYVELIRGRKEETEVWWTSNSIVVFCGTSGTYGTGSWPDGADINLMPI

SEQ ID NO: 14246 - protein, 469 aa, synthetic construct; identical to SEQ ID NO: 14135
  REGION 1..469: note = neuraminidase__InfluenzaA__AAY28534

SEQ ID NO: 14247 - protein, 469 aa, synthetic construct
  REGION 1..469: note = neuraminidase__InfluenzaA__AAY28544
MNPNQKIITIGSVSLTIATICFLMQIAILVTTVTLHFKQHECNSPPNNQVMLCEPTIIERNITEIVYLTNTTIEKEICPKLAEYRNWSKPQCNITGFAPFSKDNSIRLSAGGDIWVTREPYVSCDPNKCYQFALGQGTTLNNGHSNDTVHDRTPYRTLLMNELGVPFHLGTRQVCIAWSSSSCHDGKAWLHVCVTGDDKNATASFIYNGRLVDSIGSWSKKILRTQESECVCINGTCTVVMTDGSASGKADTKILFIEEGKIVHISTLSGSAQHVEECSCYPRYPGVRCVCRDNWKGSNRPIVDINVKDYSIVSSYVCSGLVGDTPRKNDSFSSSHCLDPNNEEGGHGVKGWAFDDGNDVWMGRTISEKLRSGYETFKVIEGWSKPNSKLQINRQVIVERGNRSGYSGIFSVEGKSCINRCFYVELIRGRKEETEVWWTSNSIVVFCGTSGTYGTGSWPDGADINLMPI

SEQ ID NO: 14248 - protein, 469 aa, synthetic construct; identical to SEQ ID NO: 14061
  REGION 1..469: note = neuraminidase__InfluenzaA__AAY28554

SEQ ID NO: 14249 - protein, 469 aa, synthetic construct
  REGION 1..469: note = neuraminidase__InfluenzaA__AAY28564
MNPNQKIITIGSVSLTIATICFLMQIAILVTTVTLHFKQHECNSPPNNQVMLCEPTIIERNITEIVYLTNTTIEKEICPKLAEYRNWSKPQCNITGFAPFSKDNSIRLSAGGDIWVTREPYVSCDPDKCYQFALGQGTTLNNGHSNDTVHDRTPYRTLLMNELGVPFHLGTRQVCIAWSSSSCHDGKAWLHVCVTGDDKNATASFIYNGRLVDSIGSWSKKILRTQESECVCINGTCTVVMTDGSASGKADTKILFIEEGKIVHISTLSGSAQHVEECSCYPRYPGVRCVCRDNWKGSNRPIVDINVKDYSIVSSYVCSGLVGDTPRKNDSSSSSHCLDPNNEEGGHGVKGWAFDDGNDVWMGRTISEKLRSGYETFKVIEGWSRPNSKLQINRQVIVERGNRSGYSGIFSVESKSCINRCFYVELIRGRKEETEVWWTSNSIVVFCGTSGTYGTGSWPDGADINLMPI

SEQ ID NO: 14250 - protein, 469 aa, synthetic construct; identical to SEQ ID NO: 14135
  REGION 1..469: note = neuraminidase__InfluenzaA__AAY28574

SEQ ID NO: 14251 - protein, 469 aa, synthetic construct; identical to SEQ ID NO: 14149
  REGION 1..469: note = neuraminidase__InfluenzaA__AAY28584

SEQ ID NO: 14252 - protein, 469 aa, synthetic construct; identical to SEQ ID NO: 14061
  REGION 1..469: note = neuraminidase__InfluenzaA__AAY28594

SEQ ID NO: 14253 - protein, 469 aa, synthetic construct
  REGION 1..469: note = neuraminidase__InfluenzaA__AAY28611
MNPNQKIITIGSVSLTIATICFLMQIAILVTTVTLHFKQYECNSPPNNQVMLCEPTIIERNITEIVYLTNTTIEKEICPKLAEYRNWSKPQCNITGFAPFSKDNSIRLSAGGDIWVTREPYVSCDPDKCYQFALGQGTTLNNGHSNDTVHDRTPYRTLLMNELGVPFHLGTKQVCIAWSSSSCHDGKAWLHVCVTGDDENATASFIYNGRLVDSIGSWSKKILRTQESECVCINGTCTVVMTDGSASGKADTKILFIEEGKIVHTSSLSGSAQHVEECSCYPRYPGVRCVCRDNWKGSNRPIVDINVKDYSIVSSYVCSGLVGDTPRKNDSSSSSHCLDPNNEEGGHGVKGWAFDDGNDVWMGRTISEKLRSGYETFKVIEGWSKPNSKLQINRQVIVDRGNRSGYSGIFSVEGKSCINRCFYVELIRGRKQETEVLWTSNSIVVFCGTSGTYGTGSWPDGADINLMPI

SEQ ID NO: 14254 - protein, 469 aa, synthetic construct; identical to SEQ ID NO: 14166
  REGION 1..469: note = neuraminidase__InfluenzaA__AAY28651

SEQ ID NO: 14255 - protein, 469 aa, synthetic construct
  REGION 1..469: note = neuraminidase__InfluenzaA__AAY44613
MNPNQKIITIGSVSLTIATICFLMQIAILVTTVTLHFKQHECNSPPNNQVMLCEPTIIERNITEIVYLTNTTIEKEICPKIAEYRNWSKPQCNITGFAPFSKDNSIRLSAGGDIWVTREPYVSCDPDKCYQFALGQGTTLNNGHSNDTVHDRTPYRTLLMNELGVPFHLGTRQVCIAWSSSSCHDGKAWLHVCVTGDDKNATASFIYNGRLVDSIGSWSKKILRTQESECVCINGTCTVVMTDGSASGKADTKILFIEEGKIVHISTLSGSAQHVEECSCYPRYPGVRCVCRDNWKGSNRPIVDINVKDYSIVSSYVCSGLVGDTPRKNDSSSSSHCLDPNNEEGGHGVKGWAFDDGNDVWMGRTISEKLRSGYETFKVIEGWSKPNSKLQINRQVIVERGNRSGYSGIFSVEGKSCINRCFYVELIRGRKEETEVWWTSNSIVVFCGTSGTYGTGSWPDGADINLMPI

SEQ ID NO: 14256 - protein, 469 aa, synthetic construct; identical to SEQ ID NO: 14149
  REGION 1..469: note = neuraminidase__InfluenzaA__AAY44624

SEQ ID NO: 14257 - protein, 469 aa, synthetic construct; identical to SEQ ID NO: 14171
  REGION 1..469: note = neuraminidase__InfluenzaA__AAY44634

SEQ ID NO: 14258 - protein, 469 aa, synthetic construct; identical to SEQ ID NO: 14164
  REGION 1..469: note = neuraminidase__InfluenzaA__AAY44644

SEQ ID NO: 14259 - protein, 469 aa, synthetic construct
  REGION 1..469: note = neuraminidase__InfluenzaA__AAY44654
MNPNQKIITIGSVSLTIATICFLMQIAILVTTVTLHFKQYECNSPPNNQVMLCEPTIIERNITEIVYLTNTTIEKEICPKLAEYRNWSKPQCNITGFAPFSKDNSIRLSAGGDIWVTREPYVSCDPDKCYQFALGQGTTLNNGHSNDTVHDRTPYRTLLMNELGVPFHLGTKQVCIAWSSSSCHDGKAWLHVCVTGDDENATASFIYNGRLVDSIGSWSKKILRTQESECVCINGTCTVVMTDGSASGKADTKILFIEEGKIVHTSSLSGSAQHVEECSCYPRYPGVRCVCRDNWKGSNRPIVDINVKDYSIVSSYVCSGLVGDTPRKNDSSSSSHCLDPNNEEGGHGVKGWAFDDGNDVWMGRTISEKLRSGYETFKVIEGWSKPNSKLQIHRQVIVDRGNRSGYSGIFSVEGKSCINRCFYVELIRGRKQETEVLWTSNSIVVFCGTSGTYGTGSWPDGADINLMPI

SEQ ID NO: 14260 - protein, 469 aa, synthetic construct
  REGION 1..469: note = neuraminidase__InfluenzaA__AAY44758
MNPNQKIITIGSVSLTIATICFLMQIAILVTTVTLHFKQYECNSPSNNQVMLCEPTIIERNITEIVYLTNTTIEKEICPKLAEYRNWSKPQCKITGFAPFSKDNSIRLSAGGDIWVTREPYVSCDPDKCYQFALGQGTTLNNRHSNDTVHDRTPYRTLLMNELGVPFHLGTKQVCIAWSSSSCHDGKAWLHVCVTGHDENATASFIYDGRLVDSIGSWSKKILRTQESECVCINGTCTVVMTDGSASGRADTKILFIEEGKIVHTSKLSGSAQHVEECSCYPRYPGVRCVCRDNWKGSNRPIVDINVKDYSIVSSYVCSGLVGDTPRKNDSSSSSHCLDPNNEEGGHGVKGWAFDDGNDVWMGRTISEKSRSGYETFKVIEGWSKPNSKLQINRQVIVERGNRSGYSGIFSVEGKSCINRCFYVELIRGRKPETEVWWTSNSIVVFCGTSGTYGTGSWPDGADINLMPI

SEQ ID NO: 14261 - protein, 469 aa, synthetic construct; identical to SEQ ID NO: 14061
  REGION 1..469: note = neuraminidase__InfluenzaA__AAY44778

SEQ ID NO: 14262 - protein, 469 aa, synthetic construct
  REGION 1..469: note = neuraminidase__InfluenzaA__AAY44788
MNPNQKIITIGSVSLTIATICFLMQIAILVTTVTLHFKQYECNSPPNNQVMLCEPTIIERNITEIVYLTNTTIEKEICPKLAEYRNWSKPQCNITGFAPFSKDNSIRLSAGGDIWVTREPYVSCDPDKCYQFALGQGTTLNNGHSNDTVHDRTPYRTLLMNELGVPFHLGTKQVCIAWSSSSCHDGKAWLHVCVTGDDENATASFIYNGRLVDSIGSWSKKILRTQESECVCINGTCTVVMTDGSASGKADTKILFIEEGKIVHTSLLSGSAQHVEECSCYPRYPGVRCVCRDNWKGSNRPIVDINVKDYSIVSSYVCSGLVGDTPRKNDSSSSSHCLDPNNEEGGHGVKGWAFDDGNDVWMGRTISEKLRSGYEIFKVIEGWSKPNSKLQINRQVIVDRGNRSGYSGIFSVEGKSCINRCFYVELIRGRKQETEVLWTSNSIVVFCGTSGTYGTGSWPDGADINLMPI

SEQ ID NO: 14263 - protein, 469 aa, synthetic construct; identical to SEQ ID NO: 14137
  REGION 1..469: note = neuraminidase__InfluenzaA__AAY44909

SEQ ID NO: 14264 - protein, 469 aa, synthetic construct; identical to SEQ ID NO: 14164
  REGION 1..469: note = neuraminidase__InfluenzaA__AAY45649

SEQ ID NO: 14265 - protein, 469 aa, synthetic construct
  REGION 1..469: note = neuraminidase__InfluenzaA__AAY46374
MNPNQKIITIGSVSLTIATICFLMQIAILVTTVTLHFKQYECNSPPNNQVMLCEPTIIERNITEIVYLTNTTIEKEICPKLAEYRNWSKPQCKITGFAPFSKDNSIRLSAGGDIWVTREPYVSCDPYKCYQFALGQGTTLNNRHSNDTVHDRTPYRTLLMNELGVPFHLGTKQVCIAWSSSSCHDGKAWLHVCVTGHDENATASFIYDGRLVDSIGSWSKKILRTQESECVCINGTCTVVMTDGSASGRADTKILFIEEGKIVHTSKLSGSAQHVEECSCYPRYPGVRCVCRDNWKGSNRPIVDINVKDYSIVSSYVCSGLVGDTPRKNDSSSSSHCLDPNNEEGGHGVKGWAFDDGNDVWMGRTISEKSRSGYETFKVIEGWSKPNSKLQINRQVIVERGNMSGYSGIFSVEGKSCINRCFYVELIRGRKQETEVWWTSNSIVVFCGTSGTYGTGSWPDGADINLMPI

SEQ ID NO: 14266 - protein, 469 aa, synthetic construct
  REGION 1..469: note = neuraminidase__InfluenzaA__AAY46384
MNPNQKIITIGSVSLTIATICFLMQIAILVTTVTLHFKQHECNSPPNNQVMLCEPTIIERNITEIVYLTNTTIEKEICPKLAEYRNWSKPQCNITGFAPFSKDNSIRLSAGGDIWVTREPYVSCDPDKCYQFALGQGTTLNNGHSNDAVHDRTPYRTLLMNELGVPFHLGTRQVCIAWSSSSCHDGKAWLHVCVTGDDKNATASFIYNGRLVDSIGSWSKKILRTQESECVCINGTCTVVMTDGSASGKADTKILFIEEGKIVHISTLSGSAQHVEECSCYPRYPGVRCVCRDNWKGSNRPIVDINVKDYSIVSSYVCSGLVGDTPRKNDSFSSSHCLDPNNEEGGHGVKGWAFDDGNDVWMGRTISEKLRSGYETFKVIEGWSKPNSKLQINRQVIVERGNRSGYSGIFSVEGKSCINRCFYVELIRGRKEETEVWWTSNSIVVFCGTSGTYGTGSWPDGADINLMPI

SEQ ID NO: 14267 - protein, 469 aa, synthetic construct
  REGION 1..469: note = neuraminidase__InfluenzaA__AAY46394
MNPNQKIITIGSVSLTIATICFLMQIAILITTVTLHFKQYECNSPPNNQVMLCEPTIIERNITEIVYLTNTTIEKEICPKLAEYRNWSKPQCNITGFAPFSKDNSIRLSAGGDIWVTREPYVSCDPDKCYQFALGQGTTLNNGHSNDTVHDRTPYRTLLMNELGVPFHLGTKQVCIAWSSSSCHDGKAWLHVCVTGDDENATASFIYNGRLVDSIGSWSKKILRTQESECVCINGTCTVVMTDGSASGKADTKILFIEEGKIVHTSSLSGSAQHVEECSCYPRYPGVRCVCRDNWKGSNRPIVDINVKDYSIVSSYVCSGLVGDTPRKNDSSSSSHCLDPNNEEGGHGVKGWAFDDGNDVWMGRTISEKLRSGYETFKVIEGWSKPNSKLQINRQVIVDRGNRSGYSGIFSVEGKSCINRCFYVELIRGRKQETEVLWTSNSIVVFCGTSGTYGTGSWPDGADIDLMPI

SEQ ID NO: 14268 - protein, 469 aa, synthetic construct
  REGION 1..469: note = neuraminidase__InfluenzaA__AAY46419
MNPNQKIITIGSVSLTIATICFLMQIAILVTTVTLHFKQYECNSLPNNQVMLCEPTILERNITEIVYLTNTTIEKEICPKLAEYRNWSKPQCKITGFAPFSKDNSIRLSAGGDIWVTREPYVSCDPDKCYQFALGQGTTLNNRHSNDTVHDRTPYRTLLMNELGVPFHLGTKQVCIAWSSSSCHDGKAWLHVCVTGHNENATASFIYGGRLVDSIGSWSKKILRTQESECVCINGTCTVVMTDGSASGRADTKILFIEEGKIIHISQLSGSAQHVEECSCYPRYPGVRCVCRDNWKGSNRPIVDINVKDYSIVSSYVCSGLVGDTPRKNDSSSSSHCLNPNNEEGGHGVKGWAFDDGNDVWMGRTISEKFRSGYETFKVIEGWSKPNSKLQINRQVIVDRDNRSGYSGIFSVEGKSCINRCFYVELIRGRKQETEVWWTSNSIVVFCGTSGTYGTGSWPDGADINLMPI

SEQ ID NO: 14269 - protein, 469 aa, synthetic construct
  REGION 1..469: note = neuraminidase__InfluenzaA__AAY47016
MNPNQKIITIGSVSLTIATICFLMQIAILVTTVTLHFKQYECNSPPNNQVMLCEPTIIERNITEIVYLTNTTIEKEICPKLAEYRNWSKPQCNITGFAPFSKDNSIRLSAGGDIWVTREPYVSCDPDKCYQFALGQGTTLNNGHSNDTVHDRTPYRTLLMNELGVPFHLGTRQVCIAWSSSSCHDGKAWLHVCVTGDDENATASFIYNGRLVDSIGSWSKKILRTQESECVCINGTCTVVMTDGSASGKADTKILFIEEGKIVHISTLSGNAQHVEECSCYPRYPGVRCVCRDNWKGSNRPIVDINVKDYSIVSSYVCSGLVGDTPRKNDSFSSSHCLDPNSEEGGHGVKGWAFDDGNDVWMGRTISEKLRSGYETFKVIEGWSKPNSKLQINRQVIVERGNRSGYSGIFSVEGKSCINRCFYVELIRGRKEETEVWWTSNSIVVFCGTSGTYGTGSWPDGADINLMPI

SEQ ID NO: 14270 - protein, 469 aa, synthetic construct
  REGION 1..469: note = neuraminidase__InfluenzaA__AAY47055
MNPNQKIITIGSVSLTIATICFLMQIAILVTTVTLHFKQYECNSPPNNQVMLCEPTIIERNITEIVYLTNTTIEKEICPKLAEYRNWSKPQCNITGFAPFSKDNSIRLSAGGDIWVTREPYVSCDPDKCYQFALGQGTTLNNGHSNDTVHDRTPYRTLLMNELGVPFHLGTKQVCIAWSSSSCHDGKAWLHVCVTGDDENATASFIYNGRLVDSIGSWSKKILRTQESECVCINGTCTVVMTDGSASGKADTKILFIEEGKIVHTSLLSGSAQHVEECSCYPRYPGVRCVCRDNWKGSNRPIVDINVKDYSIVSSYVCSGLVGDTPRKNDSSSSSHCLDPNNEEGGHGVKGWAFDDGNDVWMGRTISEKLRSGYETFKVIEGWSKPNSKLQINRQVIVDRGNRSGYSGIFSVEGKSCINRCFYVELIRGRKQETEVLWTSNSIVVFCGTSGTYGTGSWPDGADINLFPI

SEQ ID NO: 14271 - protein, 469 aa, synthetic construct
  REGION 1..469: note = neuraminidase__InfluenzaA__AAY47078
MNPNQKIITIGSVSLTIATICFLMQIAILVTTVTLHFKQYECNSPPNNQVMLCEPTIIERNITEIVYLTNTTIEKEICPKLAEYRNWSKPQCNITGFAPFSKDNSIRLSAGGDIWVTREPYVSCDHDKCYQFALGQGTTLNNGHSNDTVHDRTPYRTLLMNELGVPFHLGTKQVCIAWSSSSCHDGKAWLHVCVTGDDENATASFIYNGRLVDSIGSWSKKILRTQESECVCINGTCTVVMTDGSASGKADTKILFIEEGKIVHISTLSGSAQHVEECSCYPRYPGVRCVCRDNWKGSNRPIVDINVKDYSIVSSYVCSGLVGDTPRKNDSFSSSHCLDPNNEEGGHGVKGWAFDDGNDVWMGRTISEKLRSGYETFKVIEGWSKPNSKLQINRQVIVERGNRSGYSGIFSVEGKSCINRCFYVELIRGRKEETEVWWTSNSIVVFCGTSGTYGTGSWPDGADINLMPI

SEQ ID NO: 14272 - protein, 469 aa, synthetic construct
  REGION 1..469: note = neuraminidase__InfluenzaA__AAY47088
MNPNQKIITIGSVSLTISTICFFMQIAILITTVTLHFKQYEFNSPPNNQVMLCEPTIIERNITEIVYLTNTTIEKEICPKLAEYRNWSKPQCNITGFAPFSKDNSIRLSAGGDIWVTREPYVSCDPDKCYQFALGQGTTLNNVHSNDTVHDRTPYRTLLMNELGVPFHLGTKQVCIAWSSSSCHDGKAWLHVCVTGDDENATASFIYNGRLVDSIVSWSKKILRTQESECVCINGTCTVVMTDGSASGKADTKILFIEEGKIVHTSTLSGSAQHVEECSCYPRYPGVRCVCRDNWKGSNRPIVDINIKDHSIVSSYVCSGLVGDTPRKNDSSSSSHCLDPNNEEGGHGVKGWAFDDGNDVWMGRTISEKLRSGYETFKVIEGWSNPNSKLQINRQVIVDRGNRSGYSGIFSVEGKSCINRCFYVELIRGRKQETEVLWTSNSIVVFCGTSGTYGTGSWPDGADINLMPI

SEQ ID NO: 14273 - protein, 469 aa, synthetic construct; identical to SEQ ID NO: 14137
  REGION 1..469: note = neuraminidase__InfluenzaA__AAY58319

SEQ ID NO: 14274 - protein, 463 aa, synthetic construct
  REGION 1..463: note = neuraminidase__InfluenzaA__AAY59038
MNPNQKIITIGSVSLTIATICFLMQIAILVTTVTLHFKQYECNSPPNNQVMLCEPTIIERNITEIVYLTNTTIEKEICPKLAEYRNWSKPQCNITGFAPFSKDNSIRLSAGGDIWVTREPYVSCDPDKCYQFALGQGTTNDTVHDRTPYRTLLMNELGVPFHLGTKQVCIAWSSSSCHDGKAWLHVCVTGDDENATASFIYNGRLVDSIGSWSKKILRTQESECVCINGTCTVVMTDGSASGKADTKILFIEEGKIVHTSPLSGSAQHVEECSCYPRYPGVRCVCRDNWKGSNRPIVDINVKDYSIVSSYVCSGLVGDTPRKNDSSSSSHCLDPNNEEGGHGVKGWAFDDGNDVWMGRTISEKLRSGYETFKVIEGWSKPNSKLQINRQVIVDRGNRSGYSGIFSVEGKSCINRCFYVELIRGRKQETEVLWTSNSIVVFCGTSGTYGTGSWPDGADINLMPI

SEQ ID NO: 14275 - protein, 469 aa, synthetic construct
  REGION 1..469: note = neuraminidase__InfluenzaA__AAY64195
MNPNQKIITIGSVSLTIATICFLMQIAILVTTVTLHFKQYECNSLPNNQVMLCEPTIIERNITEIVYLTNTTIEKEICPKLAEYRNWSKPQCKITGFAPFSKDNSIRLSAGGDIWVTREPYVSCDPDKCYQFALGQGTTLNNRHSNDTVHDRTPYRTLLMNELGVPFHLGTKQVCIAWSSSSCHDGKAWLHVCVTGHDENATASFIYDGRLVDSIGSWSKKILRTQESECVCINGTCTVVMTDGSASGRADTKILFIEEGKIIHISQLSGSAQHVEECSCYPRYPGVRCVCRDNWKGSNRPIVDINVKDYSIVSSYVCSGLVGDTPRKNDSSSSSHCLNPNNEEGGHGVKGWAFDDGNDVWMGRTISEKFRSGYETFKVIEGWSKPNSKLQINRQVIVDRDNRSGYSGIFSVEGKSCINRCFYVELIRGRKQEAEVWWTSNSIVVFCGTSGTYGTGSWPDGADINLMPI

SEQ ID NO: 14276 - protein, 469 aa, synthetic construct; identical to SEQ ID NO: 14135
  REGION 1..469: note = neuraminidase__InfluenzaA__AAY64205

SEQ ID NO: 14277 - protein, 469 aa, synthetic construct; identical to SEQ ID NO: 14061
  REGION 1..469: note = neuraminidase__InfluenzaA__AAY64215

SEQ ID NO: 14278 - protein, 469 aa, synthetic construct
  REGION 1..469: note = neuraminidase__InfluenzaA__AAY64225
MNPNQKIITIGSVSLTIATICFLMQITILVTTVTLHFKQYECNPPPNNQVMLCEPTIIERNITEIVYLTNTTIEKEICPKLAEYRNWSKPQCNITGFAPFSKDNSIRLSAGGDIWVTREPYVSCDPDKCYQFALGQGTTLNNGHSNDTVHDRTPYRTLLMNELGVPFHLGTRQVCIAWSSSSCHDGKAWLHVCVTGDDENATASFIYNGRLVDSIGSWSKKILRTQESECVCINGTCTVVMTDGSASGKADTKILFIEEGKIVHISTLSGSAQHVEECSCYPRYPGVRCVCRDNWKGSNRPIVDINVKDYSIVSSYVCSGLVGDTPRKNDSFSSSHCLDPNNEEGGHGVKGWAFDDGNDVWMGRTISEKLRSGYETFKVIEGWSKPNSKLQINRQVIVERGNRSGYSGIFSVEGKSCINRCFYVELIRGRKEENEVWWTSNSIVVFCGTSGTYGTGSWPDGADINLMPI

SEQ ID NO: 14279 - protein, 469 aa, synthetic construct
  REGION 1..469: note = neuraminidase__InfluenzaA__AAY64245
MNPNQKIITIGSVSLTIATICFLMQIAILVTTVTLHFKQYECNSLPNNQVMLCEPTILERNITEIVYLTNTTIEKEICPKLAEYRNWSKPQCKITGFAPFSKDNSIRLSAGGDIWVTREPYVSCDPDKCYQFALGQGTTLNNRHSNDTVHDRTPYRTLLMNELGVPFHLGTKQVCIAWSSSSCHDGKAWLHVCVTGHDENATASFIYGGRLVDSIGSWSKKILRTQESECVCINGTCTVVMTDGSASGRADTKILFIEEGKIIHISQLSGSAQHVEECSCYPRYPGVRCVCRDNWKGSNRPIVDINVKDYSIVSSYVCSGLVGDTPRKNDSSSSSHCLNPNNEEGGHGVKGWAFDDGNDVWMGRTISEKFRSGYETFKVIEGWSKPNSKLQINRQVIVDRDNRSGYSGIFSVEGKSCINRCFYVELIRGRKQETEVWWTSNSIVVFCGTSGTYGTGSWPDGADINLMPI

SEQ ID NO: 14280 - protein, 469 aa, synthetic construct; identical to SEQ ID NO: 14061
  REGION 1..469: note = neuraminidase__InfluenzaA__AAY64255

SEQ ID NO: 14281 - protein, 469 aa, synthetic construct; identical to SEQ ID NO: 14279
  REGION 1..469: note = neuraminidase__InfluenzaA__AAY64265

SEQ ID NO: 14282 - protein, 469 aa, synthetic construct; identical to SEQ ID NO: 14279
  REGION 1..469: note = neuraminidase__InfluenzaA__AAY64285

SEQ ID NO: 14283 - protein, 469 aa, synthetic construct
  REGION 1..469: note = neuraminidase__InfluenzaA__AAY64295
MNPNQKIITIGSVSLTIATICFLMQIAILVTTVTLHFKQYECNSPPNNQVMLCEPTIIERNITEIVYLTNTTIEKEICPKLSEYRNWSKPQCNITGFAPFSKDNSIRLSAGGDIWVTREPYVSCDPDKCYQFALGQGTTLNNGHSNDTVHDRTPYRTLLMNELGVPFHLGTKQVCIAWSSSSCHDGKAWLHVCVTGDDENATASFIYNGRLVDSIGSWSKKILRTQESECVCINGTCTVVMTDGSASGKADTKILFIEEGKIVHISTLSGSAQHVEECSCYPRYPGVRCVCRDNWKGSNRPIVDINVKDHSIVSSYVCSGLVGDTPRKNDSFSSSHCLDPNNEEGGHGVKGWAFDDGNDVWMGRTISEKLRSGYETFKVIEGWSKPNSKLQINRQVIVERGNRSGYSGIFSVEGKSCINRCFYVELIRGRKEETEVWWTSNSIVVFCGTSGTYGTGSWPDGADINLMPI

SEQ ID NO: 14284 - protein, 469 aa, synthetic construct
  REGION 1..469: note = neuraminidase__InfluenzaA__AAY64305
MNPNQKIITIGSVSLTIATICFLMQIAILVTTVTLHFKQYECNSPPNNQVMLCEPTIIERNITEIVYLTNTTIEKEICPKLAEYRNWSKPQCKITGFAPFSKDNSIRLSAGGDIWVTREPYVSCDPDKCYQFALGQGTTLNNRHSNDTVHDRTPYRTLLMNELGVPFHLGTKQVCIAWSSSSCHDGKAWLHVCVTGHDENATASFIYDGRLVDSIGSWSKKILRTQESECVCINGTCTVVMTDGSASGRADTKILFIEEGKIVHTSKLSGSAQHVEECSCYPRYPGVRCVCRDNWKGSNRPIVDINVKDYSIVSSYVCSGLVGDTPRKNDSSSSSHCLDPNNEEGGHGVKGWAFDDGNDVWMGRTISEKSRSGYETFKVIEGWSKPNSKLQINRQVIVERGNMSGYSGIFSVEGKSCINRCFYVELIRGRKQETEVWWTSNSIVVFCGTSGTYGTGSWPDGADINLMPI

SEQ ID NO: 14285 - protein, 469 aa, synthetic construct; identical to SEQ ID NO: 14135
  REGION 1..469: note = neuraminidase__InfluenzaA__AAY64335

SEQ ID NO: 14286 - protein, 469 aa, synthetic construct; identical to SEQ ID NO: 14150
  REGION 1..469: note = neuraminidase__InfluenzaA__AAY64365

SEQ ID NO: 14287 - protein, 469 aa, synthetic construct
  REGION 1..469: note = neuraminidase__InfluenzaA__AAY64385
MNPNQKIITIGSVSLTIATICFLMQIAILVTTVTLHFKQYECNSLPNNQVMLCEPTILERNITEIVYLTNTTIEKEICPKLAEYRNWSKPQCKITGFAPFSKDNSIRLSAGGDIWVTREPYVSCDPDKCYQFALGQGTTLNNRHSNDTVHDRTPYRTLLMNELGVPFHLGTKQVCIAWSSSSCHDGKAWLHVCVTGHDENATASFIYGGRLVDSIGSWSKKILRTQESECVCINGTCTVVMTDGSASGRADTKILFIEEGKIIHISQLSGSAQHVEECSCYPRYPGVRCVCRDNWKGSNRPIVDINVKDYSIVSSYVCSGLVGDTPRKNDSSSSSHCLNPNNEEGGHGVKGWAFDDGNDVWMGRTISEKSRSGYETFKVIEGWSKPNSKLQINRQVIVDRDNRSGYSGIFSVEGKSCINRCFYVELIRGRKQETEVWWTSNSIVVFCGTSGTYGTGSWPDGADINLMPI

SEQ ID NO: 14288 - protein, 469 aa, synthetic construct
  REGION 1..469: note = neuraminidase__InfluenzaA__AAY64395
MNPNQKIITIGSVSLIISTICFFMQIAILITTVTLHFKQYEFNSPPNNQVMLCEPTIIERNITEIVYLTNTTIEKEICPKLAEYRNWSKPQCDITGFAPFSKDNSIRLSAGGDIWVTREPYVSCDPDKCYQFALGQGTTLNNVHSNDTVHDRTPYRTLLMNELGVPFHLGTKQVCIAWSSSSCHDGKAWLHVCVTGDDENATASFIYNGRLVDSIVSWSKKILRTQESECVCINGTCTVVMTDGSASGKADTKILFIKEGKIVHTSTLSGSAQHVEECSCYPRYPGVRCVCRDNWKGSNRPIVDINIKDYSIVSSYVCSGLVGDTPRKNDSSSSSHCLDPNNEEGGHGVKGWAFDDGNDVWMGRTISEKLRSGYETFKVIEGWSNSNSKLQINRQVIVDRGNRSGYSGIFSVEGKSCINRCFYVELIRGRKEETEVLWTSNSIVVFCGTSGTYGTGSWPDGADINLMPI

SEQ ID NO: 14289 - protein, 469 aa, synthetic construct; identical to SEQ ID NO: 14284
  REGION 1..469: note = neuraminidase__InfluenzaA__AAY64405

SEQ ID NO: 14290 - protein, 469 aa, synthetic construct; identical to SEQ ID NO: 14279
  REGION 1..469: note = neuraminidase__InfluenzaA__AAY98040

SEQ ID NO: 14291 - protein, 469 aa, synthetic construct; identical to SEQ ID NO: 14279
  REGION 1..469: note = neuraminidase__InfluenzaA__AAY98050

SEQ ID NO: 14292 - protein, 469 aa, synthetic construct; identical to SEQ ID NO: 14171
  REGION 1..469: note = neuraminidase__InfluenzaA__AAY98060

SEQ ID NO: 14293 - protein, 469 aa, synthetic construct
  REGION 1..469: note = neuraminidase__InfluenzaA__AAY98070
MNPNQKIITIGSVSLTIATICFLMQIAILVTTVTLHFKQYECNSPPNNQVMLCEPTIIERNITEIVYLTNTTIEKEICPKLAEYRNWSKPQCNITGFAPFSKDNSIRLSAGGDIWVTREPYVSCDPDKCYQFALGQGTTLNNGHSNDTVHDRTPYRTLLMNELGVPFHLGTRQVCIAWSSSSCHDGKAWLHVCVTGDDENATASFIYNGRLVDSIGSWSKKILRTQESECVCINGTCTVVMTDGSASGKADTKILFIEEGKIVHISTLSGSAQHVEECSCYPRYPGVRCVCRDNWKGSNRPIVDINVKDHSIVSSYVCSGLVGDTPRKNDSFSSSHCLDPNNEEGGHGVKGWAFDDGNDVWMGRTISEKLRSGYEIFKVIEGWSKPNSKLQINRQVIVERGNRSGYSGIFSVEGKSCINRCFYVELIRGRKEETEVWWTSNSIVVFCGTSGTYGTGSWPDGADINLMPI

SEQ ID NO: 14294 - protein, 469 aa, synthetic construct; identical to SEQ ID NO: 14179
  REGION 1..469: note = neuraminidase__InfluenzaA__AAY98080

SEQ ID NO: 14295 - protein, 469 aa, synthetic construct
  REGION 1..469: note = neuraminidase__InfluenzaA__AAY98090
MNPNQKIITIGSVSLTIATICFLMQIAILVTTVTLHFKQYECNSLPNNQVMLCEPTIIERNITEIVYLTNTTIEKEICPKLAEYRNWSKPQCKITGFAPFSKDNSIRLSAGGDIWVTREPYVSCDPDKCYQFALGQGTTLNNRHSNDTVHDRTPYRTLLMNELGVPFHLGTKQVCIAWSSSSCHDGKAWLHVCVTGHDENATASFIYDGRLVDSIGSWSKKILRTQESECVCINGTCTVVMTDGSASGKADTKILFIEEGKIIHISQLSGSAQHVEECSCYPRYPGVRCVCRDNWKGSNRPIVDINVKDYSIVSSYVCSGLVGDTPRKNDSSSSSHCLNPNNEEGGHGVKGWAFDDGNDVWMGRTISEKFRSGYETFKVIEGWSKPNSKLQINRQVIVDRDNRSGYSGIFSVEGKSCINRCFYVELIRGRKQETEVWWTSNSIVVFCGTSGTYGTGSWPDGADINLMPI

SEQ ID NO: 14296 - protein, 469 aa, synthetic construct; identical to SEQ ID NO: 14279
  REGION 1..469: note = neuraminidase__InfluenzaA__AAY98100

SEQ ID NO: 14297 - protein, 469 aa, synthetic construct; identical to SEQ ID NO: 14279
  REGION 1..469: note = neuraminidase__InfluenzaA__AAY98110

SEQ ID NO: 14298 - protein, 469 aa, synthetic construct; identical to SEQ ID NO: 14279
  REGION 1..469: note = neuraminidase__InfluenzaA__AAY98120

SEQ ID NO: 14299 - protein, 469 aa, synthetic construct; identical to SEQ ID NO: 14279
  REGION 1..469: note = neuraminidase__InfluenzaA__AAY98130

SEQ ID NO: 14300 - protein, 469 aa, synthetic construct; identical to SEQ ID NO: 14279
  REGION 1..469: note = neuraminidase__InfluenzaA__AAY98150

SEQ ID NO: 14301 - protein, 469 aa, synthetic construct
  REGION 1..469: note = neuraminidase__InfluenzaA__AAY98160
MNPNQKIITIGSVSLTIATICFLMQIAILVTTVTLHFKQYECNSLPNNQVMLCEPTILERNITEIVYLTNTTIEKEICPKLAEYRNWSKPQCKITGFAPFSKDNSIRLSAGGDIWVTREPYVSCDPDKCYQFALGQGTTLNNRHSNDTVHDRTPYRTLLMNELGVPFHLGTKQVCIAWSSSSCHDGKAWLHVCVTGHDENATASFIYGGRLVDSIGSWSKKILRTQESECVCINGTCTVVMTDGSASGRADTKILFIEEGKIIHISQLSGNAQHVEECSCYPRYPGVRCVCRDNWKGSNRPIVDINVKDYSIVSSYVCSGLVGDTPRKNDSSSSSNCLNPNNEEGGHGVKGWAFDDGNDVWMGRTISEKFRSGYETFKVIEGWSKPNSKLQINRQVIVDRDNRSGYSGIFSVEGKSCINRCFYVELIRGRKQETEVWWTSNSIVVFCGTSGTYGTGSWPDGADINLMPI

SEQ ID NO: 14302 - protein, 469 aa, synthetic construct; identical to SEQ ID NO: 14279
  REGION 1..469: note = neuraminidase__InfluenzaA__AAY98170

SEQ ID NO: 14303 - protein, 469 aa, synthetic construct; identical to SEQ ID NO: 14279
  REGION 1..469: note = neuraminidase__InfluenzaA__AAY98180

SEQ ID NO: 14304 - protein, 469 aa, synthetic construct; identical to SEQ ID NO: 14279
  REGION 1..469: note = neuraminidase__InfluenzaA__AAY98200

SEQ ID NO: 14305 - protein, 469 aa, synthetic construct; identical to SEQ ID NO: 14279
  REGION 1..469: note = neuraminidase__InfluenzaA__AAY98210

SEQ ID NO: 14306 - protein, 469 aa, synthetic construct; identical to SEQ ID NO: 14284
  REGION 1..469: note = neuraminidase__InfluenzaA__AAY98220

SEQ ID NO: 14307 - protein, 469 aa, synthetic construct; identical to SEQ ID NO: 14279
  REGION 1..469: note = neuraminidase__InfluenzaA__AAY98230

SEQ ID NO: 14308 - protein, 469 aa, synthetic construct
  REGION 1..469: note = neuraminidase__InfluenzaA__AAY98250
MNPNQKIITIGSVSLTIATICFLMQIAILVTTVTLHFKQYECNSLPNNQVMLCEPTILERNITEIVYLTNTTIEKEICPKLAEYRNWSKPQCKITGFAPFSKDNSIRLSAGGDIWVTREPYVSCDPDKCYQFALGQGTTLNNRHSNDTVHDRTPYRTLLMNELGVPFHLGTKQVCIAWSSSSCHDGKAWLHVCVTGHDENATASFIYGGRLVDSIGSWSKKILRTQESECVCINGTCTVVMTDGSASGRADTKILFIEEGKIIHISQLSGSAQHVEECSCYPRYPGVRCVCRDNWKGSNRPIVDINVKDYSIVSSYVCSGLVGDTPRKNDSSSSSHCLNPNNEEGGHGVKGWAFDDGNDVWMGRTISEKFRSGYETFKVIEGWSKPNSKLQINRQVIVDRDNRSGYSGIFSVEDKSCINRCFYVELIRGRKQETEVWWTSNSIVVFCGTSGTYGTGSWPDGADINLMPI

SEQ ID NO: 14309 - protein, 469 aa, synthetic construct; identical to SEQ ID NO: 14279
  REGION 1..469: note = neuraminidase__InfluenzaA__AAY98322

SEQ ID NO: 14310 - protein, 469 aa, synthetic construct; identical to SEQ ID NO: 14284
  REGION 1..469: note = neuraminidase__InfluenzaA__AAY98332

SEQ ID NO: 14311 - protein, 469 aa, synthetic construct; identical to SEQ ID NO: 14279
  REGION 1..469: note = neuraminidase__InfluenzaA__AAY98342

SEQ ID NO: 14312 - protein, 469 aa, synthetic construct; identical to SEQ ID NO: 14279
  REGION 1..469: note = neuraminidase__InfluenzaA__AAY98359

SEQ ID NO: 14313 - protein, 469 aa, synthetic construct; identical to SEQ ID NO: 14284
  REGION 1..469: note = neuraminidase__InfluenzaA__AAY98369

SEQ ID NO: 14314 - protein, 469 aa, synthetic construct
  REGION 1..469: note = neuraminidase__InfluenzaA__AAY98379
MNPNQKIITIGSVSLTIATICFLMQIAILVTTVTLHFKQYECNSLPNNQVMLCEPTIIERNITEIVYLTNTTIEKEICPKLAEYRNWSKPQCKITGFAPFSKDNSIRLSAGGDIWVTREPYVSCDPDKCYQFALGQGTTLNNRHSNDTVHDRTPYRTLLMNELGVPFHLGTKQVCIAWSSSSCHDGKAWLHVCVTGHDENATASFIYGGRLVDSIGSWSKKILRTQESECVCINGTCTVVMTDGSASGRADTKILFIEEGKIIHISQLSGSAQHVEECSCYPRYPGVRCVCRDNWKGSNRPIVDINVKDYSIVSSYVCSGLVGDTPRKNDSSSSSHCLNPNNEEGGHGVKGWAFDDGNDVWMGRTISEKFRSGYETFKVIEGWSKPNSKLQINRQVIVDRNNRSGYSGIFSVEGKSCINRCFYVELIRGRKQETEVWWTSNSIVVFCGTSGTYGTGSWPDGADINLMPI

SEQ ID NO: 14315 - protein, 469 aa, synthetic construct
  REGION 1..469: note = neuraminidase__InfluenzaA__AAY98389
MNPNQKIITIGSVSLTIATICFLMQIAILVTTVTLHFKQYECNSLPNNQVMLCEPTIIERNITEIVYLTNTTIEKEICPKLAEYRNWSKPQCKITGFAPFSKDNSIRLSAGGDIWVTREPYVSCDPDKCYQFALGQGTTLNNRHSNDTVHDRTPYRTLLMNELGVPFHLGTKQVCIAWSSSSCHDGKAWLHVCVTGHDENATASFIYGGRLVDSIGSWSKKILRTQESECVCINGTCTVVMTDGSASGRADTKILFIEEGKIIHISQLSGSAQHVEECSCYPRYPGVRCVCRDNWKGSNRPIVDINVKDYSIVSSYVCSGLVGDTPRKNDSSSSSHCLNPNNEEGGHGVKGWAFDDGNDVWMGRTISEKFRSGYETFKVIEGWSKPNSKLQINRQVIVDRDNRSGYSGIFSVEGKSCINRCFYVELIRGRKQETEVWWTSNSIVVFCGTSGTYGTGSWPDGADINLMPI

SEQ ID NO: 14316 - protein, 469 aa, synthetic construct; identical to SEQ ID NO: 14279
  REGION 1..469: note = neuraminidase__InfluenzaA__AAY98399

SEQ ID NO: 14317 - protein, 469 aa, synthetic construct; identical to SEQ ID NO: 14279
  REGION 1..469: note = neuraminidase__InfluenzaA__AAY98409

SEQ ID NO: 14318 - protein, 469 aa, synthetic construct; identical to SEQ ID NO: 14279
  REGION 1..469: note = neuraminidase__InfluenzaA__AAY98773

SEQ ID NO: 14319 - protein, 469 aa, synthetic construct
  REGION 1..469: note = neuraminidase__InfluenzaA__AAZ32955
MNPNQKIITIGSVSLTISTICFFMQIAILITTVTLHFKQYEFNSPPNNQVMLCEPTIIERNITEIVYLTNTTIEKEICPKLAEYRNWSKPQCNITGFAPFSKDNSIRLSAGGDIWVTREPYVSCDPDKCYQFALGQGTTLNNVHSNDIVHERTPYRTLLMNELGVPFHLGTKQVCIAWSSSSCHDGKAWLHVCVTGDDENATASFIYNGRLVDSIVSWSKKILRTQESECVCINGTCTVVMTDGSASGKADTKILFIEEGKIVHTSTLSGSAQHVEECSCYPRYPGVRCVCRDNWKGSNRPIVDINIKDYSIVSSYVCSGLVGDTPRKNDSSSSSHCLDPNNEEGGHGVKGWAFDDGNDVWMGRTISEKLRSGYETFKVIEGWSNPNSKLQINRQVIVDRGNRSGYSGIFSVEGKSCINRCFYVELIRGRKQETEVLWTSNSIVVFCGTSGTYGTGSWPDGADINLMPI

SEQ ID NO: 14320 - protein, 447 aa, synthetic construct
  REGION 1..447: note = neuraminidase__InfluenzaA__AAZ32957
MNPNQKIITIGSVSLTISTICFFMQIAILITTVTLIERNITEIVYLTNTTIEKEICPKLAEYRNWSKPQCNITGFAPFSKDNSIRLSAGGDIWVTREPYVSCDPDKCYQFALGQGTTLNNVHSNDTVHDRTPYRTLLMNELGVPFHLGTKQVCIAWSSSSCHDGKAWLHVCVTGDDENATASFIYNGRLVDSIVSWSKKILRTQESECVCINGTCTVVMTDGNASGKADTKILFIEEGKIVHTSTLSGSAQHVEECSCYPRYPGVRCVCRDNWKGSNRPIVDINIKDYSIVSSYVCSGLVGDTPRKNDSSSSSHCLDPNNEEGGHGVKGWAFDDGNDVWMGRTISEKLRSGYETFKVIEGWSNPNSKLQINRQVIVDRGNRSGYSGIFSVEGKSCINRCFYVELIRGRKQETEVLWTSNSIVVFCGTSGTYGTGSWPDGADINLMPI

SEQ ID NO: 14321 - protein, 447 aa, synthetic construct; identical to SEQ ID NO: 14320
  REGION 1..447: note = neuraminidase__InfluenzaA__AAZ32958

SEQ ID NO: 14322 - protein, 447 aa, synthetic construct; identical to SEQ ID NO: 14320
  REGION 1..447: note = neuraminidase__InfluenzaA__AAZ32959

SEQ ID NO: 14323 - protein, 469 aa, synthetic construct; identical to SEQ ID NO: 14284
  REGION 1..469: note = neuraminidase__InfluenzaA__AAZ38465

SEQ ID NO: 14324 - protein, 469 aa, synthetic construct; identical to SEQ ID NO: 14284
  REGION 1..469: note = neuraminidase__InfluenzaA__AAZ38476

SEQ ID NO: 14325 - protein, 469 aa, synthetic construct
  REGION 1..469: note = neuraminidase__InfluenzaA__AAZ38487
MNPNQKIITIGSVSLTIATICFLMQIAILVTTVTLHFKQYECNSLPNNQVMLCEPTILERNITEIVYLTNTTIEKEICPKLAEYRNWSKPQCKITGFAPFSKDNSIRLSAGGDIWVTREPYVSCDPDKCYQFALGQGTTLNNRHSNDTVHDRTPYRTLLMNELGVPFHLGTKQVCIAWSSSSCHDGKAWLHVCVTGHDENATASFIYGGRLVDSIGSWSKKILRTQESECVCINGTCTVVMTDGSASGRADTKILFIEEGKIIHISQLSGSAQHVEECSCYPRYPGVRCVCRDNWKGSNRPIVDINVKDYSIVSSYVCSGLVGDTPRKNDSSSSSNCLNPNNEEGGHGVKGWAFDDGNDVWMGRTISEKFRSGYETFKVIEGWSKPNSKLQINRQVIVDRDNRSGYSGIFSVEGKSCINRCFYVELIRGRKQETEVWWTSNSIVVFCGTSGTYGTGSWPDGADINLMPI

SEQ ID NO: 14326 - protein, 469 aa, synthetic construct
  REGION 1..469: note = neuraminidase__InfluenzaA__AAZ38509
MNPNQKIITIGSVSLTISTICFFMQIAILITTVTLHFKQYEFNSPPNNQVMLCEPTIIERNITEIVYLTNTTIEKEICPKLAEYRNWSKPQCDITGFAPFSKDNSIRLSAGGDIWVTREPYVSCDPDKCYQFALGQGTTLNNVHSNDTVHDRTPYRTLLMNELGVPFHLGTKQVCIAWSSSSCHDGKAWLHVCVTGDDKNATASFIYNGRLVDSIVSWSKEILRTQESECVCINGTCTVVMTDGSASGKADTKILFIEEGKIVHTSTLSGSAQHVEECSCYPRYPGVRCVCRDNWKGSNRPIVDINIKDYSIVSSYVCSGLVGDTPRKNDSSSSSHCLDPNNEEGGHGVKGWAFDDGNDVWMGRTISEKLRSGYETFKVIEGWSNSNSKLQINRQVIVDRGNRSGYSGIFSVEGKSCINRCFYVELIRGRKEETEVLWTSNSIVVFCGTSGTYGTGSWPDGADINLMPI

SEQ ID NO: 14327 - protein, 469 aa, synthetic construct
  REGION 1..469: note = neuraminidase__InfluenzaA__AAZ38586
MNPNQKIITIGSVSLTISTICFFMQIAILITTVTLHFKQYEFNSPPNNQVMLCEPTIIERNITEIVYLTNTTIEKEICPKLAEYRNWSKPQCDITGFAPFSKDNSIRLSAGGDIWVTREPYVSCDPDKCYQFALGQGTTLNNVHSNDTVHDRTPYRTLLMNELGVPFHLGTKQVCIAWSSSSCHDGKAWLHVCVTGDDKNATASFIYNGRLVDSIVSWSKEILRTQESECVCINGTCTVVMTDGSASGKADTKILFIEEGKIVHTSTLSGSAQHVEECSCYPRYPGVRCVCRDNWKGSNRPIVDINIKDYSIVSSYVCSGLVGDTPRKNDSSSSSHCLDPNNEEGGHGVKGWAFDDGNDVWMGRTISEKLRSGYETFKVIEGWSNPNSKLQINRQVIVDRGNRSGYSGIFSVEGKSCINRCFYVELIRGRKEETEVLWTSNSIVVFCGTSGTYGTGSWPDGADINLMPI

SEQ ID NO: 14328 - protein, 469 aa, synthetic construct; identical to SEQ ID NO: 14327
  REGION 1..469: note = neuraminidase__InfluenzaA__AAZ38597

SEQ ID NO: 14329 - protein, 469 aa, synthetic construct
  REGION 1..469: note = neuraminidase__InfluenzaA__AAZ38608
MNPNQKIITIGSVSLTISTICFFMQIAILITTVTLHFKQYEFNSPPNNQVMLCEPTIIERNITEIVYLTNTTIEKEMCPKLAEYRNWSKPQCDITGFAPFSKDNSIRLSAGGDIWVTREPYVSCDPDKCYQFALGQGTTLNNVHSNDTVHDRTPYRTLLMNELGVPFHLGTKQVCIAWSSSSCHDGKAWLHVCVTGDDKNATASFIYNGRLVDSIVSWSKKILRTQESECVCINGTCTVVMTDGSASGKADTKILFIEEGKIIHTSTLSGSAQHVEECSCYPRYPGVRCVCRDNWKGSNRPIVDINIKDYSIVSSYVCSGLVGDTPRKNDSSSSSHCLDPNNEEGGHGVKGWAFDDGNDVWMGRTISEKLRSGYETFKVIEGWSKPNSKLQINRQVIVDRGNRSGYSGIFSVEGKSCINRCFYVELIRGRKEETEVLWTSNSIVVFCGTSGTYGTGSWPDGADTNLMPI

SEQ ID NO: 14330 - protein, 469 aa, synthetic construct
  REGION 1..469: note = neuraminidase__InfluenzaA__AAZ38619
MNPNQKIITIGSVSLTISTICFFMQIAILITTVTLHFKQYEFNSPPNNQVMLCEPTIIERNITEIVYLTNTTIEKEMCPKLAEYRNWSKPQCDITGFAPFSKDNSIRLSAGGDIWVTREPYVSCDPDKCYQFALGQGTTLNNVHSNDTVHDRTPYRTLLMNELGVPFHLGTKQVCIAWSSSSCHDGKAWLHVCVTGDDKNATASFIYNGRLVDSIVSWSKKILRTQESECVCINGTCTVVMTDGSASGKADTKILFIEEGKIIHTSTLSGSAQHVEECSCYPRYPGVRCVCRDNWKGSNRPIVDINIKDYSIVSSYVCSGLVGDTPRKNDSSSSSHCLDPNNEEGGHGVKGWAFDDGNDVWMGRTISEKLRSGYETFKVIEGWSKPNSKLQINRQVIVDRGNRSGYSGIFSVEGKSCINRCFYVELIRGRKEETEVLWTSNSIVVFCGTSGTYGTGSWPDGADINLMPI

SEQ ID NO: 14331 - protein, 469 aa, synthetic construct; identical to SEQ ID NO: 14327
  REGION 1..469: note = neuraminidase__InfluenzaA__AAZ38641

SEQ ID NO: 14332 - protein, 469 aa, synthetic construct; identical to SEQ ID NO: 14327
  REGION 1..469: note = neuraminidase__InfluenzaA__AAZ38653

SEQ ID NO: 14333 - protein, 469 aa, synthetic construct; identical to SEQ ID NO: 14118
  REGION 1..469: note = neuraminidase__InfluenzaA__AAZ43386

SEQ ID NO: 14334 - protein, 469 aa, synthetic construct
  REGION 1..469: note = neuraminidase__InfluenzaA__AAZ43397
MNPNQKIITIGSVSLTIATICFLMQIAILVTTVTLHFKQHECNSPPNNQVMLCEPTIIERNITEIVYLTNTTIEREICPKLAEYRNWSKPQCNITGFAPFSKDNSIRLSAGGDIWVTREPYVSCDPDKCYQFALGQGTTLNNGHSNDTVHDRTPYRTLLMNELGVPFHLGTRQVCIAWSSSSCHDGKAWLHVCVTGDDKNATASFIYNGRLVDSIGSWSKKILRTQESECVCINGTCTVVMTDGSASGKADTKILFIEEGKIVHISTLSGSAQHVEECSCYPRYPGVRCVCRDNWKGSNRPIVDINVKDYSIVSSYVCSGLVGDTPRKNDSSSSSHCLDPNNEEGGHGVKGWAFDDGNDVWMGRTISEKLRSGYETFKVIEGWSKPNSKLQTNRQVIVERGNRSGYSGIFSVEGKSCINRCFYVELIRGRKEETEVWWTSNSIVVFCGTSGTYGTGSWPDGADINLMPI

SEQ ID NO: 14335 - protein, 469 aa, synthetic construct
  REGION 1..469: note = neuraminidase__InfluenzaA__AAZ43408
MNPNQKIITIGSVSLTIATICFLMQIAILVTTVTLHFKQYECNSPPNNQVMLCEPTMIERNITEIVYLTNTTIEKEICPKLAEYRNWSKPQCNITGFAPFSKDNSIRLSAGGDIWVTREPYVSCDPDKCYQFALGQGTTLNNGHSNDTVHDRTPYRTLLMNELGVPFHLGTKQVCIAWSSSSCHDGKAWLHVCVTGDDENATASFIYNGRLVDSIGSWSKKILRTQESECVCINGTCTVVMTDGSASGKADTKILFIEEGKIVHTSSLSGSAQHVEECSCYPRYPGVRCVCRDNWKGSNRPIVDINVKDYSIVSSYVCSGLVGDTPRKNDSSSSSHCLDPNNEEGGHGVKGWAFDDGNDVWMGRTISEKLRSGYETFKVIEGWSKPNSKLQINRQVIVDRGNRSGYSGIFSVESKSCINRCFYVELIRGRKQETEVLWTSNSIVVFCGTSGTYGTGSWPDGADINLMPI

SEQ ID NO: 14336 - protein, 469 aa, synthetic construct
  REGION 1..469: note = neuraminidase__InfluenzaA__AAZ74355
MNPNQKIITIGSVSLTIATICFLMQIAILVTTVTLHFKQHECNSPPNNQAMPCEPAIIERNTTETVYLTNTTIEKEICPKLAEYRNWSKPQCNITGFAPFSKDNSIRLSAGGDIWVTREPYVSCDPDKCYQFALGQGTTLNNGHSNDTVHDRTPYRTLLMNELGVPFHLGTRQVCIAWSSSSCHDGKAWLHVCVTGDDENATASFIYNGRLVDSIGSWSKKILRTQESECVCINGTCTVVMTDGSASGKADTKILFIEEGKIVHISTLSGSAQHVEECSCYPRYPGVRCVCRDNWKGSNRPIVDINVKDYSIVSSYVCSGLVGDTPRKNDSFSSSHCLDPNNEEGGHGVKGWAFDDGNDVWMGRTISEKLRSGYETFKVIEGWSKPNSKLQINRQVIVERGNRSGYSGIFSVEGKSCINRCFYVELIRGRKEETEVWWTSNSIVVFCGTSGTYGTGSWPDGADINLMPI

SEQ ID NO: 14337 - protein, 469 aa, synthetic construct
  REGION 1..469: note = neuraminidase__InfluenzaA__AAZ74366
MNPNQKIITIGSVSLTIATICFLMQIAILVTTVTLHFKQYECNSLPNNQVMLCEPTIIERNITEIVYLTNTTIEKEICPKLAEYRNWSKPQCKITGFAPFSKDNSIRLSAGGDIWVTREPYVSCDPDKCYQFALGQGTTLNNRHSNDTVHDRTPYRTLLMNELGVPFHLGTKQVCIAWSSSSCHDGKAWLHVCVTGHDENATASFIYDGRLVDSIGSWSKKILRTQESECVCINGTCTVVMTDGSASGKADTKILFIEEGKIIHISQLSGSAQHVEECSCYPRYPGVRCVCRDNWKGSNRPIVDINVKDYSIVSSYVCSGLVGDTPRKNDSSSSSHCLNPNNEEGGHGVKGWAFDDGNDVWMGRTISEKFRSGYETFKVIEGWSKPNSKLQINRQVIVDKDNRSGYSGIFSVEGKSCINRCFYVELIRGRKQETEVWWTSNSIVVFCGTSGTYGTGSWPDGADINLMPI

SEQ ID NO: 14338 - protein, 469 aa, synthetic construct
  REGION 1..469: note = neuraminidase__InfluenzaA__AAZ74377
MNPNQKIITIGSVSLTIATICFLTQIAILVTTVTLHFKQYECNSPPNNQVMLCEPTIIERNITEIVYLTNTTIEKEICPKLAEYRNWSKPQCNITGFAPFSKDNSIRLSAGGDIWVTREPYVSCDPDKCYQFALGQGTTLNNGHSNDTVHDRTPYRTLLMNELGVPFHLGTKQVCIAWSSSSCHDGKAWLHVCVTGDDKNATASFIYNGRLVDSIGSWSKKILRTQESECVCINGTCTVVMTDGSASGKADTKILFIEEGKIVHTSLLSGSAQHVEECSCYPRYPGVRCVCRDNWKGSNRPIVDINVKDYSIVSSYVCSGLVGDTPRKNDSSSSSHCLDPNNEEGGHGVKGWAFDDGNDVWMGRTIREKLRSGYETFKVIEGWSKPNSKLQINRQVIVDRDNRSGYSGIFSVEGKSCINRCFYVELIRGRNQETEVLWTSNSIVVFCGTSGTYGTGSWPDGADINLMPI

SEQ ID NO: 14339 - protein, 469 aa, synthetic construct
  REGION 1..469: note = neuraminidase__InfluenzaA__AAZ74400
MNPNQKIITIGSVSLTIATICFLMQIAILVTTVTLHFKQYECNSPPNNQVMLCEPTIIERNITEIVYLTNTTIEKEICPKLAEYRNWSKPQCKITGFAPFSKDNSIRLSAGGDIWVTREPYVSCDPDKCYQFALGQGTTLNNRHSNDTVHDRTPYRTLLMNELGVPFHLGTKQVCIAWSSSSCHDGKAWLHVCVTGHDENATASLIYDGRLVDSIGSWSKKILRTQESECVCINGTCTVVMTDGSASGRADTKILFIEEGKIVHTSKLSGSAQHVEECSCYPRYPGVRCVCRDNWKGSNRPIVDINVKDYSIVSSYVCSGLVGDTPRKNDSSSSSHCLDPNNEEGGHGVKGWAFDDGNDVWMGRTISEKSRSGYETFKVIEGWSKPNSKLQINRQVIVERGNMSGYSGIFSVEGKSCINRCFYVELIRGRKQETEVWWTSNSIVVFCGTSGTYGTGSWPDGADINLMPI

SEQ ID NO: 14340 - protein, 469 aa, synthetic construct; identical to SEQ ID NO: 14279
  REGION 1..469: note = neuraminidase__InfluenzaA__AAZ74411

SEQ ID NO: 14341 - protein, 469 aa, synthetic construct
  REGION 1..469: note = neuraminidase__InfluenzaA__AAZ74422
MNPNQKIITIGSVSLTISTICFFMQIAILITTVTLHFKQYEFNSPPNNQVMLCEPTIIERNITEIVYLTNTTIEKEICPKPAEYRNWSKPQCDITGFAPFSKDNSIRLSAGGDIWVTREPYVSCDPDKCYQFALGQGTTLNNVHSNDTVHDRTPYRTLLMNELGVPFHLGTKQVCIAWSSSSCHDGKAWLHVCVTGDDKNATASFIYNGRLVDSIVSWSKEILRTQESECVCINGTCAVVMTDGSASGKADTKILFIEEGKIVHTSKLSGSAQHVEECSCYPRYPGIRCVCRDNWKGSNRPIVDINIKDYSIVSSYVCSGLVGDTPRKNDSSSSSHCLDPNNEEGGHGVKGWAFDDGNDVWMGRTISEKLRSGYETFKVIEGWSNPNSKLQINRQVIVDRGNRSGYSGIFSVEGKSCINRCFYVELIRGRKEETEVLWTSNSIVVFCGTSGTYGTGSWPDGADINLMPI

SEQ ID NO: 14342 - protein, 469 aa, synthetic construct; identical to SEQ ID NO: 14327
  REGION 1..469: note = neuraminidase__InfluenzaA__AAZ74444

SEQ ID NO: 14343 - protein, 469 aa, synthetic construct
  REGION 1..469: note = neuraminidase__InfluenzaA__AAZ74455
MNPNQKIITIGSVSLTISTICFFMQIAILITTVTLHFKQYEFNSPPNNQVMLCEPTIIERNITEIVYLTNTTIEKEICPKLAEYRNWSKPQCDITGFAPFSKDNSIRLSAGGDIWVTREPYVSCDPDKCYQFALGQGTTLNNVHSNDTVHDRTPYRTLLMNELGVPFHLGTKQVCIAWSSSSCHDGKAWLHVCVTGDDKNATASFIYNGRLVDSIVSWSKDILRTQESECVCINGTCTVVMTDGSASGKADTKILFIEEGKIVHTSTLSGSAQHVEECSCYPRYPGVRCVCRDNWKGSNRPIVDINIKDYSIVSSYVCSGLVGDTPRKNDSSSSSHCLDPNNEEGGHGVKGWAFDDGNDVWMGRTISEKLRLGYETFKVIEGWSNPNSKLQINRQVIVERGNRSGYSGIFSVEGKSCINRCFYVELIRGRKEETEVLWTSNSIVVFCGTSGTYGTGSWPDGADINLMPI

SEQ ID NO: 14344 - protein, 469 aa, synthetic construct; identical to SEQ ID NO: 14327
  REGION 1..469: note = neuraminidase__InfluenzaA__AAZ74477

SEQ ID NO: 14345 - protein, 469 aa, synthetic construct; identical to SEQ ID NO: 14343
  REGION 1..469: note = neuraminidase__InfluenzaA__AAZ74488

SEQ ID NO: 14346 - protein, 469 aa, synthetic construct
  REGION 1..469: note = neuraminidase__InfluenzaA__AAZ74499
MNPNQKIITIGSVSLTISTICFFMQIAILITTVTLHFKQYEFNSPPNNQVMLCEPTIIERNITEIVYLTNTTIEKEICPKLAEYRNWSKPQCDITGFAPFSKDNSIRLSAGGDIWVTREPYVSCDPDKCYQFALGQGTTLNNVHSNDTVHDRTPYRTLLMNELGVPFHLGTKQVCIAWSSSSCHDGKAWLHVCVTGDDKNATASFIYNGRLVDSIVSWSKEILRTQESECVCINGTCAVVMTDGSASGKADTKILFIEEGKIVHTSKLSGSAQHVEECSCYPRYPGIRCVCRDNWKGSNRPIVDINIKDYSIVSSYVCSGLVGDTPRKNDSSSSSHCLDPNNEEGGHGVKGWAFDDGNDVWMGRTISEKLRSGYETFKVIEGWSNPNSKLQINRQVIVDRGNRSGYSGIFSVEGKSCINRCFYVELIRGRKEETEVLWTSNSIVVFCGTSGTYGTGSWPDGADINLMPI

SEQ ID NO: 14347 - protein, 469 aa, synthetic construct; identical to SEQ ID NO: 14343
  REGION 1..469: note = neuraminidase__InfluenzaA__AAZ74510

SEQ ID NO: 14348 - protein, 469 aa, synthetic construct; identical to SEQ ID NO: 14346
  REGION 1..469: note = neuraminidase__InfluenzaA__AAZ74521

SEQ ID NO: 14349 - protein, 469 aa, synthetic construct
  REGION 1..469: note = neuraminidase__InfluenzaA__AAZ74532
MNPNQKIITIGSVSLTISTICFFMQIAILITTVTLHFKQYEFNSPPNNQVMLCEPTIIERNITEIVYLTNTTIEKEICPKLAEYRNWSKPQCDITGFAPFSKDNSIRLSAGGDIWVTREPYVSCDPDKCYQFALGQGTTLNNVHSNDTVHDRTPYRTLLMNELGVPFHLGTKQVCIAWSSSSCHDGKAWLHVCVTGDDKNATASFIYNGRLVDSIVSWSKDILRTQESECVCINGTCTVVMTDGSASGKADTKILFIEEGKIVHTSTLSGNAQHVEECSCYPRYPGVRCVCRDNWKGSNRPIVDINIKDYSIVSSYVCSGLVGDTPRKNDSSSSSHCLDPNNEEGGHGVKGWAFDDGNDVWMGRTISEKLRLGYETFKVIEGWSNPNSKLQINRQVIVERGNRSGYSGIFSVEGKSCINRCFYVELIRGRKEETEVLWTSNSIVVFCGTSGTYGTGSWPDGANINLMPI

SEQ ID NO: 14350 - protein, 469 aa, synthetic construct; identical to SEQ ID NO: 14327
  REGION 1..469: note = neuraminidase__InfluenzaA__AAZ74543

SEQ ID NO: 14351 - protein, 469 aa, synthetic construct; identical to SEQ ID NO: 14279
  REGION 1..469: note = neuraminidase__InfluenzaA__AAZ74565

SEQ ID NO: 14352 - protein, 469 aa, synthetic construct; identical to SEQ ID NO: 14327
  REGION 1..469: note = neuraminidase__InfluenzaA__AAZ74598

SEQ ID NO: 14353 - protein, 469 aa, synthetic construct
  REGION 1..469: note = neuraminidase__InfluenzaA__AAZ74609
MNPNQKIITIGSVSLTIATICFLMQIAILVTTVTLHFKQYECNSPPNNQVMLCEPIIIERNITEIVYLTNTTIEKEICPKLAEYRNWSKPQCKITGFAPFSKDNSIRLSAGGDIWVTREPYVSCDPDKCYQFALGQGTTLNNRHSNDTVHDRTPYRTLLMNELGVPFHLGTKQVCIAWSSSSCHDGKAWLHVCVTGHDENATASFIYDGRLVDSISSWSKNILRTQESECVCINGTCTVVMTDGSASERADTKILFIEEGKIVHISPLSGSAQHVEECSCYPRYPGVRCVCRDNWKGSNRPIVDINVKDYSIVSSYVCSGLVGDTPRKNDSSSSSYCLNPNNEEGGHGVKGWAFDDGNDVWMGRTISEKLRSGYETFKVIGGWSKPNSKLQINRQVIVDRGNRSGYSGIFSVEGKSCVNRCFYVELIRGRKQETEVWWTSNSIVVFCGTSGTYGTGSWPDGADINLMPI

SEQ ID NO: 14354 - protein, 469 aa, synthetic construct; identical to SEQ ID NO: 14061
  REGION 1..469: note = neuraminidase__InfluenzaA__AAZ74620

SEQ ID NO: 14355 - protein, 469 aa, synthetic construct; identical to SEQ ID NO: 14173
  REGION 1..469: note = neuraminidase__InfluenzaA__AAZ79508

SEQ ID NO: 14356 - protein, 469 aa, synthetic construct
  REGION 1..469: note = neuraminidase__InfluenzaA__AAZ79519
MNPNQKIITIGSVSLTIATICFLMQIAILVTTVTLHFKQYECNSPPNNQVMLCEPTILERNITEIVYLTNTTIEKEICPKLAEYRNWSKPQCKITGFAPFSKDNSIRLSAGGDIWVTREPYVSCDPDKCYQFALGQGTTLNNRHSNDTVHDRTPYRTLLMNELGVPFHLGTKQVCIAWSSSSCHDGKAWLHVCVTGHDKNATASFIYGGRLVDSIGSWSKKILRTQESECVCINGTCTVVMTDGSASGRADTKILFIEEGKIIHISQLSGSAQHVEECSCYPRYPGVRCVCRDNWKGSNRPIVDINVKDYSIVSSYVCSGLVGDTPRKNDSSSSSHCLNPNNEEGGHGVKGWAFDDGNDVWMGRTISEKFRSGYETFKVIEGWSRPNSKLQINRQVIVDRDNRSGYSGIFSVEGKSCINRCFYVELIRGRKQETEVWWTSNSIVVFCGTSGTYGTGSWPDGADINLMPI

SEQ ID NO: 14357 - protein, 469 aa, synthetic construct; identical to SEQ ID NO: 14137
  REGION 1..469: note = neuraminidase__InfluenzaA__AAZ79530

SEQ ID NO: 14358 - protein, 469 aa, synthetic construct
  REGION 1..469: note = neuraminidase__InfluenzaA__AAZ79552
MNPNQKIITIGSVSLTIATICFLMQIAILVTTVTLHFKQYECNSPPNNQVMLCEPTIIERNITEIVYLTNTTIEKEICPKLAEYRNWSKPQCNITGFAPFSKDNSIRLSAGGDIWVTREPYVSCDPDKCYQFALGQGTTLNNGHSNDTVHDRTPHRTLLMNELGVPFHLGTKQVCIAWSSSSCHDGKAWLHVCVTGDDKNATASFIYNGRLVDSIGSWSKKILRTQESECVCINGTCTVVMTDGSASGKADTKILFIEEGKIVHTSLLSGSAQHVEECSCYPRYPGVRCVCRDNWKGSNRPIVDINVKDYSIVSSYVCSGLVGDTPRKNDSSSSSHCLDPNNEEGGHGVKGWAFDDGNDVWMGRTISEKLRSGYETFKVIEGWSKPNSKLQINRQVIVDRDNRSGYSGIFSVEGKSCINRCFYVELIRGRNQETEVLWTSNSIVVFCGTSGTYGTGSWPDGADINLMPI

SEQ ID NO: 14359 - protein, 469 aa, synthetic construct; identical to SEQ ID NO: 14279
  REGION 1..469: note = neuraminidase__InfluenzaA__AAZ79563

SEQ ID NO: 14360 - protein, 469 aa, synthetic construct; identical to SEQ ID NO: 14279
  REGION 1..469: note = neuraminidase__InfluenzaA__AAZ79574

SEQ ID NO: 14361 - protein, 469 aa, synthetic construct; identical to SEQ ID NO: 14279
  REGION 1..469: note = neuraminidase__InfluenzaA__AAZ79585

SEQ ID NO: 14362 - protein, 469 aa, synthetic construct; identical to SEQ ID NO: 14346
  REGION 1..469: note = neuraminidase__InfluenzaA__AAZ79618

SEQ ID NO: 14363 - protein, 469 aa, synthetic construct; identical to SEQ ID NO: 14327
  REGION 1..469: note = neuraminidase__InfluenzaA__AAZ79633

SEQ ID NO: 14364 - protein, 469 aa, synthetic construct; identical to SEQ ID NO: 14346
  REGION 1..469: note = neuraminidase__InfluenzaA__AAZ79945

SEQ ID NO: 14365 - protein, 469 aa, synthetic construct; identical to SEQ ID NO: 14343
  REGION 1..469: note = neuraminidase__InfluenzaA__AAZ79966

SEQ ID NO: 14366 - protein, 469 aa, synthetic construct; identical to SEQ ID NO: 14327
  REGION 1..469: note = neuraminidase__InfluenzaA__AAZ79977

SEQ ID NO: 14367 - protein, 469 aa, synthetic construct; identical to SEQ ID NO: 14327
  REGION 1..469: note = neuraminidase__InfluenzaA__AAZ79988

SEQ ID NO: 14368 - protein, 469 aa, synthetic construct
  REGION 1..469: note = neuraminidase__InfluenzaA__AAZ79999
MNPNQKIITIGSVSLTISTICFFMQIAILITTVTLHFKQYEFNSPPNNQMMLCEPTIIERNITEIVYLTNTTIEKEICPKLAEYRNWSKPQCDITGFAPFSKDNSIRLSAGGDIWVTREPYVSCDPDKCYQFALGQGTTLNNVHSNDTVHDRTPYRTLLMNELGVPFHLGTKQVCIAWSSSSCHDGKAWLHVCVTGDDKNATASFIYNGRLVDSIVSWSKDILRTQESECVCINGTCTVVMTDGSASGKADTKILFIEEGKIVHTSTLSGSAQHVEECSCYPRYPGVRCVCRDNWKGSNRPIVDINIKDYSIVSSYVCSGLVGDTPRKNDSSSSSHCLDPNNEEGGHGVKGWAFDDGNDVWMGRTISEKLRLGYETFKVIEGWSNPNSKLQINRQVIVERGNRSGYSGIFSVEGKSCINRCFYVELIRGRKEETEVLWTSNSIVVFCGTSGTYGTGSWPDGADINLMPI

SEQ ID NO: 14369 - protein, 469 aa, synthetic construct; identical to SEQ ID NO: 14115
  REGION 1..469: note = neuraminidase__InfluenzaA__AAZ80010

SEQ ID NO: 14370 - protein, 469 aa, synthetic construct
  REGION 1..469: note = neuraminidase__InfluenzaA__AAZ80021
MNPNQKIITIGSVSLTISTICFFMQIAILITTVTLHFKQYEFNSPPNNQVMLCEPTIIERNITEIVYLTNTTIEKEICPKLAEYRNWSKPQCDITGFAPFSKDNSIRLSAGGDIWVTREPYVSCDPDKCYQFALGQGTTLNNVHSNDTVRDRTPYRTLLMNELGVPFHLGTKQVCIAWSSSSCHDGKAWLHVCVTGDDKNATASFIYNGRLVDSIVSWSKEILRTQESECVCINGTCAVVMTDGSASGKADTKILFIEEGKIVHTSKLSGSAQHVEECSCYPRYPGIRCVCRDNWKGSNRPIVDINIKDYSIVSSYVCSGLVGDTPRKNDSSSSSHCLDPNNEEGGHGVKGWAFDDGNDVWMGRTISEKLRSGYETFKVIEGWSNPNSKLQINRQVIVDRGNRSGYSGIFSVEGKSCINRCFYVELIRGRKEETEVLWTSNSIVVFCGTSGTYGTGSWPDGADINLMPI

SEQ ID NO: 14371 - protein, 469 aa, synthetic construct
  REGION 1..469: note = neuraminidase__InfluenzaA__AAZ83245
MNPNQKIITIGSVSLTISTICFFMQIAILITTVTLHFKQYEFNPPPNNQVMLCEPTIIERNITEIVYLTNTTIEKEICPKLAEYRNWSKPQCNITGFAPFSKDNSIRLSAGGDIWVTREPYVSCDPDKCYQFALGQGTTLNNVHSNDTVHDRTPYRTLLMNELGVPFHLGTKQVCIAWSSSSCHDGKAWLHVCVTGDDENATASFIYNGRLVDSIVSWSKKILRTQESECVCINGTCTVVMTDGSASGKADTKILFIEEGKIVHTSTLSGSAQHVEECSCYPRYPGVRCVCRDNWKGSNRPIVDINIKDYSIVSSYVCSGLVGDTPRKNDSSSSSHCLDPNNEEGGHGVKGWAFDDGNDVWMGRTISEKLRSGYETFKVIEGWSNPNSKLQINRQVIVDRDNRSGYSGIFSVEGKSCINRCFYVELIRGRNQETEVLWTSNSIVVFCGTSGTYGTGSWPDGADINLMPI

SEQ ID NO: 14372 - protein, 470 aa, synthetic construct
  REGION 1..470: note = neuraminidase__InfluenzaA__AAZ83256
MNPNQKIITIGSISIAIGIISLMLQIGNIISIWASHSIQTGSQNHTGICNQRIITYENSTWVNHTYVNINNTNVVAGKDKTSVTLAGNSSLCSISGWAIYTKDNSIRIGSKGDVFVIREPFISCSHLECRTFFLTQGALLNDKHSNGTVKDRSPYRALMSCPLGEAPSPYNSKFESVAWSASACHDGMGWLTIGISGPDNGAVAVLKYNGIITETIKSWKKRILRTQESECVCVNGSCFTIMTDGPSNGAASYKIFKIEKGKVTKSIELNAPNFHYEECSCYPDTGTVMCVCRDNWHGSNRPWVSFNQNLDYQIGYICSGVFGDNPRPKDGKGSCNPVTVDGADGVKGFSYKYGNGVWIGRTKSNRLRKGFEMIWDPNGWTDTDSDFSVKQDVVAITDWSGYSGSFVQHPELTGLDCIRPCFWVELVRGLPRENTTIWTSGSSISFCGIDSDTANWSWPDGAELPFTIDK

SEQ ID NO: 14373 - protein, 469 aa, synthetic construct; identical to SEQ ID NO: 14279
  REGION 1..469: note = neuraminidase__InfluenzaA__AAZ83269

SEQ ID NO: 14374 - protein, 469 aa, synthetic construct; identical to SEQ ID NO: 14279
  REGION 1..469: note = neuraminidase__InfluenzaA__AAZ83280

SEQ ID NO: 14375 - protein, 469 aa, synthetic construct; identical to SEQ ID NO: 14253
  REGION 1..469: note = neuraminidase__InfluenzaA__AAZ83291

SEQ ID NO: 14376 - protein, 470 aa, synthetic construct
  REGION 1..470: note = neuraminidase__InfluenzaA__AAZ83302
MNPNQKIITIGSISIAIGIISLMLQIGNIISIWASHSIQTGSQNHTGVCNQRIITYENSTWVNHTYVNINNTNVIAGKDKASVTLAGNSSLCSISGWAIYTKDNSIRIGSKGDVFVIREPFISCSHSECRTFFLTQGALLNDKHSNGTVKDRSPYRALMSCPLGEAPSPYNSKFESVAWSASACHDGMGWLTIGISGPDNGAVAVLKYNGIITETIKSWKKQILRTQESECVCVNGSCFTIMTDGPSNGAASYKIFKIEKGKVTKSIELNAPNFHYEECSCYPDTGTVMCVCRDNWHGSNRPWVSFNQNLDYQIGYICSGVFGDNPRPKDGEGSCNPVTVDGANGVKGFSYKYGNGVWIGRTKSNRLRKGFEMIWDPNGWTDTDSDFSVKQDVVAITDWSGYSGSFVQHPELTGLDCIRPCFWVELVRGLPKENTTIWTSGSSISFCGVNSDTANWSWPDGAELPFTIDK

SEQ ID NO: 14377 - protein, 469 aa, synthetic construct
  REGION 1..469: note = neuraminidase__InfluenzaA__AAZ83315
MNPNQKIITIGSVSLTIATICFLMQIAILVTTVTLHFKQYECNSLPNNQVMLCEPTIIERNITEIVYLTNTTIEKEICPKLAEYRNWSKPQCKITGFAPFSKDNSIRLSAGGDIWVTREPYVSCDPDKCYQFALGQGTTLNNRHSNDTVHDRTPYRTLLMNELGVPFHLGTKQVCIAWSSSSCHDGKAWLHVCVTGHDENATASFIYDGRLVDSIGSWSKKILRTQESECVCINGTCTVVMTDGSASGRANTKILFIEEGKIIHISQLSGSAQHVEECSCYPRYPGVRCVCRDNWKGSNRPIVDINVKDYSIASSYVCSGLVGDTPRKNDSSSSSHCLNPNNEEGGHGVKGWAFDDGNDVWMGRTISEKFRSGYETFKVIEGWSKPNSKLQINRQVIVDRDNRSGYSGIFSVEGKSCINRCFYVELIRGRKQETEVWWTSNSIVVFCGTSGTYGTGSWPDGADINLMPI

SEQ ID NO: 14378 - protein, 469 aa, synthetic construct
  REGION 1..469: note = neuraminidase__InfluenzaA__AAZ83326
MNPNQKIITIGSVSLTIATICFLMQIAILVTTVTLHFKQYECDSLPNNQVMLCEPTIIERNITEIVYLTNTTIEKEICPKLAEYRNWSKPQCKITGFAPFSKDNSIRLSAGGDIWVTREPYVSCDPDKCYQFALGQGTTLNNRHSNDTVHDRTPYRTLLMNELGVPFHLGTKQVCIAWSSSSCHDGKAWLHVCVTGHDENATASFIYDGRLVDSIGSWSKKILRTQESECVCINGTCTVVMTDGSASGRADTKILFIEEGKIIHISQLSGSAQHVEECSCYPRYPGVRCVCRDNWKGSNRPIVDINVKDYSIVSSYVCSGLVGDTPRKNDSSSSSHCLNPNNEEGGHGVKGWAFDDGNDVWMGRTISEKFRSGYETFKVIEGWSKPNSKLQINRQVIVDRDNRSGYSGIFSVEGKSCINRCFYVELIRGRKQETEVWWTSNSIVVFCGTSGTYGTGSWPDGADINLMPI

SEQ ID NO: 14379 - protein, 469 aa, synthetic construct
  REGION 1..469: note = neuraminidase__InfluenzaA__AAZ83374
MNPNQKIITIGSVSLTISTICFFMQIAILITTVTLHFKQYEFNSPPNNQVMLCEPTIIERNITEIVYLTNTTIEKEICPKLAEYRNWSKPQCDITGFAPFSKDNSIRLSAGGDIWVTREPYVSCDPDKCYQFALGQGTTLNNVHSNDTVHDRTPYRTLLMNELGVPFHLGTKQVCIAWSSSSCHDGKAWLHVCVTGDDKNATASFIYNGRLVDSIVSWSKEILRTQESECVCINGTCTVVMTDGSASGKADTKILFIEEGKIVHTSTLSGSAQHVEECSCYPRYPGVRCVCRDNWKGSNRPIVDINIKDYSIVSSYVCSGLVGDTPRKNDSSSSSHCLDPNNEEGGHGVKGWAFDDGNDVWMGRTISEKLRTGYETFKVIEGWSNPNSKLQINRQVIVDRGNRSGYSGIFSVEGKSCINRCFYVELIRGRKEETEVLWTSNSIVVFCGTSGTYGTGSWPDGADINLMPI

SEQ ID NO: 14380 - protein, 469 aa, synthetic construct; identical to SEQ ID NO: 14346
  REGION 1..469: note = neuraminidase__InfluenzaA__AAZ83385

SEQ ID NO: 14381 - protein, 470 aa, synthetic construct
  REGION 1..470: note = neuraminidase__InfluenzaA__AAZ85129
MNTNQKIITIGSISIAIGIISLMLQIGNIISIWASHSIQTGSQNHTGVCNQRIITYENSTWVNHTYVNINNTNVIAGKDKTSVTLAGNSSLCSISGWAIYTKDNSIRIGSKGDVFVIREPFISCSHLECRTFFLTQGALLNDKHSNGTVKDRSPYRALMSCPLGEAPSPYNSKFESVAWSASACHDGMGWLTIGISGPDNGAVAVLKYNGIITETIKSWKKQILRTQESECVCVNGSCFTIMTDGPSNGAASYKIFKIEKGKVTKSIELNAPNFHYEECSCYPDTGTVMCVCRDNWHGSNRPWVSFNQNLDYQIGYICSGVFGDNPRPKDGEGSCNPVTVDGANGVKGFSYKYGNGVWIGRTKSNRLRKGFEMIWDPNGWTDTDSDFSVKQDVVAITDWSGYSGSFVQHPELTGLDCIRPCFWVELVRGLPKENTTIWTSGSSISFCGVNSDTANWSWPDGAELPFTIDK

SEQ ID NO: 14382 - protein, 469 aa, synthetic construct
  REGION 1..469: note = neuraminidase__InfluenzaA__ABA06513
MNPNQKIITIGSVSLTIATICFLTQIAILVTTVTLHFKQYECNSPPNNQVMLCEPTIIERNITEIVYLTNTTIEKEICPKLAEYRNWSKPQCNITGFAPFSKDNSIRLSAGGDIWVTREPYVSCDPDKCYQFALGQGTTLNNGHSNDTVHDRTPYRTLLMNELGVPFHLGTKQVCIAWSSSSCHDGKAWLHVCVTGDDKNATASFIYNGRLVDSIGSWSKKILRTQESECVCINGTCTVVMTDGSASGKADTKILFIEEGKIVHTSLLSGSAQHVEECSCYPRYPGVRCVCRDNWKGSNRPIVDINVKDYSIVSSYVCSGLVGDTPRKNDSSSSSHCLDPNNEEGGHGVKGWAFDDGNDVWMGRTISEKLRSGYETFKVIEGWSKPNSKLQINRQVIVDRDNRSGYSGIFSVEGKSCINRCFYVELIRGRNQETEVLWTSNSIVVFCGTSGTYGTGSWPDGADINLMPI

SEQ ID NO: 14383 - protein, 469 aa, synthetic construct; identical to SEQ ID NO: 14382
  REGION 1..469: note = neuraminidase__InfluenzaA__ABA06545

SEQ ID NO: 14384 - protein, 470 aa, synthetic construct
  REGION 1..470: note = neuraminidase__InfluenzaA__ABA08478
MNTNQKIITIGSISIAIGIISLMLQIGNIISIWASHSIQTGSQNHTGICNQRIITYENSTWVNHTYVNINNTNVVAGKDKTSVTLAGNSSLCSISGWAIYTKDNSIRIGSKGDVFVIREPFISCSHLECRTFFLTQGALLNDKHSNGTVKDRSPYRALMSCPLGEAPSPYNSKFESVAWSASACHDGMGWLTIGISGPDNGAVAVLKYNGIITETIKSWKKRILRTQESECVCVNGSCFTIMTDGPSNGAASYKIFKIEKGKVTKSIELNAPNFHYEECSCYPDTGTVMCVCRDNWHGSNRPWVSFNQNLDYQIGYICSGVFGDNPRPKDGKGSCNPVTVDGADGVKGFSYKYGNGVWIGRTKSNRLRKGFEMIWDPNGWTDTDSDFSVKQDVVAITDWSGYSGSFVQHPELTGLDCIRPCFWVELVRGLPRENTTIWTSGSSISFCGVDSDTANWSWPDGAELPFTIDK

SEQ ID NO: 14385 - protein, 469 aa, synthetic construct; identical to SEQ ID NO: 14382
  REGION 1..469: note = neuraminidase__InfluenzaA__ABA08511

SEQ ID NO: 14386 - protein, 470 aa, synthetic construct
  REGION 1..470: note = neuraminidase__InfluenzaA__ABA12699
MNPNQKIITIGSISIAIGIISLMLQIGNIISIWASHSIQTGSQNHTGICNQRIITYENSTWVNHTYVNINNTNVVAGKDKTSVTLAGNSSLCSISGWAIYTKDNSIRIGSKGDVFVIREPFISCSHLECRTFFLTQGALLNDKHSNGTVKDRSPYRALMSCPLGEAPSPYNSKFESVAWSASACHDGMGWLTIGISGPDNGAVAVLKYNGIITETIKSWKKRILRTQESECVCVNGSCFTIMTDGPSNGAASYKIFKIEKGKVTKSIELNAPNFHYEECSCYPDTGTVMCVCRDNWHGSNRPWVSFNQNLDYQIGYICSGVFGDNPRPKDGKGSCNPVTVDGADGVKGFSYKYGNGVWIGRTKSNRLRKGFEMIWDPNGWTDTDSDFSVKQDVVAITDWSGYSGSFVQHPELTGLDCIRPCFWVELVRGLPRENTTIWTSGSSISFCGVDSDTANWSWPDGAELPFTIDK

SEQ ID NO: 14387 - protein, 470 aa, synthetic construct; identical to SEQ ID NO: 14386
  REGION 1..470: note = neuraminidase__InfluenzaA__ABA12710

SEQ ID NO: 14388 - protein, 470 aa, synthetic construct
  REGION 1..470: note = neuraminidase__InfluenzaA__ABA12721
MNPNQKIITIGSISIAIGIISLMLQIGNIISIWASHSIQTGSQNHTGVCNQRIITYENSTWVNHTYVNINNTNVIAGKDKTSVTLAGNSSLCSISGWAIYTKDNSIRIGSKGDVFVIREPFISCSHLECRTFFLTQGALLNDKHSNGTVKDRSPYRALMSCPLGEAPSPYNSKFESVAWSASACHDGMGWLTIGISGPDNGAVAVLKYNGIITETIKSWKKQILRTQESECVCVNGSCFTIMTDGPSNGAASYKIFKIGKGKVTKSIELNAPNFHYEECSCYPDTGTVMCVCRDNWHGSNRPWVSFNQNLDYQIGYICSGVFGDNPRPRDGEGSCNPVTVDGANGVKGFSYKYGNGVWIGRTKSNRLRKGFEMIWDPNGWTDTDSDFSVKQDVVAITDWSGYSGSFVQHPELTGLDCIRPCFWVELVRGLPRENTTIWTSGSSISFCGVNSDTANWSWPDGAELPFTIDK

SEQ ID NO: 14389 - protein, 470 aa, synthetic construct; identical to SEQ ID NO: 14386
  REGION 1..470: note = neuraminidase__InfluenzaA__ABA12732

SEQ ID NO: 14390 - protein, 469 aa, synthetic construct; identical to SEQ ID NO: 14327
  REGION 1..469: note = neuraminidase__InfluenzaA__ABA12743

SEQ ID NO: 14391 - protein, 469 aa, synthetic construct; identical to SEQ ID NO: 14343
  REGION 1..469: note = neuraminidase__InfluenzaA__ABA12754

SEQ ID NO: 14392 - protein, 469 aa, synthetic construct; identical to SEQ ID NO: 14346
  REGION 1..469: note = neuraminidase__InfluenzaA__ABA12765

SEQ ID NO: 14393 - protein, 469 aa, synthetic construct; identical to SEQ ID NO: 14118
  REGION 1..469: note = neuraminidase__InfluenzaA__ABA12776

SEQ ID NO: 14394 - protein, 469 aa, synthetic construct; identical to SEQ ID NO: 14327
  REGION 1..469: note = neuraminidase__InfluenzaA__ABA12786

SEQ ID NO: 14395 - protein, 469 aa, synthetic construct; identical to SEQ ID NO: 14346
  REGION 1..469: note = neuraminidase__InfluenzaA__ABA18029

SEQ ID NO: 14396 - protein, 470 aa, synthetic construct
  REGION 1..470: note = neuraminidase__InfluenzaA__ABA18040
MNPNQKIITIGSISIAIGIISLMLQIGNIISIWASHSIQTGSQNHTGVCNQRIITYENSTWVNHTYVNINNTNVIAGKDKTSVTLAGNSSLCSISGWAIYTKDNSIRIGSKGDVFVIREPFISCSHLECRTFFLTQGALLNDKHSNGTVKDRSPYRALMSCPLGEAPSPYNSKFESVAWSASACHDGMGWLTIGISGPDNGAVAVLKYNGIITETIKSWKKQILRTQESECVCVNGSCFTIMTDGPSNGAASYKIFKIEKGKVTKSIELNAPNFHYEECSCYPDTGTVMCVCRDNWHGSNRPWVSFNQNLDYQIGYICSGVFGDNPRPKDGEGSCNPVTVDGANGVKGFSYKYGNGVWIGRTKSNRLRKGFEMIWDPNGWTDTDSDFSVKQDVVAITDWSGYSGSFVQHPELTGLDCIRPCFWVELVRGLPKENTTIWTSGSSISFCGVNSDTANWSWPDGAELPFTIDK

SEQ ID NO: 14397 - protein, 469 aa, synthetic construct
  REGION 1..469: note = neuraminidase__InfluenzaA__ABA18126
MNPNQKIITIGSVSLTIATICFLMQIAILVTTVTLHFKQYECNSPPNNQVMLCEPTIIERNITEIVYLTNTTIEKEICPKLAEYRNWSKPQCNITGFAPFSKDNSIRLSAGGDIWVTREPYVSCDPDKCYQFALGQGTTLNNGHSNDTVHDRTPYRTLLMNELGVPFHLGTKQVCIAWSSSSCHDGKAWLHVCVTGDDENATASFIYNGRLVDSIGSWSKKILRTQESECVCINGTCTVVMTDGSASGKADTKILFIEEGKIVHISTLSGSAQHVEECSCYPRYPGVRCVCRDNWKGSNRPIVDINVKDYSIVSSYVCSGLVGDTPRKNDSFSSSHCLDPNNEEGGHGVKGWAFDDGNDMWMGRTISEKLRSGYETFKVIEGWSKPNSKLQINRQVIVERGNRSGYSGIFSVEGKSCINRCFYVELIRGRKEETEVWWTSNSIVVFCGTSGTYGTGSWPDGADINLMPI

SEQ ID NO: 14398 - protein, 470 aa, synthetic construct; identical to SEQ ID NO: 14386
  REGION 1..470: note = neuraminidase__InfluenzaA__ABA18148

SEQ ID NO: 14399 - protein, 469 aa, synthetic construct
  REGION 1..469: note = neuraminidase__InfluenzaA__ABA18159
MNPNQKIITIGSVSLTISTICFFMQIAILITTVTLHFKQYEFNSPPNNQVMLCEPTIIERNITEIVYLTNTTIEKEICPKLAEYRNWSKPQCDITGFAPFSKDNSIRLSAGGDIWVTREPYVSCDPDKCYQFALGQGTTLNNVHSNDTVHDRTPYRTLLMNELGVPFHLGTKQVCIAWSSSSCHDGKAWLHVCVTGDDKNATASFIYNGRLVDSIVSWSKEILRTQESECVCINGTCAVVMTDGSASGKADTKILFIEEGKIVHTSKLSGSAQHVEECSCYPRYPGIRCVCRDNWKGSNRPIVDVNIKDYSIVSSYVCSGLVGDTPRKNDSSSSSHCLDPNNEEGGHGVKGWAFDDGNDVWMGRTISEKLRSGYETFKVIEGWSNPNSKLQINRQVIVDRGNRSGYSGIFSVEGKSCINRCFYVELIRGRKEETEVLWTSNSIVVFCGTSGTYGTGSWPDGADINLMPI

SEQ ID NO: 14400 - protein, 469 aa, synthetic construct; identical to SEQ ID NO: 14327
  REGION 1..469: note = neuraminidase__InfluenzaA__ABA26703

SEQ ID NO: 14401 - protein, 469 aa, synthetic construct; identical to SEQ ID NO: 14327
  REGION 1..469: note = neuraminidase__InfluenzaA__ABA26714

SEQ ID NO: 14402 - protein, 469 aa, synthetic construct; identical to SEQ ID NO: 14327
  REGION 1..469: note = neuraminidase__InfluenzaA__ABA26736

SEQ ID NO: 14403 - protein, 469 aa, synthetic construct; identical to SEQ ID NO: 14327
  REGION 1..469: note = neuraminidase__InfluenzaA__ABA26747

SEQ ID NO: 14404 - protein, 469 aa, synthetic construct; identical to SEQ ID NO: 14327
  REGION 1..469: note = neuraminidase__InfluenzaA__ABA26758

SEQ ID NO: 14405 - protein, 469 aa, synthetic construct; identical to SEQ ID NO: 14327
  REGION 1..469: note = neuraminidase__InfluenzaA__ABA26769

SEQ ID NO: 14406 - protein, 469 aa, synthetic construct; identical to SEQ ID NO: 14327
  REGION 1..469: note = neuraminidase__InfluenzaA__ABA26780

SEQ ID NO: 14407 - protein, 469 aa, synthetic construct; identical to SEQ ID NO: 14327
  REGION 1..469: note = neuraminidase__InfluenzaA__ABA26791

SEQ ID NO: 14408 - protein, 469 aa, synthetic construct; identical to SEQ ID NO: 14327
  REGION 1..469: note = neuraminidase__InfluenzaA__ABA26802

SEQ ID NO: 14409 - protein, 470 aa, synthetic construct
  REGION 1..470: note = neuraminidase__InfluenzaA__ABA42250
MNPNQKIITIGSISIAIGIISLMLQIGNIISIWASHSIQTGSQNHTGICNQRIITYENSTWVNHTYVNINNTNVVAGKDKTSVTLAGNSSLCSISGWAIYTKDNSIRIGSKGDVFVIREPFISCSHLECRTFFLTQGALLNDKHSNGTVKDRSPYRALMSCPLGEAPSPYNSKFESVAWSASACHDGMGWLTIGISGPDNGAVAVLKYNGIITETIKSWKKRILRTQESECVCVNGSCFTIMTDGPSNGAASYKIFKIEKGKVTKSIELNAPNFHYEECSCYPDTGTVMCVCRDNWHGSNRPWVSFNQNLDYQIGYICSGVFGDNPRPKDGKGSCNPVTVDGADGVKGFSYKYGDGVWIGRTKSNRLRKGFEMIWDPNGWTDTDSDFSVKQDVVAITDWSGYSGSFVQHPELTGLDCIRPCFWVELVRGLPRENTTIWTSGSSISFCGVDSDTANWSWPDGAELPFTIDK

SEQ ID NO: 14410 - protein, 470 aa, synthetic construct; identical to SEQ ID NO: 14396
  REGION 1..470: note = neuraminidase__InfluenzaA__ABA42261

SEQ ID NO: 14411 - protein, 469 aa, synthetic construct
  REGION 1..469: note = neuraminidase__InfluenzaA__ABA42272
MNPNQKIITIGSVSLTISTICFFMQIAILITTVTLHFKQYEFNSPPNNQVMLCEPTIIERNITEIVYLTNTTIEKEICPKLAEYRNWSKPQCDITGFAPFSKDNSIRLSAGGDIWVTREPYVSCDPDKCYQFALGQGTTLNNVHSNDTVHDRTPYRTLLMNELGVPFHLGTKQVCIAWSSSSCHDGKAWLHVCVTGDDKNATASFIYNGRLVDSIVSWSKDILRTQESECVCINGTCTVVMTDGSASGKADTKILFIEEGKIVHTSTLSGSAQHVEECSCYPRYPGVRCVCRDNWKGSNRPIVDINIKDYSIVSSYVCSGLVGDTPRKNDSSSSSHCLDPNNEEGGHGVKGWAFDDGNDVWMGRTINEKLRLGYETFKVIEGWSNPNSKLQINRQVIVERGNRSGYSGIFSVEGKSCINRCFYVELIRGRKEETEVLWTSNSIVVFCGTSGTYGTGSWPDGADINLMPI

SEQ ID NO: 14412 - protein, 469 aa, synthetic construct; identical to SEQ ID NO: 14327
  REGION 1..469: note = neuraminidase__InfluenzaA__ABA42294

SEQ ID NO: 14413 - protein, 469 aa, synthetic construct; identical to SEQ ID NO: 14154
  REGION 1..469: note = neuraminidase__InfluenzaA__ABA42305

SEQ ID NO: 14414 - protein, 469 aa, synthetic construct; identical to SEQ ID NO: 14164
  REGION 1..469: note = neuraminidase__InfluenzaA__ABA42316

SEQ ID NO: 14415 - protein, 470 aa, synthetic construct
  REGION 1..470: note = neuraminidase__InfluenzaA__ABA42327
MNPNQKIITIGSISIAIGIISLMLQIGNIISIWASHSIQTGSQNHTGICNQRIITYENSTWVNHTYVNINNTNVVAGKDKTSVTLAGNSSLCSISGWAIYTKDNSIRIGSKGDVFVIREPFISCSHLECRTFFLTQGALLNDKHSNGTVKDRSPYRALMSCPLGEAPSPYNSKFESVAWSASACHDGMGWLTIGISGPDNGAVAVLKYNGIITETIKSWKKRILRTQESECVCVNGSCFTIMTDGPSNGAASYKIFKIEKGKVTKSIELNAPNFHYEECSCYPDTGTVMCVCRDNWHGSNRPWVSFNQNLDYQIGYICSGVFGDNPRPKDGEGSCNPVTVDGADGVKGFSYKYGNGVWIGRTKSNRLRKGFEMIWDPNGWTDTDSDFSVKQDVVAITDWSGYSGSFVQHPELTGLDCIRPCFWVELVRGLPRENTTIWTSGSSISFCGVNSDTANWSWPDGAELPFTIDK

SEQ ID NO: 14416 - protein, 469 aa, synthetic construct; identical to SEQ ID NO: 14149
  REGION 1..469: note = neuraminidase__InfluenzaA__ABA42338

SEQ ID NO: 14417 - protein, 469 aa, synthetic construct
  REGION 1..469: note = neuraminidase__InfluenzaA__ABA42349
MNPNQKIITIGSVSLTIATICFLMQIAILVTTVTLHFKQYECDSPPNNQVMLCEPTIIERNITEIVYLTNTTIEKEICPKLAEYRNWSKPQCNITGFAPFSKDNSIRLSAGGDIWVTREPYVSCDPDKCYQFALGQGTTLNNGHSNDTVHDRTPYRTLLMNELGVPFHLGTRQVCIAWSSSSCHDGKAWLHVCVTGDDENATASFIYNGKLVDSIGSWSKKILRTQESECVCINGTCTVVMTDGSASGKADTKILFIEEGKIVHISTLSGSAQHVEECSCYPRYPGVRCVCRDNWKGSNRPIVDINVKDYSIVSSYVCSGLVGDTPRKNDSFSSSHCLDPNNEEGGHGVKGWAFDDGNDVWMGRTISEKLRSGYETFKVIEGWSKPNSKLQINRQVIVERGNRSGYSGIFSVEGKSCINRCFYVELIRGRKEETEVWWTSNSIVVFCGTSGTYGTGSWPDGADINLMPI

SEQ ID NO: 14418 - protein, 469 aa, synthetic construct; identical to SEQ ID NO: 14154
  REGION 1..469: note = neuraminidase__InfluenzaA__ABA42360

SEQ ID NO: 14419 - protein, 469 aa, synthetic construct; identical to SEQ ID NO: 14149
  REGION 1..469: note = neuraminidase__InfluenzaA__ABA42371

SEQ ID NO: 14420 - protein, 469 aa, synthetic construct; identical to SEQ ID NO: 14164
  REGION 1..469: note = neuraminidase__InfluenzaA__ABA42382

SEQ ID NO: 14421 - protein, 469 aa, synthetic construct; identical to SEQ ID NO: 14149
  REGION 1..469: note = neuraminidase__InfluenzaA__ABA42393

SEQ ID NO: 14422 - protein, 469 aa, synthetic construct
  REGION 1..469: note = neuraminidase__InfluenzaA__ABA42404
MNPNQKIITIGSVSLTIATICFLMQIAILVTTVTLHFKQYECNSPPNNQVMLCEPAIIERNITEIVYLTNTTIEKEICPKLAEYRNWSKPQCNITGFAPFSKDNSIRLSAGGDIWVTREPYVSCDPDKCYQFALGQGTTLNNGHSNDTVHDRTPYRTLLMNELGVPFHLGTRQVCIAWSSSSCHDGKAWLHVCVTGDDENATASFIYNGRLVDSIGSWSKKILRTQESECVCINGTCTVVMTDGSASGKADTKILFIEEGKIVNISTLPGSAQHVEECSCYPRYPGVRCVCRDNWKGSNRPIVDINVKDYSIVSSYVCSGLVGDTPRKNDSFSSSHCLDPNNEEGGHGVKGWAFDDGNDVWMGRTISEKLRSGYETFKVIEGWSKPNSKLQINRQVIVERGNRSGYSGIFSVEGKSCINRCFYVELIRGRKEETEVWWTSNSIVVFCGTSGTYGTGSWPDGADINLMPI

SEQ ID NO: 14423 - protein, 469 aa, synthetic construct; identical to SEQ ID NO: 14164
  REGION 1..469: note = neuraminidase__InfluenzaA__ABA42415

SEQ ID NO: 14424 - protein, 469 aa, synthetic construct; identical to SEQ ID NO: 14171
  REGION 1..469: note = neuraminidase__InfluenzaA__ABA42446

SEQ ID NO: 14425 - protein, 469 aa, synthetic construct
  REGION 1..469: note = neuraminidase__InfluenzaA__ABA42457
MNPNQKIITIGSVSLTIATICFLMQIAILVTTVTLHFKQYECNSPPNNQVMLCEPTIIERNITEIVYLTNTTIEKEICPKLAEYRNWSKPQCNITGFAPFSKDNSIRLSAGGDIWVTREPYVSCDPDKCYQFALGQGTTLNNGHSNDTVHDRTPYRTLLMNELGVPFHLGTRQVCIAWSSSSCHDGKAWLHVCVTGDDENATASFIYNGRLVDSIGSWSKKILRTQESECVCINGTCTVVMTDGSASGKADTKILFIEEGKIVHISTLSGSAQHVEECSCYPRYPGVRCVCRDNWKGSNRPIVDINVKDYSIVSSYVCSGLVGDTPRKNDSFSSSHCLDPNNEEGGHGVKGWAFDDGNDVWMGRTISEKLRSGYETFKVIEGWSKPNSKLQINRQVIVERGNRSGYSGIFSVESKSCINRCFYVELIRGRKEETEVWWTSNSIVVFCGTSGTYGTGSWPDGADINLMPI

SEQ ID NO: 14426 - protein, 469 aa, synthetic construct; identical to SEQ ID NO: 14171
  REGION 1..469: note = neuraminidase__InfluenzaA__ABA42468

SEQ ID NO: 14427 - protein, 469 aa, synthetic construct
  REGION 1..469: note = neuraminidase__InfluenzaA__ABA42479
MNPNQKIITIGSVSLTIATICFLMQIAILVTTVTLHFKQYECDSPPNNQVMLCEPTIIERNITEIVYLTNTTIEKEICPKLAEYRNWSKPQCNITGFAPFSKDNSIRLSAGGDIWVTREPYVSCDPDKCYQFALGQGTTLNNGHSNDTVHDRTPYRTLLMNELGVPFHLGTRQVCIAWSSSSCHDGKAWLHVCVTGDDENATASFIYNGRLVDSIGSWSKKILRTQESECVCINGTCTVVMTDGSASGKADTKILFIEEGKIVHISTLSGSAQHVEECSCYPRYPGVRCVCRDNWKGSNRPIVDINVKDYSIVSSYVCSGLVGDTPRKNDSFSSSHCLDPNNEDGGHGVKGWAFDDGNDVWMGRTISEKLRSGYETFKVIEGWSKPNSKLQINRQVIVERGNRSGYSGIFSVEGKSCINRCFYVELIRGRKEETEVWWTSNSIVVFCGTSGTYGTGSWPDGADINLMPI

SEQ ID NO: 14428 - protein, 469 aa, synthetic construct
  REGION 1..469: note = neuraminidase__InfluenzaA__ABA42490
MNPNQKIITIGSVSLTIATICFLMQIAILVTTVTLHFKQYECNSPPNNQVMLCEPTIIERNITEIVYLTNTTIEKEICPKLAEYRNWSKPQCNITGFAPFSKDNSIRLSAGGDIWVTREPYVSCDPDKCYQFALGQGTTLNNGHSNDTVHDRTPYRTLLMNELGVPFHLGTRQVCIAWSSSSCHDGKAWLHVCVTGDDENATASFIYNGRLVDSIGSWSKKILRTQESECVCINGTCTVVMTDGSASGKADTKILFIEEGKIVHISKLSGSAQHVEECSCYPRYPGVRCVCRDNWKGSNRPIVDINVKDYSIVSSYVCSGLVGDTPRKNDSFSSSHCLDPNNEEGGHGVKGWAFDDGNDVWMGRTISEKLRSGYETFKVIKGWSKPNSKLQINRQVIVERGNRSGYSGIFSVEGKSCINRCFYVELIRGRKEETEVWWTSNSIVVFCGTSGTYGTGSWPDGADINLMPI

SEQ ID NO: 14429 - protein, 469 aa, synthetic construct; identical to SEQ ID NO: 14171
  REGION 1..469: note = neuraminidase__InfluenzaA__ABA42501

SEQ ID NO: 14430 - protein, 469 aa, synthetic construct
  REGION 1..469: note = neuraminidase__InfluenzaA__ABA42512
MNPNQKIITIGSVSLTIATICFLMQIAILVTTVTLHFKQYECNSPPNNQVMLCEPTIIERNITEIVYPTNTTIEKEICPKLAEYRNWSKPQCNITGFAPFSKDNSIRLSAGGDIWVTREPYVSCDPDKCYQFALGQGTTLNNGHSNDTVHDRTPYRTLLMNELGVPFHLGTKQVCIAWSSSSCHDGKAWLHVCVTGDDENATASFIYNGRLVDSIGSWSKKILRTQESECVCINGTCTVVMTDGSASGKADTKILFIEEGKIVHTSSLSGSAQHVEECSCYPRYPGVRCVCRDNWKGSNRPIVDINVKDYSIVSSYVCSGLVGDTPRKNDSSSSSHCLDPNNEEGGHGVKGWAFDDGNDVWMGRTISEKLRSGYETFKVIEGWSKPNSKLQINRQVIVDRGNRSGYSGIFSVEGKSCINRCFYVELIRGRKQETEVLWTSNSIVVFCGTSGTYGTGSWPDGADINLMPI

SEQ ID NO: 14431 - protein, 469 aa, synthetic construct; identical to SEQ ID NO: 14061
  REGION 1..469: note = neuraminidase__InfluenzaA__ABA42523

SEQ ID NO: 14432 - protein, 469 aa, synthetic construct; identical to SEQ ID NO: 14061
  REGION 1..469: note = neuraminidase__InfluenzaA__ABA42534

SEQ ID NO: 14433 - protein, 469 aa, synthetic construct; identical to SEQ ID NO: 14253
  REGION 1..469: note = neuraminidase__InfluenzaA__ABA42545

SEQ ID NO: 14434 - protein, 469 aa, synthetic construct
  REGION 1..469: note = neuraminidase__InfluenzaA__ABA42556
MNPNQKIITIGSVSLTIATICFLMQIAILVTTVTLHFKQYECNSPPNNQVMLCEPTIIERNITEIVYLTNTTIEKEICPKLAEYRNWSKPQCNITGFAPFSKDNSIRLSAGGDIWVTREPYVSCDPDKCYQFALGQGTTLNNGHSNDTVHDRTPYRTLLMNELGVPFHLGTKQVCIAWSSSSCHDGKAWLHVCVTGDDENATASFIYNGRLVDSIGSWSKKILRTQESECVCINGTCTVVMTDGSASGKADTKILFIEEGKIVHTSLLSGSAQHVEECSCYPRYPGVRCVCRDNWKGSNRPIVDINVKDYSIVSSYVCSGLVGDTPRKNDSSSSSHCLDPNNEEGGHGVKGWAFDDGNDVWMGRTISEKLRSGYETFKVIEGWSKPNSKLQINRQVIVDRGNRSGYSGIFSVEGKSCINRCFYVELIRGRKQEAEVLWTSNSIVVFCGTSGTYGTGSWPDGADINLMPI

SEQ ID NO: 14435 - protein, 469 aa, synthetic construct; identical to SEQ ID NO: 14061
  REGION 1..469: note = neuraminidase__InfluenzaA__ABA42567

SEQ ID NO: 14436 - protein, 469 aa, synthetic construct
  REGION 1..469: note = neuraminidase__InfluenzaA__ABA42931
MNPNQKIITIGSVSLTIATICSLMQIAILVTTVTLHFKQYECNSPPNNQVMLCEPTIIERNITEIVYLTNTTIEKEICPKLAEYRNWSKPQCNITGFAPFSKDNSIRLSAGGDIWVTREPYVSCDPDKCYQFALGQGTTLNNGHSNDTVHDRTPYRTLLMNELGVPFHLGTKQVCIAWSSSSCHDGKAWLHVCVTGDDENATASFIYNGRLVDSIGSWSKKILRTQESECVCINGTCTVVMTDGSASGKADTKILFIEEGKIVHTSLLSGSAQHVEECSCYPRYPGVRCVCRDNWKGSNRPIVDINVKDYSIVSSYVCSGLVGDTPRKNDSSSSSHCLDPNNEEGGHGVKGWAFDDGNDVWMGRTISEKLRSGYETFKVIEGWSKPNSKLQINRQVIVDRGNRSGYSGIFSVEGKSCINRCFYVELIRGRKQETEVLWTSNSIVVFCGTSGTYGTGSWPDGADINLMPI

SEQ ID NO: 14437 - protein, 469 aa, synthetic construct; identical to SEQ ID NO: 14061
  REGION 1..469: note = neuraminidase__InfluenzaA__ABA42942

SEQ ID NO: 14438 - protein, 469 aa, synthetic construct; identical to SEQ ID NO: 14061
  REGION 1..469: note = neuraminidase__InfluenzaA__ABA42981

SEQ ID NO: 14439 - protein, 469 aa, synthetic construct; identical to SEQ ID NO: 14149
  REGION 1..469: note = neuraminidase__InfluenzaA__ABA42992

SEQ ID NO: 14440 - protein, 470 aa, synthetic construct
  REGION 1..470: note = neuraminidase__InfluenzaA__ABA43192
MNPNQKIITIGSISIAIGIISLMLQIGNIISIWASHSIQTGSQNHTGVCNQRIITYENSTWVNHTYVNINNTNVIAGKDKTSVILAGNSSLCSISGWAIYTKDNSIRIGSKGDVFVIREPFISCSHLECRTFFLTQGALLNDKHSNGTVKDRSPYRALMSCPLGEAPSPYNSKFESVAWSASACHDGMGWLTIGISGPDNGAVAVLKYNGIITETIKSWKKQILRTQESECVCVNGSCFTIMTDGPSNGAASYKIFKIEKGKVTKSIELNAPNFHYEECSCYPDTGTVMCVCRDNWHGSNRPWVSFNQNLDYQIGYICSGVFGDNPRPKDGEGSCNPVTVDGANGVKGFSYKYGNGVWIGRTKSNRLRKGFEMIWDPNGWTDTDSDFSVKQDVVSITDWSGYSGSFVQHPELTGLDCIRPCFWVELVRGLPKENTTIWTSGSSISFCGVNSDTANWSWPDGAELPFTIDK

SEQ ID NO: 14441 - protein, 469 aa, synthetic construct; identical to SEQ ID NO: 14346
  REGION 1..469: note = neuraminidase__InfluenzaA__ABA43203

SEQ ID NO: 14442 - protein, 469 aa, synthetic construct
  REGION 1..469: note = neuraminidase__InfluenzaA__ABA43339
MNPNQKIITIGSVSLSIATICFLMQIAILVTTVTLHFKQYECSSPPNNQVMPCEPTIIERNITEIVYLTNTTIEKEICPKLVEYRNWSKPQCKITGFAPFSKDNSIRLSAGGDIWVTREPYVSCDPGKCYQFALGQGTTLNNRHSNDTVHDRTPYRTLLMNELGVPFHLGTKQVCMAWSSSSCHDGKAWLHVCVTGHDENATASFIYDGRLVDSIGSWSKNILRTQESECVCINGTCTVVMTDGSASERADTKILFIEEGKIVHISPLSGSAQHVEECSCYPRYPGVRCVCRDNWKGSNRPIVDINVKDYSIVSSYVCSGLVGDTPRKNDRSSSSYCRNPNNEKGSHGVKGWAFDDGNDVWMGRTIGEELRSGYETFKVIGGWSTPNSKLQINRQVIVDSGNRSGYSGIFSVEGKSCINRCFYVELIRGRKQETRVWWTSNSIVVFCGTSGTYGTGSWPDGADINLMPI

SEQ ID NO: 14443 - protein, 469 aa, synthetic construct
  REGION 1..469: note = neuraminidase__InfluenzaA__ABA54916
MNPNQKIITTGSICMVIGMVSLMLQIGNIISIWVSHSIQTGTQHRAEPCNRSIINYENNTWVNQTYVKISNTNFLTEKAVASVRLVGNSSLCPISGWAVYSKDNSIRIGSKGDVFVIREPFISCSHLECRTFFLTQGALLNDKHSNGTVKDRSPYRTLMSCPVGEAPSPYNSRFESVAWSASACHDGTSWLTIGISGPDNGAVAVLKYNGIITDTIKSWRNNILRAQESECACVNGSCFTVMTDGPSNGQASYKIFKIEKGKVVKSVELNAPNYHYEECSCYPDAGEITCVCRDNWHGSNRPWVSFNQNLEYQIGYICSGVFGDNPRPNDGTGSCGPVSPNGAYGVKGFSFKYGNGVWIGRTKSTNSRSGFEMIWDPNGWTGTDSNFSVKQDIVAITDWSGYSGSFVQHPELTGLDCIRPCFWVELIRGRPKESTIWTSGSSISFCGVNSDTVGWSWPDGAELPFTIDK

SEQ ID NO: 14444 - protein, 470 aa, synthetic construct
  REGION 1..470: note = neuraminidase__InfluenzaA__ABA87048
MNPNQKIITIGSISIAIGIISLMLQIGNIISIWASHSIQTGSQNHTGVCNQRIITYENSTWVNHTYVNINNTNVIAGKDKTSVTLAGNSSLCSISGWAIYTKDNSIRIGSKGDVFVIREPFISCSHLECRTFFLTQGALLNDKHSNGTVKDRSPYRALMSCPLGEAPSPYNSKFESVAWSASACHDGMGWLTIGISGPDNGAVAVLKYNGIITETIKSWKKQILRTQESECVCVNGSCFTIMTDGPSNRAASYKIFKIEKGKVTKSVELNAPNFHYEECSCYPDTGTVMCVCRDNWHGSNRPWVSFNQNLDYQIGYICSGVFGDNPRPKDGEGSCNPVTVDGANGVKGFSYKYGNGVWIGRTKSNRLRKGFEMIWDPNGWTDTDSDFSVKQDVVAITDWSGYSGSFVQHPELTGLDCIRPCFWVELVRGLPKENTTIWTSGSSISFCGVNSDTANWSWPDGAELPFTIDK

SEQ ID NO: 14445 - protein, 470 aa, synthetic construct
  REGION 1..470: note = neuraminidase__InfluenzaA__ABA87060
MNPNQKIITIGSISIAIGIISLMLQIGNIISIWASHSIQTGSQNHTGICNQRIITYENSTWVNHTYVNINNTNVVAGKDKTSVTLAGNSSLCSISGWAIYTKDNSIRIGSKGDVFVIREPFISCSHLECRTFFLTQGALLNDKHSNGTVKDRSPYRALMSCPLGEAPSPYNSKFESVAWSASACHDGMGWLTIGISGPDNGAVAVLKYNGIITETIKSWKKRILRTQESECVCVNGSCFTIMTDGPSNGTASYKIFKIEKGKVTKSIELNAPNFHYEECSCYPDTGTVMCVCRDNWHGSNRPWVSFNQNLDYQIGYICSGVFGDNPRPKDGKGSCSPVTVDGADGVKGFSYKYGNGVWIGRTKSNRLRKGFEMIWDPNGWTDTDSDFSVKQDVVAITDWSGYSGSFVQHPELTGLDCIRPCFWVELVRGLPRENTTIWTSGSSISFCGVDSDTANWSWPDGAELPFTIDK

SEQ ID NO: 14446 - protein, 470 aa, synthetic construct
  REGION 1..470: note = neuraminidase__InfluenzaA__ABA87083
MNPNQKIITIGSISIAIGIISLMLQIGNIISIWASHSIQTGSQNHTGICNQKIITYKNSTWVNHTYVNINNTNVVAGKDKTSVTLAGNSSLCSISGWAIYTKDNSIRIGSKGDVFVIREPFISCSHLECRTFFLTQGALLNDKHSNGTVKDRSPYRALMSCPLGEAPSPYNSKFESVAWSASACHDGMGWLTIGISGPDNGAVAVLKYNGIITETIKSWKKRILRTQESECVCVNGSCFTIMTDGPSNGAASYKIFKIEKGKVTKSIELNAPNFHYEECSCYPDTGTVMCVCRDNWHGSNRPWVSFNQNLDYQIGYICSGVFGDNPRPKDGEGSCNPVTVDGADGVKGFSYKYGNGVWIGRTKSNRLRKGFEMIWDPNGWTDTDSVFSVKQDVVAITDWSGYSGSFVQHPELTGLDCIRPCFWVELVRGLPRENTTIWTSGSSISFCGVNSDTANWSWPDGAELPFTIDK

SEQ ID NO: 14447 - protein, 470 aa, synthetic construct
  REGION 1..470: note = neuraminidase__InfluenzaA__ABA87234
MNSNQKIITIGSISIAIGIISLMLQIGNIISIWASHSIQTGSQNHTGVCNQRIITYENSTWVNHTYVNINNTNVIAGKDKTSVTLAGNSSLCSISGWAIYTKDNSIRIGSKGDVFVIREPFISCSHLECRTFFLTQGALLNDKHSNGTVKDRSPYRALMSCPLGEAPSPYNSKFESVAWSASACHDGMGWLTIGISGPDNGAVAVLKYNGIITETIKSWKKQILRTQESECVCVNGSCFTIMTDGPSNGAASYKIFKIEKGKVIKSIELNAPNFHYEECSCYPDTGTVMCVCRDNWHGSNRPWVSFNQNLDYQIGYICSGVFGDNPRPKDGEGSCNPVTVDGANGVKGFSYKYGNGVWIGRTKSNRLRKGFEMIWDPNGWTDTDSDFSVKQDVVAITDWSGYSGSFVQHPELTGLDCIRPCFWVELVRGLPKENTTIWTSGSSISFCGVNSDTANWSWPDGAELPFTIDK

SEQ ID NO: 14448 - protein, 469 aa, synthetic construct; identical to SEQ ID NO: 14382
  REGION 1..469: note = neuraminidase__InfluenzaA__ABB02784

SEQ ID NO: 14449 - protein, 470 aa, synthetic construct; identical to SEQ ID NO: 14386
  REGION 1..470: note = neuraminidase__InfluenzaA__ABB02795

SEQ ID NO: 14450 - protein, 470 aa, synthetic construct; identical to SEQ ID NO: 14386
  REGION 1..470: note = neuraminidase__InfluenzaA__ABB02806

SEQ ID NO: 14451 - protein, 470 aa, synthetic construct
  REGION 1..470: note = neuraminidase__InfluenzaA__ABB02817
MNPNQKIITIGSISIAIGIISLMLQIGNIISIWASHSIQTGSQNHTGVCNQRIITYENSTWVNHTYVNINNTNVIAGKDKTSVTLAGNSSLCSISGWAIYTKDNSIRIGSKGDVFVIREPFISCSHLECRTFFLTQGALLNDKHSNGTVKDRSPYRALMSCPLGEAPSPYNSKFESVAWSASACHDGMGWLTIGISGPDNGAVAVLKYNGIITETIKSWKKQILRTQESECVCVNGSCFTIMTDGPSNGAASYKIFKIEKGKVTKSVELNAPNFHYEECSCYPDTGTVMCVCRDNWHGSNRPWVSFNQNLDYQIGYICSGVFGDNPRPKDGEGSCNPVTVDGANGVKGFSYKYGNGVWIGRTKSNRLRKGFEMIWDPNGWTDTDSDFSVKQDVVAITDWSGYSGSFVQHPELTGLDCIRPCFWVELVRGLPKENTTIWTSGSSISFCGVNSDTANWSWPDGAELPFTIDK

SEQ ID NO: 14452 - protein, 470 aa, synthetic construct; identical to SEQ ID NO: 14451
  REGION 1..470: note = neuraminidase__InfluenzaA__ABB02828

SEQ ID NO: 14453 - protein, 469 aa, synthetic construct
  REGION 1..469: note = neuraminidase__InfluenzaA__ABB02839
MNPNQKIITIGSVSLTISTICFFMQIAILITTVTLHFKQYEFNSPPNNQVVLCEPTIIERNITEIVYLTNTTIEKEICPKLAEYRNWSKPQCDITGFAPFSKDNSIRLSAGGDIWVTREPYVSCDPDKCYQFALGQGTTLNNVHSNDTVHDRTPYRTLLMNELGVPFHLGTKQVCIAWSSSSCHDGKAWLHVCVTGDDKNATASFIYNGRLVDSIVSWSKEILRTQESECVCINGTCTVVMTDGSASGKADTKILFIEEGKIVHTSTLSGSAQHVEECSCYPRYPGVRCVCRDNWKGSNRPIVDINIKDYSIVSSYVCSGLVGDTPRKNDSSSSSHCLDPNNEEGGHGVKGWAFDDGNDVWMGRTISEKLRSGYETFKVIEGWSNPNSKLQINRQVIVDRGNRSGYSGIFSVEGKSCINRCFYVELIRGRKEETEVLWTSNSIVVFCGTSGTYGTGSWPDGADINLMPI

SEQ ID NO: 14454 - protein, 469 aa, synthetic construct
  REGION 1..469: note = neuraminidase__InfluenzaA__ABB02850
MNPNQKIITIGSVSLTISTICFFMQIAILITTVTLHFKQYEFNSPPNNQVMLCEPTIIERNITEIVYLTNTTIEKEICPKPAEYRNWSKPQCDITGFAPFSKDNSIRLSAGGDIWVTREPYVSCDPDKCYQFALGQGTTLNNVHSNDTVHDRTPYRTLLMNELGVPFHLGTKQVCIAWSSSSCHDGKAWLHVCVTGDDKNATASFIYNGRLVDSIVSWSKEILRTQESECVCINGTCAVVITDGSASGKADTKILFIEEGKIVHTSKLSGSAQHVEECSCYPRYPGIRCVCRDNWKGSNRPIVDINIKDYSIVSSYVCSGLVGDTPRKNDSSSSSLCLDPNNEEGGHGVKGWAFDDGNDVWMGRTISEKLRSGYETFKVIEGWSNPNSKLQINRQVIVDRGNRSGYSGIFSVEGKSCINRCFYVELIRGRKEETEVLWTSNSIVVFCGTSGTYGTGSWPDGADINLMPI

SEQ ID NO: 14455 - protein, 469 aa, synthetic construct
  REGION 1..469: note = neuraminidase__InfluenzaA__ABB02861
MNPNQKIITIGSVSLTIATICFLMQIAILVTTVTLHFKQYECNSPPNNQVMLCEPAIIERNITEIVYLTNTTIEKEICPKLAEYRNWSKPQCNITGFAPFSKDNSIRLSAGGDIWVTREPYVSCDPDKCYQFALGQGTTLNNGHSNDTVHDRTPYRTLLMNELGVPFHLGTRQVCIAWSSSSCHDGKAWLHVCVTGDDENATASFIYDGRLVDSIGSWSKKILRTQESECVCINGTCTVVMTDGSASGKADTKILFIEEGKIVNISTLSGSAQHVEECSCYPRYPGVRCVCRDNWKGSNRPIVDINVKDYSIVSSYVCSGLVGDTPRKNDSFSSSHCLDPNNEEGGHGVKGWAFDDGNDVWMGRTISEKLRSGYETFKVIEGWSKPNSKLQINRQVIVERGNRSGYSGIFSVEGKSCINRCFYVELIRGRKEETEVWWTSNSIVVFCGTSGTYGTGSWPDGADIDLMPI

SEQ ID NO: 14456 - protein, 469 aa, synthetic construct; identical to SEQ ID NO: 14253
  REGION 1..469: note = neuraminidase__InfluenzaA__ABB02872

SEQ ID NO: 14457 - protein, 469 aa, synthetic construct; identical to SEQ ID NO: 14253
  REGION 1..469: note = neuraminidase__InfluenzaA__ABB02883

SEQ ID NO: 14458 - protein, 469 aa, synthetic construct
  REGION 1..469: note = neuraminidase__InfluenzaA__ABB02894
MNPNQKIITIGSVSLTIATICFLMQIAILVTTVTLHFKQYECNSPPNNQVMLCEPTIIERNITEMVYLTNTTIEKEICPKLAEYRNWSKPQCNITGFAPFSKDNSIRLSAGGDIWVTREPYVSCDPDKCYQFALGQGTTLNNGHSNDTVHDRTPYRTLLMNELGVPFHLGTKQVCIAWSSSSCHDGKAWLHVCVTGDDENATASFIYNGRLVDSIGSWSKKILRTQESECVCINGTCTVVMTDGSASGKADTKILFIEEGKIVHTSLLSGSAQHVEECSCYPRYPGVRCVCRDNWKGSNRPIVDINVKDYSIVSSYVCSGLVGDTPRKNDSSSSSHCLDPNNEEGGHGVKGWAFDDGNDVWMGRTISEKLRSGYETFKVIEGWSKPNSKLQINRQVIVDRGNRSGYSGIFSVEGKSCINRCFYVELIRGRKQETEVLWTSNSIVVFCGTSGTYGTGSWPDGADINLMPI

SEQ ID NO: 14459 - protein, 469 aa, synthetic construct; identical to SEQ ID NO: 14061
  REGION 1..469: note = neuraminidase__InfluenzaA__ABB02905

SEQ ID NO: 14460 - protein, 470 aa, synthetic construct
  REGION 1..470: note = neuraminidase__InfluenzaA__ABB02916
MNPNQKIITIGSISIAIGIISLMLQIGNIISIWASHSIQTGSQNHTGVCNQRIITYENSTWVNHTYVNINNTNVIAEKDKTSVTLAGNSSLCSISGWAIYTKDNSIRIGSKGDVFVIREPFISCSHLECRTFFLTQGALLNDKHSNGTVKDRSPYRALMSCPLGEAPSPYNSKFESVAWSASACHDGMGWLTIGISGPDNGAVAVLKYNGIITETIKSWKKQILRTQESECVCVNGSCFTIMTDGPSNGAASYKIFKIEKGKVTKSIELNAPNFHYEECSCYPDTGTVMCVCRDNWHGSNRPWVSFNQNLDYQIGYICSGVFGDNPRPRDGEGSCNPVTVDGANGVKGFSYKYGNGVWIGRTKSNRLRKGFEMIWDPNGWTDTDSDFSVKQDVVAITDWSGYSGSFVQHPELTGLDCIRPCFWVELVRGLPRENTTIWTSGSSISFCGVNSDTANWSWPDGAELPFTIDK

SEQ ID NO: 14461 - protein, 470 aa, synthetic construct
  REGION 1..470: note = neuraminidase__InfluenzaA__ABB02927
MNPNQKIITIGSISIAIGIISLMLQIGNIISIWASHSIQTGSQNHTGICNQRIITYENSTWVNHTYVNINNTNVVAGKDKTSVTLAGNSSLCSISGWAIYTKDNSIRIGSKGDVFVIREPFISCSHLECRTFFLTQGALLNDKHSNGTVKDRSPYRALMSCPLGEAPSPYNSKFESVAWSASACHDGMGWLTIGISGPDNGAVAVLKYNGIITETIKSWKKRILRTQESECVCVNGSCFTIMTDGPSNGAASYKIFKIEKGKVTKSIELNAPNFHYEECSCYPDTGTVMCVCRDNWHGSNRPWVSFNQNLDYQIGYICSGVFGDNPRPKDGEGSCNPVTVDGADGVKGFSYKYGNGVWIGRTKSNKLRKGFEMIWDPNGWTDTDSDFSVKQDVVAITDWSGYSGSFVQHPELTGLDCIRPCFWVELVRGLPRENTTIWTSGSSISFCGVNSDTANWSWPDGAELPFTIDK

SEQ ID NO: 14462 - protein, 470 aa, synthetic construct
  REGION 1..470: note = neuraminidase__InfluenzaA__ABB02939
MNPNQKIITIGSISIAIGIISLMLQIGNIISIWASHSIQTGSQNHTGVCNQRIITYENSTWMNHTYVNINNTNVIAGKDKTSVTLAGNSSLCSISGWAIYTKDNSIRIGSKGDVFVIREPFISCSHLECRTFFLTQGALLNDKHSNGTVKDRSPYRALMSCPLGEAPSPYNSKFESVAWSASACHDGMGWLTIGISGPDNGAVAVLKYNGIITETIKSWKKQILRTQESECVCVNGSCFTIMTDGPSNGAASYKIFKIEKGKVTKSMELNAPNFHYEECSCYPDTGTVMCVCRDNWHGSNRPWVSFNQNLDYQIGYICSGVFGDNPRPKDGEGSCNPVTVDGANGVKGFSYKYGNGVWIGRTKSNRLRKGFEMIWDPNGWTDTDSDFSVKQDVVAITDWSGYSGSFVQHPELTGLDCIRPCFWVELVRGLPKENTTIWTSGSSISFCGVNSDTANWSWPDGAELPFTIDK

SEQ ID NO: 14463 - protein, 469 aa, synthetic construct; identical to SEQ ID NO: 14378
  REGION 1..469: note = neuraminidase__InfluenzaA__ABB02950

SEQ ID NO: 14464 - protein, 469 aa, synthetic construct; identical to SEQ ID NO: 14279
  REGION 1..469: note = neuraminidase__InfluenzaA__ABB02961

SEQ ID NO: 14465 - protein, 469 aa, synthetic construct; identical to SEQ ID NO: 14279
  REGION 1..469: note = neuraminidase__InfluenzaA__ABB02972

SEQ ID NO: 14466 - protein, 469 aa, synthetic construct; identical to SEQ ID NO: 14279
  REGION 1..469: note = neuraminidase__InfluenzaA__ABB02983

SEQ ID NO: 14467 - protein, 469 aa, synthetic construct; identical to SEQ ID NO: 14279
  REGION 1..469: note = neuraminidase__InfluenzaA__ABB02994

SEQ ID NO: 14468 - protein, 469 aa, synthetic construct; identical to SEQ ID NO: 14279
  REGION 1..469: note = neuraminidase__InfluenzaA__ABB03005

SEQ ID NO: 14469 - protein, 469 aa, synthetic construct; identical to SEQ ID NO: 14284
  REGION 1..469: note = neuraminidase__InfluenzaA__ABB03016

SEQ ID NO: 14470 - protein, 469 aa, synthetic construct; identical to SEQ ID NO: 14279
  REGION 1..469: note = neuraminidase__InfluenzaA__ABB03027

SEQ ID NO: 14471 - protein, 469 aa, synthetic construct; identical to SEQ ID NO: 14284
  REGION 1..469: note = neuraminidase__InfluenzaA__ABB03038

SEQ ID NO: 14472 - protein, 469 aa, synthetic construct; identical to SEQ ID NO: 14279
  REGION 1..469: note = neuraminidase__InfluenzaA__ABB03049

SEQ ID NO: 14473 - protein, 469 aa, synthetic construct
  REGION 1..469: note = neuraminidase__InfluenzaA__ABB03060
MNPNQKIITIGSVSLTISTICFFMQIAILITTVTLHFKQYEFNSPPNNQVMLCEPTIIERNITEIVYLTNTTIEKEICPKLAEYRNWSKPQCDITGFAPFSKDNSIRLSAGGDIWVTREPYVSCDPDKCYQFALGQGTTLNNVHSNDTVHDRTPYRTLLMNELGVPFHLGTKQVCIAWSSSSCHDGKAWLHVCVTGDDKNATASFIYNGRLVDSIVSWSKEILRTQESECVCINGTCTVVMTDGSASGKADTKILFIEEGKIVHTSTLSGSAQHVEECSCYPRYPGIRCVCRDNWKGSNRPIVDINIKDYSIVSSYVCSGLVGDTPRKNDSSSSSHCLDPNNEEGGHGVKGWAFDDGNDVWMGRTISEKLRSGYETFKVIEGWSNPNSKLQINRQVIVDRGNRSGYSGIFSVEGKSCINRCFYVELIRGRKEETEVLWTSNSIVVFCGTSGTYGTGSWPDGADINLMPI

SEQ ID NO: 14474 - protein, 469 aa, synthetic construct
  REGION 1..469: note = neuraminidase__InfluenzaA__ABB03071
MNPNQKIITIGSVSLTISTICFFMQIAILITTVTLHFKQYEFNSPPNNQVMLCEPTIIERNITEIVYLTNTTIEKEICPKLAEYRNWSKPQCGITGFAPFSKDNSIRLSAGGDIWVTREPYVSCDPDKCYQFALGQGTTLNNVHSNDTVHDRTPYRTLLMNELGVPFHLGTKQVCIAWSSSSCHDGKAWLHVCVTGDDKNATASFIYNGRLVDSIVSWSKEILRTQESECVCINGTCTVVMTDGSASGKADTKILFIEEGKIVHTSTLSGSAQHVEECSCYPRYPGVRCVCRDNWKGSNRPIVDINIKDYSIVSSYVCSGLVGDTPRKNDSSSSSHCLDPNNEEGGHGVKGWAFDDGNDVWMGRTISEKLRSGYETFKVIEGWSNPNSKLQINRQVIVDKGNRSGYSGIFSVEGKSCINRCFYVELIRGRKEETEVLWTSNSIVVFCGTSGTYGTGSWPDGADINLMPI

SEQ ID NO: 14475 - protein, 469 aa, synthetic construct
  REGION 1..469: note = neuraminidase__InfluenzaA__ABB03093
MNPNQKIITIGSVSLTISTICFFMQIAILITTVTLHFKQYEFNSPPNNQVMLCEPTIIERNITEIVYLTNTTIEKEICPKLAEYRNWSKPQCDITGFAPFSKDNSIRLSAGGDIWVTREPYVSCDPDKCYQFALGQGTTLNNVHSNDTVHDRTPYRTLLMNELGVPFHLGTKQVCIAWSSSSCHDGKAWLHVCVTGDDKNATASFIYNGRLVDSIVSWSKEILRTQESECVCINGTCTVVMTDGSASGKADTKILFIEEGKIVHTSTLSGSAQHIEECSCYPRYPGVRCVCRDNWKGSNRPIVDINIKDYSIVSSYVCSGLVGDTPRKNDSSSSSHCLDPNNEEGGHGVKGWAFDDGNDVWMGRTISEKLRSGYETFKVIEGWSNPNSKLQINRQVIVDRGNRSGYSGIFSVEGKSCINRCFYVELIRGRKEETEVLWTSNSIVVFCGTSGTYGTGSWPDGADINLMPI

SEQ ID NO: 14476 - protein, 469 aa, synthetic construct; identical to SEQ ID NO: 14382
  REGION 1..469: note = neuraminidase__InfluenzaA__ABB03104

SEQ ID NO: 14477 - protein, 469 aa, synthetic construct
  REGION 1..469: note = neuraminidase__InfluenzaA__ABB03115
MNPNQKIITIGSVSLTISTICFFMQIAILITTVTLHFKQYEFNSPPNNQVMLCEPTIIERNITEIVYLTNTTIEKEICPKLAEYRNWSKPQCNITGFAPFSKDNSIRLSAGGDIWVTREPYVSCDPDKCYQFALGQGTTLNNVHSNDTVHDRTPYRTLLMNELGVPFHLGTKQVCIAWSSSSCHDGKAWLHVCVTGDDENATASFIYNGRLVDSIVSWSKKILRTQESECVCINGTCTVVMTDGSASGKADTKILFIEEGKIVHTSTLSGSAQHVEECSCYPRYPGVRCVCRDNWKGSNRPIVDINIKDYSIVSSYVCSGLVGDTPRKNDSSSSSHCLDPNNEEGGHGVKGWAFDDGNDVWMGRTISEKLRSGYETFKVIEGWSNPNSKLQINRQVIVDRGNRSGYSGIFSVEGKSCINRCFYVELIRGRKQENEVLWTSNSIVVFCGTSGTYGTGSWPDGADINLMPI

SEQ ID NO: 14478 - protein, 470 aa, synthetic construct; identical to SEQ ID NO: 14386
  REGION 1..470: note = neuraminidase__InfluenzaA__ABB03126

SEQ ID NO: 14479 - protein, 470 aa, synthetic construct
  REGION 1..470: note = neuraminidase__InfluenzaA__ABB03148
MNPNQKIITIGSISIAIGTISLMLQIGNIISIWASHSIQTGSQNHTGICNQRIITYENSTWVNHTYVNINNTNVVAGKDKTSVTLAGNSSLCSISGWAIYTKDNSIRIGSKGDVFVIREPFISCSHLECRTFFLTQGALLNDKHSNGTVKDRSPYRALMSCPLGEAPSPYNSKFESVAWSASACHDGMGWLTIGISGPDNGAVAVLKYNGIITETIKSWKKRILRTQESECVCVNGSCFTIMTDGPSNGAASYKIFKIEKGKVTKSIELNAPNFHYEECSCYPDTGTVMCVCRDNWHGSNRPWVSFNQNLDYQIGYICSGVFGDNPRPKDGKGSCNPVTVDGADGVKGFSYKYGNGVWIGRTKSNRLRKGFEMIWDPNGWTDTDSDFSVKQDVVAITDWSGYSGSFVQHPELTGLDCIRPCFWVELVRGLPRENTTIWTSGSSISFCGVDSDTANWSWPDGAELPFTIDK

SEQ ID NO: 14480 - protein, 469 aa, synthetic construct
  REGION 1..469: note = neuraminidase__InfluenzaA__ABB04286
MNPNQKIITIGSVSLTIATICFLMQIAILVTTVTLHFKQYECSSPPNNQVMPCEPIIIERNITEIVYLTNTTIEKEICPKLVEYRNWSKPQCKITGFAPFSKDNSIRLSAGGDIWVTREPYVSCDPGKCYQFALGQGTTLDNKHSNDTIHDRTPHRTLLMNELGVPFHLGTRQVCIAWSSSSCHDGKAWLHVCVTGYDKNATASFIYDGRLVDSIGSWSKNILRTQESECVCINGTCTVVMTDGSASERADTKILFIEEGKIVHISPLSGSAQHVEECSCYPRYPGVRCVCRDNWKGSNRPVVDINVKDYSIVSSYVCSGLVGDTPRKNDRSSSSYCRNPNNEKGNHGVKGWAFDDGNDVWMGRTISEESRSGYETFKVIGGWSTPNSKSQINRQVIVDSGNRSGYSGIFSVEGKSCINRCFYVELIRGREQETRVWWTSNSIVVFCGTSGTYGTGSWPDGADINLMPI

SEQ ID NO: 14481 - protein, 469 aa, synthetic construct
  REGION 1..469: note = neuraminidase__InfluenzaA__ABB04297
MNPNQKIITIGSVSLTIATICFLMQIAILVTTVTLHFKQYECDSPANNQVIPCEPITIERNITEIVYLTNTTIEKEICPKLVEYRNWSKPQCKITGFAPFSKDNSIRLSAGGDIWVTREPYVSCDPGKCYQFALGQGTTLDNKHSNDTIHDRTPHRTLLMNELGVPFHLGTRQVCIAWSSSSCHDGKAWLHVCVTGYDKNATASFIYDGRLVDSIGSWSQNILRTQESECVCINGTCTVVMTDGSASGRADTKILFIEEGKIVHISPLSGSAQHVEECSCYPRYPGVRCICRDNWKGSNRPVVDINVKDYSIDSSYVCSGLVGDTPRNNDRSSNSYCRNPNNEKGNHGVKGWAFDDGNDVWMGRTISEDSRSGYETFKVIGGWSTPNSKLQINRQVIVDSDNRSGYSGIFSVEGKSCINRCFYVELIRGREQETRVWWTSNSIVVFCGTSGTYGTGSWPDGADINLMPI

SEQ ID NO: 14482 - protein, 469 aa, synthetic construct
  REGION 1..469: note = neuraminidase__InfluenzaA__ABB04319
MNPNQKIITIGSVSLTIATICFLMQIAILVTTVTLHFKQYECSSPPNNQVMPCEPTIIERNITEIVYLTNTTIEKEICPKLVEYRNWSKPQCKITGFAPFSKDNSIRLSAGGDIWVTREPYVSCDPGKCYQFALGQGTTLNNRHSNDTVHDRTPYRTLLMNELGVPFHLGTKQVCIAWSSSSCHDGKAWLHVCVTGHDKNATASFIYNGRLVDSIGSWSKNILRTQESECVCINGTCTVVMTDGSASERADTKILFIEEGKIVHISPLSGSAQHVEECSCYPRYPGVRCVCRDNWKGSNRPIVDINVKDYSIVSSYVCSGLVGDTPRKNDRSSSSYCQNPNNEKGSHGVKGWAFDDGNDVWMGRTIGEELRSGYETFKVIGGWSTPNSKLQINRQVIVDSGNRSGYSGIFSVEGKSCINRCFYVELIRGRKQETRVWWTSNSIVVFCGTSGTYGTGSWPDGADINLMPI

SEQ ID NO: 14483 - protein, 469 aa, synthetic construct
  REGION 1..469: note = neuraminidase__InfluenzaA__ABB04341
MNPNQKIITIGSVSLTIATICFLMQIAILVTTVTLHFKQYECDSPANNQVMPCEPIIIERNITEIVYLTNTTIEKEICPKLVEYRNWSKPQCKITGFAPFSKDNSVRLSAGGDIWVTREPYVSCDPGKCYQFALGQGTTLDNKHSNDTIHDRTPHRTLLMNELGVPFHLGTRQVCIAWSSSSCHDGKAWLHVCVTGYDKNATASFIYDGRLVDSIGSWSQNILRTQESECVCINGTCTVVMTDGSASGRADTKILFIEEGKIVHISPLSGSAQHVEECSCYPRYPGVRCICRDNWKGSNRPVVDINVKDYSIDSSYVCSGLVGDTPRKNDRSSNSYCRNPNNEKGNHGVKGWAFDDGNDVWMGRTISEDSRSGYETFKVIGGWSTPNSKLQINRQVIVDSDNRSGYSGIFSVEGKSCINRCFYVELIRGREQETRVWWTSNSIVVFCGTSGTYGTGSWPDGADINLMPI

SEQ ID NO: 14484 - protein, 469 aa, synthetic construct
  REGION 1..469: note = neuraminidase__InfluenzaA__ABB04352
MNPNQKIITIGSVSLTIATICFLMQIAILVTTVTLHFKQYECSSPPNNQVMPCEPIIIERNITEIVYLTNTTIEKEICPKLVEYRNWSKPQCKITGFAPFSKDNSIRLSAGGDIWVTREPYVSCDPGKCYQFALGQGTTLNNKHSNDTVHDRTPYRTLLMNELGVPFHLGTKQVCIAWSSSSCHDGKAWLHVCVTGHDKNATASFIYDGRLVDSIGSWSKNILRTQESECVCINGTCTVVMTDGSASERADTKILFIEEGKIVHISPLSGSAQHVEECSCYPRYPGVRCVCRDNWKGSNRPIVDINVKDYSIVSSYVCSGLVGDTPRKNDRSSSSYCRNPNNEKGSHGVKGWAFDDGNDVWMGRTIGEELRSGYETFKVIGGWSTPNSKLQINRQVIVDSGNRSGYSGIFSVEGKSCINRCFYVELIRGREQETRVWWTSNSIVVFCGTSGTYGTGSWPDGADINLMPI

SEQ ID NO: 14485 - protein, 469 aa, synthetic construct
  REGION 1..469: note = neuraminidase__InfluenzaA__ABB04374
MNPNQKIITIGSVSLTIATVCFLMQIAILVTTVTLHFKQYECDSPANNQVMPCEPIIIERNITEIVYLTNTTIEKEICPKLVEYRNWSKPQCKITGFAPFSKDNSIRLSAGGDIWVTREPYVSCDPGKCYQFALGQGTTLDNKHSNDTIHDRIPHRTLLMNELGVPFHLGTRQVCIAWSSSSCHDGKAWLHVCVTGDDENATASFIYDGRLVDSIGSWSQNILRTQESECVCINGTCTVVMTDGSASGRADTRILFIEEGKIVHISPLSGSAQHVEECSCYPRYPGVRCICRDNWKGSNRPVVDINVKDYSIDSRYVCSGLVGDTPRNNDKSSNSNCRNPNNDKGNHGVKGWAFDDGNDVWMGRTISKDSRSGYETFKVIGGWSTPNSKSQINRQVIVDSDNRSGYSGIFSVEGKSCINRCFYVELIRGREQETKVWWTSNSIVVFCGTSGTYGTGSWPDGADINLMPI

SEQ ID NO: 14486 - protein, 469 aa, synthetic construct
  REGION 1..469: note = neuraminidase__InfluenzaA__ABB04931
MNPNQKIITIGSVSLTIATICFLMQIAILVTTVTLHFKQYECDSPANNQVMPCEPIIIERNITEIVYLTNTTIEKEICPKLVEYRNWSKPQCKITGFAPFSKDNSIRLSAGGDIWVTREPYVSCDPGKCYQFALGQGTTLDNKHSNDTIHDRTPHRTLLMNELGVPFHLGTRQVCIAWSSSSCHDGKAWLHVCVTGYDKNATASFIYDGRLVDSIGSWSQNILRTQESECVCINGTCTVVMTDGSASGRADTKILFIEEGKIVHISPLSGSAQHVEECSCYPRYPGVRCICRDNWKGSNRPVVDINVKDYSIDSSYVCSGLVGDTPRNNDRSSSSYCRNPNNEKGKHGVKGWAFDDGNDVWMGRTISEDSRSGYETFKVIGGWSTPNSKLQINRQVIVDSDNRSGYSGIFSVEGKSCINRCFYVELIRGREQETRVWWTSNSIVVFCGTSGTYGTGSWPDGADINLMPI

SEQ ID NO: 14487 - protein, 469 aa, synthetic construct
  REGION 1..469: note = neuraminidase__InfluenzaA__ABB04942
MNPNQKIITIGSVSLTIATICFLMQIAILVTTVTLHFKQYECSSPPNNQVMPCEPIIIERNITEIVYLTNTTIEKEICPKLVEYRNWSKPQCKITGFAPFSKDNSIRLSAGGDIWVTREPYVSCDPGKCYQFALGQGTTLNNKHSNDTIHDRTPYRTLLMNELGVPFHLGTKQVCIAWSSSSCHDGKAWLHVCVTGHDKNATASFIYDGRLVDSIGSWSKNILRTQESECVCINGTCTVVMTDGSASERADTKILFIEEGKIVHISPLSGSAQHVEECSCYPRYPGVRCVCRDNWKGSNRPIVDINVKDYSIVSSYVCSGLVGDTPRKNDRSSSSYCRNPNNEKGNHGVKGWAFDDGNDVWMGRTIGEELRSGYETFKVIGGWSTPNSKLQINRQVIVDSDNRSGYSGIFSVEGKSCINRCFYVELIRGREQETRVWWTSNSIVVFCGTSGTYGTGSWPDGADINLMPI

SEQ ID NO: 14488 - protein, 469 aa, synthetic construct; identical to SEQ ID NO: 14484
  REGION 1..469: note = neuraminidase__InfluenzaA__ABB04953

SEQ ID NO: 14489 - protein, 469 aa, synthetic construct; identical to SEQ ID NO: 14382
  REGION 1..469: note = neuraminidase__InfluenzaA__ABB04975

SEQ ID NO: 14490 - protein, 469 aa, synthetic construct; identical to SEQ ID NO: 14180
  REGION 1..469: note = neuraminidase__InfluenzaA__ABB04986

SEQ ID NO: 14491 - protein, 469 aa, synthetic construct
  REGION 1..469: note = neuraminidase__InfluenzaA__ABB04997
MNPNQKIITIGSVSLTIATICFLMQIAILVTTVTLHFKQYECNSPPNNQVMLCEPTIIERNITEIVHLTNTTIEKEICPKLAEYRNWSKPQCNITGFAPFSKDNSIRLSAGGDIWVTREPYVSCDPDKCYQFALGQGTTLNNGHSNDTVHDRTPYRTLLMNELGVPFHLGTKQVCIAWSSSSCHDGKAWLHVCVTGDDENATASFIYNGRLVDSIGSWSKKILRTQESECVCINGTCTVVMTDGSASGKADTKILFIEEGKIVHTSLLSGSAQHVEECSCYPRYPGVRCVCRDNWKGSNRPIVDINVKDYSIVSSYVCSGLVGDTPRKNDSSSSSHCLDPNNEEGGHGVKGWAFDDGNDVWMGRTISEKLRSGYETFKVIEGWSKPNSKLQINRQVIVDRGNRSGYSGIFSVEGKSCINRCFYVELIRGRKQETEVLWTSNSIVVFCGTSGTYGTGSWPDGADINLKPI

SEQ ID NO: 14492 - protein, 469 aa, synthetic construct; identical to SEQ ID NO: 14253
  REGION 1..469: note = neuraminidase__InfluenzaA__ABB05008

SEQ ID NO: 14493 - protein, 469 aa, synthetic construct; identical to SEQ ID NO: 14061
  REGION 1..469: note = neuraminidase__InfluenzaA__ABB05186

SEQ ID NO: 14494 - protein, 469 aa, synthetic construct; identical to SEQ ID NO: 14253
  REGION 1..469: note = neuraminidase__InfluenzaA__ABB05219

SEQ ID NO: 14495 - protein, 469 aa, synthetic construct
  REGION 1..469: note = neuraminidase__InfluenzaA__ABB46395
MNPNQKIITIGSVSLTIATICFLMQIAILVTTVTLHFKQYECDSPANKQVMPCEPIIIERNITEIVYLTNTTIEKEICPKLVEYRNWSKPQCKITGFAPFSKDNSIRLSAGGDIWVTREPYVSCDPGKCYQFALGQGTTLDNKHSNDTIHDRTPHRTLLMNELGVPFHLGTRQVCIAWSSSSCHDGKAWLHVCVTGYDKNATASFIYDGRLVDSIGSWSQNILRTQESECVCINGTCTVVMTDGSASGRADTKILFIEEGKIVHISPLSGSAQHVEECSCYPRYPGVRCICRDNWKGSNRPVVDINVKDYSIDSSYVCSGLVGDTPRNNDRSSSSYCRNPNNEKGTHGVKGWAFDDGNDVWMGRTISEDSRSGYETFKVIGGWSTPNSKLQINRQVIVDSDNRSGYSGIFSVEGKSCINRCFYVELIRGREQETRVWWTSNSIVVFCGTSGTYGTGSWPDGADINLMPI

SEQ ID NO: 14496 - protein, 469 aa, synthetic construct; identical to SEQ ID NO: 14040
  REGION 1..469: note = neuraminidase__InfluenzaA__ABB46417

SEQ ID NO: 14497 - protein, 469 aa, synthetic construct
  REGION 1..469: note = neuraminidase__InfluenzaA__ABB46428
MNPNQKIITIGSVSLTIATICFLMQIAILVTTVTLHFKQYECNSPPNNQVMLCEPTIIERNITEIVYLTNTTIEKEICPKLAEYRNWSKPQCNITGFAPFSKDNSIRLSAGGDIWVTREPYVSCDPDKCYQFALGQGTTLNNGHSNDTVHDRTPYRTLLMNELGVPFHLGTKQVCIAWSSSSCHDGKAWLHVCVTGDDENATASFIYNGRLVDSIGSWSKKILRTQESECVCINGTCTVVMTDGSASGKADTKILFIEEGKIVHISPLSGSAQHVEECSCYPRYPGVRCVCRDNWKGSNRPIVDINVKDYSIVSSYVCSGLVGDTPRKNDSFSSSHCLDPNNEEGGHGVKGWAFDDGNDVWMGRTISEKLRSGYETFKVIEGWSKPNSKLQINRQVIVDRGNRSGYSGIFSVEGKSCINRCFYVELIRGRKEETEVWWTSNSIVVFCGTSGTYGTGSWPDGADINLMPI

SEQ ID NO: 14498 - protein, 469 aa, synthetic construct
  REGION 1..469: note = neuraminidase__InfluenzaA__ABB46439
MNPNQKIITIGSVSLTISTICFFMQIAILITTVTLHFKQYEFNSPPNNQVMLCEPTIIERNITEIVYLTNTTIEKEICPKLAEYRNWSKPQCDITGFAPFSKDNSIRLSAGGDIWVTREPYVSCDPDKCYQFALGQGTTLNNVHSNDTVHDRTPYRTLLMNELGVPFHLGTKQVCIAWSSSSCHDGKAWLHVCVTGDDKNATASFIYNGRLVDSIVSWSKEILRTQESECVCINGACTVVMTDGSASGKADTKILFIEERRIVHTSTLSGSAQHVEECSCYPRYPGVRCVCRDNWKGSNRPIVDINIKDYSIVSSYVCSGLVGDTPRKNDSSSSSNCLDPNNEEGGHGVKGWAFDDGNDVWMGRTISEKLRSGYETFKVIEGWSNPNSKLQINRQVIVDRGNRSGYSGIFSVEGKSCINRCFYVELIRGRKEETEVLWTSNSIVVFCGTSGAYGTGSWPDGADINLMPI

SEQ ID NO: 14499 - protein, 469 aa, synthetic construct; identical to SEQ ID NO: 14346
  REGION 1..469: note = neuraminidase__InfluenzaA__ABB46450

SEQ ID NO: 14500 - protein, 469 aa, synthetic construct; identical to SEQ ID NO: 14327
  REGION 1..469: note = neuraminidase__InfluenzaA__ABB46461

SEQ ID NO: 14501 - protein, 469 aa, synthetic construct
  REGION 1..469: note = neuraminidase__InfluenzaA__ABB46550
MNPNQKIITIGSVSLTIATICFLMQIAILVTTVTLHFKQYECSSPPNNQVMPCEPIIIERNITEIVYLTNTTIEKEICPKLVEYRNWSKPQCKITGFAPFSKDNSIRLSAGGDIWVTREPYVSCDPGKCYQFALGQGTTLDNKHSNDTIHDRTPHRTLLMNELGVPFHLGTRQVCIAWSSSSCHDGKAWLHVCVTGYDKNATASFIYDGRLVDSIGSWSKNILRTQESECVCVNGTCTVVMTDGSASERADTKILFIEEGKIVHISPLSGSAQHVEECSCYPRYPGVRCVCRDNWKGSNRPVVDINVKDYSIVSSYVCSGLVGDTPRKNDRSSSSYCRNPNNEKGNHGVKGWAFDDGNDVWMGRTISEESRSGYETFKVIGGWSTPNSKSQINRQVIVDSGNRSGYSGIFSVEGKSCINRCFYVELIRGREQETRVWWTSNSIVVFCGTSGTYGTGSWPDGADINLMPI

SEQ ID NO: 14502 - protein, 469 aa, synthetic construct
  REGION 1..469: note = neuraminidase__InfluenzaA__ABB51955
MNPNQKIITIGSVSLTISTICFFMQIAILVTTVTLHFKQYECNSPPNNQVMLCEPTIIERNITEIVYLTNTTIEKEICPKLAEYRNWSKPQCNITGFAPFSKDNSIRLSAGGDIWVTREPYVSCDPDKCYQFALGQGTTLNNGHSNDIVHDRTPYRTLLMNELGVPFHLGTKQVCIAWSSSSCHDGKAWLHVCVTGDDENATASFIYNGRLVDSIGSWSKKFFRTQESECVCIHGTCTVVMTDGSASRKADTKILFIEEGKIVHTSTLSGSAQHVEECSCYPRYPGVRCVCRDNWKGSNRPIVDINIKDYSIVSSYVCSGLVGDTPRKNDSSSSSHCLDPNNEEGGHGVKGWAFDDGNDVWMGRTISEKLRSGYETFKVIEGWSKPNSKLQINRQVIVDRGNRSGYSGIFSVEGKSCINRCFYVELIRGRKQETEVLWTSNSIVVFCGTSGTYGTGSWPDGADINLMPI

SEQ ID NO: 14503 - protein, 470 aa, synthetic construct
  REGION 1..470: note = neuraminidase__InfluenzaA__ABB51956
MNPNQKIITIGSISIAIGIISLMLQIGNIISIWASHSIQTGSQNHTGVCNQRIITYENSTWVNHTYVNINNTNVIAGKDKTSVTVAGNSSLCSISGWAIYTKDNSIRIGSKGDVFVIREPFISCSHLECRTFFLTQGALLNDKHSNGTVKDRSPYRALMSCPLGEAPSPYNSKFESVAWSASACHDGMGWLTIGISGPDNGAVAVLKYNGIITETIKSWKKPILGTQESEWVCVNGSCFTIMTDDPSYEAASYKIFKIERERVTKSIELNAPNFHYEECSCYPDTGTVMCVCRDNWHGSNRPWVSFNQNLDYQIGYICSGVFGDNPRPKDGEGSCNPVTVDGANGVKGFSYKYGNGVWIGRTKSNRLRKGFEMIWDPNGWTDTDSDFSVKQDVVAITDWSGYSGSFVQHPELTGLDCIRPCFWVELVRGLPKENTTIWTSGSSISFCGVNSDTANWSWPDGAELPFTIDK

SEQ ID NO: 14504 - protein, 469 aa, synthetic construct
  REGION 1..469: note = neuraminidase__InfluenzaA__ABB51957
MNPNQKIITIGSVSLTIATICFLMQIAILVTTVTLHFKQHECNSPPNNQVMLCEPTIIERNITEIVYLTNTTIEKEICPKLAEYRNWSKPQCNITGFAPFSKDNSIRLSAGGDIWVTREPYVSCDPDKCYQFALGQGTTLNNGHSNDTVRDRTPYRTLLMNELGVPFHLGTRQVCIAWSSSSCHDGKAWLHVCVTGDDKNATASFIYNGRLVDSIGSWSKKIFRTQKFECVCIHWTCTVVMTDGSASGKADTKILFIEEGKIVHISTLSGSAQHVEECSCYPRYPGVRCVCRDNWKGSNRPIVDINVKDYSIVSSYVCSGLVGDTPRKNDSFSSSHCLDPNNEEGGHGVKGWAFDDGNDVWMGRTISEKLRSGYETFKVIEGWSKPNSKLQINRQVIVERGNRSGYSGIFSVEGKSCINRCFYVELIRGRKEETEVWWTSNSIVVFCGTSGTYGTGSWPDGADINLMPI

SEQ ID NO: 14505 - protein, 470 aa, synthetic construct
  REGION 1..470: note = neuraminidase__InfluenzaA__ABB51958
MNPNQKIITIGSISIAIGIISLMLQIGNIISIWASHSIQTGSQNHTGVCNQRIITYENSTWVNHTYVSINNTNVIAGKDKTSVTLAGNSSLCPIRGWAIYTKGNSIRIGSKGDVFVIREPFISCSHLECRTFFLTQGALLNDKHSNGTVKDRSPYRALMSCPLGEAPSPYNSKFESVAWSASACHDGMGWLTIGISGPDNGAVAVLKYNGIITETIKSWKKQILRTQESECVCVNGSCFTIMTDGPSNGAASYKIFKIEKGKVTKSIELNAPNFHYEECSRYPDTGTVMCVCRDNWHGSNRPWVSFNQNLDYQIGYICSGVFGDNPRPKDGEGSCNPVTVDGANGVKGFSYKYGNGVGIGRTISNRLRKGFEMIWDPNGWTDTDSDFSVKQDVVAITDWSGYSGSFVQHPELTGLDCIRPCFWVELVRGLPKENTTIWTSGSSISFCGVNSDTANWSWPDGAELPFTIDK

SEQ ID NO: 14506 - protein, 469 aa, synthetic construct
  REGION 1..469: note = neuraminidase__InfluenzaA__ABB51959
MNPNQKIITIGSVSLTISTICFFMQIAILITTVTLHFKQYEFNSPPNNQVMLCEPTIIERNITEIVYLTNTTIEKEICPKLAEYRNWSKPQCDITGFAPFSKDNSIRLSAGGDIWVTREPYVSCDPDKCYQFALGQGTTLNNVHSNDTVHGRTPYRTLLMNELGVPFHLGTKQVCIAWSSSSCHDGKAWLHVCVTGDDKNATASFIYNGRLVDSIVSWSKEILRTQESECVCINGTCTVVMTDGSASGKADTKILFNEEGKIVHTSTCSGSAQHVEECSCYSRYPGVRCVCRDNWKGSNRPIVDINIKDYSIVSSYVCSGLVGDTPRKNDSSSSSHCLDPNNEEGGHGVKGRAFDDGNDVWMGRTISEKLRSGYETFKVIEGWSNPNSKLQINRQVIVDRGNRSGYSGIFSVEGKSCINRCFYVELIRGRKEETEVLWTSNSIVVFCGTSGTYGTGSWPDGADINLMPI

SEQ ID NO: 14507 - protein, 470 aa, synthetic construct
  REGION 1..470: note = neuraminidase__InfluenzaA__ABB51960
MNPNQKIITIGSISIAIGIISLMLQIGNIIPIWASHSIQTGSQNHTGVCNQRIITYENSTWVNHTYVNINNTNVIAGKDKTSVTLAGNSSLCSISGWAIYTKDNSIRIGSKGDVFVIREPFISCSHLECRTFFLTQGALLNDKHSNGTVKDRSPYRALMSCPLGEAPSPYNSEFESVAWSASACHDGMGWLTIGISGPDNGAVAVLKYNGIITETIKSWKKQILRTQESECVCVNGSCFTIMTDGPSNGAASYKIFKIEKGKITKSIELNAPNSHYEECSCYPDTGTVMCVCRDSWHGSNRPWVSFNQNLDYQIGYICSGVFGDNPRPKDGEGSCNPVTVDGANGVKGFSYEYGNGDWIGRTKSNRLRKGFEMIWDPDGWTDTNSDFSVKQDVVAITDWSGYSGSFVQHPELTGLVCIRPCFWVELVRGLPKENTTIWTSGSSISFCGVNSDTANWSWPDGAELPFTIDK

SEQ ID NO: 14508 - protein, 469 aa, synthetic construct; identical to SEQ ID NO: 14343
  REGION 1..469: note = neuraminidase__InfluenzaA__ABB53617

SEQ ID NO: 14509 - protein, 469 aa, synthetic construct
  REGION 1..469: note = neuraminidase__InfluenzaA__ABB53721
MNPNQKIITIGSVSLTISTICFFMQIAILITTVTLHFKQYEFNSPPNNQVMLCEPTIIERNITEIVYLTNTTIEKEICPKLAEYRNWSKPQCDITGFAPFSKDNSIRLSSGGDIWVTREPYVSCDPDKCYQFALGQGTTLNNVHSNDTVHDRTPYRTLLMNELGVPFHLGTKQVCIAWSSSSCHDGKAWLHVCVTGDDKNATASFIYNGRLVDSIVSWSKEILRTQESECVCINGTCTVVMTDGSASGKADTKILFIEEGKIVHTSTLSGSAQHVEECSCYPRYPGVRCVCRDNWKGSNRPIVDINIKDYSIVSSYVCSGLVGDTPRKNDSSSSSHCLDPNNEEGGHGVKGWAFDDGNDVWMGRTISEKLRSGYETFKVIEGWSNPNSKLQINRQVIVDRGNRSGYSGIFSVEGKSCINRCFYVELIRGRKEETEVLWTSNSIVVFCGTSGTYGTGSWPDGADINLMPI

SEQ ID NO: 14510 - protein, 469 aa, synthetic construct
  REGION 1..469: note = neuraminidase__InfluenzaA__ABB53754
MNPNQKIITIGSVSLTIATICFLMQIAILVTTVTLHFKQYECSSPPNNQVMPCEPIIIERNITEIVYLTNTTIEKEICPKLVEYRNWSKPQCKITGFAPFSKDNSIRLSAGGDIWVTREPYVSCDPGKCYQFALGQGTTLDNKHSNDTIHDRTPHRTLLMNELGVPFHLGTRQVCIAWSSSSCHDGKAWLHVCVTGYDKNATASFIYDGRLVDSIGSWSKNILRTQESECVCINGTCTVVMTDGSASERADTKILFIEEGKIVHISPLSGSAQHVEECSCYPRYPGVRCVCRDNWKGSNRPVVDINVKDYSIVSSYVCSGLVGDTPRKNDRSSSSYCRNPNNEKGNHGVKGWAFDDGNDVWMGRTISEESRSGYETFKVIGGWSTPNSKLQINRQVIVDSDNRSGYSGIFSVEGKSCINRCFYVELIRGREQETRVWWTSNSIVVFCGTSGTYGTGSWPDGADINLMPI

SEQ ID NO: 14511 - protein, 469 aa, synthetic construct; identical to SEQ ID NO: 14103
  REGION 1..469: note = neuraminidase__InfluenzaA__ABB54517

SEQ ID NO: 14512 - protein, 469 aa, synthetic construct
  REGION 1..469: note = neuraminidase__InfluenzaA__ABB59999
MNPNQKIITIGSVSLTIATICFLMQIAILVTTVTLHFKQYECSSPPNNQVMLCEPTIIERNITEIVYLTNTTIEKEICPKLAEYRNWSKPQCKITGFAPFSKDNSIRLSAGGDIWVTREPYVSCDPDKCYQFALGQGTTLNNRHSNDTVHDRTPYRTLLMNELGVPFHLGTKQVCIAWSSSSCHDGKAWLHVCVTGHDENATASFIYDGRLVDSIGSWSKKILRTQESECVCINGTCTVVMTDGSASGRADTKILFIEEGKIVHISPLSGSAQHVEECSCYPRYPGVRCVCRDNWKGSNRPIVDINIKDYSIVSSYVCSGLVGDTPRKNDSSSSSHCLNPNNEEGGHGVKGWAFDDGNDVWMGRTISEKFRSGYETFKVIEGWSKPNSKLQINRQVIVDRGNRSGYSGIFSVEGKSCINRCFYVELIRGRKQETEVWWTSNSIVTFCGTSGTYGTGSWPDGADINLMPI

SEQ ID NO: 14513 - protein, 469 aa, synthetic construct
  REGION 1..469: note = neuraminidase__InfluenzaA__ABB60010
MNPNQKIITIGSVSLTIATICFLMQIAILVTTVTLHFKQYEYSSPPNNQVMLCEPTIIERNITEIVYLTNTTIEKEICPKLAEYRNWSKPQCKITGFAPFSKDNSIRLSAGGDIWVTREPYVSCDPDKCYQFALGQGTTLNNRHSNDTVHDRTPYRTLLMNELGVPFHLGTKQVCIAWSSSSCHDGKAWLHVCVTGHDENATASFIYDGRLVDSIGSWSKKILRTQESECVCINGTCTVVMTDGSASGRADTKILFIEEGKIVHISPLSGSAQHVEECSCYPRYPGVRCVCRDNWKGSNRPIVDINVKDYSIVSRYVCSGLVGDTPRKNDSSSSSHCLNPNNEEGGHGVKGWAFDDGNDVWMGRTISEKFRSGYETFKVIEGWSKPNSKLQINRQVIVDRGNRSGYSGIFSVEGKSCINRCFYVELIRGRKQETEVWWTSNSIVVFCGTSGTYGTGSWPDGADINLMPI

SEQ ID NO: 14514 - protein, 469 aa, synthetic construct
  REGION 1..469: note = neuraminidase__InfluenzaA__ABB77867
MNPNQKIITIGSVSLTIATICFLMQIAILVTTVTLHFKQYECNSPPNNQVMLCEPTIIERNITEIVYLTNTTIEKEICPKLAEYRNWSKPQCKITGFAPFSKDNSIRLSAGGDIWVTREPYVSCDPDKCYQFALGQGTTLNNGHSNDTVHDRTPYRTLLMNELGVPFHLGTKQVCIAWSSSSCHDGKAWLHVCVTGHDENATASFIYDGRLVDSIGSWSKKILRTQESECVCINGTCTVVMTDGSASGRADTKILFIEEGKIVHISQLSGSAQHVEECSCYPRYPGVRCVCRDNWKGSNRPIVDINVKDHSIVSSYVCSGLVGDTPRKNDSSSSSHCLNPNNEEGGHGVKGWAFDDGNDVWMGRTISEKLRSGYETFKVIEGWSKPNSKLQINRQVIVDRGNRSGYSGIFSVEGKSCINRCFYVELIRGRKQETEVWWTSNSIVVFCGTSGTYGTGSWPDGADINLMPI

SEQ ID NO: 14515 - protein, 469 aa, synthetic construct; identical to SEQ ID NO: 14514
  REGION 1..469: note = neuraminidase__InfluenzaA__ABB79719

SEQ ID NO: 14516 - protein, 469 aa, synthetic construct
  REGION 1..469: note = neuraminidase__InfluenzaA__ABB79734
MNPNQKIITIGSVSLTLSTICFFMQIAILITTVTLHFKQYEFNSPPNNQVMLCEPTIIERNITEIVYLTNTTIEKEICPKLAEYRNWSKPQCDITGFAPFSKDNSIRLSAGGDIWVTREPYVSCDPDKCYQFALGQGTTLNNVHSNDTVHDRTPYRTLLMNELGVPFHLGTKQVCIAWSSSSCHDGKAWLHVCVTGDDKNATASFIYNGRLVDSIVSWSKKILRTQESECVCINGTCTVVMTDGSASGKADTKILFIEEGKIVHTSTLSGSAQHVEECSCYPRYPGVRCVCRDNWKGSNRPIVDINIKDYSIVSSYVCSGLVGDTPRKNDSSSSSHCLDPNNEEGGHGVKGWAFDDGNDVWMGRTISEKLRSGYETFKVIEGWSNPNSKLQINRQVIVDRGNRSGYSGIFSVEGKSCINRCFYVELIRGRKEETEVLWTSNSIVVFCGTSGTYGTGSWPDGADINLMPI

SEQ ID NO: 14517 - protein, 469 aa, synthetic construct; identical to SEQ ID NO: 14487
  REGION 1..469: note = neuraminidase__InfluenzaA__ABB79791

SEQ ID NO: 14518 - protein, 469 aa, synthetic construct
  REGION 1..469: note = neuraminidase__InfluenzaA__ABB79802
MNPNQKIITIGSVSLTIATICFLMQIAILVTTVTLHFKQYECSSPPNNQVMPCEPIIIERNITEIVYLTNTTIEKEICPKLVEYRNWSKPQCKITGFAPFSKDNSIRLSAGGDIWVTREPYVSCDPGKCYQFALGQGTTLNNKHSNDTIHDRTPYRTLLMNELGVPFHLGTKQVCIAWSSSSCHDGKAWLHVCVTGHDENATASFIYDGRLVDSIGSWSKNILRTQESECVCINGTCTVVMTDGSASERADTKILFIEEGKIVHISPLSGSAQHVEECSCYPRYPGVRCVCRDNWKGSNRPIVDINVKDYSIVSSYVCSGLVGDTPRKNDRSSSSYCRNPNNEKGSHGVKGWAFDDGNDVWMGRTIGEELRSGYETFKVIGGWSTPNSKLQINRQVIVDSGNRSGYSGIFSVEGKSCINRCFYVELIRGREQETRVWWTSNSIVVFCGTSGTYGTGSWPDGADINLMPI

SEQ ID NO: 14519 - protein, 469 aa, synthetic construct
  REGION 1..469: note = neuraminidase__InfluenzaA__ABB79813
MNPNQKIITIGSVSLTIATICFLMQIAILVTTVTLHFKQYECNSPPNNQVMLCEPTIIERNITEIVYLTNTTIEKEVCPKLAEYRNWSKPQCKITGFAPFSKDNSIRLSAGGDIWVTREPYVSCDPGKCYQFALGQGTTLNNRHSNDTVHDRTPYRTLLMNELGVPFHLGTKQVCIAWSSSSCHDGKAWLHVCVTGHDENATASFIYDGRLVDSIGSWSKNILRTQESECVCINGTCTVVMTDGSASERADTKILFIEEGKIVHISPLSGSAQHVEECSCYPRYPGVRCVCRDNWKGSNRPIVDINVKDYSIVSSYVCSGLVGDTPRKNDSSSSSYCRNPNNEKGSHGVKGWAFDDGNDVWMGRTISEELRSGYETFKVIGGWSKPNSKLQINRQVIVDRGNRSGYSGIFSVEGKSCINRCFYVELIRGRKQETEVWWTSNSIVVFCGTSGTYGTGSWPDGADINLMPI

SEQ ID NO: 14520 - protein, 469 aa, synthetic construct; identical to SEQ ID NO: 14519
  REGION 1..469: note = neuraminidase__InfluenzaA__ABB79960

SEQ ID NO: 14521 - protein, 469 aa, synthetic construct; identical to SEQ ID NO: 14519
  REGION 1..469: note = neuraminidase__InfluenzaA__ABB79971

SEQ ID NO: 14522 - protein, 470 aa, synthetic construct
  REGION 1..470: note = neuraminidase__InfluenzaA__ABB79982
MNANQKIITIGSISIAIGIISLMLQIGNIISIWASHSIQTGSQNHTGVCNQRIITYENSTWVNHTYVNINNTNVIAGKDKTSVTLAGNSSLCSISGWAIYTKDNSIRIGSKGDVFVIREPFISCSHLECRTFFLTQGALLNDKHSNGTVKDRSPYRALMSCPLGEAPSPYNSKFESVAWSASACHDGMGWLTIGISGPDNGAVAVLKYNGIITETIKSWKKQILRTQESECVCVNGSCFTIMTDGPSNGAASYKIFKIEKGKVTKSIELNAPNFHYEECSCYPDTGTVMCVCRDNWHGSNRPWVSFNQNLDYQIGYICSGVFGDNPRPKDGEGSCNPVTVDGANGVKGFSYKYGNGVWIGRTKSNRLRKGFEMIWDPNGWTDTDSDFSVKQDVVAITDWSGYSGSFVQHPELTGLDCIRPCFWVELVRGLPKENTTIWTSGSSISFCGVNSDTANWSWPDGAELPFTIDK

SEQ ID NO: 14523 - protein, 470 aa, synthetic construct; identical to SEQ ID NO: 14451
  REGION 1..470: note = neuraminidase__InfluenzaA__ABB79993

SEQ ID NO: 14524 - protein, 469 aa, synthetic construct
  REGION 1..469: note = neuraminidase__InfluenzaA__ABB80004
MNPNQKIITIGSVSLTISTICFFMQIAILITTVTLHFKQYEFNSPPNNQVMLCEPTIIERNITEIVYLTNTTIEKEICPKLAEYRNWSKPQCDITGFAPFSKDNSIRLSAGGDIWVTREPYVSCDPDKCYQFALGQGTTLNNVHSNDTVHDRTPYRTLLMNELGVPFHLGTKQVCIAWSSSSCHDGKAWLHVCVTGDDKNATASFIYNGRLVDSIVSWSKEILRTQESECVCINGTCTVVMTDGSASGKADTKILFIEEGKIVHTSTLSGSAQHVEECSCYPRYPGVRCVCRDNWKGSNRPIVDINIKDYSTVSSYVCSGLVGDTPRKNDSSSSSHCLDPNNEEGGHGVKGWAFDDGNDVWMGRTISEKLRSGYETFKVIEGWSNPNSKLQINRQVIVDRGNRSGYSGIFSVEGKSCINRCFYVELIRGRKEETEVLWTSNSIVVFCGTSGTYGTGSWPDGADINLMPI

SEQ ID NO: 14525 - protein, 469 aa, synthetic construct; identical to SEQ ID NO: 14509
  REGION 1..469: note = neuraminidase__InfluenzaA__ABB80015

SEQ ID NO: 14526 - protein, 469 aa, synthetic construct
  REGION 1..469: note = neuraminidase__InfluenzaA__ABB80037
MNPNQKIITIGSVSLTIATVCFLMQIAILVTTVTLHFKQYECDSPANNQVMPCEPIIIERNITEIVYLNNTTIEKEICPKLVEYRNWSKPQCKITGFAPFSKDNSIRLSAGGDIWVTREPYVSCDPGKCYQFALGQGTTLDNKHSNDTIHDRIPHRTLLMNELGVPFHLGTRQVCIAWSSSSCHDGKAWLHVCVTGDDKNATASFIYDGRLVDSIGSWSQNILRTQESECVCINGTCTVVMTDGSASGRADTRILFIEEGKIVHISPLSGSAQHVEECSCYPRYPGVRCICRDNWKGSNRPVVDINVEDYSIDSSYVCSGLVGDTPRNNDRSSNSNCRNPNNERGNHGVKGWAFDDGNDVWMGRTISKDLRSGYETFKVIGGWSTPNSKSQINRQVIVDSDNRSGYSGIFSVEGKSCINRCFYVELIRGREQETRVWWTSNSIVVFCGTSGTYGTGSWPDGADINLMPI

SEQ ID NO: 14527 - protein, 470 aa, synthetic construct
  REGION 1..470: note = neuraminidase__InfluenzaA__ABB80048
MNPNQKIITIGSISIAIGIISLMLQIGNIISIWASHSIQTGSQNHTGVCNQRIITYENSTWVNHTYVNINNTNVIAGKDKTSVTLAGNSSLCSISGWAIYTKDNSIRIGSKGDVFVIREPFISCSHLECRTFFLTQGALLNDKHSNGTVKDRSPYRALMSCPLGEAPSPYNSKFESVAWSASACHDGMGWLTIGISGPDNGAVAVLKYNGIITETIKSWKKQILRTQESECVCVNGSCFTIMTDGPSNGAASYKIFKIEKGKVTKSVELNAPNFHYEECSCYPDTGTVMCVCRDNWHGSNRPWVSFNQNLDYQIGYICSGVFGDNPRPKDGEGSCNPVTVDGANGVKGFSYKYGNGVWIGRTKSNRLRKGFEMIWDPNGWTDTDSDFSVKQDVVAITDWSGYSGSFVQHPELTGLDCIRPCFWVELVRGLPKENTTIWTSGSSISFCGVNGDTANWSWPDGAELPFTIDK

SEQ ID NO: 14528 - protein, 469 aa, synthetic construct
  REGION 1..469: note = neuraminidase__InfluenzaA__ABB80084
MNPNQKIITIGSVSLTIATICFLMQIAILVTTVTLHFKQYECNSPSNNQVMLCEPTIIERNITEIVYLTNTTIEKEICPKLAEYRNWSKPQCKITGFAPFSKDNSIRLSAGGDIWVTREPYVSCDPDKCYQFALGQGTTLNNGHSNDTVHDRTPYRTLLMNELGVPFHLGTKQVCIAWSSSSCHDGKAWLHVCVTGHDENATASFIYDGRLVDSIGSWSKKILRTQESECVCINGTCTVVMTDGSASGRADTKILFIEEGKIVHISQLSGSAQHVEECSCYPRYPGVRCVCRDNWKGSNRPIVDINVKDHSIVSSYVCSGLVGDTPRKNDSSSSSHCLNPNNEEGGHGVKGWAFDDGNDVWMGRTISEKLRSGYETFKVIEGWSKPNSKLQINRQVIVDRGNRSGYSGIFSVEGKSCINRCFYVELIRGRKQETEVWWTSNSIVVFCGTSGTYGTGSWPDGADINLMPI

SEQ ID NO: 14529 - protein, 469 aa, synthetic construct; identical to SEQ ID NO: 14514
  REGION 1..469: note = neuraminidase__InfluenzaA__ABB80095

SEQ ID NO: 14530 - protein, 469 aa, synthetic construct; identical to SEQ ID NO: 14514
  REGION 1..469: note = neuraminidase__InfluenzaA__ABB80162

SEQ ID NO: 14531 - protein, 469 aa, synthetic construct; identical to SEQ ID NO: 14514
  REGION 1..469: note = neuraminidase__InfluenzaA__ABB80199

SEQ ID NO: 14532 - protein, 469 aa, synthetic construct
  REGION 1..469: note = neuraminidase__InfluenzaA__ABB80210
MNPNQKIITIGSVSLTIATICFLMQIAILVTTVTLHFKQYECSSPPNNQVMLCEPTIIERNITEIVYLTNTTIEKEICPKLAEYRNWSKPQCKITGFAPFSKDNSIRLSAGGDIWVTREPYVSCDPDKCYQFALGQGTTLNNRHSNDTVHDRTPYRTLLMNELGVPFHLGTKQVCIAWSSSSCHDGKAWLHVCVTGHDENATASFIYDGRLVDSIGSWSKKILRTQESECVCINGTCTVVMTDGSASGRADTKILFIEEGKIVHISPLSGSAQHVEECSCYPRYPGVRCVCRDNWKGSNRPIVDINVKDYSIVSSYVCSGLVGDTPRKNDSSSSSHCLNPNNEEGGHGVKGWAFDDGNDVWMGRTISEKFRSGYETFKVIEGWSKPNSKLQINRQVIVDRGNRSGYSGIFSVEGKSCINRCFYVELIRGRKQETEVWWTSNSIVVFCGTSGTYGTGSWPDGADIGLMPI

SEQ ID NO: 14533 - protein, 469 aa, synthetic construct
  REGION 1..469: note = neuraminidase__InfluenzaA__ABB80232
MNPNQKIITIGSVSLTIATICFLMQIAILVTTVTLHFKQYECNSPPNNQVMLCEPTIIERNITEIVYLTNTTIEKEICPKLAEYRNWSKPQCKITGFAPFSKDNSIRLAAGGDIWVTREPYVSCDPDKCYQFALGQGTTLNNRHSNDTVHDRTPYRTLLMNELGVPFHLGTKQVCIAWSSSSCHDGKAWLHVCVTGHDENATASFIYDGRLVDSIGSWSKKILRTQESECVCINGTCTVVMTDGSASGRADTKILFIEEGKIVHISQLSGSAQHVEECSCYPRYPGVRCVCRDNWKGSNRPIVDINVKDYSIVSSYVCSGLVGDTPRKNDSSSSSHCLNPNNEEGGHGVKGWAFDDGDDVWMGRTISEKLRSGYETFKVIEGWSKPNSKLQINRQVIVDRGNRSGYSGIFSVEGKSCINRCFYVELIRGRKQETEVWWTSNSIVVFCGTSGTYGTGSWPDGADINLMPI

SEQ ID NO: 14534 - protein, 469 aa, synthetic construct
  REGION 1..469: note = neuraminidase__InfluenzaA__ABB80243
MNPNQKIITIGSVSLTIATICFLMQIAILVTTVTLHFKQYECNSPPNNQVMLCEPTIIERNITEIVYLTNTTIEKEICPKLAEYRNWSKPQCKITGFAPFSKDNSIRLSAGGDIWVTREPYVSCDPDKCYQFALGQGTTLNNGHSNDTVHDRTPYRTLLMNELGVPFHLGTKQVCIAWSSSSCHDGKAWLHVCVTGHDENATASFIYDGRLVDSIGSWSKKILRTQESECVCINGTCTVVMTDGSASGRADTKILFIEEGKIVHISQLSGSAQHVEECSCYPRYPGVRCVCRDNWKGSNRPIVDINVKDHSIVSSYVCSGLVGDTPRKNDSSSSSHCLNPNNEEGGHGVKGWAFDDGNDVWMGRTISEKLRSGYETFKVIEGWSKPNSKLQINRQVIVDRGNRSGYSGIFSVEGKSCINRCFYVELIRGRKKENEVWWTSNSIVVFCGTSGTYGTGSWPDGADINLMPI

SEQ ID NO: 14535 - protein, 469 aa, synthetic construct
  REGION 1..469: note = neuraminidase__InfluenzaA__ABB80254
MNPNQKIITIGSVSLTIATICFLMQIAILVTTVTLHFKQYECSSPPNNQVMLCEPTIIERNITEIVYLTNTTIEKEICPKLAEYRNWSKPQCKITGFAPFSKDNSIRLSAGGDIWVTREPYVSCGPDKCYQFALGQGTTLNNRHSNDTVHDRTPYRTLLMNELGVPFHLGTKQVCIAWSSSSCHDGKAWLHVCVTGHDENATASFIYDGRLVDSIGSWSKKILRTQESECVCINGICTVVMTDGSASGRADTKILFIEEGKIVHISPLSGSAQHVEECSCYPRYPGVRCVCRDNWKGSNRPIVDINVKDYSIVSSYVCSGLVGDTPRKNDSSSSSHCLNPNNEEGGHGVKGWAFDDGNDVWMGRTISEKFRSGYETFKVIEGWSKPNSKLQINRQVIVDRGNRSGYSGIFSVEGKSCINRCFYVELIRGRKQETEVWWTSNSIVVFCGTSGTYGTGSWPDGADINLMPI

SEQ ID NO: 14536 - protein, 469 aa, synthetic construct; identical to SEQ ID NO: 14127
  REGION 1..469: note = neuraminidase__InfluenzaA__ABB80495

SEQ ID NO: 14537 - protein, 469 aa, synthetic construct; identical to SEQ ID NO: 14514
  REGION 1..469: note = neuraminidase__InfluenzaA__ABB80506

SEQ ID NO: 14538 - protein, 469 aa, synthetic construct; identical to SEQ ID NO: 14514
  REGION 1..469: note = neuraminidase__InfluenzaA__ABB80517

SEQ ID NO: 14539 - protein, 469 aa, synthetic construct; identical to SEQ ID NO: 14514
  REGION 1..469: note = neuraminidase__InfluenzaA__ABB80532

SEQ ID NO: 14540 - protein, 469 aa, synthetic construct
  REGION 1..469: note = neuraminidase__InfluenzaA__ABB80644
MNPNQKIITIGSVSLTIATICFLMQIAILVTTVTLHFKQYECSSPPNNQVMLCEPTIIERNITEIVYLTNTTIEKEICPKLAEYRNWSKPQCKITGFAPFSKDNSIRLSAGGDIWVTREPYVSCDPDKCYQFALGQGTTLNNRHSNDTVHDRTPYRTLLMNELGVPFHLGTKQVCIAWSSSSCHDGKAWLHVCVTGHDENATASFIYDGRLVDSIGSWSNKILRTQESECVCINGTCTVVMTDGSASGRADTKILFIEEGKIVHISPLSGSAQHVEECSCYPRYPGVRCVCRDNWKGSNRPIVDINVKDYSIVSSYVCSGLVGDTPRKNDSSSSSHCLNPNNEEGGHGVKGWAFDDGNDVWMGRTISEKFRSGYETFKVIEGWSKPNSKLQINRQVIVDRGNRSGYSGIFSVEGKSCINRCFYVELIRGRKQETEVWWTSNSIVVFCGTSGTYGTGSWPDGADINLMPI

SEQ ID NO: 14541 - protein, 469 aa, synthetic construct
  REGION 1..469: note = neuraminidase__InfluenzaA__ABB80664
MNPNQKIITIGSVSLTIATICFLMQIAILVTTVTLHFKQYECSSPPNNQVMLCEPTIIERNITEIVYLTNTTIEKEICPKLAEYRNWSKPQCKITGFAPFSKDNSIRLSAGGDIWVTREPYVSCDPDKCYQFALGQGTTLNNRHSNDTVHDRTPYRTLLMNELGVPFHLGTKQVCIAWSSSSCHDGKAWLHVCVTGHDENATASFIYDGRLVDSIGSWSKKILRTQESECVCINGTCTVVMTDGSASGRADTKVLFIEEGKIVHISPLSGSAQHVEECSCYPRYPGVRCVCRDNWKGSNRPIVDINVKDYSIVSSYVCSGLVGDTPRKNDSSSSSHCLNPNNEEGGHGVKGWAFDDGNDVWMGRTISEKFRSGYETFKVIEGWSKPNSKLQINRQVIVDRGNRSGYSGIFSVEGKSCINRCFYVELIRGRKQETEVWWTSNSIVVFCGTSGTYGTGSWPDGADINLMPI

SEQ ID NO: 14542 - protein, 469 aa, synthetic construct
  REGION 1..469: note = neuraminidase__InfluenzaA__ABB80675
MNPNQKIITIGSVSLTIATICFLMQIAILVTTVTLHFKQYECNSPPNNQVMLCEPTIIERNITEIVYLTNTTIEKEICPKLAEYRNWSKPQCKITGFAPFSKDNSIRLAAGGDIWVTREPYVSCDPDKCYQFALGQGTTLNNRHSNDTVHDRTPYRTLLMNELGVPFHLGTKQVCIAWSSSSCHDGKAWLHVCVTGHDENATASFIYDGRLVDSIGSWSKKILRTQESECVCINGTCTVVMTDGSASGRADTKILFIEEGKIVHISQLSGSAQHVEECSCYPRYPGVRCVCRDNWKGSNRPIVDINVKDYSIVSSYVCSGLVGDTPRKNDSSSSSYCLNPNNEEGGHGVKGWAFDDGDDVWMGRTISEKLRSGYETFKVIEGWSKPNSKLQINRQVIVDRGNRSGYSGIFSVEGKSCINRCFYVELIRGRKQETEVWWTSNSIVVFCGTSGTYGTGSWPDGADINLMPI

SEQ ID NO: 14543 - protein, 469 aa, synthetic construct
  REGION 1..469: note = neuraminidase__InfluenzaA__ABB80685
MNPNQKIITIGSVSLTIATICFLMQIAILVITVTLHFKQYECNSPPNNQVMLCEPTIIERNITEIVYLTNTTIEKEICPKLAEYRNWSKPQCKITGFAPFSKDNSIRLSAGGDIWVTREPYVSCDPDKCYQFALGQGTTLNNGHSNDTVHDRTPYRTLLMNELGVPFHLGTKQVCIAWSSSSCHDGKAWLHVCVTGHDENATASFIYDGRLVDSIGSWSKKILRTQESECVCINGTCTVVMTDGSASGRADTKILFIEEGKIVHISQLSGSAQHVEECSCYPRYPGVRCVCRDNWKGSNRPIVDINVKDHSIVSSYVCSGLVGDTPRKNDSSSSSHCLNPNNEEGGHGVKGWAFDDGNDVWMGRTISEKLRSGYETFKVIEGWSKPNSKLQINRQVIVDRGNRSGYSGIFSVEGKSCINRCFYVELIRGRKQETEVWWTSNSIVVFCGTSGTYGTGSWPDGADINLMPI

SEQ ID NO: 14544 - protein, 469 aa, synthetic construct; identical to SEQ ID NO: 14514
  REGION 1..469: note = neuraminidase__InfluenzaA__ABB80696

SEQ ID NO: 14545 - protein, 469 aa, synthetic construct
  REGION 1..469: note = neuraminidase__InfluenzaA__ABB80707
MNPNQKIITIGSVSLTIATICFLMQIAILVTTVTLHFKQYECSSPPNNQVMLCEPTIIERNITEIVYLTNTTIEKEICPKLAEYRNWSKPQCKITGFAPFSKDNSIRLSAGGDIWVTREPYVSCGPDKCYQFALGQGTTLNNRHSNDTVHDRTPYRTLLMNELGVPFHLGTKQVCIAWSSSSCHDGKAWLHVCVTGHDENATASFIYDGRLVDSIGSWSKKILRTQESECVCINGTCTVVMTDGSASGRADTKILFIEEGKIVHISPLSGSAQHVEECSCYPRYPGVRCVCRDNWKGSNRPIVDINVKDYSIVSSYVCSGLVGDTPRKNDSSSSSHCLNPNNEEGGHGVKGWAFDDGNDVWMGRTISEKFRSGYETFKVIEGWSKPNSKLQINRQVIVDRGNRSGYSGIFSVEGKSCINRCFYVELIRGRKQETEVWWTSNSIVVFCGTSGTYGTGSWPDGADINLMPI

SEQ ID NO: 14546 - protein, 469 aa, synthetic construct; identical to SEQ ID NO: 14514
  REGION 1..469: note = neuraminidase__InfluenzaA__ABB80716

SEQ ID NO: 14547 - protein, 469 aa, synthetic construct
  REGION 1..469: note = neuraminidase__InfluenzaA__ABB80725
MNPNQKIITIGSVSLTIATICFLMQIAILVTTVTLHFKQYECSSPPNNQVMLCEPTVIERNITEIVYLTNTTIEKEICPKLAEYRNWSKPQCKITGFAPFSKDNSIRLSAGGDIWVTREPYVSCDPDKCYQFALGQGTTLNNRHSNDTVHDRTPYRTLLMNELGVPFHLGTKQVCIAWSSSSCHDGKAWLHVCVTGHDENATASFIYDGRLVDSIGSWSKKILRTQESECVCINGTCTVVMTDGSASGRADTKILFIEEGKIVHISPLSGSAQHVEECSCYPRYPGVRCVCRDNWKGSNRPIVDINVKDYSIVSSYVCSGLVGDTPRKNDSSSSSHCLNPNNEEGGHGVKGWAFDDGNDVWMGRTISEKFRSGYETFKVIEGWSKPNSKLQINRQVIVDRGNRSGYSGIFSVEGKSCINRCFYVELIRGRKQETEVWWTSNSIVAFCGTSGTYGTGSWPDGADINLMPI

SEQ ID NO: 14548 - protein, 469 aa, synthetic construct
  REGION 1..469: note = neuraminidase__InfluenzaA__ABB80740
MNPNQKIITIGSVSLTIATICFLMQIAILVTTVTLHFKQYECCSPPNNQVMLCEPTIIERNITEIVYLTNTTIEKEICPKLAEYRNWSKPQCKITGFAPFSKDNSIRLSAGGDIWVTREPYVSCDPDKCYQFALGQGTTLNNRHSNDTVHDRTPYRTLLMNELGVPFHLGTKQVCIAWSSSSCHDGKAWLHVCVTGHDENATASFIYDGRLVDSIGSWSKKILRTQESECVCINGTCTVVMTDGSASGRADTKILFIEEGKIVHISPLSGSAQHVEECSCYPRYPGVRCVCRDNWKGSNRPIVDINVKDYSIVSSYVCSGLVGDTPRKNDSSSSSHCLNPNNEEGGHGVKGWAFDDGNDVWMGRTISEKFRSGYETFKVIEGWSKPNSKLQINRQVIVDRGNRSGYSGIFSVEGKSCINRCFYVELIRGRKQETEVWWTSNSIVAFCGTSGTYGTGSWPDGADINLMPI

SEQ ID NO: 14549 - protein, 469 aa, synthetic construct; identical to SEQ ID NO: 14514
  REGION 1..469: note = neuraminidase__InfluenzaA__ABB80751

SEQ ID NO: 14550 - protein, 469 aa, synthetic construct; identical to SEQ ID NO: 14233
  REGION 1..469: note = neuraminidase__InfluenzaA__ABB82186

SEQ ID NO: 14551 - protein, 470 aa, synthetic construct; identical to SEQ ID NO: 14396
  REGION 1..470: note = neuraminidase__InfluenzaA__ABB82197

SEQ ID NO: 14552 - protein, 470 aa, synthetic construct; identical to SEQ ID NO: 14386
  REGION 1..470: note = neuraminidase__InfluenzaA__ABB82208

SEQ ID NO: 14553 - protein, 470 aa, synthetic construct
  REGION 1..470: note = neuraminidase__InfluenzaA__ABB82219
MNPNQKIITIGSISIAIGIISLMLQIGNIISIWASHSIQTGSQNHTGICNQRIITYENSTWVNHTYVNINNTNVIAEKDKTSVTLAGNSSLCSISGWAIYTKDNSIRIGSKGDVFVIREPFISCSNLECRTFFLTQGALLNDKHSNGTVKDRSPYRALMSCPLGEAPSPYNSKFESVAWSASACHDGMGWLTIGISGPDNGAVAVLKYNGIITETIKSWKKRILRTQESECVCVNGSCFTIMTDGPSNGAASYKIFKIEKGKVTKSIELNAPNFHYEECSCYPDTGTVMCVCRDNWHGSNRPWVSFNQNLDYQIGYICSGVFGDNPRPKDGEGSCNPVTVDGADGVKGFSYKYGNGVWIGRTKSNRLRKGFEMIWDPNGWTDTDSDFSVKQDVVAITDWSGYSGSFVQHPELTGLDCIRPCFWVELVRGLPRENTTIWTSGSSISFCGVNSDAADWSWPDGAELPFTIDK

SEQ ID NO: 14554 - protein, 469 aa, synthetic construct
  REGION 1..469: note = neuraminidase__InfluenzaA__ABB82230
MNPNQKIITIGSVSLTIATVCFLMQIAILVTTVTLHFKQYECDSPANNQVMPCEPIIIERNITEIVYLTNTTIEKEICPKLVEYRNWSKPQCKITGFAPFSKDNSIRLSAGGDIWVTREPYVSCDPGKCYQFALGQGTTLDNKHSNDTIHDRIPHRTLLMNELGVPFHLGTRQVCIAWSSSSCHDGKAWLHVCVTGDDKNATASFIYDGRLVDSIGSWSQNILRTQESECVCINGTCTVVMTDGSASGRADTRILFIEEGKIVHISPLSGSAQHVEECSCYPRYPGVRCICRDNWKGSNRPIVDINVKDYSIDSRYVCSGLVGDTPRNNDRSSNSNCRNPNNDKGNHGVKGWAFDDGNDVWMGRTISKDSRSGYETFKVIGGWSTPNSKSQINRQVIVDSDNRSGYSGIFSVEGKSCINRCFYVELIRGREQETRVWWTSNSIVVFCGTSGTYGTGSWPDGADINLMPI

SEQ ID NO: 14555 - protein, 469 aa, synthetic construct
  REGION 1..469: note = neuraminidase__InfluenzaA__ABB83018
MNPNQKIITIGSVSLTIATICFLTQIAILVTTVTLHFKQYGCNSPPNNQVMLCEPTIIERNITEIVYLTNTTIEKEICPKLAEYRNWSKPQCNITGFAPFSKDNSIRLSAGGDIWVTREPYVSCDPDKCYQFALGQGTTLNNGHSNDTVHDRTPYRTLLMNELGVPFHLGTKQVCIAWSSSSCHDGKAWLHVCVTGDDKNATASFIYNGRLVDSIGSWSKKILRTQESECVCINGTCTVVMTDGSASGKADTKILFIEEGKIVHTSLLSGSAQHVEECSCYPRYPGVRCVCRDNWKGSNRPIVDINVKDYSIVSSYVCSGLVGDTPRKNDSSSSSHCLDPNNEEGGHGVKGWAFDDGNDVWMGRTISEKLRSGYETFKVIEGWSKPNSKLQINRQVIVDRGNRSGYSGIFSVEGKSCINRCFYVELIRGRNQETEVLWTSNSIVVFCGTSGTYGTGSWPDGADINLMPI

SEQ ID NO: 14556 - protein, 469 aa, synthetic construct; identical to SEQ ID NO: 14555
  REGION 1..469: note = neuraminidase__InfluenzaA__ABB83029

SEQ ID NO: 14557 - protein, 469 aa, synthetic construct; identical to SEQ ID NO: 14382
  REGION 1..469: note = neuraminidase__InfluenzaA__ABB83130

SEQ ID NO: 14558 - protein, 469 aa, synthetic construct
  REGION 1..469: note = neuraminidase__InfluenzaA__ABB83141
MNPNQKIITIGSVSLTIATICFLSQIAILVTTVTLHFKQYECNSPPNNQVMLCEPTIIERNITEIVYLTNTTIEKEICPKLAEYRNWSKPQCNITGFAPFSKDNSIRLSAGGDIWVTREPYVSCDPDKCYQFALGQGTTLNNGHSNDTVHDRTPYRTLLMNELGVPFHLGTKQVCIAWSSSSCHDGKAWLHVCVTGDDKNATASFIYNGRLVDSIGSWSKKILRTQESECVCINGTCTVVMTDGSASGKADTKILFIEEGKIVHTSLLSGSAQHVEECSCYPRYPGVRCVCRDNWKGSNRPIVDINVKDYSIVSSYVCSGLVGDTPRKNDSSSSSHCLDPNNEEGGHGVKGWAFDDGNDVWMGRTISEKLRSGYETFKVIEGWSKPNSKLQINRQVIVDRDNRSGYSGIFSVEGKSCINRCFYVELIRGRNQETEVLWTSNSIVVFCGTSGTYGTGSWPDGADINLMPI

SEQ ID NO: 14559 - protein, 469 aa, synthetic construct
  REGION 1..469: note = neuraminidase__InfluenzaA__ABB86876
MNTNQRIITIGTVCLIVGIISLLLQIGNIVSLWISHSIQTGGKNHSEMCNQNVITYVNNTWVNRTYVNISNTNIATVQDVTSVILAGNSSLCSVSGWAIYSKDNSIRIGSKGDIFVIREPFISCSHLECRTFFLTQGALLNDKHSNGTVKDRSPYRTLMSCPIGEAPSPYNSRFESVAWSASACHDGMGWLTIGISGPDNGAVAVLKYNGIITDTIKSWRNKILRTQESECVCMNGSCFTVLTDGPSNGQASYKIFKVEKGKIIKSIELDAPNYHYEECSCYPDTGKVMCVCRDNWHASNRPWVSFDQNLDYQIGYICSGVFGDNPRSNDGKGNCGPVLSNGANGVKGFSFRYGNGVWIGRTKSINSRSGFEMIWDPNGWTGTDSSFSMKQDIIALTDWSGYSGSFVQHPELTGMNCIRPCFWVELIRGQPKESTIWASGSSISFCGVDSETTSWSWPDGADLPFTIDK

SEQ ID NO: 14560 - protein, 469 aa, synthetic construct
  REGION 1..469: note = neuraminidase__InfluenzaA__ABB86886
MNTNQRIITIGTACLAIGIVSLLLQIGNIVSLWISHSIQTEEKNHSETCSQNFITHENNTWVNQTYINISNTNNVVGQGVTSIMLAGNSSLCPISGWAIYSKDNSIRIGSKGDIFVIREPFISCSHLECRTFFLTQGALLNDKHSNGTVKDRSPYRTLMSCPIGEAPSPYNSRFESVAWSASACHDGMGWLTIGISGPDNGAVAVFKYNGIITDTIKSWRNKILRTQESECVCINGSCFTIMTDGPSNGQASYKIFKMEKGKIIKSVELDAPNYHYEESSCYPDTGKVVCVCRDNWHASNRPWVSFDQNLDYQIGYICSGVFGDNPRSNDGKGNCGPVLSNGANGVKEVSFRYGNGVWIGRTKSISSRSGFEMIWDPNGWTETDSSFSIKQDIIALTDWSGYSGSFVQHPELTGMNCIKPCFWVELIRGQPKESTIWTSGSSISFCGVDSETASWSWPDGADLPFTIDK

SEQ ID NO: 14561 - protein, 469 aa, synthetic construct
  REGION 1..469: note = neuraminidase__InfluenzaA__ABB86898
MNPNQKIITIGSVSLTLATICFLMQIAILVTTVTLHFKQQECNSPPNNQVMLCEPTIIERNITEIVYLTNTTIEKEICPKLAEYRNWSKPQCNITGFAPFSKDNSIRLSAGGDIWVTREPYVSCDPDKCYQFALGQGTTLNNGHSNNTVHDRTPYRTLLMNELGVPFHLGTRQVCIAWSSSSCHDGKAWLHVCITGDDKNATASFIYNGRLVDSIGSWSKKILRTQESECVCINGTCTVVMTDGSASGKADTKILFIEEGKIVHISTLSGSAQHVEECSCYPRYPGVRCVCRDNWKGSNRPIVDINVKDYSIVSSYVCSGLVGDTPRKNDSFSSSHCLDPNNEEGGHGVKGWAFDDGNDVWMGRTISEKLRSGYETFKVIEGWSKPNSKLQINRQVIVERGSRSGYSGIFSVEGKSCINRCFYVELIRGRKEETKVWWTSNSIVVFCGTSGTYGTGSWPDGADINLMPI

SEQ ID NO: 14562 - protein, 469 aa, synthetic construct
  REGION 1..469: note = neuraminidase__InfluenzaA__ABB86906
MNTNQRIITIGTVCLIVGIISLLLQIGNIVSLWISHSIQTGGKNHSEMCNQNVITYVNNTWVNRTYVNISNTNIATVQDVTSVILAGNSSLCSVSGWAIYSKDNSIRIGSKGDIFVIREPFISCSHLECRTFFLTQGALLNDKHSNGTVKDRSPYRTLMSCPIGEAPSPYNSRFESVAWSASACHDGMGWLTIGISGPDNGAVAVLKYNGIITDTIKSWRNKILRTQESECVCMNGSCFTVLTDGPSNGQASYEIFKVEKGKIIKSIELDAPNYHYEECSCYPDTGKVMCVCRDNWHASNRPWVSFDQNLNYQIGYICSGVFGDNPRSNDGKGNCGPVLSNGANGVKGFSFRYGNGVWIGRTKSISSRSGFEMVWDPNGWTGTDSRFSMKQDIIALTDWSGYSGSFVQHPELTGMNCIRPCFWVELIRGQPKESTIWASGSSISFCGVNSETASWSWPDGADLPFTIDK

SEQ ID NO: 14563 - protein, 469 aa, synthetic construct
  REGION 1..469: note = neuraminidase__InfluenzaA__ABB86916
MNPNQKIITIGSVSLTIATICFLTQIAILVTTVTLHFKQYECNSPPNNQVMLCEPTIIERNITEIVYLTNTTIEKEICPKLAEYRNWSKPQCNITGFAPFSKDNSIRLSAGGDIWVTREPYVSCDPDKCYQFALGQGTTLNNGHSNDTVHDRTPYRTLLMNELGVPFHLGTKQVCIAWSSSSCHDGKAWLHVCITGDDKNATASFIYNGRLVDSISSWSKKILRTQESECVCINGTCTVVMTDGSASGKADTKILFIEEGKIVHTSLLSGSAQHVEECSCYPRYPGVRCVCRDNWKGSNRPIVDINVKDYSIVSSYVCSGLVGDTPRKNDSSSSSHCLDPNNEEGGHGVKGWAFDDGNDVWMGRTISEKLRSGYETFKVIEGWSKPNSKLQINRQVIVDRDNRSGYSGIFSVEGKSCINRCFYVELIRGRNQETEVLWTSNSIVVFCGTSGTYGTGSWPDGADINLMPI

SEQ ID NO: 14564 - protein, 469 aa, synthetic construct
  REGION 1..469: note = neuraminidase__InfluenzaA__ABB86928
MNPNQKIITIGSVSLTIATICFLMQIAILVTTVTLHFKQYECNSPPNNQVMLCEPTIIERNITEIVYLTNTTIEKEICPKLAEYRNWSKPQCNITGFAPFSKDNSIRLSAGGDIWVTREPYVSCDPDKCYQFALGQGTTLNNGHSNDTVHDRTPYRTLLMNELGVPFHLGTRQVCIAWSSSSCHDGKAWLHVCITGDDKNATASFIYNGRLVDSIGSWSKKILRTQESECVCINGTCTVVMTDGSASGKADTKILFIEEGKIVHISTLSGSAQHVEECSCYPRYPGVRCVCRDNWKGSNRPIVDINVKDYSIVSSYVCSGLVGDTPRKNDSFSSSHCLNPNNEEGGHGVKGWAFDDGNDVWMGRTISEKLRSGYETFKVIEGWSKPNSKLQINRQVIVERGNRSGYSGIFSIEGKSCINRCFYVELIRGRKEETKVWWTSNSIVVFCGTSGTYGTGSWPDGADINLMPI

SEQ ID NO: 14565 - protein, 469 aa, synthetic construct
  REGION 1..469: note = neuraminidase__InfluenzaA__ABB86936
MNTNQRIITIGTVCLIVGIISLLLQIGNIVSLWINHSIQTEGKNHSEMCNQNVITYVNNTWVNRTYVNISNTNIATVQDVTSVILAGNSSLCPVSGWAIYSKDNSIRIGSKGDIFVIREPFISCSHLECRTFFLTQGALLNDKHSNGTVRDRSPYRTLMSCPTGEAPSPYNSRFESVAWSASACHDGMGWLTIGISGPDNGAVAVLKYNGIITDTIKSWRNKILRTQESECVCMNGSCFTVLTDGPSNGQASYKIFKVEKGKIIKSIELDAPNYHYEECSCYPDTGKVMCVCRDNWHASNRPWIYFDQNLDYQIGYICSGVFGDNPRSNDGKGNCGPVLSNGANGVKGFSFRYGNGVWIGRTKSINSRSGFEMIWDPNGWTGTDSSFSMKQDILATTDWSGYSGSFVQHPELTGMNCIRPCFWVELIRGQPKESTIWASGSSISFCGVNSETANWSWPDGADLPFTIDK

SEQ ID NO: 14566 - protein, 469 aa, synthetic construct
  REGION 1..469: note = neuraminidase__InfluenzaA__ABB86947
MNTNQRIITIGTVCLIVGIISLLSQIGNIVSLWIIHSIQTGGKNHSEMCNQNVITYVNNTWVNRTYINISNTNIATVKDVTSVILAGNSSLCPVSGWAIYSKDNSIRIGSKGDIFVIREPFISCSHLECRTFFLTQGALLNDKHSNGTVKDRSPYRTLMSCPIGEAPSPYNSRFESVAWSASACHDGMGWLTIGISGPDNGAVAVLKYNGIITDTIKSWRNKILRTQESECVCMNGSCFTVLTDGPSNGQASYKIFKVEKGKIIKSIELDAPNYHYEECSCYPDAGKVMCVCRDNWHASNRPWVSFDQNLDYQMGYICSGVFGDNPRSNDGKGNCGPVLSNGANGVKGFSFRYGNGVWIGRTKSINSRSGFEMIWDPNGWTGTDSSFSMKQDIIALTDWSGYSGSFVQHPELTGMNCIRPCFWVELIRGQPKESTIWASGSSISFCGVNSETASWSWPDGADLPFTIDK

SEQ ID NO: 14567 - protein, 469 aa, synthetic construct
  REGION 1..469: note = neuraminidase__InfluenzaA__ABB86957
MNTNQRIITVGTVCLIVGIVSLLLQIGNIVSLWISHSIQTGEKNHSEVCNQNIITYENKTWVNQTYVNISNTNIAEGQGVTSIIMAGNSSLCPVSGWAIYSKDNSIRIGSKGDIFVIREPFISCSHLECRTFFLTQGALLNDRHSNGTVKDRSPYRTLMSCPIGEAPSPYNSRFESVAWSASACHDGMGWLTIGISGSDNEAVAVLKYNGIITDTIKSWRNKILRTQESECVCINGSCFTIMTDGPSNGQASYKIFKMEKGKIIKSVELEAPNYHYEECSCYPDTGKVVCVCRDNWHASNRPWVSFNQNLDYQIGYICSGVFGDNPRSNDGKGNCGPVPSNGANGVKGFSFRYGNGVWIGRTKSIFSRSGFEMIWDPNGWTETDSSFSIKQDIIALTDWSGYSGSFVQHPELTGMNCIRPCFWVELIRGQPKESTIWTSGSSISFCGVDSETASWSWPDGADLPFTIDK

SEQ ID NO: 14568 - protein, 469 aa, synthetic construct
  REGION 1..469: note = neuraminidase__InfluenzaA__ABB96333
MNPNQKIITIGSVSLTIATICFLMQIAILVTTVTLHFKQYDCDSPANNQVMPCEPIIIERNITEIVYLTNTTIEKEICPKLVEYRNWSKPQCKITGFAPFSKDNSIRLSAGGDIWVTREPYVSCDPGKCYQFALGQGTTLDNKHSNDTIHDRTPHRTLLMNELGVPFHLGTRQVCIAWSSSSCHDGKAWLHVCVTGYDKNATASFIYDGRLVDSIGSWSKNILRTQESECVCINGTCTVVMTDGSASERADTKILFIEEGKIVHISPLSGSAQHVEECSCYPRYPGVRCVCRDNWKGSNRPVVDINVKDYSIASSYVCSGLVGDTPRKNDRYSSSYCRNPNNEKGNHGVKGWAFDDGNDVWMGRTISDESRSGYETFKVIGGWSTPNSKLQINRQVIVDSDNRSGYSGIFSVEGKSCINRCFYVELIRGREQETRVWWTSNSIVVFCGTSGTYGTGSWPDGADINLMPI

SEQ ID NO: 14569 - protein, 469 aa, synthetic construct
  REGION 1..469: note = neuraminidase__InfluenzaA__ABB96344
MNPNQKIITIGSVSLTIATICFLMQIAILVTTVTLHFKQYECDSPANNQVMPCEPIIIERNITEIVYLTNTTIEKEICPKLVEYRNWSKPQCKITGFAPFSKDNSIRLSAGGDIWVTREPYVSCDPGRCYQFALGQGTTLDNKHSNDTIHDRTPHRTLLMNELGVPFHLGTRQVCIAWSSSSCHDGKAWLHVCVTGYDKNATASFIYDGRLVDSIGSWSKNILRTQESECVCINGTCTVVMTDGSASERADTKVLFIEEGKIVHISPLSGSAQHVEECSCYPRYPGVRCVCRDNWKGSNRPVVDINVKDYSIASSYVCSGLVGDTPRKNDRYSSSYCRNPNNEKGNHGVKGWAFDDGNDVWMGRTISDESRSGYETFKVIGGWSTPNSKLQINRQVIVDSDNRSGYSGIFSVEGKSCINRCFYVELIRGREQETRVWWTSNSIVVFCGTSGTYGTGSWPDGADINLMPI

SEQ ID NO: 14570 - protein, 469 aa, synthetic construct
  REGION 1..469: note = neuraminidase__InfluenzaA__ABB96398
MNPNQKIITIGSVSLTIATICFLMQIAILVTTVTLHFKQYECDSPANNQVMPCEPIIIERNITEIVYLTNTTIEKETCPKLVEYRNWSKPQCKITGFAPFSKDNSIRLSAGGDIWVTREPYVSCDPGKCYQFALGQGTTLDNKHSNDTIHDRTPYRTLLMNELGVPFHLGTRQVCIAWSSSSCHDGKAWLHVCVTGYDKNATASFIYDGRLVDSIGSWSKNILRTQESECVCINGTCTVVMTDGSASERADTKILFIEEGKIVHISPLSGSAQHVEECSCYPRYPGVRCVCRDNWKGSNRPVVDINVKDYSIASSYVCSGLVGDTPRKNDRSSSSYCRNPNNEKGNHGVKGWAFDDGNDVWMGRTISEESRSGYETFKVIGGWSTPNSKLQINRQVIVDSDNRSGYSGIFSVEGKSCINRCFYVELIRGREQETRVWWTSNSIVVFCGTSGTYGTGSWPDGADINLMPI

SEQ ID NO: 14571 - protein, 469 aa, synthetic construct; identical to SEQ ID NO: 14382
  REGION 1..469: note = neuraminidase__InfluenzaA__ABB96490

SEQ ID NO: 14572 - protein, 469 aa, synthetic construct
  REGION 1..469: note = neuraminidase__InfluenzaA__ABB96501
MNPNQKIITIGSVSLTIATICFLMQIAILVTTVTLHFKQYECSSPPNNQVMPCEPIIIERNITEIVYLTNTTIEKEICPKLVEYRNWSKPQCKITGFAPFSKDNSIRLSAGGDIWVTREPYVSCDPSKCYQFALGQGTTLDNKHSNDTIHDRTPHRTLLMNELGVPFHLGTRQVCIAWSSSSCHDGKAWLHVCVTGYDKNATASFIYDGRLVDSIGSWSKNILRTQESECVCINGTCTVVMTDGSASERADTKILFIEEGKIVHISPLSGSAQHVEECSCYPRYPGVRCVCRDNWKGSNRPVVDINVKDYSIVSSYVCSGLVGDTPRKNDRSSSSYCRNPNNEKGNHGVKGWAFDDGNDVWMGRTISEESRSGYETFKVIGGWSTPNSKSQINRQVIVDSGNRSGYSGIFSVEGKSCINRCFYVELIRGREQETRVWWTSNSIVVFCGTSGTYGTGSWPDGADINLMPI

SEQ ID NO: 14573 - protein, 469 aa, synthetic construct
  REGION 1..469: note = neuraminidase__InfluenzaA__ABB96534
MNPNQKIITIGSVSLTIATICFLMQIAILVTTVTLHFKQYECSSPPNNQVMLCEPTIIERNITEIVYLTNTTIEKEICPKLAEYRNWSKPQCKITGFAPFSKDNSIRLSAGGDIWVTREPYVSCDPDKCYQFALGQGTTLNNRHSNDTVHDRTPYRTLLMNELGVPFHLGTKQVCIAWSSSSCHDGKAWLHVCVTGHDENATASFIYDGRLVDSIGSWSKKILRTQESECVCINGTCTVVMTDGSASGRADTKILFIEEGKIVHISPLSGSAQHVEECSCYPRYPGVRCVCRDNWKGSNRPIVDINVKDYSIVSSYVCSGLVGDTPRKNDSSSSSHCLNPNNEEGGHGVKGWAFDDGNDVWMGRTISEKFRSGYETFKVIEGWSKPNSKLQINRQVIVDRGNRSGYSGIFSVEGKSCINRCFYVELIRGRKQETEVWWTSNSIVVFCGTSGTYGTGSWPDGADINLMPI

SEQ ID NO: 14574 - protein, 469 aa, synthetic construct
  REGION 1..469: note = neuraminidase__InfluenzaA__ABC02237
MNPNQKIITIGSVSLTIATICFLMQIAILVTTVTLHFKQYECSSPPNNQVMLCEPTIIERNITEIVYLTNTTIEKEICPKLAEYRNWSKPQCKITGFAPFSKDNSIRLSAGGDIWVTREPYVSCDPDKCYQFALGQGTTLNNRHSNDTVHDRTPYRTLLMNELGVPFHLGTKQVCIAWSSSSCHDGKAWLHVCVTGHDENATASFIYDGRLVDSIGSWSKKILRTQESECVCINGTCTVVMTDGSASGRADTKILFIEEGKIVHISQLSGSAQHVEECSCYPRYPGVRCVCRDNWKGSNRPIVDINIKDYSIVSSYVCSGLVGDTPRKNDSSSSSHCLNPNNEEGGHGVKGWAFDDGNDVWMGRTISEKFRSGYETFKVIEGWSKPNSKLQINRQVIVDRGNRSGYSGIFSVEGKSCINRCFYVELIRGRKQETEVWWTSNSIVAFCGTSGTYGTGSWPDGADINLMPI

SEQ ID NO: 14575 - protein, 469 aa, synthetic construct
  REGION 1..469: note = neuraminidase__InfluenzaA__ABC02258
MNPNQKIITIGSVSLTIATICFLMQIAILVTTVTLHFKQYECDSPANNQIMPCEPTIIERNITEIVYLTNITIEKEICPKLVEYRNWSKPQCKITGFAPFSKDNSIRLSAGGDIWVTREPYVSCDPSKCYQFALGQGTTLDNKHSNDTIHDRTPHRTLLMNELGVPFHLGTRQVCIAWSSSSCHDGKAWLHVCVTGYDKNATASFIYDGRLVDSIGSWSQNILRTQESECVCINGTCTVVMTDGSASGRADTKILFIEEGKIVHISPLSGSAQHVEECSCYPRYPGVRCICRDNWKGSNRPVVDINVKDYSIDSSYVCSGLVGDTPRKNDRSSNSYCRNPNNEKGNHGVKGWAFDDGNDVWMGRTISEDSRSGYETFKVIGGWSTPNSKLQINRQVIVDSDNRSGYSGIFSVEGKSCINRCFYVELIRGREQETRVWWTSNSIVVFCGTSGTYGAGSWPDGADINLMPI

SEQ ID NO: 14576 - protein, 469 aa, synthetic construct
  REGION 1..469: note = neuraminidase__InfluenzaA__ABC02269
MNPNQKIITIGSVSLTIATICFLMQIAILVTTVTLHFKQYECDSPANNQVMPCEPIIIERNITEIVYLTNTTIEKEICPKLVEYRNWSKPQCKITGFAPFSKDNSIRLSAGGDIWVTREPYVSCDPGKCYQFALGQGTTLDNKHSNDTIHDRTPHRTLLMNELGVPFHLGTRQVCIAWSSSSCHDGKAWLHVCVTGYDKNATASFIYDGRLVDSIGSWSQNILRTQESECVCINGTCTVVMTDGSASGRADTKILFIEEGKIVHTSPLSGSAQHVEECSCYPRYPGVRCICRDNWKGSNRPVVDINVKDYSIDSSYVCSGLVGDTPRNNDRSSSSYCRNPNNEKGTHGVKGWAFDDGNDVWMGRTISEDSRSGYETFKVIGGWSTPNSKLQINRQVIVDSDNRSGYSGIFSVEGKSCINRCFYVELIRGREQETRVWWTSNSIVVFCGTSGTYGTGSWPDGADINLMPI

SEQ ID NO: 14577 - protein, 470 aa, synthetic construct
  REGION 1..470: note = neuraminidase__InfluenzaA__ABC02280
MNPNQKIITIGSISIAIGIISLMLQIGNIISIWASHSIQTGSQNHTGVCNQRIITYENSTWVNHTYVNINNTNVIAGKDKTSVTLAGNSSLCSISGWAIYTKDNSIRIGSKGDVFVIREPFISCSHLECRTFFLTQGSLLNDKHSNGTVKDRSPYRALMSCPLGEAPSPYNSKFESVAWSASACHDGMGWLTIGISGPDNGAVAVLKYNGIITETIKSWKKQILRTQESECVCVNGSCFTIMTDGPSNGAASYKIFKIEKGKVTKSIELNAPNFHYEECSCYPDTGTVMCVCRDNWHGSNRPWVSFNQNLDYQIGYICSGVFGDNPRPKDGEGSCNPVTVDGANGVKGFSYKYGNGVWIGRTKSNRLRKGFEMIWDPNGWTDTDSDFSVKQDVVAITDWSGYSGSFVQHPELTGLDCIRPCFWVELVRGLPKENTTIWTSGSSISFCGVNSDTANWSWPDGAELPFTIDK

SEQ ID NO: 14578 - protein, 469 aa, synthetic construct; identical to SEQ ID NO: 14573
  REGION 1..469: note = neuraminidase__InfluenzaA__ABC02302

SEQ ID NO: 14579 - protein, 469 aa, synthetic construct; identical to SEQ ID NO: 14570
  REGION 1..469: note = neuraminidase__InfluenzaA__ABC02313

SEQ ID NO: 14580 - protein, 469 aa, synthetic construct; identical to SEQ ID NO: 14575
  REGION 1..469: note = neuraminidase__InfluenzaA__ABC02324

SEQ ID NO: 14581 - protein, 469 aa, synthetic construct
  REGION 1..469: note = neuraminidase__InfluenzaA__ABC02335
MNPNQKIITIGSVSLTIATICFLMQIAILVTTVTLHFKQYECDSPANNQVMPCEPIIIERNITEIVYLTNTTIEKEICPKLVEYRNWSKPQCKITGFAPFSKDNSIRLSAGGDIWVTREPYVSCDPGKCYQFALGQGTTLDNKHSNDTIHDRTPHRTLLMNELGVPFHLGTRQVCIAWSSSSCHDGKAWLHVCVTGYDKNATASFIYDGRLVDSIGSWSQNILRTQESECVCINGTCTVVMTDGSASGRADTKILFIKEGKIVHISPLSGSAQHVEECSCYPRYPGVRCICRDNWKGSNRPVVDINVKDYSIDSSYVCSGLVGDTPRNNDRSSNSYCRNPNNEKGNHGVKGWAFDDGNDVWMGRTISEDSRSGYETFKVIGGWSTPNSKLQINRQVIVDSDNRSGYSGIFSVEGKSCINRCFYVELIRGREQETRVWWTSNSIVVFCGTSGTYGTGSWPDGADINLMPI

SEQ ID NO: 14582 - protein, 469 aa, synthetic construct
  REGION 1..469: note = neuraminidase__InfluenzaA__ABC39808
MNPNQKIITIGSVSLTIATICFLMQIAILVTTVTLHFKQYECSSPPNNQVMPCEPIIIERNITEIVYLTNTTIEKEICPKLVEYRNWSKPQCKITGFAPFSKDNSIRLSAGGDIWVTREPYVSCDPSKCYQFALGQGTTLDNKHSNDTIHDRTPHRTLLMNELGVPFHLGTRQVCIAWSSSSCHDGKAWLHVCVTGYDKNATASFIYDGRLVDSIGSWSKNILRTQESECVCINGTCTVVMTDGSASERADTKILFIEEGKIVHISPLSGSAQHVEECSCYPRYPGVRCVCRDNWKGSNRPVVDINVKDYSIVSSYVCSGLVGDTPRKNDRSSSSYCRNPNNEKGDHGVKGWAFDDGNDVWMGRTISEESRSGYETFKVIGGWSTPNSKSQINRQVIVDSGNRSGYSGIFSVEGKSCINRCFYVELIRGRKQETRVWWTSNSIVVFCGTSGTYGTGSWPDGADINLMPI

SEQ ID NO: 14583 - protein, 469 aa, synthetic construct; identical to SEQ ID NO: 14382
  REGION 1..469: note = neuraminidase__InfluenzaA__ABC40525

SEQ ID NO: 14584 - protein, 470 aa, synthetic construct
  REGION 1..470: note = neuraminidase__InfluenzaA__ABC40536
MNPNQKIITIGSISIAIGIISLMLQIGNIISIWASHSIQTGSQNHTGVCNQRIITYENSTWVNHTYVNINNTNVIAGKDKTSVTLAGNSSLCSISGWAIYTKDNSIRIGSKGDVFVIREPFISCSHLECRTFFLTQGALLNDKHSNGTVKDRSPYRALMSCPLGEAPSPYNSKFESVAWSASACHDGMGWLTIGISGPDNGAVAVLKYNGIITETIKSWKKQILRTQESECVCVNGSCFTIMTDGPSNGAASYKIFKIEKGKVIKSIELNAPNFHYEECSCYPDTGTVMCVCRDNWHGSNRPWVSFNQNLDYQIGYICSGVFGDNPRPKDGEGSCNPVTVDGANGVKGFSYKYGNGVWIGRTKSNRLRKGFEMIWDPNGWTDTDSDFSVKQDVVAITDWSGYSGSFVQHPELTGLDCIRPCFWVELVRGLPKENTTIWTSGSSISFCGVNSDTANWSWPDGAELPFTIDK

SEQ ID NO: 14585 - protein, 469 aa, synthetic construct; identical to SEQ ID NO: 14576
  REGION 1..469: note = neuraminidase__InfluenzaA__ABC40547

SEQ ID NO: 14586 - protein, 469 aa, synthetic construct
  REGION 1..469: note = neuraminidase__InfluenzaA__ABC40558
MNPNQKIITIGSVSLTIATICFLMQIAILVTTVTLHFKQYECSSPPNNQVMPCEPIIIERNITEIVYLTNTTIEKEICPKLVEYRNWSKPQCKITGFAPFSKDNSIRLSAGGDIWVTREPYVSCDPGKCYQFALGQGTTLDNKHSNDTIHDRTPYRTLLMNELGVPFHLGTRQVCIAWSSSSCHDGKAWLHVCVTGHDKNATASFIYDGRLVDSIGSWSKSILRTQESECVCINGTCTVVMTDGSASERADTKILFIEEGKIVHISPLSGSAQHVEECSCYPRYPGVRCVCRDNWKGSNRPVVDINVKDYSIVSSYVCSGLVGDTPRKNDRSSSSYCQNPNNEKGNHGVKGWAFDDGNDVWMGRTISEESRSGYETFKVIGGWSTPNSKLQINRQVIVDIDNRSGYSGIFSVEGKSCINRCFYVELIRGREQETRVWWTSNSIVVFCGTSGTYGTGSWPDGADINLMPI

SEQ ID NO: 14587 - protein, 469 aa, synthetic construct
  REGION 1..469: note = neuraminidase__InfluenzaA__ABC40611
MNPNQKIITIGSISLTIATICFLMQIAILVTTVTLHFKQYECNSLPNNQVMLCEPTIIERNITEIVYLTNTTIEKEICPKLAEYRNWSKPQCKITGFAPFSKDNSIRLSAGGDIWVTREPYVSCDPDKCYQFALGQGTTLNNRHSNDTVHDRTPYRTLLMNELGVPFHLGTKQVCIAWSSSSCHDGKAWLHVCVTGHDENATASFIYDGRLVDSIGSWSKKILRTQESECVCINGTCTVVMTDGSASGRADTKILFIEEGKIIHISQLSGSAQHVEECSCYPRYPGVRCVCRDNWKGSNRPIVDINVKDYSIVSSYVCSGLVGDTPRKNDSSSSSHCLNPNNEEGGHGVKGWAFDDGNDVWMGRTISEKFRSGYETFKVIEGWSKPNSKLQINRQVIVDRDNRSGYSGIFSVEGKSCINRCFYVELIRGRKQETEVWWTSNSIVVFCGTSGTYGTGSWPDGADINLMPI

SEQ ID NO: 14588 - protein, 469 aa, synthetic construct
  REGION 1..469: note = neuraminidase__InfluenzaA__ABC40622
MNPNQKIITIGSVSLTIATICFLMQIAILVTTVTLHFKQYECDSPANNQVMPCEPIIIERNITEIVYLTNTTIEKEICPKLVEYRNWSKPQCKITGFAPFSKDNSIRLSAGGDIWVTREPYVSCDPGKCYQFALGQGTTLDNKHSNDTIHDRTPHRTLLMNELGVPFHLGTRQVCIAWSSSSCHDGKAWLHVCVTGYDKNATASFIYDGRLVDSIGSWSQNILRTQESECVCINGTCTVVMTDGNASGRADTKILFIEEGKIVHISPLSGSAQHVEECSCYPRYPGVRCICRDNWKGSNRPVVDINVKDYSIDSSYVCSGLVGDTPRNNDRSSNSYCRNPNNEKGNHGVKGWAFDDGNDVWMGRTISEDSRSGYETFKVIGGWSTPNSKLQINRQVIVDSDNRSGYSGIFSVEGKSCINRCFYVELIRGREQETRVWWTSNSIVVFCGTSGTYGTGSWPDGADINLMPI

SEQ ID NO: 14589 - protein, 469 aa, synthetic construct
  REGION 1..469: note = neuraminidase__InfluenzaA__ABC40634
MNPNQKIITIGSVSLTIATICFLTQIAILVTTVTLHFKQYECNSPPNNQVMLCEPTIIERNITEIVYLTNTTIEKEICPKLAEYRNWSKPQCNITGFAPFSKDNSIRLSAGGDIWVTREPYVSCDPDKCYQFALGQGTTLNNGHSNDTVHDRTPYRTLLMNELGVPFHLGTKQVCIAWSSSSCHDGKAWLHVCVTGDDKNATASFIYNGRLVDSIGSWSKKILRTQESECVCIDGTCTVVMTDGSASGKADTKILFIEEGKIVHTSLLSGSAQHVEECSCYPRYPGVRCVCRDNWKGSNRPIVDINVKDYSIVSSYVCSGLVGDTPRKNDSSSSSHCLDPNNEEGGHGVKGWAFDDGNDVWMGRTISEKLRSGYETFKVIEGWSKPNSKLQINRQVIVDRGNRSGYSGIFSVEGKSCINRCFYVELIRGRNQETEVLWTSNSIVVFCGTSGTYGTGSWPDGADINLMPI

SEQ ID NO: 14590 - protein, 469 aa, synthetic construct
  REGION 1..469: note = neuraminidase__InfluenzaA__ABC40645
MNPNQKIITIGSVSLTISTICFFMQIAILITTVTLHFKQYEFNSPPNNQVMLCEPTIIERNITEIVYLTNTTIEKEICPKLAEYRNWSKPQCNITGFAPFSKDNSIRLSAGGDIWVTREPYVSCDPDKCYQFALGQGTTLNNVHSNDTVHDRTPYRTLLMNELGVPFHLGTKQVCIAWSSSSCHDGKAWLHVCVTGDDENATASFIYNGRLVDSVVSWSKKILRTQESECVCINGTCTVVMTDGSASGKADTKILFIEEGKIVHTSTLSGSAQHVEECSCYPRYPGVRCVCRDNWKGSNRPIVDINIKDYSIVSSYVCSGLVGDTPRKNDSSSSSHCLDPNNEEGGHGVKGWAFDDGNDVWMGRTISEKLRSGYETFKVIEGWSNPNSKLQINRQVIVDRGNRSGYSGIFSVEGKSCINRCFYVELIRGRKQETEVLWTSNSIVVFCGTSGTYGTGSWPDGADINLMPI

SEQ ID NO: 14591 - protein, 469 aa, synthetic construct
  REGION 1..469: note = neuraminidase__InfluenzaA__ABC41706
MNPNQKIITIGSVSLTIATICFLMQIAILVTTVTLHFKQHECNSPPNNQVMLCEPTIIERNITEIVYLTNTTIEKEICPKLVEYRNWSKPQCNITGFAPFSKDNSIRLSAGGDIWVTREPYVSCDPDKCYQFALGQGTTLNNGHSNDTVHDRTPYRTLLMNELGVPFHLGTRQVCIAWSSSSCHDGKAWLHVCVTGDDKNATASFIYNGRLVDSIGSWSKKILRTQESECVCINGTCTVVMTDGSASGKADTKILFIEEGKIVHISTLSGSAQHVEECSCYPRYPGVRCVCRDNWKGSNRPIVDINVKDYSIVSSYVCSGLVGDTPRKNDSFSSSHCLDPNNEEGGHGVKGWAFDDGNDVWMGRTISEKLRSGYETFKVIEGWSKPNSKLQINRQVIVERGNRSGYSGIFSVEGKSCINRCFYVELIRGRKEETEVWWTSNSIVVFCGTSGTYGTGSWPDGADINLMPI

SEQ ID NO: 14592 - protein, 470 aa, synthetic construct
  REGION 1..470: note = neuraminidase__InfluenzaA__ABC41717
MNPNQKIITIGSISIAIGIISLMLQIGNIISIWASHSIQTGSQNHTGICNQRIITYENSTWVNHTYVNINNTNVVAGKDKTSVTLAGNSSLCSISGWAIYTKDNSIRIGSKGDVFVIREPFISCSHLECRTFFLTQGALLNDKHSNGTVKDRSPYRALMSCPLGEAPSPYNSKFESVAWSASACHDGMGWLTIGISGPDNGAVAVLKYNGIITETIKSWKKRILRTQESECVCVNGSCFTIMTDGPSNGAASYKIFKIEKGKVTKSIELNAPNFHYEECSCYPDTGTVMCVCRDNWHGSNRPWVSFNQNLDYQIGYICSGVFGDNPRPKDGKGSCNPVTVDGADGVKGFSYKYGNGVWIGRTKSNRLRKGFEMIWDPNGWTDTDSDFSVKQDVVAVTDWSGYSGSFVQHPELTGLDCIRPCFWVELVRGLPRENTTIWTSGSSISFCGVDSDTANWSWPDGAELPFTIDK

SEQ ID NO: 14593 - protein, 469 aa, synthetic construct
  REGION 1..469: note = neuraminidase__InfluenzaA__ABC41728
MNPNQKIITIGSVSLTIATICFLMQIAILVTTVTLHFKQHECNSPPNNQVMLCEPTIIERNITEIVYLTNTTIEKEICPKLVEYRNWSKPQCNITGFAPFSKDNSIRLSAGGDIWVTREPYVSCDPDKCYQFALGQGTTLNNGHSNDTVHDRTPYRTLLMNELGVPFHLGTRQVCIAWSSSSCHDGKAWLHVCVTGDDKNATASFIYNGRLVDSIGSWSKNILRTQESECVCINGTCTVVMTDGSASGKADTKILFIEEGKIVHISTLSGSAQHVEECSCYPRYPGVRCVCRDNWKGSNRPIVDINVKDYSIVSSYVCSGLVGDTPRKNDSFSSSHCLDPNNEEGGHGVKGWAFDDGNDVWMGRTISEKLRSGYETFKVIEGWSKPNSKLQINRQVIVERGNRSGYSGIFSVEGKSCINRCFYVELIRGRKEETEVWWTSNSIVVFCGTSGTYGTGSWPDGADINLMPI

SEQ ID NO: 14594 - protein, 469 aa, synthetic construct; identical to SEQ ID NO: 14591
  REGION 1..469: note = neuraminidase__InfluenzaA__ABC41742

SEQ ID NO: 14595 - protein, 469 aa, synthetic construct; identical to SEQ ID NO: 14591
  REGION 1..469: note = neuraminidase__InfluenzaA__ABC41956

SEQ ID NO: 14596 - protein, 469 aa, synthetic construct; identical to SEQ ID NO: 14591
  REGION 1..469: note = neuraminidase__InfluenzaA__ABC41967

SEQ ID NO: 14597 - protein, 469 aa, synthetic construct; identical to SEQ ID NO: 14591
  REGION 1..469: note = neuraminidase__InfluenzaA__ABC42017

SEQ ID NO: 14598 - protein, 469 aa, synthetic construct; identical to SEQ ID NO: 14591
  REGION 1..469: note = neuraminidase__InfluenzaA__ABC42117

SEQ ID NO: 14599 - protein, 469 aa, synthetic construct; identical to SEQ ID NO: 14591
  REGION 1..469: note = neuraminidase__InfluenzaA__ABC42128

SEQ ID NO: 14600 - protein, 469 aa, synthetic construct; identical to SEQ ID NO: 14591
  REGION 1..469: note = neuraminidase__InfluenzaA__ABC42139

SEQ ID NO: 14601 - protein, 469 aa, synthetic construct
  REGION 1..469: note = neuraminidase__InfluenzaA__ABC42150
MNPNQKIITIGSVSLTIATICFLMQIAILATTVTLHFKQHECNSPPNNQVMLCEPTIIERNITEIVYLTNTTIEKEICPKLVEYRNWSKPQCNITGFAPFSKDNSIRLSAGGDIWVTREPYVSCDPDKCYQFALGQGTTLNNGHSNDTVHDRTPYRTLLMNELGVPFHLGTRQVCIAWSSSSCHDGKAWLHVCVTGDDKNATASFIYNGRLVDSIGSWSKKILRTQESECVCINGTCTVVMTDGSASGKADTKILFIEEGKIVHISTLSGSAQHVEECSCYPRYPGVRCVCRDNWKGSNRPIVDINVKDYSIVSSYVCSGLVGDTPRKNDSFSSSHCLDPNNEEGGHGVKGWAFDDGNDVWMGRTISGKLRSGYETFKVIEGWSKPNSKLQINRQVIVERGNRSGYSGIFSVEGKSCINRCFYVELIRGRKEETEVWWTSNSIVVFCGTSGTYGTGSWPDGADINLMPI

SEQ ID NO: 14602 - protein, 469 aa, synthetic construct; identical to SEQ ID NO: 14591
  REGION 1..469: note = neuraminidase__InfluenzaA__ABC42161

SEQ ID NO: 14603 - protein, 469 aa, synthetic construct
  REGION 1..469: note = neuraminidase__InfluenzaA__ABC42172
MNPNQKIITIGSVSLTIATICSLMQIAILVTTVTLHFKQHECNSPPNNQVMLCEPTIIERNITEIVYLTNTTIEKEICPKLVEYRNWSKPQCNITGFAPFSKDNSIRLSAGGDIWVTREPYVSCDPDKCYQFALGQGTTLNNGHSNDTVHDRTPYRTLLMNELGVPFHLGTRQVCIAWSSSSCHDGKAWLHVCVTGDDKNATASFIYNGRLVDSIGSWSKKILRTQESECVCINGTCTVVMTDGSASGKADTKILFIEEGKIVHISTLSGSAQHVEECSCYPRYPGVRCVCRDNWKGSNRPIVDINVKDYSIVSSYVCSGLVGDTPRKNDSFSSSHCLDPNNEEGGHGVKGWAFDDGNDVWMGRTISEKLRSGYETFKVIEGWSKPNSKLQINRQVIVERGNRSGYSGIFSVEGKSCINRCFYVELIRGRKEETEVWWTSNSIVVFCGTSGTYGTGSWPDGADINLMPI

SEQ ID NO: 14604 - protein, 469 aa, synthetic construct; identical to SEQ ID NO: 14591
  REGION 1..469: note = neuraminidase__InfluenzaA__ABC42183

SEQ ID NO: 14605 - protein, 469 aa, synthetic construct; identical to SEQ ID NO: 14591
  REGION 1..469: note = neuraminidase__InfluenzaA__ABC42195

SEQ ID NO: 14606 - protein, 469 aa, synthetic construct; identical to SEQ ID NO: 14591
  REGION 1..469: note = neuraminidase__InfluenzaA__ABC42310

SEQ ID NO: 14607 - protein, 469 aa, synthetic construct; identical to SEQ ID NO: 14591
  REGION 1..469: note = neuraminidase__InfluenzaA__ABC42321

SEQ ID NO: 14608 - protein, 469 aa, synthetic construct; identical to SEQ ID NO: 14591
  REGION 1..469: note = neuraminidase__InfluenzaA__ABC42349

SEQ ID NO: 14609 - protein, 469 aa, synthetic construct; identical to SEQ ID NO: 14591
  REGION 1..469: note = neuraminidase__InfluenzaA__ABC42464

SEQ ID NO: 14610 - protein, 469 aa, synthetic construct; identical to SEQ ID NO: 14591
  REGION 1..469: note = neuraminidase__InfluenzaA__ABC42497

SEQ ID NO: 14611 - protein, 469 aa, synthetic construct; identical to SEQ ID NO: 14591
  REGION 1..469: note = neuraminidase__InfluenzaA__ABC42508

SEQ ID NO: 14612 - protein, 469 aa, synthetic construct; identical to SEQ ID NO: 14591
  REGION 1..469: note = neuraminidase__InfluenzaA__ABC42519

SEQ ID NO: 14613 - protein, 469 aa, synthetic construct; identical to SEQ ID NO: 14591
  REGION 1..469: note = neuraminidase__InfluenzaA__ABC42530

SEQ ID NO: 14614 - protein, 469 aa, synthetic construct; identical to SEQ ID NO: 14591
  REGION 1..469: note = neuraminidase__InfluenzaA__ABC42577

SEQ ID NO: 14615 - protein, 469 aa, synthetic construct; identical to SEQ ID NO: 14591
  REGION 1..469: note = neuraminidase__InfluenzaA__ABC42588

SEQ ID NO: 14616 - protein, 469 aa, synthetic construct; identical to SEQ ID NO: 14327
  REGION 1..469: note = neuraminidase__InfluenzaA__ABC42599

SEQ ID NO: 14617 - protein, 469 aa, synthetic construct; identical to SEQ ID NO: 14327
  REGION 1..469: note = neuraminidase__InfluenzaA__ABC42610

SEQ ID NO: 14618 - protein, 469 aa, synthetic construct; identical to SEQ ID NO: 14327
  REGION 1..469: note = neuraminidase__InfluenzaA__ABC42621

SEQ ID NO: 14619 - protein, 469 aa, synthetic construct; identical to SEQ ID NO: 14327
  REGION 1..469: note = neuraminidase__InfluenzaA__ABC42632

SEQ ID NO: 14620 - protein, 469 aa, synthetic construct; identical to SEQ ID NO: 14327
  REGION 1..469: note = neuraminidase__InfluenzaA__ABC42643

SEQ ID NO: 14621 - protein, 469 aa, synthetic construct; identical to SEQ ID NO: 14327
  REGION 1..469: note = neuraminidase__InfluenzaA__ABC42654

SEQ ID NO: 14622 - protein, 469 aa, synthetic construct; identical to SEQ ID NO: 14327
  REGION 1..469: note = neuraminidase__InfluenzaA__ABC42665

SEQ ID NO: 14623 - protein, 469 aa, synthetic construct; identical to SEQ ID NO: 14327
  REGION 1..469: note = neuraminidase__InfluenzaA__ABC42676

SEQ ID NO: 14624 - protein, 469 aa, synthetic construct; identical to SEQ ID NO: 14327
  REGION 1..469: note = neuraminidase__InfluenzaA__ABC42687

SEQ ID NO: 14625 - protein, 469 aa, synthetic construct; identical to SEQ ID NO: 14327
  REGION 1..469: note = neuraminidase__InfluenzaA__ABC42698

SEQ ID NO: 14626 - protein, 469 aa, synthetic construct; identical to SEQ ID NO: 14327
  REGION 1..469: note = neuraminidase__InfluenzaA__ABC42709

SEQ ID NO: 14627 - protein, 469 aa, synthetic construct; identical to SEQ ID NO: 14327
  REGION 1..469: note = neuraminidase__InfluenzaA__ABC42720

SEQ ID NO: 14628 - protein, 469 aa, synthetic construct
  REGION 1..469: note = neuraminidase__InfluenzaA__ABC42742
MNPNQKIITIGSVSLTISTICFFMQIAILMTTVTLHFKQYEFNSPPNNQVMLCEPTIIERNITEIVYLTNTTIEKEICPKLAEYRNWSKPQCDITGFAPFSKDNSIRLSAGGDIWVTREPYVSCDPDKCYQFALGQGTTLNNVHSNDTVHDRTPYRTLLMNELGVPFHLGTKQVCIAWSSSSCHDGKAWLHVCVTGDDKNATASFIYNGRLVDSIVSWSKEILRTQESECVCINGTCTVVMTDGSASGKADTKILFIEEGKIVHTSTLSGSAQHVEECSCYPRYPGVRCVCRDNWKGSNRPIVDINIKDYSIVSSYVCSGLVGDTPRRNDSSSSSHCLDPNNEEGGHGVKGWAFDDGNDVWMGRTISEKLRSGYETFKVIEGWSNPNSKLQINRQVIVDRGNRSGYSGIFSVEGKSCINRCFYVELIRGRKEETEVLWTSNSIVVFCGTSGTYGTGSWPDGADINLMPI

SEQ ID NO: 14629 - protein, 469 aa, synthetic construct; identical to SEQ ID NO: 14327
  REGION 1..469: note = neuraminidase__InfluenzaA__ABC42764

SEQ ID NO: 14630 - protein, 469 aa, synthetic construct; identical to SEQ ID NO: 14327
  REGION 1..469: note = neuraminidase__InfluenzaA__ABC42775

SEQ ID NO: 14631 - protein, 469 aa, synthetic construct; identical to SEQ ID NO: 14327
  REGION 1..469: note = neuraminidase__InfluenzaA__ABC42786

SEQ ID NO: 14632 - protein, 469 aa, synthetic construct; identical to SEQ ID NO: 14327
  REGION 1..469: note = neuraminidase__InfluenzaA__ABC42797

SEQ ID NO: 14633 - protein, 469 aa, synthetic construct; identical to SEQ ID NO: 14327
  REGION 1..469: note = neuraminidase__InfluenzaA__ABC42808

SEQ ID NO: 14634 - protein, 469 aa, synthetic construct; identical to SEQ ID NO: 14327
  REGION 1..469: note = neuraminidase__InfluenzaA__ABC42819

SEQ ID NO: 14635 - protein, 469 aa, synthetic construct
  REGION 1..469: note = neuraminidase__InfluenzaA__ABC42841
MNPNQKIITIGSVSLTISTICFFMQIAILITTVTLHFKQYEFNSPPNNQVMLCEPTIIERNITEIVYLTNTTIEKEICPKLAEYRNWSKPQCDITGFAPFSKDNSIRLSAGGDIWVTREPYVSCDPDKCYQFALGQGTTLNNVHSNDTVHDRTPYRTLLMNELGVPFHLGTKQVCIAWSSSSCHDGKAWLHVCVTGDDKNATASFIYNGRLVDSIVSWSKEILRTQESECVCINGTCTVVMTDGSASRKADTKILFIEEGKIVHTSTLSGSAQHVEECSCYPRYPGVRCVCRDNWKGSNRPIVDINIKDYSIVSSYVCSGLVGDTPRKNDSSSSSHCLDPNNEEGGHGVKGWAFDDGNDVWMGRTISEKLRSGYETFKVIEGWSNPNSKLQINRQVIVDRGNRSGYSGIFSVEGKSCINRCFYVELIRGRKEETEVLWTSNSIVVFCGTSGTYGTGSWPDGADINLMPI

SEQ ID NO: 14636 - protein, 469 aa, synthetic construct; identical to SEQ ID NO: 14327
  REGION 1..469: note = neuraminidase__InfluenzaA__ABC42852

SEQ ID NO: 14637 - protein, 469 aa, synthetic construct; identical to SEQ ID NO: 14327
  REGION 1..469: note = neuraminidase__InfluenzaA__ABC42863

SEQ ID NO: 14638 - protein, 469 aa, synthetic construct; identical to SEQ ID NO: 14166
  REGION 1..469: note = neuraminidase__InfluenzaA__ABC42874

SEQ ID NO: 14639 - protein, 469 aa, synthetic construct; identical to SEQ ID NO: 14166
  REGION 1..469: note = neuraminidase__InfluenzaA__ABC42885

SEQ ID NO: 14640 - protein, 469 aa, synthetic construct; identical to SEQ ID NO: 14166
  REGION 1..469: note = neuraminidase__InfluenzaA__ABC42896

SEQ ID NO: 14641 - protein, 469 aa, synthetic construct; identical to SEQ ID NO: 14591
  REGION 1..469: note = neuraminidase__InfluenzaA__ABC42914

SEQ ID NO: 14642 - protein, 469 aa, synthetic construct; identical to SEQ ID NO: 14591
  REGION 1..469: note = neuraminidase__InfluenzaA__ABC42932

SEQ ID NO: 14643 - protein, 469 aa, synthetic construct
  REGION 1..469: note = neuraminidase__InfluenzaA__ABC42943
MNPNQKIITIGSVSLTIATICFLMQIAILVTTVTLHFKQHECNSPPNNQVMLCEPTIIERNITEIVYLTNTTIEKEICPKLVGYRNWSKPQCNITGFAPFSKDNSIRLSAGGDIWVTREPYVSCDPDKCYQFALGQGTTLNNGHSNDTVHDRTPYRTLLMNELGVPFHLGTRQVCIAWSSSSCHDGKAWLHVCVTGDDKNATASFIYNGRLVDSIGSWSKKILRTQESECVCINGTCTVVMTDGSASGKADTKILFIEEGKIVHISTLSGSAQHVEECSCYPRYPGVRCVCRDNWKGSNRPIVDINVKDYSIVSSYVCSGLVGDTPRKNDSFSSSHCLDPNNEEGGHGVKGWAFDDGNDVWMGRTISEKLRSGYETFKVIEGWSKPNSKLQINRQVIVERGNRSGYSGIFSVEGKSCINRCFYVELIRGRKEETEVWWTSNSIVVFCGTSGTYGTGSWPDGADINLMPI

SEQ ID NO: 14644 - protein, 469 aa, synthetic construct; identical to SEQ ID NO: 14591
  REGION 1..469: note = neuraminidase__InfluenzaA__ABC42954

SEQ ID NO: 14645 - protein, 469 aa, synthetic construct; identical to SEQ ID NO: 14591
  REGION 1..469: note = neuraminidase__InfluenzaA__ABC42965

SEQ ID NO: 14646 - protein, 469 aa, synthetic construct
  REGION 1..469: note = neuraminidase__InfluenzaA__ABC42976
MNPNQKIITIGSVSLTIATICFLMQIAILVTTVTLHFKQHECNSPPNNQAMLCEPTIIERNITEIVYLTNTTIEKEICPKLVEYRNWSKPQCNITGFAPFSKDNSIRLSAGGDIWVTREPYVSCDPDKCYQFALGQGTTLNNGHSNDTVHDRTPYRTLLMNELGVPFHLGTRQVCIAWSSSSCHDGKAWLHVCVTGDDKNATASFIYNGRLVDSIGSWSKKILRTQESECVCINGTCTVVMTDGSASGKADTKILFIEEGKIVHISTLSGSAQHVEECSCYPRYPGVRCVCRDNWKGSNRPIVDINVKDYSIVSSYVCSGLVGDTPRKNDSFSSSHCLDPNNEEGGHGVKGWAFDDGNDVWMGRTISEKLRSGYETFKVIEGWSKPNSKLQINRQVIVERGNRSGYSGIFSVEGKSCINRCFYVELIRGRKEETEVWWTSNSIVVFCGTSGTYGTGSWPDGADINLMPI

SEQ ID NO: 14647 - protein, 469 aa, synthetic construct; identical to SEQ ID NO: 14591
  REGION 1..469: note = neuraminidase__InfluenzaA__ABC42987

SEQ ID NO: 14648 - protein, 469 aa, synthetic construct; identical to SEQ ID NO: 14591
  REGION 1..469: note = neuraminidase__InfluenzaA__ABC42998

SEQ ID NO: 14649 - protein, 469 aa, synthetic construct; identical to SEQ ID NO: 14591
  REGION 1..469: note = neuraminidase__InfluenzaA__ABC43009

SEQ ID NO: 14650 - protein, 469 aa, synthetic construct; identical to SEQ ID NO: 14591
  REGION 1..469: note = neuraminidase__InfluenzaA__ABC43020

SEQ ID NO: 14651 - protein, 469 aa, synthetic construct
  REGION 1..469: note = neuraminidase__InfluenzaA__ABC43042
MNPNQKIITIGSVSLTIATICFLMQIAILVTTVTLHFKQHECNSPPNNQVMLCEPTIIERNITEIVYLTNTTIEKEICPKLVEYRNWSKPQCNITGFAPFSKDNSIRLSAGGDIWVTREPYVSCDPDKCYQFALGQGTTLNNGHSNDTVHDRTPYRTLLMNELGVPFHLGTRQVCIAWSSSSCHDGKAWLHVCVTGDDKNATASFIYNGRLVDSIGSWSKKILRTQESECVCINGTCTVVMTDGSASGKADTKILFIEEGKIVHISTLSGSAQHVEECSCYPRYPGVRCVCRDNWKGSNRPIVDINVKDYSIVSSYVCSGLVGDTPRKNDSFSSSHCLDPNNEEGGHGVKGWAFDDGNDVWMGRTISEKLRSGYETFKVIEGWSKPNSKLQINRQVIVERGNRSGYSGIFSVEGKSCINRCFYVELIRGRKEETEVWWTSNSIVVFCGTSGTYGTGSWPDGADINLMSI

SEQ ID NO: 14652 - protein, 469 aa, synthetic construct; identical to SEQ ID NO: 14591
  REGION 1..469: note = neuraminidase__InfluenzaA__ABC43053

SEQ ID NO: 14653 - protein, 469 aa, synthetic construct
  REGION 1..469: note = neuraminidase__InfluenzaA__ABC43064
MNPNQKIITIGSVSLTIATICFLMQIAILVTTVTLHFKQHECNSPPNNQVMLCEPTIIERNITEIVYLTNTTIEKEICPKLVEYRNWSKPQCNITGFAPFSKDNSIRLSAGGDIWVTREPYVSCDPDKCYQFALGQGTTLNNGHSNDTVHDRTPYRTLLMNELGVPFHLGTRQVCIAWSSSSCHDGKAWLHVCVTGDDKNATASFIYNGRLVDSIGSWSKKILRTQESECVCINGTCTVVMTDGSASGKADTKILFIEEGKIVHISTLSGSAQHVEECSCYPRYPGVRCVCRDNWKGSNRPIVDINVKDYSIVSSYVCSGLVGDTPRKNDSFSSSHCLDPNNEEGGHGVKGWAFDDGNDVWMGRTISEKLRSGYETFKVIEGWSKPNSKLQINRQVIVERGNRSGYSGIFSVEGKSCINRCFYVELIRGRKEKTEVWWTSNSIVVFCGTSGTYGTGSWPDGADINLMPI

SEQ ID NO: 14654 - protein, 469 aa, synthetic construct; identical to SEQ ID NO: 14591
  REGION 1..469: note = neuraminidase__InfluenzaA__ABC43075

SEQ ID NO: 14655 - protein, 469 aa, synthetic construct
  REGION 1..469: note = neuraminidase__InfluenzaA__ABC43086
MNPNQKIITIGSVSLIIATICFLMQIAILVTTVTLHFKQHECNSPPNNQVMLCEPTIIERNITEIVYLTNTTIEKEICPKLVEYRNWSKPQCNITGFAPFSKDNSIRLSAGGDIWVTREPYVSCDPDKCYQFALGQGTTLNNGHSNDTVHDRTPYRTLLMNELGVPFHLGTRQVCIAWSSSSCHDGKAWLHVCVTGDDKNATASFIYNGRLVDSIGSWSKKILRTQESECVCINGTCTVVMTDGSASGKADTKILFIEEGKIVHISTLSGSAQHVEECSCYPRYPGVRCVCRDNWKGSNRPIVDINVKDYSIVSSYVCSGLVGDTPRKNDSFSSSHCLDPNNEEGGHGVKGWAFDDGNDVWMGRTISEKLRSGYETFKVIEGWSKPNSKLQINRQVIVERGNRSGYSGIFSVEGKSCINRCFYVELIRGRKEETEVWWTSNSIVVFCGTSGTYGTGSWPDGADINLMPI

SEQ ID NO: 14656 - protein, 469 aa, synthetic construct; identical to SEQ ID NO: 14591
  REGION 1..469: note = neuraminidase__InfluenzaA__ABC43097

SEQ ID NO: 14657 - protein, 469 aa, synthetic construct; identical to SEQ ID NO: 14591
  REGION 1..469: note = neuraminidase__InfluenzaA__ABC43108

SEQ ID NO: 14658 - protein, 469 aa, synthetic construct; identical to SEQ ID NO: 14591
  REGION 1..469: note = neuraminidase__InfluenzaA__ABC43119

SEQ ID NO: 14659 - protein, 469 aa, synthetic construct; identical to SEQ ID NO: 14327
  REGION 1..469: note = neuraminidase__InfluenzaA__ABC43130

SEQ ID NO: 14660 - protein, 469 aa, synthetic construct; identical to SEQ ID NO: 14327
  REGION 1..469: note = neuraminidase__InfluenzaA__ABC43141

SEQ ID NO: 14661 - protein, 469 aa, synthetic construct; identical to SEQ ID NO: 14327
  REGION 1..469: note = neuraminidase__InfluenzaA__ABC43152

SEQ ID NO: 14662 - protein, 469 aa, synthetic construct; identical to SEQ ID NO: 14327
  REGION 1..469: note = neuraminidase__InfluenzaA__ABC43163

SEQ ID NO: 14663 - protein, 469 aa, synthetic construct; identical to SEQ ID NO: 14327
  REGION 1..469: note = neuraminidase__InfluenzaA__ABC43174

SEQ ID NO: 14664 - protein, 469 aa, synthetic construct
  REGION 1..469: note = neuraminidase__InfluenzaA__ABC43185
MNPNQKIITIGSVSLTISTICFFMQIAILITTVTLHFKQYEFNSPPNNQVMLCEPTIIERNITEIVYLTNTTIEKEICPKLAEYRNWSKPQCDITGFAPFSKDNSIRLSAGGDIWVTREPYVSCDPDKCYQFALGQGTTLNNVHSNDTVHDRTPYRTLLMNELGVPFHLGTKQVCIAWSSSSCHDGKAWLHVCVTGDDKNATASFIYNGRLVDSIVSWSKEILRTQESECVCINGTCTVVMTDGSASGKADTRILFIEEGKIVHTSTLSGSAQHVEECSCYPRYPGVRCVCRDNWKGSNRPIVDINIKDYSIVSSYVCSGLVGDTPRKNDSSSSSHCLDPNNEEGGHGVKGWAFDDGNDVWMGRTISEKLRSGYETFKVIEGWSNPNSKLQINRQVIVDRGNRSGYSGIFSVEGKSCINRCFYVELIRGRKEETEVLWTSNSIVVFCGTSGTYGTGSWPDGADINLMPI

SEQ ID NO: 14665 - protein, 469 aa, synthetic construct; identical to SEQ ID NO: 14327
  REGION 1..469: note = neuraminidase__InfluenzaA__ABC43478

SEQ ID NO: 14666 - protein, 469 aa, synthetic construct; identical to SEQ ID NO: 14327
  REGION 1..469: note = neuraminidase__InfluenzaA__ABC43489

SEQ ID NO: 14667 - protein, 469 aa, synthetic construct; identical to SEQ ID NO: 14327
  REGION 1..469: note = neuraminidase__InfluenzaA__ABC43500

SEQ ID NO: 14668 - protein, 469 aa, synthetic construct
  REGION 1..469: note = neuraminidase__InfluenzaA__ABC43511
MNPNQKIITIGSVSLTISTICFFMQIAILITTVTLHFKQYEFNSPPNNQVMLCETTIIERNITEIVYLTNTTIEKEICPKLAEYRNWSKPQCDITGFAPFSKDNSIRLSAGGDIWVTREPYVSCDPDKCYQFALGQGTTLNNVHSNDTVHDRTPYRTLLMNELGVPFHLGTKQVCIAWSSSSCHDGKAWLHVCVTGDDKNATASFIYNGRLVDSIVSWSKEILRTQESECVCINGTCTVVMTDGSASGKADTKILFIEEGKIVHTSTLSGSAQHVEECSCYPRYPGVRCVCRDNWKGSNRPIVDINIKDYSIVSSYVCSGLVGDTPRKNDSSSSSHCLDPNNEEGGHGVKGWAFDDGNDVWMGRTISEKLRSGYETFKVIEGWSNPNSKLQINRQVIVDRGNRSGYSGIFSVEGKSCINRCFYVELIRGRKEETEVLWTSNSIVVFCGTSGTYGTGSWPDGADINLMPI

SEQ ID NO: 14669 - protein, 469 aa, synthetic construct; identical to SEQ ID NO: 14327
  REGION 1..469: note = neuraminidase__InfluenzaA__ABC43522

SEQ ID NO: 14670 - protein, 469 aa, synthetic construct; identical to SEQ ID NO: 14327
  REGION 1..469: note = neuraminidase__InfluenzaA__ABC43533

SEQ ID NO: 14671 - protein, 469 aa, synthetic construct; identical to SEQ ID NO: 14327
  REGION 1..469: note = neuraminidase__InfluenzaA__ABC43544

SEQ ID NO: 14672 - protein, 469 aa, synthetic construct; identical to SEQ ID NO: 14327
  REGION 1..469: note = neuraminidase__InfluenzaA__ABC43555

SEQ ID NO: 14673 - protein, 469 aa, synthetic construct; identical to SEQ ID NO: 14570
  REGION 1..469: note = neuraminidase__InfluenzaA__ABC46557

SEQ ID NO: 14674 - protein, 469 aa, synthetic construct
  REGION 1..469: note = neuraminidase__InfluenzaA__ABC46579
MNPNQKIITIGSVSLTIATICFLMQIAILVTTVTLHFKQYECSSPPNNQVMPCEPIIIERNITEIVYLTNTTIEKEICPKLVEYRNWSKPQCKITGFAPFSKDNSIRLSAGGDIWVTREPYVSCDPGKCYQFALGQGTTLDNKHSNDTIHDRTPYRTLLMNELGVPFHLGTRQVCIAWSSSSCHDGKAWLHVCVTGHDKNATASFIYDGRLVDSIGSWSKNILRTQESECVCINGTCTVVMTDGSASERADTKILFIEEGKIVHISPLSGSAQHVEECSCYPRYPGVRCVCRDNWKGSNRPVVDINVKDYSIVSSYVCSGLVGDTPRKNDRSSSSYCRNPNNEKGNHGVKGWAFDDGNDVWMGRTISEESRSGYETFKVIGGWSTPNSKLQINRQVIVDSDNRSGYSGIFSVEGKSCINRCFYVELIRGREQETRVWWTSNSIVVFCGTSGTYGTGSWPDGADINLMPI

SEQ ID NO: 14675 - protein, 469 aa, synthetic construct; identical to SEQ ID NO: 14514
  REGION 1..469: note = neuraminidase__InfluenzaA__ABC50170

SEQ ID NO: 14676 - protein, 469 aa, synthetic construct; identical to SEQ ID NO: 14514
  REGION 1..469: note = neuraminidase__InfluenzaA__ABC50181

SEQ ID NO: 14677 - protein, 469 aa, synthetic construct; identical to SEQ ID NO: 14514
  REGION 1..469: note = neuraminidase__InfluenzaA__ABC50192

SEQ ID NO: 14678 - protein, 469 aa, synthetic construct; identical to SEQ ID NO: 14166
  REGION 1..469: note = neuraminidase__InfluenzaA__ABC50203

SEQ ID NO: 14679 - protein, 469 aa, synthetic construct
  REGION 1..469: note = neuraminidase__InfluenzaA__ABC50214
MNPNQKIITIGSVSLTIATICFLMQIAILVTTVTLHFKQYECNSPPNNQVMLCEPTIIERNITEIVYLTNTTIEKEICPKLAEYRNWSKPQCNITGFAPFSKDNSIRLSAGGDIWVTREPYVSCDPDKCYQFALGQGTTLNNGHSNDTVHDRTPYRTLLMNELGVPFHLGTRQVCIAWSSSSCHDGKAWLHVCVTGDDENATASFIYNGRLVDSIGSWSKKILRTQESECVCINGTCTVVMTDGSASGKADTKILFIEEGKIVHISTLSGSAQHVEECSCYPRYPGVRCVCRDNWKGSNRPIIDINVKDYSIVSSYVCSGLVGDTPRKNDSFSSSHCLDPNNEEGGHGVKGWAFDDGNDVWMGRTISEKLRSGYETFKVIEGWSKPNPKLQTNRQVIVERGNRSGYSGIFSVEGKSCINRCFYVELIRGRKEETEVWWTSNSIVVFCGTSGTYGTGSWPDGADINLMPI

SEQ ID NO: 14680 - protein, 469 aa, synthetic construct; identical to SEQ ID NO: 14166
  REGION 1..469: note = neuraminidase__InfluenzaA__ABC50225

SEQ ID NO: 14681 - protein, 469 aa, synthetic construct; identical to SEQ ID NO: 14166
  REGION 1..469: note = neuraminidase__InfluenzaA__ABC50247

SEQ ID NO: 14682 - protein, 469 aa, synthetic construct
  REGION 1..469: note = neuraminidase__InfluenzaA__ABC50258
MNPNQKIITIGSVSLTIATICFLMQIAILVTTVTLHFKQYECNSPPNNQVMLCEPTIIERNITEIVYLTNTTIEKEICPKLAEYRNWSKPQCNITGFAPFSKDNSIRLSAGGDIWVTREPYVSCDPDKCYQFALGQGTTLNNGHSNDTVHDRTPYRTLLMNELGVPFHLGTRQVCIAWSSSSCHDGKAWLHVCVTGDDENATASFIYNGRLVDSIGSWSKKILRTQESECVCINGTCTVVMTDGSASGKADTKILFIEEGKIVHISTLSGSAQHVEECSCYPRYPGVRCVCRDNWKGSNRPIIDINVKDYSIVSSYVCSGLVGDTPRKNDSFSSSHCLDPNNEEGGHGVKGWAFDDGNDVWMGRTISEKLRSGYETFKVIEGWSKPNSKLQTNRQVIVERGNRSGYSGIFSIEGKSCINRCFYVELIRGRKEETEVWWTSNSIVVFCGTSGTYGTGSWPDGADINLMPI

SEQ ID NO: 14683 - protein, 469 aa, synthetic construct; identical to SEQ ID NO: 14166
  REGION 1..469: note = neuraminidase__InfluenzaA__ABC50280

SEQ ID NO: 14684 - protein, 469 aa, synthetic construct; identical to SEQ ID NO: 14166
  REGION 1..469: note = neuraminidase__InfluenzaA__ABC50291

SEQ ID NO: 14685 - protein, 469 aa, synthetic construct
  REGION 1..469: note = neuraminidase__InfluenzaA__ABC50302
MNPNQKIITIGSVSLTIATICFLMQIAILITTVTLHFKQYECNSPPNNQVMLCEPTIIERNITEIVYLTNTTIEKEICPKLAEYRNWSKPQCNITGFAPFSKDNSIRLSAGGDIWVTREPYVSCDPDKCYQFALGQGTTLNNGHSNDTVHDRTPYRTLLMNELGVPFHLGTRQVCIAWSSSSCHDGKAWLHVCVTGDDENATASFIYNGRLVDSIGSWSKKILRTQESECVCINGTCTVVMTDGSASGKADTKILFIEEGKIVHISTLSGSAQHVEECSCYPRYPGVRCVCRDNWKGSNRPIVDINVKDYSIVSSYVCSGLVGDTPRKNDSFSSSHCLDPNNEEGGHGVKGWAFDDGNDVWMGRTISEKLRSGYETFKVIEGWSKPNSKLQTNRQVIVERGNRSGYSGIFSVEGKSCINRCFYVELIRGRKEETEVWWTSNSIVVFCGTSGTYGTGSWPDGADINLMPI

SEQ ID NO: 14686 - protein, 469 aa, synthetic construct
  REGION 1..469: note = neuraminidase__InfluenzaA__ABC50313
MNPNQKIITIGSVSLTIATICFLMQIAILVTTVTLHFKQHECNSPPNNQVMLCEPTIIERNITEIVYLTNTTIEKEICPKLAEYRNWSKPQCNITGFAPFSKDNSIRLSAGGDIWVTREPYVSCDPDKCYQFALGQGTTLNNGHSNDTVHDRTPYRTLLMNELGVPFHLGTRQVCIAWSSSSCHDGKAWLHVCVTGDDENATASFIYNGRLVDSIGSWSKKILRTQESECVCINGTCTVVMTDGSASGKADTKILFIEEGKIVHISTLSGSAQHVEECSCYPRYPGVRCVCRDNWKGSNRPIVDINVKDYSIVSSYVCSGLVGDTPRKNDSFSSSHCLDPNNEEGGHGVKGWAFDDGNDVWMGRTISEKLRSGYETFKVIEGWSKPNSKLQTNRQVIVERGNRSGYSGIFSVEGKSCINRCFYVELIRGRKEETEVWWTSNSIVVFCGTSGTYGTGSWPDGADINLMPI

SEQ ID NO: 14687 - protein, 469 aa, synthetic construct; identical to SEQ ID NO: 14166
  REGION 1..469: note = neuraminidase__InfluenzaA__ABC50324

SEQ ID NO: 14688 - protein, 469 aa, synthetic construct; identical to SEQ ID NO: 14154
  REGION 1..469: note = neuraminidase__InfluenzaA__ABC50335

SEQ ID NO: 14689 - protein, 469 aa, synthetic construct
  REGION 1..469: note = neuraminidase__InfluenzaA__ABC50346
MNPNQKIITIGSVSLTIATICFLMQIAILVTTVTLHFKQYECNSPPNNQVMLCEPTIIERNITEIVYLTNTTIEKEICPKLAEYRNWSKPQCNITGFAPFSKDNSIRLSAGGDIWVTREPYVSCDPDKCYQFALGQGTTLNNGHSNDTVHDRTPYRTLLMNELGVPFHLGTRQVCIAWSSSSCHDGKAWLHVCVTGDDENATASFIYNGRLVDSIGSWSKKILRTQESECVCINGTCTVVMTDGSASGKADTKILFIEEGKIVHISTLSGSAQHVEECSCYPRYPGVRCVCRDNWKGSNRPIIDINVKDYSIVSSYVCSGLVGDTPRKNDSFSSSHCLDPNNEEGGHGVKGWAFDDGNDVWMGRTISEKLRSGYETFKVIEGWSKPNSKLQTNRQVIVERGNRSGYSGIFSVEGKSCINRCFYVELIRGRKEETEVWWTSNSIVVFCGTSGTYGTGSWPDGADINLMPI

SEQ ID NO: 14690 - protein, 469 aa, synthetic construct; identical to SEQ ID NO: 14166
  REGION 1..469: note = neuraminidase__InfluenzaA__ABC50357

SEQ ID NO: 14691 - protein, 469 aa, synthetic construct; identical to SEQ ID NO: 14166
  REGION 1..469: note = neuraminidase__InfluenzaA__ABC50368

SEQ ID NO: 14692 - protein, 469 aa, synthetic construct; identical to SEQ ID NO: 14166
  REGION 1..469: note = neuraminidase__InfluenzaA__ABC50379

SEQ ID NO: 14693 - protein, 469 aa, synthetic construct; identical to SEQ ID NO: 14166
  REGION 1..469: note = neuraminidase__InfluenzaA__ABC50390

SEQ ID NO: 14694 - protein, 469 aa, synthetic construct
  REGION 1..469: note = neuraminidase__InfluenzaA__ABC50412
MNPNQKIITIGSVSLTISTICFFMQIAILITTVTLHFKQYEFNSPPNNQVMLCEPTIIERNITEIVYLTNTTIEKEICPKLAEYRNWSKPQCDITGFAPFSKDNSIRLSAGGDIWVTREPYVSCDPDKCYQFALGQGTTLNNVHSNDTVHDRTPYRTLLMNELGVPFHLGTKQVCIAWSSSSCHDGKAWLHVCVTGDDKNATASFIYNGRLVDSIVSWSKEILRTQESECVCINGTCTVVMTDGSASGKADTKILFIEEGKIVHTSTLSGSAQHVEECSCYPRYPGVRCVCRDNWKGSNRPIVDINIKDYSIVSSYVCSGLVGDTPRKNDSSSSSHCLDPNNEEGGHGVKGWAFDDGNDVWMGRTISEKLRLGYETFKVIEGWSNPNSKLQINRQVIVDRGNRSGYSGIFSVEGKSCINRCFYVELIRGRKEETEVLWTSNSIVVFCGTSGTYGTGSWPDGADINLMPI

SEQ ID NO: 14695 - protein, 469 aa, synthetic construct; identical to SEQ ID NO: 14694
  REGION 1..469: note = neuraminidase__InfluenzaA__ABC50423

SEQ ID NO: 14696 - protein, 469 aa, synthetic construct; identical to SEQ ID NO: 14279
  REGION 1..469: note = neuraminidase__InfluenzaA__ABC54671

SEQ ID NO: 14697 - protein, 469 aa, synthetic construct; identical to SEQ ID NO: 14411
  REGION 1..469: note = neuraminidase__InfluenzaA__ABC54682

SEQ ID NO: 14698 - protein, 469 aa, synthetic construct; identical to SEQ ID NO: 14591
  REGION 1..469: note = neuraminidase__InfluenzaA__ABC67322

SEQ ID NO: 14699 - protein, 469 aa, synthetic construct; identical to SEQ ID NO: 14166
  REGION 1..469: note = neuraminidase__InfluenzaA__ABC67474

SEQ ID NO: 14700 - protein, 469 aa, synthetic construct; identical to SEQ ID NO: 14689
  REGION 1..469: note = neuraminidase__InfluenzaA__ABC67546

SEQ ID NO: 14701 - protein, 469 aa, synthetic construct
  REGION 1..469: note = neuraminidase__InfluenzaA__ABC67557
MNPNQKIITIGSVSLTISTICFFMQIAILVTTVTLHFKQYEFNSPPNNQVMLCEPTIIERNITEIVYLTNTTIEKEICPKLAEYRNWSKPQCDITGFAPFSKDNSIRLSAGGDIWVTREPYVSCDPDKCYQFALGQGTTLNNVHSNDTVHDRTPYRTLLMNELGVPFHLGTKQVCIAWSSSSCHDGKAWLHVCVTGDDKNATASFIYNGRLVDSIVSWSKKILRTQESECVCINGTCTVVMTDGSASGKADTKILFIEEGKIVHTSTLSGSAQHVEECSCYPRYPGVRCVCRDNWKGSNRPIVDINIKDYSIVSSYVCSGLVGDTPRKNDSSSSSHCLDPNNEEGGHGVKGWAFDDGNDVWMGRTISEKLRSGYETFKVIEGWSNPNSKLQINRQVIVDRGNRSGYSGIFSVEGKSCINRCFYVELIRGRKEETEVLWTSNSIVVFCGTSGTYGTGSWPDGADINLMPI

SEQ ID NO: 14702 - protein, 469 aa, synthetic construct
  REGION 1..469: note = neuraminidase__InfluenzaA__ABC67568
MNPNQKIITIGSVSLTIATICFLMQIAILVTTVTLHFKQYECDSPANNQVMPCEPIIIERNITEIVYLTNTTIEKEICPKLVEYRNWSKPQCKITGFAPFSKDNSIRLSAGGDIWVTREPYVSCDPGKCYQFALGQGTTLDNKHSNDTIHDRTPHRTLLMNELGVPFHLGTRQVCIAWSSSSCHDGKAWLHVCVTGYDKNATASFIYDGRLVDSIGSWSQNILRTQESECVCINGTCTVVMTDGSASGRADTKILFIEEGKIVHISPLSGSAQHVEECSCYPRYPGVRCICRDNWKGSNRPVVDINVKDYSIDSSYVCSGLVGDTPRNNDRSSNSYCRNPNNEKGNHGVKGWAFDDGNDVWMGRTISEDSRSGYETFKVIGGWSTPNSKLQINRQVIVDSDNRSGYSGIFSVEGKSCINRCFYVELIRGREQETRVWWTSNSIVVFCGTSGTYGTGSWPDGANINLMPI

SEQ ID NO: 14703 - protein, 469 aa, synthetic construct
  REGION 1..469: note = neuraminidase__InfluenzaA__ABC67579
MNPNQKIITIGSVSLTIATICFLMQIAILVTTVTLHFKQYECNSPPNNQVMLCEPTIIERNITEIVYLTNTTIEKEICPKPAEYRNWSKPQCKITGFAPFSKDNSIRLSAGGDIWVTREPYVSCDPDKCYQFALGQGTTLNNGHSNDTVHDRTPYRTLLMNELGVPFHLGTKQVCIAWSSSSCHDGKAWLHVCVTGHDENATASFIYDGRLVDSIGSWSKKILRTQESECVCINGTCTVVMTDGSASGRADTKILFIEEGKIVHISQLSGSAQHVEECSCYPRYPGVRCVCRDNWKGSNRPIVDINVKDHSIVSSYVCSGLVGDTPRKNDSSSSSHCLNPNNEEGGHGVKGWAFDDGNDVWMGRTISEKLRSGYETFKVIEGWSKPNSKLQINRQVIVDRGNRSGYSGIFSVEGKSCINRCFYVELIRGRKQETEVWWTSNSIVVFCGTSGTYGTGSWPDGADINLMPI

SEQ ID NO: 14704 - protein, 469 aa, synthetic construct; identical to SEQ ID NO: 14327
  REGION 1..469: note = neuraminidase__InfluenzaA__ABC67590

SEQ ID NO: 14705 - protein, 469 aa, synthetic construct; identical to SEQ ID NO: 14327
  REGION 1..469: note = neuraminidase__InfluenzaA__ABC67601

SEQ ID NO: 14706 - protein, 469 aa, synthetic construct; identical to SEQ ID NO: 14166
  REGION 1..469: note = neuraminidase__InfluenzaA__ABC67612

SEQ ID NO: 14707 - protein, 469 aa, synthetic construct; identical to SEQ ID NO: 14166
  REGION 1..469: note = neuraminidase__InfluenzaA__ABC67623

SEQ ID NO: 14708 - protein, 469 aa, synthetic construct
  REGION 1..469: note = neuraminidase__InfluenzaA__ABC67634
MNPNQKIITIGSVSLTIATICFLMQIAILVTTVTLHFKQYECNPPPNNQVMLCEPTIIERNITEIVYLTNTTIEKEICPKLAEYRNWSKPQCNITGFAPFSKDNSIRLSAGGDIWVTREPYVSCDPDKCYQFALGQGTTLNNGHSNDTVHDRTPYRTLLMNELGVPFHLGTRQVCIAWSSSSCHDGKAWLHVCVTGDDENATASFIYNGRLVDSIGSWSKKILRTQESECVCINGTCTVVMTDGSASGKADTKILFIEEGKIVHISTLSGSAQHVEECSCYPRYPGVRCVCRDNWKGSNRPIVDINVKDYSIVSSYVCSGLVGDTPRKNDSFSSSHCLDPNNEEGGHGVKGWAFDDGNDVWMGRTISEKLRSGYETFKVIEGWSKPNSKLQTNRQVIVERGNRSGYSGIFSVEGKSCINRCFYVELIRGRKEETEVWWTSNSIVVFCGTSGTYGTGSWPDGADINLMPI

SEQ ID NO: 14709 - protein, 469 aa, synthetic construct; identical to SEQ ID NO: 14166
  REGION 1..469: note = neuraminidase__InfluenzaA__ABC67645

SEQ ID NO: 14710 - protein, 469 aa, synthetic construct; identical to SEQ ID NO: 14166
  REGION 1..469: note = neuraminidase__InfluenzaA__ABC67656

SEQ ID NO: 14711 - protein, 469 aa, synthetic construct
  REGION 1..469: note = neuraminidase__InfluenzaA__ABC67700
MNPNQKIITIGSVSLTISTICFFMQIAILITTVTLHFKQYEFNSPPNNQVMLCEPTIIERNITEIVYLTNTTIEKEICPKLAEYRNWSKPQCNITGFAPFSKDNSIRLSAGGDIWVTREPYVSCDPDKCYQFALGQGTTLNNVHSNDTVHDRTPYRTLLMNELGVPFHLGTKQVCIAWSSSSCHDGKAWLHVCVTGDDKNATASFIYNGRLVDSIVSWSKEILRTQESECVCINGTCTVVMTDGSASGKADTKILFIEEGKIVHTSTLSGSAQHVEECSCYPRYPGVRCVCRDNWKGSNRPIVDINIKDYSIVSSYVCSGLVGDTPRKNDSSSSSHCLDPNNEEGGHGVKGWAFDDGNDVWMGRTISEKLRSGYETFKVIEGWSNSNSKLQINRQVIVDRGNRSGYSGIFSVEGKSCINRCFYVELIRGRKEETEVLWTSNSIVVFCGTSGTYGTGSWPDGADINLMPI

SEQ ID NO: 14712 - protein, 469 aa, synthetic construct
  REGION 1..469: note = neuraminidase__InfluenzaA__ABC67711
MNPNQKIITIGSVSLTISTICFFMQIAILITTVTLHFKQYEFNSPPNNQVMLCEPTIIERNITEIVYLTNTTIEKEICPKLAEYRNWSKPQCNITGFAPFSKDNSIRLSAGGDIWVTREPYVSCDPDKCYQFALGQGTTLNNVHSNDTVHDRTPYRTLLMNELGVPFHLGTKQVCIAWSSSSCHDGKAWLHVCVTGDDKNATASFIYNGRLVDSIVSWSKEILRTQESECVCINGTCTVVMTDGSASGKADTKILFIEEGKIVHTSTLSGSAQHVEECSCYPRYPGVRCVCRDNWKGSNRPIVDINIKDYSIVSSYVCSGLVGDTPRKNDSSSSSHCLDPNNEEGGHGVKGWAFDDGNDVWMGRTISEKLRSGYETFKVIEGWSNPNSKLQINRQVIVDRGNRSGYSGIFSVEGKSCINRCFYVELIRGRKEETEVLWTSNSIVVFCGTSGTYGTGSWPDGADINLMPI

SEQ ID NO: 14713 - protein, 469 aa, synthetic construct
  REGION 1..469: note = neuraminidase__InfluenzaA__ABC67736
MNPNQKIITIGSVSLTISTICFFMQIAILITTVTLHFKQYEFNSPPNNQVMLCEPTIIERNITEIVYLTNTTIEKEICPKLAEYRNWSKPQCNITGFAPFSKDNSIRLSAGGDIWVTREPYVSCDPDKCYQFALGQGTTLNNVHSNDTVHDRTPYRTLLMNELGVPFHLGTKQVCVAWSSSSCHDGKAWLHVCVTGDDKNATASFIYNGRLVDSIVSWSKEILRTQESECVCINGTCTVVMTDGSASGKADTKILFIEEGKIVHTSTLSGSAQHVEECSCYPRYPGVRCVCRDNWKGSNRPIVDINIKDYSIVSSYVCSGLVGDTPRKNDSSSSSHCLDPNNEEGGHGVKGWAFDDGNDVWMGRTISEKLRSGYETFKVIEGWSNPNSKLQINRQVIVDRGNRSGYSGIFSVEGKSCINRCFYVELIRGRKEETEVLWTSNSIVVFCGTSGTYGTGSWPDGADINLMPI

SEQ ID NO: 14714 - protein, 469 aa, synthetic construct
  REGION 1..469: note = neuraminidase__InfluenzaA__ABC67809
MNPNQKIITIGSVSLTISTICFFMQIAILITTVTLHFKQYEFNSPPNNQVMLCEPTIIERNITEIVYLTNTTIEKEICPKLAEYRNWSKPQCDITGFAPFSKDNSIRLSAGGDIWVTREPYVSCDPDKCYQFALGQGTTLNNVHSNDTVHDRTPYRTLLMNELGVPFHLGTKQVCIAWSSSSCHDGKAWLHVCVTGDDKNATASFIYNGRLVDSIVSWSKKILRTQESECVCINGTCTVVMTDGSASGKADTKILFIEEGKIVHTSTLSGSAQHVEECSCYPRYPGVRCVCRDNWKGSNRPIVDINIKDYSIVSSYVCSGLVGDTPRKNDSSSSSHCLDPNNEEGGHGVKGWAFDDGNDVWMGRTISEKLRSGYETFKVIEGWSNPNSKLQINRQVIVDRGNRSGYSGIFSVEGKSCINRCFYVELIRGRKEETEVLWTSNSIVVFCGTSGTYGTGSWPDGADINLMPI

SEQ ID NO: 14715 - protein, 469 aa, synthetic construct; identical to SEQ ID NO: 14591
  REGION 1..469: note = neuraminidase__InfluenzaA__ABC67820

SEQ ID NO: 14716 - protein, 469 aa, synthetic construct; identical to SEQ ID NO: 14570
  REGION 1..469: note = neuraminidase__InfluenzaA__ABC67842

SEQ ID NO: 14717 - protein, 469 aa, synthetic construct; identical to SEQ ID NO: 14166
  REGION 1..469: note = neuraminidase__InfluenzaA__ABC67853

SEQ ID NO: 14718 - protein, 469 aa, synthetic construct; identical to SEQ ID NO: 14570
  REGION 1..469: note = neuraminidase__InfluenzaA__ABC67864

SEQ ID NO: 14719 - protein, 469 aa, synthetic construct; identical to SEQ ID NO: 14689
  REGION 1..469: note = neuraminidase__InfluenzaA__ABC67886

SEQ ID NO: 14720 - protein, 469 aa, synthetic construct; identical to SEQ ID NO: 14166
  REGION 1..469: note = neuraminidase__InfluenzaA__ABC67897

SEQ ID NO: 14721 - protein, 469 aa, synthetic construct; identical to SEQ ID NO: 14166
  REGION 1..469: note = neuraminidase__InfluenzaA__ABC67970

SEQ ID NO: 14722 - protein, 469 aa, synthetic construct
  REGION 1..469: note = neuraminidase__InfluenzaA__ABC67981
MNPNQKIITIGSVSLTIATICFLMQIAILVTTVTLHFKQYECNSPPNNQVMLCEPTIIERNITEIVYLTNTTIEKEICPKLAEYRNWSKPQCNITGFAPFSKDNSIRLSAGGDIWVTREPYVSCDPDKCYQFALGQGTTLNNGHSNDTVHDRTPYRTLLMNELGVPFHLGTRQVCIAWSSSSCHDGKAWLHVCVTGDDENATASFIYNGRLVDSIGSWSKKILRTQESECVCINGTCTVVMTDGSASGKADTKILFIEEGKIVHISTLSGSAQHVEECSCYPQYPGVRCVCRDNWKGSNRPIVDINVKDYSIVSSYVCSGLVGDTPRKNDSFSSSHCLDPNNEEGGHGVKGWAFDDGNDVWMGRTISEKLRSGYETFKVIEGWSKPNSKLQTNRQVIVERGNRSGYSGIFSVEGKSCINRCFYVELIRGRKEETEVWWTSNSIVVFCGTSGTYGTGSWPDGADINLMPI

SEQ ID NO: 14723 - protein, 469 aa, synthetic construct
  REGION 1..469: note = neuraminidase__InfluenzaA__ABC67992
MNPNQKIITIGSVSLTIATICFLMQIAILVTTVTLHFKQYECNSPPNNQVMLCEPTIIERNITEIVYLTNTTIEKEICPKLAEYRNWSKPQCNITGFAPFSKDNSIRLSAGGDIWVTREPYVSCDPDKCYQFALGQGTTLNNGHSNDTVHDRTPYRTLLMNELGVPFHLGTRQVCIAWSSSSCHDGKAWLHVCVTGDDENATASFIYNGRLVDSIGSWSKKILRTQESECVCINGTCTVVMTDGSASGKADTKILFIEEGKIVHISTLSGSAQHVEECSCYPRYPGVRCVCRDNWKGSNRPIVDINVKDYSIVSSYVCSGLVGDTPRKNNSFSSSHCLDPNNEEGGHGVKGWAFDDGNDVWMGRTISEKLRSGYETFKVIEGWSKPNSKLQTNRQVIVERGNRSGYSGIFSVEGKSCINRCFYVELIRGRKEEIEVWWTSNSIVVFCGTSGTYGTGSWPDGADINLMPI

SEQ ID NO: 14724 - protein, 469 aa, synthetic construct; identical to SEQ ID NO: 14689
  REGION 1..469: note = neuraminidase__InfluenzaA__ABC68003

SEQ ID NO: 14725 - protein, 469 aa, synthetic construct
  REGION 1..469: note = neuraminidase__InfluenzaA__ABC68052
MNPNQKIITIGSVSLTIATICFLMQIAILVTTVTLHFKQYECNSPPNNQVMLCEPTIIERNITEIVYLTNTTIEKEICPKLAEYRNWSKPQCNITGFAPFSKDNSIRLSAGGDIWVTREPYVSCDPDKCYQFALGQGTTLNNGHSNDTVHDRTPYRTLLMNELGVPFHLGTRQVCIAWSSSSCHDGKAWLHVCVTGDDENATASFIYNGRLVDSIGSWSKKILRTQESECVCINGTCTVVMIDGSASGKADTKILFIEEGKIVHISTLSGSAQHVEECSCYPRYPGVRCVCRDNWKGSNRPIVDINVKDYSIVSSYVCSGLVGDTPRKNDSFSSSHCLDPNNEEGGHGVKGWAFDDGNDVWMGRTISEKLRSGYETFKVIEGWSKPNSKLQTNRQVIVERGNRSGYSGIFSVEGKSCINRCFYVELIRGRKEETEVWWTSNSIVVFCGTSGTYGTGSWPDGADINLMPI

SEQ ID NO: 14726 - protein, 469 aa, synthetic construct; identical to SEQ ID NO: 14166
  REGION 1..469: note = neuraminidase__InfluenzaA__ABC68063

SEQ ID NO: 14727 - protein, 469 aa, synthetic construct; identical to SEQ ID NO: 14166
  REGION 1..469: note = neuraminidase__InfluenzaA__ABC68074

SEQ ID NO: 14728 - protein, 469 aa, synthetic construct; identical to SEQ ID NO: 14712
  REGION 1..469: note = neuraminidase__InfluenzaA__ABC68085

SEQ ID NO: 14729 - protein, 469 aa, synthetic construct
  REGION 1..469: note = neuraminidase__InfluenzaA__ABC68096
MNPNQKIITIGSVSLTIATICFLMQIAILVTTVTLHFKQYECNSPPNNQVMLCEPTIIERNITEIVYLTNTTIEKEICPKLAEYRNWSKPQCNITGFAPFSKDNSIRLSAGGDIWVTREPYVSCDPDKCYQFALGQGTTLNNGHSNDTVHDRTPYRTLLMNELGVPFHLGTRQVCIAWSSSSCHDGKAWLHVCVTGDDENATASFIYNGRLVDSIGSWSKKILRTQESECVCINGTCTVVMTDGSASGKADTKILFIEEGKIVHISTLSGSAQHVEECSCYPRYPGVRCVCRDNWKGSNRPIVDINVKDYSIVSSYVCSGLVGDTPRKNDSFSSSHCLDPNNEEGGHGVKGWAFDDGNDVWMGRTISEKLRSGYETFKVIEGWSKPNSKLHINRQVIVERGNRSGYSGIFSVEGKSCINRCFYVELIRGRKEETEVWWTSNSIVVFCGTSGTYGTGSWPDGADINLMPI

SEQ ID NO: 14730 - protein, 469 aa, synthetic construct
  REGION 1..469: note = neuraminidase__InfluenzaA__ABC68225
MNPNQKIITIGSVSLTIATICFLMQIAILVTTVTLHFKQYECNSPPNNQVMLCEPTIIERNITEIVYLTNTTIEKEICPKLAEYRNWSKPQCNITGFAPFSKDNSIRLSAGGDIWVTREPYVSCDPDKCYQFALGQGTTLNNGHSNDTVHDRTPYRTLLMNELGVPFHLGTKQVCIAWSSSSCHDGKAWLHVCVTGDDENATASFIYNGRLVDSIGSWSKKILRTQESECVCINGTCTVVMTDGSASGKADTKILFIEEGKIVHTSSLSGSAQHVEECSCYPRYPGVRCVCRDNWKGSNRPIVDINVKDYSIVSSYVCSGLVGDTPRKNDSSSSSHCLDPNNEEGGHGVKGWAFDDGNDVWMGRTISEKLRSGYETFKVIEGWSKPNSKLQINRQVIVDRGNRSGYSGIFSVESKSCINRCFYVELIRGRKQETEVLWTSNSIVVFCGTSGTYGTGSWPDGADINLMPI

SEQ ID NO: 14731 - protein, 469 aa, synthetic construct; identical to SEQ ID NO: 14519
  REGION 1..469: note = neuraminidase__InfluenzaA__ABC68236

SEQ ID NO: 14732 - protein, 449 aa, synthetic construct
  REGION 1..449: note = neuraminidase__InfluenzaA__ABC72646
MNPNKKIITIGSICMVTGMVSLMLQIGNLISIWVSHSIHTGNQQKAEPISNTNFLTEKAVASVKLAGNSSLCPINGWAVYSKDNSIRIGSKGDVFVIREPFISCSHLECRTFFLTQGSLLNDKHSNGTVKDRSPHRTLMSCPVGEAPSPYNSRFESVAWSASACHDGTSWLTIGISGPDSGAVAVLKYNGIITDTIKSWRNNILRTQESECACVNGSCFTVMTDGPSNGQASHKIFKMDKGKVVKSVELDAPNYHYEECSCYPDAGEITCVCRDNWHGSNRPWVSFNQNLEYQIGYICSGVFGDTPRPNDGTGSCGPVSSNGTYGVKGFSFKYGNGVWIGRTKSTNSRSGFEMIWDPNGWTETDSSFSVKQDIVAITDWSGYSGSFVQHPELTGLDCIRPCFWVELIRGRPKESTIWTSGSSISFCGVNSDTVGWSWPDGAELPFTIDK

SEQ ID NO: 14733 - protein, 469 aa, synthetic construct; identical to SEQ ID NO: 14095
  REGION 1..469: note = neuraminidase__InfluenzaA__ABC84392

SEQ ID NO: 14734 - protein, 469 aa, synthetic construct; identical to SEQ ID NO: 14509
  REGION 1..469: note = neuraminidase__InfluenzaA__ABC84403

SEQ ID NO: 14735 - protein, 469 aa, synthetic construct; identical to SEQ ID NO: 14514
  REGION 1..469: note = neuraminidase__InfluenzaA__ABC84414

SEQ ID NO: 14736 - protein, 469 aa, synthetic construct
  REGION 1..469: note = neuraminidase__InfluenzaA__ABC84425
MNPNQKIITIGSVSLTISTICFFMQIAILITTVTLHFKQYEFNSPPNNQVMLCEPTIIERNITEIVYLTNTTIEKEICPKLAEYRNWSKPQCDITGFAPFSKDNSIRLSAGGDIWVTREPYVSCDPDKCYQFALGQGTTLNNVHSNDTVHDRTPYRTLLMNELGVPFHLGTKQVCIAWSSSSCHDGKAWLHVCVTGDDKNATASFIYNGRLVDSIVSWSKEILRTQESECVCINGTCTVVMTDGSASGKADTKILFIEEGKIVHTSTLSGSAQHVEECSCYPRYPGVRCVCRDNWKGSNRPIVDINIKDYSIVSSYVCSGLVGDTPRKNDSSSSSHCLDPNNEEGGHGVKGWAFDDGNDVWMGRTISEKLRSGYETFKVIEGWSNPNSKLQINRQVIVDRGNRSGYSGIFSVEGKNCINRCFYVELIRGRKEETEVLWTSNSIVVFCGTSGTYGTGSWPDGADINLMPI

SEQ ID NO: 14737 - protein, 469 aa, synthetic construct; identical to SEQ ID NO: 14327
  REGION 1..469: note = neuraminidase__InfluenzaA__ABC84436

SEQ ID NO: 14738 - protein, 469 aa, synthetic construct
  REGION 1..469: note = neuraminidase__InfluenzaA__ABC84447
MNPNQKIITIGSVSLTIATICFLMQIAILVTTVTLHFKQYECNSPPNNQVMLCEPTIIERNITEIVHLTNTTIEKEICPKLAEYRNWSKPQCNITGFAPFSKDNSIRLSAGGDIWVTREPYVSCDPDKCYQFALGQGTTLNNGHSNDTVHDRTPYRTLLMNELGVPFHLGTRQVCIAWSSSSCHDGKAWLHVCVTGDDENATASFIYNGRLVDSIGSWSKKILRTQESECVCINGTCTVVMTDGSASGKADTKILFIEEGKIVHISTLSGSAQHVEECSCYPRYPGVRCVCRDNWKGSNRPIVDINVKDYSIVSSYVCSGLVGDTPRKNDSFSSSHCLDPNNEEGGHGVKGWAFDDGNDVWMGRTISEKLRSGYETFKVIEGWSKPNSKLQTNRQVIVERGNRSGYSGIFSVEGKSCINRCFYVELIRGRKEETEVWWTSNSIVVFCGTSGTYGTGSWPDGADINLMPI

SEQ ID NO: 14739 - protein, 469 aa, synthetic construct; identical to SEQ ID NO: 14714
  REGION 1..469: note = neuraminidase__InfluenzaA__ABC84501

SEQ ID NO: 14740 - protein, 469 aa, synthetic construct; identical to SEQ ID NO: 14714
  REGION 1..469: note = neuraminidase__InfluenzaA__ABC84512

SEQ ID NO: 14741 - protein, 469 aa, synthetic construct
  REGION 1..469: note = neuraminidase__InfluenzaA__ABC84523
MNPNQKIITIGSVSLTISTICFFMQIAILITTVTLHFKQYEFNSPPNNQVMLCEPTIIERNITEIVYLTNTTIEKEICPKLAEYRNWSKPQCNITGFAPFSKDNSIRLSAGGDIWVTREPYVSCDPDKCYQFALGQGTTLNNVHSNDTVHDRTPYRTLLMNELGVPFHLGTKQVCIAWSSSSCHDGKAWLHVCVTGDDKNATASFIYNGRLADSIVSWSKEILRTQESECVCINGTCTVVMTDGSASGKADTKILFIEEGKIVHTSTLSGSAQHVEECSCYPRYPGVRCVCRDNWKGSNRPIVDINIKDYSIVSSYVCSGLVGDTPRKNDSSSSSHCLDPNNEEGGHGVKGWAFDDGNDVWMGRTISEKLRSGYETFKVIEGWSNPNSKLQINRQVIVDRGNRSGYSGIFSVEGKSCINRCFYVELIRGRKEETEVLWTSNSIVVFCGTSGTYGTGSWPDGADINLMPI

SEQ ID NO: 14742 - protein, 469 aa, synthetic construct
  REGION 1..469: note = neuraminidase__InfluenzaA__ABC84545
MNPNQKIITIGSVSLTIATICFLMQIAILVTTVTLHFKQYECDSPANNQVMPCEPIIIERNITEIVYLTNTTIEKEICPKLVEYRNWSKPQCKITGFAPFSKDNSIRLSAGGDIWVTREPYVSCDPGKCYQFALGQGTTLDNKHSNDTIHDRTPHRTLLMNELGVPFHLGTRQVCIAWSSSSCHDGKAWLHVCVTGYDKNATASFIYDGRLVDSIGSWSQNILRTQESECVCINGTCTVVMTDGSASGSADTKILFIEEGKIVHISPLSGSAQHVEECSCYPRYPGVRCICRDNWKGSNRPVVDINVKDHSIDSSYVCSGLVGDTPRNNDRSSNSYCRNPNNEKGNHGVKGWAFDDGNDVWMGRTISEDSRSGYETFKVIGGWSTPNSKLQINRQVIVDSDNRSGYSGIFSVEGKSCINRCFYVELIRGREQETRVWWTSNSIVVFCGTSGTYGTGSWPDGADINLMPI

SEQ ID NO: 14743 - protein, 469 aa, synthetic construct; identical to SEQ ID NO: 14730
  REGION 1..469: note = neuraminidase__InfluenzaA__ABC84574

SEQ ID NO: 14744 - protein, 469 aa, synthetic construct; identical to SEQ ID NO: 14730
  REGION 1..469: note = neuraminidase__InfluenzaA__ABC85757

SEQ ID NO: 14745 - protein, 469 aa, synthetic construct; identical to SEQ ID NO: 14741
  REGION 1..469: note = neuraminidase__InfluenzaA__ABC85768

SEQ ID NO: 14746 - protein, 469 aa, synthetic construct; identical to SEQ ID NO: 14730
  REGION 1..469: note = neuraminidase__InfluenzaA__ABC85779

SEQ ID NO: 14747 - protein, 469 aa, synthetic construct; identical to SEQ ID NO: 14730
  REGION 1..469: note = neuraminidase__InfluenzaA__ABC85790

SEQ ID NO: 14748 - protein, 469 aa, synthetic construct; identical to SEQ ID NO: 14714
  REGION 1..469: note = neuraminidase__InfluenzaA__ABC85801

SEQ ID NO: 14749 - protein, 469 aa, synthetic construct; identical to SEQ ID NO: 14714
  REGION 1..469: note = neuraminidase__InfluenzaA__ABC85812

SEQ ID NO: 14750 - protein, 469 aa, synthetic construct; identical to SEQ ID NO: 14741
  REGION 1..469: note = neuraminidase__InfluenzaA__ABC85823

SEQ ID NO: 14751 - protein, 469 aa, synthetic construct; identical to SEQ ID NO: 14713
  REGION 1..469: note = neuraminidase__InfluenzaA__ABC85834

SEQ ID NO: 14752 - protein, 469 aa, synthetic construct; identical to SEQ ID NO: 14714
  REGION 1..469: note = neuraminidase__InfluenzaA__ABC85845

SEQ ID NO: 14753 - protein, 469 aa, synthetic construct; identical to SEQ ID NO: 14741
  REGION 1..469: note = neuraminidase__InfluenzaA__ABC85856

SEQ ID NO: 14754 - protein, 469 aa, synthetic construct; identical to SEQ ID NO: 14713
  REGION 1..469: note = neuraminidase__InfluenzaA__ABC85867

SEQ ID NO: 14755 - protein, 469 aa, synthetic construct; identical to SEQ ID NO: 14712
  REGION 1..469: note = neuraminidase__InfluenzaA__ABC85900

SEQ ID NO: 14756 - protein, 469 aa, synthetic construct
  REGION 1..469: note = neuraminidase__InfluenzaA__ABC85911
MNPNQKIITIGSVSLTIATICFLMQIAILVTTVTLHFKQYECNSPPNNQVMLCEPTIIERNITEIVYLTNTTIEKEICPKLAEYRNWSKPQCNITGFAPFSKDNSIRLSAGGDIWVTREPYVSCDPDKCYQFALGQGTTLNNGHSNDTVHDRTPYRTLLMNELGVPFHLGTRQVCIAWSSSSCHDGKAWLHVCVTGDDENATASFIYNGRLVDSIGSWSKKILRTQESECVCINGTCTVVMTDGSASGKADTKILFIEEGKIVHISTLSGSAQHVEECSCYPRYPGVRCVCRDNWKGSNRPIVDINVKDYSIVSSYVCSGLVGDTPRKNDSFSSSHCLDPNNEEGGHGVKGWAFDDGNDMWMGRTISEKLRSGYETFKVIEGWSKPNSKLQTNRQVIVERGNRSGYSGIFSVEGKSCINRCFYVELIRGRKEETEVWWTSNSIVVFCGTSGTYGTGSWPDGADINLMPI

SEQ ID NO: 14757 - protein, 469 aa, synthetic construct
  REGION 1..469: note = neuraminidase__InfluenzaA__ABC85922
MNPNQKIITIGSVSLTIATICFLMQIAILVTTVTLHFKQYECNSPPNNQVMLCEPTTIERNITEIVYLTNTTIEKEICPKLAEYRNWSKPQCNITGFAPFSKDNSIRLSAGGDIWVTREPYVSCDSDKCYQFALGQGTTLNNGHSNDTVHDRTPYRTLLMNELGVPFHLGTRQVCIAWSSSSCHDGKAWLHVCVTGDDENATASFIYNGRLVDSIGSWSKKILRTQESECVCINGTCTVVMTDGSASGKADTKILFIEEGKIVHISTLSGSAQHVEECSCYPRYPGVRCVCRDNWKGSNRPIVDINVKDYSIVSSYVCSGLVGDTPRKNDSFSSSHCLDPNNEEGGHGVKGWAFDDGNDVWMGRTISEKLRSGYETFKVIEGWSKPNSKLQTNRQVIVERGNRSGYSGIFSVEGKSCINRCFYVELIRGRKEETEVWWTSNSIVVFCGTSGTYGTGSWPDGADINLMPI

SEQ ID NO: 14758 - protein, 469 aa, synthetic construct; identical to SEQ ID NO: 14166
  REGION 1..469: note = neuraminidase__InfluenzaA__ABC85933

SEQ ID NO: 14759 - protein, 469 aa, synthetic construct
  REGION 1..469: note = neuraminidase__InfluenzaA__ABC85955
MNPNQKIITIGSVSLTIATICFLMQIAILVTTVTLHFKQYECNSPPNNQVMLCEPTIIERNITEIVYLTNTTIEKEICPKLAEYRNWSKPQCNITGFAPFSKDNSIRLSAGGDIWVTREPYVSCDPDKCYQFALGQGTTLNNGHSNDTVHDRTPYRTLLMNELGVPFHLGTRQVCIAWSSSSCHDGKAWLHVCVTGDDENATASFIYNGRLVDSIGSWSKKILRTQESECVCINGTCTVVMTDGSASGKADTKILFIEEGKIVHISTLSGSAQHVEECSCYPRYPGVRCVCRDNWKGSNRPIVDINVKDYSIVSSYVCSGLVGDTPRKNDSFSSSHCLDPNNEEGGHGVKGWAFDDGNDVWMGRTISEKLRSGYETFKVIEGWSKPNSKLQTNRQVIVERGNRSGYSGIFSVEGKSCINRCFYVELIRGRKEETEVWWTSNSIVVFCGTSGTYGTGSWPDGADINRMPI

SEQ ID NO: 14760 - protein, 469 aa, synthetic construct; identical to SEQ ID NO: 14166
  REGION 1..469: note = neuraminidase__InfluenzaA__ABC85966

SEQ ID NO: 14761 - protein, 469 aa, synthetic construct; identical to SEQ ID NO: 14166
  REGION 1..469: note = neuraminidase__InfluenzaA__ABC85977

SEQ ID NO: 14762 - protein, 469 aa, synthetic construct
  REGION 1..469: note = neuraminidase__InfluenzaA__ABC85988
MNPNQKIITIGSVSLTIATICFLMQIAILVTTVTLHFKQYECNSPPNNQVMLCEPTIIERNITEIVYLTNTTIEKGICPKLAEYRNWSKPQCNITGFAPFSKDNSIRLSAGGDIWVTREPYVSCDPDKCYQFALGQGTTLNNGHSNDTVHDRTPYRTLLMNELGVPFHLGTRQVCIAWSSSSCHDGKAWLHVCVTGDDENATASFIYNGRLVDSIGSWSKKILRTQESECVCINGTCTVVMTDGSASGKADTKILFIEEGKIVHISTLSGSAQHVEECSCYPRYPGVRCVCRDNWKGSNRPIVDINVKDYSIVSSYVCSGLVGDTPRKNDSFSSSHCLDPNNEEGGHGVKGWAFDDGNDVWMGRTISEKLRSGYETFKVIEGWSKPNSKLQTNRQVIVERGNRSGYSGIFSVEGKSCINRCFYVELIRGRKEETEVWWTSNSIVVFCGTSGTYGTGSWPDGADINLMPI

SEQ ID NO: 14763 - protein, 469 aa, synthetic construct; identical to SEQ ID NO: 14327
  REGION 1..469: note = neuraminidase__InfluenzaA__ABC85999

SEQ ID NO: 14764 - protein, 469 aa, synthetic construct; identical to SEQ ID NO: 14327
  REGION 1..469: note = neuraminidase__InfluenzaA__ABC86010

SEQ ID NO: 14765 - protein, 469 aa, synthetic construct
  REGION 1..469: note = neuraminidase__InfluenzaA__ABC86021
MNPNQKIITIGSVSLTISTICFFMQIAILITTVTLHFKQYEFNSPPNNQVMLCEPTIIERNITEIVYLTNTTIEKEICPKLAEYRNWSKPQCDITGFAPFSKDNSIRLSAGGDIWVTREPYVSCDPDKCYQFALGQGTTLNNVHSNDTVHDRTPYRTLLMNELGVPFHLGTKQVCIAWSSSSCHDGKAWLHVCVTGDDKNATASFIYNGRLVDSIVSWSKEILRTQESECVCINGTCTVVMTDGSASGKADTKILFIEEGKIVHTSTLSGSAQHVEECSCYPRYPGVRCVCRDNWKGSNRPIVDINIKDYSIVSSYVCSGLVGDTPRKNDSSSSSHCLDPNNEEGGHGVKGWAFDDGNDVWMGRTISEKLRSGYETFKVIEGWSNPNSKLQINRQVIVDRGNRSGYSGIFSVEGKSCINRCFYVELIRGRKEETEVLWTSNSIVVFCGTSGTYGTGSWPDGANINLMPI

SEQ ID NO: 14766 - protein, 469 aa, synthetic construct; identical to SEQ ID NO: 14591
  REGION 1..469: note = neuraminidase__InfluenzaA__ABC86127

SEQ ID NO: 14767 - protein, 469 aa, synthetic construct; identical to SEQ ID NO: 14674
  REGION 1..469: note = neuraminidase__InfluenzaA__ABC86140

SEQ ID NO: 14768 - protein, 469 aa, synthetic construct; identical to SEQ ID NO: 14484
  REGION 1..469: note = neuraminidase__InfluenzaA__ABC86151

SEQ ID NO: 14769 - protein, 470 aa, synthetic construct
  REGION 1..470: note = neuraminidase__InfluenzaA__ABC86240
MNPNQKIITIGSISVAIGIISLILQIGNIISIWASHSIQTGSQNYTGICNQKIITYENRTWVNQTYVNINNTNVVAGKDKTSMTLAGNSSLCPIRGWAIYTKDNSIRIGSKGDVFVIREPFISCSHLECRTFFLTQGALLNDKHSNGTIKDRSPFRALMSCPLGEAPSPYNSRFESVAWSASACHDGLGWLTIGISGPDNGAVAVLKYNGIITETIKSWKKQILRTQESECVCVNGSCFTIMTDGPSNRAASYRIFKIEKGRVTKSIELDAPNYHYEECSCYPDTGTVMCVCRDNWHGSNRPWVSFNQNLDYQIGYICSGVFGDNPRPKDGEGSCNPVTVDGADGVKGFSYRYGNGVWIGRTKSNRLRKGFEMIWDPNGWTDTDSDFSMKQDVVAMTDWSGYSGSFVQHPELTGLDCMRPCFWVELVRGLPRENTTIWTSGSSISFCGVNSETANWSWPDGAELPFTIDK

SEQ ID NO: 14770 - protein, 469 aa, synthetic construct
  REGION 1..469: note = neuraminidase__InfluenzaA__ABC97377
MNPNQKIITIGSVSLTIATICFLMQIAILVTTVTLHFKQYECDSPANNQVMPCEPIIIERNITEIVYLTNTTIEKEICPKLVEYRNWSKPQCKITGFAPFSKDNSIRLSAGGDIWVTREPYVSCDPGKCYQFALGQGTTLDNKHSNDTIHDRTPHRTLLMNELGVPFHLGTRQVCIAWSSSSCHDGKAWLHVCVTGYDKNATASFIYDGRLVDSIGSWSQNILRTQESECVCINGTCTVVMTDGSASGSADTKILFIEEGKIVHISPLSGSAQHVEECSCYPRYPGVRCICRDNWKGSNRPVVDINVKDYSIDSSYVCSGLVGDTPRNNDRSSNSYCRNPNNEKGNHGVKGWAFDDGNDVWMGRTISEDSRSGYETFKVIGGWSTPNSKLQINRQVIVDSDNRSGYSGIFSVEGKSCINRCFYVELIRGREQETRVWWTSNSIVVFCGTSGTYGTGSWPDGADINLMPI

SEQ ID NO: 14771 - protein, 469 aa, synthetic construct; identical to SEQ ID NO: 14137
  REGION 1..469: note = neuraminidase__InfluenzaA__ABD15452

SEQ ID NO: 14772 - protein, 469 aa, synthetic construct; identical to SEQ ID NO: 14225
  REGION 1..469: note = neuraminidase__InfluenzaA__ABD15463

SEQ ID NO: 14773 - protein, 469 aa, synthetic construct; identical to SEQ ID NO: 14145
  REGION 1..469: note = neuraminidase__InfluenzaA__ABD15474

SEQ ID NO: 14774 - protein, 469 aa, synthetic construct
  REGION 1..469: note = neuraminidase__InfluenzaA__ABD15485
MNPNQKIITIGSVSLTIATICFLMQIAILVTTVTLHFKQHECNSPPNNQVMLCEPTIIERNITEIVYLTNTTIEKEICPKLAEYRNWSKPQCNITGFAPFSKDNSIRLSAGGDIWVTREPYVSCDPDKCYQFALGQGTTLNNGHSNDTVHDRTPYRTLLMNELGVPFHLGTRQVCIAWSSSSCHDGKAWLHVCVTGDDKNATASFIYNGRLVDSIGSWSKKILRTQESECVCINGTCTVVMTDGSASGKADTKILFIEEGKIVHISTLSGSAQHVEECSCYPRYPGVRCVCRDNWKGSNRPIVDINVKDYSIVSSYVCSGLVGDTPRKNDSFSSSHCLDPNNEEGGHGVKGWAFDDGNDVWMGRTISEKLRSGYETFKVIEGWSKPNSKLQINRQVIVERGNRSGYSGIFSVEGKSCINRCFYVELIRGRKEETEVWWTSNSIVVFCGTSGTYGTGSWPDGANINLMPI

SEQ ID NO: 14775 - protein, 469 aa, synthetic construct; identical to SEQ ID NO: 14225
  REGION 1..469: note = neuraminidase__InfluenzaA__ABD15496

SEQ ID NO: 14776 - protein, 469 aa, synthetic construct; identical to SEQ ID NO: 14145
  REGION 1..469: note = neuraminidase__InfluenzaA__ABD15507

SEQ ID NO: 14777 - protein, 470 aa, synthetic construct
  REGION 1..470: note = neuraminidase__InfluenzaA__ABD15518
MNPNQKIITIGSISIAIGIISLMLQIGNIISIWASHSIQTGSQNHTGICNQRIITYENSTWVNHTYVNINNTNVVAGKDKTSVTLAGNSSLCSISGWAIYTKDNSIRIGSKGDVFVIREPFISCSHLECRTFFLTQGALLNDKHSNGTVKDRSPYRALMSCPLGEAPSPYNSKFESVAWSASACHDGMGWLTIGISGPDNGAVAVLKYNGIITETIKSWKKRILRTQESECVCVNGSCFTIMTDGPSNGGASYKIFKIEKGKVTKSIELNAPNFHYEECSCYPDTGTVMCVCRDNWHGSNRPWVSFNQNLDYQIGYICSGVFGDNPRPKDGKGSCNPVTVDGADGVKGFSYKYGNGVWIGRTKSNRLRKGFEMIWDPNGWTDTDSDFSVKQDVVAITDWSGYSGSFVQHPELTGLDCIRPCFWVELVRGLPRENTTIWTSGSSISFCGVDSDTANWSWPDGAELPFTIDK

SEQ ID NO: 14778 - protein, 469 aa, synthetic construct; identical to SEQ ID NO: 14327
  REGION 1..469: note = neuraminidase__InfluenzaA__ABD15529

SEQ ID NO: 14779 - protein, 469 aa, synthetic construct; identical to SEQ ID NO: 14514
  REGION 1..469: note = neuraminidase__InfluenzaA__ABD15551

SEQ ID NO: 14780 - protein, 469 aa, synthetic construct
  REGION 1..469: note = neuraminidase__InfluenzaA__ABD15562
MNPNQKIITIGSVSLTIATICFLMQIAILVTTVTLHFKQYECSSPPNNQVMLCEPTIIERNITEIVYLTNTTIEKEICPKLAEYRNWSKPQCKITGFAPFSKDNSIRLSAGGDIWVTREPYVSCDPDKCYQFALGQGTTLNNRHSNDTVHDRTPYRTLLMNELGVPFHLGTKQVCIAWSSSSCHDGKAWLHVCVTGHDENATASFIYDGRLVDSIGSWSKKILRTQESECVCINGTCTIVMTDGSASGRADTKILFIEEGKIVHISPLSGSAQHVEECSCYPRYPGVRCVCRDNWKGSNRPIVDINVKDYSIVSSYVCSGLVGDTPRKNDSSSSSHCLNPNNEEGGHGVKGWAFDDGNDVWMGRTISEKFRSGYETFKVIEGWSKPNSKLQINRQVIVDRGNRSGYSGIFSVEGKSCINRCFYVELIRGRKQETEVWWTSNSIVVFCGTSGTYGTGSWPDGADINLMPI

SEQ ID NO: 14781 - protein, 469 aa, synthetic construct
  REGION 1..469: note = neuraminidase__InfluenzaA__ABD15573
MNPNQKIITIGSVSLTIATICFLMQIAILVTTVTLHFKQYECNSPPNNQVMLCEPTIIERNITEIVYLTNTTIEKEICPKLAEYRNWSKPQCKITGFAPFSKDNSIRLSAGGDIWVTREPYVSCDPDKCYQFALGQGTTLNNGHSNDTVHDRTPYRTLLMNELGVPFHLGTKQVCMAWSSSSCHDGKAWLHVCVTGHDENATASFIYDGRLVDSIGSWSKKILRTQESECVCINGTCTVVMTDGSASGRADTKILFIEEGKIVHISQLSGSAQHVEECSCYPRYPGVRCVCRDNWKGSNRPIVDINVKDHSIVSSYVCSGLVGDTPRKNDSSSSSHCLNPNNEEGGHGVKGWAFDDGNDVWMGRTISEKLRSGYETFKVIEGWSKPNSKLQINRQVIVDRGNRSGYSGIFSVEGKSCINRCFYVELIRGRKQETEVWWTSNSIVVFCGTSGTYGTGSWPDGADINLMPI

SEQ ID NO: 14782 - protein, 469 aa, synthetic construct
  REGION 1..469: note = neuraminidase__InfluenzaA__ABD15584
MNPNQKIITIGSVSLTIATICFLMQIAILVTTVTLHFKQYECSSPPNNQVMLCEPTIIERNITEIVYLTNTTIEKEICPKLAEYRNWSKPQCKITGFAPFSKDNSIRLSAGGDIWVTREPYVSCDPDKCYQFALGQGTTLNNRHSNDTVHDRTPYRTLLMNELGVPFHLGTKQVCIAWSSSSCHDGKAWLHVCVTGHDENATASFIYDGRLVDSIGSWSKKILRTQESECVCINGTCTVVMTDGSASGRADTKILFIEEGKIVHISPLSGSAQHVEECSCYPRYPGVRCVCRDNWKGSNRPIVDINVKDYSIVSSYVCSGLVGDTPRKNDSSSSSHCLNPNNEEGGHGVKGWAFDDENDVWMGRTISEKFRSGYETFKVIEGWSKPNSKLQINRQVIVDRGNRSGYSGIFSVEGKSCINRCFYVELIRGRKQETEVWWTSNSIIVFCGTSGTYGTGSWPDGADINLMPI

SEQ ID NO: 14783 - protein, 469 aa, synthetic construct; identical to SEQ ID NO: 14514
  REGION 1..469: note = neuraminidase__InfluenzaA__ABD15595

SEQ ID NO: 14784 - protein, 469 aa, synthetic construct; identical to SEQ ID NO: 14514
  REGION 1..469: note = neuraminidase__InfluenzaA__ABD15606

SEQ ID NO: 14785 - protein, 469 aa, synthetic construct; identical to SEQ ID NO: 14514
  REGION 1..469: note = neuraminidase__InfluenzaA__ABD15617

SEQ ID NO: 14786 - protein, 469 aa, synthetic construct; identical to SEQ ID NO: 14573
  REGION 1..469: note = neuraminidase__InfluenzaA__ABD15639

SEQ ID NO: 14787 - protein, 469 aa, synthetic construct; identical to SEQ ID NO: 14730
  REGION 1..469: note = neuraminidase__InfluenzaA__ABD15650

SEQ ID NO: 14788 - protein, 469 aa, synthetic construct; identical to SEQ ID NO: 14253
  REGION 1..469: note = neuraminidase__InfluenzaA__ABD15661

SEQ ID NO: 14789 - protein, 469 aa, synthetic construct; identical to SEQ ID NO: 14730
  REGION 1..469: note = neuraminidase__InfluenzaA__ABD15683

SEQ ID NO: 14790 - protein, 469 aa, synthetic construct; identical to SEQ ID NO: 14253
  REGION 1..469: note = neuraminidase__InfluenzaA__ABD15694

SEQ ID NO: 14791 - protein, 469 aa, synthetic construct; identical to SEQ ID NO: 14730
  REGION 1..469: note = neuraminidase__InfluenzaA__ABD15705

SEQ ID NO: 14792 - protein, 469 aa, synthetic construct; identical to SEQ ID NO: 14730
  REGION 1..469: note = neuraminidase__InfluenzaA__ABD15727

SEQ ID NO: 14793 - protein, 469 aa, synthetic construct
  REGION 1..469: note = neuraminidase__InfluenzaA__ABD15749
MNPNQKIITIGSVSLTIATICFLMQIAVLVTTVTLHFKQYECNSPPNNQVMLCEPTIIERNITEIVYLTNTTIEKEICPKLAEYRNWSKPQCNITGFAPFSKDNSIRLSAGGDIWVTREPYVSCDPDKCYQFALGQGTTLNNGHSNDTVHDRTPYRTLLMNELGVPFHLGTKQVCIAWSSSSCHDGKAWLHVCVTGDDENATASFIYNGRLVDSIGSWSKKILRTQESECVCINGTCTVVMTDGSASGKADTKILFIEEGKIVHTSLLSGSAQHVEECSCYPRYPGVRCVCRDNWKGSNRPIVDINVKDYSIVSSYVCSGLVGDTPRKNDSSSSSHCLDPNNEEGGHGVKGWAFDDGNDVWMGRTISEKLRSGYETFKVIEGWSKPNSKLQINRQVIVDRGNRSGYSGIFSVEGKSCINRCFYVELIRGRKQETEVLWTSNSIVVFCGTSGTYGTGSWPDGADINLMPI

SEQ ID NO: 14794 - protein, 469 aa, synthetic construct; identical to SEQ ID NO: 14793
  REGION 1..469: note = neuraminidase__InfluenzaA__ABD15760

SEQ ID NO: 14795 - protein, 469 aa, synthetic construct; identical to SEQ ID NO: 14730
  REGION 1..469: note = neuraminidase__InfluenzaA__ABD15771

SEQ ID NO: 14796 - protein, 469 aa, synthetic construct; identical to SEQ ID NO: 14730
  REGION 1..469: note = neuraminidase__InfluenzaA__ABD15782

SEQ ID NO: 14797 - protein, 469 aa, synthetic construct; identical to SEQ ID NO: 14730
  REGION 1..469: note = neuraminidase__InfluenzaA__ABD15793

SEQ ID NO: 14798 - protein, 469 aa, synthetic construct; identical to SEQ ID NO: 14714
  REGION 1..469: note = neuraminidase__InfluenzaA__ABD16306

SEQ ID NO: 14799 - protein, 469 aa, synthetic construct
  REGION 1..469: note = neuraminidase__InfluenzaA__ABD16317
MNPNQKIITIGSVSLTISTICFFMQIAILITTVTLHFKQYEFNSPPNNQVMLCEPTIIERNITEIVYLTNTTIEKEICPKLAEYRNWSKPQCNITGFAPFSKDNSIRLSAGGDIWVTREPYVSCDPDKCYQFALGQGTTLNNVHSNDTVRDRTPYRTLLMNELGVPFHLGTKQVCIAWSSSSCHDGKAWLHVCVTGDDKNATASFIYNGRLVDSIVSWSKEILRTQESECVCINGTCTVVMTDGSASGKADTKILFIEEGKIVHTSTLSGSAQHVEECSCYPRYPGVRCVCRDNWKGSNRPIVDINIKDYSIVSSYVCSGLVGDTPRKNDSSSSSHCLDPNNEEGGHGVKGWAFDDGNDVWMGRTISEKLRSGYETFKVIEGWSNPNSKLQINRQVIVDRGNRSGYSGIFSVEGKSCINRCFYVELIRGRKEETEVLWTSNSIVVFCGTSGTYGTGSWPDGADINLMPI

SEQ ID NO: 14800 - protein, 469 aa, synthetic construct; identical to SEQ ID NO: 14714
  REGION 1..469: note = neuraminidase__InfluenzaA__ABD16328

SEQ ID NO: 14801 - protein, 469 aa, synthetic construct
  REGION 1..469: note = neuraminidase__InfluenzaA__ABD16339
MNPNQKIITIGSVSLTISTICFFMQIAILITTVTLHFKQYEFNSPPNNQVMLCEPTIIERNITEIVYLTNTTIEKEICPKLAEYRNWSKPQCDITGFAPFSKDNSIRLSAGGDIWVTREPYVSCDPDKCYQFALGQGTTLNNVHSNDTVHDRTPYRTLLMNELGVPFHLGTKQVCIAWSSSSCHDGKAWLHVCVTGDDKNATASFIYNGRLVDSIVSWSKKILRTQESECVCINGTCTVVMTDGSASGKADTKILFIEEGKIVHTSTLSGSAQHVEECSCYPRYPGVRCVCRDNWKGSNRPIVDINIKDYSIVSSYVCSGLVGDTPRKNDSSSSGHCLDPNNEEGGHGVKGWAFDDGNDVWMGRTISEKLRSGYETFKVIEGWSNPNSKLQINRQVIVDRGNRSGYSGIFSVEGKSCINRCFYVELIRGRKEETEVLWTSNSIVVFCGTSGTYGTGSWPDGADINLMPI

SEQ ID NO: 14802 - protein, 469 aa, synthetic construct
  REGION 1..469: note = neuraminidase__InfluenzaA__ABD16361
MNPNQKIITIGSVSLTISTICFFMQIAILITTVTLHFKQYEFNSPPNNQVMLCEPTIIERNITEIVYLTNTTIEKEICPKLAEYRNWSKPQCDITGFAPFSKDNSIRLSAGGDIWVTREPYVSCDPDKCYQFALGQGTTLNNVHSNDTVHDRTPYRTLLMNELGVPFHLGTKQVCIAWSSSSCHDGKAWLHVCVTGDDKNATASFIYNGKLVDSIVSWSKKILRTQESECVCINGTCTVVMTDGSASGKADTKILFIEEGKIVHTSTLSGSAQHVEECSCYPRYPGVRCVCRDNWKGSNRPIVDINIKDYSIVSSYVCSGLVGDTPRKNDSSSSSHCLDPNNEEGGHGVKGWAFDDGNDVWMGRTISEKLRSGYETFKVIEGWSNPNSKLQINRQVIVDRGNRSGYSGIFSVEGKSCINRCFYVELIRGRKEETEVLWTSNSIVVFCGTSGTYGTGSWPDGADINLMPI

SEQ ID NO: 14803 - protein, 469 aa, synthetic construct; identical to SEQ ID NO: 14714
  REGION 1..469: note = neuraminidase__InfluenzaA__ABD16475

SEQ ID NO: 14804 - protein, 469 aa, synthetic construct; identical to SEQ ID NO: 14714
  REGION 1..469: note = neuraminidase__InfluenzaA__ABD16486

SEQ ID NO: 14805 - protein, 469 aa, synthetic construct; identical to SEQ ID NO: 14741
  REGION 1..469: note = neuraminidase__InfluenzaA__ABD16497

SEQ ID NO: 14806 - protein, 469 aa, synthetic construct; identical to SEQ ID NO: 14714
  REGION 1..469: note = neuraminidase__InfluenzaA__ABD16508

SEQ ID NO: 14807 - protein, 469 aa, synthetic construct
  REGION 1..469: note = neuraminidase__InfluenzaA__ABD16519
MNPNQKIITIGSVSLTISTICFFMQIAILITTVTLHFKQYEFNSPPNNQVMLCEPTIIERNITEIVYLTNTTIEKEICPKLAEYRNWSKPQCDITGFAPFSKDNSIRLSAGGDIWVTREPYVSCDPDKCYQFALGQGTTLNNVHSNDTVHDRTPYRTLLMNELGVPFHLGTKQVCIAWSSSSCHDGKAWLHVCVTGDDKNATASFIYNGRLVDSIVSWSKDILRTQESECVCINGTCTVVMTDGSASGKADTKILFIEEGKIVHTSTLSGSAQHVEECSCYPRYPGVRCVCRDNWKGSNRPIVDINIKDYSIVSSYVCSGLVGDTPRKTDSSSSSHCLDPNNEEGGHGVKGWAFDDGNDVWMGRTISEKLRLGYETFKVIEGWSNPNSKLQINRQVIVDRGNRSGYSGIFSVEGKSCINRCFYVELIRGRKEETEVLWTSNSIVVFCGTSGTYGTGSWPDGADINLMPI

SEQ ID NO: 14808 - protein, 469 aa, synthetic construct
  REGION 1..469: note = neuraminidase__InfluenzaA__ABD16530
MNPNQKIITIGSVSLTIATICFLMQIAILVTTVTLHFKQHECNSPPNNQVMLCEPTIIERNITEIVYLTNTTIEKEICPKLVEYRNWSKPQCNITGFAPFSKDNSIRLSAGGDIWVTREPYVSCDPDKCYQFALGQGTTLNNGHSNDTVHDRTPYRTLLMNELGVPFHLGTRQVCIAWSSSSCHDGKAWLHVCVTGDDKNATASFIYNGRLVDSIGSWSKKILRTQESECVCINGTCTVVMTDGSASGKADTKILFIEEGKIVHISTLSGSAQHVEECSCYPRYPGVRCVCRDNWKGSNRPIVDINVKDYSIVSSYVCSGLVGDTPRKNDSFSSSHCLDPNNEEGGHGVKGWAFDDGNDVWMGRTISEKLRSGYETFKVIEGWSKPNSKLQINRQVIVERGNRSGYSGIFSVEGKRCINRCFYVELIRGRKEETEVWWTSNSIVVFCGTSGTYGTGSWPDGADINLMPI

SEQ ID NO: 14809 - protein, 469 aa, synthetic construct; identical to SEQ ID NO: 14591
  REGION 1..469: note = neuraminidase__InfluenzaA__ABD16541

SEQ ID NO: 14810 - protein, 469 aa, synthetic construct; identical to SEQ ID NO: 14714
  REGION 1..469: note = neuraminidase__InfluenzaA__ABD16552

SEQ ID NO: 14811 - protein, 469 aa, synthetic construct; identical to SEQ ID NO: 14713
  REGION 1..469: note = neuraminidase__InfluenzaA__ABD16563

SEQ ID NO: 14812 - protein, 469 aa, synthetic construct
  REGION 1..469: note = neuraminidase__InfluenzaA__ABD16574
MNPNQKIITIGSVSLTIATICFLMQIAILVTTVTLHFKQYECSSPPNNQVMPCEPTIIERNITEIVYLTNTTIEKEICPKLVEYRNWSKPQCKITGFAPFSKDNSIRLSAGGDIWVTREPYVSCDPGKCYQFALGQGTTLNNRHSNDTVHDRTPYRTLLMNELGVPFHLGTKQVCIAWSSSSCHDGKAWLHVCVTGHDENATASFIYDGRLVDSIGSWSKNILRTQESECVCINGTCTVVMTDGSASERADTKILFIEEGKIVHISPLSGSAQHVEECSCYPRYPGVRCVCRDNWKGSNRPIVDINVKDYSIVSSYVCSGLVGDTPRKNDRSSSSYCRNPNNEKGSHGVKGWAFDDGNDVWMGRTIGEELRSGYETFKVIGGWSTPNSKLQINRQVIVDSGNRSGYSGIFSVEGKSCINRCFYVELIRGRKKETRVWWTSNSIVVFCGTSGTYGTGSWPDGADINLMPI

SEQ ID NO: 14813 - protein, 469 aa, synthetic construct
  REGION 1..469: note = neuraminidase__InfluenzaA__ABD16585
MNPNQKIITIGSVSLTIATICFLMQIAILVTTVTLHFKQYECSSPPNNQVMPCEPTIIERNITEIVYLTNTTIEKEICPKLVEYRNWSKPQCKITGFAPFSKDNSIRLSAGGDIWVTREPYVSCDPGKCYQFALGQGTTLNNRHSNDTVHDRTPYRTLLMNELGVPFHLGTKQVCIAWSSSSCHDGKAWLHVCVTGHDKNATASFIYDGRLVDSIGSWSKNILRTQESECVCINGTCTVVMTDGSASERADTKILFIEEGKIVHISPLSGSAQHVEECSCYPRYPGVRCVCRDNWKGSNRPIVDINVKDYSIVSSYVCSGLVGDTPRKNDRSSSSYCRNPNNEKGSHGVKGWAFDDGNDVWMGRTIGEELRSGYETFKVIGGWSTPNSKLQINRQVIVDSGNRSGYSGIFSVEGKSCINRCFYVELIRGREQETRVWWTSNSIVVFCGTSGTYGTGSWPDGADINLMPI

SEQ ID NO: 14814 - protein, 469 aa, synthetic construct
  REGION 1..469: note = neuraminidase__InfluenzaA__ABD16721
MNPNQKIITIGSVSLTIATICFLMQIAILVTTVTLHFKQYECSSPPNNQVMPCEPIIIERNITKIVYLTNTTIEKEICPKLVEYRNWSKPQCKITGFAPFSKDNSIRLSAGGDIWVTREPYVSCDPGKCYQFALGQGTTLNNKHSNDTIHDRTPYRTLLMNELGVPFHLGTKQVCIAWSSSSCHDGKAWLHVCVTGHDKNATASFIYDGRLVDSIGSWSKNILRTQESECVCINGTCTVVMTDGSASERADTKILFIEEGKIVHISPLSGSAQHVEECSCYPRYPGVRCVCRDNWKGSNRPIVDINVKDYSIVSSYVCSGLVGDTPRKNDRSSSSYCQNPNNEKGNHGVKGWAFDDGNDVWMGRTIGEELRSGYETFKVIGGWSTPNSKLQINRQVIVDSKNRSGYSGIFSVEGKSCINRCFYVELIRGREQETRVWWTSNSIVVFCGTSGTYGTGSWPDGADINLMPI

SEQ ID NO: 14815 - protein, 469 aa, synthetic construct; identical to SEQ ID NO: 14484
  REGION 1..469: note = neuraminidase__InfluenzaA__ABD16732

SEQ ID NO: 14816 - protein, 469 aa, synthetic construct
  REGION 1..469: note = neuraminidase__InfluenzaA__ABD16743
MNPNQKIITIGSVSLTIATICFLMQIAILVTTVTLHFKQYECDSPANNQVMPCEPIIIERNITEIVYLTNTTIEKEICPKLVEYRNWSKPQCKITGFAPFSKDNSIRLSAGGDIWVTREPYVSCDPGKCYQFALGQGTTLDNKHSNDTIHDRTPHRTLLMNELGVPFHLGTRQVCIAWSSSSCHDGKAWLHVCVTGYDKNATASFIYDGRLVDSIGSWSQNILRTQESECVCINGTCTVVMTDGSASGRADTKILFIEEGKIVHTSPLSGSAQHVEECSCYPRYPGVRCICRDNWKGSNRPVVDINVKDYSIDSSYVCSGLVGDTPRNNDRSSSSYCRNPNNEKGTHGVKGWAFDDGNDVWMGRTISEDSRSGYETFKVIGGWSTPNSKLQMNRQVIVDSDNRSGYSGIFSVEGKSCINRCFYVELIRGREQETRVWWTSNSIVVFCGTSGTYGTGSWPDGADINLMPI

SEQ ID NO: 14817 - protein, 469 aa, synthetic construct; identical to SEQ ID NO: 14576
  REGION 1..469: note = neuraminidase__InfluenzaA__ABD16754

SEQ ID NO: 14818 - protein, 469 aa, synthetic construct; identical to SEQ ID NO: 14674
  REGION 1..469: note = neuraminidase__InfluenzaA__ABD16765

SEQ ID NO: 14819 - protein, 469 aa, synthetic construct; identical to SEQ ID NO: 14118
  REGION 1..469: note = neuraminidase__InfluenzaA__ABD17326

SEQ ID NO: 14820 - protein, 469 aa, synthetic construct
  REGION 1..469: note = neuraminidase__InfluenzaA__ABD38137
MNPNQKIITIGSVSLTIATICFLMQIAILVTTVTLHFKQYECNSPPNNQVMLCEPTIIERNITEIVYLTNTTIEKEICPKLAEYRNWSKPQCNITGFAPFSKDNSIRLSAGGDIWVTREPYVSCDPDKCYQFALGQGTTLNNGHSNDTVHDRTPYRTLLMNELGVPFHLGTRQVCIAWSSSSCHDGKAWLHVCVTGDDENATASFIYNGRLVDSIGSWSKKILRTQESECVCINGTCTVVMTDGSASGKADTKILFIEEGKIVHISTLSGSAQHVEECSCYPRYPGVRCVCRDNWKGSNRPIIDINVKDYSIVSSYVCSGLVGDTPRKNDSFSSSHCLDPNNEEGGHGVKGWAFDDGNDVWMGRTISEKLRSGYETFKVIEGWSKPNSKLQTNRQVIVERGNRSGYSGIFSVEGKSCINRCFYVELIRGRKEEPEVWWTSNSIVVFCGTPGTYGTGSWPDGADINLMPI

SEQ ID NO: 14821 - protein, 470 aa, synthetic construct; identical to SEQ ID NO: 14386
  REGION 1..470: note = neuraminidase__InfluenzaA__ABD60782

SEQ ID NO: 14822 - protein, 469 aa, synthetic construct
  REGION 1..469: note = neuraminidase__InfluenzaA__ABD60793
MNPNQKIITIGSVSLTIATICFLMQIAILVTTVTLHFKQYECDSPVNNQVMPCEPIIIERNITEIVYLTNTTIEKEICPKLVEYRNWSKPQCKITGFAPFSKDNSIRLSAGGDIWVTREPYVSCDPGKCYQFALGQGTTLDNKHSNDTIHDRTPHRTLLMNELGVPFHLGTRQVCIAWSSSSCHDGKAWLHVCVTGYDKNATASFIYDGRLVDSIVSWSQNILRTQESECVCINGTCTVVMTDGSASERADTKILFIEEGKIVHISPLSGSAQHVEECSCYPRYPGVRCICRDNWKGSNRPVVDINVKDYSIDSSYVCSGLVGDTPRNNDRSSNSYCRNPNNEKGNHGVKGWAFDDGNDLWMGRTISEDSRSGYETFKVIGGWSTPNSKLQINRQVIVDSDNRSGYSGIFSVEGKSCINRCFYVELIRGREQETRVWWTSNSIIVFCGTSGTYGTGSWPDGADINLMPI

SEQ ID NO: 14823 - protein, 469 aa, synthetic construct; identical to SEQ ID NO: 14519
  REGION 1..469: note = neuraminidase__InfluenzaA__ABD60804

SEQ ID NO: 14824 - protein, 469 aa, synthetic construct; identical to SEQ ID NO: 14712
  REGION 1..469: note = neuraminidase__InfluenzaA__ABD60815

SEQ ID NO: 14825 - protein, 469 aa, synthetic construct; identical to SEQ ID NO: 14714
  REGION 1..469: note = neuraminidase__InfluenzaA__ABD60826

SEQ ID NO: 14826 - protein, 469 aa, synthetic construct; identical to SEQ ID NO: 14793
  REGION 1..469: note = neuraminidase__InfluenzaA__ABD60837

SEQ ID NO: 14827 - protein, 469 aa, synthetic construct
  REGION 1..469: note = neuraminidase__InfluenzaA__ABD60848
MNPNQKIITIGSVSLTIATICFLMQVAILVTTVTLHFKQYECNSPPNNQVMLCEPTIIERNITEIVYLTNTTIEKEICPKLAEYRNWSKPQCNITGFAPFSKDNSIRLSAGGDIWVTREPYVSCDPDKCYQFALGQGTTLNNGHSNDTVHDRTPYRTLLMNELGVPFHLGTKQVCIAWSSSSCHDGKAWLHVCVTGDDENATASFIYNGRLVDSIGSWSKKILRTQESECVCINGTCTVVMTDGSASGKADTKILFIEEGKIVHTSLLSGSAQHVEECSCYPRYPGVRCVCRDNWKGSNRPIVDINVKDYSIVSSYVCSGLVGDTPRKNDSSSSSHCLDPNNEEGGHGVKGWAFDDGNDVWMGRTISEKLRSGYETFKVIEGWSKPNSKLQINRQVIVDRGNRSGYSGIFSVEGKSCINRCFYVELIRGRKQETEVLWTSNSIVVFCGTSGTYGTGSWPDGADINLMPI

SEQ ID NO: 14828 - protein, 470 aa, synthetic construct
  REGION 1..470: note = neuraminidase__InfluenzaA__ABD60881
MNPNQKIITIGSISIAIGIISLMLQIGNIISIWASHSIQTGSQNHTGICNQRIITYENSTWVNHTYVNINNTNVVAGKDKTSVTLAGNSSLCSISGWAIYTKDNSIRIGSKGDVFVIREPFISCSHLECRTFFLTQGALLNDKHSNGTVKDRSPYRALMSCPLGEAPSPYNSKFESVAWSASACHDGMGWLTIGISGPDNGAVAVLKYNGIITETIKSWKKRILRTQESECVCVNGSCFTIMTDGPSNGAASYKIFKIEKGKVTKSIELNAPNFHYEECSCYPDTGTVMCVCRDNWHGSNRPWVSFNQNLDYQIGYICSGVFGDNPRPKDGEGSCNPVTVDGADGVKGFSYKYGNGVWIGRTKSNRLRKGFEMIWDPNGWTDTDSNFSVKQDVVAITDWSGYSGSFVQHPELTGLDCIRPCFWVELVRGLPRENTTIWTSGSSISFCGVNSDTANWSWPDGAELPFTIDK

SEQ ID NO: 14829 - protein, 470 aa, synthetic construct
  REGION 1..470: note = neuraminidase__InfluenzaA__ABD60892
MNPNQKIITIGSISIAIGIISLMLQIGNIISIWASHSIQTGSQNHTGICNQRVITYENSTWVNHTYVNINNTNVVAGKDKTSVTLAGNSSLCSISGWAIYTKDNSIRIGSKGDVFVIREPFISCSHLECRTFFLTQGALLNDKHSNGTVKDRSPYRALMSCPLGEAPSPYNSKFESVAWSASACHDGMGWLTIGISGPDNGAVAVLKYNGIITETIKSWKKRILRTQESECVCVNGSCFTIMTDGPSNGAASYKIFKIEKGKVTKSIELNAPNFHYEECSCYPDTGTVMCVCRDNWHGSNRPWVSFNQNLDYQIGYICSGVFGDNPRPKDGEGSCNPVTVDGADGVKGFSYKYGNGVWIGRTKSNRLRKGFEMIWDPNGWTDTDSNFSVKQDVVAITDWSGYSGSFVQHPELTGLDCIRPCFWVELVRGLPRENTTIWTSGSSISFCGVNSDTANWSWPDGAELPFTIDK

SEQ ID NO: 14830 - protein, 470 aa, synthetic construct; identical to SEQ ID NO: 14828
  REGION 1..470: note = neuraminidase__InfluenzaA__ABD60903

SEQ ID NO: 14831 - protein, 470 aa, synthetic construct; identical to SEQ ID NO: 14415
  REGION 1..470: note = neuraminidase__InfluenzaA__ABD60914

SEQ ID NO: 14832 - protein, 469 aa, synthetic construct
  REGION 1..469: note = neuraminidase__InfluenzaA__ABD60925
MNPNQKIITIGSVSLTIATICFLMQIAILVTTVTLHFKQHECNSPPNNQVMLCEPTIIERNITEIVYLTNTTIEKEICPKLAEYRNWSKPQCNITGFAPFSKDNSIRLSAGGDIWVTREPYVSCDPDKCYQFALGQGTTLNNGHSNDTVHDRTPYRTLLMNELGVPFHLGTRQVCIAWSSSSCHDGKAWLHVCVTGDDKNATASFIYNGRLVDSIGSWSKKILRTQESECVCINGTCTVVMTDGSASGKADTKILFIEEGKIVHISTLSGSAQHVEECSCYPRYPGVRCVCRDNWKGSNRPIVDINIKDYSIVSSYVCSGLVGDTPRKNDSFSSSHCLDPNNEEGGHGVKGWAFDDGNDVWMGRTISEKLRSGYETFKVIEGWSKPNSKLQINRQVIVERGNRSGYSGIFSVEGKSCINRCFYVELIRGRKEETEVWWTSNSIVVFCGTSGTYGTGSWPDGADINLMPI

SEQ ID NO: 14833 - protein, 470 aa, synthetic construct
  REGION 1..470: note = neuraminidase__InfluenzaA__ABD60947
MNPNQKIITIGSICMAIGIISLILQIGNIISIWVSHSIQTGSQNHTGICNQRIITYENSTWVNQTYVNISNTNVVAGKDTTSMTLAGNSSLCPIRGWAIYSKDNSIRIGSKGDVFVIREPFISCSHLECRTFFLTQGALLNDKHSNGTIKDRSPYRALMSCPIGEAPSPYNSRFESVAWSASACHDGMGWLTIGISGPDDGAVAVLKYNGIITETIKSWRKQILRTQESECVCVNGSCFTIMTDGPSDGPASYRIFKIEKGKITKSIELDAPNSHYEECSCYPDTGTVMCVCRDNWHGSNRPWVSFNQNLDYQIGYICSGVFGDNPRPKDGKGSCDPVNVDGADGVKGFSYRYGNGVWIGRTKSNSSRKGFEMIWDPNGWTDTDSNFLVKQDVVAMTDWSGYSGSFVQHPELTGLDCMRPCFWVELIRGRPREKTTIWTSGSSISFCGVNSDTVNWSWPDGAELPFTIDK

SEQ ID NO: 14834 - protein, 469 aa, synthetic construct
  REGION 1..469: note = neuraminidase__InfluenzaA__ABD61263
MNPNQKIITIGSVSLTIATICFLMQIAILVTTVTLHFKQHECNSPPNNQVMLCEPTIIERNITEIVYLTNTTIEKEICPKLAEYRNWSKPQCNITGFAPFSKDNSIRLSAGGDIWVTREPYVSCDPDKCYQFALGQGTTLNNGHSNDTVHDRTPYRTLLMNELGVPFHLGTRQVCIAWSSSSCHDGKAWLHVCVTGDDKNATASFIYNGRLVDSIGSWSKKILRTQESECVCINGTCTVVMTDGSASGKADTKILFIEEGKIVHISTLSGSAQHVEECSCYPRYPGVRCVCRDNWKGSNRPIVDINVKDYSIVSSYVCSGLVGDTPRKNDSFSSSHCLDPNNEEGGHGMKGWAFDDGNDVWMGRTISEKLRSGYETFKVIEGWSKPNSKLQVNRQVIVERGNRSGYSGIFSVEGKSCINRCFYVELIRGRKEETEVWWTSNSIVVFCGTSGTYGTGSWPDGADINLMPI

SEQ ID NO: 14835 - protein, 469 aa, synthetic construct; identical to SEQ ID NO: 14145
  REGION 1..469: note = neuraminidase__InfluenzaA__ABD61274

SEQ ID NO: 14836 - protein, 469 aa, synthetic construct
  REGION 1..469: note = neuraminidase__InfluenzaA__ABD61285
MNPNQKIITIGSVSLTISTICFFMQIAILITTVTLHFKQYEFNSPPNNQVMLCEPTIIERNITEIVYLTNTTIEKEICPKLAEYRNWSKPQCDITGFAPFSKDNSIRLSAGGDIWVTREPYVSCDPDKCYQFALGQGTTLNNVHSNDTVHDRTPYRTLLMNELGVPFHLGTKQVCIAWSSSSCHDGKAWLHVCVTGDDKNATASFIYNGRLVDSIVSWSKEILRTQESECVCINGTCTVVMTDGNASGKADTKILFIEEGKIVHTSTLSGSAQHVEECSCYPRYPGVRCVCRDNWKGSNRPIVDINIKDYSIVSSYVCSGLVGDTPRKNDSSSSSHCLDPNNEEGGHGVKGWAFDDGNDVWMGRTISEKLRSGYETFKVIEGWSNPNSKLQINRQVIVDRGNRSGYSGIFSVEGKSCINRCFYVELIRGRKEETEVLWTSNSIVVFCGTSGTYGTGSWPDGADINLMPI

SEQ ID NO: 14837 - protein, 469 aa, synthetic construct; identical to SEQ ID NO: 14591
  REGION 1..469: note = neuraminidase__InfluenzaA__ABD61296

SEQ ID NO: 14838 - protein, 469 aa, synthetic construct; identical to SEQ ID NO: 14712
  REGION 1..469: note = neuraminidase__InfluenzaA__ABD61307

SEQ ID NO: 14839 - protein, 469 aa, synthetic construct; identical to SEQ ID NO: 14730
  REGION 1..469: note = neuraminidase__InfluenzaA__ABD61318

SEQ ID NO: 14840 - protein, 469 aa, synthetic construct; identical to SEQ ID NO: 14061
  REGION 1..469: note = neuraminidase__InfluenzaA__ABD61340

SEQ ID NO: 14841 - protein, 469 aa, synthetic construct; identical to SEQ ID NO: 14061
  REGION 1..469: note = neuraminidase__InfluenzaA__ABD61351

SEQ ID NO: 14842 - protein, 469 aa, synthetic construct
  REGION 1..469: note = neuraminidase__InfluenzaA__ABD61362
MNPNQKIITIGSVSLTIATICFLMQIAILVTTVTLHFKQYECNSPPNNQVMLCEPTIIERNITEIVYLTNTTIEKEVCPKLAEYRNWSKPQCNITGFAPFSKDNSIRLSAGGDIWVTREPYVSCDPDKCYQFALGQGTTLNNGHSNDTVHDRTPYRTLLMNELGVPFHLGTKQVCIAWSSSSCHDGKAWLHVCVTGDDENATASFIYNGRLVDSIGSWSKKILRTQESECVCINGTCTVVMTDGSASGKADTKILFIEEGKIVHTSSLSGSAQHVEECSCYPRYPGVRCVCRDNWKGSNRPIVDINVKDYSIVSSYVCSGLVGDTPRKNDSSSSSHCLDPNNEEGGHGVKGWAFDDGNDVWMGRTISEKLRSGYETFKVIEGWSKPNSKLQINRQVIVDRGNRSGYSGIFSVEGKSCINRCFYVELIRGRKQETEVLWTSNSIVVFCGTSGTYGTGSWPDGADIDLMPI

SEQ ID NO: 14843 - protein, 469 aa, synthetic construct; identical to SEQ ID NO: 14793
  REGION 1..469: note = neuraminidase__InfluenzaA__ABD61373

SEQ ID NO: 14844 - protein, 469 aa, synthetic construct
  REGION 1..469: note = neuraminidase__InfluenzaA__ABD61384
MNPNQKIITIGSVSLTIATICFLMQIAILVTTVTLHFKQYECNSPPNNQVMLCEPTIIERNITEIVYLTNTTIEKEICPKLAEYRNWSKPQCNITGFAPFSKDNSIRLSAGGDIWVTREPYVSCDPDKCYQFALGQGTTLNNGHSNDTVHDRTPYRTLLMNELGVPFHLGTKQVCIAWSSSSCHDGKAWLHVCVTGDDENATASFIYNGRLVDSIGSWSKKILRTQESECVCINGTCTVVMTDGSASGKADTKILFIEEGKIVHTSSLSGSAQHVEECSCYPRYPGVRCVCRDNWKGSNRPIVDINIKDYSIVSSYVCSGLVGDTPRKNDSSSSSHCLDPNNEEGGHGVKGWAFDDGNDVWMGRTISEKLRSGYETFKVIEGWSKPNSKLQINRQVIVDRGNRSGYSGIFSVESKSCINRCFYVELIRGRKQETEVLWTSNSIVVFCGTSGTYGTGSWPDGADINLMPI

SEQ ID NO: 14845 - protein, 469 aa, synthetic construct; identical to SEQ ID NO: 14730
  REGION 1..469: note = neuraminidase__InfluenzaA__ABD61395

SEQ ID NO: 14846 - protein, 469 aa, synthetic construct; identical to SEQ ID NO: 14827
  REGION 1..469: note = neuraminidase__InfluenzaA__ABD61406

SEQ ID NO: 14847 - protein, 470 aa, synthetic construct; identical to SEQ ID NO: 14828
  REGION 1..470: note = neuraminidase__InfluenzaA__ABD61521

SEQ ID NO: 14848 - protein, 469 aa, synthetic construct
  REGION 1..469: note = neuraminidase__InfluenzaA__ABD61532
MNPNQKIITIGSVSLTIATICFLMQIAILVTTVTLHFKQYECSSPPNNQVMPCEPIIIERNITEIVYLTNTTIEKEICPKLVEYRNWSKPQCKITGFAPFSKDNSIRLSAGGDIWVTREPYVSCDPGKCYQFALGQGTTLNNKHSNDTIHDRTPYRTLLMNELGVPFHLGTKQVCIAWSSSSCHDGKAWLHVCVTGHDKNATASFIYDGRLVDSIGSWSKNILRTQESECVCINGTCTVVMTDGSASERADTKILFIEEGKIVHISPLSGSAQHVEECSCYPRYPGVRCVCRDNWKGSNRPIVDINVKDYSIVSSYVCSGLVGDTPRKNDRSSSSYCRNPNNEKGNHGVKGWAFDDGNDVWMGRTIGEELRSGYETFKVIGGWSTPNSKLQINRQVIVDSENRSGYSGIFSVEGKSCINRCFYVELIRGREQETRVWWTSNSIVVFCGTSGTYGTGSWPDGADISLMPI

SEQ ID NO: 14849 - protein, 470 aa, synthetic construct
  REGION 1..470: note = neuraminidase__InfluenzaA__ABD61543
MNPNQKIITIGSISIAIGIISLMLQIGNIISIWASHSIQTGSQNHTGICNQRIITYENSTWVNHTYVNINNTNVVAGKDKTSVTLAGNSSLCSISGWAIYTKDNSIRIGSKGDVFVIREPFISCSHLECRTFFLTQGALLNDKHSNGTVKDRSPYRALMSCPLGEAPSPYNSKFESVAWSASACHDGMGWLTIGISGPDNGAVAVLKYNGIITETIKSWKKRILRTQESECVCVNGSCFTIMTDGPSNGAASYKIFKIEKGKVTKSIELNAPNFHYEECSCYPDTGTVMCVCRDNWHGSNRPWVSFNQNLDYQIGYICSGVFGDNPRPKDGEGSCNPVTVDGADGVKGFSYKYGNGVWIGRTKSNRLRKGFEMIWDPNGWTDTDSNFSVKQDVVAITDWSGYSGNFVQHPELTGLDCIRPCFWVELVRGLPRENTTIWTSGSSISFCGVNSDTANWSWPDGAELPFTIDK

SEQ ID NO: 14850 - protein, 470 aa, synthetic construct; identical to SEQ ID NO: 14828
  REGION 1..470: note = neuraminidase__InfluenzaA__ABD63066

SEQ ID NO: 14851 - protein, 469 aa, synthetic construct; identical to SEQ ID NO: 14253
  REGION 1..469: note = neuraminidase__InfluenzaA__ABD77601

SEQ ID NO: 14852 - protein, 469 aa, synthetic construct
  REGION 1..469: note = neuraminidase__InfluenzaA__ABD77612
MNPNQKIITIGSVSLTIATICFLMQIAILVTTVTLHFKQYECNSPPNNQVMLCEPTIIERNITEIVYLTNTTIEKEMCPKLAEYRNWLKPQCNITGFAPFSKDNSIRLSAGGDIWVTREPYVSCDPDKCYQFALGQGTTLNNGHSNDTVHDRTPYRTLLMNELGVPFHLGTKQVCIAWSSSSCHDGKAWLHVCVTGDDENATASIIYNGRLVDSIGSWSKKILRTQESECVCINGTCTVVMTDGSASGKADTKILFIKEGKIVHTSSLSGSAQHVEECSCYPRYPGVRCVCRDNWKGSNRPIVDINVKDYSIVSSYVCSGLVGDTPRKNDSSSSSHCLDPNNEEGGHGVKGWAFDDGNDVWMGRTISEKLRSGYETFKVIEGWSKANSKLQINRQVIVDRGNRSGYSGIFSVESKSCINRCFYVELIRGRKQETEVLWTSNSIVVFCGTSGTYGTGSWPDGADINLMPI

SEQ ID NO: 14853 - protein, 469 aa, synthetic construct
  REGION 1..469: note = neuraminidase__InfluenzaA__ABD77634
MNPNQKIITIGSVSLTIATICFLMQIAILVTTVTLHFKQYECNSPPNNQVMLCEPTIIERNITEIVYLTNTTIEKEMCPKLAEYRNWSKPQCNITGFAPFSKDNSIRLSAGGDIWVTREPYVSCDPDKCYQFALGQGTTLNNGHSNDTVHDRTPYRTLLMNELGVPFHLGTKQVCIAWSSSSCHDGKAWLHVCVTGDDENATASIIYNGRLVDSIGSWSKKILRTQESECVCINGTCTVVMTDGSASGKADTKILFIKEGKIVHTSSLSGSAQHVEECSCYPRYPGVRCVCRDNWKGSNRPIVDINVKDYSIVSSYVCSGLVGDTPRKNDSSSSSHCLDPNNEEGGHGVKGWAFDDGNDVWMGRTISEKLRSGYETFKVIEGWSKANSKLQINRQVIVDRGNRSGYSGIFSVESKSCINRCFYVELIRGRKQETEVLWTSNSIVVFCGTSGTYGTGSWPDGADINLMPI

SEQ ID NO: 14854 - protein, 469 aa, synthetic construct; identical to SEQ ID NO: 14853
  REGION 1..469: note = neuraminidase__InfluenzaA__ABD77645

SEQ ID NO: 14855 - protein, 469 aa, synthetic construct; identical to SEQ ID NO: 14853
  REGION 1..469: note = neuraminidase__InfluenzaA__ABD77656

SEQ ID NO: 14856 - protein, 469 aa, synthetic construct; identical to SEQ ID NO: 14126
  REGION 1..469: note = neuraminidase__InfluenzaA__ABD77700

SEQ ID NO: 14857 - protein, 470 aa, synthetic construct; identical to SEQ ID NO: 14828
  REGION 1..470: note = neuraminidase__InfluenzaA__ABD77722

SEQ ID NO: 14858 - protein, 470 aa, synthetic construct; identical to SEQ ID NO: 14828
  REGION 1..470: note = neuraminidase__InfluenzaA__ABD77733

SEQ ID NO: 14859 - protein, 469 aa, synthetic construct
  REGION 1..469: note = neuraminidase__InfluenzaA__ABD77744
MNPNQKIITIGSVSLTIATICFLMQIVILVTTVTLHFKQYECNSPPNNQVMLCEPTIIERNITEIVYLTNTTIEKEICPKLAEYRNWSKPQCNITGFAPFSKDNSIRLSAGGDIWVTREPYVSCDPDKCYQFALGQGTTLNNGHSNDTVHDRTPYRTLLMNELGVPFHLGTKQVCIAWSSSSCHDGKAWLHVCVTGDDENATASFIYNGRLVDSIGSWSKKILRTQESECVCINGTCTVVMTDGSASGKADTKILFIEEGKIVHTSLLSGSAQHVEECSCYPRYPGVRCVCRDNWKGSNRPIVDINVKDYSIVSSYVCSGLVGDTPRKNDSSSSSHCLDPNNEEGGHGVKGWAFDDGNDVWMGRTISEKLRSGYETFKVIEGWSKPNSKLQINRQVIVDRGNRSGYSGIFSVEGKSCINRCFYVELIRGRKQETEVLWTSNSIVVFCGTSGTYGTGSWPDGADINLMPI

SEQ ID NO: 14860 - protein, 469 aa, synthetic construct; identical to SEQ ID NO: 14853
  REGION 1..469: note = neuraminidase__InfluenzaA__ABD77755

SEQ ID NO: 14861 - protein, 469 aa, synthetic construct; identical to SEQ ID NO: 14853
  REGION 1..469: note = neuraminidase__InfluenzaA__ABD77766

SEQ ID NO: 14862 - protein, 469 aa, synthetic construct
  REGION 1..469: note = neuraminidase__InfluenzaA__ABD77777
MNPNQKIITIGSVSLTIATICFLMQIVILVTTVTLHFKQYECNSPPNNQVMPCEPTIIERNITEIVYLTNTTIEKEICPKLAEYRNWSKPQCNITGFAPFSKDNSIRLSAGGDIWVTREPYVSCDPDKCYQFALGQGTTLNNGHSNDTVHDRTPYRTLLMNELGVPFHLGTKQVCIAWSSSSCHDGKAWLHVCVTGDDENATASFIYNGRLVDSIGSWSKKILRTQESECVCINGTCTVVMTDGSASGKADTKILFIEEGKIVHTSLLSGSAQHVEECSCYPRYPGVRCVCRDNWKGSNRPIVDINVKDYSIVSSYVCSGLVGDTPRKNDSSSSSHCLDPNNEEGGHGVKGWAFDDGNDVWMGRTISEKLRSGYETFKVIEGWSKPNSKLQINRQVIVDRGNRSGYSGIFSVEGKSCINRCFYVELIRGRKQETEVLWTSNSIVVFCGTSGTYGTGSWPDGADINLMPI

SEQ ID NO: 14863 - protein, 469 aa, synthetic construct; identical to SEQ ID NO: 14862
  REGION 1..469: note = neuraminidase__InfluenzaA__ABD77788

SEQ ID NO: 14864 - protein, 453 aa, synthetic construct
  REGION 1..453: note = neuraminidase__InfluenzaA__ABD77799
MNPNQKIITIGSICMVVGIISLILQIGNIISIWISHSIQTGNQNHTGICNQGIITYNVVAGQDSTSVILTGNSSLCPIRGWAIHSKDNGIRIGSKGDVFVIREPFISCSHLECRTFFLTQGALLNDKHSNGTVKDRSPYRALMSCPVGEAPSPYNSRFESVAWSASACHDGMGWLTIGISGPDNGAVAVLKYNGIITETIKSWRKKILRTQESECTCVNGSCFTIMTDGPSNGLASYKIFKIEKGKVTKSIELNAPNSHYEECSCYPDTGKVMCVCRDNWHGSNRPWVSFDQNLDYQIGYICSGVFGDNPRPKDGTGSCGPVSADGANGVKGFSYRYGNGVWIGRTKSDSSRHGFEMIWDPNGWTETDSRFSVRQDVVAMTDRSGYSGSFVQHPELTGLDCMRPCFWVELIRGRPEEETIWTSGSIISFCGVNSDTVDWSWPDGAELPFTIDK

SEQ ID NO: 14865 - protein, 469 aa, synthetic construct
  REGION 1..469: note = neuraminidase__InfluenzaA__ABD77810
MNPNQKIITIGSICMVVGIISLILQIGNIVSIWISHSIQTGNQNHTGTCNQSIITYKNSTWVNQTYVNISNTNVVAGKDTTSVILAGNSSLCPIRGWAIYSKDNGVRIGSKGDVFVIREPFISCSHLECRTFFLTQGALLNDKHSNGTVKDRSPYRALMSCPVGEAPSPYNSRFESVAWSASACHDGMGWLTIGISGPDDGAVAVLKYNGIITETIKSWRKEILRTQESECVCVNGSCFTIMTDGPSGGPASYKIFKIEKGKVTKSIELDAPNSHYEECSCYPDTSKVMCVCRDNWHGSNRPWVSFDQNLDYQMGYICSGVFGDNPRPKDGKGSCGPVYVDGANGVKGFSYRYGNGVWIGRTKSNSSRQGFEMIWDPNGWTETDSNFFTKQDVVAVTDWSGYSGSFVQHPELTGLDCMRPCFWVELIRGRPKENTIWTSGSSISFCGVNSDTVDWSWPDGAELPFTIDK

SEQ ID NO: 14866 - protein, 469 aa, synthetic construct
  REGION 1..469: note = neuraminidase__InfluenzaA__ABD77832
MNPNQKIITIGSVSLTIATICFLMQIAILVTTVTLHFKQYECNSPPNNQVMLCEPTIIERNITEIVYLTNTTIEKEICPKLAEYRNWSKPQCKITGFAPFSKDNSIRLSAGGDIWVTREPYVSCDPDKCYQFALGQGTTLNNRHSNDTVHDRTPYRTLLMNELGVPFHLGTKQVCIAWSSSSCHDGKAWLHVCVTGHDENATASFIYGGRLVDSIGSWSKKILRTQESECVCINGTCTVVMTDGSASGRADTKILFIEEGKIVHISPLSGSAQHVEECSCYPRYSGVRCVCRDNWKGSNRPIVDINVKDYSIVSSYVCSGLVGDTPRKNDSSSSSHCLNPNNEEGGHGVKGWAFDDGNDVWMGRTISEKFRSGYETFKVIGGWSKPNSKLQINRQVIVDRGNRSGYSGIFSVEGKSCINRCFYVELIRGRKQETEVWWTSNSIVVFCGTSGTYGTGSWPDGADINLMPI

SEQ ID NO: 14867 - protein, 469 aa, synthetic construct
  REGION 1..469: note = neuraminidase__InfluenzaA__ABD77876
MNPNQKIITIGSVSLTIATICFLMQIAILVTTVTLHFKQYECNSPPNNQVMLCEPTIIERNITEIVYLTNTTIEKEICPKLAEYRNWSKPQCKITGFAPFSKDNSIRLSAGGDIWVTREPYVSCDPDKCYQFALGQGTTLNNRHSNDTVHDRTPYRTLLMNELGVPFHLGTKQVCIAWSSSSCHDGKAWLHVCVTGHDENATASFIYDGRLVDSIGSWSKKILRTQESECVCINGTCTVVMTDGSASGRADTKILFIEEGKIVHISPLSGSAQHVEECSCYPRYSGVRCVCRDNWKGSNRPIVDINVKDYSIVSSYVCSGLVGDTPRKNDSSSSSHCLNPNNEEGGHGVKGWAFDDGNDVWMGRTISEKLRSGYETFKVIEGWSKPNSKLQINRQVIVDRGNRSGYSGIFSVEGKSCINRCFYVELIRGRKQETEVWWTSNSIVVFCGTSGTYGTGSWPDGADINLMPI

SEQ ID NO: 14868 - protein, 469 aa, synthetic construct; identical to SEQ ID NO: 14126
  REGION 1..469: note = neuraminidase__InfluenzaA__ABD77887

SEQ ID NO: 14869 - protein, 469 aa, synthetic construct
  REGION 1..469: note = neuraminidase__InfluenzaA__ABD77898
MNPNQKIITIGSVSLTIATICFLMQIAILVTTVTLHFKQYECNSPPNNQVMLCEPTIIERNITEIVYLTNTTIEKEICPKLAEYRNWSKPQCKITGFAPFSKDNSIRLSAGGDIWVTREPYVSCDPDKCYQFALGQGTTLNNRHSNDTVHDRTPYRTLLMNELGVPFHLGTKQVCIAWSSSSCHDGKAWLHVCVTGHDENATASFIYDGRLVDSIGSWSKKILRTQESECVCINGTCTVVMTDGSASGRADTKILFIEEGKIIHISPLSGSAQHVEECSCYPRYPGVRCVCRDNWKGSNRPIVDINVKDYSIVSSYVCSGLVGDTPRKNDSSSSSHCLNPNNEEGGHGVKGWAFDDGSDVWMGRTISEKLRSGYETFKVIEGWSKPNSKLQINRQVIVDRGNRSGYSGIFSVEGKSCINRCFYVELIRGRKQETEVWWTSNSIVVFCGTSGTYGTGSWPDGADINLMPI

SEQ ID NO: 14870 - protein, 469 aa, synthetic construct
  REGION 1..469: note = neuraminidase__InfluenzaA__ABD77909
MNPNQKIITIGSVSLTIATICFLMQIAILVTTVTLHFKQYECNSPPNNQVMLCEPTIIERNITEIVYLTNTTIEKEICPKLAEYRNWSKPQCKITGFAPFSKDNSIRLSAGGDIWVTREPYVSCDPDKCYQFALGQGTTLNNRHSNDTVHDRTPYRTLLMNELGVPFHLGTKQVCIAWSSSSCHDGKAWLHVCVTGHDENATASFIYDGRLVDSIGSWSKKILRTQESECVCINGTCTVVMTDGSASGRADTKILFIEEGKIVHISPLSGSAQHVEECSCYPRYPGVRCVCRDNWKGSNRPIVDINVKDYSIVSSYVCSGLVGDTPRKNDSSSSSHCLNPNNEEGGHGVKGWAFDDGNDVWMGRTISEKLRSGYETFKVIEGWSKPNSKLQINRQVIVDRGNSSGYSGIFSVEGKSCINRCFYVELIRGRKQETEVWWTSNSIVVFCGTSGTYGTGSWPDGADINLMPI

SEQ ID NO: 14871 - protein, 470 aa, synthetic construct; identical to SEQ ID NO: 14828
  REGION 1..470: note = neuraminidase__InfluenzaA__ABD77920

SEQ ID NO: 14872 - protein, 470 aa, synthetic construct; identical to SEQ ID NO: 14828
  REGION 1..470: note = neuraminidase__InfluenzaA__ABD77931

SEQ ID NO: 14873 - protein, 470 aa, synthetic construct; identical to SEQ ID NO: 14828
  REGION 1..470: note = neuraminidase__InfluenzaA__ABD77942

SEQ ID NO: 14874 - protein, 470 aa, synthetic construct
  REGION 1..470: note = neuraminidase__InfluenzaA__ABD77953
MNPNQKIITIGSISIAIGIISLMLQIGNIISIWASHSIQTGSQNHTGICNQRIITYENSTWVNHTYVNINNTNVVAGKDKTSVTLAGNSSLCSISGWAIYTKDNSIRIGSKGDVFVIREPFISCSHLECRTFFLTQGALLNDKHSNGTVKDRSPYRALMSCPLGEAPSPYNSKFESVAWSASACHDGMGWLTIGISGPDNGAVAVLKYNGIITETIKSWKKRILRTQESECVCVNGSCFTIMTDGPSNGAASYKIFKIEKGKVTKSIELNAPNFHYEECSCYPDTGTVMCVCRDNWHGSNRPWVSFNQNLDYQIGYICSGVFGDNPRPKDGEGSCNPVTVDGADGVKGFSYKYGNGVWIGRTKSNRLRKGFEMIWDPNGWTDTDSNFSVKQDVVAITDWSGYSGSFVQHPELTGLDCIRPCFLVELVRGLPRENTTIWTSGSSISFCGVNSDTANWSWPDGAELPFTIDK

SEQ ID NO: 14875 - protein, 470 aa, synthetic construct
  REGION 1..470: note = neuraminidase__InfluenzaA__ABD77964
MNPNQKIITIGSISIAIGIISLMLQIGNIISIWASHSIQTRSQNHTGICNQRIITYENSTWVNHTYVNINNTNVVAGKDKTSVTLAGNSSLCSISGWAIYTKDNSIRIGSKGDVFVIREPFISCSHLECRTFFLTQGALLNDKHSNGTVKDRSPYRALMSCPLGEAPSPYNSKFESVAWSASACHDGMGWLTIGISGPDNGAVAVLKYNGIITETIKSWKKRILRTQESECVCVNGSCFTIMTDGPSNGAASYKIFKIEKGKVTKSIELNAPNFHYEECSCYPDTGTVMCVCRDNWHGSNRPWVSFNQNLDYQIGYICSGVFGDNPRPKDGEGSCNPVTVDGADGVKGFSYKYGNGVWIGRTKSNRLRKGFEMIWDPNGWTDTDSNFSVKQDVVAITDWSGYSGSFVQHPELTGLDCIRPCFWVELVRGLPRENTTIWTSGSSISFCGVNSDTANWSWPDGAELPFTIDK

SEQ ID NO: 14876 - protein, 470 aa, synthetic construct; identical to SEQ ID NO: 14828
  REGION 1..470: note = neuraminidase__InfluenzaA__ABD77975

SEQ ID NO: 14877 - protein, 470 aa, synthetic construct; identical to SEQ ID NO: 14828
  REGION 1..470: note = neuraminidase__InfluenzaA__ABD77986

SEQ ID NO: 14878 - protein, 470 aa, synthetic construct
  REGION 1..470: note = neuraminidase__InfluenzaA__ABD77997
MNPNQKIITIGSISIAIGILSLMLQIGNIISIWASHSIQTGSQNHTGICNQRIITYENSTWVNHTYVNINNTNVVAGKDKTSVTLAGNSSLCSISGWAIYTKDNSIRIGSKGDVFVIREPFISCSHLECRTFFLTQGALLNDKHSNGTVKDRSPYRALMSCPLGEAPSPYNSKFESVAWSASACHDGMGWLTIGISGPDNGAVAVLKYNGIITETIKSWKKRILRTQESECVCVNGSCFTIMTDGPSNGAASYKIFKIEKGKVTKSIELNAPNFHYEECSCYPDTGTVMCVCRDNWHGSNRPWVSFNQNLDYQIGYICSGVFGDNPRPKDGEGSCNPVTVDGADGVKGFSYKYGNGVWIGRTKSNRLRKGFEMIWDPNGWTDTDNNFSVKQDVVAITDWSGYSGSFVQHPELTGLDCIRPCFWVELVRGLPRENTTIWTSGSSISFCGVNSDTANWSWPDGAELPFTIDK

SEQ ID NO: 14879 - protein, 470 aa, synthetic construct; identical to SEQ ID NO: 14828
  REGION 1..470: note = neuraminidase__InfluenzaA__ABD78008

SEQ ID NO: 14880 - protein, 470 aa, synthetic construct; identical to SEQ ID NO: 14828
  REGION 1..470: note = neuraminidase__InfluenzaA__ABD78019

SEQ ID NO: 14881 - protein, 470 aa, synthetic construct
  REGION 1..470: note = neuraminidase__InfluenzaA__ABD78030
MNPNQKIITIGSISIAIGIISLMLQIGNIISIWASHSIQTGSQNHTGICNQRIITYENSTWVNHTYVNINNTNVVAGKDKTSVTLAGNSSLCSISGWAIYTKDNSIRIGSKGDVFVIREPFISCSHLECRTFFLTQGALLNDKHSNRTVKDRSPYRALMSCPLGEAPSPYNSKFESVAWSASACHDGMGWLTIGISGPDNGAVAVLKYNGIITETIKSWKKRILRTQESECVCVNGSCFTIMTDGPNNGAASYKIFKIEKGKVTKSIELNAPNFHYEECSCYPDTGTVMCVCRDNWHGSNRPWVSFNQNLDYQIGYICSGVFGDNPRPKDGEGSCNPVTVDGADGVKGFSYKYGNGVWIGRTKSNRLRKGFEMIWDPNGWTDTDSNFSVKQDVVAITDWSGYSGSFVQHPELTGLDCIRPCFWVELVRGLPRENTTIWTSGSSISFCGVNSDTANWSWPDGAELPFTIDK

SEQ ID NO: 14882 - protein, 470 aa, synthetic construct
  REGION 1..470: note = neuraminidase__InfluenzaA__ABD78041
MNPNQKIITIGSISIAIGIISLMLQIGNIISIWASHSIQTGSQNHTGICNQRIITYENSTWVNHTYVNINNTNVVAGKDKTSVTLAGNSSLCSISGWAIYTKDNSIRIGSKGDVFVIREPFISCSHLECRTFFLTQGALLNDKHSNGTVKDRSPYRALMSCPLGEAPSPYNSKFESVAWSASACHDGMGWLTIGISGPDNGAVAVLKYNGIITETIKSWKKRILRTQESECVCVNGSCFTIMTDGPSNGAASYKIFKIEKGKVTKSIELNAPNFHYEECSCYPDTSTVMCVCRDNWHGSNRPWVSFNQNLDYQIGYICSGVFGDNPRPKDGEGSCNPVTVDGADGVKGFSYKYGNGVWIGRTKSNRLRKGFEMIWDPNGWTDTDSNFSVKQDVVAITDWSGYSGSFVQHPELTGLDCIRPCFWVELVRGLPRENTTIWTSGSSISFCGVNSDTANWSWPDGAELPFTIDK

SEQ ID NO: 14883 - protein, 469 aa, synthetic construct; identical to SEQ ID NO: 14862
  REGION 1..469: note = neuraminidase__InfluenzaA__ABD78052

SEQ ID NO: 14884 - protein, 470 aa, synthetic construct; identical to SEQ ID NO: 14396
  REGION 1..470: note = neuraminidase__InfluenzaA__ABD78063

SEQ ID NO: 14885 - protein, 470 aa, synthetic construct; identical to SEQ ID NO: 14396
  REGION 1..470: note = neuraminidase__InfluenzaA__ABD78074

SEQ ID NO: 14886 - protein, 470 aa, synthetic construct; identical to SEQ ID NO: 14396
  REGION 1..470: note = neuraminidase__InfluenzaA__ABD78085

SEQ ID NO: 14887 - protein, 470 aa, synthetic construct; identical to SEQ ID NO: 14396
  REGION 1..470: note = neuraminidase__InfluenzaA__ABD78096

SEQ ID NO: 14888 - protein, 469 aa, synthetic construct
  REGION 1..469: note = neuraminidase__InfluenzaA__ABD78118
MNPNQKIITIGSVSLTIATICFLMQIAILVTTVTLHFKQYECNSPPNNQVMLCEPTIIERNITEIVYLTNTTIEKEMCPKLAEYRNWSKPQCKITGFAPFSKDNSIRLSAGGDIWVTREPYVSCDPDKCYQFALGQGTTLNNRHSNDTVHDRTPYRTLLMNELGVPFHLGTKQVCIAWSSSSCHDGKAWLHVCVTGHDENATASFIYDGRLVDSIGSWSKKILRTQESECVCINGTCTVVMTDGSASGRADTKILFIEEGKIVHISPLSGSAQHVEECSCYPRYSGVRCVCRDNWKGSNRPIVDINVKDYSIVSSYVCSGLVGDTPRKNDSSSSSHCLNPNNEEGGHGVKGWAFDDGNDVWMGRTISEKFRSGYETFKVIGGWSKPNSKLQINRQVIVDRGNRSGYSGIFSVEGKSCINRCFYVELIRGRKQETEVWWTSNSIVVFCGTSGTYGTGSWPDGADINLMPI

SEQ ID NO: 14889 - protein, 469 aa, synthetic construct; identical to SEQ ID NO: 14888
  REGION 1..469: note = neuraminidase__InfluenzaA__ABD78129

SEQ ID NO: 14890 - protein, 469 aa, synthetic construct; identical to SEQ ID NO: 14118
  REGION 1..469: note = neuraminidase__InfluenzaA__ABD79035

SEQ ID NO: 14891 - protein, 450 aa, synthetic construct
  REGION 1..450: note = neuraminidase__InfluenzaA__ABD79115
MNPNQKIITIGSICMVVGIISLIFQIGNIVSIWISHSITGTCNRSIYVNISNTNVVAGKDTTSVILAGNSSLCPIRGWAIYSKDNGVRIGSKGDVFVIREPFISCSHLECRTFFLTQGALLNDKHSNGTVKDRSPYRTLMSCPVGEAPSPYNSRFESVAWSASACHDGMGWLTIGISGPDDGAVAVLKYNGIITGTIKSWRKEILRTQESECVCVNGSCFTIMTDGPSGGPASYKIFKIEKGKVTKSIELDAPNSHYEECSCYPDTSKVMCVCRDNWHGSNRPWVSFDQNLDYQMGYICSGVFGDNPRPKDGKGSCGPVYVDGANGVKGFSYRYGNGVWIGRTKSSSSRQGFEMIWDPNGWTETDSNFFMKQDVVAVTDWSGYSGSFVQHPELTGLDCMRPCFWVELIRGRPKENTIWTSGSSISFCGVNSDTVDWSWPDGAELPFTIDK

SEQ ID NO: 14892 - protein, 469 aa, synthetic construct
  REGION 1..469: note = neuraminidase__InfluenzaA__ABD79126
MNPNQKIITIGSVSLTITTICFLMQIAILVITVTLHFKQCECNSPPNNQVMLCEPTIIERNITEIVYLTNTTIEKEICPKLAEYRNWSKPQCKITGFAPFSKDNSIRLSAGGDIWVTREPYVSCDPGKCYQFALGQGTTLNNRHSNDTVHDRTPYRTLLMNELGVPFHLGTKQVCIAWSSSSCHDGKAWLHVCVTGHNENATASFIYDGRLVDSIGSWSKNILRTQESECVCINGTCTVVMTDGSASGRADTKILFIEEGKIVHISPLSGSAQHVEECSCYPRYPGVRCVCRDNWKGSNRPIVDINVKDYSIVSSYVCSGLVGDTPRKNDSSSSSYCLDPNNEEGGHGVKGWAFDDGNDVWMGRTISEKLRSGYETFKVIGGWSKPNSKLQINRQVIVDKGNRSGYSGIFSVEGKSCINRCFYVELIRGRKQETEVWWTSNSIVVFCGTSGTYGTGSWPDGADINLMPI

SEQ ID NO: 14893 - protein, 469 aa, synthetic construct; identical to SEQ ID NO: 14892
  REGION 1..469: note = neuraminidase__InfluenzaA__ABD79137

SEQ ID NO: 14894 - protein, 469 aa, synthetic construct; identical to SEQ ID NO: 14892
  REGION 1..469: note = neuraminidase__InfluenzaA__ABD79148

SEQ ID NO: 14895 - protein, 469 aa, synthetic construct; identical to SEQ ID NO: 14892
  REGION 1..469: note = neuraminidase__InfluenzaA__ABD79159

SEQ ID NO: 14896 - protein, 469 aa, synthetic construct
  REGION 1..469: note = neuraminidase__InfluenzaA__ABD79170
MNPNQKIITIGSVSLTITTICFLMQIAILVITVTLHFKQCECNSPPNNQVMLCEPTIIERNITEIVYLTNTTIEKEICPKLAEYRNWSKPQCKITGFAPFSKDNSIRLSAGGDIWVTREPYVSCDPGKCYQFALGQGTTLNNRHSNNTVHDRTPYRTLLMNELGVPFHLGTKQVCIAWSSSSCHDGKAWLHVCVTGHNENATASFIYDGRLVDSIGSWSKNILRTQESECVCINGTCTVVMTDGSASGRADTKILFIKEGKIVHVSPLSGSAQHVEECSCYPRYPGVRCVCRDNWKGSNRPIVDINVKDYSIVSSYVCSGLVGDTPRKNDSSSSSYCLDPNNEEGGHGVKGWAFDDGNDVWMGRTISEKLRSGYETFKVIGGWSKPNSKLQINRQVIVDKGNRSGYSGIFSVEGKSCINRCFYVELIRGRKQETEVWWTSNSIVVFCGTSGTYGTGSWPDGADINLMPI

SEQ ID NO: 14897 - protein, 469 aa, synthetic construct; identical to SEQ ID NO: 14892
  REGION 1..469: note = neuraminidase__InfluenzaA__ABD79181

SEQ ID NO: 14898 - protein, 469 aa, synthetic construct; identical to SEQ ID NO: 14892
  REGION 1..469: note = neuraminidase__InfluenzaA__ABD79192

SEQ ID NO: 14899 - protein, 469 aa, synthetic construct
  REGION 1..469: note = neuraminidase__InfluenzaA__ABD79203
MNPNQKIITIGSVSLTITTICFLMQIAILVITVTLHFKQCECNSPPNNQVMLCEPTIIERNITEIVYLTNTTIEKEKCPKLAEYRNWSKPQCKITGFAPFSKDNSIRLSAGGDIWVTREPYVSCDPGKCYQFALGQGTTLNNRHSNDTVHDRTPYRTLLMNELGVPFHLGTKQVCIAWSSSSCHDGKAWLHVCVTGHNENATASFIYDGRLVDSIGSWSKNILRTQESECVCINGTCTVVMTDGSASGRADTKILFIEEGKIVHISPLSGSAQHVEECSCYPRYPGVRCVCRDNWKGSNRPIVDINMKDYSIVSSYVCSGLVGDTPRKNDSSSSSYCLDPNNEEGGHGVKGWAFDDGNDVWMGRTISEKLRSGYETFKVIGGWSKPNSKLQINRQVIVDKGNRSGYSGIFSVEGKSCINRCFYVELIRGRKQETEVWWTSNSIVVFCGTSGTYGTGSWPDGADINLMPI

SEQ ID NO: 14900 - protein, 469 aa, synthetic construct; identical to SEQ ID NO: 14892
  REGION 1..469: note = neuraminidase__InfluenzaA__ABD79214

SEQ ID NO: 14901 - protein, 469 aa, synthetic construct
  REGION 1..469: note = neuraminidase__InfluenzaA__ABD79236
MNPNQKIITIGSVSLTITTICFLMQIAILVITVTLHFKQCECNSPPNNQVMLCEPTIIERNITEIVYLTNTTIEKEICPKLAEYRNWSKPQCKITGFAPFSKDNSIRLSAGGDIWVTREPYVSCDPGKCYQFALGQGTTLNNRHSNNTAHDRTPYRTLLMNELGVPFHLGTKQVCIAWSSSSCHDGKAWLHVCVTGHNENATASFIYDGRLVDSIGSWSKNILRTQESECVCINGTCTVVMTDGSASGRADTKILFIKEGKIVHISPLSGSAQHVEECSCYPRYPGVRCVCRDNWKGSNRPIVDINVKDYSIVSSYVCSGLVGDTPRKNDSSSSSYCLDPNNEEGGHGVKGWAFDDGNDVWMGRTISEKLRSGYETFKVIGGWSKPNSKLQINRQVIVDKGNRSGYSGIFSVEGKSCINRCFYVELIRGRKQETEVWWTSNSIVVFCGTSGTYGTGSWPDGADINLMPI

SEQ ID NO: 14902 - protein, 469 aa, synthetic construct
  REGION 1..469: note = neuraminidase__InfluenzaA__ABD79247
MNPNQKIITIGSVSLTITTICFLMQIAILVITVTLHFKQCECNPPPNNQVMLCEPTIIERNITEIVYLTNTTIEKEICPKLAEYRNWSKPQCKITGFAPFSKDNSIRLSAGGDIWVTREPYVSCDPGKCYQFALGQGTTLNNRHSNDTVHDRTPYRTLLMNELGVPFHLGTKQVCIAWSSSSCHDGKAWLHVCVTGHNENATASFIYDGRLVDSIGSWSKNILRTQESECVCINGTCTVVMTDGSASGRADTKILFIEEGKIVHISPLSGSAQHVEECSCYPRYPGVRCVCRDNWKGSNRPIVDINVKDYSIVSSYVCSGLVGDTPRKNDSSSSSYCLDPNNEEGGHGVKGWAFDDGNDVWMGRTISEKLRSGYETFKVMGGWSKPNSKLQINRQVIVDRGNRSGYSGIFSVEGKSCINRCFYVELIRGRKQETEVWWTSNSIVVFCGTSGTYGTGSWPDGADINLMPI

SEQ ID NO: 14903 - protein, 469 aa, synthetic construct; identical to SEQ ID NO: 14327
  REGION 1..469: note = neuraminidase__InfluenzaA__ABD94737

SEQ ID NO: 14904 - protein, 469 aa, synthetic construct; identical to SEQ ID NO: 14712
  REGION 1..469: note = neuraminidase__InfluenzaA__ABD94748

SEQ ID NO: 14905 - protein, 470 aa, synthetic construct; identical to SEQ ID NO: 14828
  REGION 1..470: note = neuraminidase__InfluenzaA__ABD94759

SEQ ID NO: 14906 - protein, 469 aa, synthetic construct; identical to SEQ ID NO: 14061
  REGION 1..469: note = neuraminidase__InfluenzaA__ABD94770

SEQ ID NO: 14907 - protein, 470 aa, synthetic construct; identical to SEQ ID NO: 14396
  REGION 1..470: note = neuraminidase__InfluenzaA__ABD94792

SEQ ID NO: 14908 - protein, 470 aa, synthetic construct; identical to SEQ ID NO: 14396
  REGION 1..470: note = neuraminidase__InfluenzaA__ABD94803

SEQ ID NO: 14909 - protein, 470 aa, synthetic construct; identical to SEQ ID NO: 14396
  REGION 1..470: note = neuraminidase__InfluenzaA__ABD94814

SEQ ID NO: 14910 - protein, 469 aa, synthetic construct; identical to SEQ ID NO: 14573
  REGION 1..469: note = neuraminidase__InfluenzaA__ABD94825

SEQ ID NO: 14911 - protein, 469 aa, synthetic construct
  REGION 1..469: note = neuraminidase__InfluenzaA__ABD94847
MNPNQKIITIGSVSLTIATICFLMQIAILVTTVTLHFKQYECNSPPNNQVMLCEPKIIERNITEIVYLTNTTIEKEICPKLAEYRNWSKPQCKITGFAPFSKDNSIRLSAGGDIWVTREPYVSCDPDKCYQFALGQGTTLNNRHSNDTVHDRTPYRTLLMNELGVPFHLGTKQVCIAWSSSSCHDGKAWLHVCVTGHDENATASFIYDGRLVDSIGSWSKKILRTQESECVCINGTCTVVMTDGSASGRAVTKILFIEEGKIVHISPLLGSAQHVEECSCYPRYPGVRCVCRDNWKGSNRPIVDINVKDYSIVSSYVCSGLVGDTPRKNDSSSSSHCLNPNNEEGGHGVKGWAFDDGNDVWMGRTISEKLRSGYETFKVIEGWSKPNSKLQINRQVIVDRGNRSGYSGIFSVEGKSCINRCFYVELIRGRKQETEVWWTSNSIVVFCGTSGTYGTGSWPDGADINLMPI

SEQ ID NO: 14912 - protein, 469 aa, synthetic construct; identical to SEQ ID NO: 14126
  REGION 1..469: note = neuraminidase__InfluenzaA__ABD94858

SEQ ID NO: 14913 - protein, 469 aa, synthetic construct; identical to SEQ ID NO: 14126
  REGION 1..469: note = neuraminidase__InfluenzaA__ABD94880

SEQ ID NO: 14914 - protein, 469 aa, synthetic construct
  REGION 1..469: note = neuraminidase__InfluenzaA__ABD94891
MNPNQKIITIGSVSLTITTICFLMQIAILVITVTLHFKQCECNSPPNNQVMLCEPTIIERNITEIVYLTNTTIEKEICPKLAEYRNWSKPQCKITGFAPFSKDNSIRLSAGGDIWVTREPYVSCDPGKCYQFALGQGTTLNNRHSNDTVHDRTPYRTLLMNELGVPFHLGTKQVCIAWSSSSCHDGKAWLHVCVTGHNENATASFIYDGRLVDSIGSWSKNILRTQESECVCINGTCTVVMTDGSASGRADTKVLFIEEGKIVHISQLSGSAQHVEECSCYPRYPGVRCVCRDNWKGSNRPIVDINVKDYSIVSSYVCSGLVGDTPRKNDSSSSSYCLDPNNEEGGHGVKGWAFDDGNDVWMGRTISEKLRSGYETFKVIGGWSKPNSKLQINRQVIVDRGNRSGYSGIFSVEGKSCINRCFYVELIRGRKQETEVWWTSNSIVVFCGTSGTYGTGSWPDGADINLMPI

SEQ ID NO: 14915 - protein, 469 aa, synthetic construct; identical to SEQ ID NO: 14892
  REGION 1..469: note = neuraminidase__InfluenzaA__ABD94902

SEQ ID NO: 14916 - protein, 469 aa, synthetic construct
  REGION 1..469: note = neuraminidase__InfluenzaA__ABD94924
MNPNQKIITIGSVSLTIATICLLMQIAILVTTVTLHFKQYECNSPPNNQVMLCEPTIIERNITEIVYLTNTTIEKEICPKLAEYRNWSKPQCKITGFAPFSKDNSIRLSAGGDIWVTREPYVSCDPDKCYQFALGQGTTLNNRHSNDTVHDRTPYRTLLMNELGVPFHLGTKQVCIAWSSSSCHDGKAWLHVCVTGHDENATASFIYDGRLVDSIGSWSKKILRTQESECVCINGTCTVVMTDGSASGRADTKILFIEEGKIVHISQLLGSAQHVEECSCYPRYPGVRCVCRDNWKGSNRPIVDINVKDYSIVSSYVCSGLVGDTPRKNDSSSSSHCLNPNNEEGGHGVKGWAFDDGNDVWMGRTISEKLRSGYETFKVIEGWSKPNSKLQINRQVIVDRGNRSGYSGIFSVEGKSCINRCFYVELIRGRKQETEVWWTSNSIVVFCGTSGTYGTGSWPDGADINLMPI

SEQ ID NO: 14917 - protein, 469 aa, synthetic construct
  REGION 1..469: note = neuraminidase__InfluenzaA__ABD94946
MNPNQKIITIGSVSLTIATICFLTQIAILVTTVTLHFKQYECNSPPNNQVMLCEPTIIERNITEIVYLTNTTIEKEICPKLAEYRNWSKPQCNITGFAPFSKDNSIRLSAGGDIWVTREPYVSCDPDKCYQFALGQGTTLNNGHSNDTVHDRTPYRTLLMNELGVPFHLGTKQVCIAWSSSSCHDGKAWLHVCVTGDDKNATASFIYNGRLVDSIGSWSKKILRTQESECVCINGTCTVVMTDGSASGKADTKILFIEEGKIVHTSLLSGSAQHVEECSCYPRYPGVRCVCRDNWKGSNRPIVDINVKDYSIVSSYVCSGLVGDTPRKNDRSSSSHCLDPNNEEGGHGVKGWAFDDGNDVWMGRTISEKLRSGYETFKVIEGWSKPNSKLQINRQVIVDRDNRSGYSGIFSVEGKSCINRCFYVELIRGRNQETEVLWTSNSIVVFCGTSGTYGTGSWPDGADINLMPI

SEQ ID NO: 14918 - protein, 469 aa, synthetic construct
  REGION 1..469: note = neuraminidase__InfluenzaA__ABD94957
MNPNQKIITIGSVSLTISTICFFMQIAILITTVTLHFKQYEFNSPPNNQVMLCEPTIIERNITEIVYLTNTTIEKEICPKLAEYRNWSKPQCDITGFAPFSKDNSIRLSAGGDIWVTREPYVSCDPDKCYQFALGQGTTLNNVHSNDTVHDRTPYRTLLMNELGVPFHLGTKQVCIAWSSSSCHDGKAWLHVCVTGDDKNATASFIYNGRLVDSIVSWSKKILRTQESECVCINGTCTVVMTDGSASGKADTKILFIEEGKIVHTSTLSGSAQHVEECSCYPRYPGVRCVCRDNWKGSNRPIVDINIKDYSIVSSYVCSGLVGDTPRKNDSSSSSHCLDPNNEEGGHGVKGWAFDDGNDVWMGRTISEKLRSGYETFKVIEGWSNPNSKLQINRQVIVDRGNRSGYSGIFSVESKSCINRCFYVELIRGRKEETEVLWTSNSIVVFCGTSGTYGTGSWPDGADINLMPI

SEQ ID NO: 14919 - protein, 470 aa, synthetic construct; identical to SEQ ID NO: 14828
  REGION 1..470: note = neuraminidase__InfluenzaA__ABD94968

SEQ ID NO: 14920 - protein, 470 aa, synthetic construct; identical to SEQ ID NO: 14828
  REGION 1..470: note = neuraminidase__InfluenzaA__ABD94990

SEQ ID NO: 14921 - protein, 470 aa, synthetic construct
  REGION 1..470: note = neuraminidase__InfluenzaA__ABD95001
MNPNQKIITIGSISIAIGIISLMLQIGNIISIWASHSIQTGSQNHTGICNQRIITYENSTWVNHTYVNIHNTNVVAGKDKTSVTLAGNSSLCSISGWAIYTKDNSIRIGSKGDVFVIREPFISCSHLECRTFFLTQGALLNDKHSNGTVKDRSPYRALMSCPLGEAPSPYNSKFESVAWSASACHDGMGWLTIGISGPDNGAVAVLKYNGIITETIKSWKKRILRTQESECVCVNGSCFTIMTDGPSNGAASYKIFKIEKGKVTKSIELNAPNFHYEECSCYPDTGTVMCVCRDNWHGSNRPWVSFNQNLDYQIGYICSGVFGDNPRPKDGEGSCNPVTVDGADGVKGFSYKYGNGVWIGRTKSNRLRKGFEMIWDPNGWTDTDSNFSMKQDVVAITDWSGYSGSFVQHPELTGLDCIRPCFWVELVRGLPRENTTIWTSGSSISFCGVNSDTANWSWPDGAELPFTIDK

SEQ ID NO: 14922 - protein, 470 aa, synthetic construct
  REGION 1..470: note = neuraminidase__InfluenzaA__ABD95012
MNPNQKIITIGSISIAIGIISLMLQIGNIISIWASHSIQTGSQNHTGICNQRIITYENSTWVNHTYVNINNTNVVAGKDKTSVTLAGNSSLCSISGWAIYTKDNSIRIGSKGDVFVIREPFISCSHLECRTFFLTQGALLNDKHSNGTVKDRSPYRALMSCPLGEAPSPYNSKFESVAWSASACHDGMGWLTIGISGPDNGAVAVLKYNGIITETIKSWKKRILRTQESECVCVNGSCFTIMTDGPSNGAASYKIFKIEKGKVTKSIELNAPNFHYEECSCYPDTGTVMCVCRDNWHGSNRPWVSFNQNLDYQIGYICSGVFGDNPRPKDGEGSCNPVTVDGADGVKGFSYKYGNGVWIGRTKSNRLRKGFEMIWDPNGWTNTDSNFSVKQDVVAITDWSGYSGSFVQHPELTGLDCIRPCFWVELVRGLPRENTTIWTSGSSISFCGVNSDTANWSWPDGAELPFTIDK

SEQ ID NO: 14923 - protein, 470 aa, synthetic construct; identical to SEQ ID NO: 14828
  REGION 1..470: note = neuraminidase__InfluenzaA__ABD95023

SEQ ID NO: 14924 - protein, 470 aa, synthetic construct
  REGION 1..470: note = neuraminidase__InfluenzaA__ABD95034
MNPNQKIITIGSISIAIGIISLMLQIGNIISIWASHSIQTGSQNHTGICNQRIITYENSTWVNHTYVNINNTNVVAGKDKTSVTLAGNSSLCSISGWAIYTKDNSIRIGSKGDVFVIREPFISCSHLECRTFFLTQGALLNDKHSNGTVKDRSPYRALMSCPLGEAPSPYNSKFESVAWSASACHDGMGWLTIGISGPDNGAVAVLKYNGIITETIKSWKKRILRTQESECVCVNGSCFTIMTDGPSNGAASYKIFKIEKGKVTKSIELNAPNFHYEECSCYPDTGTVMCVCRDNWHGSNRPWVSFNQNLDYQIGYICSGVFGDNPRPKDGEGSCNPVTVDGADGVKGFSYKYGNGVWIGRTKSNRLRKGFEMIWDPNGWTDTDSNFSVKQDVVAITDWSGYSGSFIQHPELTGLDCIRPCFWVELVRGLPRENTTIWTSGSSISFCGVNSDTANWSWPDGAELPFTIDK

SEQ ID NO: 14925 - protein, 470 aa, synthetic construct
  REGION 1..470: note = neuraminidase__InfluenzaA__ABD95056
MNPNQKIITIGSISIAIGIISLMLQIGNIISIWASHSIQTGSQNHTGVCNQRIITYENSTWVNHTYVNINNTNVIAGKDKTSVTLAGNSSLCSISGWAIYTKDNSIRIGSKGDVFVIREPFISCSHLECRTFFLTQGALLNDKHSNGTVKDRSPYRALMSCPLGEAPSPYNSKFESVAWSASACHDGMGWLTIGISGPDNGAVAVLKYNGIITETIKSWKKQILRTQESECVCVNGSCFTIMTDGPSNGAASYKIFKIEKGKITKSIELNAPNFHYEECSCYPDTGTVMCVCRDNWHGSNRPWVSFNQNLDYQIGYICSGVFGDNPRPKDGEGSCNPVTVDGANGVKGFSYKYGNGVWIGRTKSNRLRKGFEMIWDPNGWTDTDSDFSVKQDVVAITDWSGYSGSFVQHPELTGLNCIRPCFWVELVRGLPKENTTIWTSGSSISFCGVNSDTANWSWPDGAELPFTIDK

SEQ ID NO: 14926 - protein, 470 aa, synthetic construct; identical to SEQ ID NO: 14396
  REGION 1..470: note = neuraminidase__InfluenzaA__ABD95067

SEQ ID NO: 14927 - protein, 470 aa, synthetic construct; identical to SEQ ID NO: 14396
  REGION 1..470: note = neuraminidase__InfluenzaA__ABD95078

SEQ ID NO: 14928 - protein, 470 aa, synthetic construct; identical to SEQ ID NO: 14925
  REGION 1..470: note = neuraminidase__InfluenzaA__ABD95089

SEQ ID NO: 14929 - protein, 470 aa, synthetic construct; identical to SEQ ID NO: 14396
  REGION 1..470: note = neuraminidase__InfluenzaA__ABD95100

SEQ ID NO: 14930 - protein, 470 aa, synthetic construct
  REGION 1..470: note = neuraminidase__InfluenzaA__ABD95111
MNPNQKIITIGSISIAIGMISLMLQIGNIISIWASHSIQTGSQNHTGVCNQRIITYENSTWVNHTYVNINNTNVIAGKDKTSVTLAGNSSLCSISGWAIYTKDNSIRIGSKGDVFVIREPFISCSHLECRTFFLTQGALLNDKHSNGTVKDRSPYRALMSCPLGEAPSPYNSKFESVAWSASACHDGMGWLTIGISGPDNGAVAVLKYNGIITETIKSWKKQILRTQESECVCVNGSCFTIMTDGPSNGAASYKIFKIEKGKVTKSIELNAPNFHYEECSCYPDTGTVMCVCRDNWHGSNRPWVSFNQNLDYQIGYICSGVFGDNPRPKDGEGSCNPVTVDGANGVKGFSYKYGNGVWIGRTKSNRLRKGFEMIWDPNGWTDTDSDFSVKQDVVAITDWSGYSGSFVQHPELTGLDCIRPCFWVELVRGLPKENTTIWTSGSSISFCGVNSDTANWSWPDGAELPFTIDK

SEQ ID NO: 14931 - protein, 470 aa, synthetic construct; identical to SEQ ID NO: 14930
  REGION 1..470: note = neuraminidase__InfluenzaA__ABD95122

SEQ ID NO: 14932 - protein, 470 aa, synthetic construct; identical to SEQ ID NO: 14396
  REGION 1..470: note = neuraminidase__InfluenzaA__ABD95144

SEQ ID NO: 14933 - protein, 470 aa, synthetic construct; identical to SEQ ID NO: 14396
  REGION 1..470: note = neuraminidase__InfluenzaA__ABD95155

SEQ ID NO: 14934 - protein, 470 aa, synthetic construct
  REGION 1..470: note = neuraminidase__InfluenzaA__ABD95166
MNPNQKIITIGSISIAIGMISLMLQIGNIISIWASHSIQTGSQNHTGVCNQRIITYENSTWVNHTYVNINNTNVIAEKDKTSVTLAGNSSLCSISGWAIYTKDNSIRIGSKGDVFVIREPFISCSHLECRTFFLTQGALLNDKHSNGTVKDRSPYRALMSCPLGEAPSPYNSKFESVAWSASACHDGMGWLTIGISGPDNGAVAVLKYNGIITETIKSWKKQILRTQESECVCVNGSCFTIMTDGPSNGAASYKIFKIEKGKVTKSIELNAPNFHYEECSCYPDTGTVMCVCRDNWHGSNRPWVSFNQNLDYQIGYICSGVFGDNPRPKDGEGSCNPVTVDGANGVKGFSYKYGNGVWIGRTKSNRLRKGFEMIWDPNGWTDTDSDFSVKQDVVAITDWSGYSGSFVQHPELTGLDCIRPCFWVELVRGLPKENTTIWTSGSSISFCGVNSDTANWSWPDGAELPFTIDK

SEQ ID NO: 14935 - protein, 470 aa, synthetic construct; identical to SEQ ID NO: 14925
  REGION 1..470: note = neuraminidase__InfluenzaA__ABD95177

SEQ ID NO: 14936 - protein, 470 aa, synthetic construct
  REGION 1..470: note = neuraminidase__InfluenzaA__ABD95188
MNPNQKIITIGSISTTIGIISLMLQIGNIISIWASHSIQTGSQNHTGVCNQRIITYENSTWVNHTYVNINNTNVIAGKDKTSVTLAGNSSLCSISGWAIYTKDNSIRIGSKGDVFVIREPFISCSHLECRTFFLTQGALLNDKHSNGTVKDRSPYRALMSCPLGEAPSPYNSKFESVAWSASACHDGMGWLTIGISGPDNGAVAVLKYNGIITETIKSWKKQILRTQESECVCVNGSCFTIMTDGPSNGAASYKIFKIEKGKVTKSIELNAPNFHYEECSCYPDTGTVMCVCRDNWHGSNRPWVSFNQNLDYQIGYICSGVFGDNPRPKDGEGSCNPVTVDGANGVKGFSYKYGNGVWIGRTKSNRLRKGFEMIWDPNGWTDTDSDFSVKQDVVAITDWSGYSGSFVQHPELTGLDCIRPCFWVELVRGLPKENTTIWTSGSSISFCGVNSDTANWSWPDGAELPFTIDK

SEQ ID NO: 14937 - protein, 470 aa, synthetic construct; identical to SEQ ID NO: 14925
  REGION 1..470: note = neuraminidase__InfluenzaA__ABD95199

SEQ ID NO: 14938 - protein, 470 aa, synthetic construct; identical to SEQ ID NO: 14415
  REGION 1..470: note = neuraminidase__InfluenzaA__ABD95210

SEQ ID NO: 14939 - protein, 470 aa, synthetic construct
  REGION 1..470: note = neuraminidase__InfluenzaA__ABD95221
MNPNQKIITIGSISIAIGMISLMLQIGNIISIWASHSIQTGSQNHTGVCNQRIITYENSTWVNHTYVNINNTNVIAGKDKTSVTLAGNSSLCSISGWAIYTKDNSIRIGSKGDVFVIREPFISCSHLECRTFFLTQGALLNDKHSNGTVKDRSPYRALMSCPLGEAPSPYNSKFESVAWSASACHDGMGWLTIGISGPDNGAVAVLKYNGIITETIKSWKKQILRTQESECVCVNGSCFTIMTDGPSNGAASYKIFKIEKGKVTKSIELNAPNSHYEECSCYPDTGTVMCVCRDNWHGSNRPWVSFNQNLDYQIGYICSGVFGDNPRPKDGEGSCNPVTVDGANGVKGFSYKYGNGVWIGRTKSNRLRKGFEMIWDPNGWTDTDSDFSVKQDVVAITDWSGYSGSFVQHPELTGLDCIRPCFWVELVRGLPKENTTIWTSGSSISFCGVNSDTANWSWPDGAELPFTIDK

SEQ ID NO: 14940 - protein, 470 aa, synthetic construct; identical to SEQ ID NO: 14930
  REGION 1..470: note = neuraminidase__InfluenzaA__ABD95232

SEQ ID NO: 14941 - protein, 470 aa, synthetic construct; identical to SEQ ID NO: 14396
  REGION 1..470: note = neuraminidase__InfluenzaA__ABD95243

SEQ ID NO: 14942 - protein, 470 aa, synthetic construct; identical to SEQ ID NO: 14930
  REGION 1..470: note = neuraminidase__InfluenzaA__ABD95254

SEQ ID NO: 14943 - protein, 470 aa, synthetic construct; identical to SEQ ID NO: 14415
  REGION 1..470: note = neuraminidase__InfluenzaA__ABD95265

SEQ ID NO: 14944 - protein, 470 aa, synthetic construct; identical to SEQ ID NO: 14396
  REGION 1..470: note = neuraminidase__InfluenzaA__ABD95276

SEQ ID NO: 14945 - protein, 470 aa, synthetic construct
  REGION 1..470: note = neuraminidase__InfluenzaA__ABD95287
MNPNQKIITIGSISVAIGIISLMLQIGNIISIWASHSIQTGSQNHTGVCNQRIITYENSTWVNHTYVNINNTNVIAGKDKTSVTLAGNSSLCSISGWAIYTKDNSIRIGSKGDVFVIREPFISCSHLECRTFFLTQGALLNDKHSNGTVKDRSPYRALMSCPLGEAPSPYNSKFESVAWSASACHDGMGWLTIGISGPDNGAVAVLKYNGIITETIKSWKKQILRTQESECVCVNGSCFTIMTDGPSNGAASYKIFKIEKGKVTKSIELNAPNFHYEECSCYPDTGTVMCVCRDNWHGSNRPWVSFNQNLDYQIGYICSGVFGDNPRPKDGEGSCNPVTVDGANGVKGFSYKYGNGVWIGRTKSNRLRKGFEMIWDPNGWTDTDSDFSVKQDVVAITDWSGYSGSFVQHPELTGLDCIRPCFWVELVRGLPKENTTIWTSGSSISFCGVNSDTANWSWPDGAELPFTIDK

SEQ ID NO: 14946 - protein, 470 aa, synthetic construct; identical to SEQ ID NO: 14396
  REGION 1..470: note = neuraminidase__InfluenzaA__ABD95298

SEQ ID NO: 14947 - protein, 470 aa, synthetic construct
  REGION 1..470: note = neuraminidase__InfluenzaA__ABD95309
MNPNQKIITIGSISIAIGMISLMLQIGNIISIWASHSIQTGSQNHTGVCNQRIITYENSTWVNHTYVNINNTNVIAGKDKTSVTLAGNSSLCSISGWAIYTKDNSIRIGSKGDVFVIREPFISCSHLECRTFFLTQGALLNDKHSNGTVKDRSPYRALMSCPLGEAPSPYNSKFESVAWSASACHDGMGWLTIGISGPDNGAVAVLKYNGIITETIKSWKKQILRTQESECVCVNGSCFTIMTDGPSNGAASYKIFKIEKGKVTKSIELNAPNFHYEECSCYPDTGTVMCVCRDNWHGSNRPWVSFNQNLDYQIGYICSGVFGDNPRPKDGEGSCNPVTVDGANGVKGFSYKYGNGVWIGRTKCNRLRKGFEMIWDPNGWTDTDSDFSVKQDVVAITDWSGYSGSFVQHPELTGLDCIRPCFWVELVRGLPKENTTIWTSGSSISFCGVNSDTANWSWPDGAELPFTIDK

SEQ ID NO: 14948 - protein, 470 aa, synthetic construct; identical to SEQ ID NO: 14396
  REGION 1..470: note = neuraminidase__InfluenzaA__ABD95320

SEQ ID NO: 14949 - protein, 470 aa, synthetic construct; identical to SEQ ID NO: 14925
  REGION 1..470: note = neuraminidase__InfluenzaA__ABD95331

SEQ ID NO: 14950 - protein, 470 aa, synthetic construct
  REGION 1..470: note = neuraminidase__InfluenzaA__ABD95342
MNPNQKIITIGSICMAIGIISLILQIGNIISIWVSHSIQTGSQNHTGICNQRIITYENSTWVNQTYVNINNTNVVAGKDTTSVTLAGNSSLCPVRGWAIYSKDNSIRIGSKGDVFVIREPFISCSHLECRTFFLTQGALLNDKHSNGTVKDRSPYRALMSCPIGEAPSPYNSRFESVAWSASACHDGMGWLTIGISGPDDGAVAVLKYNGIITETIKSWRKRILRTQESECVCINGSCFTIMTDGPSNGPASYRIFKIEKGKITKSIELDAPNSHYEECSCYPDTGTVMCVCRDNWHGSNRPWVSFNQNLDYQIGYICSGVFGDNPRPKDGKGSCGPVTVDGADGVKGFSYRYGNGVWIGRTKSNSSRKGFEMIWDPNGWTDTDSNFLVKQDVVAMTDWSGYSGSFVQHPELTGLDCMRPCFWVELIRGRPREKTTIWTSGSSISFCGVNSDTVNWSWPDGAELPFTIDK

SEQ ID NO: 14951 - protein, 470 aa, synthetic construct
  REGION 1..470: note = neuraminidase__InfluenzaA__ABD95353
MNPNQKIITIGSICMAIGIISLILQIGNIISIWVSHSIQTGSQNHTGICNQRIITYENSTWVNQTYVNISNTNVVAGKDTTSMTLAGNSSLCPIRGWAIYSKDNSIRIGSKGDVFVIREPFISCSHLECRTFFLTQGALLNDKHSNGTVKDRSPYRALMSCPIGEAPSPYNSRFESVAWSASACHDGMGWLTIGISGPDDGAVAVLKYNGIITETIKSWRKQILRTQESECVCVNGSCFTIMTDGPSDGPASYRIFKIEKGKITKSIELDAPNSHYEECSCYPDTGTVMCVCRDNWHGSNRPWVSFNQNLDYQIGYICSGVFGDNPRPKDGKGSCDPVNVDGADGVKGFSYRYGNGVWIGRTKSNSSRKGFEMIWDPNGWTDTDSNFLVKQDVVAMTDWSGYSGSFVQHPELTGLDCMRPCFWVELIRGRPREKTTIWTSGSSISFCGVNSDTVNWSWPDGAELPFTIDK

SEQ ID NO: 14952 - protein, 470 aa, synthetic construct; identical to SEQ ID NO: 14828
  REGION 1..470: note = neuraminidase__InfluenzaA__ABE11660

SEQ ID NO: 14953 - protein, 470 aa, synthetic construct
  REGION 1..470: note = neuraminidase__InfluenzaA__ABE11671
MNPNQKIITIGSISIAIGIISLMLQIGNIISIWASHSIQTGSQNHTGVCNQRIITYENSTWVNHTYVNINNTNVVAGKDKTSVTLAGNSSLCSISGWAIYTKDNSIRIGSKGDVFVIREPFISCSHLECRTFFLTQGALLNDKHSNGTVKDRSPYRALMSCPLGEAPSPYNSKFESVAWSASACHDGMGWLTIGISGPDNGAVAVLKYNGIITETIKSWKKQILRTQESECVCVNGSCFTIMTDGPSNGAASYKIFKIEKGKVNKSIELNAPNFHYEECSCYPDTGTVMCVCRDNWHGSNRPWVSFNQNLDYQIGYICSGVFGDNPRPKDGEGSCNPVTVDGANGVKGFSYKYGNGVWIGRTKSNRLRKGFEMIWDPNGWTDTDSDFSVKQDVVAITDWSGYSGSFVQHPELTGLDCIRPCFWVELVRGLPRENTTIWTSGSSISFCGVNSDTANWSWPDGAELPFTIDK

SEQ ID NO: 14954 - protein, 470 aa, synthetic construct
  REGION 1..470: note = neuraminidase__InfluenzaA__ABE11682
MNPNQKIITIGSISIAIGIISLMLQIGNIISIWASHSIQTGSQNHTGICNQRIITYENSTWVNHTYVNINNTNVVAGEDKTSVTLAGNSSLCSISGWAIYTKDNSIRIGSKGDVFVIREPFISCSHLECRTFFLTQGALLNDKHSNGTVKDRSPYRALMSCPLGEAPSPYNSKFESVAWSASACHDGMGWLTIGISGPDNGAVAVLKYNGIITETIKSWKKRILRTQESECVCVNGSCFTIMTDGPSNGAASYKIFKIEKGKVTKSIELNAPNFHYEECSCYPDTGTVMCVCRDNWHGSNRPWVSFNQNLDYQIGYICSGVFGDNPRPKDGEGSCNPVTVDGADGVKGFSYKYGNGVWIGRTKSNRLRKGFEMIWDPNGWTDTDSDFSVKQDVVAITDWSGYSGSFVQHPELTGLDCIRPCFWVELVRGLPRENTTIWTSGSSISFCGVNSDTANWSWPDGAELPFTIDK

SEQ ID NO: 14955 - protein, 470 aa, synthetic construct; identical to SEQ ID NO: 14396
  REGION 1..470: note = neuraminidase__InfluenzaA__ABE11693

SEQ ID NO: 14956 - protein, 470 aa, synthetic construct; identical to SEQ ID NO: 14396
  REGION 1..470: note = neuraminidase__InfluenzaA__ABE11704

SEQ ID NO: 14957 - protein, 470 aa, synthetic construct; identical to SEQ ID NO: 14396
  REGION 1..470: note = neuraminidase__InfluenzaA__ABE11715

SEQ ID NO: 14958 - protein, 470 aa, synthetic construct; identical to SEQ ID NO: 14925
  REGION 1..470: note = neuraminidase__InfluenzaA__ABE11726

SEQ ID NO: 14959 - protein, 470 aa, synthetic construct; identical to SEQ ID NO: 14930
  REGION 1..470: note = neuraminidase__InfluenzaA__ABE11737

SEQ ID NO: 14960 - protein, 470 aa, synthetic construct; identical to SEQ ID NO: 14396
  REGION 1..470: note = neuraminidase__InfluenzaA__ABE11815

SEQ ID NO: 14961 - protein, 470 aa, synthetic construct; identical to SEQ ID NO: 14925
  REGION 1..470: note = neuraminidase__InfluenzaA__ABE11826

SEQ ID NO: 14962 - protein, 470 aa, synthetic construct; identical to SEQ ID NO: 14925
  REGION 1..470: note = neuraminidase__InfluenzaA__ABE11837

SEQ ID NO: 14963 - protein, 470 aa, synthetic construct; identical to SEQ ID NO: 14925
  REGION 1..470: note = neuraminidase__InfluenzaA__ABE11848

SEQ ID NO: 14964 - protein, 470 aa, synthetic construct; identical to SEQ ID NO: 14930
  REGION 1..470: note = neuraminidase__InfluenzaA__ABE11859

SEQ ID NO: 14965 - protein, 470 aa, synthetic construct
  REGION 1..470: note = neuraminidase__InfluenzaA__ABE11903
MNPNQKIITIGSISMAIGIISLILQIGNIISIWASHSIQTGSQNYTGICNQRIITYENSTWVNQTYVNINNTNVVAGKDKTSMTLAGNSSLCPIRGWAIYTKDNSIRIGSKGDVFVIREPFISCSHLECRTFFLTQGALLNDKHSNGTVKDRSPYRALMSCPLGEAPSPYNSRFESVAWSASACHDGLGWLTIGISGPDNGAVAVLKYNGIITETIKSWKKQILRTQESECVCVNGSCFTIMTDGPSNGAASYRIFKIEKGRVTKSIELDAPNYHYEECSCYPDTGTVMCVCRDNWHGSNRPWVSFNQNLDYQIGYICSGVFGDNPRPKDGEGSCNPVTVDGADGVKGFSYRYGNGVWIGRTKSNRLRKGFEMIWDPNGWTDTDSDFSMKQDVVAMTDWSGYSGSFVQHPELTGLDCMRPCFWVELVRGLPRENTTIWTSGSSISFCGVNSETANWSWPDGAELPFTIDK

SEQ ID NO: 14966 - protein, 470 aa, synthetic construct
  REGION 1..470: note = neuraminidase__InfluenzaA__ABE11925
MNPNQKIITIGSISIAIGIISLILQIGNIISIWASHSIQTGSQNHTGICNQRIITYENSTWVNQTYVNINNTNVVAGKDKTSMTLAGNSSLCPIRGWAIYTKDNSIRIGSKGDVFVIREPFISCSHLECRTFFLTQGALLNDKHSNGTVKDRSPYRALMSCPLGEAPSPYNSRFESVAWSASACHDGLGWLTIGISGPDNGAVAVLKYNGIITETIKSWKKRILRTQESECVCMNGSCFTIMTDGPSNGAASYRIFKIEKGKVTKSIELDAPNYHYEECSCYPDTGTVMCVCRDNWHGSNRPWVSFNQNLDYQIGYICSGVFGDNPRPKDGEGSCNPVTADGADGVKGFSYRYGNGVWIGRTKSNRLRKGFEMIWDPNGWTDTDSDFSMKQDIVAMTDWSGYSGSFVQHPELTGLDCMRPCFWVELVRGLPRENTTIWTSGSSISFCGVNSDTANWSWPDGAELPFTIDK

SEQ ID NO: 14967 - protein, 470 aa, synthetic construct
  REGION 1..470: note = neuraminidase__InfluenzaA__ABE11952
MNPNQKIITIGSISMAIGIISLILQIGNIISIWASHSIQTGSQNYTGICNQRIITYENSTWVNQTYVNINNTNVVAGKDKTSMTLAGNSSLCPIRGWAIYTKDNSIRIGSKGDVFVIREPFISCSHLECRTFFLTQGALLNDKHSNGTVKDRSPYRALMSCPLGEAPSPYNSRFESVAWSASACHDGLGWLTIGISGPDNGAVAVLKYNGIITETIKSWKKQILRTQESECVCVNGSCFTIMTDGPSNGAASYRIFKIEKGRVTKSIELDAPNYHYEECSCYPDTGTVMCVCRDNWHGSNRPWVSFNQNLDYQIGYICSGVFGDNPRPKDGEGSCNPVTVDGADGVKGFSYRYGNGVWIGRTKSNRLRKGFEMIWDPNGWTDTDSDFSMKQDVVAMTDWSGYSGSFVQHPELTGLDCMRPCFWVELVRGLPRENTTIWTSGSSISFCGVNSETADWSWPDGAELPFTIDK

SEQ ID NO: 14968 - protein, 470 aa, synthetic construct
  REGION 1..470: note = neuraminidase__InfluenzaA__ABE12035
MNPNQKIITIGSISIAIGIISLILQIGNIISIWASHSIQTGSQNHTGICNQRIITYENSTWVNQTYVNINNTNVVAGKDKTSMTLAGNSSLCPIRGWAIYTKDNSIRIGSKGDVFVIREPFISCSHLECRTFFLTQGALLNDKHSNGTVKDRSPYRALMSCPLGEAPSPYNSRFESVAWSASACHDGLGWLTIGISGPDNGAVAVLKYNGIITETIKSWKKRILRTQESECVCMNGSCFTIMTDGPSNGAASYRIFKIEKGRVTKSIELDAPNYHYEECSCYPDTGTVMCVCRDNWHGSNRPWVSFNQNLDYQIGYICSGVFGDNPRPKDGEGSCNPVTVDGADGVKGFSYRYGNGVWIGRTKSNRLRKGFEMIWDPNGWTDTDSDFSMKQDIVAMTDWSGYSGSFVQHPELTGLDCMRPCFWVELVRGLPRENTTIWTSGSSISFCGVNSDTANWSWPDGAELPFTIDK

SEQ ID NO: 14969 - protein, 469 aa, synthetic construct; identical to SEQ ID NO: 14730
  REGION 1..469: note = neuraminidase__InfluenzaA__ABE12094

SEQ ID NO: 14970 - protein, 469 aa, synthetic construct; identical to SEQ ID NO: 14862
  REGION 1..469: note = neuraminidase__InfluenzaA__ABE12126

SEQ ID NO: 14971 - protein, 470 aa, synthetic construct; identical to SEQ ID NO: 14396
  REGION 1..470: note = neuraminidase__InfluenzaA__ABE12263

SEQ ID NO: 14972 - protein, 469 aa, synthetic construct
  REGION 1..469: note = neuraminidase__InfluenzaA__ABE12626
MNPNQKIITIGSVSLTIATICFLMQIAILVTTVTLHFKQYECDSPANNQVMPCEPIIIERNITEIVYLTNTTIEKEICPKLVEYRKWSKPQCKITGFAPFSKDNSIRLSAGGDIWVTREPYVSCDPGKCYQFALGQGTTLDNKHSNDTIHDRIPHRTLLMNELGVPFHLGTRQVCIAWSSSSCHDGKAWLHVCVTGDDKNATASFIYDGRLVDSIGSWSQNILRTQESECVCINGTCTVVMTDGSASGRADTRILFIEEGKIVHISPLSGSAQHVEECSCYPRYPGVRCICRDNWKGSNRPVVDINVKDYSIDSSYVCSGLVGDTPRNNDRSSNSYCRNPNNERGNHGVKGWAFDDGNDVWMGRTISKDSRSGYETFKVIGGWSTPNSKSQINRQVIVDSDNRSGYSGIFSVEGKSCINRCFYVELIRGREQETRVWWTSNSIVVFCGTSGTYGTGSWPDGADINLMPI

SEQ ID NO: 14973 - protein, 469 aa, synthetic construct
  REGION 1..469: note = neuraminidase__InfluenzaA__ABE12650
MNPNQKIITIGSVSLTIATICFLMQIAILVTTVTLHFKQYECNSPPNNQVMLCEPTIIERNITEIVYLTNTTIEKEICPKLAEYRNWSKPQCKITGFAPFSKDNSIRLSAGGDIWVTREPYVSCDPDKCYQFALGQGTTLNNRHSNDTVHDRTPYRTLLMNELGVPFHLGTKQVCIAWSSSSCHDGKAWLHVCVTGHDENATASFIYDGRLVDSIGSWSKKILRTQESECVCINGTCTVVMTDGSASGRADTKILFIKEGKIVHISPLLGSAQHVEECSCYPRYPGVRCVCRDNWKGSNRPIVDINVKDYSIVSSYVCSGLVGDTPRKNDSSSSSHCLNPNNEEGGHGVKGWAFDDGNDVWMGRTISEKLRSGYETFKVIEGWSKPNSKLQINRQVIVDRGNRSGYSGIFSVEGKSCINRCFYVELIRGRKQETEVWWTSNSIVVFCGTSGTYGTGSWPDGADINLMPI

SEQ ID NO: 14974 - protein, 469 aa, synthetic construct
  REGION 1..469: note = neuraminidase__InfluenzaA__ABE13095
MNPNQKIITIGSVSLTITTICFLMQIAILVITVTLHFKQCECNSPPNNQVMLCEPTIIERNITEIVYLTNTTIEKEICPKLAEYRNWSKPQCKITGFAPFSKDNSIRLSAGGDIWVTREPYVSCDPGKCYQFALGQGTTLNNRHSNDTVHDRTPYRTLLMNELGVPFHLGTKQVCIAWSSSSCHDGKAWLHVCVTGHNENATASFIYDGRLVDSIGSWSKNILRTQESECVCINGTCTVVMTDGSASGRADTKILFIEEGKIVHISPLSGSAQHVEECSCYPRYPGVRCVCRDNWKGSNRPIVDINVKDYSIVSSYVCSGLVGDTPRKNDGSSSSYCLDPNNEEGGHGVKGWAFDDGNDVWMGRTISEKLRSGYETFKVIGGWSKPNSKLQINRQVIVDKGNRSGYSGIFSVEGKSCINRCFYVELIRGRKQETEVWWTSNSIVVFCGTSGTYGTGSWPDGADINLMPI

SEQ ID NO: 14975 - protein, 469 aa, synthetic construct; identical to SEQ ID NO: 14126
  REGION 1..469: note = neuraminidase__InfluenzaA__ABE13332

SEQ ID NO: 14976 - protein, 469 aa, synthetic construct; identical to SEQ ID NO: 14126
  REGION 1..469: note = neuraminidase__InfluenzaA__ABE13558

SEQ ID NO: 14977 - protein, 469 aa, synthetic construct
  REGION 1..469: note = neuraminidase__InfluenzaA__ABE13642
MNPNQKIITIGSVSLTIATICFLMQIAILVTTVTLHFKQYECNSPPNNQVMLCEPTIIERNITEIVYLTNTTIEKEICPKLAEYRNWSKPQCKITGFAPFSKDNSIRLSAGGDIWVTREPYVSCDPGKCYQFALGQGTTLNNRHSNDTVHERTPYRTLLMNELGVPFHLGTKQVCIAWSSSSCHDGKAWLHVCVTGHDENATASFIYNGRLVDSIGSWSKNILRTQESECVCINGTCTVVMTDGSASGRADTKILFIEEGKIVHISPLSGSAQHVEECSCYPRYPGVRCVCRDNWKGSNRPIVDINVKDYSIVSSYVCSGLVGDTPRKNDSSSSSHCLNPNNEEGGHGVKGWAFDDGNDVWMGRTISEKLRSGYETFKVIGGWSKPNSKLQINRQVIVDRGNRSGYSGIFSVEGKSCINRCFYVELIRGRKQETEVWWTSNSIVVFCGTSGTYGTGSWPDGADINLMPI

SEQ ID NO: 14978 - protein, 469 aa, synthetic construct
  REGION 1..469: note = neuraminidase__InfluenzaA__ABE13668
MNPNQKIITIGSVSLTIATICFLMQIAILVTTVTLHFKQYECNSPPNNQVMLCEPTIIERNITEIVYLTNTTIEKEICPKLAEYRNWSKPQCKITGFAPFSKDNSIRLSAGGDIWVTREPYVSCDPGKCYQFALGQGTTLNNRHSNDTVHDRTPYRTLLMNELGVPFHLGTKQVCIAWSSSSCHDGKAWLHVCVTGHDENATASFIYDGRLVDSIGSWSKNILRTQESECVCINGTCTVVMTDGSASGRADTKILFIEEGKIVHISPLSGSAQHVEECSCYPRYPGVRCVCRDNWKGSNRPIVDINVKDYSIVSSYVCSGLVGDTPRKNDSSSSSHCLNPNNEEGGHGVKGWAFDDGNDVWMGRTISEKLRSGYETFKVIGGWSKPNSKLQINRQVIVDRGNRSGYSGIFSVEGKSCINRCFYVELIRGRKQETEVWWTSNSIVVFCGTSGTYGTGSWPDGADINLMPI

SEQ ID NO: 14979 - protein, 469 aa, synthetic construct
  REGION 1..469: note = neuraminidase__InfluenzaA__ABE13836
MNPNQKIITIGSVSLTIATICFLMQIAILVTTVTLHFKQYECNSLPNNQVMLCEPTIIERNITEIVYLTNTTIEKEICPKLAEYRNWSKPQCKITGFAPFSKDNSIRLSAGGDIWVTREPYVSCDPGKCYQFALGQGTTLNNRHSNDTVHDRTPYRTLLMNELGVPFHLGTKQVCIAWSSSSCHDGKAWLHVCVTGHDENATASFIYDGRLVDSIGSWSKNILRTQESECVCINGTCTVVMTDGSASGRADTKILFIEEGKIVHISPLSGSAQHVEECSCYPRYPGVRCVCRDNWKGSNRPIVDINVKDYSIVSSYVCSGLVGDTPRKNDSSSSSHCLNPNNEEGGHGVKGWAFDDGNDVWMGRTISEKLRSGYETFKVIGGWSKPNSKLQINRQVIVDRGNRSGYSGIFSVEGKSCINRCFYVELIRGRKQETEVWWTSNSIVVFCGTSGTYGTGSWPDGADINLMPI

SEQ ID NO: 14980 - protein, 469 aa, synthetic construct
  REGION 1..469: note = neuraminidase__InfluenzaA__ABE14033
MNPNQKIITIGSVSLTIATICFLMQIAILVTTVTLHFKQYECNSPPNNQVMLCEPTIIERNITEIVYLTNTTIEKEICPKLAEYRNWSKPQCKITGFAPFSKDNSIRLSAGGDIWVTREPYVSCDPGKCYQFALGQGTTLNNRHSNDTVHDRTPYRTLLMNELGVPFHLGTKQVCIAWSSSSCHDGKAWLHVCVTGHDENATASFIYDGRLVDSIGSWSKNILRTQESECVCINGTCTVVMTDGSASGRADTKILFIEEGKIVHISPLSGSAQHVEECSCYPRYPGVRCVCRDNWKGSNRPIVDINVKDYSIVSSYVCSGLVGDTPRKNDSSSSSYCLNPNNEEGGHGVKGWAFDDGNDVWMGRTISEKLRSGYETFKVIGGWSKPNSKLQINRQVIVDRGNRSGYSGIFSVEGKSCINRCFYVELIRGRKQETEVWWTSNSIVVFCGTSGTYGTGSWPDGADINLMPI

SEQ ID NO: 14981 - protein, 469 aa, synthetic construct
  REGION 1..469: note = neuraminidase__InfluenzaA__ABE14055
MNPNQKIITIGSVSLTIATICFLMQIAILVTTVTLHFKQYECNSPPNNQVMLCEPTIIERNITEIVYLTNTTIEKEICPKLAEYRNWSKPQCKITGFAPFSKDNSIRLSAGGDIWVTREPYVSCDPDKCYQFALGQGTTLNNRHSNDTVHDRTPYRTLLMNELGVPFHLGTKQVCIAWSSSSCHDGKAWLHVCVTGHDENATASFIYDGRLVDSISSWSKNILRTQESECVCINGTCTVVMTDGSSSGRADTKILFIEEGKIVHISPLSGSAQHVEECSCYPRYPGVRCVCRDNWKGSNRPIVDINVKDYSIVSSYVCSGLVGDTPRKNDSSSSSYCLNPNNEEGGHGVKGWAFDDGNDVWMGRTISEKLRSGYETFKVIGGWSKPNSKLQINRQVIVDRGNRSGYSGIFSVEGKSCVNRCFYVELIRGRKQETEVWWTSNSIVVFCGTSGTYGTGSWPDGADINLMPI

SEQ ID NO: 14982 - protein, 469 aa, synthetic construct
  REGION 1..469: note = neuraminidase__InfluenzaA__ABE14857
MNPNQKIITIGSVSLTIATICFLMQIAILVTTVTLHFKQYECNSPPNNQVMLCEPTIIERNTTEIVYLTNTTIEKEICPKLAEYRNWSKPQCKITGFAPFSKDNSIRLSAGGDIWVTREPYVSCDPGKCYQFALGQGTTLNNRHSNDTVHDRTPYRTLLMNELGVPFHLGTKQVCIAWSSSSCHDGKAWLHVCVTGHDENATASFIYDGRLVDSIGSWSKNILRTQESECVCINGTCTVVMTDGSASGRADTKILFIEEGKIVHISPLSGSAQHVEECSCYPRYPGVRCVCRDNWKGSNRPIVDINVKDYSIVSSYVCSGLVGDTPRKNDSSSSSYCLNPNNEEGGHGVKGWAFDDGNDVWMGRTISEKLRSGYETFKVIGGWSKPNSKLQINRQVIVDRGNRSGYSGIFSVEGKSCINRCFYVELIRGRKQETEVWWTSNSIVVFCGTSGTYGTGSWPDGADINLMPI

SEQ ID NO: 14983 - protein, 469 aa, synthetic construct; identical to SEQ ID NO: 14980
  REGION 1..469: note = neuraminidase__InfluenzaA__ABE15594

SEQ ID NO: 14984 - protein, 470 aa, synthetic construct
  REGION 1..470: note = neuraminidase__InfluenzaA__ABE26994
MNPNQKIITIGSISIAIGIISLILQIGNIISIWASHSIQTGSQNHTGICNQRIITYENSTWVNQTYVNINNTNVVAGKDKTSMTLAGNSSLCPIRGWAIYTKDNSIRIGSKGDVFVIREPFISCSHLECRTFFLTQGALLNDKHSNGTVKDRSPYRALMSCPLGEAPSPYNSRFESVAWSASACHDGLGWLTIGISGPDNGAVAVLKYNGIITETIKSWKKRILRTQESECVCMNGSCFTIMTDGPSNGAASYRIFKIEKGRVTKSIELDAPNYHYEECSCYPDTGTVMCVCRDNWHSSNRPWVSFNQNLDYQIGYICSGVFGDNPRPKDGEGSCNPVTVDGADGVKGFSYRYGNGVWIGRTKSNRLRKGFEMIWDPNGWTDTDSDFSMKQDIVAMTDWSGYSGSFVQHPELTGLDCMRPCFWVELVRGLPRENTTIWTSGSSISFCGVNSDTANWSWPDGAELPFTIDK

SEQ ID NO: 14985 - protein, 449 aa, synthetic construct
  REGION 1..449: note = neuraminidase__InfluenzaA__ABE97641
MNPNQKIITIGSICMVIGIISLMLQIGNMISIWVSHSIQTWNQHQAESISNTNPLTEKAVASVTLAGNSSLCPIRGWAVHSKDNSIRIGSKGDVFVIREPFISCSHLECRTFFLTQGALLNDKHSNGTVKDRSPHRTLMSCPVGEAPSPYNSRFESVAWSASACHDGTSWLTIGISGPDNGAVAVLKYNGIITDTIKSWRNNILRTQESECACVNGSCFTVMTDGPSNGQASYKIFKMEKGKVVKSVELDAPNYHYEECSCYPDAGEITCVCRDNWHGSNRPWISFNQNLEYQIGYICSGVFGDNPRPNDGTGSCGPMSPNGAYGVKGFSFKYGNGVWIGRTKSTNSRSGFEMIWDPNGWIGTDSSFSVKQDIVAITDWSGYSGSFVQHPELTGLDCIRPCFWVELIRGRPKESTIWTSGSSISFCGVNSDIVSWSWPDGAELPFTIDK

SEQ ID NO: 14986 - protein, 449 aa, synthetic construct
  REGION 1..449: note = neuraminidase__InfluenzaA__ABE97642
MNPNQKIITIGSICMVIGMVSLMLQIGNMISIWLSHSIQTGNQHQAESISNNNLLTENAVASVTLAGNSSLCPIRGWAVHSKDNSIRIGSKGDVFVIREPFISCSHLECRTFFLTQGALLNDKHSNGTVKDRSPHRTLMSCPVGEAPSPYNSRFESVAWSASACHDGISWLTIGISGPDNGAVAVLKYNGIITDTIKSWRNNILRTQESECACVNGSCFTVMTDGPSNGQASYKIFKMEKGKVVKSVELDAPNYHYEECSCYPDAGEITCVCRDNWHGSNRPWVSFNQNLEYQIGYICSGVFGDNPRPNDGTGSCGPMSPNGAYGVKGFSFKYGNGVWIGRTKSTNSRSGFEMIWDPNGWTGTDSSFSVKQDIVAITDWSGYSGSFVQHPELTGLDCIRPCFWVELIRGRPKESTIWTSGSSISFCGVNGDTVSWSWPDGAELPFIIDK

SEQ ID NO: 14987 - protein, 449 aa, synthetic construct
  REGION 1..449: note = neuraminidase__InfluenzaA__ABE97644
MNPNQKIITIGSICMVIGIVSLMLQIGNMISIWVSHSIQTGNQHQAESISNTNPLTEKAVASVTLAGNSSLCPIRGWAVHSKDNNIRIGSKGDVFVIREPFISCSHLECRTFFLTQGALLNDKHSNGTVKDRSPHRTLMSCPVGEAPSPYNSRFESVAWSASACHDGTSWLTIGISGPDNGAVAVLKYNGIITDTIKSWRNNILRTQESECACVNGSCFTVMTDGPSNGQASYKIFKMEKGKVVKSVELDAPNYHYEECSCYPDAGEITCVCRDNWHGSNRPWVSFNQNLEYQIGYICSGVFGDNPRPNDGTGSCGPMSPNGAYGVKGFSFKYGNGVWIGRTKSTNSRSGFEMIWDPNGWTGTDSSFSVKQDIVALTDWSGYSGSFVQHPELTGLDCIRPCFWVELIRGRPKESTIWTSGSSISFCGVNSDTVSWSWPDGAELPFTIDK

SEQ ID NO: 14988 - protein, 449 aa, synthetic construct
  REGION 1..449: note = neuraminidase__InfluenzaA__ABE97645
MNPNQKIITIGSICMVIGTVSLMLQIGNMISIWVSHSIQTGNQHQAEPTSSTNPLTEKAVASVTLAGNSSLCPIRGWAIHSKDNSIRIGSKGDVFVIREPFISCSHLECRTFFLTQGALLNDKHSNGTVKDRSPHRTLMSCPVGEAPSPYNSRFESVAWSASACHDGTSWLTIGISGPDNGAVAVLKYNGIITDTIKSWRNNILRTQESECACVNGSCFTVMTDGPSNGQASYKIFKMEKGKVVKSVELDAPNYHYEECSCYPDAGEITCVCRDNWHGSNRPWVSFNQNLEYQIGYICSGVFGDNPRPNDGTGSCGPMSPNGAYGVKGFAFKYGNGVWIGRTKSTNSRSGFEMIWDPNGWTGPDSSFSVKQDIVAITDWSGYSGSFVQHPELTGLDCIRPCFWVELIRGRPKESTIWTSGSSISFCGVNSDTVSWSWPDGAELPFTIDK

SEQ ID NO: 14989 - protein, 449 aa, synthetic construct
  REGION 1..449: note = neuraminidase__InfluenzaA__ABE97646
MNPNQKIITIGSICMVIGIVSLMLQIGNMISIWVSHSIQTENQHQAESISNTNPPTEKAVASVTLAGNSSLCPIRGWAVHSKDNSIRIGSKGDVFVIREPFISCSHLECRTFFLTQGALLNDKHSNGTVKDRSPHRTLMSCPVGEAPSPYNSRFESVAWSASACHDGTSWLTIGISGPDNGAVAVLKYNGIITDTIKSWRNNTLRTQESECACVNGSCFTVMTDGPSNGQASYKIFKMEKGKVVKSVELDAPNYHYEECSCYPDAGEITCVCRDNWHGSNRPWVSFNQNLEYQIGYICSGVFGDNPRPNDGTGSCGPMSPNGAYGVKGFSFKYGNGVWIGRTKSTNSRSGFEMIWDPNGWTGTDSSFSVKQDIVSITDWSGYSGSFVQHPELTGLDCIRPCFWVELIRGRPKESTIWTSGSSISFCGVNSDTVSWSWPDGAELPFTIDK

SEQ ID NO: 14990 - protein, 449 aa, synthetic construct
  REGION 1..449: note = neuraminidase__InfluenzaA__ABE97647
MNPNQKIITIGSICMVIGIVSLMLQIGNMISIWVSHSIQTGNQHRAESISNTNPLTEKAVASVTLAGNSSLCPIRGWAVHSKDNNIRIGSKGDVFVIREPFISCSHLECRTFFLTQGALLNDKHSNGTVKDRSPHRTLMSCPVGEAPSPYNSRFESVAWSASACHDGTSWLTIGISGPDNGAVAVLKYNGIITDTIKSWRNNILRTQESECACVNGSCFTVMTDGPSNGQASYKIFKMEKGKVVKSVELDAPNYHYEECSCYPDAGEITCVCRDNWHGSNRPWVSFNQNLEYQIGYICSGVFGDNPRPNDGTGSCGPMSPNGAYGVKGFSFKYGNGVWIGRTKSTNSRSGFEMIWDPNGWTGTDSSFSVKQDIVAITDWSGYSGSFVQHPELTGLDCIRPCFWVELIRGRPKESTIWTSGSSISFCGVNSDTVSWSWPDGAELPFTIDK

SEQ ID NO: 14991 - protein, 449 aa, synthetic construct
  REGION 1..449: note = neuraminidase__InfluenzaA__ABE97649
MNPNQKIITIGSICMVIGIVSLMLQIGNMISIWVSHSIQTGNQHQAESISNTNPLTEKAVASVTLAGNSSLCPIRGWAVHSKDNSIRIGSKGDVFVIREPFISCSHLECRTFFLTQGALLNDKHSNGTVKDRSPHRTLMSCPVGEAPSPYNSRFESVAWSASACHDGTSWLTIGISGPDNGAVAVLKYNGIITDTIKSWRNNILRTQESECACVNGSCFTVMTDGPSNGQASYKIFKMEKGKVVKSVELDAPNYHYEECSCYPDAGEITCVCRDNWHGSNRPWVSFNQNLEYQIGYICSGVFGDNPRPNDGTGSCGPMSPNGAYGVKGFSFKYGNGVWIGRTKSTNSRSGFEMIWDPNGWTGTDSSFSVKQDIVAITDWSGYSGSFVQHPELTGLDCIRPCFWVELIRGRPKESTIWTSGSSISFCGVNSDTVSWSWPDGAELPFTIDK

SEQ ID NO: 14992 - protein, 449 aa, synthetic construct; identical to SEQ ID NO: 14991
  REGION 1..449: note = neuraminidase__InfluenzaA__ABE97651

SEQ ID NO: 14993 - protein, 449 aa, synthetic construct; identical to SEQ ID NO: 14991
  REGION 1..449: note = neuraminidase__InfluenzaA__ABE97653

SEQ ID NO: 14994 - protein, 449 aa, synthetic construct; identical to SEQ ID NO: 14991
  REGION 1..449: note = neuraminidase__InfluenzaA__ABE97654

SEQ ID NO: 14995 - protein, 449 aa, synthetic construct
  REGION 1..449: note = neuraminidase__InfluenzaA__ABE97655
MNPNQKIITIGSICMAIGIVSLMLQIGNMISIWVSHSIQTGNQHQAESTSNTNPLTEKAVASVTLAGNSSLCPIRGWAIHSKDNSIRIGSKGDVFVIREPFISCSHLECRTFFLTQGALLNDKHSNGTVKDRSPHRTLMSCPVGEAPSPYNSRFESVAWSASACHDGTSWLTIGISGPDNGAVAVLKYNGIITDTIKSWRNNILRTQESECACVNGSCFTVMTDGPSNGQASYKIFKMEKGKVVKSVELDAPNYHYEECSCYPDAGEITCVCRDNWHGSNRPWVSFNQNLEYQIGYICSGVFGDNPRPNDGTGSCGPMSPNGAYGVKGFAFKYGNGVWIGRTKSTNSRSGFEMIWDPNGWTGPDSSFSVKQDIVAITDWSGYSGSFVQHPELTGLDCIRPCFWVELIRGRPKESTIWTSGSSISFCGVNSDTVSWSWPDGAELPFTIDK

SEQ ID NO: 14996 - protein, 449 aa, synthetic construct
  REGION 1..449: note = neuraminidase__InfluenzaA__ABE97657
MNPNQKIITIGSICMVIGTVSLVLQIGNMISIWVSHSIQTGNQHQAESISNTNPLTEKAVASVTLAGNSSLCPIRGWAVHSKDNSIRIGSKGDVFVIREPFISCSHLECRTFFLTQGALLNDKHSNGTVKDRSPHRTLMSCPVGEAPSPYNSRFESVAWSASACHDGTSWLTIGISGPDNGAVAVLKYNGIITDTIKSWRDNILRTQESECACVNGSCFTVMTDGPSNGQASYKIFKMEKGKVVKSVELDAPNYHYEECSCYPDAGEITCVCRDNWHGSNRPWVSFNQNLEYQIGYICSGVFGDNPRPNDGTGSCGPMSSNGAYGVKGFSFKYGNGVWIGRTKSTNSRSGFEMIWDPNGWTGTDSSFSVKQDIVAITDWSGYSGSFVQHPELTGLDCIRPCFWVELIRGRPKESTIWTSGSSISFCGVNSDTVSWSWPDGAELPFTIDK

SEQ ID NO: 14997 - protein, 449 aa, synthetic construct
  REGION 1..449: note = neuraminidase__InfluenzaA__ABE97658
MNPNQKIITIGSICMVIGTISLMLQIGNMISIWVSHSIQTGNQHQTESISNTNPLTEKAVASVTLAGNSSLCSIRGWAVHSKDNSIRIGSKGDVFVIREPFISCSHLECRTFFLTQGALLNDKHSNGTVKDRSPHRTLMSCPVGEAPSPYNSRFESVAWSASACHDGTSWLTIGISGPDNGAVAVLKYNGIITDTIKSWRDNILRTQESECACVNGSCFTVMTDGPSNGQASYKIFKMEKGKVVKSVELDAPNYHYEECSCYPDAGEITCVCRDNWHGSNRPWVSFNQNLEYQIGYICSGVFGDNPRPNDGTGSCGPMSSNGAHGVKGFSFKYGNGVWIGRTKSTNSRSGFEMIWDPNGWTGTDSSFSVKQDIVAITDWSGYSGSFVQHPELTGLDCIRPCFWVELIRGRPKESTIWTSGSSISFCGVNSDTVSWSWPDGAELPFTIDK

SEQ ID NO: 14998 - protein, 449 aa, synthetic construct
  REGION 1..449: note = neuraminidase__InfluenzaA__ABE97659
MNPNQKIITIGSICMVIGIVSLMLQIGNMISIWVSHSIQTGNQHQAESISNTNPLTEKAVASVTLAGNSSLCPIRGWAVHSKDNSIRIGSKGDVFVIREPFISCSHLECRTFFLTQGALLNDKHSNETVKDRSPHRTLMSCPVGEAPSPYNSRFESVAWSASACHDGTSWLTIGISGPDNGAVAVLKYNGIITDTIKSWRDNILRTQESECACVNGSCFTVMTDGPSNGQASYKIFKMEKGKVVKSVELDAPNYHYEECSCYPDAGEITCVCRDNWHGSNRPWVSFNQNLEYQIGYICSGVFGDNPRPNDGTGSCGPMSSNGAYGVKGFSFKYGNGVWIGRTKSTNSRSGFEMIWDPNGWTGTDSSFSVKQDIVAITDWSGYSGSFVQHPELTGLDCIRPCFWVELIRGRPKESTIWTSGSSISFCGVNSDTVSWSWPDGAELPFTIDK

SEQ ID NO: 14999 - protein, 449 aa, synthetic construct
  REGION 1..449: note = neuraminidase__InfluenzaA__ABE97660
MNPNQKIITIGSICMVIGTISLMLQIGNMISIWVSHSIQTGNQHQAESISNTNPLTEKAVASVTLAGNSSLCPIRGWAVHSKDNSIRIGSKGDVFVIREPFISCSHLECRTFFLTQGALLNDKHSNGTVKDRSPHRTLMSCPVGEAPSPYNSRFESVAWSASACHDGTSWLTIGISGPDNGAVAVLKYNGIITDTIKSWRDNILRTQESECACVNGSCFTVMTDGPSNGQASYKIFKMEKGKVVKSVELDAPNYHYEECSCYPDAGEITCVCRDNWHGSNRPWVSFNQNLEYQIGYICSGVFGDNPRPNDGTGSCGPMSSNGAHGVKGFSFKYGNGVWIGRTKSTNSRSGFEMIWDPNGWTGTDSSFSVKQDIVAITDWSGYSGSFVQHPELTGLDCIRPCFWVELIRGRPKESTIWTSGSSISFCGVNSDTVSWSWPDGAELPFTIDK

SEQ ID NO: 15000 - protein, 449 aa, synthetic construct
  REGION 1..449: note = neuraminidase__InfluenzaA__ABE97661
MNPNQKIITIGSICMVIGTISLMLQIGNMISIWVSHSIQTGNQHQTESISNTNPLTEKAVASVTLAGNSSLCPIRGWAVHSKDNSIRIGSKGDVFVIREPFISCSHLECRTFFLTQGALLNDKHSNGTVKDRSPHRTLMSCPVGEAPSPYNSRFESVAWSASACHDGTSWLTIGISGPDNGAVAVLKYNGIITDTIKSWRDNILRTQESECACVNGSCFTVMTDGPSNGQASYKIFKMEKGKVVKSVELDAPNYHYEECSCYPDAGEITCVCRDNWHGSNRPWVSFNQNLEYQIGYICSGVFGDNPRPNDGTGSCGPMSSNGAHGVKGFSFKYGNGVWIGRTKSTNSRSGFEMIWDPNGWTGTDSSFSVKQDIVATTDWSGYSGSFVQHPELTGLDCIRPCFWVELIRGRPKESTVWTSGSSISFCGVNSDTVSWSWPDGAELPFTIDK

SEQ ID NO: 15001 - protein, 449 aa, synthetic construct
  REGION 1..449: note = neuraminidase__InfluenzaA__ABE97662
MNPNQKIITIGSICMVIGIVSLMLQIGNMISIWVSHSIQTGNQHQAESISNTNPLTEKAVASVTLAGNSSLCPIRGWAVHSKDNSIRIGSKGDVFVIREPFISCSHLECRTFFLTQGALLNDKHSNGTVKDRSPHRTLMSCPVGEAPSPYNSRFESVAWSASACHDGTSWLTIGISGPDNGAVAVLKYNGIITDTIKSWRNNILRTQESECACVNGSCFTVMTDGPSNGQASYKIFKMRKGKVVKSVELDAPNYHYEECSCYPDAGEITCVCRDNWHGSNRPWVSFNQNLEYQIGYICSGVFGDNPRPNDGTGSCGPMSPNGAYGVKGFSFKYGNGVWIGRTKSTNSRSGFEMIWDPNGWTGTDSSFSVKQDIVAITDWSGYSGSFVQHPELTGLDCIRPCFWVELIRGRPKESTIWTSGSSISFCGVNSDTVSWSWPDGAELPFTIDK

SEQ ID NO: 15002 - protein, 449 aa, synthetic construct
  REGION 1..449: note = neuraminidase__InfluenzaA__ABE97663
MNPNQKIITIGSICMVTGIVSLMLQIGNMISIWVSHSIHTGNQHQAEPISNTNFLTEKAVASVKLAGNSSLCPINGWAVYSKDNSIRIGSKGDVFVIREPFISCSHLECRTFFLTQGALLNDKHSNGTVKDRSPHRTLMSCPVGEAPSPYNSRFESVAWSASACHDGTSWLTIGISGPDNGAVAVLKYNGIITDTIKSWRNNILRTQESECACVNGSCFTVMTDGPSNGQASHKIFKMEKGKVVKSVELDAPNYHYEECSCYPDAGEITCVCRDNWHGSNRPWVSFNQNLEYQIGYICSGVFGDNPRPNDGTGSCGPVSSNGAYGVKGFSFRYGNGVWIGRTKSTNSRSGFEMIWDPNGWTETDSSFSVKQDIVAITDWSGYSGSFVQHPELTGLDCIRPCFWVELIRGRPKESTIWTSGSSISFCGVNSDTVGWSWPDGAELPFTIDK

SEQ ID NO: 15003 - protein, 449 aa, synthetic construct
  REGION 1..449: note = neuraminidase__InfluenzaA__ABE97665
MNPNQKIITIGSICMVTGIVSLMLQVGNMISIWVSHSIHTGNQHQAEPISNTNFLTEKAVASVKLAGNSSLCPINGWAVYSKDNSIRIGSKGDVFVIREPFISCSHLECRTFFLTHGALLNDKHSNGTVKDRSPHRTLMSCPVGEAPSPYNSRFESVAWSASACHDGTSWLTIGISGPDNGAVAVLKYNGIITDTIKSWRNNILRTQESECACVNGSCFTVMTDGPSNGQASHKIFKMEKGKVVKSVELDAPNYHYEECSCYPDAGEITCVCRDNWHGSNRPWVSFNQNLEYQIGYICSGVFGDNPRPNDGTGSCGPVSSNGAYGVKGFSFKYGNGVWIGRTKSTNSRSGFEMIWDPNGWTETDSSFSVKQDIVAITDWSGYSGSFVQHPELTGLDCIRPCFWVELIRGRPKESTIWTSGSSISFCGVNSDTVGWSWPDGAELPFTIDK

SEQ ID NO: 15004 - protein, 449 aa, synthetic construct
  REGION 1..449: note = neuraminidase__InfluenzaA__ABE97666
MNPNQKIITIGSICMVTGIVSLMLQIGNMISIWVSHSIHTGNQHQSEPISNTNFLTEKAVASVKLAGNSPLCPINGWAVYSKDNSIRIGSKGDVFVIREPFISCSHLECRTFFLTQGALLNDKHSNGTVKDRSPHRTLMSCPVGEAPSPYNSRFESVAWSASACHDGTSWLTIGISGPDNGAVAVLKYNGIITDTIKSWRNNILRTQESECACVNGSCFTVMTDGPSNGQASHKIFKMEKGKVVKSVELDAPNYHYEECSCYPDAGEITCVCRDNWHGSNRPWVSFNQNLEYQIGYICSGVFGDSPRPNDGTGSCGPVSSNGAYGVKGFSFKYGNGVWIGRTKSTNSRSGFEMIWDPNGWTETDSSFSVKQDIVAITDWSGYSGSFVQHPELTGLDCIRPCFWVELIRGRPKESTIWTSGSSISFCGVNSDTVGWSWPDGAELPFTIDK

SEQ ID NO: 15005 - protein, 449 aa, synthetic construct
  REGION 1..449: note = neuraminidase__InfluenzaA__ABE97667
MNPNQKIITIGSICMVTGIVSLMLQIGNMISIWGSHSIHTGNQHQSEPISNTNFLTEKAVASVKLAGNSSLCPINGWAVYSKDNSIRIGSKGDVFVIREPFISCSHLECRTFFLTQGALLNDKHSNGTVKDRSPHRTLMSCPVGEAPSPYNSRFESVAWSASACHDGTSWLTIGISGPDNGAVAVVKYNGIITDTIKSWRNNILRTQESECACVNGSCFTVMTDGPSNGQASHKIFKMEKGKVVKSVELDAPNYHYEECSCYPDAGKITCVCRDNWHGSNRPWVSFNQNLEYQIGYICSGVFGDNPRPNDGTGSCGPVSSNGAYGVKGFSFKYGNGVWIGRTKSTNSRSGFEMIWDPNGWTETDSSFSVKQDIVAITDWSGYSGSFVQHPELTGLDCIRPCFWVELIRGRPKESTIWTSGSSISFCGVNSDIVGWSWPDGAELPFTIDK

SEQ ID NO: 15006 - protein, 449 aa, synthetic construct
  REGION 1..449: note = neuraminidase__InfluenzaA__ABE97669
MNPNQKIITIGSICMVTGIVSLMLQIGNMISIWVSHSIHTGNQHQSEPISNTNFLTEKAVASVKLAGNSSLCPINGWAVYSKDNSIRIGSKGDVFVIREPFISCSHLECRTFFLTQGALLNDKHSNGTVKDRSPHRTLMSCPVGEAPSPYNSRFESVAWSASACHDGTSWLTIGISGPDNGAVAVVKYNGIITDTIKSWRNNILRTQESECACVNGSCFTVMTDGPSNGQASHKIFKMEKGKVVKSVELDAPNYHYEECSCYPDAGEITCVCRDNWHGSNRPWVSFNQNLEYQIGYICSGVFGDNPRPNDGTGSCGPVSSNGAYGVKGFSFKYGNGVWIGRTKSTNSRSGFEMIWDPNGWTETDSSFSVKQDIVAITDWSGYSGSFVQHPELTGLDCIRPCFWVELIRGRPKESTIWTSGSSISFCGVNSDTVGWSWPDGAELPFTIDK

SEQ ID NO: 15007 - protein, 449 aa, synthetic construct
  REGION 1..449: note = neuraminidase__InfluenzaA__ABE97670
MNPNQKIITIGSICMVTGIVSLMLQIGNMISIWVSHSIHTGNQHQSEPISNTNFLTEKAVASVKLAGNSSLCPINGWAVYSKDNSIRIGSKGDVFVIREPFISCSHLECRTFFLTQGALLNDKHSNGTVKDRSPHRTLMSCPVGEAPSPYNSRFESVAWSASACHDGTSWLTIGISGPDNGAVAVVKYNGIITDTIKSWRNNILRTQESECACVNGSCFTVMTDGPSNGQASHKIFKMEKGKVVKSVELDTPNYHYEECSCYPDAGEITCVCRDNWHGSNRPWVSFNQNLEYQIGYICSGVFGDNPRPNDGTGSCGPVSSNGAYGVKGFSFKYGNGVWIGRTKSTNSRSGFEMIWDPNGWTETDSSFSVKQDIVAITDWSGYSGSFVQHPELTGLDCIRPCFWVELIRGRPKESTIWTSGSSISFCGVNSDTVGWSWPDGAELPFTIDK

SEQ ID NO: 15008 - protein, 449 aa, synthetic construct
  REGION 1..449: note = neuraminidase__InfluenzaA__ABE97671
MNPNQKIITIGSICMVTGIVSLMLQIGNMISIWVSHSIHTGNQHQAEPISNTNFLTEKAVASVKLAGNSSLCPINGWAVYSKDNSIRIGSKGDVFVIREPFISCSHLECRTFFLTQGALLNDKHSNGTVKDRSPHRTLMSCPVGEAPSPYNSRFESVAWSASACHDGTSWLTIGISGPDNGAVAVLKYNGIITDTIKSWRNNILRTQESECACVNGSCFTVMTDGPSNGQASHKIFKMEKGKVVKSVELDAPNYHYEECSCYPDAGEITCVCRDNWHGSNRPWVSFNQNLEYQIGYICSGVFGDNPRPNDGTGSCGPVSSNGAYGVKGFSFKYGNGVWIGRTKSTNSRSGFEMIWDPNGWTETDSSFSVKQDIVAITDWSGYSGSFVQHPELTGLDCIRPCFWVELIRGRPKESTIWTSGSSISFCGVNSDTVGWSWPDGAELPFTIDK

SEQ ID NO: 15009 - protein, 449 aa, synthetic construct
  REGION 1..449: note = neuraminidase__InfluenzaA__ABE97672
MNPNQKIITIGSICMVTGIVSLMLQIGNMISIWVSHSIHTGNQHQAEPISNTNFLTEKALASVKLAGNSSLCPINGWAVYSKDNSIRIGSKGDVFVIREPFISCSHLECRTFFLTQGALLNDKHSNGTVKDRSPHRTLMSCPVGEAPSPYNSRFESVAWSASACHDGTSWLTIGISGPDNGAVAVLKYNGIITDTIKSWRNNILRTQESECACVNGSCFTVMTDGPSNGQASHKIFKMEKGKVVKSVELDAPNYHYEECSCYPDAGEITCVCRDNWHGSNRPWVSFNQNLEYQIGYICSGVFGDNPRPNDGTGSCGPVSSNGAYGVKGFSFKYGNGVWIGRTKSTNSRSGFEMIWDPNGWTETDSSFSVKQDIVAITDWSGYSGSFVQHPELTGLDCIRPCFWVELIRGRPKESTIWTSGSSISFCGVNSDTVGWSWPDGAELPFTIDK

SEQ ID NO: 15010 - protein, 449 aa, synthetic construct
  REGION 1..449: note = neuraminidase__InfluenzaA__ABE97675
MNPNQKIITIGSICMVTGIVSLMLQVGNMISIWVSHSIHTGNQHQAEPISNTNFLIEKAVASVKLAGNSSLCPINGWAVYSKDNSIRIGSKGDVFVIREPFISCSHLECRTFFLTQGALLNDKHSNGTVKDRSPHRTLMSCPVGEAPSPYNSRFESVAWSASACHDGTSWLTIGISGPDNGAVAVLKYNGIITDTIKSWRNNILRTQESECACVNGSCFTVMTDGPSNGQASHKIFKIEKGKVVKSVELDAPNYHYEECSCYPDAGEITCVCRDNWHGSNRPWVSFNQNLEYQIGYICSGVFGDNPRPNDGTGSCGPVSSNGAYGVKGFSFKYGNGVWIGRTKSTNSRSGFEMIWDPNGWSETDSSFSVKQDIVAITDWSGYSGSFVQHPELTGLDCIRPCFWVELIRGRPKESTIWTSGSSISFCGVNSDTVGWSWPDGAELPFTIDK

SEQ ID NO: 15011 - protein, 449 aa, synthetic construct
  REGION 1..449: note = neuraminidase__InfluenzaA__ABE97676
MNPNQKIITIGSICMVTGIVSLMLQIGNMISIWVSHSIHTGNQHQAEPISNTNFLTEKAVASVKLAGNSSLCPINGWAVYSKDNSIRIGSKGDVFVIREPFISCSHLECRTFFLTQGALLNDKHSNGTVKDRSPHRTLMSCPVGEAPSPYNSRFESVAWSASACHDGTSWLTIGISGPDNGAVAVLKYNGIITDTIKSWRNNILRTQESECACVNGSCFTVMTDGPSNGQASHKIFKMEKGKVVKSVELDAPNYHYEECSCYPDAGEITCVCRDNWHGSNRPWVSFNQNLEYQIGYICSGVFGDNPRPNDGTGSCGPVSSNGAYGVKGFSFKYGNGVWIGRTKSTNSRSGFEMIWDPNGWTETDSSFSVKQDIVAINDWSGYSGSFVQHPELTGLDCIRPCFWVELIRGRPKESTIWTSGSSISFCGVNSDTVGWSWPDGAELPFTIDK

SEQ ID NO: 15012 - protein, 449 aa, synthetic construct
  REGION 1..449: note = neuraminidase__InfluenzaA__ABE97677
MNPNQKIITIGSICMVTGIVSLMLQIGNIISIWVRHSIHTGNQHQSEPISNTNFLTEKAVASVKLAGNSSLCPINGWAVYSKDNSIRIGSKGDVFVIREPFISCSHLECRTFFLTQGALLNDKHSNGTVKDRSPHRTLMSCPVGEAPSPYNSRFESVAWSASACHDGTSWLTIGISGPDNGAVAVVKYNGIITDTIKSWRNNILRTQESECACVNGSCFTVMTDGPSNGQASHKIFKMEKGKVVKSVELDAPNYHYEECSCYPDAGEITCVCRDNWHGSNRPWVSFNQNLEYQIGYICSGVFGDNPRPNDGTGSCGPVSSNGAYGVKGFSFKYGNGVWIGRTKSTNSRSGFEMIWDPNGWTETDSSFSVKQDIVAITDWSGYSGSFVQHPELTGLDCIRPCFWVELIRGRPKESTIWTSGSSISFCGVNSDTVGWSWPDGAELPFTIDK

SEQ ID NO: 15013 - protein, 449 aa, synthetic construct
  REGION 1..449: note = neuraminidase__InfluenzaA__ABE97679
MNPNQKIITIGSICMVTGIVSLMLQIGNMISIWVRHSIHTGNQHQSEPISNTNFLTEKAVASVKLAGNSSLCPINGWAVYSKDNSIRIGSKGDVFVIREPFISCSHLECRTFFLTQGALLNDKHSNGTVKDRSPHRTLMSCPVGEAPSPYNSRFESVAWSASACHDGTSWLTIGISGPDNGAVAVVKYNGIITDTIKSWRNNILRTQESECACVNGSCFTVMTDGPSNGQASHKIFKMEKGKVVKSVELDAPNYHYEECSCYPDAGEITCVCRDNWHGSNRPWVSFNQNLEYQIGYICSGVFGDNPRPNDGTGSCGPVSSNGAYGVKGFSFKYGNGVWIGRTKSTNSRSGFEMIWDPNGWTETDSSFSVKQDIVAITDWSGYSGSFVQHPELTGLDCIRPCFWVELIRGRPKESTIWTSGSSISFCGVNSDTVGWSWPDGAELPFTIDK

SEQ ID NO: 15014 - protein, 449 aa, synthetic construct; identical to SEQ ID NO: 15006
  REGION 1..449: note = neuraminidase__InfluenzaA__ABE97680

SEQ ID NO: 15015 - protein, 449 aa, synthetic construct; identical to SEQ ID NO: 15006
  REGION 1..449: note = neuraminidase__InfluenzaA__ABE97681

SEQ ID NO: 15016 - protein, 449 aa, synthetic construct; identical to SEQ ID NO: 15006
  REGION 1..449: note = neuraminidase__InfluenzaA__ABE97682

SEQ ID NO: 15017 - protein, 449 aa, synthetic construct
  REGION 1..449: note = neuraminidase__InfluenzaA__ABE97684
MNPNQKIITIGSICMVTGIVSLMLQIGNMISIWVSHSIHTGNQHQAEPISNTNFLTEKAVASVKLAGNSSLCPINGWAVYSKDNSIRIGSKGDVFVIREPFISCSHLECRTFFLTQGALLNDKHSNGTVKDRSPHRTLMSCPVGEAPSPYNSRFESVAWSASACHDGTSWLTIGISGPDNGAVAVLKYNGIITDTIKSWRNNILRTQESECACVNGSCFTVMTDGPSNGQASHKIFKMEKGKVVKSVELDAPNYHYEECSCYPDAGEITCVCRDNWHGSNRPWVSFNQNLEYQIGYICSGVFGDNPRPNDGTGSCGPVSSNGAYGVKGFSFKYGNGVWIGRTKSTNSRSGFEMIWDPNGWTETDSSFSVKQDIVAITDWSGYSGSFVQHPELTGLDCIRPCFWVELIRGRPKESTIWTSGSSISFCGVNSGTVGWSWPDGAELPFTIDK

SEQ ID NO: 15018 - protein, 449 aa, synthetic construct
  REGION 1..449: note = neuraminidase__InfluenzaA__ABE97685
MNPNQKIITIGSICMVTGIVSLMLQIGNMISIWVSHSIHTGNQHQAEPISNTNFLTEKAVASVKLAGNSSLCPINGWAVYSKDNSIRIGSKGDVFVIREPFISCSHLECRTFFLTQGALLNDKHSNGTVKDRSPHRTLMSCPVGEAPSPYNSRFESVAWSASACHDGTSWLTIGISGPDNGAVAVLKYNGIITDTIKSWRNNILRTQESECACVNGSCFTVMTDGPSNGQASHKIFKMEKGKVVKSVELDAPNYHYEECSCYPDAGEITCVCRDNWHGSNRPWVSFNQNLEYQIGYICSGVFGDNPRPNDGTGSCGPVSSNGAYGVKGFSFKYGNGVWIGRTKSTNSRSGFEMIWDPNGWTETDSSFSVKQDIVAITDWSGYSGSFVQHPELTGLDCIRPCFWVELIRGRPKESTIWTSGSSISFCGVNSDTGGWSWPDGAELPFTIDK

SEQ ID NO: 15019 - protein, 449 aa, synthetic construct; identical to SEQ ID NO: 15008
  REGION 1..449: note = neuraminidase__InfluenzaA__ABE97686

SEQ ID NO: 15020 - protein, 449 aa, synthetic construct
  REGION 1..449: note = neuraminidase__InfluenzaA__ABE97687
MNPNQKIITIGSICMVTGIVSLMLQVGNMISIWVSHSIHTGNQHQAEPISNTNFLTEKAVASVKLAGNSSLCPINGWAVYSKDNSIRIGSKGDVFVIREPFISCSHLECRTFFLTQGALLNDKHSNGTVKDRSPHRTLMSCPVGEAPSPYNSRFESVAWSASACHDGTSWLTIGISGPDNGAVAVLKYNGIITDTIKSWRNNILRTQESECACVNGSCFTVMTDGPSNGQASHKIFKMEKGKVVKSVELDAPNYHYEECSCYPDAGEITCVCRDNWHGSNRPWVSFNQNLEYQIGYICSGVFGDNPRPNDGTGSCGPVSSNGAYGVKGFSFKYGNGVWIGRTKSTNSRSGFEMIWDPNGWTETDSSFSVKQDIVAITDWSGYSGSFVQHPELTGLDCIRPCFWVELIRGRPKESTIWTSGSSISFCGVNSDTVGWSWPDGAELPFTIDK

SEQ ID NO: 15021 - protein, 449 aa, synthetic construct
  REGION 1..449: note = neuraminidase__InfluenzaA__ABE97688
MNPNQKIITIGSICMVTGIVSLMLQVGNMISIWVSHSIHTGNQHQAEPISNTNFLTEKAVASVKLAGNSSLCPINGWAVYSKDNSIRIGSKGDVFVIREPFISCSHLECRTFFLTQGALLNDKHSNGTVKDRSPHRTLMSCPVGEAPSPYNSRFESVAWSASACHDGTSWLTIGISGPDNGAVAVLKYNGIITDTIKSWRNNILRTQESECACVNGSCFTVMTDGPSNGQASHKIFKMEKGKVIKSVELDAPNYHYEECSCYPDAGEITCVCRDNWHGSNRPWVSFNQNLEYQIGYICSGVFGDNPRPNDGTGSCGPVSSNGAYGVKGFSFKYGNGVWVGRTKSTNSRSGFEMIWDPNGWTETDSSFSVKQDIVAITDWSGYSGSFVQHPELTGLDCIRPCFWVELIRGRPKESTIWTSGSSISFCGVNSDTVGWSWPDGAELPFIIDK

SEQ ID NO: 15022 - protein, 449 aa, synthetic construct
  REGION 1..449: note = neuraminidase__InfluenzaA__ABE97690
MNPNQKIITIGSICMVTGIVSLMLQVGNMISIWVSHSIHTGNQHQAEPISNTNFLTEKAVASVKLAGNSSLCPINGWAVYSKDNSIRIGSKGDVFVIREPFISCSHLECRTFFLTQGALLNDKHSNGTVKDRSPHRSLMSCPVGEAPSPYNSRFESVAWSASACHDGTSWLTIGISGPDNGAVAVLKYNGIITDTIKSWRNNILRTQESECACVNGSCFTVMTDGPSNGQASHKIFKMKKGKVVKSVELDAPNYHYEECSCYPDAGEITCVCRDNWHGSNRPWVSFNQNLEYQIGYICSGVFGDNPRPNDGTGSCGPVSSNGAYGVKGFSFKYGNGVWIGRTKSTNSRSGFEMIWDPNGWTETDSSFSVKQDIVAITDWSGYSGSFVQHPELTGLDCIRPCFWVELIRGRPKESTIWTSGSSISFCGVNSDTVGWSWPDGAELPFTIDK

SEQ ID NO: 15023 - protein, 449 aa, synthetic construct
  REGION 1..449: note = neuraminidase__InfluenzaA__ABE97691
MNPNQKIITIGSICMVTGIVSLMLQVGNMISIWVSHSIHTGNQHQAEPISNTNFLTEKAVASVKLAGNSSLCPINGWAVYSKDNSIRIGSKGDVFVKREPCISCSHLKCRTFFLTQGALLNDKHSNGTVKDRSPHRTLMSCPVGEAPSPYNSRFESVAWSASACHDGTSWLTIGISGPDNGAVAVLKYNGIITDTIKSWRNNILRTQESECACVNGSCFTVMTDGPSNGQASHKIFKMEKGKVVKSVELDAPNYHYEECSCYPDAGEITCVCRDNWHGSNRPWVSFNQNLEYQIGYICSGVFGDNPRPNDGTGSCGPVSSNGAYGVKGFSFKYGNGVWIGRTKSTNSRSGFEMIWDPNGWTETDSSFSVKQDIVAITDWSGYSGSFVQHPELTGLDCIRPCFWVELIRGRPKESTIWTSGSSISFCGVNSDTVGWSWPDGAELPFTIDK

SEQ ID NO: 15024 - protein, 449 aa, synthetic construct
  REGION 1..449: note = neuraminidase__InfluenzaA__ABE97694
MNPNQKIMTIGSICMVTGIVSLMLQVGNMISIWVSHSIHTGNQHQAEPISNTNFLTEKAVDSVKLAGNSSLCPINGWAVYSKDNSIRIGSKGDVFVIREPSVSCSHLECRTFFLTQGALLNDKHSNGTVKDRSPHRTLMSCPVGEAPSPYNSRFESVAWSASACHDGTSWLTIGISGPDNGAVAVLKYNGIITDTIKSWRNNILRTQESECACVNGSCFTVMTDGPSNGQASHKIFKMEKGKVVKSVELDAPNYHYEECSCYPDAGEITCVCRDNWHGSNRPWVSFNQNLEYQIGYICSGVFGDNPRPNDGTGSCGPVSSNGAYGVKGFSFKYGNGVWIGRTKSTNSRSGFEMIWDPNGWTETDSSFSVKQDVVAITDWSGYSGSFVQHPELTGLDCIRPCFWVELIRGRPKESTIWTSGSSISFCGVNSDTVGWSWPDGAELPFTIDK

SEQ ID NO: 15025 - protein, 449 aa, synthetic construct
  REGION 1..449: note = neuraminidase__InfluenzaA__ABE97696
MNPNQKIITIGSICMVTGIVSLMLQVGNMISIWVSHSIHTGNQHQAEPISNTNFLTEKAVASVKLAGNSSLCPINGWAVYSKDNSIRIGSKGDVFVIREPFISCSHLECRTFFLTQGALLNDKHSNGSVKDRSPHRTLMSCSVGEAPSPYNSRFESVAWSASACHDGTSWLTIGISGPDNGAVAVLKYNGIITDTIKSWRNNILRTQESECACVNGSCFTVMTDGPSNGQASHKIFKMEKGKVVKSVELDAPNYHYEECSCYPDAGEITCVCRDNWHGSNRPWVSFNQNLEYQIGYICSGVFGDNPRPNDGTGSCGPVSSNGAYGVKGFSFKYGNGVWIGRTKSTNSRSGFEMIWDPNGWTETDSSFSVKQDIVAITDWSGYSGSFVQHPELTGLDCIRPCFWVELIRGRPKESTIWTSGSSISFCGVNSDTVGWSWPDGAELPFTIDK

SEQ ID NO: 15026 - protein, 449 aa, synthetic construct
  REGION 1..449: note = neuraminidase__InfluenzaA__ABE97697
MNPNQKIITIGSICMVTGIVSLMLQVGNMISIWVSHSIHTGNQHQAEPISNTNFLNEKAVASVKLAGNSSLCPINGWAVYSKDNSIRIGSKGDVFVIREPFISCSHLECRTFFLTQGALLNDKHSNGTVKDRSPHRTLMSCPVGEAPSPYNSRFESVAWSASACHDGTSWLTIGISGPDNGAVAVLKYNGIITDTIKSWRNNILRTQESECACVNGSCFTVMTDGPSNGQASHKIFKMEKGKVVKSVELDAPNYHYEECSCYPDAGEITCVCRDNWHGSNRPWVSFNQNLEYQIGYICSGVFGDNPRPNDETGSCGPVSSNGAYGVKGFSFKYGNGVWIGRTKSTNSRSGFEMIWDPNGWTETDSSFSVKQDIVAITDWSGYSGSFVQHPELTGLDCIRPCFWVELIRGRPKESTIWTSGSSISFCGVNSDTVGWSWPDGAELPFTIDK

SEQ ID NO: 15027 - protein, 449 aa, synthetic construct
  REGION 1..449: note = neuraminidase__InfluenzaA__ABE97702
MNPNQKIITIGSICMVTGIVSLMLQVGNMISIWVSHSIHTGNQHQAEPISNTNFLTEKAVASVKLAGNSSLCPINGWAVYSKDNSIRIGSKGDVFVIREPFISCSHLECRTFFLTQGALLNDKHSNGTVKDRSPHRTLMSCPVGEAPSPYNSRFESVAWSASACHDGTSWLTIGISGPDNGAVAVLKYNGIITDTIKSWRNNILRTQESECACVNGSCFTVMTDGPSNGQASHKIFKMEKGKVVKSVELDAPYYHYEECSCYPDAGEITCVCRDNWHGSNRPWVSFNQNLEYQIGYICSGVFGDNPRPNDGTGSCGPVSSNGAYGVKGFSFKYGNGVWIGRTKSTNSRSGFEMIWDPNGWTETDSSFSVKQDIVSITDWSGYSGSFVQHPELTGLDCIRPCFWVELIRGRPKESTIWTSGSSISFCGVNSDTVGWSWPDGAELPFTTDK

SEQ ID NO: 15028 - protein, 449 aa, synthetic construct; identical to SEQ ID NO: 15020
  REGION 1..449: note = neuraminidase__InfluenzaA__ABE97703

SEQ ID NO: 15029 - protein, 449 aa, synthetic construct; identical to SEQ ID NO: 15020
  REGION 1..449: note = neuraminidase__InfluenzaA__ABE97705

SEQ ID NO: 15030 - protein, 449 aa, synthetic construct
  REGION 1..449: note = neuraminidase__InfluenzaA__ABE97706
MNPNQKIITIGSICMVTGIVSLMLQVGNMISLWVSHSIHTGNQHQAEPISNTNFLTERAVASVKLAGNSSLCPINGWAVYSKDNSIRIGSKGDVFVIREPFISCSHLECRTFFLTQGALLNDKHSNGTVKDRSPHRTLMSCPVGEAPSPYNSRFESVAWSASACHDGTSWLTIGISGPDNGAVAVLKYNGIITDTIKSWRNNILRTQESECACVNGSCFTVMTDGPSNGQASHKIFKMEKGKVVKSVELDAPNYHYEECSCYPDAGEITCVCRDNWHGSNRPWVSFNQNLEYQIGYICSGVFGDNPRPNDGTGSCGPVSSNGAYGVKGFSFKYGNGVWIGRTKSTSSRSGFEMIWDPNGWTETDSSFSVKQDIVAITDWSGYSGSFVQHPELTGLDCIRPCFWVELIRGRPKESTIWASGSSISFCGVNSDTVGWSWPDGAELPFTIDK

SEQ ID NO: 15031 - protein, 449 aa, synthetic construct
  REGION 1..449: note = neuraminidase__InfluenzaA__ABE97707
MNPNQKIITIGSICMVTGIVSLMLQVGNMISIWVSHSIHTGNQHQAEPISNTNFLTEKAVASVKLAGNSSLCPIKGWAVYSKDNSIRIGSKGDVFVIREPFISCSHLECRTFFLTQGALLNDKHSNGTVKDRSPHRTLMSCPVGEAPSPYNSRFESVAWSASACHDGTSWLTIGISGPDNGAVAVLKYNGIITDTIKSWRNNILRTQESECACVNGSCFTVMTDGPSNGQASHKIFKMEKGKVVKSVELDAPNYHYEECSCYPDAGEITCVCRDNWHGSNRPWVSFNQNLEYQIGYICSGVFGDNPRPNDGTGSCGPVSSNGAYGVKGFSFKYGNGVWIGRTKSTNSRSGFEMIWDPNGWTETDSSFSVKQDIVAITDWSGYSGSFVQHPELTGLDCIRPCFWVELIRGRPKESTIWTSGSSISFCGVNSDTVGWSWPDGAELPFTIDK

SEQ ID NO: 15032 - protein, 449 aa, synthetic construct
  REGION 1..449: note = neuraminidase__InfluenzaA__ABE97708
MNPNQKIITIGSICMVTGIVSLMLQVGNMISIWVSHSIHTGNQHQAEPISNTNFLTEKAVASVKLAGNSSLCPINGWAVYSKDNSIRIGSKGDVFVIREPFISCSHLECRTFFLTHGALLNDKHSNGTVKDRSPHRTLMSCPVGEAPSPYNSRFESVAWSASACHDGTSWLTIGISGPDNGAVAVLKYNGIITDTIKSWRNNILRTQESECACVNGSCFTVMTDGPSNGQASHKIFKMKKGKVVKSVELDAPNYHYEECSCYPDAGEITCVCRDNWHGSNRPWVSFNQNLEYQIGYICSGVFGDNPRPNDGTGSCGPVSSNGAYGVKGFSFKYGNGVWIGRTKSTNSRSGFEMIWDPNGWTETDSSFSVKQDIVAITDWSGYSGSFVQHPELTGLDCIRPCFWVELIRGRPKESTIWTSGSSISFCGVNSDTVGWSWPDGAELPFTIDK

SEQ ID NO: 15033 - protein, 449 aa, synthetic construct
  REGION 1..449: note = neuraminidase__InfluenzaA__ABE97710
MNPNQKIITIGSICMVTGIVSLMLQVGNMISIWVSHSIHTGNQHQAEPISNTNFLTEKAVASVKLAGNSSLCPINGWAVYSKDNSIRIGSKGDVFVIREPFISCSHLECRTFFLTQGALLNDKHSNGTVKDRSPHRTLMSCPVGEAPSPYNSRFESVAWSASACHDGTSWLTIGISGPDNGAVAVLKYNGIITDTIKSWRNNILRTQESECACVNGSCFTVMTDGPSNGQASHKIFKMEKGKVVKSVELNAPNYHYEECSCYPDAGEITCVCRDNWHGSNRPWVSFNQNLEYQIGYICSGVFGDNPRPNDGTGSCGPVSSNGAYGVKGFSFKYGNGVWIGRTKSTNSRSGFEMIWDPNGWTETDSSFSLKQDIVAITDWSGYSGSFVQHPELTGLDCIRPCFWVELIRGRPKESTIWTSGSSISFCGVNSDTVGWSWPDGAELPFTIDK

SEQ ID NO: 15034 - protein, 449 aa, synthetic construct
  REGION 1..449: note = neuraminidase__InfluenzaA__ABE97711
MNPNQKIITIGSICMVTGIVSLMLQVGNMISIWVSHSIHTGNQHQAEPISNTNFLTEKAVASVKLAGNSSLCPINGWAVYSKDNSIRIGSKGDVFVIREPFISCSHLECRTFFLTQGALLNDKHSNGTVKDRSPHRTLMSCPVGEAPSPYNSRFESVAWSASACHDGTSWLTIGISGPDNGAVAVLKYNGIITDTIKSWRNNILRTQESECACVNGSCFTVMTDGPSDGQASHKIFKMEKGKVVKSVELDAPNYHYEECSCYPDAGEITCVCRDNWHGSNRPWVSFNQNLEYQIGYICSGVFGDNPRPNDGTGSCGPVSSNGAYGVKGFSFKYGNGVWIGRTKSTNSRSGFEMVWDPNGWTETDSSFSVKQDIVAITDWSGYSGSFVQHPELTGLDCIRPCFWVELIRGRPKESTIWTSGSSISFCGVNSDTVGWSWPDGAELPFTIDK

SEQ ID NO: 15035 - protein, 449 aa, synthetic construct; identical to SEQ ID NO: 15020
  REGION 1..449: note = neuraminidase__InfluenzaA__ABE97712

SEQ ID NO: 15036 - protein, 449 aa, synthetic construct; identical to SEQ ID NO: 15020
  REGION 1..449: note = neuraminidase__InfluenzaA__ABE97713

SEQ ID NO: 15037 - protein, 449 aa, synthetic construct; identical to SEQ ID NO: 15020
  REGION 1..449: note = neuraminidase__InfluenzaA__ABE97715

SEQ ID NO: 15038 - protein, 449 aa, synthetic construct
  REGION 1..449: note = neuraminidase__InfluenzaA__ABE97717
MNPNQKIITIGSICMVTGIVNLMLQVGNMISIWVSHSIHTGNQHQAEPISNTNFLTEKAVASVKLAGNSSLCPINGWAVYSKDNSIRIGSKGDVFVIREPFISCSHLECRTFFLTQGALLNDKHSNGTVKDRSPHRTLMSCPVGEAPSPYNSRFESVAWSASACHDGTSWLTIGISGPDNGAVAVLKYNGIITDTIKSWRNNILRTQESECACVNGSCFTVMTDGPSNGQASHKIFKMEKGKVVKSVELDAPNYHYEECSCYPDAGEITCVCRDNWHGSNRPWVSFNQNLEYQIGYICSGVFGDNPRPNDGTGSCGPVPSNGAYGVKGFSFKYGNGVWIGRTKSTNSRSGFEMIWDPNGWTETDSSFSVKQDIVAITDWSGYSGSFVQHPELTGLDCIRPCFWVELIRGRPKESTIWTSGSSISFCGVNSDTVGWSWPDGAELPFTIDK

SEQ ID NO: 15039 - protein, 449 aa, synthetic construct
  REGION 1..449: note = neuraminidase__InfluenzaA__ABE97718
MNPNQKIITIGSICMVTGIVSLMLQVGNMISIWVSHSIHTGNQHQAEPISNTNFLTEKAVASVKLAGNSSLCPINGWAVYSKDNSIRIGSKGDVFVIREPFISCSHLECRTFFLTQGALLNDKHSNGTVKDRSPHRTLMSCPVGEAPSPYNSRFESVAWSASACHDGTSWLTIGISGPDNGAVAVLKYNGIITDTIKSWRNNILRTQESECACVNGSCFTVMTDGPSNGQASHKIFKMEKGKVVKSVELDAPNYHYEECSCYPDAGEITCVCRDNWHGSNRPWVSFNQNLEYQIGYICSGVFGDNPRPNDGTGSCGPVSSNGAYGVKGFSFKYGNGVWIGRTKSTNSRSGFEMIWDPNGWTETDSSFSVKQDIVAITDWSGYSGSFVQHPELTGLDCIRPCFWVELIRGRPKESTIWTSGSSISFCGVDSDTVGWSWPDGAELPFTIDK

SEQ ID NO: 15040 - protein, 449 aa, synthetic construct
  REGION 1..449: note = neuraminidase__InfluenzaA__ABE97719
MNPNQKIITIGSICMVTGIVSLMLQVGNMISIWVSHSIHTGNQHQAEPISNTNFLTEKAVASVKLAGNSSLCPINGWAVYSKDNSIRIGSKGDVFVIREPFISCSHLECRTFFLTQGALLNDKHSNGTVKDRSPHRTLMSCPVGEAPSPYNSRFESVAWSASACHDGTSWLTIGISGPDNGAVAVLKYNGIITDTIKSWRNNILRTQESECACVNGSCFTVMTDGPSNGQASHKIFKMKKGKVVKSVELDAPNYHYEECSCYPDAGEITCVCRDNWHGSNRPWVSFNQNLEYQIGYICSGVFGDNPRPNDGTGSCGPVSSNGAYGVKGFSFKYGNGVWIGRTKSTNSRSGFEMIWDPNGWTETDSSFSVKQDIVAITDWSGYSGSFVQHPELTGLDCIRPCFWVELIRGRPKESTIWTSGSSISFCGVNSDTVGWSWPDGAELPFTIDK

SEQ ID NO: 15041 - protein, 449 aa, synthetic construct
  REGION 1..449: note = neuraminidase__InfluenzaA__ABE97720
MNPNQKIITIGSICMVTGIVSLMLQVGNMISIWVSHSIHTGNQHQAEPISNANFLTEKAVASVKLAGNSSLCPINGWAVYSKDNSIRIGSKGDVFVIREPFISCSHLECRTFFLTQGALLNDKHSNGTVKDRSPHRTLMSCPVGEAPSPYNSRFESVAWSASACHDGTSWLTIGISGPDNGAVAVLKYNGIITDTIKSWRNNILRTQESECACVNGSCFTVMTDGPSNGQASHKIFKMEKGKVVKSVELDAPNYHYEECSCYPDAGEITCVCRDNWHGSNRPWVSFNQNLEYQIGYICSGVFGDTPRPNDGTGSCGPVSSNGAYGVKGFSFKYGNGVWIGRTKSTNSRSGFEMIWDPNGWTETDSSFSVKQDIVAITDWSGYSGSFVQHPELTGLDCIRPCFWVELIRGRPKESTIWTSGSSISFCGVNSDTVGWSWPDGAELPFTIDK

SEQ ID NO: 15042 - protein, 469 aa, synthetic construct; identical to SEQ ID NO: 14813
  REGION 1..469: note = neuraminidase__InfluenzaA__ABF47553

SEQ ID NO: 15043 - protein, 470 aa, synthetic construct; identical to SEQ ID NO: 14396
  REGION 1..470: note = neuraminidase__InfluenzaA__ABF47564

SEQ ID NO: 15044 - protein, 470 aa, synthetic construct
  REGION 1..470: note = neuraminidase__InfluenzaA__ABF47575
MNPNQKIITIGSISIAIGIISLMLQIGNIISIWASHSIQTGSQNHTGVCNQRIITYENSTWVNHTYVNINNTNVIAGKDKTSVALAGNSSLCSISGWAIYTKDNSIRIGSKGDVFVIREPFISCSHFECRTFFLTQGALLNDKHSNGTVKDRSPYRALMSCPLGEAPSPYNSKFESVAWSASACHDGMGWLTIGISGPDNGAVAVLKYNGIITETIKSWKKQILRTQESECVCVNGSCFTIMTDGPSNGAASYKIFKIEKGKVTKSIELNAPNFHYEECSCYPDTGTVMCVCRDNWHGSNRPWVSFNQNLDYQIGYICSGVFGDNPRPKDGEGSCNPVTVDGANGVKGFSYKYGNGVWIGRTKSNRLRKGFEMIWDPNGWTDTDSDFSVKQDVVAITDWSGYSGSFVQHPELTGLDCIRPCFWVELVRGLPKENTTIWTSGSSISFCGVNSDTANWSWPDGAELPFTIDK

SEQ ID NO: 15045 - protein, 470 aa, synthetic construct; identical to SEQ ID NO: 14396
  REGION 1..470: note = neuraminidase__InfluenzaA__ABF47586

SEQ ID NO: 15046 - protein, 469 aa, synthetic construct; identical to SEQ ID NO: 14126
  REGION 1..469: note = neuraminidase__InfluenzaA__ABF47597

SEQ ID NO: 15047 - protein, 470 aa, synthetic construct; identical to SEQ ID NO: 14968
  REGION 1..470: note = neuraminidase__InfluenzaA__ABF47608

SEQ ID NO: 15048 - protein, 469 aa, synthetic construct
  REGION 1..469: note = neuraminidase__InfluenzaA__ABF47619
MNPNQKIITIGSVSLTIATICFLMQIAILVTTVTLHFKQYECNSPPNNQVMLCEPTIIERNITEIVYLTNTTIEKEICPKLAEYRNWSKPQCKITGFAPFSKDNSIRLSAGGDIWVTREPYVSCDPGKCYQFALGQGTTLNNRHSNDTVHDRTPYRTLLMNELGVPFHLGTKQVCIAWSSSSCHDGKAWLHVCVTGHDENATASFIYDGRLVDSIGSWSKNILRTQESECVCINGTCTVVMTDGSASGRADTKILFIEEGKIVHISPLSGSAQHVEECSCYPRYPGVRCVCRDNWKGSNRPIVDINVKDYSIVSSYVCSGLVGDTPRKNDSASSSHCLNPNNEEGGHGVKGWAFDDGNDVWMGRTISEKLRSGYETFKVIGGWSKPNSKLQINRQVIVDRGNRSGYSGIFSVEGKSCINRCFYVELIRGRKQETEVWWTSNSIVVFCGTSGTYGTGSWPDGADINLMPI

SEQ ID NO: 15049 - protein, 470 aa, synthetic construct
  REGION 1..470: note = neuraminidase__InfluenzaA__ABF47630
MNPNQKIITIGSISIAIGIISLILQIGNIISIWASHSIQTGSQNHTGICNQRIITYENSTWVNQTYVNINNTNVVAGKDKTSMALAGNSSLCPIRGWAIYTKDNSIRIGSKGDVFVIREPFISCSHLECRTFFLTQGALLNDKHSNGTVKDRSPYRALMSCPLGEAPSPYNSRFESVAWSASACHDGLGWLTIGISGPDNGAVAVLKYNGIITETIKSWKKRILRTQESECVCMNGSCFTIMTDGPSNGAASYRIFKIEKGRVTKSIELDAPNYHYEECSCYPDTGTVMCVCRDNWHGSNRPWVSFNQNLDYQIGYICSGVFGDNPRPKDGEGSCNPVTVDGADGVKGFSYRYGNGVWIGRTKSNRLRKGFEMIWDPNGWTDTDSDFSMKQDIVAMTDWSGYSGSFVQHPELTGLDCMRPCFWVELVRGLPRENTTIWTSGSSISFCGVNSDTANWSWPDGAELPFTIDK

SEQ ID NO: 15050 - protein, 470 aa, synthetic construct
  REGION 1..470: note = neuraminidase__InfluenzaA__ABF47652
MNPNQKIITIGSISIAIGIISLILQIGNIISIWASHSIQTGSQNHTGICNQRIITYENSTWVNQTYVNINNTNVVAGKDKTSMTLAGNSSLCPIRGWAIYTKDNSIRIGSKGDVFVIREPFISCSHLECRTFFLTQGALLNDKHSNGTVKDRSPYRALMSCPLGEAPSPYNSRFESVAWSASACHDGLGWLTIGISGPDNGAVAVLKYNGIITETIKSWKKRILRTQESECVCMNGSCFTIMTDGPSNGAASYRIFKIEKGRVTKSIELDAPNYHYEECSCYPNTGTVMCVCRDNWHGSNRPWVSFNQNLDYQIGYICSGVFGDNPRPKDGEGSCNPVTVDGADGVKGFSYRYGNGVWIGRTKSNRLRKGFEMIWDPNGWTDTDSDFSMKQDIVAMTDWSGYSGSFVQHPELTGLDCMRPCFWVELVRGLPRENTTIWTSGSSISFCGVNSDTANWSWPDGAELPFTIDK

SEQ ID NO: 15051 - protein, 470 aa, synthetic construct; identical to SEQ ID NO: 14968
  REGION 1..470: note = neuraminidase__InfluenzaA__ABF47663

SEQ ID NO: 15052 - protein, 470 aa, synthetic construct
  REGION 1..470: note = neuraminidase__InfluenzaA__ABF47674
MNPNQKIITIGSISIAIGIISLMLQIGNIISIWASHSIQTGSQNHTGVCIQRIITYENSTWVNHTYVNINNTNVIAGKDKTSVTLAGNSSLCSISGWAIYTKDNSIRIGSKGDVFVIREPFISCSHLECRTFFLTQGALLNDKHSNGTVKDRSPYRALMSCPLGEAPSPYNSKFESVAWSASACHDGMGWLTIGISGPDNGAVAVLKYNGIITETIKSWKKQILRTQESECVCVNGSCFTIMTDGPSNGAASYKIFKIEKGKVTKSIELNAPNFHYEECSCYPDTGTVMCVCRDNWHGSNRPWVSFNQNLDYQIGYICSGVFGDNPRPKDGEGSCNPVTVDGANGVKGFSYKYGNGVWIGRTKSNRLRKGFEMIWDPNGWTDTDSDFSVKQDVVAITDWSGYSGSFVQHPELTGLDCIRPCFWVELVRGLPKENTTIWTSGSSISFCGVNSDTANWSWPDGAELPFTIDK

SEQ ID NO: 15053 - protein, 470 aa, synthetic construct; identical to SEQ ID NO: 14951
  REGION 1..470: note = neuraminidase__InfluenzaA__ABF47696

SEQ ID NO: 15054 - protein, 470 aa, synthetic construct
  REGION 1..470: note = neuraminidase__InfluenzaA__ABF47707
MNPNQKIITIGSICMAIGIISLILQIGNIISIWVSHSIQTGSQNHTGICNQRIITYENSTWVNQTYVNISNTNVVAGKGTTSMTLAGNSSLCPIRGWAIYSKDNSIRIGSKGDVFVIREPFISCSHLECRTFFLTQGALLNDKHSNGTVKDRSPYRALMSCPIGEAPSPYNSRFESVAWSASACHDGMGWLTIGISGPDDGAVAVLKYNGIITETIKSWRKQILRTQESECVCVNGSCFTIMTDGPSDGPASYRIFKIEKGKITKSIELDAPNSHYEECSCYPDTGTVMCVCRDNWHGSNRPWVSFNQNLDYQIGYICSGVFGDNPRPKDGKGSCDPVNVDGADGVKGFSYRYGNGVWIGRTKSNSSRKGFEMIWDPNGWTDTDSNFLVKQDVVAMTDWSGYSGSFVQHPELTGLDCMRPCFWVELIRGRPREKTTIWTSGSSISFCGVNSDTVNWSWPDGAELPFTIDK

SEQ ID NO: 15055 - protein, 470 aa, synthetic construct; identical to SEQ ID NO: 14951
  REGION 1..470: note = neuraminidase__InfluenzaA__ABF47718

SEQ ID NO: 15056 - protein, 470 aa, synthetic construct; identical to SEQ ID NO: 14951
  REGION 1..470: note = neuraminidase__InfluenzaA__ABF47729

SEQ ID NO: 15057 - protein, 470 aa, synthetic construct; identical to SEQ ID NO: 14951
  REGION 1..470: note = neuraminidase__InfluenzaA__ABF47740

SEQ ID NO: 15058 - protein, 470 aa, synthetic construct
  REGION 1..470: note = neuraminidase__InfluenzaA__ABF47751
MNPNQKIITIGSICMAIGIISLILQIGNIISIWVSHSIQTGSQNHTGICNQRIITYENSTWVNQTYVNINNTNVVAGKDTTSVTLAGNSSLCPIRGWAIYSKDNSIRIGSKGDVFVIREPFISCSHLECRTFFLTQGALLNDKHSNGTVKDRSPYRALMSCPIGEAPSPYNSRFESVAWSASACHDGMGWLTIGISGPDDGAVAVLKYNGIITETIKSWRKRILRTQESECVCVNGSCFTIMTDGPSNGPASYRIFKIEKGKITKSIELDAPNSHYEECSCYPDTGTVMCVCRDNWHGSNRPWVSFNQNLDYQIGYICSGVFGDNPRPKDGKGSCDPVTVDGADGVKGFSYRYGNGVWIGRTKSNSSRKGFEMIWDPNGWTDTDSNFLVKQDVVAMTDWSGYSGSFVQHPELTGLDCMRPCFWVELIRGRPREKTTIWTSGSSISFCGVNSDTANWSWPDGAELPFTIDK

SEQ ID NO: 15059 - protein, 470 aa, synthetic construct
  REGION 1..470: note = neuraminidase__InfluenzaA__ABF47773
MNPNQKIITIGSICMTIGIISLILQIGNIISIWVSHSIQTGSQNHTGICNQRIITYENSTWVNQTYVNINNTNVVAGKDTTSVTLAGNSSLCPIRGWAIYSKDNSIRIGSKGDVFVIREPFISCSHLECRTFFLTQGALLNDKHSNGTVKDRSPYRALMSCPIGEAPSPYNSRFESVAWSASACHDGMGWLTIGISGPDDGAVAVLKYNGIITETIKSWRKRILRTQESECVCVNGSCFTIMTDGPSNGPASYRIFKIEKGKITKSIELDAPNSHYEECSCYPDTGTVMCVCRDNWHGSNRPWVSFNQNLDYQIGYICSGVFGDNPRPKDGKGSCDPVTVDGADGVKGFSYRYGNGVWIGRTKSNSSRKGFEMIWDPNGWTDTDSNFLVKQDVVAMTDWSGYSGSFVQHPELTGLDCMRPCFWVELIRGRPREKTTIWTSGSSISFCGVNSDTANWSWPDGAELPFTIDK

SEQ ID NO: 15060 - protein, 470 aa, synthetic construct; identical to SEQ ID NO: 15059
  REGION 1..470: note = neuraminidase__InfluenzaA__ABF47784

SEQ ID NO: 15061 - protein, 470 aa, synthetic construct; identical to SEQ ID NO: 15059
  REGION 1..470: note = neuraminidase__InfluenzaA__ABF47795

SEQ ID NO: 15062 - protein, 470 aa, synthetic construct; identical to SEQ ID NO: 15059
  REGION 1..470: note = neuraminidase__InfluenzaA__ABF47806

SEQ ID NO: 15063 - protein, 470 aa, synthetic construct; identical to SEQ ID NO: 15059
  REGION 1..470: note = neuraminidase__InfluenzaA__ABF47817

SEQ ID NO: 15064 - protein, 470 aa, synthetic construct; identical to SEQ ID NO: 15059
  REGION 1..470: note = neuraminidase__InfluenzaA__ABF47839

SEQ ID NO: 15065 - protein, 470 aa, synthetic construct; identical to SEQ ID NO: 15059
  REGION 1..470: note = neuraminidase__InfluenzaA__ABF47850

SEQ ID NO: 15066 - protein, 470 aa, synthetic construct; identical to SEQ ID NO: 14828
  REGION 1..470: note = neuraminidase__InfluenzaA__ABF47872

SEQ ID NO: 15067 - protein, 470 aa, synthetic construct; identical to SEQ ID NO: 14828
  REGION 1..470: note = neuraminidase__InfluenzaA__ABF47883

SEQ ID NO: 15068 - protein, 470 aa, synthetic construct; identical to SEQ ID NO: 14828
  REGION 1..470: note = neuraminidase__InfluenzaA__ABF47894

SEQ ID NO: 15069 - protein, 469 aa, synthetic construct; identical to SEQ ID NO: 14844
  REGION 1..469: note = neuraminidase__InfluenzaA__ABF47905

SEQ ID NO: 15070 - protein, 453 aa, synthetic construct
  REGION 1..453: note = neuraminidase__InfluenzaA__ABF47958
MNPNQKIITIGSICMVVGIISLILQIGNIISIWISHSIQTGNQNHTGICNQGSITYKVVAGQDSTSVILTGNSSLCPIRGWAIHSKDNGIRIGSKGDVFVIREPFISCSHLECRTFFLTQGALLNDKHSRGTFKDRSPYRALMSCPVGEAPSPYNSRFESVAWSASACHDGMGWLTIGISGPDDGAVAVLKYNGIITETIKSWRKNILRTQESECTCVNGSCFTIMTDGPSDGLASYKIFKIEKGKVTKSIELNAPNSHYEECSCYPDTGKVMCVCRDNWHGSNRPWVSFDQNLDYKIGYICSGVFGDNPRPKDGTGSCGPVSADGANGVKGFSYKYGNGVWIGRTKSDSSRHGFEMIWDPNGWTETDSRFSMRQDVVAMTDRSGYSGSFVQHPELTGLDCMRPCFWVELIRGLPEEDAIWTSGSIISFCGVNSDTVDWSWPDGAELPFTIDK

SEQ ID NO: 15071 - protein, 449 aa, synthetic construct
  REGION 1..449: note = neuraminidase__InfluenzaA__ABF56651
MNPNQKIITIGSICMVTGIVSLMLQVGNMISIWVSHSIHTGSQHQAEPISNTNFLTEKAVASVKLAGNSSLCPINGWAVYSKDNSIRIGSKGDVFVIREPFISCSHLECRTFFLTQGALLNDKHSNGTVKDRSPHRTLMSCPVGEAPSPYNSRFESVAWSASACHDGTSWLTIGISGPDNGAVAVLKYNGIITDTIKSWRNNILRTQESECACVNGSCFTVMTDGPSNGQASHKIFKMEKGKVVKSVELDAPNYHYEECSCYPDAGEITCVCRDNWHGSNRPWVSFNQNLEYQIGYICSGVFGDNPRPNDGTGSCGPVSSNGAYGVKGFSFKYGNGVWIGRTKSTNSRSGFEMIWDPNGWTETDSSFSVKQDIVAITDWSGYSGSFVQHPELTGLDCIRPCFWVELIRGRPKESTIWTSGSSISFCGVNSDTVGWSWPDGAELPFTIDK

SEQ ID NO: 15072 - protein, 469 aa, synthetic construct; identical to SEQ ID NO: 14827
  REGION 1..469: note = neuraminidase__InfluenzaA__ABF82654

SEQ ID NO: 15073 - protein, 470 aa, synthetic construct; identical to SEQ ID NO: 14396
  REGION 1..470: note = neuraminidase__InfluenzaA__ABF82665

SEQ ID NO: 15074 - protein, 470 aa, synthetic construct; identical to SEQ ID NO: 14396
  REGION 1..470: note = neuraminidase__InfluenzaA__ABF82676

SEQ ID NO: 15075 - protein, 470 aa, synthetic construct
  REGION 1..470: note = neuraminidase__InfluenzaA__ABF82687
MNPNQKIITIGSISIAIGIISLMLQIGNIISIWASHSIQTGSQNHTGVCNQRIITYENSTWVNHTYVNINNTNVIAGKDKTSVTLAGNSSLCSISGWAIYTKDNSIRIGSKGDVFVIREPFISCSHLECRTFFLTQGALLNDKHSNGTVKDRSPYRALMSCPLGEAPSPYNSKFESVAWSASACHDGMGWLTIGISGPDNGAVAVLKYNGIITETIKSWKKQILRTQESECVCVNGSCFTIMTDGPSNGAASYKIFKIEKGKTTKSIELNAPNFHYEECSCYPDTGTVMCVCRDNWHGSNRPWVSFNQNLDYQIGYICSGVFGDNPRPKDGEGSCNPVTVDGANGVKGFSYKYGNGVWIGRTKSNRLRKGFEMIWDPNGWTDTDSDFSVKQDVVAITDWSGYSGSFVQHPELTGLNCIRPCFWVELVRGLPKENTTIWTSGSSISFCGVNSDTANWSWPDGAELPFTIDK

SEQ ID NO: 15076 - protein, 469 aa, synthetic construct
  REGION 1..469: note = neuraminidase__InfluenzaA__ABF82698
MNPNQKIITIGSVSLTITTICFLMQIAILVITVTLHFKQCECNSPPNNQVMLCEPTIIERNITEIVYLTNTTIEKEICPKLAEYRNWSKPQCKITGFAPFSKDNSIRLSAGGDIWVTREPYVSCDPGKCYQFALGQGTTLNNRHSNDTVHDRTPYRTLLMNELGVPFHLGTKQVCIAWSSSSCHDGKAWLHVCVTGHNENATASFIYDGRLVDSIGSWSKNILRTQESECVCINGTCTVVMTDGSASGRADTKILFIEEGKIVHISPLSGSAQHVEECSCYPRYPGVRCVCRDNWKGSNRPIVDINVKDYSIVSSYVCSGLVGDTPRKNDSSSSSYCLDPNNEEGGHGVKGWAFDDGNDVWMGRTISEKLRSGYETFKVIGGWSKPNSKLQINRQVIVDKGNRSGYSGIFSVEGKSCTNRCFYVELIRGRKQETEVWWTSNSIVVFCGTSGTYGTGSWPDGADINLMPI

SEQ ID NO: 15077 - protein, 469 aa, synthetic construct; identical to SEQ ID NO: 14126
  REGION 1..469: note = neuraminidase__InfluenzaA__ABF82709

SEQ ID NO: 15078 - protein, 470 aa, synthetic construct; identical to SEQ ID NO: 14415
  REGION 1..470: note = neuraminidase__InfluenzaA__ABF82822

SEQ ID NO: 15079 - protein, 470 aa, synthetic construct; identical to SEQ ID NO: 14396
  REGION 1..470: note = neuraminidase__InfluenzaA__ABF82833

SEQ ID NO: 15080 - protein, 470 aa, synthetic construct; identical to SEQ ID NO: 14396
  REGION 1..470: note = neuraminidase__InfluenzaA__ABF82844

SEQ ID NO: 15081 - protein, 470 aa, synthetic construct
  REGION 1..470: note = neuraminidase__InfluenzaA__ABF82855
MNPNQKIITIGSISIAIGIISLMLQIGNIISIWASHSIQIGSQNHTGVCNQRIITYENSTWVNHTYVNINNTNVIAGKDKTSVTLAGNSSLCSISGWAIYTKDNSIRIGSKGDVFVIREPFISCSHLECRTFFLTQGALLNDKHSNGTVKDRSPYRALMSCPLGEAPSPYNSKFESVAWSASACHDGMGWLTIGISGPDNGAVAVLKYNGIITETIKSWKKQILRTQESECVCVNGSCFTIMTDGPSNGAASYKIFKIEKGKVTKSIELNAPNFHYEECSCYPDTGTVMCVCRDNWHGSNRPWVSFNQNLDYQIGYICSGVFGDNPRPKDGEGSCNPVTVDGANGVKGFSYKYGNGVWIGRTKSNRLRKGFEMIWDPNGWTDTDSDFSVKQDVVAITDWSGYSGSFVQHPELTGLDCIRPCFWVELVRGLPKENTTIWTSGSSISFCGVNSDTANWSWPDGAELPFTIDK

SEQ ID NO: 15082 - protein, 470 aa, synthetic construct; identical to SEQ ID NO: 14396
  REGION 1..470: note = neuraminidase__InfluenzaA__ABF82866

SEQ ID NO: 15083 - protein, 470 aa, synthetic construct; identical to SEQ ID NO: 14930
  REGION 1..470: note = neuraminidase__InfluenzaA__ABF82888

SEQ ID NO: 15084 - protein, 470 aa, synthetic construct; identical to SEQ ID NO: 14396
  REGION 1..470: note = neuraminidase__InfluenzaA__ABF82910

SEQ ID NO: 15085 - protein, 470 aa, synthetic construct; identical to SEQ ID NO: 14396
  REGION 1..470: note = neuraminidase__InfluenzaA__ABF82921

SEQ ID NO: 15086 - protein, 470 aa, synthetic construct; identical to SEQ ID NO: 14396
  REGION 1..470: note = neuraminidase__InfluenzaA__ABF82932

SEQ ID NO: 15087 - protein, 470 aa, synthetic construct; identical to SEQ ID NO: 14396
  REGION 1..470: note = neuraminidase__InfluenzaA__ABF82943

SEQ ID NO: 15088 - protein, 449 aa, synthetic construct
  REGION 1..449: note = neuraminidase__InfluenzaA__ABG20474
MNPNQKIITIGSICMVIGIVSLMLQIGNMISIWVSHSIQTGNQRQAEPISNTKFLTEKAVASVTLAGNSSLCPISGWAVYSKDNSIRIGSRGDVFVIREPFISCSHLECRTFFLTQGALLNDKHSNGTVKDRSPYRTLMSCPVGEAPSPYNSRFESVAWSASACHDGTSWLTIGISGPDNGAVAVLKYNGIITDTIKSWRNNVLRTQESECACVNGSCFTVMTDGPSNGQASYKIFKMEKGKVVKSVELDAPNYHYEECSCYPDAGEITCVCRDNWHGSNRPWVSFNQNLEYQIGYICSGVFGDNPRPNDGTGSCGPVSPNGAYGVKGFSFKYGNGVWIGRTKSTNSRSGFEMIWDPNGWTGTDSNFSVKQDIVAITDWSGYSGSFVQHPELTGLDCIRPCFWVELIRGRPKESTIWTSGSSIFFCGVNSDTVSWSWPDGAELPFTIDK

SEQ ID NO: 15089 - protein, 469 aa, synthetic construct; identical to SEQ ID NO: 14126
  REGION 1..469: note = neuraminidase__InfluenzaA__ABG26761

SEQ ID NO: 15090 - protein, 469 aa, synthetic construct
  REGION 1..469: note = neuraminidase__InfluenzaA__ABG26772
MNPNQKIITIGSVSLTIATICFLMQIAILVTTVTLHFKQYECNSPPNNQVMLCEPTIIERNITEIVYLTNTTIEKEICPKLAEYRNWSKPQCKITGFAPFSKDNSIRLSAGGDIWVTREPYVSCDPDKCYQFALGQGTTLNNRHSNDTVHDRTPYRTLLMNELGVPFHLGTKQVCIAWSSSSCHDGKAWLHVCVTGHDENATASFIYDGRLVDSIGSWSKKILRTQESECVCINGTCTVVMTDGSASGRADTKILFIKEGKIVHISPLSGSAQHVEECSCYPRYPGVRCVCRDNWKGSNRPIVDINVKDYSIVSSYVCSGLVGDTPRKNDSSSSSHCLNPNNEEGGHGVKGWAFDDGNDVWMGRTISEKLRSGYETFKVIEGWSKPNSKLQINRQVIVDRGNRSGYSGIFSVEGKSCINRCFYVELIRGRKQETEVWWTSNSIVVFCGTSGTYGTGSWPDGADINLMPI

SEQ ID NO: 15091 - protein, 470 aa, synthetic construct
  REGION 1..470: note = neuraminidase__InfluenzaA__ABG26783
MNPNQKIITIGSISIAIGIISLILQIGNIISIWASHSIQTGSQNHTGICNQRIITYENSTWVNQTYVNINNTNVVAGKDKTSMTLAGNSSLCPIRGWAIYTKDNSIRIGSKGDVFVIREPFISCSHLECRTFFLTQGALLNDKHSNGTVKDRSPYRALMSCPLGEAPSPYNSRFESVAWSASACHDGLGWLTIGISGPDNGAVAVLKYNGIITETIKSWKKRILRTQESECVCMNGSCFTIMTDGPSNGAASYRIFKIEKGRVTKSIELDAPNYHYEECSCYPNTGTVMCVCRDNWHGSNRPWVSFNQNLDYQIGYICSGVFGDNPRPKDGEGSCNPVTVDGADGVKGFSYRYGNGVWIGRTKSNRLRKGFEMIWDPNGWTDTDSDFSMKQDIVAMTDWSGYSGSFVQHPELTGLDCIRPCFWVELVRGLPRENTTIWTSGSSISFCGVNSDTANWSWPDGAELPFTIDK

SEQ ID NO: 15092 - protein, 470 aa, synthetic construct; identical to SEQ ID NO: 14968
  REGION 1..470: note = neuraminidase__InfluenzaA__ABG26794

SEQ ID NO: 15093 - protein, 469 aa, synthetic construct
  REGION 1..469: note = neuraminidase__InfluenzaA__ABG26805
MNPNQKIITIGSVSLTIATICFLTQIAILVTTVTLHFKQYECSSPPNNQVMPCEPIIIERNITEIVYLTNTTIEKEICPKLVEYRNWSKPQCKITGFAPFSKDNSIRLSAGGDIWVTREPYVSCDPGKCYQFALGQGTTLNNKHSNDTIHDRTPYRTLLMNELGVPFHLGTKQVCIAWSSSSCHDGKAWLHVCITGHDKNATASFIYDGRLVDSIGSWSKNILRTQESECVCINGTCTVVMTDGSASERADTKILFIEEGKIVHISPLSGSAQHVEECSCYPRYPGVRCVCRDNWKGSNRPIVDINVKDYSIVSSYVCSGLVGDTPRKNDRSSSSYCRNPNNEKGNHGVKGWAFDDGNDVWMGRTIGEELRSGYETFKVIGGWSTPNSKLQINRQIIVDSGNRSGYSGIFSVEGKSCINRCFYVELIRGREQETRVWWTSNSIVVFCGTSGTYGTGSWPDGADINLMPI

SEQ ID NO: 15094 - protein, 470 aa, synthetic construct; identical to SEQ ID NO: 14951
  REGION 1..470: note = neuraminidase__InfluenzaA__ABG26816

SEQ ID NO: 15095 - protein, 470 aa, synthetic construct; identical to SEQ ID NO: 15059
  REGION 1..470: note = neuraminidase__InfluenzaA__ABG26827

SEQ ID NO: 15096 - protein, 470 aa, synthetic construct; identical to SEQ ID NO: 15059
  REGION 1..470: note = neuraminidase__InfluenzaA__ABG26838

SEQ ID NO: 15097 - protein, 469 aa, synthetic construct
  REGION 1..469: note = neuraminidase__InfluenzaA__ABG26860
MNPNQKIITIGSVSLTIATICFLMQIAILVTTVTLHFKQYECNSPPNNQVMLCEPTIIERNITEIVYLTNTTIEKEICPKLAEYRNWSKPQCKITGFAPFSKDNSIRLSAGGDIWVTREPYVSCDPGKCYQFALGQGTTLNNRHSNDTVHDRTPYRTLLMNELGVPFHLGTKQVCIAWSSSSCHDGKAWLHVCVTGHDENATASFIYDGRLVDSIGSWSKNILRTQESECVCINGTCTVVMTDGSASDRADTKILFIEEGKIVHISPLSGSAQHVEECSCYPRYPGVRCVCRDNWKGSNRPIIDINVKDYSIVSSYVCSGLVGDTPRKNDSSSSSYCWNPNNEKGGHGVKGWAFDDGNDVWMGRTISEESRSGYETFKVIGGWSKPNSKLQINRQVIVDRGNRSGYSGIFSVEGKSCINRCFYVELIRGRKQETEVWWTSNSIVVFCGTSGTYGTGSWPDGADINLMPI

SEQ ID NO: 15098 - protein, 469 aa, synthetic construct
  REGION 1..469: note = neuraminidase__InfluenzaA__ABG26871
MNPNQKIITIGSVSLTIATICFLMQIAILVTTVTLHFKQYECNSPPYNQIMLCEPTIIERNITEIVYLTNTTIEKEICPKLAEYRNWSKPQCKITGFAPFSKDNSIRLSAGGDIWVTREPYVSCDPGKCYQFALGQGTTLNNRHSNDTVHDRTPYRTLLMNELGVPFHLGTKQVCIAWSSSSCHDGKAWLHVCVTGHDENATASFIYDGRLVDSIGSWSKNILRTQESECVCINGTCTVVMTDGSASDRADTKILFIEEGKIVHISPLSGSAQHVEECSCYPRYPGVRCVCRDNWKGSNRPIVDINVKDYSIVSSYVCSGLVGDTPRKNDSSSSSYCWNPNNEKGGHGVKGWAFDDGNDVWMGRTISEESRSGYETFKVIGGWSKPNSKLQINRQVIVDRGNRSGYSGIFSVEGKSCINRCFYVELIRGRKQETEVWWTSNSIVVFCGTSGTYGTGSWPDGADINLMPI

SEQ ID NO: 15099 - protein, 469 aa, synthetic construct
  REGION 1..469: note = neuraminidase__InfluenzaA__ABG26893
MNPNQKIITIGSISLTIATICFLMQIAILVTTVTLHFKQYECNSPPNNQVMLCEPTIIERNITEIVYLTNTTIEKEICPKLAEYRNWSKPQCKITGFAPFSKDNSIRLSAGGDIWVTREPYVSCDPGKCYQFALGQGTTLNNRHSNDTVHDRTPYRTLLMNELGVPFHLGTKQVCIAWSSSSCHDGKAWLHVCVTGHDENATASFIYDGRLVDSIGSWSKNILRTQESECVCINGTCTVVMTDGSASDRADTKILFIEEGKIVHISPLSGSAQHVEECSCYPRYPGVRCVCRDNWKGSNRPIVDINVKDYSIVSSYVCSGLVGDTPRKNDSSSSSYCWNPNNEKGGHGVKGWAFDDGNDVWMGRTISEESRSGYETFKVIGGWSKPNSKLQINRQVIVDRGNRSGYSGIFSVEGKSCINRCFYVELIRGRKQETEVWWTSNSIVVFCGTSGTYGTGSWPDGADINLMPI

SEQ ID NO: 15100 - protein, 469 aa, synthetic construct
  REGION 1..469: note = neuraminidase__InfluenzaA__ABG26915
MNPNQKIITIGSVSLTIATICFLMQIAILVTTVTLHFKQYECNSPPNNQVMLCEPTIIERNITEIVYLTNTTIEKEICPKLAEYRNWSKPQCKITGFAPFSKDNSIRLSAGGDIWVTREPYVSCDPGKCYQFALGQGTTLNNRHSNDTVHDRTPYRTLLMNELGVPFHLGTKQVCIAWSSSSCHDGKAWLHVCVTGHDENATASFIYDGRLVDSISSWSKNILRTQESECVCINGTCTVVMTDGSASERADTKILFIEEGKIVHISPLSGSAQHVEECSCYPRYPGVRCVCRDNWKGSNRPIVDINVKDYSIVSSYVCSGLVGDTPRKNDSSSSSYCLNPNNEEGGHGVKGWAFDDGNDVWMGRTISEKLRSGYETFKVIGGWSKPNSKLQINRQVIVDRGNRSGYSGIFSVEGKSCVNRCFYVELIRGRKQETEVWWTSNSIVVFCGTSGTYGTGSWPDGADINLMPI

SEQ ID NO: 15101 - protein, 469 aa, synthetic construct
  REGION 1..469: note = neuraminidase__InfluenzaA__ABG26937
MNPNQKIITIGSVSLTIATICFLMQIAILVTTVTLHFKQYECNSPPSNQVMLCEPTIIERNITEIVYLTNTTIEKEICPKLAEYRNWSKPQCKITGFAPFSKDNSIRLSAGGDIWVTREPYVSCDPGKCYQFALGQGTTLNNRHSNDTVHDRTPYRTLLMNELGVPFHLGTKQVCIAWSSSSCHDGKAWLHVCVTGHDENATASFIYDGRLVDSIGSWSKNILRTQESECVCINGTCTVVMTDGSASERADTKILFIEEGKIVHISPLSGSAQHVEECSCYPRYPGVRCVCRDNWKGSNRPIVDINVKDYSIVSSYVCSGLVGDTPRKNDSSSSSYCRNPNNEKGSHGVKGWAFDDGNDVWMGRTISEELRSGYETFKVIGGWSKPNSKLQINRQVIVDRGNRSGYSGIFSVEGKSCINRCFYVELIRGRKQETEVWWTSNSIVVFCGTSGTYGTGSWPDGADINLMPI

SEQ ID NO: 15102 - protein, 470 aa, synthetic construct; identical to SEQ ID NO: 14396
  REGION 1..470: note = neuraminidase__InfluenzaA__ABG26948

SEQ ID NO: 15103 - protein, 469 aa, synthetic construct; identical to SEQ ID NO: 14166
  REGION 1..469: note = neuraminidase__InfluenzaA__ABG26959

SEQ ID NO: 15104 - protein, 470 aa, synthetic construct
  REGION 1..470: note = neuraminidase__InfluenzaA__ABG37123
MNPNQKIITIGSISITIGIISLMLQIGNIISIWASHSIQTGSQNHTGVCNQRIITYENSTWVNHTYVNINNTNVIAGKDKTSVTLAGNSSLCSISGWAIYTKDNSIRIGSKGDVFVIREPFISCSHLECRTFFLTQGALLNDKHSNGTVKDRSPYRALMSCPLGEAPSPYNSKFESVAWSASACHDGMGWLTIGISGPDNGAVAVLKYNGIITETIKSWKKQILRTQESECVCVNGSCFTIMTDGPSNGAASYKIFKIEKGKVTKSIELNAPNFHYEECSCYPDTGTVMCVCRDNWHGSNRPWVSFNQNLDYQIGYICSGVFGDNPRPKDGEGSCNPVTVDGANGVKGFSYKYGNGVWIGRTKSNRLRKGFEMIWDPNGWTDTDSDFSVKQDVVAITDWSGYSGSFVQHPELTGLDCIRPCFWVELVRGLPKENTTIWTSGSSISFCGVNSDTANWSWPDGAELPFTIDK

SEQ ID NO: 15105 - protein, 469 aa, synthetic construct
  REGION 1..469: note = neuraminidase__InfluenzaA__ABG37134
MNPNQKIITIGSVSLTIATICFLMQIAILVTTVTLHFKQYECNSPPNNQVMLCEPTIIERNITEIVYLTNTTIEKEICPKLAEYRNWSKPQCKITGFAPFSKDNSIRLSAGGDIWVTREPYVSCDPDKCYQFALGQGTTLNNRHSNDTVHDRTPYRTLLMNELGVPFHLGTKQVCIAWSSSSCHDGKAWLHVCVTGHDENATASFIYDGRLVDSIGSWSKKILRTQESECVCINGTCTVVMTDGSASGRADTKILFIEEGKIVHISQLLGSAQHVEECSCYPRYPGVRCVCRDNWKGSNRPIVDINVKDYSIVSSYVCSGLVGDTPRKNDSSSSSHCLNPNNEEGGHGVKGWAFDDGNDVWMGRTISEKLRSGYETFKVIEGWSKPNSKLQINRQVIVDRGNRSGYSGIFSVEGKSCINRCFYVELIRGRKQETEVWWTSNSIVVFCGTSGTYGTGSWPDGADINLMPI

SEQ ID NO: 15106 - protein, 469 aa, synthetic construct; identical to SEQ ID NO: 14126
  REGION 1..469: note = neuraminidase__InfluenzaA__ABG37145

SEQ ID NO: 15107 - protein, 469 aa, synthetic construct
  REGION 1..469: note = neuraminidase__InfluenzaA__ABG37156
MNPNQKIITIGSVSLTIATICFLMQIAILVTTVTLHFKQYECNSPPNNQVMLCEPTIIERNITEIVYLTNTTIEKEICPKLAEYRNWSKPQCKITGFAPFSKDNSIRLSAGGDIWVTREPYVSCDPGKCYQFALGQGTTLNNRHSNDTVHDRTPYRTLLMNELGVPFHLGTKQVCIAWSSSSCHDGKAWLHVCVTGHDENATASFIYDGRLVDSIGSWSKNILRTQESECVCINGTCTVVMTDGSASGRADTKILFIEEGKIVHISPLSGSAQHVEECSCYPRYPGVRCVCRDNWKGSNRPIVDINVKDYSIVSNYVCSGLVGDTPRKNDSSSSSHCLNPNNEEGGHGVKGWAFDDGNDVWMGRTISEKLRSGYETFKVIGGWSKPNSKLQINRQVIVDRGNRSGYSGIFSVEGKSCINRCFYVELIRGRKQETEVWWTSNSIVVFCGTSGTYGTGSWPDGADINLMPI

SEQ ID NO: 15108 - protein, 469 aa, synthetic construct
  REGION 1..469: note = neuraminidase__InfluenzaA__ABG37167
MNPNQKIITIGSVSLTIATICFLMQIAILVTTVTLHFKQYECNSPPNNQVMLCEPTIIERNITEIVYLTNTTIEKEICPKLAEYRNWSKPQCKITGFAPFSKDNSIRLSAGGDIWVTREPYVSCDPDKCYQFALGQGTTLNNRHSNDTVHDRTPYRTLLMNELGVPFHLGTKQVCIAWSSSSCHDGKAWLHVCVTGHDENATASFIYDGRLVDSISSWSKNILRTQESECVCINGTCTVVMTDGSASGRADTKILFIEEGKIVHISPLSGSAQHVEECSCYPRYPGVRCVCRDNWKGSNRPIVDINVKDYSIVSSYVCSGLVGDTPRKNDSSSSSYCLNPNNEEGGHGVKGWAFDDGNDVWMGRTISEKLRSGYETFKVIGGWSKPNSKLQINRQVIVDRGNRSGYSGIFSVEGKSCVNRCFYVELIRGRKQETEVWWTSNSIVVFCGTSGTYGTGSWPDGADINLMPI

SEQ ID NO: 15109 - protein, 469 aa, synthetic construct
  REGION 1..469: note = neuraminidase__InfluenzaA__ABG37189
MNPNQKIITIGSVSLTIATICFLMQIAILVTTVTLHFKQYECNSPPNNQVLLCEPTIIERNITEIVYLTNTTIEKEICPKLAEYRNWSKPQCKITGFAPFSKDNSIRLSAGGDIWVTREPYVSCDPGKCYQFALGQGTTLNNRHSNDTVHDRTPYRTLLMNELGVPFHLGTKQVCIAWSSSSCHDGKAWLHVCVTGHDENATASFIYDGRLVDSIGSWSKNILRTQESECVCINGTCTVVMTDGSASGRADTKILFIEEGKIVHISSLSGSAQHVEECSCYPRYPGVRCVCRDNWKGSNRPIVDINVKDYSIVSSYVCSGLVGDTPRKNDSSSSSHCLNPNNEEGGHGVKGWAFDDGNDVWMGRTISEKLRSGYETFKVIGGWSKPNSKLQINRQVIVDRGNRSGYSGIFSVEGKSCINRCFYVELIRGRKQETEVWWTSNSIVVFCGTSGTYGTGSWPDGADINLMPI

SEQ ID NO: 15110 - protein, 469 aa, synthetic construct
  REGION 1..469: note = neuraminidase__InfluenzaA__ABG37200
MNPNQKIITIGSVSLTIATICFLMQIAILVTTVTLHFKQYECNSPPNNQVMLCEPTIIERNITEIVYLTNTTIEKEICPKLAEYRNWSKPQCKITGFAPFSKDNSIRLSAGGDIWVTREPYVSCDSGKCYQFALGQGTTLNNRHSNDTVHDRTPYRTLLMNELGVPFHLGTKQVCIAWSSSSCHDGKAWLHVCVTGHDENATASFIYDGRLVDSIGSWSKNILRTQESECVCINGTCTVVMTDGSASGRADTKILFIEEGKIVHISTLSGSAQHVEECSCYPRYPGVRCVCRDNWKGSNRPIVDINVKDYSIVSSYVCSGLVGDTPRKNDSSSSSHCLNPNNEEGGHGVKGWAFDDGNDVWMGRTISEKLRSGYETFKVIGGWSKPNSKLQINRQVIVDRGNRSGYSGIFSVEGKSCINRCFYVELIRGRKQETEVWWTSNSIVVFCGTSGTYGTGSWPDGADINLMPI

SEQ ID NO: 15111 - protein, 469 aa, synthetic construct
  REGION 1..469: note = neuraminidase__InfluenzaA__ABG37211
MNPNQKIITIGSVSLTIATICFLTQIAILVTTVTLHFKQYECSSPPNNQVMPCEPIIIERNITEIVYLTNTTIEKEICPKLVEYRNWSKPQCKITGFAPFSKDNSIRLSAGGDIWVTREPYVSCDPGKCYQFALGQGTTLNNKHSNDTIHDRTPYRTLLMNELGVPFHLGTKQVCIAWSSSSCHDGKAWLHVCITGHDKNATASFIYDGRLVDSIGSWSKNILRTQESECVCINGTCTVVMTDGSASERADTKILFIEEGKIVHISPLSGSAQHVEECSCYPRYPGVRCVCRDNWKGSNRPIVDINVKDYSIVSSYVCSGLVGDTPRKNDRSSSSYCRNPNNEKGNHGVKGWAFDDGNDVWMGRTIGEELRSGYETFKVIGGWSTPNSKLQINRQVIVDSGNRSGYSGIFSVEGKSCINRCFYVELIRGREQETRVWWTSNSIVVFCGTSGTYGTGSWPDGADINLMPI

SEQ ID NO: 15112 - protein, 469 aa, synthetic construct
  REGION 1..469: note = neuraminidase__InfluenzaA__ABG37233
MNPNQKIITIGSVSLTIATICFLMQIAILVTTVTLHFKQYECNSPPSNQAMLCEPTIIERNITEIVYLTNTTIEKEICPKLAEYRNWSKPQCKITGFAPFSKDNSIRLSAGGDIWVTREPYVSCDPGKCYQFALGQGTTINNRHSNDTVHDRTPYRTLLMNELGVPFHLGTKQVCIAWSSSSCHDGKAWLHVCVTGHDENATASFIYDGRLVDSIGSWSKNILRTQESECVCINGTCTVVMTDGSASGRADTKILFIEEGKIVHISPLSGSAQHVEECSCYPRYPGVRCVCRDNWKGSNRPIVDINVKDYSIVSSYVCSGLVGDTPRKNDSSSNSYCRNPNNEKGSHGVKGWAFDDGNDVWMGRTISAESRSGYETFKVIGGWSKPNSKLQINRQVIVDRGNRSGYSGIFSVEGKSCINRCFYVELIRGRKQETEVWWTSNSIVVFCGTSGTYGTGSWPDGADINLMPI

SEQ ID NO: 15113 - protein, 469 aa, synthetic construct
  REGION 1..469: note = neuraminidase__InfluenzaA__ABG37244
MNPNQKIITIGSVSLTIATICFLMQIAILVTTVTLHFKQYECNSPPNNQVMLCEPTIIERNITEIVYLTNTTIEKEICPKLAEYRNWSKPQCKITGFAPFSKDNSIRLSAGGDIWVTREPYVSCDPGKCYQFALGQGTTLNNRHSNDTVHDRTPYRTLLMNELGVPFHLGTKQVCIAWSSSSCHDGKAWLHVCVTGHDENATASFIYDGRLVDSIGSWSKNILRTQESECVCINGTCTVVMTDGSASDRADTKILFIEEGKIVHISPLSGSAQHVEECSCYPRYPGVRCVCRDNWKGSNRPIVDINVKDYSIVSSYVCSGLVGDTPRKNDSSSSSYCWNPNNEKGGHGVKGWAFDDGNDVWMGRTISEESRSGYETFKVIGGWSKPNSKLQINRQVIVDRGNRSGYSGIFSVEGKSCINRCFYVELIRGRKQETEVWWTSNSIVVFCGTSGTYGTGSWPDGADINLMPI

SEQ ID NO: 15114 - protein, 469 aa, synthetic construct; identical to SEQ ID NO: 15113
  REGION 1..469: note = neuraminidase__InfluenzaA__ABG37255

SEQ ID NO: 15115 - protein, 469 aa, synthetic construct; identical to SEQ ID NO: 15100
  REGION 1..469: note = neuraminidase__InfluenzaA__ABG37266

SEQ ID NO: 15116 - protein, 469 aa, synthetic construct; identical to SEQ ID NO: 15113
  REGION 1..469: note = neuraminidase__InfluenzaA__ABG37277

SEQ ID NO: 15117 - protein, 469 aa, synthetic construct; identical to SEQ ID NO: 15113
  REGION 1..469: note = neuraminidase__InfluenzaA__ABG37288

SEQ ID NO: 15118 - protein, 469 aa, synthetic construct; identical to SEQ ID NO: 15113
  REGION 1..469: note = neuraminidase__InfluenzaA__ABG37310

SEQ ID NO: 15119 - protein, 469 aa, synthetic construct; identical to SEQ ID NO: 15100
  REGION 1..469: note = neuraminidase__InfluenzaA__ABG37321

SEQ ID NO: 15120 - protein, 469 aa, synthetic construct
  REGION 1..469: note = neuraminidase__InfluenzaA__ABG37332
MNPNQKIITIGSVSLTIATICFLMQIAILVTTVTLHFKQHECNSPPNNQVMLCEPTIIERNITEIVHLTNTTIEKEICPKLAEYRNWSKPQCKITGFAPFSKDNSIRLSAGGDIWVTREPYVSCDPGKCYQFALGQGTTLNNRHSNDTVHDRTPYRTLLMNELGVPFHLGTKQVCIAWSSSSCHDGKAWLHVCVTGHDENATASFIYDGRLVDSIGSWSKNILRTQESECVCINGTCTVVMTDGSASDRADTKILFIEEGKIVHISPLSGGAQHVEECSCYPRYPGVRCVCRDNWKGSNRPIVDINVKDYSIVSSYVCSGLVGDTPRKNDSSSSSYCWNPNNEKGGHGVKGWAFDDGNDVWMGRTISEESRSGYETFKVIGGWSKPNSKLQINRQVIVDRGNRSGYSGIFSVEGKSCINRCFYVELIRGRKQETEVWWTSNSIVVFCGTSGTYGTGSWPDGADINLMPI

SEQ ID NO: 15121 - protein, 469 aa, synthetic construct
  REGION 1..469: note = neuraminidase__InfluenzaA__ABG37343
MNPNQKIITIGSVSLTIATICFLMQIAILVTTVTLHFKQYECNSPPNNQVMLCEPTIIERNITEIVYLTNTTIEKEICPKLAEYRNWSKPQCKITGFAPFSKDNSIRLSAGGDIWVTREPYVSCDPGKCYQFALGQGTTLNNRHSNDTVHDRTPYRTLLMNELGVPFHLGTKQVCIAWSSSSCHDGKAWLHVCVTGHDENATASFIYDGRLVDSIGSWSKNILRTQESECVCINGTCTVVMTDGSASDRADTKILFIEEGKIVHISPLSGSAQHVEECSCYPRYPGVRCVCRDNWKGSNRPIVDINVKNYSIVSSYVCSGLVGDTPRKNDSSSSSYCWNPNNEKGGHGVKGWAFDDGNDVWMGRTISEESRSGYETFKVIGGWSKPNSKLQINRQVIVDRGNRSGYSGIFSVEGKSCINRCFYVELIRGRKQETEVWWTSNSIVVFCGTSGTYGTGSWPDGADINLMPI

SEQ ID NO: 15122 - protein, 469 aa, synthetic construct; identical to SEQ ID NO: 15101
  REGION 1..469: note = neuraminidase__InfluenzaA__ABG37354

SEQ ID NO: 15123 - protein, 470 aa, synthetic construct; identical to SEQ ID NO: 14828
  REGION 1..470: note = neuraminidase__InfluenzaA__ABG37365

SEQ ID NO: 15124 - protein, 470 aa, synthetic construct; identical to SEQ ID NO: 14930
  REGION 1..470: note = neuraminidase__InfluenzaA__ABG37387

SEQ ID NO: 15125 - protein, 470 aa, synthetic construct
  REGION 1..470: note = neuraminidase__InfluenzaA__ABG37398
MNPNQKIITIGSISIAIGIISLMLQIGNIISIWASHSIQTGSQNHTGVCNQRIITYENNTWVNHTYVNINNTNVIAGKDKTSVTLAGNSSLCSISGWAIYTKDNSIRIGSKGDVFVIREPFISCSHLECRTFFLTQGALLNDKHSNGTVKDRSPYRALMSCPLGEAPSPYNSKFESVAWSASACHDGMGWLTIGISGPDNGAVAVLKYNGIITETIKSWKKQILRTQESECVCVNGSCFTIMTDGPSNGAASYKIFKIEKGKVTKSIELNAPNFHYEECSCYPDTGTVMCVCRDNWHGSNRPWVSFNQNLDYQIGYICSGVFGDNPRPKDGEGSCNPVTVDGANGVKGFSYKYGNGVWIGRTKSNRLRKGFEMIWDPNGWTDTDSDFSVKQDVVAITDWSGYSGSFVQHPELTGLDCIRPCFWVELVRGLPKENTTIWTSGSSISFCGVNSDTANWSWPDGAELPFTIDK

SEQ ID NO: 15126 - protein, 469 aa, synthetic construct
  REGION 1..469: note = neuraminidase__InfluenzaA__ABG37409
MNPNQKIITIGSVSLTIATICFLMQIVILVTTVTLHFKQYECNSPPNNQVMPCEPTIIERNITEIVYLTNTTIEKEICPKLAEYRNWSKPQCNITGFAPFSKDNSIRLSAGGDIWVTREPYVSCDPDKCYQFALGQGTTLNNGHSNDTVHDRTPYRTLLMNELGVPFHLGTKQVCIAWSSSSCHDGKAWLHVCVTGDDENATASFIYNGRLVDSIGSWSKKILRTQESECVCINGTCTVVMTDGSASGKADTKILFIEEGKIVHTSLLSGSAQHVEECSCYPRYPGVRCVCRDNWKGSNRPIVDINVKDYSIVSSYVCSGLVGDTPRKNDSSSSSHCLDPNNEEGGHGVKGWAFDDRNDVWMGRTISEKLRSGYETFKVIEGWSKPNSKLQINRQVIVDRGNRSGYSGIFSVEGKSCINRCFYVELIRGRKQETEVLWTSNSIVVFCGTSGTYGTGSWPDGADINLMPI

SEQ ID NO: 15127 - protein, 469 aa, synthetic construct
  REGION 1..469: note = neuraminidase__InfluenzaA__ABG37442
MNPNQKIITIGSVSLTIATICFLMQIAILVTTVTLHFKQFECNSPPNNQVMLCEPTIIEGNITEIVYLTNTTIEKEICPKLAEYRNWSKPQCNITGFAPFSKDNSIRLSAGGDIWVTREPYVSCDPDKCYQFALGQGTTLNNGHSNDTVHDRTPYRTLLMNELGVPFHLGTRQVCIAWSSSSCHDGKAWLHVCVTGDDENATASFIYNGRLVDSIGSWSKKILRTQESECVCINGTCTVVMTDGSASGKADTKILFIEEGKIVHISTLSGSAQHVEECSCYPRYPGVRCVCRDNWKGSNRPIVDINVKDYSIVSSYVCSGLVGDTPRKNDSFSSSHCLDPNNEEGGHGVKGWAFDDGNDVWMGRTISEKLRSGYETFKVIEGWSKPNSKLQTNRQVIVERGNRSGYSGIFSVEGKSCINRCFYVELIRGRKEETEVWWTSNSIVVFCGTSGTYGTGSWPDGADINLMPI

SEQ ID NO: 15128 - protein, 469 aa, synthetic construct; identical to SEQ ID NO: 14154
  REGION 1..469: note = neuraminidase__InfluenzaA__ABG37453

SEQ ID NO: 15129 - protein, 469 aa, synthetic construct; identical to SEQ ID NO: 14166
  REGION 1..469: note = neuraminidase__InfluenzaA__ABG37464

SEQ ID NO: 15130 - protein, 469 aa, synthetic construct
  REGION 1..469: note = neuraminidase__InfluenzaA__ABG37475
MNPNQKIITIGSVSLTIATICFLMQIAILVTTVTLHFKQYECNSPPNNQVMLCEPTIIERNITEIVYLTNTTIEKEICPKLAEYRNWSKPQCNITGFAPFSKDNSIRLSAGGDIWVTREPYVSCDPDKCYQFALGQGTTLNNGHSNDTVHDRTPYRTLLMNELGVPFHLGTRQVCIAWSSSSCHDGKAWLHVCVTGDDENATASFIYNGRLVDSIGSWSKKILRTQESECVCINGTCTVVMTDGSASGKADTKILFIEEGKIVHISTLSGSAQHVEECSCYPRYPGVRCVCRDNWKGSNRPIVDINVKDYSIVSSYVCSGLVGDTPRKNDSFSSSHCLDPNNEEGGHGVKGWAFDDGNDVWMGRTISEKLRSGYETFKVIEGWSKPNSKLQINRQVIVERGDRSGYSGIFSVEGKSCINRCFYVELIRGRKEETEVLWTSNSIVVFCGTSGTYGTGSWPDGADINLMPI

SEQ ID NO: 15131 - protein, 469 aa, synthetic construct
  REGION 1..469: note = neuraminidase__InfluenzaA__ABG37486
MNPNQKIITIGSVSLTIATICFLMQIAILVTTVTLHFKQYECNSPPNNQVMLCEPTIIERNITEIVYLTNTTIEKEICPKLAEYRNWSKPQCNLTGFAPFSKDNSIRLSAGGDIWVTREPYVSCDPDKCYQFALGQGTTLNNGHSNDTVHDRTPYRTLLMNELGVPFHLGTRQVCIAWSSSSCHDGKAWLHVCVTGDDENATASFIYNGRLVDSIGSWSKKILRTQESECVCINGTCTVVMTDGSASGKADTKILFIEEGKIVHISTLSGSAQHVEECSCYPRYPGVRCVCRDNWKGSNRPIVDINVKDYSIVSSYVCSGLVGDTPRKNDSFSSSHCLDPNNEEGGHGVKGWAFDDGNDVWMGRTISEKLRSGYETFKVIEGWSKPNSKLQTNRQVIVERGNRSGYSGIFSVEGKSCINRCFYVELIRGRKEETEVWWTSNSIVVFCGTSGTYGTGSWPDGADINLMPI

SEQ ID NO: 15132 - protein, 469 aa, synthetic construct
  REGION 1..469: note = neuraminidase__InfluenzaA__ABG37497
MNPNQKIITIGSVSLTIATICFLMQIAILVTTVTLHFKQYECNSPPNNQVMLCEPTIIERNITEIVYLTNTTIEKEICPKLAEYRNWSKPQCNITGFAPFSKDNSIRLSAGGDIWVTREPYVSCDPDKCYQFALGQGTTLNNGHSNDTVHDRTPYRTLLMNELGVPFHLGTRQVCIAWSSSSCHDGKAWLHVCVTGDDENATASFIYNGRLVDSIGSWSKKILRTQESECVCINGTCTVVMTDGSASGKADTKIIFIEEGKIVHISTLSGSAQHVEECSCYPRYPGVRCVCRDNWKGSNRPIVDINVKDYSIVSSYVCSGLVGDTPRKNDSFSSSHCLDPNNEEGGHGVKGWAFDDGNDVWMGRTISEKLRSGYETFKVIEGWSKPNSKLQTNRQVIVERGNRSGYSGIFSVEGKSCINRCFYVELIRGRKEETEVWWTSNSIVVFCGTSGTYGTGSWPDGADINLMPI

SEQ ID NO: 15133 - protein, 469 aa, synthetic construct; identical to SEQ ID NO: 14180
  REGION 1..469: note = neuraminidase__InfluenzaA__ABG37508

SEQ ID NO: 15134 - protein, 469 aa, synthetic construct; identical to SEQ ID NO: 14591
  REGION 1..469: note = neuraminidase__InfluenzaA__ABG37519

SEQ ID NO: 15135 - protein, 469 aa, synthetic construct; identical to SEQ ID NO: 14591
  REGION 1..469: note = neuraminidase__InfluenzaA__ABG37530

SEQ ID NO: 15136 - protein, 469 aa, synthetic construct; identical to SEQ ID NO: 14591
  REGION 1..469: note = neuraminidase__InfluenzaA__ABG37541

SEQ ID NO: 15137 - protein, 469 aa, synthetic construct; identical to SEQ ID NO: 14591
  REGION 1..469: note = neuraminidase__InfluenzaA__ABG37552

SEQ ID NO: 15138 - protein, 469 aa, synthetic construct; identical to SEQ ID NO: 14591
  REGION 1..469: note = neuraminidase__InfluenzaA__ABG37563

SEQ ID NO: 15139 - protein, 469 aa, synthetic construct; identical to SEQ ID NO: 14591
  REGION 1..469: note = neuraminidase__InfluenzaA__ABG37585

SEQ ID NO: 15140 - protein, 469 aa, synthetic construct; identical to SEQ ID NO: 14591
  REGION 1..469: note = neuraminidase__InfluenzaA__ABG37596

SEQ ID NO: 15141 - protein, 469 aa, synthetic construct; identical to SEQ ID NO: 14591
  REGION 1..469: note = neuraminidase__InfluenzaA__ABG37607

SEQ ID NO: 15142 - protein, 469 aa, synthetic construct; identical to SEQ ID NO: 14591
  REGION 1..469: note = neuraminidase__InfluenzaA__ABG37618

SEQ ID NO: 15143 - protein, 470 aa, synthetic construct; identical to SEQ ID NO: 14828
  REGION 1..470: note = neuraminidase__InfluenzaA__ABG47810

SEQ ID NO: 15144 - protein, 470 aa, synthetic construct
  REGION 1..470: note = neuraminidase__InfluenzaA__ABG47832
MNPNQKIITIGSISIAIGIISLILQVGNIISIWASHSIQTGSQNHTGICNQRIITYENSTWVNQTYVNINNTNVVAGKDKTSMTLAGNSSLCPIRGWAIYTKDNSIRIGSKGDVFVIREPFISCSHLECRTFFLTQGALLNDKHSNGTVKDRSPYRALMSCPLGEAPSPYNSRFESVAWSASACHDGLGWLTIGISGPDNGAVAVLKYNGIITETIKSWKKRILRTQESECVCMNGSCFTIMTDGPSNGAASYRIFKIEKGRVTKSIELDAPNYHYEECSCYPNTGTVMCVCRDNWHGSNRPWVSFNQNLDYQIGYICSGVFGDNPRPKDGEGSCNPVTVDGADGVKGFSYRYGNGVWIGRTKSNRLRKGFEMIWDPNGWTDTDSDFSMKQDIVAMTDWSGYSGSFVQHPELTGLDCMRPCFWVELVRGLPRENTTIWTSGSSISFCGVNSDTANWSWPDGAELPFTIDK

SEQ ID NO: 15145 - protein, 470 aa, synthetic construct; identical to SEQ ID NO: 14968
  REGION 1..470: note = neuraminidase__InfluenzaA__ABG47843

SEQ ID NO: 15146 - protein, 469 aa, synthetic construct
  REGION 1..469: note = neuraminidase__InfluenzaA__ABG47865
MNPNQKIITIGSVSLTIATICFLMQIAILVITVTLHFKQYECNSPPNNQVMLCEPTIIERNITEIVYLTNTTIEKEICPKLAEYRNWSKPQCKITGFAPFSKDNSIRLSAGGDIWVTREPYVSCDPDKCYQFALGQGTTLNNRHSNDTVHDRTPYRTLLMNELGVPFHLGTKQVCIAWSSSSCHDGKAWLHVCVTGHDENATASFIYDGRLVDSIGSWSKKILRTQESECVCINGTCTVVMTDGSASGRADTKILFIEEGKIVHISPLSGSAQHVEECSCYPRYSGVRCVCRDNWKGSNRPIVDINVKDYSIVSSYVCSGLVGDTPRKNDSSSSSHCLNPNNEEGGHGVKGWAFDDGNDVWMGRTISEKLRSGYETFKVIGGWSKPNSKLQINRQVIVDRGNRSGYSGIFSVEGKSCINRCFYVELIRGRKQETEVWWTSNSIVVFCGTSGTYGTGSWPDGADINLMPI

SEQ ID NO: 15147 - protein, 469 aa, synthetic construct; identical to SEQ ID NO: 15113
  REGION 1..469: note = neuraminidase__InfluenzaA__ABG47876

SEQ ID NO: 15148 - protein, 469 aa, synthetic construct; identical to SEQ ID NO: 15113
  REGION 1..469: note = neuraminidase__InfluenzaA__ABG47887

SEQ ID NO: 15149 - protein, 469 aa, synthetic construct; identical to SEQ ID NO: 15100
  REGION 1..469: note = neuraminidase__InfluenzaA__ABG47898

SEQ ID NO: 15150 - protein, 469 aa, synthetic construct; identical to SEQ ID NO: 15113
  REGION 1..469: note = neuraminidase__InfluenzaA__ABG47909

SEQ ID NO: 15151 - protein, 469 aa, synthetic construct; identical to SEQ ID NO: 15101
  REGION 1..469: note = neuraminidase__InfluenzaA__ABG47920

SEQ ID NO: 15152 - protein, 469 aa, synthetic construct; identical to SEQ ID NO: 15101
  REGION 1..469: note = neuraminidase__InfluenzaA__ABG47931

SEQ ID NO: 15153 - protein, 469 aa, synthetic construct; identical to SEQ ID NO: 15101
  REGION 1..469: note = neuraminidase__InfluenzaA__ABG47942

SEQ ID NO: 15154 - protein, 469 aa, synthetic construct
  REGION 1..469: note = neuraminidase__InfluenzaA__ABG47953
MNPNQKIITIGSVSLTIATICFLMQIAILVTTVTLHFKQYECNSPPSNQVMLCEPTIIERNITEIVYLTNTTIEKEICPKLAEYRNWSKPQCKITGFAPFSKDNSIRLSAGGDIWVTREPYVSCDPGKCYQFALGQGTTLNNRHSNDTVHDRTPYRTLLMNELGVPFHLGTKQVCIAWSSSSCHDGKAWLHVCVTGHDENATASFIYDGRLVDSIGSWSKNILRTQESECVCINGTCTVVMTDGSASERADTKILFIEEGKIVHISPLSGSAQHVEECSCYPRYPGVRCVCRDNWKGSNRPIVDINVKDYSIVSSYVCSGLVGDTPRKNDSSSSSYCRNPNNEKGSHGVKGWAFDDGNDVWMGRTISEELRSGYETFKVIGGWSKPNSKLQINRQVIVDRGNRSGYSGIFSVEGKSCINRCFYVELIRGRKQETEVWWTSNSIVVFCGTSGTYGTGSWPDGANINLMPI

SEQ ID NO: 15155 - protein, 469 aa, synthetic construct
  REGION 1..469: note = neuraminidase__InfluenzaA__ABG47964
MNPNQKIITIGSVSLTIATICFLMQIAILVTTVTLHFKQYECNSPPNNQVMLCEPTIIERNITEIVYLTNTTIEKEICPKLAEYRNWSKPQCKITGFAPFSKDNSIRLSAGGDIWVTREPYVSCDPGKCYQFALGQGTTLNNRHSNDTVHDRTPYRTLLMNELGVPFHLGTKQVCIAWSSSSCHDGKAWLHVCVTGHDENATASFIYDGRLVDSIGSWSKNILRTQESECVCINGTCTVVMTDGSASERADTKILFIEEGKIVHISPLSGSAQHVEECSCYPRYPGVRCVCRDNWKGSNRPIVDINVKDYSIVSSYVCSGLVGDTPRKNDSSSSSYCQNPNNEKGSHGVKGWAFDDGNDVWMGRTISEELRSGYETFKVIGGWSKPNSKLQINRQVIVDRGNRSGYSGIFSVEGKSCINRCFYVELIRGRKQETEVWWTSNSIVVFCGTSGTYGTGSWPDGADINLMPI

SEQ ID NO: 15156 - protein, 469 aa, synthetic construct
  REGION 1..469: note = neuraminidase__InfluenzaA__ABG47975
MNPNQKIITIGSVSLTIATICFLMQIAILVTTVTLHFKQYECNSPPSNQVMLCEPTIIERNITEIVYLTNTTIEKEICPKLAEYRNWSKPQCKITGFAPFSKDNSIRLSAGGDIWVTREPYVSCDPGKCYQFALGQGTTLNNRHSNDTVHDRTPYRTLLMNELGVPFHLGTKQVCIAWSSSSCHDGKAWLHVCVTGHDENATASFIYDGRLVDSIGSWSKNILRTQESECVCINGTCTVVMTDGSASERADTKILFIEEGKIVHISPLSGSAQHVEECSCYPRYPGVRCVCRDNWKGSNRPIVDINVKDYSIVSSYVCSGLVGDTPRKNDSSSSSYCRDPNNERGSHGVKGWAFDDGNDVWMGRTISEELRSGYETFKVIGGWSKPNSKLQINRQVIVDRGNRSGYSGIFSVEGKSCINRCFYVELIRGRKQETEVWWTSNSIVVFCGTSGTYGTGSWPDGADINLMPI

SEQ ID NO: 15157 - protein, 469 aa, synthetic construct
  REGION 1..469: note = neuraminidase__InfluenzaA__ABG47986
MNPNQKIITIGSVSLTIATICFLMQIAILVTTVTLHFKQYECNSPPSNQVMLCEPTIIERNITEIVYLTNTTIEKEICPKLAEYRNWSKPQCKITGFAPFSKDNSIRLSAGGDIWVTREPYVSCDPGKCYQFALGQGTTLNNRHSNDTVHDRTPYRTLLMNELGVPFHLGTKQVCIAWSSSSCHDGKAWLHVCVTGHDENATASFIYDGRLVDSIGSWSKNILRTQESECVCINGTCTVVMTDGSASERADTKILFIEEGKIVHISPLSGSAQHVEECSCYPRYPGVRCVCRDNWKGSNRPIVDINVKDYSIVSSYVCSGLVGDTPRKNDSSSSSYCRKPNNEKGSHGVKGWAFDDGNDVWMGRTISEELRSGYETFKVIGGWSKPNSKLQINRQVIVDRGNRSGYSGIFSVEGKSCINRCFYVELIRGRKQETEVWWTSNSIVVFCGTSGTYGTGSWPDGADINLMPI

SEQ ID NO: 15158 - protein, 469 aa, synthetic construct; identical to SEQ ID NO: 15101
  REGION 1..469: note = neuraminidase__InfluenzaA__ABG47997

SEQ ID NO: 15159 - protein, 469 aa, synthetic construct
  REGION 1..469: note = neuraminidase__InfluenzaA__ABG48008
MNPNQKIITIGSVSLTIATICFLMQIAILVTTVTLHFKQYECNSPPSNQVMLCEPTIIERNITEIVYLTNTTIEKEICPKLAEYRNWSKPQCKITGFAPFSKDNSIRLSAGGDIWVTREPYVSCDPGKCYQFALGQGTTLNNRHSNDTVHDRTPYRTLLMNELGVPFHLGTKQVCIAWSSSSCHDGKAWLHVCVTGHDENATASFIYDGRLVDSIGSWSKNILRTQESECVCINGTCTVVMTDGSASERADTKILFIEEGKIVHISPLSGSAQHVEECSCYPRYPGVRCVCRDNWKGSNRPIVDINVKDYSIVSSYVCSGLVGDTPRRNDSSSSSYCRKPNNEKGSHGVKGWAFDDGNDVWMGRTISEELRSGYETFKVIGGWSKPNSKLQINRQVIVDRGNRSGYSGIFSVEGKSCINRCFYVELIRGRKQETEVWWTSNSIVVFCGTSGTYGTGSWPDGADINLMPI

SEQ ID NO: 15160 - protein, 469 aa, synthetic construct
  REGION 1..469: note = neuraminidase__InfluenzaA__ABG48019
MNPNQKIITIGSVSLTIATICFLMQIAILVTTVTLHFKQYECNSPPSNQVMLCEPTIIERNITEIVYLTNTTIEKEICPKLAEYRNWSKPQCKITGFAPFSKDNSIRLSAGGDIWVTREPYVSCDPGKCYQFALGQGTTLNNRHSNDTVHDRTPYRTLLMNELGVPFHLGTKQVCIAWSSSSCHDGKAWLHVCVTGHDENATASFIYDGRLVDSIGSWSKNILRTQESECVCINGTCTVVMTDGSASERADTKILFIEEGKIVHISPLSGSAQHVEECSCYPRYPGVRCACRDNWKGSNRPIVDINVKDYSIVSSYVCSGLVGDTPRKNDSSSSSYCRNPNNEKGSHGVKGWAFDDGNDVWMGRTISEELRSGYETFKVIGGWSKPNSKLQINRQVIVDRDNRSGYSGIFSVEGKSCINRCFYVELIRGRKQETEVWWTSNSIVVFCGTSGTYGTGSWPDGADINLMPI

SEQ ID NO: 15161 - protein, 469 aa, synthetic construct; identical to SEQ ID NO: 15101
  REGION 1..469: note = neuraminidase__InfluenzaA__ABG48030

SEQ ID NO: 15162 - protein, 469 aa, synthetic construct; identical to SEQ ID NO: 15101
  REGION 1..469: note = neuraminidase__InfluenzaA__ABG48041

SEQ ID NO: 15163 - protein, 470 aa, synthetic construct; identical to SEQ ID NO: 14828
  REGION 1..470: note = neuraminidase__InfluenzaA__ABG48052

SEQ ID NO: 15164 - protein, 469 aa, synthetic construct; identical to SEQ ID NO: 14730
  REGION 1..469: note = neuraminidase__InfluenzaA__ABG48063

SEQ ID NO: 15165 - protein, 469 aa, synthetic construct; identical to SEQ ID NO: 14853
  REGION 1..469: note = neuraminidase__InfluenzaA__ABG48074

SEQ ID NO: 15166 - protein, 469 aa, synthetic construct; identical to SEQ ID NO: 14154
  REGION 1..469: note = neuraminidase__InfluenzaA__ABG48085

SEQ ID NO: 15167 - protein, 469 aa, synthetic construct
  REGION 1..469: note = neuraminidase__InfluenzaA__ABG48107
MNPNQKIITIGSVSLTIATICFLMQIAILVTTVTLHFKQYECNSPPNNQVMLCEPTIIERNITEIVYLTNTTIEKEICPKLAEYRNWSKPQCNITGFAPFSKDNSIRLSAGGDIWVTREPYVSCDPDKCYQFALGQGTTLNNGHSNDTVHDRTPYRTLLMNELGVPFHLGTRQVCIAWSSSSCHDGKAWLHVCVTGDDENATASFIYNGRLVDSIGSWSKKTLRTQESECVCINGTCTVVMTDGSASGKADTKILFIEEGKIVHISTLSGSAQHVEECSCYPRYPGVRCVCRDNWKGSNRPIVDINVKDYSIVSSYVCSGLVGDTPRKNDSFSSSHCLDPNNEEGGHGVKGWAFDDGNDVWMGRTISEKLRSGYETFKVIEGWSKPNSKLQINRQVIVERGNRSGYSGIFSVEGKSCINRCFYVELIRGRKEETEVWWTSNSIVVFCGTSGTYGTGSWPDGADINLMPI

SEQ ID NO: 15168 - protein, 469 aa, synthetic construct; identical to SEQ ID NO: 14166
  REGION 1..469: note = neuraminidase__InfluenzaA__ABG48118

SEQ ID NO: 15169 - protein, 469 aa, synthetic construct; identical to SEQ ID NO: 14166
  REGION 1..469: note = neuraminidase__InfluenzaA__ABG48129

SEQ ID NO: 15170 - protein, 469 aa, synthetic construct; identical to SEQ ID NO: 14154
  REGION 1..469: note = neuraminidase__InfluenzaA__ABG48140

SEQ ID NO: 15171 - protein, 469 aa, synthetic construct; identical to SEQ ID NO: 14166
  REGION 1..469: note = neuraminidase__InfluenzaA__ABG48151

SEQ ID NO: 15172 - protein, 469 aa, synthetic construct; identical to SEQ ID NO: 14154
  REGION 1..469: note = neuraminidase__InfluenzaA__ABG48173

SEQ ID NO: 15173 - protein, 469 aa, synthetic construct; identical to SEQ ID NO: 14166
  REGION 1..469: note = neuraminidase__InfluenzaA__ABG48184

SEQ ID NO: 15174 - protein, 469 aa, synthetic construct
  REGION 1..469: note = neuraminidase__InfluenzaA__ABG48195
MNPNQKIITIGSVSLTIATICFLMQIAILVTTVTLHFKQYECNSPPNNQVMLCEPTIIERNITEIVYLTNTTIEKEICPKLAEYRNWSKPQCNITGFAPFSKDNSIRLSAGGDIWVTREPYVSCDPDKCYQFALGQGTTLNNGHSNDTVHDRTPYRTLLMNELGVPFHLGTRQVCIAWSSSSCHDGKAWLHVCVTGDDENATASFIYNGRLVDSIGSWSKKILRTQESECVCINGTCTVVMTDGSASGKADTKILFIEEGKIVHISTLSGSAQHVEECSCYPRYPGVRCVCRDNWKGSNRPIVDINVKDYSIVSSYVCSGLVGDTPRKNDSFSSSHCIDPNNEEGGHGVKGWAFDDGNDVWMGRTISEKLRSGYETFKVIEGWSKPNSKLQTNRQVIVERGNRSGYSGIFSVEGKSCINRCFYVELIRGRKEETEVWWTSNSIVVFCGTSGTYGTGSWPDGADINLMPI

SEQ ID NO: 15175 - protein, 469 aa, synthetic construct
  REGION 1..469: note = neuraminidase__InfluenzaA__ABG48206
MNPNQKIITIGSVSLTIATICFLMQIAILVTTVTLHFKQHECNSPPNNQVMLCEPTIIERNITEIVYLTNTTIEKEICPKLVEYRNWSKPQCNITGFAPFSKDNSIRLSAGGDIWVTREPYVSCDPDKCYQFALGQGTTLNNGHSNDTVHDRTPYRTLLMNELGVPFHLGTRQVCIAWSSSSCHDGKAWLHVCVTGDDKNATASFIYNGRLVDSIGSWSKKILRTQESECVCINGTCTVVMTDGSASGKADTKILFIEEGKIVHISTLSGSAQHVEECSCYPRYPGVRCVCRDNWKGSNRPIVDINVKDYSIVSSYVCSGLVGDTPRKNDSFSSSHCLDPNNEEGGHGVKGWAFDDGNDVWMGRTINEKLRSGYETFKVIEGWSKPNSKLQINRQVIVERGNRSGYSGIFSVEGKSCINRCFYVELIRGRKEETEVWWTSNSIVVFCGTSGTYGTGSWPDGADINLMPI

SEQ ID NO: 15176 - protein, 469 aa, synthetic construct; identical to SEQ ID NO: 14591
  REGION 1..469: note = neuraminidase__InfluenzaA__ABG48217

SEQ ID NO: 15177 - protein, 469 aa, synthetic construct; identical to SEQ ID NO: 14591
  REGION 1..469: note = neuraminidase__InfluenzaA__ABG48228

SEQ ID NO: 15178 - protein, 469 aa, synthetic construct; identical to SEQ ID NO: 15175
  REGION 1..469: note = neuraminidase__InfluenzaA__ABG48239

SEQ ID NO: 15179 - protein, 469 aa, synthetic construct; identical to SEQ ID NO: 14591
  REGION 1..469: note = neuraminidase__InfluenzaA__ABG48250

SEQ ID NO: 15180 - protein, 469 aa, synthetic construct
  REGION 1..469: note = neuraminidase__InfluenzaA__ABG48272
MNPNQKIITIGSVSLTISTICFFMQIAILITTVTLHFKQYEFNSPPNNQVMLCEPTIIERNITEIVYLTNTTIEKEICPKLAEYRNWSKPQCDITGFAPFSKDNSIRLSAGGDIWVTREPYVSCDPDKCYQFALGQGTTLNNVHSNDTVHDRTPYRTLLMNELGVPFHLGTKQVCIAWSSSSCHDGKAWLHVCVTGDDKNATASFIYNGRLVDSIVSWSKKILRTQESECVCINGTCTVVMTDGSASGKADTKILFIEEGKIVHTSTLSGSAQHVEECSCYPRYPGVRCVCRDNWKGSNRPIVDINIKDYSIVSSYVCSGLVGDTPRKNDSSSSSHCLDPNNEEGGHGVKGWAFDDGNDVWMGRTISEKSRSGYETFKVIEGWSNPNSKLQINRQVIVDRGNRSGYSGIFSVEGKSCINRCFYVELIRGRKEETEVLWTSNSIVVFCGTSGTYGTGSWPDGADINLMPI

SEQ ID NO: 15181 - protein, 469 aa, synthetic construct
  REGION 1..469: note = neuraminidase__InfluenzaA__ABG48294
MNPNQKIITIGSVSLTIATICFLMQIAILVTTVTLHFKQYECSSPPNNQVIPCQPTIIERNITEIVYLTNTTIEKEICPKLVEYRNWSKPQCKITGFAPFSKDNSIRLSAGGDIWVTREPYVSCDPGKCYQFALGQGTTLNNRHSNDTVHDRTPYRTLLMNELGVPFHLGTKQVCIAWSSSSCHDGKAWLHVCVTGHDENATASFIYDGRLVDSIGSWSRNILRTQESECVCINGTCTVVMTDGSASERADTKILFIEEGKVVHISPLSGSAQHVEECSCYPRYPGVRCVCRDNWKGSNRPIVDINVKDYSIISSYVCSGLVGDTPRRNDSSSSSYCQNPNNEKGSHGVKGWAFDDGNDVWMGRTISEELRSGYETFKVIGGWSTPNSKLQINRQVIVDSGNRSGYSGIFSVEGKSCINRCFYVELIRGRKQETKVWWTSNSIVVFCGTSGTYGTGSWPDGADIDLMPI

SEQ ID NO: 15182 - protein, 469 aa, synthetic construct
  REGION 1..469: note = neuraminidase__InfluenzaA__ABG48305
MNPNQKIIIIGSVSLTIATICFLMQIAILVTTVTLHFKQYECNSPPNNQVMLCEPTIIERNITEIVYLTNTTIEKEICPKLAEYRNWSKPQCKITGFAPFSKDNSIRLSAGGDIWVTREPYVSCDPGKCYQFALGQGTTLNNRHSNDTVHDRTPYRTLLMNELGVPFHLGTKQVCIAWSSSSCHDGKAWLHVCVTGHDENATASFIYDGRLVDSIGSWSKNILRTQESECVCINGTCTVVMTDGSASERADTKILFIEEGKIVHISPLSGSAQHVEECSCYPRYPGVRCVCRDNWKGSNRPIVDINVKDYSIVSSYVCSGLVGDTPRKNDSSSSSYCRNPNNEKGSHGVKGWAFDDGNDVWMGRTISEELRSGYETFKVIGGWSKPNSKLQINRQVIVDRGNRSGYSGIFSVEGKSCINRCFYVELIRGRKQETEVWWTSNSIVVFCGTSGTYGTGSWPDGADINLMPI

SEQ ID NO: 15183 - protein, 469 aa, synthetic construct
  REGION 1..469: note = neuraminidase__InfluenzaA__ABG48316
MNPNQKIITIGSVSLTVATICFLMQIAILVTTVTLHFKQYECNSPPNNQVMLCEPTIIERNITEIVYLTNTTIEKEICPKLAEYRNWSKPQCKITGFAPFSKDNSIRLSAGGDIWVTREPYVSCDPGKCYQFALGQGTTLNNRHSNDTVHDRTPYRTLLMNELGVPFHLGTKQVCIAWSSSSCHDGKAWLHVCVTGHDENATASFIYDGRLVDSIGSWSKNILRTQESECVCINGTCTVVMTDGSASERADTKILFIEEGKIVHISPLSGSAQHVEECSCYPRYPGVRCVCRDNWKGSNRPIVDINVKDYSIVSSYVCSGLVGDTPRKNDSSSSSYCRNPNNEKGSHGVKGWAFDDGNDVWMGRTISEELRSGYETFKVIGGWSKPNSKLQINRQVIVERGNRSGYSGIFSVEGKSCINRCFYVELIRGRKQETEVWWTSNSIVVFCGTSGTYGTGSWPDGADINLMPI

SEQ ID NO: 15184 - protein, 469 aa, synthetic construct
  REGION 1..469: note = neuraminidase__InfluenzaA__ABG48327
MNPNQKIITIGSVSLTIATICFLMQIAILVTTVTLHFKQYECNSPPNNQVMLCEPTIIERNITEIVYLTNTTIEKEICPKLAEYRNWSKPQCKITGFAPFSKDNSIRLSAGGDIWVTREPYVSCDPGKCYQFALGQGTTLNNRHSNDTVHDRTPYRTLLMNELGVPFHLGTKQVCIAWSSSSCHDGKAWLHVCVTGHDENATASFIYDGRLVDSIGSWSKNILRTQESECVCINGTCTVVMTDGSASERADTKILFIEEGKIVHISPLSGSAQHVEECSCYPRYPGVRCVCRDNWKGSNRPIVDINVKDYSIVSSYVCSGLVGDTPRKNDSSSSSYCRNPNNEKGSRGVKGWAFDDGNDVWMGRTISEELRSGYETFKVIGGWSKPNSKLQINRQVIVDRGNRSGYSGIFSVEGKSCINRCFYVELIRGRKQETEVWWTSNSIVVFCGTSGTYGTGSWPDGADINLMPI

SEQ ID NO: 15185 - protein, 469 aa, synthetic construct
  REGION 1..469: note = neuraminidase__InfluenzaA__ABG48338
MNPNQKIITIGSVSLTIATICFLMQIAILVTTVTLHFKQYECNSPPNNQVMLCEPTIIERNITEIVYLTNTTIEKEICPKLAEYRNWSKPQCKITGFAPFSKDNSIRLSAGGDIWVTREPYVSCDPGKCYQFALGQGTTLNNRHSNDTVHDRTPYRTLLMNELGVPFHLGTKQVCIAWSSSSCHDGKAWLHVCVTGHDENATASFIYDGRLVDSIGSWSKNILRTQESECVCINGTCTVVMTDGSASERADTKILFIEEGKIVHISPLSGSAQHVEECSCYPRYPGVRCVCRDNWKGSNRPIVDINVKDYSIVSSYVCSGLVGDTPRKNDSSSSSYCRNPNNEKGSHGVKGWAFDDGNDVWMGRTISEELRSGYETFKVIGGWSKPNSKLQINRQVIVDRGNRSGYSGIFSVEGKSCINRCFYVELIRGRKQETEVWWTSNSIVVFCGTSGTYGTGSWPDGADINLMPI

SEQ ID NO: 15186 - protein, 469 aa, synthetic construct; identical to SEQ ID NO: 15185
  REGION 1..469: note = neuraminidase__InfluenzaA__ABG48349

SEQ ID NO: 15187 - protein, 469 aa, synthetic construct
  REGION 1..469: note = neuraminidase__InfluenzaA__ABG48360
MNPNQKIITIGSVSLTIATICFLMQIAILVTTVTLHFKQYECNSPPNNQVMLCEPTIIERNITEIVYLTNTTIEKEICPKLAEYRNWSKPQCKITGFAPFSKDNSIRLSAGGDIWVTREPYVSCDPGKCYQFALGQGTTLNNRHSNDTVHDRTPYRTLLMSELGVPFHLGTKQVCIAWSSSSCHDGKAWLHVCVTGHDENATASFIYDGKLVDSIGSWSKNILRTQESECVCINGTCTVVMTDGSASERADTKILFIEEGKIVHISPLSGSAQHVEECSCYPRYPGVRCVCRDNWKGSNRPIVDINVKDHSIVSSYVCSGLVGDTPRKNDSSSSSYCRNPNNEKGSHGVKGWAFDDGNDVWMGRTISEELRSGYETFKVIGGWSKPNSKLQINRQVIVDRGNRSGYSGIFSVEGKSCINRCFYVELIRGRKQETEVWWTSNSIVVFCGTSGTYGTGSWPDGADINLMPI

SEQ ID NO: 15188 - protein, 469 aa, synthetic construct; identical to SEQ ID NO: 15185
  REGION 1..469: note = neuraminidase__InfluenzaA__ABG48371

SEQ ID NO: 15189 - protein, 469 aa, synthetic construct
  REGION 1..469: note = neuraminidase__InfluenzaA__ABG67138
MNPNQKIITIGSVSLTIATICFLTQIAILVTTVTLHFKQYECNSPPSNQVMLCEPTTIERNITEIVYLTNTTIEKEICPKLAEYRNWSKPQCKITGFAPFSKDNSIRLSAGGDIWVTREPYVSCDPDKCYQFALGQGTTLNNRHSNDTVHDRTPYRTLLMNELGVPFHLGTKQVCIAWSSSSCHDGKAWLHVCVTGHDENATASFIYDGRLVDSIGSWSKKILRTQESECVCINGTCTVVMTDGSASGRADTKILFIEEGKIVHISPLSGSAQHVEECSCYPRYPGVRCVCRDNWKGSNRPIVDINVKDYSIVSSYVCSGLVGDTPRKNDSSSSSHCLNPNNEEGGHGVKGWAFDDGNDVWMGRTISEKLRSGYETFKVIEGWSKPNSKLQINRQVIVDRGNRSGYSGIFSVEGKSCINRCFYVELIRGRKQETEVWWTSNSIVVFCGTSGTYGTGSWPDGADINLMPI

SEQ ID NO: 15190 - protein, 469 aa, synthetic construct; identical to SEQ ID NO: 14126
  REGION 1..469: note = neuraminidase__InfluenzaA__ABG67149

SEQ ID NO: 15191 - protein, 469 aa, synthetic construct
  REGION 1..469: note = neuraminidase__InfluenzaA__ABG67160
MNPNQKIITIGSVSLTIATICFLMQIAILVTTVTLHFKQYECNSPPNNQVMLCEPTIIERNITEIVYLTNTTIEKEICPKLAEYRSWSKPQCKITGFAPFSKDNSIRLSAGGDIWVTREPYVSCDPGKCYQFALGQGTTLNNRHSNDTVHDRTPYRTLLMNELGVPFHLGTKQVCIAWSSSSCHDGKAWLHVCVTGHDENATASFIYDGRLVDSIGSWSKNILRTQESECVCVNGTCTVVMTDGSASERADTKILFIEEGKIVHISPLSGSAQHVEECSCYPRYPGVRCVCRDNWKGSNRPIVDINVKDYSIVSSYVCSGLVGDTPRKNDSSSSSYCWNPNNEKGGHGVKGWAFDDGNDVWMGRTISEELRSGYETFKVIGGWSKPNSKLQINRQVIVDRGNRSGYSGIFSVEGKSCINRCFYVELIRGRKQETEVWWTSNSIVVFCGTSGTYGTGSWPDGADINLMPI

SEQ ID NO: 15192 - protein, 469 aa, synthetic construct
  REGION 1..469: note = neuraminidase__InfluenzaA__ABG67171
MNPNQKIITIGSVSLTIATICFLMQIAILVTTVTLHFKQYECNSPPNNQVMLCEPTIIERNITEIVYLTNTTIEKEICPKLAEYRNWSKPQCKITGFAPFSKDNSIRLSAGGDIWVTREPYVSCDPGKCYQFALGQGTTLNNRHSNDTVHDRTPYRTLLMNELGVPFHLGTKQVCIAWSSSSCHDGKAWLHVCVTGHDKNATASFIYDGRLVDSIGSWSKNILRTQESECVCINGTCTVVMTDGSASDRADTKILFIEEGKIVHISPLSGSAQHVEECSCYPRYPGVRCVCRDNWKGSNRPIVDINVKDYSIVSSYVCSGLVGDTPRKNDSSSSSYCWNPNNEKGGHGVKGWAFDDGNDVWMGRTISEESRSGYETFKVIGGWSKPNSKLQINRQVIVDRGNRSGYSGIFSVEGKSCINRCFYVELIRGRKQETEVWWTSNSIVVFCGTSGTYGTGSWPDGADINLMPI

SEQ ID NO: 15193 - protein, 469 aa, synthetic construct; identical to SEQ ID NO: 15113
  REGION 1..469: note = neuraminidase__InfluenzaA__ABG67182

SEQ ID NO: 15194 - protein, 469 aa, synthetic construct
  REGION 1..469: note = neuraminidase__InfluenzaA__ABG67193
MNPNQKIITIGSVSLTIATICFLMQIAILVTTVTLHFKQYECNSPPNNQVMLCEPTTIERNITEIVYLTNTTIEKEICPKLAEYRNWSKPQCKITGFAPFSKDNSIRLSAGGDIWVTREPYVSCDPGKCYQFALGQGTTLNNRHSNDTVHDRTPYRTLLMNELGVPFHLGTKQVCIAWSSSSCHDGKAWLHVCVTGHDENATASFIYDGRLVDSIGSWSKNILRTQESECVCINGTCTVVMTDGSASDRADTKILFIEEGKIVHISPLSGSAQHVEECSCYPRYPGVRCVCRDNWKGSNRPIVDINVKNYSIVSSYVCSGLVGDTPRKNDSSSSSYCWNPNNEKGGHGVKGWAFDDGNDVWMGRTISEESRSGYETFKVIGGWSKPNSKLQINRQVIVDRGNRSGYSGIFSVEGKSCINRCFYVELIRGRKQETEVWWTSNSIVVFCGTSGTYGTGSWPDGADINLMPI

SEQ ID NO: 15195 - protein, 469 aa, synthetic construct; identical to SEQ ID NO: 15113
  REGION 1..469: note = neuraminidase__InfluenzaA__ABG67204

SEQ ID NO: 15196 - protein, 469 aa, synthetic construct
  REGION 1..469: note = neuraminidase__InfluenzaA__ABG67215
MNPNQKIITIGSVSLTIATICFLMQIAILVTTVTLHFKQYECNSPPSNQVMLCEPTIIERNITEIVYLTNTTIEKEICPKLAEYRNWSKPQCKITGFAPFSKDNSIRLSAGGDIWVTREPYVSCGPGKCYQFALGQGTTLNNRHSNDTVHDRTPYRTLLMNELGVPFHLGTKQVCIAWSSSSCHDGKAWLHVCVTGHDENATASFIYDGRLVDSIGSWSKNILRTQESECVCINGTCTVVMTDGSASERADTKILFIEEGKIVHISPLSGSAQHVEECSCYPRYPGVRCVCRDNWKGSNRPIVDINVKDYSIVSSYVCSGLVGDTPRKNDSSSSSYCRNPNNEKGSHGVKGWAFDDGNDVWMGRTISEELRSGYETFKVIGGWSKPNSKLQINRQVIVDRGNRSGYSGIFSVEGKSCINRCFYVELIRGRKQETEVWWTSNSIVVFCGTSGTYGTGSWPDGADINLMPI

SEQ ID NO: 15197 - protein, 469 aa, synthetic construct; identical to SEQ ID NO: 15101
  REGION 1..469: note = neuraminidase__InfluenzaA__ABG67226

SEQ ID NO: 15198 - protein, 469 aa, synthetic construct; identical to SEQ ID NO: 15101
  REGION 1..469: note = neuraminidase__InfluenzaA__ABG67248

SEQ ID NO: 15199 - protein, 470 aa, synthetic construct; identical to SEQ ID NO: 14828
  REGION 1..470: note = neuraminidase__InfluenzaA__ABG67480

SEQ ID NO: 15200 - protein, 470 aa, synthetic construct; identical to SEQ ID NO: 14396
  REGION 1..470: note = neuraminidase__InfluenzaA__ABG67494

SEQ ID NO: 15201 - protein, 469 aa, synthetic construct; identical to SEQ ID NO: 14154
  REGION 1..469: note = neuraminidase__InfluenzaA__ABG67505

SEQ ID NO: 15202 - protein, 469 aa, synthetic construct; identical to SEQ ID NO: 14154
  REGION 1..469: note = neuraminidase__InfluenzaA__ABG67516

SEQ ID NO: 15203 - protein, 469 aa, synthetic construct; identical to SEQ ID NO: 15167
  REGION 1..469: note = neuraminidase__InfluenzaA__ABG67527

SEQ ID NO: 15204 - protein, 469 aa, synthetic construct
  REGION 1..469: note = neuraminidase__InfluenzaA__ABG67538
MNPNQKIITIGSVSLTIATICFLMQIAILVTTVTLHFKQYECNSPPNNQVMLCEPTTIERNTTEIVYLTNTTIEKEICPKLAEYRNWSKPQCNITGFAPFSKDNSIRLSAGGDIWVTREPYVSCDPDKCYQFALGQGTTLNNGHSNDTVHDRTPYRTLLMNELGVPFHLGTRQVCIAWSSSSCHDGKAWLHVCVTGDDENATASFIYNGRLVDSIGSWSKKILRTQESECVCINGTCTVVMTDGSASGKADTKILFIEEGKIVHISTLSGSAQHVEECSCYPRYPGVRCVCRDNWKGSNRPIIDINVKDYSIVSSYVCSGLVGDTPRKNDSFSSSHCLDPNNEEGGHGVKGWAFDDGNDVWMGRTISEKLRSGYETFKVIEGWSKPNSKLQTNRQVIVERGNRSGYSGIFSVEGKSCINRCFYVELIRGRKEETEVWWTSNSIVVFCGTSGTYGTGSWPDGADINLMPI

SEQ ID NO: 15205 - protein, 469 aa, synthetic construct
  REGION 1..469: note = neuraminidase__InfluenzaA__ABG67549
MNPNQKIITIGSVSLTIATICFLMQIAILVTTVTLHFKQHECNSPPNNQVMLCEPTIIERNITEIVYLTNTTIEKEICPKLVEYRNWSKPQCNITGFAPFSKDNSIRLSAGGDIWVTREPYVSCDPDKCYQFALGQGTTLNNGHSNDTVHDRTPYRTLLMNELGVPFHLGTRQVCIAWSSSSCHDGKAWLHVCVTGDDKNATASFIYNGRLVDSIGSWSKKILRTQESECVCINGTCTVVMTDGSASGKADTKILFIEEGKIVHISTLSGSAQHVEECSCYPRYPGVRCVCRDNWKGSNRPIVDINVKDYSIVSSYVCSGLVGDTPRKNDSFSSSHCLDPNNEEGGHGVKGWAFDDGNDVWMGRTISEKLRSGYETFKVIEGWSKPNSKLQINRQVIVERGNRSGYSGIFSVEGKSCINRCFYVELIRGRKEENEVWWTSNSIVVFCGTSGTYGTGSWPDGADINLMPI

SEQ ID NO: 15206 - protein, 469 aa, synthetic construct; identical to SEQ ID NO: 14591
  REGION 1..469: note = neuraminidase__InfluenzaA__ABG67560

SEQ ID NO: 15207 - protein, 469 aa, synthetic construct; identical to SEQ ID NO: 14591
  REGION 1..469: note = neuraminidase__InfluenzaA__ABG67571

SEQ ID NO: 15208 - protein, 469 aa, synthetic construct
  REGION 1..469: note = neuraminidase__InfluenzaA__ABG67582
MNPNQKIITIGSVSLTIATICFLMQIAILVTTVTLHFKQHECNSPPNNQVMLCEPTIIERNITEIVYLTNTTIEKEICPKLVEYRNWSKPQCNITGFAPFSKDNSIRLSAGGDIWVTREPYVSCDPDKCYQFALGQGTTLNNGHSNDTVHDRTPYRTLLMNELGVPFHLGTRQVCIAWSSSSCHDGKAWLHVCVTGDDKNATASFIYNGRLVDSIGSWSKKILRTQESECVCINGTCTVVMTDGSASGKADTKILFIEEGKIVHISTLSGSAKHVEECSCYPRYPGVRCVCRDNWKGSNRPIVDINVKDYSIVSSYVCSGLVGDTPRKNDSFSSSHCLDPNNEEGGHGVKGWAFDDGNDVWMGRTISEKLRSGYETFKVIEGWSKPNSKLQINRQVIVERGNRSGYSGIFSVEGKSCINRCFYVELIRGRKEETEVWWTSNSIVVFCGTSGTYGTGSWPDGADINLMPI

SEQ ID NO: 15209 - protein, 469 aa, synthetic construct; identical to SEQ ID NO: 15175
  REGION 1..469: note = neuraminidase__InfluenzaA__ABG67593

SEQ ID NO: 15210 - protein, 469 aa, synthetic construct; identical to SEQ ID NO: 14591
  REGION 1..469: note = neuraminidase__InfluenzaA__ABG67604

SEQ ID NO: 15211 - protein, 469 aa, synthetic construct; identical to SEQ ID NO: 14591
  REGION 1..469: note = neuraminidase__InfluenzaA__ABG67615

SEQ ID NO: 15212 - protein, 469 aa, synthetic construct; identical to SEQ ID NO: 14591
  REGION 1..469: note = neuraminidase__InfluenzaA__ABG67626

SEQ ID NO: 15213 - protein, 469 aa, synthetic construct; identical to SEQ ID NO: 14591
  REGION 1..469: note = neuraminidase__InfluenzaA__ABG67637

SEQ ID NO: 15214 - protein, 469 aa, synthetic construct; identical to SEQ ID NO: 14591
  REGION 1..469: note = neuraminidase__InfluenzaA__ABG67648

SEQ ID NO: 15215 - protein, 469 aa, synthetic construct
  REGION 1..469: note = neuraminidase__InfluenzaA__ABG67659
MNPNQKIITIGSVSLTIATICFLMQIAILVTTVTLHFKQHECNSPPNNQVMLCEPTIIERNITEIVYLTNTTIEKEICPKLVEYRNWSKPQCNITGFAPFSRDNSIRLSAGGDIWVTREPYVSCDPDKCYQFALGQGTTLNNGHSNDTVHDRTPYRTLLMNELGVPFHLGTRQVCIAWSSSSCHDGKAWLHVCVTGDDKNATASFIYNGRLVDSIGSWSKKILRTQESECVCINGTCTVVMTDGSASGKADTKILFIEEGKIVHISTLSGSAQHVEECSCYPRYPGVRCVCRDNWKGSNRPIVDINVKDYSIVSSYVCSGLVGDTPRKNDSFSSSHCLDPNNEEGGHGVKGWAFDDGNDVWMGRTISEKLRSGYETFKVIEGWSKPNSKLQINRQVIVERGNRSGYSGIFSVEGKSCINRCFYVELIRGRKEETEVWWTSNSIVVFCGTSGTYGTGSWPDGADINLMPI

SEQ ID NO: 15216 - protein, 469 aa, synthetic construct
  REGION 1..469: note = neuraminidase__InfluenzaA__ABG67670
MNPNQKIITIGSVSLTIATICFLMQIAILITTVTLHFKQYECNSPPNNQVMLCEPTIIERNITEIVYLTNTTIEKEICPKLAEYRNWSKPQCKITGFAPFSKDNSIRLSAGGDIWVTREPYVSCDPGKCYQFALGQGTTLNNRHSNDTVHDRTPYRTLLMNELGVPFHLGTKQVCIAWSSSSCHDGKAWLHVCVTGHDENATASFIYDGRLVDSIGSWSKNILRTQESECVCINGTCTVVMTDGSASGRADTKILFIEEGKIVHISPLSGSAQHVEECSCYPRYPGVRCVCRDNWKGSNRPIVDINVKDYSIVSSYVCSGLVGDTPRKNDSSSSSHCLNPNNEEGGHGVKGWAFDDGNDVWMGRTISEKLRSGYETFKVIGGWSKPNSKLQINRQVIVDRGNRSGYSGIFSVEGKSCINRCFYVELIRGRKQETEVWWTSNSIVVFCGTSGTYGTGSWPDGADINLMPI

SEQ ID NO: 15217 - protein, 469 aa, synthetic construct; identical to SEQ ID NO: 14730
  REGION 1..469: note = neuraminidase__InfluenzaA__ABG79944

SEQ ID NO: 15218 - protein, 470 aa, synthetic construct; identical to SEQ ID NO: 15059
  REGION 1..470: note = neuraminidase__InfluenzaA__ABG79955

SEQ ID NO: 15219 - protein, 469 aa, synthetic construct
  REGION 1..469: note = neuraminidase__InfluenzaA__ABG79966
MNPNQKIITIGSVSLTIATICFLMQIAILVTTVTLHFKQYECNSPPSNQVMLCEPTIIERNITEIVYLTNTTIEKEICPKLAEYRNWSKPQCKITGFAPFSKDNSIRLSAGGDIWVTREPYVSCDPGKCYQFALGQGTTLNNRHSNDTVHDRTPYRTLLMNELGVPFHLGTKQVCIAWSSSSCHDGKAWLHVCVTGHDENATASFIYDGRLVDSIGSWSKNILRTQESECVCINGTCTVVMTDGSASERADTKILFIEEGKIVHISPLSGSAQHVEECSCYPRYPGVRCVCRDNWKGSNRPIVDINVKDYSIVSSYVCSGLVGDTPRKNDSSSSSYCQNPNNEKGSHGVKGWAFDDGNDVWMGRTISEELRSGYETFKVIGGWSKPNSKLQINRQVIVDRGNRSGYSGIFSVEGKSCINRCFYVELIRGRKQETEVWWTSNSIVVFCGTSGTYGTGSWPDGADINLMPI

SEQ ID NO: 15220 - protein, 469 aa, synthetic construct
  REGION 1..469: note = neuraminidase__InfluenzaA__ABG79977
MNPNQKIITIGSVSLTIATICFLMQIAILVTTVTLHFKQYECNSPPNNQAMLCEPTIIERNITEIVYLTNTTIEKEICPKLAEYRNWSKPQCKITGFAPFSKDNSIRLSAGGDIWVTREPYVSCDPGKCYQFALGQGTTLNNRHSNDTVHDRTPYRTLLMNELGVPFHLGTKQVCIAWSSSSCHDGKAWLHVCVTGHDENATASFIYDGRLVDSIGSWSKNILRTQESECVCINGTCTVVMTDGSASDRADTKILFIEEGKIVHISPLSGSAQHVEECSCYPRYPGVRCVCRDNWKGSNRPIVDINVKDYSIVSSYVCSGLVGDTPRKNDSSSSSYCWNPNNEKGGHGVKGWAFDDGNDVWMGRTISEESRSGYETFKVIGGWSKPNSKLQINRQVIVDRGNRSGYSGIFSVEGKSCINRCFYVELIRGRKQETEVWWTSNSIVVFCGTSGTYGTGSWPDGADINLMPI

SEQ ID NO: 15221 - protein, 469 aa, synthetic construct; identical to SEQ ID NO: 15113
  REGION 1..469: note = neuraminidase__InfluenzaA__ABG79988

SEQ ID NO: 15222 - protein, 469 aa, synthetic construct; identical to SEQ ID NO: 15113
  REGION 1..469: note = neuraminidase__InfluenzaA__ABG79999

SEQ ID NO: 15223 - protein, 469 aa, synthetic construct
  REGION 1..469: note = neuraminidase__InfluenzaA__ABG80010
MNPNQKIITIGSVSLTIATICFLMQIAILVTTVTLHFKQYECNSPPNNQVMLCEPTIIERNITEIVYLTNTTIEKEICPKLAEYRNWSKPQCKITGFAPFSKDNSIRLSAGGDIWVTREPYVSCDPGKCYQFALGKGTTLNNRHSNDTVHDRTPYRTLLMNELGVPFHLGTKQVCIAWSSSSCHDGKAWLHVCVTGHDENATASFIYDGRLVDSIGSWSKNILRTQESECVCINGTCTVVMTDGSASDRADTKILFIEEGKIVHISPLSGSAQHVEECSCYPRYPGVRCVCRDNWKGSNRPIVDINVKDYSIVSSYVCSGLVGDTPRKNDSSSSSYCWNPNNEKGGHGVKGWAFDDGNDVWMGRTISEESRSGYETFKVIGGWSKPNSKLQINRQVIVDRGNRSGYSGIFSVEGKSCINRCFYVELIRGRKQETEVWWTSNSIVVFCGTSGTYGTGSWPDGADINLMPI

SEQ ID NO: 15224 - protein, 469 aa, synthetic construct; identical to SEQ ID NO: 15113
  REGION 1..469: note = neuraminidase__InfluenzaA__ABG80021

SEQ ID NO: 15225 - protein, 469 aa, synthetic construct
  REGION 1..469: note = neuraminidase__InfluenzaA__ABG80032
MNPNQKIITIGSVSLTIATICFLMQIAILVTTVTLHFKQYECNSPPNNQVMLCEPTIIERNITEIVYLTNTTIEKEICPKLAEYRNWSKPQCKITGFAPFSKDNSIRLSAGGDIWVTREPYVSCDPGKCYQFALGQGTTLNNRHSNDTVHDRTPYRTLLMNELGVPFHLGTKQVCIAWSSSSCHDGKAWLHVCVTGHDENATASIIYDGRLVDSISSWSKNILRTQESECVCINGTCTVVMTDGSASERADTKILFIEEGKIVHISPLSGSAQHVEECSCYPRYPGVRCVCRDNWKGSNRPIVDINVKDYSIVSSYVCSGLVGDTPRKNDSSSSSYCLNPNNEEGGHGVKGWAFDDGNDVWMGRTISEKLRSGYETFKVIGGWSKPNSKLQINRQVIVDRGNRSGYSGIFSVEGKSCVNRCFYVELIRGRKQETEVWWTSNSIVVFCGTSGTYGTGSWPDGADINLMPI

SEQ ID NO: 15226 - protein, 469 aa, synthetic construct; identical to SEQ ID NO: 15100
  REGION 1..469: note = neuraminidase__InfluenzaA__ABG80043

SEQ ID NO: 15227 - protein, 469 aa, synthetic construct; identical to SEQ ID NO: 15113
  REGION 1..469: note = neuraminidase__InfluenzaA__ABG80054

SEQ ID NO: 15228 - protein, 469 aa, synthetic construct; identical to SEQ ID NO: 15100
  REGION 1..469: note = neuraminidase__InfluenzaA__ABG80065

SEQ ID NO: 15229 - protein, 469 aa, synthetic construct
  REGION 1..469: note = neuraminidase__InfluenzaA__ABG80076
MNPNQKIITIGSVSLTIATICFLMQIAILVTTVTLHFKQYECNSPPNNQVMLCEPTIIERNITEIVYLTNTTIEKEICPKLAEYRNWSKPQCKITGFAPFSKDNSIRLSAGGDIWVTREPYVSCDPGKCYQFALGQGTTLNNRHSNDTVHDRTPYRTLLMNELGVPFHLGTKQVCIAWSSSSCHDGKAWLHVCVTGHDENATASFIYDGRLVDSIGSWSKNILRTQESECVCINGTCTVVMTDGSASERADTKILFIEEGKIVHISPLSGSAQHVEECSCYPRYPGVRCVCRDNWKGSNRPIVDINVKDYSIVSSYVCSGLVGDTPRKNDSSSSSYCRNPNNEKGSHGVKGWAFDDGNDVWMGRTISEELRSGYETFKVIGGWSKPNSKLQINRQVIVDRGNRSGYSGIFSVEGKNCINRCFYVELIRGRKQETEVWWTSNSIVVFCGTSGTYGTGSWPDGADINLMPI

SEQ ID NO: 15230 - protein, 469 aa, synthetic construct
  REGION 1..469: note = neuraminidase__InfluenzaA__ABG80087
MNPNQKIITIGSVSLTIATICFLMQIAVLVTTVTLHFKQYECNSPPSNQVMLCEPTIIERNITEIVYLTNTTIEKEICPKLAEYRNWSKPQCKITGFAPFSKDNSIRLSAGGDIWVTREPYVSCDPGKCYQFALGQGTTLNNRHSNDTVHDRTPYRTLLMNELGVPFHLGTKQVCMAWSSSSCHDGKAWLHVCVTGHDENATASFIYDGRLVDSIGSWSKNILRTQESECVCINGTCTVVMTDGSASERADTKILFIEEGKIVHISPLSGSAQHVEECSCYPRYPGVRCVCRDNWKGSNRPIVDINVKDYSIVSSYVCSGLVGDTPRKNDSSSSSYCRNPNNEKGSHGVKGWAFDDGNDVWMGRTISEELRSGYETFKVIGGWSKPNSKLQINRQVIVDRGNRSGYSGIFSVEGKSCINRCFYVELIRGRKQETEVWWTSNSIVVFCGTSGTYGTGSWPDGADINLMPI

SEQ ID NO: 15231 - protein, 469 aa, synthetic construct; identical to SEQ ID NO: 15157
  REGION 1..469: note = neuraminidase__InfluenzaA__ABG80098

SEQ ID NO: 15232 - protein, 469 aa, synthetic construct; identical to SEQ ID NO: 15101
  REGION 1..469: note = neuraminidase__InfluenzaA__ABG80109

SEQ ID NO: 15233 - protein, 469 aa, synthetic construct
  REGION 1..469: note = neuraminidase__InfluenzaA__ABG80120
MNPNQKIITIGSVSLTIATICFLMQIAILVTTVTLHFKQYECNSPPSNQVMLCEPTIIERNITEIVYLTNTTIEKEICPKLAEYRNWSKPQCKITGFAPFSKDNSIRLSAGGDIWVTREPYVSCDPGKCYQFALGQGTTLNNRHSNDTVHDRTPYRTLLMNELGVPFHLGTKQVCIAWSSSSCHDGKAWLHVCVTGHDENATASFIYDGRLVDSIGSWSKNILRTQESECICINGTCTVVMTDGSASERADTKILFIEEGKIVHISPLSGSAQHVEECSCYPRYPGVRCVCRDNWKGSNRPIVDINVKDYSIVSSYVCSGLVGDTPRKNDSSSSSYCRNPNNEKGSHGVKGWAFDDGNDVWMGRTISEELRSGYETFKVIGGWSKPNSKLQINRQVIVDRGNRSGYSGIFSVEGKSCINRCFYVELIRGRKQETEVWWTSNSIVVFCGTSGTYGTGSWPDGADINLMPI

SEQ ID NO: 15234 - protein, 469 aa, synthetic construct
  REGION 1..469: note = neuraminidase__InfluenzaA__ABG80131
MNPNQKIITIGSVSLTIATICFLMQIAIMVTTVTLHFKQYECNSPPSNQVMLCEPTIIERNITEIVYLTNTTIEKEICPKLAEYRNWSKPQCKITGFAPFSKDNSIRLSAGGDIWVTREPYVSCDPGKCYQFALGQGTTLNNRHSNDTVHDRTPYRTLLMNELGVPFHLGTKQVCIAWSSSSCHDGKAWLHVCVTGHDENATASFIYDGRLVDSIGSWSKNILRTQESECVCINGTCTVVMTDGSASERADTKILFIEEGKIVHISPLSGSAQHVEECSCYPRYPGVRCVCRDNWKGSNRPIVDINVKDYSIVSSYVCSGLVGDTPRKNDSSSSSYCRNPNNEKGSHGVKGWAFDDGNDVWMGRTISEELRSGYETFKVIGGWSKPNSKLQINRQVIVDRGNRSGYSGIFSVEGKSCINRCFYVELIRGRKQETEVWWTSNSIVVFCGTSGTYGTGSWPDGADINLMPI

SEQ ID NO: 15235 - protein, 469 aa, synthetic construct; identical to SEQ ID NO: 15101
  REGION 1..469: note = neuraminidase__InfluenzaA__ABG80142

SEQ ID NO: 15236 - protein, 469 aa, synthetic construct; identical to SEQ ID NO: 15157
  REGION 1..469: note = neuraminidase__InfluenzaA__ABG80153

SEQ ID NO: 15237 - protein, 469 aa, synthetic construct; identical to SEQ ID NO: 15101
  REGION 1..469: note = neuraminidase__InfluenzaA__ABG80164

SEQ ID NO: 15238 - protein, 470 aa, synthetic construct; identical to SEQ ID NO: 14828
  REGION 1..470: note = neuraminidase__InfluenzaA__ABG80186

SEQ ID NO: 15239 - protein, 469 aa, synthetic construct; identical to SEQ ID NO: 14061
  REGION 1..469: note = neuraminidase__InfluenzaA__ABG80197

SEQ ID NO: 15240 - protein, 469 aa, synthetic construct; identical to SEQ ID NO: 14253
  REGION 1..469: note = neuraminidase__InfluenzaA__ABG80219

SEQ ID NO: 15241 - protein, 469 aa, synthetic construct
  REGION 1..469: note = neuraminidase__InfluenzaA__ABG80230
MNPNQKIITIGSVSLTIATICFLMQIAILVTTVTLHFKQYECNSPPNNQVMLCEPTIIERNITEIVYLTNTTIEKEICPKLAEYRNWSKPQCNITGFAPFSKDNSIRLSAGGDIWVTREPYVSCDPDKCYQFALGQGTTLNNGHSNDTVHDRTPYRTLLMNELGVPFHLGTRQVCIAWSSSSCHDGKAWLHVCVTGDDENATASFIYNGRLVDSIGSWSKNILRTQESECVCINGTCTVVMTDGSASGKADTKILFIEEGKIVHISTLSESAQHVEECSCYPRYPGVRCVCRDNWKGSNRPIVDINVKDYSIVSSYVCSGLVGDTPRKNDSFSSSHCLDPNNEEGGHGVKGWAFDDGNDVWMGRTISEKLRSGYETFKVIEGWSKPNSKLQTNRQVIVERGNRSGYSGIFSVEGKSCINRCFYVELIRGRKEETEVWWTSNSIVVFCGTSGTYGTGSWPDGADINLMPI

SEQ ID NO: 15242 - protein, 469 aa, synthetic construct; identical to SEQ ID NO: 14591
  REGION 1..469: note = neuraminidase__InfluenzaA__ABG80241

SEQ ID NO: 15243 - protein, 469 aa, synthetic construct; identical to SEQ ID NO: 14591
  REGION 1..469: note = neuraminidase__InfluenzaA__ABG80252

SEQ ID NO: 15244 - protein, 469 aa, synthetic construct; identical to SEQ ID NO: 15175
  REGION 1..469: note = neuraminidase__InfluenzaA__ABG80263

SEQ ID NO: 15245 - protein, 469 aa, synthetic construct; identical to SEQ ID NO: 14736
  REGION 1..469: note = neuraminidase__InfluenzaA__ABG80274

SEQ ID NO: 15246 - protein, 469 aa, synthetic construct; identical to SEQ ID NO: 14327
  REGION 1..469: note = neuraminidase__InfluenzaA__ABG80285

SEQ ID NO: 15247 - protein, 469 aa, synthetic construct; identical to SEQ ID NO: 14327
  REGION 1..469: note = neuraminidase__InfluenzaA__ABG80296

SEQ ID NO: 15248 - protein, 469 aa, synthetic construct; identical to SEQ ID NO: 14327
  REGION 1..469: note = neuraminidase__InfluenzaA__ABG80307

SEQ ID NO: 15249 - protein, 469 aa, synthetic construct; identical to SEQ ID NO: 14714
  REGION 1..469: note = neuraminidase__InfluenzaA__ABG80318

SEQ ID NO: 15250 - protein, 469 aa, synthetic construct; identical to SEQ ID NO: 14327
  REGION 1..469: note = neuraminidase__InfluenzaA__ABG80329

SEQ ID NO: 15251 - protein, 469 aa, synthetic construct; identical to SEQ ID NO: 14327
  REGION 1..469: note = neuraminidase__InfluenzaA__ABG80340

SEQ ID NO: 15252 - protein, 469 aa, synthetic construct; identical to SEQ ID NO: 15185
  REGION 1..469: note = neuraminidase__InfluenzaA__ABG80351

SEQ ID NO: 15253 - protein, 469 aa, synthetic construct
  REGION 1..469: note = neuraminidase__InfluenzaA__ABG80373
MNPNQKIITIGSVSLTIATICFLMQIAILVTTVTLHFKQYECNSPPNNQVMLCEPTIIERNITEIVYLTNTTIEKEICPKLAEYRNWSKPQCKITGFAPFSKDNSIRLSAGGDIWVTREPYVSCDPGKCYQFALGQGTTLNNRHSNDTVHDRTPYRTLLMNELGVPFHLGTKQVCIAWSSSSCHDGKAWLHVCVTGHDENATASFIYDGRLVDSIGSWSKNILRTQESECVCINGTCTVVMTDGSASERADTKILFIEEGKIVHISPLSGSAQHVEECSCYPRYPGVRCVCRDNWKGSNRPIVDINVKDHSIVSSYVCSGLVGDTPRKNDSSSSSYCRNPNNEKGSHGVKGWAFDDGNDVWMGRTISEELRSGYETFKVIGGWSKPNSKLQINRQVIVDRGNRSGYSGIFSVEGKSCINRCFYVELIRGRKQETEVWWTSNSIVVFCGTSGTYGTGSWPDGADINLMPI

SEQ ID NO: 15254 - protein, 469 aa, synthetic construct; identical to SEQ ID NO: 15253
  REGION 1..469: note = neuraminidase__InfluenzaA__ABG80384

SEQ ID NO: 15255 - protein, 469 aa, synthetic construct
  REGION 1..469: note = neuraminidase__InfluenzaA__ABG80395
MNPNQKIITIGSVSLTIATICFLMQIAILVTTVTLHFKQYECNSPPNNQVMLCEPTIIERNITEIVYLTNTTIEKEICPKLAEYRNWSKPQCKITGFAPFSKDNSIRLSAGGDIWVTREPYVSCDPGKCYQFALGQGTTLNNRHSNDTVHDRTPYRTLLMNELGVPFHLGTKQVCIAWSSSSCHDGKAWLHVCVTGHDENATASFIYDGRLVDSIGSWSKNILRTQESECVCINGTCTVVMTDGSASKRADTKILFIEEGKIVHISPLSGSAQHVEECSCYPRYPGVRCVCRDNWKGSNRPIVDINVKDYSIVSSYVCSGLVGDTPRKNDSSSSSYCRNPNNEKGSHGVKGWAFDDGNDVWMGRTISEELRSGYETFKVIGGWSKPNSKLQINRQVIVDRGNMSGYSGIFSVEGKSCINRCFYVELIRGRKQETEVWWTSNSIVVFCGTSGTYGTGSWPDGADINLMPI

SEQ ID NO: 15256 - protein, 469 aa, synthetic construct; identical to SEQ ID NO: 15185
  REGION 1..469: note = neuraminidase__InfluenzaA__ABG80406

SEQ ID NO: 15257 - protein, 469 aa, synthetic construct; identical to SEQ ID NO: 15185
  REGION 1..469: note = neuraminidase__InfluenzaA__ABG80417

SEQ ID NO: 15258 - protein, 469 aa, synthetic construct; identical to SEQ ID NO: 15185
  REGION 1..469: note = neuraminidase__InfluenzaA__ABG80428

SEQ ID NO: 15259 - protein, 469 aa, synthetic construct; identical to SEQ ID NO: 14126
  REGION 1..469: note = neuraminidase__InfluenzaA__ABG88292

SEQ ID NO: 15260 - protein, 470 aa, synthetic construct; identical to SEQ ID NO: 15050
  REGION 1..470: note = neuraminidase__InfluenzaA__ABG88314

SEQ ID NO: 15261 - protein, 470 aa, synthetic construct
  REGION 1..470: note = neuraminidase__InfluenzaA__ABG88325
MNPNQKIITIGSTSIAIGIISLILQIGNIISIWASHSIQTGSQNHTGICNQRIITYENSTWVNQTYVNINNTSVVAGKDKTSMTLAGNSSLCPIRGWAIYTKDNSIRIGSKGDVFVIREPFISCSHLECRTFFLTQGALLNDKHSNGTVKDRSPYRALMSCPLGEAPSPYNSRFESVAWSASACHDGLGWLTIGISGPDNGAVAVLKYNGIITETIKSWKKRILRTQESECVCMNGSCFTIMTDGPSNGAASYRIFKIEKGRVTKSIELDAPNYHYEECSCYPDTGTVMCVCRDNWHGSNRPWVSFNQNLDYQTGYICSGVFGDNPRPKDGEGSCNPVTADGADGVKGFSYRYGNGVWIGRTKSNRLRKGFEMIWDPNGWTDTDSDFSMKQDIVAMTDWSGYSGSFVQHPELTGLDCMRPCFWVELVRGLPRENTTIWTSGSSISFCGVNSDTANWSWPDGAELPFTIDK

SEQ ID NO: 15262 - protein, 470 aa, synthetic construct
  REGION 1..470: note = neuraminidase__InfluenzaA__ABG88336
MNPNQKIITIGSICMAIGIISLILQIGNIISIWVSHSIQTGNQNHTGICNQRIITYENSTWVNQTYVNINNTNVVAGKDTTSVTLAGNSSLCPVRGWAIYSKDNSIRIGSKGDVFVIREPFISCSHLECRTFFLTQGALLNDKHSNGTVKDRSPYRALMSCPIGEAPSPYNSRFESVAWSASACHDGMGWLTIGISGPDDGAVAVLKYNGIITETIKSWRKRILRTQESECVCVNGSCFTIMTDGPSNGPASYKIFKIEKGKITKSIELDAPNSHYEECSCYPDTGTVMCVCRDNWHGSNRPWVSFNQNLDYQLGYICSGIFGDNPRPKDGKGSCGPVTVDGADGVKGFSYRYGNGVWIGRTKSNSSRKGFEMIWDPNGWTDTDSNFLVKQDVVAMTDWSGYSGSFVQHPELTGLDCMRPCFWVELIRGRPRETTTIWTSGSSISFCGVNSDTVNWSWPDGAELPFTIDK

SEQ ID NO: 15263 - protein, 470 aa, synthetic construct
  REGION 1..470: note = neuraminidase__InfluenzaA__ABG88347
MNPNQKIITIGSICMAIGIIGLILQIGNIISIWVSHSIQTGSQNHTGICNQRIITYENSTWVNQTYVNINNTNVVAGKDTTSVTLAGNSSLCPVRGWAIYSKDNSIRIGSKGDVFVIREPFISCSHLECRTFFLTQGALLNDKHSNGTVKDRSPYRALMSCPIGEAPSPYNSRFESVAWSASACHDGMGWLTIGISGPDDGAVAVLKYNGIITETIKSWRKRILRTQESECVCVNGSCFTIMTDGPSNGPASYKIFKIEKGKITKSIELDAPNSHYEECSCYPDTGTVMCVCRDNWHGSNRPWVSFNQNLDYQLGYICSGIFGDNPRPKDGKGSCGPVTVDGADGVKGFSYRYGNGVWIGRTKSNSSRKGFEMIWDPNGWTDTDSNFLVKQDVVAMTDWSGYSGSFVQHPELTGLDCMRPCFWVELIRGRPRETTTIWTSGSSISFCGVNSDTVNWSWPDGAELPFTIDK

SEQ ID NO: 15264 - protein, 469 aa, synthetic construct
  REGION 1..469: note = neuraminidase__InfluenzaA__ABG88358
MNPNQKIITIGSVSLTIATICFLMQIAILVTTVTLHFKQYECNSPPNNQVMLCEPTIIERNITEIVYLTNTTIEKEICPKLAEYRNWSKPQCKITGFAPFSKDNSIRLSAGGDIWVTREPYVSCDPGKCYQFALGQGTTLNNRHSNDTVHDRTPYRTLLMNELGVPFHLGTKQVCIAWSSSSCHDGKAWLHVCVTGHDKNATASFIYDGRLVDSIGSWSKNILRTQESECVCINGTCTVVMTDGSASDRADTKILFIEEGKIVHIRPLSGSAQHVEECSCYPRYPGVRCVCRDNWKGSNRPIVDINVKDYSIVSSYVCSGLVGDTPRKNDSSSSSYCWNPNNEKGGHGVKGWAFDDGNDVWMGRTISEESRSGYETFKVIGGWSKPNSKLQINRQVIVDRGNRSGYSGIFSVEGKSCINRCFYVELIRGRKQETEVWWTSNSIVVFCGTSGTYGTGSWPDGADINLMPI

SEQ ID NO: 15265 - protein, 469 aa, synthetic construct; identical to SEQ ID NO: 15113
  REGION 1..469: note = neuraminidase__InfluenzaA__ABG88369

SEQ ID NO: 15266 - protein, 469 aa, synthetic construct; identical to SEQ ID NO: 15113
  REGION 1..469: note = neuraminidase__InfluenzaA__ABG88380

SEQ ID NO: 15267 - protein, 469 aa, synthetic construct; identical to SEQ ID NO: 15113
  REGION 1..469: note = neuraminidase__InfluenzaA__ABG88391

SEQ ID NO: 15268 - protein, 469 aa, synthetic construct; identical to SEQ ID NO: 15100
  REGION 1..469: note = neuraminidase__InfluenzaA__ABG88402

SEQ ID NO: 15269 - protein, 469 aa, synthetic construct; identical to SEQ ID NO: 15157
  REGION 1..469: note = neuraminidase__InfluenzaA__ABG88413

SEQ ID NO: 15270 - protein, 469 aa, synthetic construct; identical to SEQ ID NO: 15101
  REGION 1..469: note = neuraminidase__InfluenzaA__ABG88424

SEQ ID NO: 15271 - protein, 469 aa, synthetic construct; identical to SEQ ID NO: 15101
  REGION 1..469: note = neuraminidase__InfluenzaA__ABG88435

SEQ ID NO: 15272 - protein, 469 aa, synthetic construct; identical to SEQ ID NO: 15101
  REGION 1..469: note = neuraminidase__InfluenzaA__ABG88446

SEQ ID NO: 15273 - protein, 469 aa, synthetic construct
  REGION 1..469: note = neuraminidase__InfluenzaA__ABG88457
MNPNQKIITIGSVSLTTATICFLMQIAILVTTVTLHFKQYECNSPPNNQVMLCEPTIIERNITEIVYLTNTTIEKEICPKLAEYRNWSKPQCKITGFAPFSKDNSIRLSAGGDIWVTREPYVSCDPGKCYQFALGQGTTLNNRHSNDTVHDRTPYRTLLMNELGVPFHLGTKQVCIAWSSSSCHDGKAWLHVCVTGHDENATASFIYDGRLVDSIGSWSKNILRTQESECVCINGTCTVVMTDGSASERADTKILFIKEGKIVHISPLSGSAQHVEECSCYPRYPGVRCVCRDNWKGSNRPIVDINVKDYSIVSSYVCSGLVGDTPRKNDSSSSSYCQNPNNEKGSHGVKGWAFDDGNDVWMGRTISEELRSGYETFKVIGGWSKPNSKLQINRQVIVDRGNRSGYSGIFSVEGKSCINRCFYVELIRGRKQETEVWWTSNSIVVFCGTSGTYGTGSWPDGADINLMPI

SEQ ID NO: 15274 - protein, 469 aa, synthetic construct; identical to SEQ ID NO: 15101
  REGION 1..469: note = neuraminidase__InfluenzaA__ABG88468

SEQ ID NO: 15275 - protein, 469 aa, synthetic construct; identical to SEQ ID NO: 15101
  REGION 1..469: note = neuraminidase__InfluenzaA__ABG88479

SEQ ID NO: 15276 - protein, 469 aa, synthetic construct; identical to SEQ ID NO: 15101
  REGION 1..469: note = neuraminidase__InfluenzaA__ABG88490

SEQ ID NO: 15277 - protein, 469 aa, synthetic construct; identical to SEQ ID NO: 15101
  REGION 1..469: note = neuraminidase__InfluenzaA__ABG88501

SEQ ID NO: 15278 - protein, 469 aa, synthetic construct; identical to SEQ ID NO: 15101
  REGION 1..469: note = neuraminidase__InfluenzaA__ABG88512

SEQ ID NO: 15279 - protein, 469 aa, synthetic construct; identical to SEQ ID NO: 15101
  REGION 1..469: note = neuraminidase__InfluenzaA__ABG88523

SEQ ID NO: 15280 - protein, 469 aa, synthetic construct
  REGION 1..469: note = neuraminidase__InfluenzaA__ABG88534
MNPNQKIITIGSVSLTIATICFLMQIAILVTTVTLHFKQYECNSPPSNQVMLCEPTIIERNITEIVYLTNTTIEKEICPKLAEYRNWSKPQCKITGFAPFSKDNSIRLSAGGDIWVTREPYVSCDPGKCYQFALGQGTTLNNRHSNDTVHDRTPYRTLLMNELGVPFHLGTKQVCIAWSSSSCHDGKAWLHVCVTGHDENATASFIYDGRLVDSIGSWSKNILRTQESECVCINGTCTVVMTDGSASERADTKILFIEEGKIVHISPLSGSAQHVEECSCYPRYPGVRCVCRDNWKGSNRPIVDINVKDYSIVSSYVCSGLVGDTPRKNDSSSSSYCRNPNNEKGSHGVKGWAFDDGNDVWMGRTISEELRSGYETFKVIGGWSKPNSKLQINRQVIVDRGNRSGYSGIFSVENKSCINRCFYVELIRGRKQETEVWWTSNSIVVFCGTSGTYGTGSWPDGADINLMPI

SEQ ID NO: 15281 - protein, 469 aa, synthetic construct; identical to SEQ ID NO: 14793
  REGION 1..469: note = neuraminidase__InfluenzaA__ABG88567

SEQ ID NO: 15282 - protein, 469 aa, synthetic construct
  REGION 1..469: note = neuraminidase__InfluenzaA__ABG88600
MNPNQKIITIGSVSLTIATICFLMQIAILVTTVTLHFKQYECNSPPNNQVMLCEPTIIERNITEIVYLTNTTIEKEICPKPAEYRNWSKPQCNITGFAPFSKDNSIRLSAGGDIWVTREPYVSCDPDKCYQFALGQGTTLNNGHSNDTVHDRTPYRTLLMNELGVPFHLGTKQVCIAWSSSSCHDGKAWLHVCVTGDDENATASFIYNGRLVDSIGSWSKKILRTQESECVCINGTCTVVMTDGSASGKADTKILFIEEGKIVHTSLLSGSAQHVEECSCYPRYPGVRCVCRDNWKGSNRPIVDINVKDYSIVSSYVCSGLVGDTPRKNDSSSSSHCLDPNNEEGGHGVKGWAFDDGNDVWMGRTISEKLRSGYETFKVIEGWSKPNSKLQINRQVIVDRGNRSGYSGIFSVEGKSCINRCFYVELIRGRKQETEVLWTSNSIVVFCGTSGTYGTGSWPDGADINLMPI

SEQ ID NO: 15283 - protein, 469 aa, synthetic construct; identical to SEQ ID NO: 14154
  REGION 1..469: note = neuraminidase__InfluenzaA__ABG88611

SEQ ID NO: 15284 - protein, 469 aa, synthetic construct; identical to SEQ ID NO: 14166
  REGION 1..469: note = neuraminidase__InfluenzaA__ABG88622

SEQ ID NO: 15285 - protein, 469 aa, synthetic construct; identical to SEQ ID NO: 14154
  REGION 1..469: note = neuraminidase__InfluenzaA__ABG88633

SEQ ID NO: 15286 - protein, 469 aa, synthetic construct; identical to SEQ ID NO: 15205
  REGION 1..469: note = neuraminidase__InfluenzaA__ABG88655

SEQ ID NO: 15287 - protein, 469 aa, synthetic construct; identical to SEQ ID NO: 15205
  REGION 1..469: note = neuraminidase__InfluenzaA__ABG88666

SEQ ID NO: 15288 - protein, 469 aa, synthetic construct; identical to SEQ ID NO: 14591
  REGION 1..469: note = neuraminidase__InfluenzaA__ABG88677

SEQ ID NO: 15289 - protein, 469 aa, synthetic construct; identical to SEQ ID NO: 15205
  REGION 1..469: note = neuraminidase__InfluenzaA__ABG88688

SEQ ID NO: 15290 - protein, 469 aa, synthetic construct; identical to SEQ ID NO: 14591
  REGION 1..469: note = neuraminidase__InfluenzaA__ABG88699

SEQ ID NO: 15291 - protein, 469 aa, synthetic construct; identical to SEQ ID NO: 14327
  REGION 1..469: note = neuraminidase__InfluenzaA__ABG88710

SEQ ID NO: 15292 - protein, 469 aa, synthetic construct; identical to SEQ ID NO: 14327
  REGION 1..469: note = neuraminidase__InfluenzaA__ABG88721

SEQ ID NO: 15293 - protein, 469 aa, synthetic construct
  REGION 1..469: note = neuraminidase__InfluenzaA__ABG88732
MNPNQKIITIGSVSLTIATICFLMQIAILVTTVTLHFKQYECNSPPNNQVMLCEPTIIERNITEIVYLTNTTIEKEICPKLAEYRNWSKPQCKITGFAPFSKDNSIRLSAGGDIWVTREPYVSCDPGKCYQFALGQGTTLNNRHSNDTVHDRTPYRTLLMNELGVPFHLGTKQVCIAWSSSSCHDGKAWLHVCVTGHDENATASFIYDGRLVDSIGSWSKNILRTQESECVCINGTCTVVMTDGSASERADTKILFIEEGKIVHISPLSGSAQHVEECSCYPRYPGVRCVCRDNWKGSNRPIVDINVKDYSIVSSYVCSGLVGDTPRKNDSSSSSYCRNPNNEKGSHGVKGWAFDDGNDVWMGRTISEELRSGYETFKVIGGWSKPNSKLQINRQVIVERGNRSGYSGIFSVEGKSCINRCFYVELIRGRKQETEVWWTSNSIVVFCGTSGTYGTGSWPDGADINLMPI

SEQ ID NO: 15294 - protein, 469 aa, synthetic construct; identical to SEQ ID NO: 15253
  REGION 1..469: note = neuraminidase__InfluenzaA__ABG88743

SEQ ID NO: 15295 - protein, 469 aa, synthetic construct; identical to SEQ ID NO: 15253
  REGION 1..469: note = neuraminidase__InfluenzaA__ABG88754

SEQ ID NO: 15296 - protein, 469 aa, synthetic construct; identical to SEQ ID NO: 14519
  REGION 1..469: note = neuraminidase__InfluenzaA__ABG88765

SEQ ID NO: 15297 - protein, 469 aa, synthetic construct; identical to SEQ ID NO: 15185
  REGION 1..469: note = neuraminidase__InfluenzaA__ABG88776

SEQ ID NO: 15298 - protein, 469 aa, synthetic construct; identical to SEQ ID NO: 15185
  REGION 1..469: note = neuraminidase__InfluenzaA__ABG88787

SEQ ID NO: 15299 - protein, 469 aa, synthetic construct
  REGION 1..469: note = neuraminidase__InfluenzaA__ABG88820
MNPNQKIITIGSVSLTISTICFFMQIAILITTVTLHFKQYEFNSPPNNQVMLCEPTIIERNITEIVYLTNTTIEKEKCPKLAEYRNWSKPQCNITGFAPFSKDNSIRLSAGGDIWVTREPYVSCDPDKCYQFALGQGTTLNNVHSNDTVRDRTPYRTLLMNELGVPFHLGTKQVCIAWSSSSCHDGKAWLHVCVTGDDKNATASFIYNGRLVDSIVSWSKEILRTQESECVCINGTCTVVMTDGSASGKADTKILFIEEGKIVHTSTLSGSAQHVEECSCYPRYPGVRCVCRDNWKGSNRPIVDINIKDYSIVSSYVCSGLVGDTPRKNDSSSSSHCLDPNNEEGGHGVKGWAFDDGNDVWMGRTISEKLRLGYETFKVIEGWSNPNSKLQTNRQVIVDRGNRSGYSGIFSVEGKSCINRCFYVELIRGRKEETEVLWTSNSIVVFCGTSGTYGTGSWPDGADINLMPI

SEQ ID NO: 15300 - protein, 449 aa, synthetic construct
  REGION 1..449: note = neuraminidase__InfluenzaA__ABI16506
MNPNQKIITIGSICMVIGIVSLMLQIGNMVSLWVSHSIQTGNQHQVEPISNTNFLTEKAVASVTLAGNSSLCPIRGWAVHSKDNSIRIGSKGDVFVIREPFISCSHLECRTFFLTQGALLNDKHSNGTVKDRSPHRTLMSCPVGEAPSPYNSRFESVAWSASACHDGTSWLTIGISGPDNGAVAVLKYNGMITDTIKSWRNNILRTQESECVCVNGSCFTVMTDGPSNGQASYKIFKMEKGKVVKSVELDAPNYHYEECSCYPDAGEITCVCRDNWHGSNRPWVSFNQNLEYQIGYICSGVFGDNPRPNDGTGSCGPVSPNGAYGVKGFSFKYGNGVWIGRTKSPSSRSGFEMIWDPNGWTETDSSFSVKQDIVAITDWSGYSGSFVQHPELTGLDCIRPCFWVELIRGRPKESTIWTSGSSISFCGVNSDTVSWSWPDGAELPFTIDK

SEQ ID NO: 15301 - protein, 470 aa, synthetic construct; identical to SEQ ID NO: 14965
  REGION 1..470: note = neuraminidase__InfluenzaA__ABI20840

SEQ ID NO: 15302 - protein, 470 aa, synthetic construct
  REGION 1..470: note = neuraminidase__InfluenzaA__ABI20862
MNPNQKIITIGSICMTIGIISLILQIGNIISIWVSHSIQTGSQNHTGICNQRIITYENSTWVNQTYVNINNTNVVAGKDTTSVTLAGNSSLCPIRGWAIYSKDNSIRIGSKGDVFVIREPFISCSHLECRTFFLTQGALLNDKHSNGTVKDRSPYRALMSCPIGEAPSPYNSRFESVAWSASACHDGMGWLTIGISGPDDGAVAVLKYNGIITETIKSWRKRILRTQESECVCVNGSCFTIMTDGPSNGPASYRIFKIEKGKITKSIELDAPNSHYEECSCYPDTGTVMCVCRDNWHGSNRPWVSFNQNLDYQTGYICSGVFGDNPRPKDGKGSCDPVTVDGADGVKGFSYRYGNGVWIGRTKSNSSRKGFEMIWDPNGWTDTDSNFLVKQDVVAMTDWSGYSGSFVQHPELTGLDCMRPCFWVELIRGRPREKTTIWTSGSSISFCGVNSDTANWSWPDGAELPFTIDK

SEQ ID NO: 15303 - protein, 470 aa, synthetic construct
  REGION 1..470: note = neuraminidase__InfluenzaA__ABI20873
MNPNQKIITIGSISMAIGIISLTLQIGNIISIWASHSIQTGSQNHTGICNQRIITYENSTWVNQTYVNINNTNVVAEKDKTSVTLAGNSSLCPIRGWAIYTKDNSIRIGSKGDVFVIREPFISCSHLECRTFFLTQGALLNDKHSNGTVKDRSPYRALMSCPLGEAPSPYNSRFESVAWSATACHDGIGWLTIGISGPDNGAVAVLKYNGVITETIKSWKKQILRTQESECVCVNGSCFTIMTDGPSNGAASYRIFKIEKGKITKSIELDAPNFHYEECSCYPDTGTVMCVCRDNWHGSNRPWVSFNQNLDYQIGYICSGVFGDNPRPKDGEGSCNPVTVDGADGVKGFSYRYGNGVWIGRTKSNRLRKGFEIIWDPNGWTDTDSDFSVKQDVVAMTDWSGYSGSFVQHPELTGLDCMRPCFWVELVRGLPRENATIWTSGSSISFCGVNSDTANWSWPDGAELPFTIDK

SEQ ID NO: 15304 - protein, 469 aa, synthetic construct; identical to SEQ ID NO: 15100
  REGION 1..469: note = neuraminidase__InfluenzaA__ABI20895

SEQ ID NO: 15305 - protein, 469 aa, synthetic construct; identical to SEQ ID NO: 15113
  REGION 1..469: note = neuraminidase__InfluenzaA__ABI20906

SEQ ID NO: 15306 - protein, 469 aa, synthetic construct; identical to SEQ ID NO: 15101
  REGION 1..469: note = neuraminidase__InfluenzaA__ABI20928

SEQ ID NO: 15307 - protein, 469 aa, synthetic construct; identical to SEQ ID NO: 15101
  REGION 1..469: note = neuraminidase__InfluenzaA__ABI20939

SEQ ID NO: 15308 - protein, 469 aa, synthetic construct; identical to SEQ ID NO: 15101
  REGION 1..469: note = neuraminidase__InfluenzaA__ABI20950

SEQ ID NO: 15309 - protein, 469 aa, synthetic construct; identical to SEQ ID NO: 15101
  REGION 1..469: note = neuraminidase__InfluenzaA__ABI20961

SEQ ID NO: 15310 - protein, 469 aa, synthetic construct; identical to SEQ ID NO: 14827
  REGION 1..469: note = neuraminidase__InfluenzaA__ABI20983

SEQ ID NO: 15311 - protein, 469 aa, synthetic construct
  REGION 1..469: note = neuraminidase__InfluenzaA__ABI20994
MNPNQKIITIGSVSLTIATICFLMQIAILVTTVTLHFKQYECNSPPNNQVMLCEPTIIERNITEIVYLTNTTIEKEICPKLAEYRNWSKPQCNITGFAPFSKDNSIRLSAGGDIWVTREPYVSCDPDKCYQFALGQGTTLNNGHSNDTVHNRTPYRTLLMNELGVPFHLGTKQVCIAWSSSSCHDGKAWLHVCVTGDDENATASFIYNGRLVDSIGSWSKKILRTQESECVCINGTCTVVMTDGSASGKADTKILFIEEGKIVHTSSLSGSAQHVEECSCYPRYPGVRCVCRDNWKGSNRPIVDINVKDYSIVSSYVCSGLVGDTPRKNDSSSSSHCLDPNNEEGGHGVKGWAFDDGNDVWMGRTISEKLRSGYETFKVIEGWSKPNSKLQINRQVIVDRGNRSGYSGIFSVESKSCINRCFYVELIRGRKQETEVLWTSNSIVVFCGTSGTYGTGSWPDGADINLMPI

SEQ ID NO: 15312 - protein, 469 aa, synthetic construct
  REGION 1..469: note = neuraminidase__InfluenzaA__ABI21005
MNPNQKIITIGSVSLTIATICFLMQIAVLVTTVTLHFKQYECNSPPNNQVMLCEPTIIERNITEIVYLTNTTIEKEICPKLAEYRNWSKPQCNITGFAPFSKDNSIRLSAGGDIWVTREPYVSCDPDKCYQFALGQGTTLNNGHSNDTVHDRTPYRTLLMNELGVPFHLGTKQVCIAWSSSSCHDGKAWLHVCVTGDDENATASFIYNGRLADSIGSWSKKILRTQESECVCINGTCTVVMTDGSASGKADTKILFIEEGKIVHTSLLSGSAQHVEECSCYPRYPGVRCVCRDNWKGSNRPIVDINVKDYSIVSSYVCSGLVGDTPRKNDSSSSSHCLDPNNEEGGHGVKGWAFDDGNDVWMGRTISEKLRSGYETFKVIEGWSKPNSKLQINRQVIVDRGNRSGYSGIFSVEGKSCINRCFYVELIRGRKQETEVLWTSNSIVVFCGTSGTYGTGSWPDGADINLMPI

SEQ ID NO: 15313 - protein, 469 aa, synthetic construct; identical to SEQ ID NO: 14154
  REGION 1..469: note = neuraminidase__InfluenzaA__ABI21016

SEQ ID NO: 15314 - protein, 469 aa, synthetic construct
  REGION 1..469: note = neuraminidase__InfluenzaA__ABI21027
MNPNQRIITIGSVSLTIATICFLMQIAILVTTVTLHFKQYECNSPPNNQVMLCEPTIIERNITEIVYLTNTTIEKEICPKLAEYRNWSKPQCNITGFAPFSKDNSIRLSAGGDIWVTREPYVSCDPDKCYQFALGQGTTLNNGHSNDTVHDRTPYRTLLMNELGVPFHLGTRQVCIAWSSSSCHDGKAWLHVCVTGDDENATASFIYNGRLVDSIGSWSKKILRTQESECVCINGTCTVVMTDGSASGKADTKILFIEEGKIVHISTLSGSAQHVEECSCYPRYPGVRCVCRDNWKGSNRPIVDINVKDYSIVSSYVCSGLVGDTPRKNDSFSSSHCLDPNNEEGGHGVKGWAFDDGNDVWMGRTISEKLRSGYETFKVIEGWSKPNSKLQTNRQVIVERGNRSGYSGIFSVEGKSCINRCFYVELIRGRKEETEVWWTSNSIVVFCGTPGTYGTGSWPDGADINLMPI

SEQ ID NO: 15315 - protein, 469 aa, synthetic construct; identical to SEQ ID NO: 14591
  REGION 1..469: note = neuraminidase__InfluenzaA__ABI21038

SEQ ID NO: 15316 - protein, 469 aa, synthetic construct
  REGION 1..469: note = neuraminidase__InfluenzaA__ABI21049
MNPNQKIITIGSVSLTIATICFLMQIAILVTTVTLHFKQHECNSPPNNQVMLCEPTIIERNITEIVYLTNTTIEKEICPKLVEYRNWSKPQCNITGFAPFSKDNSIRLSAGGDIWVTREPYVSCDPDKCYQFALGQGTTLNNGHSNDTVHDRTPYRTLLMNELGVPFHLGTRQVCIAWSSSSCHDGKAWLHVCVTGDDKNATASFIYNGRLVDSIGSWSKKILRTQESECVCINGTCTVVMTDGSASGKADTKILFIEEGKIVHISTLSGSAQHVEECSCYPRYPGVRCVCRDNWKGSNRPIVDINVKDYSIVSGYVCSGLVGDTPRKNDSFSSSHCLDPNNEEGGHGVKGWAFDDGNDVWMGRTISEKLRSGYETFKVIEGWSKPNSKLQINRQVIVERGNRSGYSGIFSVEGKSCINRCFYVELIRGRKEETEVWWTSNSIVVFCGTSGTYGTGSWPDGADINLMPI

SEQ ID NO: 15317 - protein, 469 aa, synthetic construct
  REGION 1..469: note = neuraminidase__InfluenzaA__ABI21060
MNPNQKIITIGSVSLTIATICFLMQIAILVTTVTLHFKQHECNSPPNNQVMLCEPTIIERNITEIVYLTNTTIEKEICPKPVEYRNWSKPQCNITGFAPFSKDNSIRLSAGGDIWVTREPYVSCDPDKCYQFALGQGTTLNNGHSNDTVHDRTPYRTLLMNELGVPFHLGTRQVCIAWSSSSCHDGKAWLHVCVTGDDKNATASFIYNGRLVDSIGSWSKKILRTQESECVCINGTCTVVMTDGSASGKADTKILFIEEGKIVHISTLSGSAQHVEECSCYPRYPGVRCVCRDNWKGSNRPIVDINVKDYSIVSSYVCSGLVGDTPRKNDSFSSSHCLDPNNEEGGHGVKGWAFDDGNDVWMGRTISEKLRSGYETFKVIEGWSKPNSKLQINRQVIVERGNRSGYSGIFSVEGKSCINRCFYVELIRGRKEETEVWWTSNSIVVFCGTSGTYGTGSWPDGADINLMPI

SEQ ID NO: 15318 - protein, 469 aa, synthetic construct
  REGION 1..469: note = neuraminidase__InfluenzaA__ABI21071
MNPNQKIITIGSVSLTISTICFFMQIAILITTVTLHFKQYEFNSPPNNQVMLCEPTIIERNITEIVYLTNTTIEKEICPKLAEYRNWSKPQCDITGFAPFSKDNSIRLSAGGDIWVTREPYVSCDPDKCYQFALGQGTTLNNVHSNDTVHDRTPYRTLLMSELGVPFHLGTKQVCIAWSSSSCHDGKAWLHVCVTGDDKNATASFIYNGRLVDSIVSWSKEILRTQESECVCINGTCTVVMTDGSASGKADTKILFIEEGKIVHTSTLSGSAQHVEECSCYPRYPGVRCVCRDNWKGSNRPIVDINIKDYSIVSSYVCSGLVGDTPRKNDSSSSSHCLDPNNEEGGHGVKGWAFDDGNDVWMGRTISEKLRSGYETFKVIEGWSNPNSKLQINRQVIVDRGNRSGYSGIFSVEGKSCINRCFYVELIRGRKEETEVLWTSNSIVVFCGTSGTYGTGSWPDGADINLMPI

SEQ ID NO: 15319 - protein, 469 aa, synthetic construct
  REGION 1..469: note = neuraminidase__InfluenzaA__ABI21082
MNPNQKIITIGSVSLTISTICFFMQIATLITTVTLHFKQYEFNSPPNNQVMLCEPTIIERNITEIVYLTNTTIEKEICPKLAEYRNWSKPQCDITGFAPFSKDNSIRLSAGGDIWVTREPYVSCDPDKCYQFALGQGTTLNNVHSNDTVHDRTPYRTLLMNELGVPFHLGTKQVCIAWSSSSCHDGKAWLHVCVTGDDKNATASFIYNGRLVDSIVSWSKEILRTQESECVCINGTCTVVMTDGSASGKADTKILFIEEGKIVHTSTLSGSAQHVEECSCYPRYPGVRCVCRDNWKGSNRPIVDINIKDYSIVSSYVCSGLVGDTPRKNDSSSSSHCLDPNNEEGGHGVKGWAFDDGNDVWMGRTISEKLRSGYETFKVIEGWSNPNSKLQINRQVIVDRGNRSGYSGIFSVEGKSCINRCFYVELIRGRKEETEVLWTSNSIVVFCGTSGTYGTGSWPDGADINLMPI

SEQ ID NO: 15320 - protein, 469 aa, synthetic construct; identical to SEQ ID NO: 14736
  REGION 1..469: note = neuraminidase__InfluenzaA__ABI21093

SEQ ID NO: 15321 - protein, 469 aa, synthetic construct
  REGION 1..469: note = neuraminidase__InfluenzaA__ABI21104
MNPNQKIITIGSVSLTISTICFFMQIAILITTVTLHFKQYEFNSPPNNQVMLCEPTIIERNITEIVYLANTTIEKEICPKLAEYRNWSKPQCDITGFAPFSKDNSIRLSAGGDIWVTREPYVSCDPDKCYQFALGQGTTLNNVHSNDTVHDRTPYRTLLMNELGVPFHLGTKQVCIAWSSSSCHDGKAWLHVCVTGDDKNATASFIYNGRLVDSIVSWSKEILRTQESECVCINGTCTVVMTDGSASGKADTKILFIEEGKIVHTSTLSGSAQHVEECSCYPRYPGVRCVCRDNWKGSNRPIVDINIKDYSIVSSYVCSGLVGDTPRKNDSSSSSHCLDPNNEEGGHGVKGWAFDDGNDVWMGRTISEKLRSGYETFKVIEGWSNPNSKLQINRQVIVDRGNRSGYSGIFSVEGKNCINRCFYVELIRGRKEETEVLWTSNSIVVFCGTSGTYGTGSWPDGADINLMPI

SEQ ID NO: 15322 - protein, 469 aa, synthetic construct; identical to SEQ ID NO: 14327
  REGION 1..469: note = neuraminidase__InfluenzaA__ABI21115

SEQ ID NO: 15323 - protein, 469 aa, synthetic construct; identical to SEQ ID NO: 14327
  REGION 1..469: note = neuraminidase__InfluenzaA__ABI21126

SEQ ID NO: 15324 - protein, 469 aa, synthetic construct; identical to SEQ ID NO: 14736
  REGION 1..469: note = neuraminidase__InfluenzaA__ABI21137

SEQ ID NO: 15325 - protein, 469 aa, synthetic construct; identical to SEQ ID NO: 14327
  REGION 1..469: note = neuraminidase__InfluenzaA__ABI21148

SEQ ID NO: 15326 - protein, 469 aa, synthetic construct
  REGION 1..469: note = neuraminidase__InfluenzaA__ABI21159
MNPNQKIITIGSVSLTISTICFFMQIAILITTVTLHFKQYEFNSPPNNQVMLCEPTIIERNITEIVYLTNTTIEKEICPKLAEYRNWSKPQCDITGFAPFSKDNSIRLSAGGDIWVTREPYVSCDPDKCYQFALGQGTTLNNVHSNDTVHDRTPYRTLLMNELGVPFHLGTKQVCIAWSSSSCHDGKAWLHVCVTGDDKNATASFIYNGRLVDSIVSWSKEILRTQESECVCINGTCTVVMTDGSASGKADTKILFIEEGKIVHTSTLSGSAQHVEECSCYPRYPGVRCVCRDNWKGSNRPIVDINIKDYSIVSGYVCSGLVGDTPRKNDSSSSSHCLDPNNEEGGHGVKGWAFDDGNDVWMGRTISEKLRSGYETFKVIEGWSNPNSKLQINRQVIVDRGNRSGYSGIFSVEGKSCINRCFYVELIRGRKEETEVLWTSNSIVVFCGTSGTYGTGSWPDGADINLMPI

SEQ ID NO: 15327 - protein, 469 aa, synthetic construct; identical to SEQ ID NO: 14327
  REGION 1..469: note = neuraminidase__InfluenzaA__ABI21170

SEQ ID NO: 15328 - protein, 469 aa, synthetic construct; identical to SEQ ID NO: 14327
  REGION 1..469: note = neuraminidase__InfluenzaA__ABI21181

SEQ ID NO: 15329 - protein, 470 aa, synthetic construct
  REGION 1..470: note = neuraminidase__InfluenzaA__ABI21192
MNPNQKIITIGSISIAIGIISLMLQIGNIISIWASHSIQTGSQNHTGTCNQRIITYENSTWVNHTYVNINNTNVVAGKDKTSVTLAGNSSLCSISGWAIYTKDNSIRIGSKGDVFVIREPFISCSHLECRTFFLTQGALLNDKHSNGTVKDRSPYRALMSCPLGEAPSPYNSKFESVAWSASACHDGMGWLTIGISGPDNGAVAVLKYNGIITETIKSWRKRILRTQESECVCVNGSCFTIMTDGPSNGAASYKIFKIEKGKVTKSIELNAPNFHYEECSCYPDTGTVMCVCRDNWHGSNRPWVSFNQNLDYQIGYICSGVFGDNPRPKDGKGSCNPVTVDGADGVKGFSYKYGNGVWIGRTKSNRLRKGFEMIWDPNGWTDTDSDFSVKQDVVAITDWSGYSGSFVQHPELTGLDCIRPCFWVELVRGLPRENTTIWTSGSSISFCGVDSDTANWSWPDGAELPFIIDK

SEQ ID NO: 15330 - protein, 470 aa, synthetic construct; identical to SEQ ID NO: 14386
  REGION 1..470: note = neuraminidase__InfluenzaA__ABI21203

SEQ ID NO: 15331 - protein, 470 aa, synthetic construct
  REGION 1..470: note = neuraminidase__InfluenzaA__ABI21214
MNPNQKIITIGSISIAIGIISLMLQIGNIISIWASHSIQTGSQNHTGICNQRIITYENSTWVNHTYVNINNTNVVAGKDITSVTLAGNSSLCSISGWAIYTKDNSIRIGSKGDVFVIREPFISCSHLECRTFFLTQGALLNDKHSNGTVKDRSPYRALMSCPLGEAPSPYNSKFESVAWSASACHDGMGWLTIGISGPDNGAVAVLKYNGIITETIKSWKKRILRTQESECVCVNGSCFTIMTDGPSNGAASYKIFKIEKGKVTKSIELNAPNFHYEECSCYPDTGTVMCVCRDNWHGSNRPWVSFNQNLDYQIGYICSGVFGDNPRPKDGKGSCNPVTVDGADGVKGFSYKYGNGVWIGRTKSNRLRKGFEMIWDPNGWTDTDSDFSVKQDVVAITDWSGYSGSFVQHPELTGLDCIRPCFWVELVRGLPRENTTIWTSGSSISFCGVDSDTANWSWPDGAELPFTIDK

SEQ ID NO: 15332 - protein, 469 aa, synthetic construct
  REGION 1..469: note = neuraminidase__InfluenzaA__ABI21247
MNPNQKIITIGSVSLTIATICFLMQIAILVTTVTLHFKQYECNSPPNNQVMLCEPTIIERNITEIVYLTNTTIEKEKCPKLAEYRNWSKPQCKITGFAPFSKDNSIRLSAGGDIWVTREPYVSCDPGKCYQFALGQGTTLNNRHSNDTVHDRTPYRTLLMNELGVPFHLGTKQVCIAWSSSSCHDGKAWLHVCVTGHDENATASFIYDGRLVDSIGSWSKNILRTQESECVCINGTCTVVMTDGSASERADTKILFIEEGKIVHISPLSGSAQHVEECSCYPRYPGVRCVCRDNWKGSNRPIVDINVKDHSIVSSYVCSGLVGDTPRKNDSSSSSYCRNPNNEKGSHGMKGWAFDDGNDVWMGRTISEELRSGYETFKVIGGWSKPNSKLQINRQVIVDRGNRSGYSGIFSVEGKSCINRCFYVELIRGRKQETEVWWTSNSIVVFCGTSGTYGTGSWPDGADINLMPI

SEQ ID NO: 15333 - protein, 469 aa, synthetic construct; identical to SEQ ID NO: 15253
  REGION 1..469: note = neuraminidase__InfluenzaA__ABI21258

SEQ ID NO: 15334 - protein, 469 aa, synthetic construct; identical to SEQ ID NO: 15253
  REGION 1..469: note = neuraminidase__InfluenzaA__ABI21269

SEQ ID NO: 15335 - protein, 469 aa, synthetic construct; identical to SEQ ID NO: 15253
  REGION 1..469: note = neuraminidase__InfluenzaA__ABI21280

SEQ ID NO: 15336 - protein, 469 aa, synthetic construct; identical to SEQ ID NO: 15185
  REGION 1..469: note = neuraminidase__InfluenzaA__ABI21302

SEQ ID NO: 15337 - protein, 469 aa, synthetic construct; identical to SEQ ID NO: 15185
  REGION 1..469: note = neuraminidase__InfluenzaA__ABI21313

SEQ ID NO: 15338 - protein, 469 aa, synthetic construct; identical to SEQ ID NO: 15185
  REGION 1..469: note = neuraminidase__InfluenzaA__ABI21324

SEQ ID NO: 15339 - protein, 469 aa, synthetic construct; identical to SEQ ID NO: 15185
  REGION 1..469: note = neuraminidase__InfluenzaA__ABI21335

SEQ ID NO: 15340 - protein, 469 aa, synthetic construct; identical to SEQ ID NO: 15253
  REGION 1..469: note = neuraminidase__InfluenzaA__ABI21346

SEQ ID NO: 15341 - protein, 469 aa, synthetic construct
  REGION 1..469: note = neuraminidase__InfluenzaA__ABI21357
MNPNQKIITIGSVSLTIATICFLMQIAILVTTVTLHFKQYECNSPPNNQVMLCEPTIIERNITEIVYLTNTTIEKEICPKLAEYRNWSKPQCKITGFAPFSKDNSIRLSAGGDIWVTREPYVSCDPGKCYQFALGQGTTLNNRHSNDTVHDRTPYRTLLMNELGVPFHLGTKQVCIAWSSSSCHDGKAWLHVCVTGHDENATASFIYDGRLVDSIGSWSKNILRTQESECVCINGTCTVVMTDGSASERADTKILFIEEGKIVHISPLSGSAQHVEECSCYPRYPGVRCVCRDNWKGSNRPIVDINVKNYSIVSSYVCSGLVGDTPRKNDSSSSSYCRNPNNEKGSHGVKGWAFDDGNDVWMGRTISEELRSGYETFKVIGGWSKPNSKLQINRQVIVDRGNRSGYSGIFSVEGKSCINRCFYVELIRGRKQEAEVWWTSNSIVVFCGTSGTYGTGSWPDGADINLMPI

SEQ ID NO: 15342 - protein, 469 aa, synthetic construct; identical to SEQ ID NO: 15185
  REGION 1..469: note = neuraminidase__InfluenzaA__ABI21368

SEQ ID NO: 15343 - protein, 469 aa, synthetic construct; identical to SEQ ID NO: 15185
  REGION 1..469: note = neuraminidase__InfluenzaA__ABI21379

SEQ ID NO: 15344 - protein, 469 aa, synthetic construct; identical to SEQ ID NO: 15185
  REGION 1..469: note = neuraminidase__InfluenzaA__ABI21390

SEQ ID NO: 15345 - protein, 469 aa, synthetic construct; identical to SEQ ID NO: 15253
  REGION 1..469: note = neuraminidase__InfluenzaA__ABI21401

SEQ ID NO: 15346 - protein, 469 aa, synthetic construct
  REGION 1..469: note = neuraminidase__InfluenzaA__ABI21412
MNPNQKIITIGSVSLTIATICFLMQIAILVTTVTLHFKQYECNPPPNNQVMLCEPTIIERNITEIVYLTNTTIEKEICPKLAEYRNWSKPQCKITGFAPFSKDNSIRLSAGGDIWVTREPYVSCDPGKCYQFALGQGTTLNNRHSNDTVHDRTPYRTLLMNELGVPFHLGTKQVCIAWSSSSCHDGKAWLHVCVTGHDENATASFIYDGRLVDSIGSWSKNILRTQESECVCINGTCTVVMTDGSASERADTKILFIEEGKIVHISPLSGSAQHVEECSCYPRYPGVRCVCRDNWKGSNRPIVDINVKDYSIVSSYVCSGLVGDTPRKNDSSSSSYCRNPNNEKGSHGVKGWAFDDGNDVWMGRTISEELRSGYETFKVIGGWSKPNSKLQINRQVIVDRGNRSGYSGIFSVEGKSCINRCFYVELIRGRKQETEVWWTSNSIVVFCGTSGTYGTGSWPDGADINLMPI

SEQ ID NO: 15347 - protein, 469 aa, synthetic construct; identical to SEQ ID NO: 14519
  REGION 1..469: note = neuraminidase__InfluenzaA__ABI21423

SEQ ID NO: 15348 - protein, 469 aa, synthetic construct; identical to SEQ ID NO: 15185
  REGION 1..469: note = neuraminidase__InfluenzaA__ABI21434

SEQ ID NO: 15349 - protein, 469 aa, synthetic construct; identical to SEQ ID NO: 15253
  REGION 1..469: note = neuraminidase__InfluenzaA__ABI21445

SEQ ID NO: 15350 - protein, 469 aa, synthetic construct; identical to SEQ ID NO: 15253
  REGION 1..469: note = neuraminidase__InfluenzaA__ABI21456

SEQ ID NO: 15351 - protein, 469 aa, synthetic construct; identical to SEQ ID NO: 15346
  REGION 1..469: note = neuraminidase__InfluenzaA__ABI21467

SEQ ID NO: 15352 - protein, 469 aa, synthetic construct; identical to SEQ ID NO: 15253
  REGION 1..469: note = neuraminidase__InfluenzaA__ABI21478

SEQ ID NO: 15353 - protein, 469 aa, synthetic construct; identical to SEQ ID NO: 15253
  REGION 1..469: note = neuraminidase__InfluenzaA__ABI21489

SEQ ID NO: 15354 - protein, 469 aa, synthetic construct; identical to SEQ ID NO: 15253
  REGION 1..469: note = neuraminidase__InfluenzaA__ABI21500

SEQ ID NO: 15355 - protein, 469 aa, synthetic construct
  REGION 1..469: note = neuraminidase__InfluenzaA__ABI21511
MNPNQKIITIGSVSLTIATICFLMQIAILVTTVTLHFKQYECNSPPNNQVMLCEPAIIERNITEIVYLTNTTIEKEMCPKLAEYRNWSKPQCNITGFAPFSKDNSIRLSAGGDIWVTREPYVSCDPDKCYQFALGQGTTLNNGHSNDTVHDRTPYRTLLMNELGVPFHLGTRQVCIAWSSSSCHDGKAWLHVCVTGDDENATASFIYDGRLVDSIGSWSKKILRTQESECVCINGTCTVVMTDGSASGKADTKILFIEEGKIVNISTLSGSAQHVEECSCYPRYPGVRCVCRDNWKGSNRPIVDINVKDYSIVSSYVCSGLVGDTPRKNDSFSSSHCLDPNNEEGGHGVKGWAFDDGNDVWMGRTISEKLRSGYETFKVIEGWSKPNSKLQINRQVIVERGNRSGYSGIFSVEGKSCINRCFYVELIRGRKEETEVWWTSNSIVVFCGTSGTYGTGSWPDGADINLMPI

SEQ ID NO: 15356 - protein, 470 aa, synthetic construct
  REGION 1..470: note = neuraminidase__InfluenzaA__ABI21533
MNPNQKIITIGSISIAIGIISLMLQIGNIISIWASHSIQTGSQNHTGICNQRIITYENSTWVNHTYVNINNTNVVAGKDKTSVTLAGNSSLCSISGWAIYTKDNSIRIGSKGDVFVMREPFISCSHLECRTFFLTQGALLNDKHSNGTVKDRSPYRALMSCPLGEAPSPYNSKFESVAWSASACHDGMGWLTIGISGPDNGAVAVLKYNGIITETIKSWKKRILRTQESECVCVNGSCFTIMTDGPSNGAASYKIFKIEKGKVIKSIELNAPNSHYEECSCYPDTGTVMCVCRDNWHGSNRPWVSFNQNLDYQIGYICSGVFGDNPRPKDGEGSCNPVTVDGADGVKGFSYKYGNGVWIGRTKSNRLRKGFEMIWDPNGWTDTDSDFSVKQDVVAITDWSGYSGSFVQHPELTGLDCIRPCFWVELVRGRPRENTTIWTSGSSISFCGVNSDTANWSWPDGAELPFTIDK

SEQ ID NO: 15357 - protein, 470 aa, synthetic construct; identical to SEQ ID NO: 15356
  REGION 1..470: note = neuraminidase__InfluenzaA__ABI21544

SEQ ID NO: 15358 - protein, 470 aa, synthetic construct; identical to SEQ ID NO: 15356
  REGION 1..470: note = neuraminidase__InfluenzaA__ABI21555

SEQ ID NO: 15359 - protein, 470 aa, synthetic construct; identical to SEQ ID NO: 15356
  REGION 1..470: note = neuraminidase__InfluenzaA__ABI21566

SEQ ID NO: 15360 - protein, 470 aa, synthetic construct; identical to SEQ ID NO: 15356
  REGION 1..470: note = neuraminidase__InfluenzaA__ABI21577

SEQ ID NO: 15361 - protein, 470 aa, synthetic construct
  REGION 1..470: note = neuraminidase__InfluenzaA__ABI22112
MNPNQKIITIGSISIAIGIISLMLQIGNIISIWASHSIQTGSQNHTGICNQRIITYENSTWVNHTYVNINNTNVVAGKDKTSVTLAGNSSLCSISGWAIYTKDNSIRIGSKGDVFVIREPFISCSHLECRTFFLTQGALLNDKHSNGTVKDRSPYRALMSCPLGEAPSPYNSKFESVAWSASACHDGMGWLTIGISGPDNGAVAVLKYNEIITETIKSWKKRILRTQESECVCVNGSCFTIMTDGPSNGAASYKIFKIEKGKVTKSIELNAPNFHYEECSCYPDTGTVMCVCRDNWHGSNRPWVSFNQNLDYQIGYICSGVFGDNPRPKDGKGSCNPVTVDGADGVKGFSYKYGNGVWIGRTKSNRLRKGFEMIWDPNGWTDTDSDFSVKQDVVAITDWSGYSGSFVQHPELTGLDCIRPCFWVELVRGLPRENTTIWTSGSSISFCGVDSDTANWSWPDGAELPFTIDK

SEQ ID NO: 15362 - protein, 469 aa, synthetic construct
  REGION 1..469: note = neuraminidase__InfluenzaA__ABI22162
MNPNQKIITIGSVSLTISTICFFMQIAILITTVTLHFKQYEFNSPPNNQVMLCEPTIIERNITEIVYLTNTTIEKEICPKLAEYRNWSKPQCNITGFAPFSKDNSIRLSAGGDIWVTREPYVSCDPDKCYQFALGQGTTLNNVHSNDTVHDRTPYRTLLMNELGVPFHLGTKQVCIAWSSSSCHDGKAWLHVCVTGDDKNATASFIYNGRLVDSIVSWSKEILRTQESECVCINGTCTVVMTDGSASGKADTKILFIEEGKIVHTSTLSGSAQHVEECSCYPRYPGVRCVCRDNWKGSNRPIVDINIKDYSIVSSYVCSGLVGDTPRKNDSSSSSHCLDPNNEEGGHGVKGWAFDDGNDVWMGRTISEKLRSGYETFKVIEGWSNPNSKLQTNRQVIVDRGNRSGYSGIFSVEGKSCINRCFYVELIRGRKEETEVLWTSNSIVVFCGTSGTYGTGSWPDGADIDLMPI

SEQ ID NO: 15363 - protein, 449 aa, synthetic construct
  REGION 1..449: note = neuraminidase__InfluenzaA__ABI23981
MNPNQKIITIGSICMVIGIVSLMLQIGNMISIWVSHSIQTGNQRQAESISNTKFLTEKAVASVTLAGNSSLCPISGWAVYSKDNSIRIGSRGDVFVIREPFISCSHLECRTFFLTQGALLNDKHSNGTVKDRSPYRTLMSSPVGEAPSPYNSRFESVAWSASACHDGTSWLTIGISGPDNGAVAVLKYNGIITDTIKSWRNNILRTQESECACVNGSCFTVMTDGPSNGQASYKIFKMEKGKVVKSVELDAPNYHYEECSCYPDAGEITCVCRDNWHGSNRPWVSFNQNLEYQIGYICSGVFGDNPRPNDGTGSCGPVSLNGAYGVKGFSFKYGNGVWIGRTKSTNSRSGFEMIWDPNGWTGTDSSFSVKQDIVAITDWSGYSGSFVQHPELTGLDCIRPCFWVELIRGRPKESTIWTSGSSISFCGVNSDTVSWSWPDGAELPFTIDK

SEQ ID NO: 15364 - protein, 469 aa, synthetic construct; identical to SEQ ID NO: 14327
  REGION 1..469: note = neuraminidase__InfluenzaA__ABI26649

SEQ ID NO: 15365 - protein, 470 aa, synthetic construct; identical to SEQ ID NO: 15050
  REGION 1..470: note = neuraminidase__InfluenzaA__ABI30370

SEQ ID NO: 15366 - protein, 469 aa, synthetic construct; identical to SEQ ID NO: 15101
  REGION 1..469: note = neuraminidase__InfluenzaA__ABI30392

SEQ ID NO: 15367 - protein, 469 aa, synthetic construct; identical to SEQ ID NO: 14730
  REGION 1..469: note = neuraminidase__InfluenzaA__ABI30403

SEQ ID NO: 15368 - protein, 469 aa, synthetic construct; identical to SEQ ID NO: 14730
  REGION 1..469: note = neuraminidase__InfluenzaA__ABI30414

SEQ ID NO: 15369 - protein, 469 aa, synthetic construct; identical to SEQ ID NO: 14327
  REGION 1..469: note = neuraminidase__InfluenzaA__ABI30425

SEQ ID NO: 15370 - protein, 469 aa, synthetic construct; identical to SEQ ID NO: 14327
  REGION 1..469: note = neuraminidase__InfluenzaA__ABI30436

SEQ ID NO: 15371 - protein, 469 aa, synthetic construct; identical to SEQ ID NO: 14327
  REGION 1..469: note = neuraminidase__InfluenzaA__ABI30447

SEQ ID NO: 15372 - protein, 469 aa, synthetic construct; identical to SEQ ID NO: 14327
  REGION 1..469: note = neuraminidase__InfluenzaA__ABI30458

SEQ ID NO: 15373 - protein, 469 aa, synthetic construct; identical to SEQ ID NO: 14327
  REGION 1..469: note = neuraminidase__InfluenzaA__ABI30469

SEQ ID NO: 15374 - protein, 469 aa, synthetic construct; identical to SEQ ID NO: 14327
  REGION 1..469: note = neuraminidase__InfluenzaA__ABI30480

SEQ ID NO: 15375 - protein, 469 aa, synthetic construct
  REGION 1..469: note = neuraminidase__InfluenzaA__ABI30491
MNPNQKIITIGSVSLTISTICFFMQIAILITTVTLHFKQYEFNSPPNNQVMLCEPTIIERNITKIVYLTNTTIEKEICPKLAEYRNWSKPQCDITGFAPFSKDNSIRLSAGGDIWVTREPYVSCDPDKCYQFALGQGTTLNNVHSNDTVHDRTPYRTLLMNELGVPFHLGTKQVCIAWSSSSCHDGKAWLHVCVTGDDKNATASFIYNGRLVDSIVSWSKEILRTQESECVCINGTCTVVMTDGSASGKADTKILFIEEGKIVHTSTLSGSAQHVEECSCYPRYPGVRCVCRDNWKGSNRPIVDINIKDYSIVSSYVCSGLVGDTPRKNDSSSSSHCLDPNNEEGGHGVKGWAFDDGNDVWMGRTISEKLRSGYETFKVIEGWSNPNSKLQINRQVIVDRGNRSGYSGIFSVEGKSCINRCFYVELIRGRKEETEVLWTSNSIVVFCGTSGTYGTGSWPDGADINLMPI

SEQ ID NO: 15376 - protein, 469 aa, synthetic construct; identical to SEQ ID NO: 14327
  REGION 1..469: note = neuraminidase__InfluenzaA__ABI30502

SEQ ID NO: 15377 - protein, 469 aa, synthetic construct
  REGION 1..469: note = neuraminidase__InfluenzaA__ABI30513
MNPNQKIITIGSVSLTISTICFFMQIAILITTVTLHFKQYEFNSPPNNQVMLCEPTIIERNITEIVYLTNTTIEKEICPKLAEYRNWSKPQCDITGFAPFSKDNSIRLSAGGDIWVTREPYVSCDPDKCYQFALGQGTTLNNVHSNDTVHDRTPYRTLLMNELGVPFHLGTKQVCIAWSSSSCHDGKAWLHVCVTGDDKNATASFIYNGRLVDSIVSWSKEILRTQESECVCINGTCTVVMTDGSASGKADTKILFIEEGKIVHTSTLSGSAQHVEECSCYPRYPGVRCVCRDNWKGSNRPIVDINIKDYSIVSSYVCSGLVGDTPRKNDSSSSSHCLDPNNEEGGHGVKGWAFDDGNDVWMGRTISEKLRSGYETFKVIEGWSNPNSKLQTNRQVIVDRGNRSGYSGIFSVEGKSCINRCFYVELIRGRKEETEVLWTSNSIVVFCGTSGTYGTGSWPDGADINLMPI

SEQ ID NO: 15378 - protein, 469 aa, synthetic construct; identical to SEQ ID NO: 14327
  REGION 1..469: note = neuraminidase__InfluenzaA__ABI30524

SEQ ID NO: 15379 - protein, 469 aa, synthetic construct; identical to SEQ ID NO: 14327
  REGION 1..469: note = neuraminidase__InfluenzaA__ABI30535

SEQ ID NO: 15380 - protein, 469 aa, synthetic construct
  REGION 1..469: note = neuraminidase__InfluenzaA__ABI30546
MNPNQKIITIGSVSLTISTICFFMQIAILITTVTLHFKQYEFNSPPNNQVMLCEPTIIERNITEIVYLTNTTIEKEICPKLAEYRNWSKPQCDITGFAPFSKDNSIRLSAGGDIWVTREPYVSCDPDKCYQFALGQGTTLNNLHSNDTVHDRTPYRTLLMSELGVPFHLGTKQVCIAWSSSSCHDGKAWMHVCVTGDDKNATASFIYNGRLVDSIVSWSKEILRTQESECVCINGTCTVVMTDGSASGKADTKILFIEEGKIVHTSTLSGSAQHVEECSCYPRYPGVRCVCRDNWKGSNRPIVDINIKDYSIVSSYVCSGLVGDTPRKNDSSSSSHCLDPNNEEGGHGVKGWAFDDGNDVWMGRTISEKLRSGYETFKVIEGWSNPNSKLQINRQVIVDRGNRSGYSGIFSVEGKNCINRCFYVELIRGRKEETEVLWTSNSIVVFCGTSGTYGTGSWPDGADINLMPI

SEQ ID NO: 15381 - protein, 469 aa, synthetic construct; identical to SEQ ID NO: 14327
  REGION 1..469: note = neuraminidase__InfluenzaA__ABI30557

SEQ ID NO: 15382 - protein, 469 aa, synthetic construct; identical to SEQ ID NO: 14714
  REGION 1..469: note = neuraminidase__InfluenzaA__ABI30579

SEQ ID NO: 15383 - protein, 469 aa, synthetic construct
  REGION 1..469: note = neuraminidase__InfluenzaA__ABI30590
MNPNQKIITIGSVSLTISTICFFMQIAILITTVTLHFKQYEFNSPPNNQVMLCEPTIIERNITEIVYLTNTTIEKEICPKLAEYRNWSKPQCDITGFAPFSKDNSIRLSAGGDIWVTREPYVSCDPDKCYQFALGQGTTLNNVHSNDTVHDRTPYRTLLMNELGVPFHLGTKQVCIAWSSSSCHDGKAWLHVCVTGDDKNATASFIYNGRLVDSIVSWSKKILRTQESECVCINGTCTVVMTDGSASGKADTKILFIEEGKIVHTSTLSGSAQHVEECSCYPRYPGVRCVCRDNWKGSNRPIVDINIKDYSIVSSYVCSGLVGDTPRKNDSSSSSHCLDPNNEEGGHGVKGWAFDDGNDVWMGRTISEKLRSGYETFKVIEGWSNPNSKLQINRQVIVDRGNRSGYSGIFSVEGKGCINRCFYVELIRGRKEETEVLWTSNSIVVFCGTSGTYGTGSWPDGADINLMPI

SEQ ID NO: 15384 - protein, 469 aa, synthetic construct; identical to SEQ ID NO: 14807
  REGION 1..469: note = neuraminidase__InfluenzaA__ABI30601

SEQ ID NO: 15385 - protein, 469 aa, synthetic construct
  REGION 1..469: note = neuraminidase__InfluenzaA__ABI30612
MNPNQKIITIGSVSLTISTICFFMQIAILITTVTLHFKQYEFNSPPNNQVMLCEPTIIERNITEIVYLTNTTIEKEICPKLAEYRNWSKPQCNITGFAPFSKDNSIRLSAGGDIWVTREPYVSCDPDKCYQFALGQGTTLNNVHSNDTVHDRTPYRTLLMNELGVPFHLGTKQVCIAWSSSSCHDGKAWLHVCVTGDDKNATASFIYNGRLVDSIVSWSKEILRTQESECVCINGTCTVVMTDGSASGKADTKILFIEEGKIIHTSTLSGSAQHVEECSCYPRYPGVRCVCRDNWKGSNRPIVDINIKDYSIVSSYVCSGLVGDTPRKNDSSSSSHCLDPNNEEGGHGVKGWAFDDGNDVWMGRTISEKLRSGYETFKVIEGWSNPNSKLQINRQVIVDRGNRSGYSGIFSVEGKSCINRCFYVELIRGRKEETEVLWTSNSIVVFCGTSGTYGTGSWPDGADINLMPI

SEQ ID NO: 15386 - protein, 469 aa, synthetic construct; identical to SEQ ID NO: 14807
  REGION 1..469: note = neuraminidase__InfluenzaA__ABI30623

SEQ ID NO: 15387 - protein, 469 aa, synthetic construct
  REGION 1..469: note = neuraminidase__InfluenzaA__ABI30736
MNPNQKIITIGSVSLTISTICFFMQIAILITTVTLHFKQYEFNSPPNNQVMLCEPTIIERNITEIVYLTNTTIEKEICPKLAEYRNWSKPQCDITGFAPFSKDNSIRLSAGGDIWVTREPYVSCDPDKCYQFALGQGTTLNNVHSNDTVHDRTPYRTLLMNELGVPFHLGTKQVCIAWSSSSCHDGKAWLHVCVTGDDKNATASFIYNGRLVDSIVSWSKKILRTQESECVCINGTCTVVMTDGSASGKADTKILFIEEGKIVHTSTLSGSAQHVEECSCYPRYPGVRCVCRDNWKGSNRPIVDINIKDYSVVSSYVCSGLVGDTPRKNDSSSSSHCLDPNNEEGGHGVKGWAFDDGNDVWMGRTISEKLRSGYETFKVIEGWSNPNSKLQINRQVIVDRGNRSGYSGIFSVEGKSCINRCFYVELIRGRKEETEVLWTSNSIVVFCGTSGTYGTGSWPDGADINLMPI

SEQ ID NO: 15388 - protein, 469 aa, synthetic construct
  REGION 1..469: note = neuraminidase__InfluenzaA__ABI30758
MNPNQKIITIGSVSLTISTICFFMQIAILITTVTLHFKQYEFNSPPNNQVMLYEPTIIERNITEIVYLTNTTIEKEICPKLAEYRNWSKPQCDITGFAPFSKDNSIRLSAGGDIWVTREPYVSCDPDKCYQFALGQGTTLNNVHSNDTVHDRTPYRTLLMNELGVPFHLGTKQVCIAWSSSSCHDGKAWLHVCVTGDDKNATASFIYNGRLVDSIVSWSKKILRTQESECVCINGTCTVVMTDGSASGKADTKILFIEEGKIVHTSTLSGSAQHVEECSCYPRYPGVRCVCRDNWKGSNRPIVDINIKDYSIVSSYVCSGLVGDTPRKNDSSSSSHCLDPNNEEGGHGVKGWAFDDGNDVWMGRTISEKLRSGYETFKVIEGWSNPNSKLQINRQVIVDRGNRSGYSGIFSVEGKSCINRCFYVELIRGRKEETEVLWTSNSIVVFCGTSGTYGTGSWPDGADINLMPI

SEQ ID NO: 15389 - protein, 469 aa, synthetic construct; identical to SEQ ID NO: 14714
  REGION 1..469: note = neuraminidase__InfluenzaA__ABI30769

SEQ ID NO: 15390 - protein, 469 aa, synthetic construct; identical to SEQ ID NO: 14714
  REGION 1..469: note = neuraminidase__InfluenzaA__ABI30780

SEQ ID NO: 15391 - protein, 469 aa, synthetic construct; identical to SEQ ID NO: 14714
  REGION 1..469: note = neuraminidase__InfluenzaA__ABI30791

SEQ ID NO: 15392 - protein, 469 aa, synthetic construct; identical to SEQ ID NO: 14714
  REGION 1..469: note = neuraminidase__InfluenzaA__ABI30802

SEQ ID NO: 15393 - protein, 469 aa, synthetic construct; identical to SEQ ID NO: 14714
  REGION 1..469: note = neuraminidase__InfluenzaA__ABI30813

SEQ ID NO: 15394 - protein, 469 aa, synthetic construct; identical to SEQ ID NO: 14714
  REGION 1..469: note = neuraminidase__InfluenzaA__ABI30824

SEQ ID NO: 15395 - protein, 469 aa, synthetic construct; identical to SEQ ID NO: 14714
  REGION 1..469: note = neuraminidase__InfluenzaA__ABI30835

SEQ ID NO: 15396 - protein, 469 aa, synthetic construct; identical to SEQ ID NO: 14714
  REGION 1..469: note = neuraminidase__InfluenzaA__ABI30846

SEQ ID NO: 15397 - protein, 469 aa, synthetic construct; identical to SEQ ID NO: 15185
  REGION 1..469: note = neuraminidase__InfluenzaA__ABI30857

SEQ ID NO: 15398 - protein, 469 aa, synthetic construct; identical to SEQ ID NO: 15185
  REGION 1..469: note = neuraminidase__InfluenzaA__ABI30868

SEQ ID NO: 15399 - protein, 449 aa, synthetic construct
  REGION 1..449: note = neuraminidase__InfluenzaA__ABI36157
MNPNQKIITIGSICMAIGTVSLMLQIGNMISIWVSHSIQTGNQHQAESISNTNPLTEKAVASVTLAGNSSLCPIRGWAVHSKDNSIRIGSKGDVFVIREPFISCSHSECRTFFLTQGALLNDKHSNETVKDRSPHRTLMSCPVGEAPSPYNSRFESVAWSASACHDGTSWLTIGISGPDNGAVAVLKYNGIITDTIKSWRNNILRTQESECACVNGSCFTVMTDGPSNGQASYKIFKMEKGKVVKSVELDAPNYHYEECSCYPDAGEITCVCRDNWHGSNRPWVSFNQNLEYQIGYICSGVFGDNPRPNDGTGSCGPMSSNGAYGVKGFSFKYGNGVWIGRTKSTNSRSGFEMIWDPNGWTGTDSSFSVKQDIVAITDWSGYSGSFVQHPELTGLDCIRPCFWVELIRGRPKESTIWTSGSSISFCGVNSDTVSWSWPDGAELPFTIDK

SEQ ID NO: 15400 - protein, 449 aa, synthetic construct; identical to SEQ ID NO: 15399
  REGION 1..449: note = neuraminidase__InfluenzaA__ABI36168

SEQ ID NO: 15401 - protein, 449 aa, synthetic construct; identical to SEQ ID NO: 15399
  REGION 1..449: note = neuraminidase__InfluenzaA__ABI36179

SEQ ID NO: 15402 - protein, 449 aa, synthetic construct; identical to SEQ ID NO: 15399
  REGION 1..449: note = neuraminidase__InfluenzaA__ABI36189

SEQ ID NO: 15403 - protein, 449 aa, synthetic construct
  REGION 1..449: note = neuraminidase__InfluenzaA__ABI36278
MNPNQKIITIGSICMVIGIVSLMLQIGNMISIWVSHSIQKGNQHQAESISNTNPLTEKAVASVTLAGNSSLCPIRGWAVHSKDNNIRIGSKGDVFVIREPFISCSHLECRTFFLTQGALLNDKHSNGTVKDRSPHRTLMSCPVGEAPSPYNSRFESVAWSASACHDGTSWLTIGISGPDNEAVAVLKYNGIITDTIKSWRNNILRTQESECACVNGSCFTVMTDGPSNGQASYKIFKMEKGKVVKSVELDAPNYHYEECSCYPDAGEITCVCRDNWHGSNRPWVSFNQNLEYQIGYICSGVFGDNPRPNDGTGSCGPMSPNGAYGVKGFSFKYGNGVWIGRTKSTNSRSGFEMIWDPNGWTGTDSSFSVKQDIVAITDWSGYSGSFVQHPELTGLDCIRPCFWVELIRGRPKESTIWTSGSSISFCGVNSDTVSWSWPDGAELPFTIDK

SEQ ID NO: 15404 - protein, 449 aa, synthetic construct; identical to SEQ ID NO: 15403
  REGION 1..449: note = neuraminidase__InfluenzaA__ABI36287

SEQ ID NO: 15405 - protein, 449 aa, synthetic construct; identical to SEQ ID NO: 15403
  REGION 1..449: note = neuraminidase__InfluenzaA__ABI36298

SEQ ID NO: 15406 - protein, 449 aa, synthetic construct
  REGION 1..449: note = neuraminidase__InfluenzaA__ABI36314
MNPNQKIITIGSICMVIGIVSLMLQIGNMISIWVSHSIQTGNQHQAESISNTNPLTEKAVASVTLAGNSSLCPIRGWAVHSKDNNIRIGSKGDVFVIREPFISCSHLECRTFFLTQGALLNDKHSNGTVKDRSPHRTLMSCPVGEAPSPYNSRFESVAWSASACHDGNSWLTIGISGPDNEAVAVLKYNGIITDTIKSWRNNILRTQESECACVNGSCFTVMTDGPSNGQASYKIFKMEKGKVVKSVELDAPNYHYEECSCYPDAGEITCVCRDNWHGSNRPWVSFNQNLEYQIGYICSGVFGDNPRPNDGTGSCGPMSPNGAYGVKGFSFKYGNGVWIGRTKSTNSRSGFEMIWDPNGWTGTDSSFSVKQDIVAITDWSGYSGSFVQHPELTGLDCIRPCFWVELIRGRPKESTIWTSGSSISFCGVNSDTVSWSWPDGAELPFTIDK

SEQ ID NO: 15407 - protein, 449 aa, synthetic construct
  REGION 1..449: note = neuraminidase__InfluenzaA__ABI36336
MNPNQKIITIGSICMVIGIVSLMLQIGNMISIWVSHSVQTGNQHQAESISNTNPLTEKAVASVTLAGNSSLCPIRGWAVHSKDNNIRIGSKGDVFVIREPFISCSHLECRTFFLTQGALLNDKHSNGTVKDRSPHRTLMSCPLGEAPSPYNSRFESVSWSASACHDGTSWLTIGISGPDNEAVAVLKYNGIITDTIKSWRNNILRTQESECACVNGSCFTVMTDGPSNGQASYKIFKMEKGKVVKSVELDAPNYHYEECSCYPDAGEITCVCRDNWHGSNRPWVSFNQNLEYQIGYICSGVFGDNPRPNDGTGSCGPMSPNGAYGVKGFSFKYGNGVWIGRTKSTNSRSGFEMIWDPNGWTGTDSSFSVKQDIVAITDWSGYSGSFVQHPELTGLDCIRPCFWVELIRGRPKESTIWTSGSIISFCGVNSDTVSWSWPDGAELPFTIDK

SEQ ID NO: 15408 - protein, 449 aa, synthetic construct
  REGION 1..449: note = neuraminidase__InfluenzaA__ABI36358
MNPNQKIITIGSICMVIGIVSLMLQIGNMISIWVSHSVQTGNQHQAESISNTNPLTEKAVASVTLAGNSSLCPIRGWAVHSKDNNIRIGSKGDVFVIREPFISCSHLECRTFFLTQGALLNDKHSNGTVKDRSPHRTLMSCPVGEAPSPYNSRFESVAWSASACHDGTSWLTIGISGPDNEAVAVLKYNGIITDTIKSWRNNILRTQESECACVNGSCFTVMTDGPSNGQASYKIFKMEKGKVVKSVELDAPNYHYEECSCYPDAGEITCVCRDNWHGSNRPWVSFNQNLEYQIGYICSGVFGDNPRPNDGTGSCGPMSPNGAYGVKGFSFKYGNGVWIGRTKSTNSRSGFEMIWDPNGWTGTDSSFSVKQDIVAITDWSGYSGSFVQHPELTGLDCIRPCFWVELIRGRPKESTIWTSGSSISFCGVNSDTVSWSWPDGAELPFTIDK

SEQ ID NO: 15409 - protein, 449 aa, synthetic construct; identical to SEQ ID NO: 15399
  REGION 1..449: note = neuraminidase__InfluenzaA__ABI36369

SEQ ID NO: 15410 - protein, 449 aa, synthetic construct
  REGION 1..449: note = neuraminidase__InfluenzaA__ABI36391
MNPNQKIITIGSICMVIGIVSLMLQIGNMISIWVSHSTQKGNQHQAESISNTNPLTEKAVASVTLAGNSSLCPIRGWAVHSKDNNIRIGSKGDVFVIREPFISCSHLECRTFFLTQGALLNDKHSNGTVKDRSPHRTLMSCPVGEAPSPYNSRFESVAWSASACHDGTSWLTIGISGPDNEAVAVLKYNGIITDTIKSWRNNILRTQESECACVNGSCFTVMTDGPSNGQASYKIFKMEKGKVVKSVELDAPNYHYEECSCYPDAGEITCVCRDNWHGSNRPWVSFNQNLEYQIGYICSGIFGDNPRPNDGTGSCGPMFPNGAYGVKGFSFKYGNGVWIGRTKSTNSRSGFEMIWDPNGWTGTDSSFSVKQDIVAITDWSGYSGSFVQHPELTGLDCIRPCFWVELIRGRPKESTIWTSGSSISFCGVNSDTVSWSWPDGAELPFTIDK

SEQ ID NO: 15411 - protein, 449 aa, synthetic construct; identical to SEQ ID NO: 15410
  REGION 1..449: note = neuraminidase__InfluenzaA__ABI36402

SEQ ID NO: 15412 - protein, 449 aa, synthetic construct; identical to SEQ ID NO: 15399
  REGION 1..449: note = neuraminidase__InfluenzaA__ABI36413

SEQ ID NO: 15413 - protein, 449 aa, synthetic construct
  REGION 1..449: note = neuraminidase__InfluenzaA__ABI36446
MNPNQKIITIGSICMVIGIVSLMLQIGNMISIWVSHSIQTGNQHQAESISNTNPLTEKAVASVTLAGNSSLCPIRGWAVHSKDNNIRIGSKGDVFVIREPFISCSHLECRTFFLTQGALLNDKHSNGTVKDRSPHRTLMSCPVGEAPSPYNSRFESVAWSASACHDGTSWLTIGISGPDNEAVAVLKYNGIITDTIKSWRNNILRTQESECACVNGSCFTVMTDGPSNGQASYKIFKMEKGKVVKSVELDAPNYHYEECSCYPDAGEITCVCRDNWHGSNRPWISFNQNLEYQIGYICSGVFGDNPRPNDGTGSCGPMSPNGAYGVKGFSFKYGNGVWIGRTKSTNSRSGFEMIWDPNGWTGTDSSFSVKQDIVAITDWSGYSGSFVQHPELTGLDCIRPCFWVELIRGRPKESTIWTSGSSISFCGVNSDTVSWSWPDGAELPFTIDK

SEQ ID NO: 15414 - protein, 449 aa, synthetic construct; identical to SEQ ID NO: 15403
  REGION 1..449: note = neuraminidase__InfluenzaA__ABI36457

SEQ ID NO: 15415 - protein, 449 aa, synthetic construct
  REGION 1..449: note = neuraminidase__InfluenzaA__ABI36476
MNPNQKIITIGSICMVIGIVSLMLQIGNMISIWVSHSTQKGNQHQAESISNTNPLTEKAVASVTLAGNSSLCPIRGWAVHSKDNNIRIGSKGDVFVIREPFISCSHLECRTFFLTQGALLNDKHSNGTVKDRSPHRTLMSCPVGEAPSPYNSRFESVAWSASACHDGTSWLTIGISGPDNEAVAVLKYNGIITDTIKSWRNNILRTQESECACVNGSCFTVMTDGPSNGQASYKIFKMEKGKVVKSVELDAPNYHYEECSCYPDAGEITCVCRDNWHGSNRPWVSFNQNLEYQIGYICSGVFGDNPRPNDGTGSCGPMSPNGAYGVKGFSFKYGNGVWIGRTKSTNSRSGFEMIWDPNGWTGTDSSFSVKQDIVAITDWSGYSGSFVQHPELTGLDCIRPCFWVELIRGRPKESTIWTSGSSISFCGVNSDTVSWSWPDGAELPFTIDK

SEQ ID NO: 15416 - protein, 449 aa, synthetic construct
  REGION 1..449: note = neuraminidase__InfluenzaA__ABI49409
MNPNRKIITIGSICMVIGMVSLMLQIGNMISIWVSHSIQTGNQHQAESISNTNPLTEKAVASVTLAGNSSLCPIRGWAVHSKDNNIRIGSKGDVFVIREPFISCSHLECRTFFLTQGALLNDKHSNGTVKDRSPHRTLMSCPVGEAPSPYNSRFESVAWSASACHDGTSWLTIGISGPDNEAVAVLKYNGIITDTIKSWRNNILRTQESECACVNGSCFTVMTDGPSNGQASYKIFKMEKGKVVKSVELVAPNYHYEECSCYPDAGEITCVCRDNWHGSNRPWVSFNQNLEYQIGYICSGVFGDNPRPNDGTGSCGPMSPNGAYGVKGFSFKYGNGVWIGRTKSTNSRSGFEMIWDPNGWTGTDSSFSVKQDIVAITDWSGYSGSFVQHPELTGLDCIRPCFWVELIRGRPKESTIWTSGSSISFCGVNSDTASWSWPDGAELPFTIDK

SEQ ID NO: 15417 - protein, 449 aa, synthetic construct
  REGION 1..449: note = neuraminidase__InfluenzaA__ABI49417
MNPNQKIITIGSICMVIGIVSLMLQIGNMISIWVSHSIQTGNQHQAESISNTNPLTEKAVASVTLAGNSSLCPIRGWAVHSKDNNIRIGSKGDVFVIREPFISCSHLECRTFFLTRGALLNDKHSNGTVKDRSPHRTLMSCPVGEAPSPYNSRFESVAWSASACHDGTSWLTIGISGPDNEAVAVLKYNGIITDTIKSWRNNILRTQESECACVNGSCFTVMTDGPSNGQASYKIFKMEKGKVVKSVELDAPNYHYEECSCYPDAGEITCVCRDNWHGSNRPWVSFNQNLEYQIGYICSGVFGDNPRPNDGTGSCGPMSPNGAYGVKGFSFKYGNGVWIGRTKSTNSRSGFEMIWDPNGWTGTDSSFSVKQDIVAITDWSGYSGSFVQHPELTGLDCIRPCFWVELIRGQPKESTIWTSGSSISFCGVNSDTVSWSWPDGAELPFTIDK

SEQ ID NO: 15418 - protein, 469 aa, synthetic construct
  REGION 1..469: note = neuraminidase__InfluenzaA__ABI84962
MNPNQKIITIGSVSLTIATVCFLMQIAILATTVTLHFKQHECDSPASNQVMPCEPIIIERNITEIVYLNNTTIEKEICPEVVEYRNWSKPQCQITGFAPFSKDNSIRLSAGGDIWVTREPYVSCDPGKCYQFALGQGTTLDNKHSNGTIHDRIPHRTLLMNELGVPFHLGTKQVCVAWSSSSCHDGKAWLHVCVTGDDRNATASFIYDGRLVDSIGSWSQNILRTQESECVCINGTCTVVMTDGSASGRADTRILFIKEGKIVHISPLSGSAQHIEECSCYPRYPDVRCICRDNWKGSNRPVIDINMEDYSIDSSYVCSGLVGDTPRNDDSSSNSNCRDPNNERGNPGVKGWAFDNGDDVWMGRTISKDSRSGYETFKVIGGWSTPNSKSQVNRQVIVDNNNWSGYSGIFSVEGKSCINRCFYVELIRGRPQETRVWWTSNSIVVFCGTSGTYGTGSWPDGANINFMPI

SEQ ID NO: 15419 - protein, 469 aa, synthetic construct
  REGION 1..469: note = neuraminidase__InfluenzaA__ABI85003
MNPNQKIITIGVVNTTLSTIALLIGVGNLVFNTVIHEKIGDHQIVTHPTIMTPEVPNCSDTIITYNNTVINNITTTIITEAERPFKSPLPLCPFRGFFPFHKDNAIRLGENKDVIVTREPYVSCDNDNCWSFALAQGALLGTKHSNGTIKDRTPYRSLIRFPIGTAPVLGNYKEICIAWSSSSCFDGKEWMHVCMTGNDNDASAQIIYGGRMTDSIKSWRKDILRTQESECQCIDGTCVVAVTDGPAANSADHRVYWIREGRIIKYENVPKTKIQHLEECSCYVDIDVYCICRDNWKGSNRPWMRINNETILETGYVCSKFHSDTPRPADPSIMSCDSPSNVNGGPGVKGFGFKAGNDVWLGRTVSTSGRSGFEIIKVTEGWINSPNHVKSITQTLVSNNDWSGYSGSFIVKAKDCFQPCFYVELIRGRPNKNDDVSWTSNSIVTFCGLDNEPGSGNWPDGSNIGFMPK

SEQ ID NO: 15420 - protein, 469 aa, synthetic construct; identical to SEQ ID NO: 15090
  REGION 1..469: note = neuraminidase__InfluenzaA__ABI92294

SEQ ID NO: 15421 - protein, 470 aa, synthetic construct
  REGION 1..470: note = neuraminidase__InfluenzaA__ABI92305
MNPNQKIITIGSICMAIGIISLILQIGNIISIWVSHLIQTGSQNHTGICNQRIITYENSTWVNQTYVNINNTNVVAGKDTTSVTLAGNSSLCPVRGWAIYSKDNSIRIGSKGDVFVIREPFISCSHLECRTFFLTQGALLNDKHSNGTVKDRSPYRALMSCPIGEAPSPYNSRFESVAWSASACHDGMGWLTIGISGPDDGAVAVLKYNGIITETIKSWRKRILRTQESECVCINGSCFTIMTDGPSNGPASYRIFKIEKGKITKSIELDAPNSHYEECSCYPDTGTVMCVCRDNWHGSNRPWVSFNQNLDYQIGYICSGVFGDNPRPKDGKGSCGPVTVDGADGVKGFSYRYGNGVWIGRTKSNSSRKGFEMIWDPNGWTDTDSNFLVKQDVVAMTDWSGYSGSFVQHPELTGLDCMRPCFWVELIRGRPREKTTIWTSGSSISFCGVNSDTVNWSWPDGAELPFTIDK

SEQ ID NO: 15422 - protein, 470 aa, synthetic construct
  REGION 1..470: note = neuraminidase__InfluenzaA__ABI92316
MNPNQKIITIGSISIAIGVISLILQIGNIISIWASHSIQTGSQNHTGICNQRIITYENSTWVNQTYVNINNTNVVAGKDKTSMTLAGNSSLCPIRGWAIYTKDNSIRIGSKGDVFVIREPFISCSHLECRTFFLTQGALLNDKHSNGTVKDRSPYRALMSCPLGEAPSPYNSRFESVAWSASACHDGLGWLTIGISGPDNGAVAVLKYNGIITETIKSWKKRILRTQESECVCVNGSCFTIMTDGPSNGAASYRIFKIEKGRVTKSIELDAPNYHYEECSCYPDTGTVMCVCRDNWHGSNRPWVSFNQNLDYQIGYICSGVFGDNPRPKDGEGSCNPVTVDGADGVKGFSYRYGNGVWIGRTKSNRLRKGFEMIWDPNGWTDTDSDFSMKQDIVAMTDWSGYSGSFVQHPELTGLDCMRPCFWVELVRGLPRENTTIWTSGSSISFCGVNSDTANWSWPDGAELPFTIDK

SEQ ID NO: 15423 - protein, 469 aa, synthetic construct; identical to SEQ ID NO: 15101
  REGION 1..469: note = neuraminidase__InfluenzaA__ABI92327

SEQ ID NO: 15424 - protein, 469 aa, synthetic construct
  REGION 1..469: note = neuraminidase__InfluenzaA__ABI92338
MNPNQKIITIGSVSLTIATICFLMQIAILVTTVTLHFKQYECNSPPNNQVMLCEPAIIERNITEIVYLTNTTIEKEICPKLAEYRNWSKPQCNITGFAPFSKDNSIRLSAGGDIWVTREPYVSCDPDKCYQFALGQGTTLNNGHSNDTVHDRTPYRTLLMNELGVPFHLGTRQVCIAWSSSSCHDGKAWLHVCVTGDDENATASFIYNGRLVDSIGSWSKKILRTQESECVCINGTCTVVMTDGSASGKADTKILFIEEGKIVNISTLSGSAQHVEECSCYPRYPGVRCVCRDNWKGSNRPIIDINVKDYSIVSSYVCSGLVGDTPRKNDSFSSSHCLDPNNEEGGHGVKGWAFDDGNDVWMGRTISEKLRSGYETFKVIEGWSKPNSKLQINRQVIVERGNRSGYSGIFSVEGKSCINRCFYVELIRGRKEETEVWWTSNSIVVFCGTSGTYGTGSWPDGADINLMPI

SEQ ID NO: 15425 - protein, 469 aa, synthetic construct
  REGION 1..469: note = neuraminidase__InfluenzaA__ABI92349
MNPNQKIITIGSVSLTIATICFLMQIAILVTTVTLHFKQYECNSPPNNQVMLCEPTIIERNITEIVYLTNTTIEKEICPKLAKYRNWSKPQCNITGFAPFSKDNSIRLSAGGDIWVTREPYVSCDPDKCYQFALGQGTTLNNGHSNDTVHDRTPYRTLLMNELGVPFHLGTRQVCIAWSSSSCHDGKAWLHVCVTGDDENATASFIYNGRLVDSIGSWSKKILRTQESECVCINGTCTVVMTDGSASGKADTKILFIEEGKIVHISTLSGSAQHVEECSCYPRYPGVRCVCRDNWKGSNRPIVDINVKDYSIVSSYVCSGLVGDTPRKNDSFSSSHCLDPNNEEGGHGVKGWAFDDGNDVWIGRTISEKLRSGYETFKVIEGWSKPNSKLQTNRQVIVERGNRSGYSGIFSVEGKSCINRCFYVELIRGRKEETEVWWTSNSIVVFCGTSGTYGTGSWPDGADINLMPI

SEQ ID NO: 15426 - protein, 469 aa, synthetic construct; identical to SEQ ID NO: 14327
  REGION 1..469: note = neuraminidase__InfluenzaA__ABI92360

SEQ ID NO: 15427 - protein, 469 aa, synthetic construct; identical to SEQ ID NO: 14327
  REGION 1..469: note = neuraminidase__InfluenzaA__ABI92371

SEQ ID NO: 15428 - protein, 470 aa, synthetic construct; identical to SEQ ID NO: 14386
  REGION 1..470: note = neuraminidase__InfluenzaA__ABI92382

SEQ ID NO: 15429 - protein, 469 aa, synthetic construct; identical to SEQ ID NO: 14714
  REGION 1..469: note = neuraminidase__InfluenzaA__ABI92393

SEQ ID NO: 15430 - protein, 469 aa, synthetic construct; identical to SEQ ID NO: 14327
  REGION 1..469: note = neuraminidase__InfluenzaA__ABI92404

SEQ ID NO: 15431 - protein, 469 aa, synthetic construct
  REGION 1..469: note = neuraminidase__InfluenzaA__ABI92415
MNPNQKIITIGSVSLTISTICFFMQIAILITTVTLHFKQYEFNSPPNNQVMLCEPTIIERNITEIVYLTNTTIEKEICPKLAEYRNWSKPQCDITGFAPFSKDNSIRLSAGGDIWVTREPYVSCDPDKCYQFALGQGTTLNNVHSNDTVHDRTPYRTLLMNELGVPFHLGTKQVCIAWSSSSCHDGKAWLHVCVTGDDKNATASFIYNGRLVDSIVSWSKKILRTQESECVCINGTCTVVMTDGSASGKADTKILFIEEGKIVHTSTLSGSAQHVEECSCYPRYPGVRCVCRDNWKGSNRPIVDINIKDYSIVSSYVCSGLVGDTPRKNDSSSSSHCLDPNNEEGGHGVKGWAFDDGNDVWMGRTISEKLRSGYETFKVIEGWSNPNSKLQINRQVIVDRGNRSGYSGIFSVEGKSCINRCFYVELIRGRKEETEVLWTSNSIVVFCGTSGTYGTGSWPDGADINFMPI

SEQ ID NO: 15432 - protein, 469 aa, synthetic construct; identical to SEQ ID NO: 14714
  REGION 1..469: note = neuraminidase__InfluenzaA__ABI92426

SEQ ID NO: 15433 - protein, 469 aa, synthetic construct; identical to SEQ ID NO: 14714
  REGION 1..469: note = neuraminidase__InfluenzaA__ABI92437

SEQ ID NO: 15434 - protein, 469 aa, synthetic construct; identical to SEQ ID NO: 14714
  REGION 1..469: note = neuraminidase__InfluenzaA__ABI92448

SEQ ID NO: 15435 - protein, 469 aa, synthetic construct; identical to SEQ ID NO: 14714
  REGION 1..469: note = neuraminidase__InfluenzaA__ABI92459

SEQ ID NO: 15436 - protein, 469 aa, synthetic construct
  REGION 1..469: note = neuraminidase__InfluenzaA__ABI92470
MNPNQKIITIGSVSLTIATICFLMQIAILVTTVTLHFKQYECNSPPNNQVMLCEPTIIERNITEIVYLTNTTIEKEICPKLAEYRNWSKPQCNITGFAPFSKDNSIRLSAGGDIWVTREPYVSCDPDKCYQFALGQGTTLNNGHSNDTVHDRTPYRTLLMNELGVPFHLGTKQVCIAWSSSSCHDGKAWLHVCVTGDDENATASFIYNGRLVDSIGSWSKKILRTQESECVCINGTCTVVMTDGSASEKADTKILFIEEGKIVHTSSLSGSAQHVEECSCYPRYPGVRCVCRDNWKGSNRPIVDINVKDYSIVSSYVCSGLVGDTPRKNDSSSSSHCLDPNNEEGGHGVKGWAFDDGNDVWMGRTISEKLRSGYETFKVIEGWSKPNSKLQINRQVIVDRGNRSGYSGIFSVESKSCINRCFYVELIRGRKQETEVLWTSNSIVVFCGTSGTYGTGSWPDGADINLMPI

SEQ ID NO: 15437 - protein, 469 aa, synthetic construct; identical to SEQ ID NO: 14730
  REGION 1..469: note = neuraminidase__InfluenzaA__ABI92481

SEQ ID NO: 15438 - protein, 469 aa, synthetic construct; identical to SEQ ID NO: 14730
  REGION 1..469: note = neuraminidase__InfluenzaA__ABI92492

SEQ ID NO: 15439 - protein, 469 aa, synthetic construct
  REGION 1..469: note = neuraminidase__InfluenzaA__ABI92503
MNPNQKIITIGSVSLTIATICFLMQIAILVTTVTLHFKQYECNSPPNNQVMLCEPTIIERNITEIVYLTNTTIEKEICPKLEEYRNWSKPQCNITGFAPFSKDNSIRLSAGGDIWVTREPYVSCDPDKCYQFALGQGTTLNNGHSNDTVHDRTPYRTLLMNELGVPFHLGTKQVCIAWSSSSCHDGKAWLHVCVTGDDENATASFIYNGRLVDSIGSWSKKILRTQESECVCINGTCTVVMTDGSASGKADTKILFIEEGKIVHTSSLSGSAQHVEECSCYPRYPGVRCVCRDNWKGSNRPIVDINVKDYSIVSSYVCSGLVGDTPRKNDSSSSSHCLDPNNEEGGHGVKGWAFDDGNDVWMGRTISEKLRSGYETFKVIEGWSKPNSKLQINRQVIVDRGNRSGYSGIFSVESKSCINRCFYVELIRGRKQETEVLWTSNSIVVFCGTSGTYGTGSWPDGADINLMPI

SEQ ID NO: 15440 - protein, 469 aa, synthetic construct
  REGION 1..469: note = neuraminidase__InfluenzaA__ABI92514
MNPNQKIITIGSVSLTIATICFLVQIAILVTTVTLHFKQYECNSPPNNQVMLCEPTIIERNITEIVYLTNTTIEKEICPKLAEYRNWSKPQCKITGFAPFSKDNSIRLSAGGDIWVTREPYVSCDPDKCYQFALGQGTTLNNRHSNDTVHDRTPYRTLLMNELGVPFHLGTKQVCIAWSSSSCHDGKAWLHVCVTGDDENATASFIYDGRLVDSIGSWSKKILRTQESECVCINGTCTVVMTDGSASGRADTKILFIEEGKIVHTSKLSGSAQHVEECSCYPRYPGVRCVCRDNWKGSNRPIVDINVKDYSIVSSYVCSGLVGDTPRKNDSSSSSHCLDPNNEEGGHGVKGWAFDDGDDVWMGRTISEKSRSGYETFKVIEGWSKPNSKLQINRQVIVERGNMSGYSGIFSVEGKSCINRCFYVELIRGRKQETEVWWTSNSIVVFCGTSGTYGTGSWPDGADINLMPI

SEQ ID NO: 15441 - protein, 469 aa, synthetic construct
  REGION 1..469: note = neuraminidase__InfluenzaA__ABI92525
MNPNQKIITIGSVSLTIATICFLMQIAILVTTVTLHFKQYECNSPPNNQVMLCEPTIIERNITEIVYLTNTTIEKEICPKLAEYRNWSKPQCNITGFAPFSKDNSIRLSAGGDIWVTREPYVSCDPDKCYQFALGQGTTLNNGHSNDTVHDRTPYRTLLMNELGVPFHLGTKQVCIAWSSSSCHDGKAWLHVCVTGDDENATASFIYNGRLVDSIGSWSKKILRTQESECVCINGTCTVVMTDGSASGKADTKILFIEEGKIVHISTLSGSAQHVEECSCYPRYPGVRCVCRDNWKGSNRPIVDINVKDYSIVSSYVCSGLVGDTPRKNDSFSSSHCLDPNNEEGGHGVKGWAFDDGNDVWMGRTISEKLRSGYETFKVIEGWSKPNSKLQINRQVIVERGNRSGYSGIFSVEGKSCINRCFYVELIRGRKEETEVWWTSNSIVVFCGTSGTYGTGSWPDGADINLMPI

SEQ ID NO: 15442 - protein, 469 aa, synthetic construct
  REGION 1..469: note = neuraminidase__InfluenzaA__ABI92536
MNPNQKIITIGSVSLTIATICFLMQIAILVTTVTLHFKQYECNSPPNNQVMLCEPTIIERNITEIVYLTNTTIEKEKCPKLAEYRNWSKPQCNITGFAPFSKDNSIRLSAGGDIWVTREPYVSCDPDKCYQFALGQGTTLNNGHSNDTVHDRTPYRTLLMNELGVPFHLGTRQVCIAWSSSSCHDGKAWLHVCVTGDDENATASFIYNGRLVDSIGSWSKKILRTQESECVCINGTCTVVMTDGSASGKADTKILFIEEGKIVHISTLSGSAQHVEECSCYPRYPGVRCVCRDNWKGSNRPIVDINVKDYSIVSSYVCSGLVGDTPRKNDSFSSSHCLDPNNEEGGHGVKGWAFDDGNDVWMGRTISEKLRSGYETFKVIEGWSKPNSKLQINRQVIVERGNRSGYSGIFSVEGKSCINRCFYVELIRGRKEETEVWWTSNSIVVFCGTSGTYGAGSWPDGADINLMPI

SEQ ID NO: 15443 - protein, 469 aa, synthetic construct
  REGION 1..469: note = neuraminidase__InfluenzaA__ABI92547
MNPNQKIITIGSVSLTIATICFLMQIAILVTTVTLHFKQYECNSPPNNQVMLCEPTIIERNITEIVYLTNTTIEKEMCPKLAEYRNWSKPQCNITGFAPFSKDNSIRLSAGGDIWVTREPYVSCDPDKCYQFALGQGTTLNNGHSNDTVHDRTPYRTLLMNELGVPFHLGTRQVCIAWSSSSCHDGKAWLHVCVTGDDENATASFIYNGRLVDSIGSWSKKILRTQESECVCINGTCTVVMTDGSASGKADTKILFIEEGKIVHISTLSGSAQHVEECSCYPRYPGVRCVCRDNWKGSNRPIVDINVKDYSIVSSYVCSGLVGDTPRKNDSFSSSHCLDPNNEEGGHGVKGWAFDDGNDVWMGRTISEKLRSGYETFKVIEGWSKPNSKLQINRQVIVERGNRSGYSGIFSVEGKSCINRCFYVELIRGRKEETEVWWTSNSIVVFCGTSGTYGAGSWPDGADINLMPI

SEQ ID NO: 15444 - protein, 469 aa, synthetic construct
  REGION 1..469: note = neuraminidase__InfluenzaA__ABI92558
MNPNQKIITIGSVSLTIATICFLMQIAILVTTVTLHFKQYECNSPPNNQVMLCEPTIIERNITEIVYLTNTTIEKEICPKLAEYRNWSRPQCNITGFAPFSKDNSIRLSAGGDIWVTREPYVSCDPDKCYQFALGQGTTLNNGHSNDTVHDRTPYRTLLMNELGVPFHLGTRQVCIAWSSSSCHDGKAWLHVCVTGDDENATASFIYNGRLVDSIGSWSKKILRTQESECVCINGTCTVVMTDGSASGKADTKILFIEEGKIVHISTLSGSAQHVEECSCYPRYPGVRCVCRDNWKGSNRPIVDINVKDYSIVSSYVCSGLVGDTPRKNDSFSSSHCLDPNNEEGGHGVKGWAFDDGNDVWMGRTISEKLRSGYETFKVIEGWSKPNSKLQINRQVIVERGNRSGYSGIFSVEGKSCINRCFYVELIRGRKEETEVWWTSNSIVVFCGTSGTYGTGSWPDGADINLMPI

SEQ ID NO: 15445 - protein, 469 aa, synthetic construct
  REGION 1..469: note = neuraminidase__InfluenzaA__ABI92569
MNPNQKIITIGSVSLTIATICFLMQIAILVTTVTLHFKQYECNSPPNNQVMLCEPTIIERNITEIVYLTNTTIEKEICPKLAEYRNWSKPQCNITGFAPFSKDNSIRLSAGGDIWVTREPYVSCDPDKCYQFALGQGTTLNNGHSNDTVHDRTPYRTLLMNELGVPFHLGTRQVCIAWSSSSCHDGKAWLHVCVTGDDENATASFIYNGKLVDSIGSWSKKILRTQESECVCINGTCAVVMTDGSASGKADTKILFIEEGKIVHISTLSGSAQHVEECSCYPRYPGVRCVCRDNWKGSNRPIVDINVKDYSIVSSYVCSGLVGDTPRKNDSFSSSHCLDPNNEEGGHGVKGWAFDDGNDVWMGRTISEKLRSGYETFKVIEGWSKPNSKLQTNRQVIVERGNRSGYSGIFSVEGKSCINRCFYVELIRGRKEETEVWWTSNSIVVFCGTSGTYGTGSWPDGADINLMPI

SEQ ID NO: 15446 - protein, 469 aa, synthetic construct
  REGION 1..469: note = neuraminidase__InfluenzaA__ABI92580
MNPNQKIITIGSVSLTIATICFLMQIAILVTTVTLHFKQYECNSPPNNKVMLCEPTIIERNITEIVYLTNTTIEKEICPKLAEYRNWSKPQCNITGFAPFSKDNSIRLSAGGDIWVTREPYVSCDPDKCYQFALGQGTTLNNGHSNDTVHDRTPYRTLLMNELGVPFHLGTRQVCIAWSSSSCHDGKAWLHVCVTGDDENATASFIYNGRLVDSIGSWSKKILRTQESECVCINGTCTVVMTDGSASGKADTKILFIEEGKIVHISTLSGSAQHVEECSCYPRYPGVRCVCRDNWKGSNRPIVDINVKDYSIVSSYVCSGLVGDTPRKNDSFSSSHCLDPNNEEGGHGVKGWAFDDGNDVWMGRTISEKLRSGYETFKVIEGWSKPNSKLQINRQVIVERGNRSGYSGIFSVEGKGCINRCFYVELIRGRKEETEVWWTSNSIVVFCGTSGTYGTGSWPDGADINLMPI

SEQ ID NO: 15447 - protein, 469 aa, synthetic construct
  REGION 1..469: note = neuraminidase__InfluenzaA__ABI92591
MNPNQKIITIGSVSLTIATICFLMQIAILVTTVTLHFKQYECNSPPNNQVMLCEPTIIERNITEIVYLTNTTIEKEICPKLAEYRNWSKPQCNITGFAPFSKDNSIRLSAGGDIWVTREPYVSCDPDKCYQFALGQGTTLNNGHSNDTVHDRTPYRTLLMNELGVPFHLRTRQVCIAWSSSSCHDGKAWLHVCVTGDDENATASFIYNGRLVDSIGSWSKKILRTQESECVCINGTCTVVMTDGSASGKADTKILFIEEGKIVHISTLSGSAQHVEECSCYPRYPGVRCVCRDNWKGSNRPIVDINVKDYSIVSSYVCSGLVGDTPRKNDSLSSSHCLDPNNEEGGHGVKGWAFDDGNDVWMGRTISEKLRSGYETFKVIEGWSKPNSKLQINRQVIVERGNRSGYSGIFSVEGKGCINRCFYVELIRGRKEETEVWWTSNSIVVFCGTSGTYGTGSWPDGADINLMPI

SEQ ID NO: 15448 - protein, 469 aa, synthetic construct
  REGION 1..469: note = neuraminidase__InfluenzaA__ABI92602
MNPNQKIITIGSVSLTIATICFLMQIAILVTTVTLHFKQYECNSPPNNQVMLCEPTIIERNITEIVYLTNTTIEKEICPKLAEYRNWSKPQCNITGFAPFSKDNSIRLSAGGDIWVTREPYVSCDPDKCYQFALGQGTTLNNGHSNDTVHDRTPYRTLLMNELGVPFHLGTRQVCIAWSSSSCHDGKAWLHVCVTGDDENATASLIYNGRLVDSIGSWSKKILRTQESECVCINGTCTVVMTDGSASGKADTKILFIEEGKIVHISTLSGSAQHVEECSCYPRYPGVRCVCRDNWKGSNRPIVDINVKDYSIVSSYVCSGLVGDTPRKNDSFSSSHCLDPNNEEGGHGVKGWAFDDGNDVWMGRTISEKLRSGYETFKVIEGWSKPNSKLQVNRQVIVERGNRSGYSGIFSVEGKSCINRCFYVELIRGRKEETEVWWTSNSIVVFCGTSGTYGTGSWPDGADINLMPI

SEQ ID NO: 15449 - protein, 469 aa, synthetic construct
  REGION 1..469: note = neuraminidase__InfluenzaA__ABI92613
MNPNQKIITIGSVSLTIATICFLMQIAILVTTVTLHFKQYECNSPPNNQVMLCEPTIIERNITEIVYLTNTTIEKEICPKLAEYRNWSKPQCNITGFAPFSKDNSIRLSAGGDIWVTREPYVSCDPDKCYQFALGQGTTLNNGHSNDTVHDRTPYRTLLMNELGVPFHLGTRQVCIAWSSSSCHDGKAWLHVCVTGDNENATASFIYNGKLVDSIGSWSKKILRTQESECVCINGTCAVVMTDGSASGKADTKILFIEEGKIVHISTLSGSAQHVEECSCYPRYPGVRCVCRDNWKGSNRPIVDINVKDYSIVSSYVCSGLVGDTPRKNDSFSSSHCLDPNNEEGGHGVKGWAFDDGNDVWMGRTISEKLRSGYETFKVIEGWSKPNSKLQTNRQVIVERGNRSGYSGIFSVEGKSCINRCFYVELIRGRKEETEVWWTSNSIVVFCGTSGTYGTGSWPDGADINLMPI

SEQ ID NO: 15450 - protein, 469 aa, synthetic construct
  REGION 1..469: note = neuraminidase__InfluenzaA__ABI92624
MNPNQKIITIGSVSLTIATICFLMQIAILVTTVTLHFKQYECNSPPNNQVMLCEPTIIERNITEIVYLTNTTIEKEICPKLAEYRNWSKPQCNITGFAPFSKDNSIRLSAGGDIWVIREPYVSCDPDKCYQFALGQGTTLNNGHSNDTVHDRTPYRTLLMNELGVPFHLGTRQVCIAWSSSSCHDGKAWLHVCVTGDDENATASFIYNGRLVDSIGSWSKKILRTQESECVCINGTCTVVMTDGSASGKADTKILFIEEGKIVHISTLSGSAQHVEECSCYPRYPGVRCVCRDNWKGSNRPIVDINVKDHSIVSSYVCSGLVGDTPRKNDSFSSSHCLDPNNEEGGHGVKGWAFDDGNDVWMGRTISEKLRSGYETFKVIEGWSKPNSKLQINRQVIVERGNRSGYSGIFSVEGKSCINRCFYVELIRGRKEETEVWWTSNSIVVFCGTSGTYGTGSWPDGADINLMPI

SEQ ID NO: 15451 - protein, 469 aa, synthetic construct
  REGION 1..469: note = neuraminidase__InfluenzaA__ABI92635
MNPNQKIITIGSVSLTIATICFLMQIAILVTTVTLHFKQYECNPPPNNQVMLCEPTIIERNITEIVYLTNTTIEKEICPKLAEYRNWSKPQCNLTGFAPFSKDNSIRLSAGGDIWVTREPYVSCDPDKCYQFALGQGTTLNNGHSNDTVHDRTPYRTLLMNELGVPFHLGTRQVCIAWSSSSCHDGKAWLHVCVTGDDENATASFIYNGRLVDSIGSWSKKILRTQESECVCINGTCTVVMTDGSASGKADTKIIFIEEGKIVHTSTLSGSAQHVEECSCYPRYPGVRCVCRDNWKGSNRPIVDINVKDYSIVSSYVCSGLVGDTPRKNDSFSSSHCLDPNNEEGGHGVKGWAFDDGNDVWMGRTISEKLRSGYETFKVIEGWSKPNSKLQTNRQVIVERGNRSGYSGIFSVEGKSCINRCFYVELIRGRKEETEVWWTSNSIVVFCGTSGTYGTGSWPDGADINLMPI

SEQ ID NO: 15452 - protein, 469 aa, synthetic construct; identical to SEQ ID NO: 14145
  REGION 1..469: note = neuraminidase__InfluenzaA__ABI92646

SEQ ID NO: 15453 - protein, 469 aa, synthetic construct; identical to SEQ ID NO: 14145
  REGION 1..469: note = neuraminidase__InfluenzaA__ABI92657

SEQ ID NO: 15454 - protein, 469 aa, synthetic construct
  REGION 1..469: note = neuraminidase__InfluenzaA__ABI92668
MNPNQKIITIGSVSLTIATICFLMQIAILVTTVTLHFKQHECNSPPNNQVMLCEPTIIERNITEIVYLTNTTIEKEICPKLAEYRNWSKPQCNITGFAPFSKDNSIRLSAGGDIWVTREPYVSCGPDKCYQFALGQGTTLNNGHSNDTVHDRTPYRTLLMNELGVPFHLGTRQVCIAWSSSSCHDGKAWLHVCVTGDDKNATASFIYNGRLVDSIGSWSKKILRTQESECVCINGTCTVVMTDGSASGKADTKILFIEEGKIVHISTLSGSAQHVEECSCYPRYPGVRCVCRDNWKGSNRPIVDINVKDYSIVSSYVCSGLVGDTPRKNDSFSSSHCLDPNNEEGGHGVKGWAFDDGNDVWMGRTISEKLRSGYETFKVIEGWSKPNSKLQINRQVIVERGNRSGYSGIFSVEGKSCINRCFYVELIRGRKEETEVWWTSNSIVVFCGTSGTYGTGSWPDGADINLMPI

SEQ ID NO: 15455 - protein, 469 aa, synthetic construct; identical to SEQ ID NO: 14591
  REGION 1..469: note = neuraminidase__InfluenzaA__ABI92679

SEQ ID NO: 15456 - protein, 469 aa, synthetic construct; identical to SEQ ID NO: 14145
  REGION 1..469: note = neuraminidase__InfluenzaA__ABI92701

SEQ ID NO: 15457 - protein, 469 aa, synthetic construct
  REGION 1..469: note = neuraminidase__InfluenzaA__ABI92712
MNPNQKIITIGSVSLTIATICFLMQIAILVTTVTLHFKQHECNSPPNNQAMLCEPTTTERNTTEIVYLTNTTIEKEICPKLVEYRNWSKPQCNITGFAPFSKDNSIRLSAGGDIWVTREPYVSCDPDKCYQFALGQGTTLNNGHSNDTVHDRTPYRTLLMNELGVPFHLGTRQVCIAWSSSSCHDGKAWLHVCVTGDDKNATASFIYNGRLVDSIGSWSKKILRTQESECVCINGTCTVVMTDGSASGKADTKILFIEEGKIVHISTLSGSAQHVEECSCYPRYPGVRCVCRDNWKGSNRPIVDINVKDYSIVSSYVCSGLVGDTPRKNDSFSSSHCLDPNNEEGGHGVKGWAFDDGNDVWMGRTISEKLRSGYETFKVIEGWSKPNSKLQINRQVIVERGNRSGYSGIFSVEGKSCINRCFYVELIRGRKEETEVWWTSNSIVVFCGTSGTYGTGSWPDGADINLMPI

SEQ ID NO: 15458 - protein, 469 aa, synthetic construct
  REGION 1..469: note = neuraminidase__InfluenzaA__ABI92723
MNPNQKIITIGSVSLTIATICFLMQIAILVTTVTLHFKQHECNSPPNNQVMLCEPTIIERNITEIVYLTNTTIEKEICPKLVEYRNWSKPQCNITGFAPFSKDNSIRLSAGGDIWVTREPYVSCDPDKCYQFALGQGTTLNNGHSNDTVHDRTPYRTLLMNELGVPFHLGTKQVCIAWSSSSCHDGKAWLHVCVTGDDKNATASFIYNGRLVDSIGSWSKKILRTQESECVCINGTCTVVMTDGSASGKADTKILFIEEGKIVHISTLSGSAQHVEECSCYPRYPGVRCVCRDNWKGSNRPIVDINVKDYSIVSSYVCSGLVGDTPRKNDSFSSSHCLDPNNEEGGHGVKGWAFDDGNDVWMGRTISEKLRSGYETFKVIEGWSKPNSKLQINRQVIVERGNRSGYSGIFSVEGKSCINRCFYVELIRGRKEETEVWWTSNSIVVFCGTSGTYGTGSWPDGADINLMPI

SEQ ID NO: 15459 - protein, 469 aa, synthetic construct; identical to SEQ ID NO: 14145
  REGION 1..469: note = neuraminidase__InfluenzaA__ABI92734

SEQ ID NO: 15460 - protein, 469 aa, synthetic construct; identical to SEQ ID NO: 14591
  REGION 1..469: note = neuraminidase__InfluenzaA__ABI92745

SEQ ID NO: 15461 - protein, 469 aa, synthetic construct
  REGION 1..469: note = neuraminidase__InfluenzaA__ABI92756
MNPNQKIITIGSVSLTIATICFLMQIAILVTTVTLHFKQHECNSPPNNQVILCEPTIIERNITEIVYLTNTTIEKEICPKLAEYRNWSKPQCNITGFAPFSKDNSIRLSAGGDIWVTREPYVSCDPDKCYQFALGQGTTLNNGHSNDTVHDRTPYRTLLMNELGVPFHLGTRQVCIAWSSSSCHDGKAWLHVCVTGDDKNATASFIYNGRLVDSIGSWSKKILRTQESECVCINGTCTVVMTDGSASGKADTKILFIEEGKIVHISTLSGSAQHVEECSCYPRYPGVRCVCRDNWKGSNRPIVDINVKDYSIVSSYVCSGLVGDTPRKNDSFSSSHCLDPNNEEGGHGVKGWAFDDGNDVWMGRTISEKLRSGYETFKVIEGWSKPNSKLQINRQVIVERGNRSGYSGIFSVEGKSCINRCFYVELIRGRKEETEVWWTSNSIVVFCGTSGTYGTGSWPDGADINLMPI

SEQ ID NO: 15462 - protein, 469 aa, synthetic construct
  REGION 1..469: note = neuraminidase__InfluenzaA__ABI92767
MNPNQKIITIGSVSLTIATICFLMQIAILVTTVTLHFKQHECNSPPNNQVMLCEPTIIERNITEIVYLTNTTIEKEICPKLAEYRNWSKPQCNITGFAPFSKDNSIRLSAGGDIWVTREPYVSCDPDKCYQFALGQGTTLNNGHSNDTVHDRTPYRTLLMNELGVPFHLGTRQVCIAWSSSSCHDGKAWLHVCVTGDDKNATASFIYNGRLVDSIGSWSKKILRTQESECVCINGTCTVVMTDGSASGKADTKILFIEEGKIVHISTLSGSAQHVEECSCYPRYPGVRCVCRDNWKGSNRPIVDINVKDYSIVSSYVCSGLVGDTPRKNDSFSSSHCLDPNNEEGGHGVKGWAFDDGNDVWMGRTISEKLRSGYETFKVIEGWSKPNSKLQINRQVIVERGNRSGYSGIFSVEGKSCINRCFYVELIRGRKEKTEVWWTSNSIVVFCGTSGTYGTGSWPDGADINLMPI

SEQ ID NO: 15463 - protein, 469 aa, synthetic construct; identical to SEQ ID NO: 14145
  REGION 1..469: note = neuraminidase__InfluenzaA__ABI92778

SEQ ID NO: 15464 - protein, 469 aa, synthetic construct; identical to SEQ ID NO: 14327
  REGION 1..469: note = neuraminidase__InfluenzaA__ABI92789

SEQ ID NO: 15465 - protein, 469 aa, synthetic construct; identical to SEQ ID NO: 14327
  REGION 1..469: note = neuraminidase__InfluenzaA__ABI92800

SEQ ID NO: 15466 - protein, 469 aa, synthetic construct; identical to SEQ ID NO: 14327
  REGION 1..469: note = neuraminidase__InfluenzaA__ABI92811

SEQ ID NO: 15467 - protein, 469 aa, synthetic construct; identical to SEQ ID NO: 14327
  REGION 1..469: note = neuraminidase__InfluenzaA__ABI92822

SEQ ID NO: 15468 - protein, 469 aa, synthetic construct; identical to SEQ ID NO: 14327
  REGION 1..469: note = neuraminidase__InfluenzaA__ABI92844

SEQ ID NO: 15469 - protein, 469 aa, synthetic construct; identical to SEQ ID NO: 14327
  REGION 1..469: note = neuraminidase__InfluenzaA__ABI92855

SEQ ID NO: 15470 - protein, 469 aa, synthetic construct
  REGION 1..469: note = neuraminidase__InfluenzaA__ABI92866
MNPNQKIITIGSASLTIATICFLIQIAILVTTVTLHFKQHECNSLPNNQVMLCEPTIIERNITEIVYLTNTTIEKEICPKLAEYRNWSKPQCNITGFAPFSKDNSIRLSAGGDIWVTREPYVSCDPDKCYQFALGQGTTLNNGHSNDTVHDRTPYRTLLMNELGVPFHLGTRQVCIAWSSSSCHDGKAWLHVCVTGDDKNATASFIYNGRLVDSISSWSKKILRTQESECVCINGTCTVVMTDGSASGKADTKILFIEEGKIIHISTLSGSAQHVEECSCYPRYPGVRCVCRDNWKGSNRPIVDINVKDYSIVSSYVCSGLVGDTPRKNDSFSSSHCLDPNNEEGGHGVKGWAFDDGNDVWMGRTISEKLRSGYETFKVIEGWSNPNSKLQINRQVIVERGNRSGYSGIFSVEGKSCINRCFYVELIRGRKEETEVWWTSNSIVVFCGTSGTYGTGSWPDGADINLMPI

SEQ ID NO: 15471 - protein, 469 aa, synthetic construct; identical to SEQ ID NO: 14327
  REGION 1..469: note = neuraminidase__InfluenzaA__ABI92877

SEQ ID NO: 15472 - protein, 469 aa, synthetic construct; identical to SEQ ID NO: 14327
  REGION 1..469: note = neuraminidase__InfluenzaA__ABI92888

SEQ ID NO: 15473 - protein, 469 aa, synthetic construct; identical to SEQ ID NO: 14327
  REGION 1..469: note = neuraminidase__InfluenzaA__ABI92899

SEQ ID NO: 15474 - protein, 469 aa, synthetic construct; identical to SEQ ID NO: 14327
  REGION 1..469: note = neuraminidase__InfluenzaA__ABI92910

SEQ ID NO: 15475 - protein, 469 aa, synthetic construct; identical to SEQ ID NO: 14327
  REGION 1..469: note = neuraminidase__InfluenzaA__ABI92921

SEQ ID NO: 15476 - protein, 469 aa, synthetic construct; identical to SEQ ID NO: 14327
  REGION 1..469: note = neuraminidase__InfluenzaA__ABI92932

SEQ ID NO: 15477 - protein, 469 aa, synthetic construct; identical to SEQ ID NO: 14714
  REGION 1..469: note = neuraminidase__InfluenzaA__ABI92943

SEQ ID NO: 15478 - protein, 469 aa, synthetic construct; identical to SEQ ID NO: 14714
  REGION 1..469: note = neuraminidase__InfluenzaA__ABI92954

SEQ ID NO: 15479 - protein, 469 aa, synthetic construct
  REGION 1..469: note = neuraminidase__InfluenzaA__ABI92965
MNPNQKIITIGSVSLTISTICFFMQIAILITTVTLHFKQYEFNSPPNNQVMLCEPTIIERNITEIVYLTNTTIEKEICPKLAEYRNWSKPQCDITGFAPFSKDNSIRLSAGGDIWVTREPYVSCDPDKCYQFALGQGTTLNNVHSNDTVHDRTPYRTLLMNELGVPFHLGTKQVCIAWSSSSCHDGKAWLHVCVTGDDKNATASFIYNGRLVDSIVSWSKKILRTQESECVCINGTCTVVMTDGSASGKADTKILFIEEGKIVHTSTLSGSAQHVEECSCYPRYPGVRCVCRDNWKGSNRPIVDINIKDYSIVSSYVCSGLVGDTPRKNDRSSSSHCLDPNNEEGGHGVKGWAFDDGNDVWMGRTISEKLRSGYETFKVIEGWSNPNSKLQINRQVIVDRGNRSGYSGIFSVEGKSCINRCFYVELIRGRKEETEVLWTSNSIVVFCGTSGTYGTGSWPDGADINLMPI

SEQ ID NO: 15480 - protein, 469 aa, synthetic construct; identical to SEQ ID NO: 14714
  REGION 1..469: note = neuraminidase__InfluenzaA__ABI92976

SEQ ID NO: 15481 - protein, 469 aa, synthetic construct; identical to SEQ ID NO: 14714
  REGION 1..469: note = neuraminidase__InfluenzaA__ABI92987

SEQ ID NO: 15482 - protein, 469 aa, synthetic construct; identical to SEQ ID NO: 14714
  REGION 1..469: note = neuraminidase__InfluenzaA__ABI92998

SEQ ID NO: 15483 - protein, 469 aa, synthetic construct; identical to SEQ ID NO: 14918
  REGION 1..469: note = neuraminidase__InfluenzaA__ABI93009

SEQ ID NO: 15484 - protein, 469 aa, synthetic construct; identical to SEQ ID NO: 14714
  REGION 1..469: note = neuraminidase__InfluenzaA__ABI93020

SEQ ID NO: 15485 - protein, 470 aa, synthetic construct; identical to SEQ ID NO: 15356
  REGION 1..470: note = neuraminidase__InfluenzaA__ABI93031

SEQ ID NO: 15486 - protein, 469 aa, synthetic construct; identical to SEQ ID NO: 15111
  REGION 1..469: note = neuraminidase__InfluenzaA__ABI93042

SEQ ID NO: 15487 - protein, 469 aa, synthetic construct; identical to SEQ ID NO: 14284
  REGION 1..469: note = neuraminidase__InfluenzaA__ABI93053

SEQ ID NO: 15488 - protein, 469 aa, synthetic construct
  REGION 1..469: note = neuraminidase__InfluenzaA__ABI93064
MNPNQKIITIGSVSLTIATICFLMQIAILVTTVTLHFKQYECNSPPNNQVMLCEPTIIERNITEIVYLTNTTIEKEICPKLAEYRNWSKPQCKITGFAPFSKDNSIRLSAGGDIWVTREPYVSCDPDKCYQFALGQGTTLNNRHSNDTVHDRTPYRTLLMNELGVPFHLGTKQVCIAWSSSSCHDGKAWLHVCVTGHDENATASFIYDGRLVDSIGSWSKKILRTQESECVCINGTCTVVMTDGSASGRADTKILFIEEGKIVHTSKLSGSAQHVEECSCYPRYPGVRCVCRDNWKGSNRPIVDINVKDYSIVSSYVCSGLVGDTPRKNDSSSSSHCLDPNNEEGGHGVKGWAFDDGNDVWMGRTISEKSRSGYETFKVIEGWSKPNSKLQINRQVIVERGNRSGYSGIFSVEGKSCINRCFYVELIRGRKQETEVWWTSNSIVVFCGTSGTYGTGSWPDGADINLMPI

SEQ ID NO: 15489 - protein, 469 aa, synthetic construct; identical to SEQ ID NO: 14730
  REGION 1..469: note = neuraminidase__InfluenzaA__ABI93075

SEQ ID NO: 15490 - protein, 469 aa, synthetic construct; identical to SEQ ID NO: 14730
  REGION 1..469: note = neuraminidase__InfluenzaA__ABI93086

SEQ ID NO: 15491 - protein, 469 aa, synthetic construct; identical to SEQ ID NO: 14730
  REGION 1..469: note = neuraminidase__InfluenzaA__ABI93097

SEQ ID NO: 15492 - protein, 469 aa, synthetic construct
  REGION 1..469: note = neuraminidase__InfluenzaA__ABI93108
MNPNQKIITIGSVSLTIATICFLMQIAILVTTVTLHFKQYECNSPPNNQVMLCEPTIIERNITEIVYLTNTTIEKEICPKLAEYRNWSKPQCNITGFAPFSKDNSIRLSAGGDIWVTREPYVSCDPDKCYQFALGQGTTLNNGHSNDTVHDRTPYRTLLMNELGVPFHLGTKQVCIAWSSSSCHDGKAWLHVCVTGDDENATASFIYNGRLVDSIGSWSKKILRTQESECVCINGTCTVVMTDGSASGKADTKILFIEEGKIVHTSSLSGSAQHVEECSCYPRYPGVRCVCRDNWKGSNRPIVDINVNDYSIVSSYVCSGLVGDTPRKNDSSSSSHCLDPNNEEGGHGVKGWAFDDGNDVWMGRTISEKLRSGYETFKVIEGWSKPNSKLQINRQVIVDRGNRSGYSGIFSVESKSCINRCFYVELIRGRKQETEVLWTSNSIVVFCGTSGTYGTGSWPDGADINLMPI

SEQ ID NO: 15493 - protein, 469 aa, synthetic construct
  REGION 1..469: note = neuraminidase__InfluenzaA__ABI93119
MNPNQKIITIGSVSLTIATICFLMQIAILVTTVTLHFKQYECNSPPNNQVMLCEPTIIERNITEIVYLTNTTIEKEICPKLAEYRNWSKPQCNITGFAPFSKDNSIRLSAGGDIWVTREPYVSCDPDKCYQFALGQGTTLNNGHSNDTVHDRTPYRTLLMNELGVPFHLGTKQVCIAWSSSSCHDGKAWLHVCVTGDDENATASFIYNGRLVDSIGSWSKKILRTQESECVCINGTCTVVMTDGSASGKADTKILFIEEGKIVHTSSLSGSAQHVEECSCYPRYPGVRCVCRDNWKGSNRPIVDINVKDYSIVSSYVCSGLVGDTPRKNDNSSSSHCLDPNNEEGGHGVKGWAFDDGNDVWMGRTISEKLRSGYETFKVIEGWSKPNSKLQINRQVIVDRSNRSGYSGIFSVESKSCINRCFYVELIRGRKQETEVLWTSNSIVVFCGTSGTYGTGSWPDGADINLMPI

SEQ ID NO: 15494 - protein, 471 aa, synthetic construct
  REGION 1..471: note = neuraminidase__InfluenzaA__ABI94584
MNPNQKLFALSGVAIALSVLNLLIGISNVGLNVSLHLKEKGPKQEENLTCTTINQNNTTVVENTYVNNTTIITKGTDLKTPSYLLLNKSLCNVEGWVVIAKDNAVRFGESEQIIVTREPYVSCDPTGCKMYALHQGTTIRNKHSNGTIHDRTAFRGLISTPLGTPPTVSNSDFMCVGWSSTTCHDGIARMTICIQGNNDNATATVYYNRRLTTTIKTWARNILRTQESECVCHNGTCAVVMTDGSASSQAYTKVMYFHKGLVVKEEELRGSARHIEECSCYGHNQKVTCVCRDNWQGANRPIIEIDMSTLEHTSRYVCTGILTDTSRPGDKSSGDCSNPITGSPGVPGVKGFGFLNGDNTWLGRTISPRSRSGFEMLKIPNAGTDPNSRIAERQEIVDNNNWSGYSGSFIDYWNDNSECYNPCFYVELIRGRPEEAKYVWWASNSLIALCGSPFPVGSGSFPDGAQIQYFS

SEQ ID NO: 15495 - protein, 470 aa, synthetic construct; identical to SEQ ID NO: 14828
  REGION 1..470: note = neuraminidase__InfluenzaA__ABI95220

SEQ ID NO: 15496 - protein, 469 aa, synthetic construct
  REGION 1..469: note = neuraminidase__InfluenzaA__ABI95242
MNPNQKIITIGSVSLTISTICFFMQIAILITTVTLHFKQYEFNSPPNNQVMLCEPTIIERNITEIVYLTNTTIEKEICPKLAEYRNWSKPQCDITGFAPFSKDNSIRLSAGGDIWVTREPYVSCDPDKCYQFALGQGTTLNNVHSNDTVHGRTPYRTLLMNELGVPFHLGTKQVCIAWSSSSCHDGKAWLHVCVTGDDKNATASFIYNGRLVDSIVSWSKEILRTQESECVCINGTCTVVMTDGSASGEADTKILFIEEGKIVHTSTLSGSAQHVEECSCYPRYPGVRCVCRDNWKGSNRPIVDINIKDYSIVSSYVCSGLVGDTPRKNDSSSSSHCLDPNNEEGGHGVKGWAFDDGNDVWMGRTISEKLRSGYETFKVIEGWSNPNSKLQINRQVIVDRGNRSGYSGIFSVEGKSCINRCFYVELIRGRKEETEVLWTSNSIVVFCGTSGTYGTGSWPDGADINLMPI

SEQ ID NO: 15497 - protein, 470 aa, synthetic construct
  REGION 1..470: note = neuraminidase__InfluenzaA__ABI95253
MNPNQKIITIGSISIAIGIISIMLQIGNIISIWASHSIQTGSQNHTGICNQRIITYENSTWVNHTYVNINNTNVVAGKDKTSVTLAGNSSLCSISGWAIYTKDNSIRIGSKGDVFVIREPFISCSHLECRTFFLTQGALLNDKHSNGTVKDRSPYRALMSCPLGEAPSPYNSKFESVAWSASACHDGMGWLTIGISGPDNGAVAVLKYNGIITETIKSWKKRILRTQESECVCVNGSCFTIMTDGPSDGAASYKIFKIEKGKVTKSIELNAPNSHYEECSCYPDTGTVMCVCRDNWHGSNRPWVSFNQNLDYQIGYICSGVFGDNPRPKDGEGSCNPVTVDGADGVKGFSYKYGNGVWIGRTKSNRLRKGFEMIWDPNGWTDTDSDFSVKQDVVAITDWSGYSGSFVQHPELTGLDCIRPCFWVELVRGRPRENTTIWTSGSSISFCGVNSDTANWSWPDGAELPFTIDK

SEQ ID NO: 15498 - protein, 470 aa, synthetic construct; identical to SEQ ID NO: 15356
  REGION 1..470: note = neuraminidase__InfluenzaA__ABI95264

SEQ ID NO: 15499 - protein, 470 aa, synthetic construct; identical to SEQ ID NO: 15356
  REGION 1..470: note = neuraminidase__InfluenzaA__ABI95275

SEQ ID NO: 15500 - protein, 470 aa, synthetic construct; identical to SEQ ID NO: 15356
  REGION 1..470: note = neuraminidase__InfluenzaA__ABI95286

SEQ ID NO: 15501 - protein, 470 aa, synthetic construct
  REGION 1..470: note = neuraminidase__InfluenzaA__ABI95297
MNPNQKIITIGSISIAIGIISLMLQIGNIISIWASHSIQTGSQNHTGVCNQRIITYENSTWVNHTYVNINNTNVIAGKDKTSVTLAGNSSLCSISGWAIYTKDNSIRIGSKGDVFVIREPFISCSHLECRTFFLTQGALLNDKHSNGTVKNRSPYRALMSCPLGEAPSPYNSKFESVAWSASACHDGMGWLTIGISGPDNGAVAVLKYNGIITETIKSWKKQILRTQESECVCVNGSCFTIMTDGPSNGAASYKIFKIEKGKVTKSIELNAPNFHYEECSCYPDTGTVMCVCRDNWHGSNRPWVSFNQNLDYQIGYICSGVFGDNPRPKDGEGSCNPVTVDGANGVKGFSYKYGNGVWIGRTKSNRLRKGFEMIWDPNGWTDTDSDFSVKQDVVAITDWSGYSGSFVQHPELTGLDCIRPCFWVELVRGLPKENTTIWTSGSSISFCGVNSDTANWSWPDGAELPFTIDK

SEQ ID NO: 15502 - protein, 469 aa, synthetic construct; identical to SEQ ID NO: 14730
  REGION 1..469: note = neuraminidase__InfluenzaA__ABI95308

SEQ ID NO: 15503 - protein, 470 aa, synthetic construct; identical to SEQ ID NO: 14386
  REGION 1..470: note = neuraminidase__InfluenzaA__ABI96131

SEQ ID NO: 15504 - protein, 470 aa, synthetic construct; identical to SEQ ID NO: 14386
  REGION 1..470: note = neuraminidase__InfluenzaA__ABI96133

SEQ ID NO: 15505 - protein, 470 aa, synthetic construct; identical to SEQ ID NO: 14386
  REGION 1..470: note = neuraminidase__InfluenzaA__ABI96136

SEQ ID NO: 15506 - protein, 469 aa, synthetic construct
  REGION 1..469: note = neuraminidase__InfluenzaA__ABJ09110
MNPNQKIITIGSVSLTIATICFLMQIAILVTTVTLHFKQYECNSPPNNQVMLCEPTIIERNITEIVYLTNTTIEKEICPKLAEYRNWSKPQCNITGFAPFSKDNSIRLSAGGDIWVTREPYVSCDPDKCYQFALGQGTTLNNGHSNDTVHDRTPYRTLLMNELGVPFHLGTKQVCIAWSSSSCHDGKAWLHVCVTGDDENATASFIYNGRLVDSIGSWSKKILRTQESECVCINGTCTVVMTDGSASGKADTKILFIEEGKIIHTSSLSGSAQHVEECSCYPRYPGVRCVCRDNWKGSNRPIVDINVKDYSIVSSYVCSGLVGDTPRKNDSSSSSHCLDPNNEEGGHGVKGWAFDDGNDVWMGRTISEKLRSGYETFKVIEGWSKPNSKLQINRQVIVDRGNRSGYSGIFSVESKSCINRCFYVELIRGRKQETEVLWTSNSIVVFCGTSGTYGTGSWPDGADINLMPI

SEQ ID NO: 15507 - protein, 469 aa, synthetic construct; identical to SEQ ID NO: 15101
  REGION 1..469: note = neuraminidase__InfluenzaA__ABJ09143

SEQ ID NO: 15508 - protein, 470 aa, synthetic construct; identical to SEQ ID NO: 14925
  REGION 1..470: note = neuraminidase__InfluenzaA__ABJ09154

SEQ ID NO: 15509 - protein, 469 aa, synthetic construct; identical to SEQ ID NO: 14327
  REGION 1..469: note = neuraminidase__InfluenzaA__ABJ09165

SEQ ID NO: 15510 - protein, 469 aa, synthetic construct; identical to SEQ ID NO: 14327
  REGION 1..469: note = neuraminidase__InfluenzaA__ABJ09176

SEQ ID NO: 15511 - protein, 469 aa, synthetic construct; identical to SEQ ID NO: 14714
  REGION 1..469: note = neuraminidase__InfluenzaA__ABJ09198

SEQ ID NO: 15512 - protein, 469 aa, synthetic construct; identical to SEQ ID NO: 14714
  REGION 1..469: note = neuraminidase__InfluenzaA__ABJ09209

SEQ ID NO: 15513 - protein, 469 aa, synthetic construct
  REGION 1..469: note = neuraminidase__InfluenzaA__ABJ09220
MNPNQKIITIGSVSLTIATICFLMQIAILVTTVTLHFKQYECNSPPNNQVMLCEPTIIERNITEIVYLTNTTIEKEICPKLAKYRNWSKPQCKITGFAPFSKDNSIRLSAGGDIWVTREPYVSCDPGKCYQFALGRGTTLNNRHSNDTVHDRTPYRTLLMNELGVPFHLGTKQVCIAWSSSSCHDGKAWLHVCVTGHDENATASFIYDGRLVDSIGSWSKNILRTQESECVCINGTCTVVMTDGSASERADTKILFIEEGKIVHISPLSGSAQHVEECSCYPRYPGVRCVCRDNWKGSNRPIVDINVKDYSIVSSYVCSGLVGDTPRKNDSSSSSYCRNPNNEKGSHGVKGWAFDDGNDVWMGRTISEELRSGYETFKVIGGWSKPNSKLQINRQVIVDRGNRSGYSGIFSVEGKSCINRCFYVELIRGRKQETEVWWTSNSIVVFCGTSGTYGTGSWPDGADINLMPI

SEQ ID NO: 15514 - protein, 469 aa, synthetic construct; identical to SEQ ID NO: 14730
  REGION 1..469: note = neuraminidase__InfluenzaA__ABJ09231

SEQ ID NO: 15515 - protein, 469 aa, synthetic construct; identical to SEQ ID NO: 14730
  REGION 1..469: note = neuraminidase__InfluenzaA__ABJ09242

SEQ ID NO: 15516 - protein, 469 aa, synthetic construct; identical to SEQ ID NO: 14284
  REGION 1..469: note = neuraminidase__InfluenzaA__ABJ09253

SEQ ID NO: 15517 - protein, 469 aa, synthetic construct
  REGION 1..469: note = neuraminidase__InfluenzaA__ABJ09264
MNPNQKIITIGSVSLTIATICFLMQIAILVTTVTLHFKQYECNSPPNNQVMLCEPTIIERNITEIVYMTNTTIEKEICPKLAEYRNWSKPQCNITGFAPFSKDNSIRLSAGGDIWVTREPYVSCDPDKCYQFALGQGTTLNNRHSNDTVHDRTPYRTLLMNELGVPFHLGTKQVCIAWSSSSCHDGKAWLHVCVTGHDENATASFIYNGRLVDSIGSWSKKILRTQESECVCINGTCTVVMTDGSASGKADTKILFIEEGKIVHISPLSGSAQHVEECSCYPRYPGVRCVCRDNWKGSNRPIVDINVKDYSIVSSYVCSGLVGDTPRKNDSSSSSHCLNPNNEEGGHGVKGWAFDDGNDVWMGRTISEKLRSGYETFKVIEGWSKPNSKLQINRQVIVDRGNSSGYSGIFSVEGKSCINRCFYVELIRGRKQETEVWWTSNSIVVLCGTSGTYGTGSWPDGADINLMPI

SEQ ID NO: 15518 - protein, 469 aa, synthetic construct
  REGION 1..469: note = neuraminidase__InfluenzaA__ABJ09286
MNPNQKIITIGSVSLTIATICFLMQIAILVTTVTLHFKQYECNSPPNNQVMLCEPTIIERNITEIVYLTNTTIEKEICPKLAEYRNWSKPQCNITGFAPFSKDNSIRLSAGGDIWVTREPYVSCDPDKCYQFALGQGTTLNNGHSNDTVHDRTPYRTLLMNELGVPFHLGTKQVCIAWSSSSCHDGKAWLHVCVTGDDENATASFIYNGRLVDSIGSWSKKILRTQESECVCINGTCTVVMTDGSASGKADTKILFIEEGKIVHTSPLSGSAQHVEECSCYPRYPGVRCVCRDNWKGSNRPIVDINVKDYSIVSSYVCSGLVGDTPRKNDSSSSSHCLDPNNEEGGHGVKGWAFDDGNDVWMGRTISEKLRSGYETFKVIEGWSKPNSKLQINKQVIVDRGNRSGYSGIFSVEGKSCINRCFYVELIRGRKQETEVLWTSNSIVVFCGTSGTYGTGSWPDGADINLMPI

SEQ ID NO: 15519 - protein, 469 aa, synthetic construct; identical to SEQ ID NO: 14284
  REGION 1..469: note = neuraminidase__InfluenzaA__ABJ09308

SEQ ID NO: 15520 - protein, 469 aa, synthetic construct; identical to SEQ ID NO: 15488
  REGION 1..469: note = neuraminidase__InfluenzaA__ABJ09319

SEQ ID NO: 15521 - protein, 470 aa, synthetic construct; identical to SEQ ID NO: 14953
  REGION 1..470: note = neuraminidase__InfluenzaA__ABJ09330

SEQ ID NO: 15522 - protein, 469 aa, synthetic construct
  REGION 1..469: note = neuraminidase__InfluenzaA__ABJ09341
MNPNQKIITIGSVSLTIATICFLMQIAILVTTVTLHFKQYECNSPPNNQVMLCEPTIIERNITEIVYLTNTTIEKEICPKLAEYRNWSKPQCNITGFAPFSKDNSIRLSAGGDIWVTREPYVSCDPDKCYQFALGQGTTLNNGHSNDTVHDRTPYRTLLMNELGVPFHLGTKQVCIAWSSSSCHDGKAWLHVCVTGDDENATASFIYNGRLVDSIGSWSKKILRTQESECVCINGTCTVVMTDGSASGKADTKILFIEEGKIVHTSSLLGSAQHVEECSCYPRYPGVRCVCRDNWKGSNRPIVDINVKDYSIVSSYVCSGLVGDTPRKNDSSSSSHCLDPNNEEGGHGVKGWAFDDGNDVWMGRTISEKLRSGYETFKVIEGWSKPNSKLQINRQVIVDRGNRSGYSGIFSVESKSCINRCFYVELIRGRKQETEVLWTSNSIVVFCGTSGTYGTGSWPDGADINLMPI

SEQ ID NO: 15523 - protein, 469 aa, synthetic construct
  REGION 1..469: note = neuraminidase__InfluenzaA__ABJ09352
MNPNQKIITIGSVSLTIATICFLMQIAILVTTVTLHFKQYECNSPPNNQVMLCEPTIIERNITEIVYLTNTTIEKEICPKLAEYRNWSKPQCNITGFAPFSKDNSIRLSAGGDIWVTREPYVSCDPDKCYQFALGQGTTLNNGHSNDTVHGRTPYRTLLMNELGVPFHLGTKQVCIAWSSSSCHDGKAWLHVCVTGDDENATASFIYNGRLVDSIGSWSKKILRTQESECVCINGTCTVVMTDGSASGKADTKILFIEEGKIVHTSSLSGSAQHVEECSCYPRYPGVRCVCRDNWKGSNRPIVDINVKDYSIVSSYVCSGLVGDTPRKNDSSSSSHCLDPNNEEGGHGVKGWAFDDGNDVWMGRTISEKLRSGYETFKVIEGWSKPNSKLQINRQVIVDRGNRSGYSGIFSVESKSCINRCFYVELIRGRKQETEVLWTSNSIVVFCGTSGTYGTGSWPDGADINLMPI

SEQ ID NO: 15524 - protein, 468 aa, synthetic construct
  REGION 1..468: note = neuraminidase__InfluenzaA__ABJ09374
MIQSKIITIGSVSLTISTICFFMQIAILITTVTLHFKQYEFNSPPNNQVMLCEPTIIERNITEIVYLTNTTIEKEICPKLAEYRNWSKPQCDITGFAPFSKDNSIRLSAGGDIWVTREPYVSCDPDKCYQFALGQGTTLNNVHSNDTVHDRTPYRTLLMNELGVPFHLGTKQVCIAWSSSSCHDGKAWLHVCVTGDDKNATASFIYNGRLVDSIVSWSKKILRTQESECVCINGTCTVVMTDGSASGKADTKILFIEEGKIVHTSTLSGSAQHVEECSCYPRYPGVRCVCRDNWKGSNRPIVDINIKDYSIVSSYVCSGLVGDTPRKNDSSSSSHCLDPNNEEGGHGVKGWAFDDGNDVWMGRTISEKLRSGYETFKVIEGWSNPNSKLQINRQVIVDRGNRSGYSGIFSVEGKSCINRCFYVELIRGKKEETEVLWTSNSIVVFCGTSGTYGTGSWPDGADINLMPI

SEQ ID NO: 15525 - protein, 469 aa, synthetic construct; identical to SEQ ID NO: 14714
  REGION 1..469: note = neuraminidase__InfluenzaA__ABJ09385

SEQ ID NO: 15526 - protein, 469 aa, synthetic construct; identical to SEQ ID NO: 14253
  REGION 1..469: note = neuraminidase__InfluenzaA__ABJ16590

SEQ ID NO: 15527 - protein, 469 aa, synthetic construct; identical to SEQ ID NO: 15518
  REGION 1..469: note = neuraminidase__InfluenzaA__ABJ16601

SEQ ID NO: 15528 - protein, 470 aa, synthetic construct
  REGION 1..470: note = neuraminidase__InfluenzaA__ABJ16612
MNPNQKIITIGSISIAIGIISLMLQIGNIISIWASHSIQTGSQNHTGVCNQRIITYENSTWVNHTYVNINNTNVVAGKDKTSVTLAGNSSLCSISGWAIYTKDNSIRIGSKGDVFVIREPFISCSHLECRTFFLTQGALLNDKHSNGTVKDRSPYRALMSCPLGEAPSPYNSKFESVAWSASACHDGMGWLTVGISGPDNGAVAVLKYNGIITETIKSWKKRILRTQESECVCVNGSCFTIMTDGPSNGAASYKIFKIEKGKVTKSIELNAPNFHYEECSCYPDTGTVMCVCRDNWHGSNRPWVSFNQNLDYQIGYICSGVFGDNPRPKDGEGSCNPVTVDGADGVKGFSYKYGNGVWIGRTKSNRLRKGFEMIWDPNGWTDTDSDFSVKQDVVAITDWSGYSGSFVQHPELTGLDCIRPCFWVELVRGLPRENTTIWTSGSSISFCGVNSDTANWSWPDGAELPFTIDK

SEQ ID NO: 15529 - protein, 469 aa, synthetic construct; identical to SEQ ID NO: 15518
  REGION 1..469: note = neuraminidase__InfluenzaA__ABJ16623

SEQ ID NO: 15530 - protein, 469 aa, synthetic construct
  REGION 1..469: note = neuraminidase__InfluenzaA__ABJ16634
MNPNQKIITIGSVSLTISTICFFMQIAILITTVTLHFKQYEFNSPPNNQVMLCEPTIIERNITEIVYLTNITIEKEICPKLAEYRNWSKPQCDITGFAPFSKDNSIRLSAGGDIWVTREPYVSCDPDKCYQFALGQGTTLNNVHSNDTVHDRTPYRTLLMNELGVPFHLGTKQVCIAWSSSSCHDGKAWLHVCVTGDDKNATASFIYNGRLVDSIVSWSKKILRTQESECVCINGTCTVVMTDGSASGKADTKILFIEEGKIVHTSTLSGSAQHVEECSCYPRYPGVRCVCRDNWKGSNRPIVDINIKDYSIVSSYVCSGLVGDTPRKNDSSSSSHCLDPNNEEGGHGVKGWAFDDGNDVWMGRTISEKLRSGYETFKVIEGWSNPNSKLQINRQVIVDRGNRSGYSGIFSVEGKSCINRCFYVELIRGRKEETEVLWTSNSIVVFCGTSGTYGTGSWPDGADINLMPI

SEQ ID NO: 15531 - protein, 470 aa, synthetic construct; identical to SEQ ID NO: 14386
  REGION 1..470: note = neuraminidase__InfluenzaA__ABJ16656

SEQ ID NO: 15532 - protein, 470 aa, synthetic construct; identical to SEQ ID NO: 14386
  REGION 1..470: note = neuraminidase__InfluenzaA__ABJ16667

SEQ ID NO: 15533 - protein, 470 aa, synthetic construct
  REGION 1..470: note = neuraminidase__InfluenzaA__ABJ16678
MNPNQKIITIGSISIAIGIISLMLQIGNIISIWASHSIQTGSQNHTGICNQRIITYENSTWVNHTYVNINNTNVVAGKDKTSVTLAGNSSLCSISGWAIYTKDNSIRIGSKGDVFVIREPFISCSHLECRTFFLTQGALLNDKHSNGTVKDRSPYRALMSCPLGEAPSPYNSKFESVAWSASACHDGMGWLTIGISGPDNGAVAVLKYNGIITETIKSWKKRILRTQESECVCVNGSCFTIMTDGPSNGAASYKIFKIEKGKVTKSIELNAPNFHYEECSCYPDTGTVMCVCRDNWHGSNRPWVSFNQNLDYQIGYICSGVFGDNPRPKDGKGSCNPVTVDGADGVKGFSYKYGNGVWIGRTKSNRLRKGFEMIWDPNGWTDTDSDFLVKQDVVAITDWSGYSGSFVQHPELTGLDCIRPCFWVELVRGLPRENTTIWTSGSSISFCGVDSDTANWSWPDGAELPFTIDK

SEQ ID NO: 15534 - protein, 470 aa, synthetic construct; identical to SEQ ID NO: 14386
  REGION 1..470: note = neuraminidase__InfluenzaA__ABJ16689

SEQ ID NO: 15535 - protein, 469 aa, synthetic construct
  REGION 1..469: note = neuraminidase__InfluenzaA__ABJ16700
MNPNQKIITIGSVSLTIATICFLMQIAILVTTVTLHFKQYECNSPPNNQVMLCEPTIIERNITEIVYLTNTTIEKEICPKLAEYRNWSKPQCNITGFAPFSKDNSIRLSAGGDIWVTREPYVSCDPDKCYQFALGQGTTLNNGHSNDTVHDRTPYRTLLMNELGVPFHLGTKQVCIAWSSSSCHDGKAWLHVCVTGDDENATASFIYNGRLVDSIGSWSKKILRTQESECVCINGTCTVVMTDGSASGKADTKILFIEEGKIVHTSSLSGSAQHVEECSCYPRYPGVRCVCRDNWKGSNRPIVDINVKDYSIVSSYVCSGLVGDTPRKNDSSSSSHCLDPNNEEGGHGVKGWAFDDGNDVWMGRTISEKLRSGYETFKVIEGWSKPNSKLQINRQVIVDRGNRSGYSGIFSVESKSCINRCFYVELIRGKKQETEVLWTSNSIVVFCGTSGTYGTGSWPDGADINLMPI

SEQ ID NO: 15536 - protein, 469 aa, synthetic construct
  REGION 1..469: note = neuraminidase__InfluenzaA__ABJ16711
MNPNQKIITIGSVSLTIATICFLMQIAILVTTVTLHFKQYECNSPPNNQVMLCEPTIIERNITEIVYLTNTTIEKEICPKLAEYRNWSKPQCNITGFAPFSKDNSIRLSAGGDIWVTREPYVSCDPDKCYQFALGQGTTLNNGHSNDTVHDRTPYRTLLMNELGVPFHLGTKQVCIAWSSSSCHDGKAWLHVCVTGDDENATASFIYNGRLVDSIGSWSKKILRTQESECVCINGTCTVVMTDGSASGKADTKILFIEEGKIVHTSSLSGSAQHVEECSCYPRYPGVRCVCRDNWKGSNRPIVDINIKDYSIVSSYVCSGLVGDTPRKNDSSSSSHCLDPNNEEGGHGVKGWAFDDGNDAWMGRTISEKLRSGYETFKVIEGWSKSNSKLQINRQVIVDRGNRSGYSGIFSVEGKSCINRCFYVELIRGRKQETEVLWTSNSIVVFCGTSGTYGTGSWPDGADINLMPI

SEQ ID NO: 15537 - protein, 470 aa, synthetic construct
  REGION 1..470: note = neuraminidase__InfluenzaA__ABJ16733
MNPNQKIITIGSISVAIGIINLILQIGNIISIWASHSIQTGSQNYTGICNQRIITYENRTWVNQTYVNINNTNVVAGKDKTSMTLAGNSSLCPIRGWAIYTKDNSIRIGSKGDIFVIREPFISCSHLECRTFFLTQGALLNDKHSNGTIKDRSPFRALMSCPLGEAPSPYNSRFESVAWSASACHDGLGWLTIGISGPDNGAVAVLKYNGIITETIKSWKKQILRTQESECVCVNGSCFTIMTDGPSNRAASYRIFKIEKGRVTKSIELDAPNYHYEECSCYPDTGTVMCVCRDNWHGSNRPWVSFNQNLDYQIGYICSGVFGDNPRPKDGEGSCNPVTVDGADGVKGFSYRYGNGVWIGRTKSNRLRKGFEMIWDPNGWTDTDSDFSMKQDVVAMTDWSGYSGSFVQHPELTGLDCMRPCFWVELVRGLPRENTTIWTSGSSISFCGVNSETANWSWPDGAELPFTIDK

SEQ ID NO: 15538 - protein, 469 aa, synthetic construct; identical to SEQ ID NO: 14730
  REGION 1..469: note = neuraminidase__InfluenzaA__ABJ16744

SEQ ID NO: 15539 - protein, 469 aa, synthetic construct; identical to SEQ ID NO: 14730
  REGION 1..469: note = neuraminidase__InfluenzaA__ABJ16755

SEQ ID NO: 15540 - protein, 469 aa, synthetic construct; identical to SEQ ID NO: 14730
  REGION 1..469: note = neuraminidase__InfluenzaA__ABJ16766

SEQ ID NO: 15541 - protein, 469 aa, synthetic construct
  REGION 1..469: note = neuraminidase__InfluenzaA__ABJ16777
MNPNQKIITIGSVSLTIATICFLMQIAILVTTVTLHFKQYECNSPPNNQVMLCEPTIIERNITEIVYLTNTTIEKEICPKLAEYRNWSKPQCNITGFAPFSKDNSIRLSAGGDIWVTREPYVSCDPDKCYQFALGQGTTLNNGHSNDTVHDRTPYRTLLMNELGVPFHLGTKQVCIAWSSSSCHDGKAWLHVCVTGDDENATASFIYNGRLVDSIGSWSKKILRTQESECVCINGTCTVVMTDGSASGKADTKILFIEEGKIVHTSSLSGSAQHVEECSCYPRYPGVRCVCRDNWKGSNRPIVDINIKDYSIVSSYVCSGLVGDTPRKNDSSSSSHCLDPNNEEGGHGVKGWAFDDGNDVWMGRTISEKLRSGYETFKVIEGWSKPNSKLQINRQVIVDRGNRSGYSGIFSVEGKSCINRCFYVELIRGRKQETEVLWTSNSIVVFCGTSGTYGTGSWPDGADINLMPI

SEQ ID NO: 15542 - protein, 469 aa, synthetic construct; identical to SEQ ID NO: 14730
  REGION 1..469: note = neuraminidase__InfluenzaA__ABJ16788

SEQ ID NO: 15543 - protein, 470 aa, synthetic construct; identical to SEQ ID NO: 14968
  REGION 1..470: note = neuraminidase__InfluenzaA__ABJ53441

SEQ ID NO: 15544 - protein, 470 aa, synthetic construct
  REGION 1..470: note = neuraminidase__InfluenzaA__ABJ53452
MNPNQKIITIGSISIAIGIISLMLQIGNIISIWASHSIQTGSQNHTGICNQRIITYENSTWVNHTYVNINNTNVIAGKDKTSVTLAGNSSLCSISGWAIYTKDNSIRIGSKGDVFVIREPFISCSHLECRTFFLTQGALLNDKHSNGTVKDRSPYRALMSCPLGEAPSPYNSKFESVAWSASACHDGMGWLTIGISGPDNGAVAVLKYNGIITETIKSWKKRILRTQESECVCVNGSCFTIMTDGPSNGAASYKIFKIEKGKVTKSIELNAPNFHYEECSCYPDTGTVMCVCRDNWHGSNRPWVSFNQNLDYQIGYICSGVFGDNPRPKDGEGSCNPVTVDGADGVKGFSYKYGNGVWIGRTKSNRLRKGFEMIWDPNGWTDTDSNFSVKQDVVAITDWSGYSGSFVQHPELTGLDCIRPCFWVELVRGLPRENTTIWTSGSSISFCGVNSDTANWSWPDGAELPFTIDK

SEQ ID NO: 15545 - protein, 469 aa, synthetic construct; identical to SEQ ID NO: 14712
  REGION 1..469: note = neuraminidase__InfluenzaA__ABJ53463

SEQ ID NO: 15546 - protein, 469 aa, synthetic construct; identical to SEQ ID NO: 14712
  REGION 1..469: note = neuraminidase__InfluenzaA__ABJ53474

SEQ ID NO: 15547 - protein, 469 aa, synthetic construct
  REGION 1..469: note = neuraminidase__InfluenzaA__ABJ53485
MNPNQKIITIGSVSLTISTICFFMQIAILITTVTLHFKQYEFNSPPNNQVMLCEPTIIERNITEIVYLTNTTIEKEICPKLAEYRNWSKPQCNITGFAPFSKDNSIRLSAGGDIWVTREPYVSCDPDKCYQFALGQGTTLNNVHSNDTVHDRTPYRTLLMNELGVPFHLGTKQVCIAWSSSSCHDGKAWLHVCVTGDDKNATASFIYNGRLVDSIVSWSKEILRTQESECVCINGTCTVVMTDGSASGKADTKILFIEEGKIVHTSTLSGSAQHVEECSCYPRYPGVRCVCRDNWKGSNRPIVDINIKDYSIVSSYVCSGLVGDTPRKNDSSSSSHCLDPNNEEGGHGVKGWAFDDGNDVWMGRTISEKLRLGYETFKVIEGWSNSNSKLQTNRQVIVDRGNRSGYSGIFSVEGKSCINRCFYVELIRGRKEETEVLWTSNSIVVFCGTSGTYGTGSWPDGADINLMPI

SEQ ID NO: 15548 - protein, 470 aa, synthetic construct; identical to SEQ ID NO: 15356
  REGION 1..470: note = neuraminidase__InfluenzaA__ABJ53496

SEQ ID NO: 15549 - protein, 470 aa, synthetic construct; identical to SEQ ID NO: 15356
  REGION 1..470: note = neuraminidase__InfluenzaA__ABJ53507

SEQ ID NO: 15550 - protein, 470 aa, synthetic construct
  REGION 1..470: note = neuraminidase__InfluenzaA__ABJ53518
MNPNQKIITIGSISVAIGIINLILQIGNIISIWASHSIQTGSQNYTGICNQRIITYENRTWVNQTYVNINNTNVVAGKDKTSMTLAGNLSLCPIRGWAIYTKDNSIRIGSKGDVFVIREPFISCSHLECRTFFLTQGALLNDKHSNGTIKDRSPFRALMSCPLGEAPSPYNSRFESVAWSASACHDGLGWLTIGISGPDNGAVAVLKYNGIITETIKSWKKQILRTQESECVCVNGSCFTIMTDGPSNRAASYRIFKIEKGRVTKSIELDAPNYHYEECSCYPDTGTVMCVCRDNWHGSNRPWVSFNQNLDYQIGYICSGVFGDNPRPKDGEGSCNPVTVDGADGVKGFSYRYGNGVWIGRTKSNRLRKGFEMIWDPNGWTDTDSDFSMKQDVVAMTDWSGYSGSFVQHPELTGLDCMRPCFWVELVRGLPRENTTIWTSGSSISFCGVNSETANWSWPDGAELPFTIDK

SEQ ID NO: 15551 - protein, 469 aa, synthetic construct; identical to SEQ ID NO: 14154
  REGION 1..469: note = neuraminidase__InfluenzaA__ABK39965

SEQ ID NO: 15552 - protein, 469 aa, synthetic construct
  REGION 1..469: note = neuraminidase__InfluenzaA__ABK39976
MNPNQKIITIGSVSLTISTTCFFMQIAILITTVTLHFKQYEFNSPPNNQVMLCEPTIIERNITEIVYLTNTTIEKEICPKLAEYRNWSKPQCNITGFAPFSKDNSIRLSAGGDIWVTREPYVSCDPDKCYQFALGQGTTLNNVHSNDTVHDRTPYRTLLMNELGVPFHLGTKQVCIAWSSSSCHDGKAWLHVCVTGDDKNATASFIYNGRLVDSIVSWSKEILRTQESECVCINGTCAVVMTDGSASGKADTKILFIEEGKIVHTSTLSGSAQHVEECSCYPRYPGVRCVCRDNWKGSNRPIVDINIKDYSIVSSYVCSGLVGDTPRKNDSSSSSHCLDPNNEEGGHGVKGWAFDDGNDVWMGRTISEKLRSGYETFKVIEGWSNPNSKLQINRQVIVDRGNRSGYSGIFSVEGKSCINRCFYVELIRGRKEETEVLWTSNSIVVFCGTSGTYGTGSWPDGADINLMPI

SEQ ID NO: 15553 - protein, 469 aa, synthetic construct; identical to SEQ ID NO: 14712
  REGION 1..469: note = neuraminidase__InfluenzaA__ABK39987

SEQ ID NO: 15554 - protein, 469 aa, synthetic construct; identical to SEQ ID NO: 14382
  REGION 1..469: note = neuraminidase__InfluenzaA__ABK39998

SEQ ID NO: 15555 - protein, 469 aa, synthetic construct; identical to SEQ ID NO: 14327
  REGION 1..469: note = neuraminidase__InfluenzaA__ABK40020

SEQ ID NO: 15556 - protein, 470 aa, synthetic construct
  REGION 1..470: note = neuraminidase__InfluenzaA__ABK40031
MNPNQKIITIGSISVAIGIINLILQIGNIISIWASHSIQTGSQNYTGICNQRIITYENRTWVNQTYVNINNTNVVAGKDKTSMTLAGNSSLCPIRGWAIYTKDNSIRIGSKGDVFVIREPFISCSHLECRTFFLTQGALLNDKHSNGTIKDRSPFRALMSCPLGEAPSPYNSRFESVAWSASACHDGLGWLTIGISGPDNGAVAVLKYNGIITETIKSWKKQILRTQESECVCVNGSCFTIMTDGPSNRAASYRIFKIEKGRVTKSIELDAPNYHYEECSCYPDTGTVMCVCRDNWHGSNRPWVSFNQNLDYQIGYICSGVFGDNPRPKDGEGSCNPVTVDGADGVKGFSYRYGNGVWIGRTKSNRLRKGFEMIWDPNGWTDTDSDFSMKQDVVAMTDWSGYSGSFVQHPELTGLDCMRPCFWVELVRGLPRENTTIWTSGSSISFCGVNSETANWSWPDGAELPFTIDK

SEQ ID NO: 15557 - protein, 470 aa, synthetic construct; identical to SEQ ID NO: 15556
  REGION 1..470: note = neuraminidase__InfluenzaA__ABK40042

SEQ ID NO: 15558 - protein, 470 aa, synthetic construct; identical to SEQ ID NO: 15556
  REGION 1..470: note = neuraminidase__InfluenzaA__ABK40053

SEQ ID NO: 15559 - protein, 469 aa, synthetic construct; identical to SEQ ID NO: 14730
  REGION 1..469: note = neuraminidase__InfluenzaA__ABK40064

SEQ ID NO: 15560 - protein, 469 aa, synthetic construct; identical to SEQ ID NO: 14730
  REGION 1..469: note = neuraminidase__InfluenzaA__ABK40078

SEQ ID NO: 15561 - protein, 470 aa, synthetic construct; identical to SEQ ID NO: 15059
  REGION 1..470: note = neuraminidase__InfluenzaA__ABK40513

SEQ ID NO: 15562 - protein, 470 aa, synthetic construct; identical to SEQ ID NO: 15059
  REGION 1..470: note = neuraminidase__InfluenzaA__ABK40538

SEQ ID NO: 15563 - protein, 470 aa, synthetic construct
  REGION 1..470: note = neuraminidase__InfluenzaA__ABK40549
MNPNQKIITIGSICMTIGIISLILQIGNIISIWVSHSIQTGSQNHTGICNQRIITYENSTWVNQTYVNINNTNVVAGKDTTSVTLAGNSSLCPIRGWAIYSKDNSIRIGSKGDVFVIREPFISCSHLECRTFFLTQGALLNDKHSNGTVKDRSPYRALMSCPIGEAPSPYNSRFESVAWSASACHDGMGWLTIGISGPDDGAVAVLKYNGIITETIKSWRKRILRTQESECVCVNGSCFTIMTDGPSNGPASYRIFKIEKGKITKSIELDAPNSHYEECSCYPDTGTVMCVCRDNWHGSNRPWVSFNQNLDYKIGYICSGVFGDNPRPKDGKGSCDPVTVDGADGVKGFSYRYGNGVWIGRTKSNSSRKGFEMIWDPNGWTDTDSNFLVKQDVVAMTDWSGYSGSFVQHPELTGLDCMRPCFWVELIRGRPREKTTIWTSGSSISFCGVNSDTANWSWPDGAELPFTIDK

SEQ ID NO: 15564 - protein, 470 aa, synthetic construct; identical to SEQ ID NO: 15059
  REGION 1..470: note = neuraminidase__InfluenzaA__ABK40560

SEQ ID NO: 15565 - protein, 470 aa, synthetic construct; identical to SEQ ID NO: 15059
  REGION 1..470: note = neuraminidase__InfluenzaA__ABK40571

SEQ ID NO: 15566 - protein, 470 aa, synthetic construct; identical to SEQ ID NO: 15059
  REGION 1..470: note = neuraminidase__InfluenzaA__ABK40582

SEQ ID NO: 15567 - protein, 470 aa, synthetic construct
  REGION 1..470: note = neuraminidase__InfluenzaA__ABK40593
MNPNQKIITIGSICMTIGIISLILQIGNIISIWVSHSIQTGSQNHTGICNQRIITYENSTWVNQTYVNINNTNVVAGKDTTSVTLAGNSSLCPIRGWAIYSKDNSIRIGSKGDVFVIREPFISCSHLECRTFFLTQGALLNDKHSNGTVKDRSPYRALMSCPIGEAPSPYNSRFESVAWSASACHDGMGWLTIGISGPDDGAVAVLKYNGIITETIKSWRKRILRTQESECVCVNGSCFTIMTDGPSNGPASHRIFKIEKGKITKSIELDAPNSHYEECSCYPDTGTVMCVCRDNWHGSNRPWVSFNQNLDYKIGYICSGVFGDNPRPKDGKGSCDPVTVDGADGVKGFSYRYGNGVWIGRTKSNSSRKGFEMIWDPNGWTDTDSNFLVKQDVVAMTDWSGYSGSFVQHPELTGLDCMRPCFWVELIRGRPREKTTIWTSGSSISFCGVNSDTANWSWPDGAELPFTIDK

SEQ ID NO: 15568 - protein, 470 aa, synthetic construct; identical to SEQ ID NO: 15059
  REGION 1..470: note = neuraminidase__InfluenzaA__ABK40604

SEQ ID NO: 15569 - protein, 469 aa, synthetic construct; identical to SEQ ID NO: 14730
  REGION 1..469: note = neuraminidase__InfluenzaA__ABK40615

SEQ ID NO: 15570 - protein, 469 aa, synthetic construct; identical to SEQ ID NO: 14061
  REGION 1..469: note = neuraminidase__InfluenzaA__ABK40626

SEQ ID NO: 15571 - protein, 469 aa, synthetic construct
  REGION 1..469: note = neuraminidase__InfluenzaA__ABK40648
MNPNQKIITIGSVSLTIATICFLMQIAILVTTVTLHFKQYECNSPPNNQVMLCEPTIIERNITEIVYLTNTTIEKEICPKLAEYRNWSKPQCKITGFAPFSKDNSIRLSAGGDIWVTREPYVSCDPGKCYQFALGQGTTLNNRHSNDTVHDRTPYRTLLMNELGIPFHLGTKQVCIAWSSSSCHDGKAWLHVCVTGHDENATASFIYDGRLVDSIGSWSKNILRTQESECVCINGTCTVVMTDGSASDRADTKILFIEEGKIVHISPLSGSAQHVEECSCYPRYPGVRCVCRDNWKGSNRPIVDINVKDYSIVSSYVCSGLVGDTPRKNDSSSSSYCWNPNNEKGGHGVKGWAFDDGNDVWMGRTISEESRSGYETFKVIGGWSKPNSKLQINRQVIVDRGNRSGYSGIFSVEGKSCINRCFYVELIRGRKQETEVWWTSNSIVVFCGTSGTYGTGSWPDGADINLMPI

SEQ ID NO: 15572 - protein, 469 aa, synthetic construct; identical to SEQ ID NO: 15113
  REGION 1..469: note = neuraminidase__InfluenzaA__ABK40659

SEQ ID NO: 15573 - protein, 469 aa, synthetic construct; identical to SEQ ID NO: 15101
  REGION 1..469: note = neuraminidase__InfluenzaA__ABK40681

SEQ ID NO: 15574 - protein, 470 aa, synthetic construct
  REGION 1..470: note = neuraminidase__InfluenzaA__ABK40692
MNPNQKIITIGSISIAIGIISLMLQIGNIISIWASHSIQTGSQNHTGICNQRIITYENSTWVNHTYVNINNTNVVAGKDKTSVTLAGNSSLCSISGWAIYTKDNSIRIGSKGDVFVIREPFISCSHLECRTFFLTQGALLNDKHSNGTVKDRSPYRALMSCPLGEAPSPYNSKFESVAWSASACHDGMGWLTIGISGPDNGAVAVLKYNGIITETIKSWEKRILRTQESECVCVNGSCFTIMTDGPSNGAASYKIFKIEKGKVTKSVELNAPNFHYEECSCYPDTGTVMCVCRDNWHGSNRPWVSFNQNLDYQIGYICSGVFGDNPRPKDGKGSCNPVTVDGADGVKGFSYKYGNGVWIGRTKSNRLRKGFEMIWDPNGWTDTDSDFSVKQDVVAITDWSGYSGSFVQHPELTGLDCIRPCFWVELVRGLPRENTTIWTSGSSISFCGVDSDTANWSWPDGAELPFTIDK

SEQ ID NO: 15575 - protein, 469 aa, synthetic construct; identical to SEQ ID NO: 14730
  REGION 1..469: note = neuraminidase__InfluenzaA__ABK40703

SEQ ID NO: 15576 - protein, 469 aa, synthetic construct; identical to SEQ ID NO: 14730
  REGION 1..469: note = neuraminidase__InfluenzaA__ABK40714

SEQ ID NO: 15577 - protein, 469 aa, synthetic construct; identical to SEQ ID NO: 14730
  REGION 1..469: note = neuraminidase__InfluenzaA__ABK40725

SEQ ID NO: 15578 - protein, 469 aa, synthetic construct; identical to SEQ ID NO: 14730
  REGION 1..469: note = neuraminidase__InfluenzaA__ABK40736

SEQ ID NO: 15579 - protein, 469 aa, synthetic construct; identical to SEQ ID NO: 15445
  REGION 1..469: note = neuraminidase__InfluenzaA__ABK40747

SEQ ID NO: 15580 - protein, 470 aa, synthetic construct; identical to SEQ ID NO: 14951
  REGION 1..470: note = neuraminidase__InfluenzaA__ABK79951

SEQ ID NO: 15581 - protein, 470 aa, synthetic construct; identical to SEQ ID NO: 15556
  REGION 1..470: note = neuraminidase__InfluenzaA__ABK79973

SEQ ID NO: 15582 - protein, 469 aa, synthetic construct; identical to SEQ ID NO: 14730
  REGION 1..469: note = neuraminidase__InfluenzaA__ABK79984

SEQ ID NO: 15583 - protein, 469 aa, synthetic construct; identical to SEQ ID NO: 14730
  REGION 1..469: note = neuraminidase__InfluenzaA__ABK79995

SEQ ID NO: 15584 - protein, 470 aa, synthetic construct; identical to SEQ ID NO: 15059
  REGION 1..470: note = neuraminidase__InfluenzaA__ABK80028

SEQ ID NO: 15585 - protein, 470 aa, synthetic construct; identical to SEQ ID NO: 15059
  REGION 1..470: note = neuraminidase__InfluenzaA__ABK80039

SEQ ID NO: 15586 - protein, 470 aa, synthetic construct; identical to SEQ ID NO: 15059
  REGION 1..470: note = neuraminidase__InfluenzaA__ABK80050

SEQ ID NO: 15587 - protein, 469 aa, synthetic construct
  REGION 1..469: note = neuraminidase__InfluenzaA__ABK80061
MNPNQKIITIGSVSLTIATICFLMQIAILVTTVTLHFKQYECNSPPNNQVMLCEPTIIERNITEIVYLTNTTIEKEICPKLAEYRNWSKPQCNITGFAPFSKDNSIRLSAGGDIWVTREPYVSCDPDKCYQFALGQGTTLNNGHSNDTVHDRTPYRTLLMNELGVPFHLGTKQVCIAWSSSSCHDGKAWLHVCVTGDDENATASFIYNGRLVDSIGSWSKKILRTQESECVCINGTCTVVMTDGSASGKADTKILFIEEGKIVHTSSLSGSAQHVEECSCYPRYPGVRCVCRDNWKGSNRPIVDINVKDYSIVSSYVCSGLVGDTPRKNDSSSSSHCLDPNNEEGGHGVKGWAFDDGNDVWMGRTISEKSRSGYETFKVIEGWSKPNSKLQINRQVIVDRGNRSGYSGIFSVEGKSCINRCFYVELIRGRKQETEVLWTSNSIVVFCGTSGTYGTGSWPDGADINLMPI

SEQ ID NO: 15588 - protein, 469 aa, synthetic construct; identical to SEQ ID NO: 14061
  REGION 1..469: note = neuraminidase__InfluenzaA__ABK80072

SEQ ID NO: 15589 - protein, 469 aa, synthetic construct
  REGION 1..469: note = neuraminidase__InfluenzaA__ABK80083
MNPNQKIITIGSVSLTIATICFLMQIAILVTTVTLHFKQYECSSPPNNQVMLCEPTIIERNITEIVYLTNTTIEKEICPKLAEYRNWSKPQCNITGFAPFSKDNSIRLSAGGDIWVTREPYVSCDPDKCYQFALGQGTTLNNGHSNDTVHDRTPYRTLLMNELGVPFHLGTKQVCIAWSSSSCHDGKAWLHVCVTGDDENATASFIYNGRLVDSIGSWSKKILRTQESECVCINGTCTVVMTDGSASGKADTKILFIEEGKIVHTSLLSGSAQHVEECSCYPRYPGVRCVCRDNWKGSNRPIVDINVKDYSIVSSYVCSGLVGDTPRKNDSSSSSHCLDPNNEEGGHGVKGWAFDDGNDVWMGRTISEKLRSGYETFKVIEGWSKPNSKLQINRQVIVDRGNRSGYSGIFSVEGKSCINRCFYVELIRGRKQETEVLWTSNSIVVFCGTSGTYGTGSWPDGADINLMPI

SEQ ID NO: 15590 - protein, 469 aa, synthetic construct
  REGION 1..469: note = neuraminidase__InfluenzaA__ABK80094
MNPNQKIITIGSVSLIIATICFLMQIAILVTTVTLHFKQYECNSPPNNQVMLCEPTIIERNITEIVYLTNTTIEKEICPKLAEYRNWSKPQCNITGFAPFSKDNSIRLSAGGDIWVTREPYVSCDPDKCYQFALGQGTTLNNGHSNDTVHDRTPYRTLLMNELGVPFHLGTKQVCIAWSSSSCHDGKAWLHVCVTGDDENATASFIYNGRLVDSIGSWSKKILRTQESECVCINGTCTVVMTDGSASGKADTKILFIEEGKIVHTSSLSGSAQHVEECSCYPRYPGVRCVCRDNWKGSNRPIVDINVKDYSIVSSYVCSGLVGDTPRKNDSSSSSHCLDPNNEEGGHGVKGWAFDDGNDVWMGRTISEKLRSGYETFKVIEGWSKPNSKLQINRQVIVDRGNRSGYSGIFSVESKSCINRCFYVELIRGRKQETEVLWTSNSIVVFCGTSGTYGTGSWPDGADINLMPI

SEQ ID NO: 15591 - protein, 469 aa, synthetic construct; identical to SEQ ID NO: 14730
  REGION 1..469: note = neuraminidase__InfluenzaA__ABK80105

SEQ ID NO: 15592 - protein, 469 aa, synthetic construct
  REGION 1..469: note = neuraminidase__InfluenzaA__ABK80138
MNPNQKIITIGSVSLTIATICFLMQTAILVTTVTLHFKQYECNSPPNNQVMLCEPTIIERNITEIVYLTNTTIEKEICPKLAEYRNWSKPQCNITGFAPFSKDNSIRLSAGGDIWVTREPYVSCDPDKCYQFALGQGTTLNNGHSNDTVHDRTPYRTLLMNELGVPFHLGTRQVCIAWSSSSCHDGKAWLHVCVTGDDENATASFIYNGRLVDSIGSWSKKILRTQESECVCINGTCTVVMTDGSASGKADTKILFIEEGKIVHISTLSGSAQHVEECSCYPRYPGVRCVCRDNWKGSNRPIVDINVKDYSIVSSYVCSGLVGDTPRKNDSFSSSHCLDPNNEEGGHGVKGWAFDDGNDVWMGRTISEKLRSGYETFKVIEGWSKPNSKLQINRQVIVERGNRSGYSGIFSVEGKSCINRCFYVELIRGRKEETEVWWTSNSIVVFCGTSGTYGTGSWPDGADINLMPI

SEQ ID NO: 15593 - protein, 469 aa, synthetic construct
  REGION 1..469: note = neuraminidase__InfluenzaA__ABK80149
MNPNQKIITIGSVSLTIATICFLMQIAILVTTVTLHFKQYECNSPPNNQAMLYEPTIIERNITEIVYLTNTTIEKEICPKLAEYRNWSKPQCNITGFAPFSKDNSIRLSAGGDIWVTREPYVSCDPDKCYQFALGQGTTLNNGHSNDTVHDRTPYRTLLMNELGVPFHLGTRQVCIAWSSSSCHDGKAWLHVCVTGDDENATASFIYNGRLVDSIGSWSKKILRTQESECVCINGTCTVVMTDGSASGKADTKILFIEEGKIVHISTLSGSAQHVEECSCYPRYPGVRCVCRDNWKGSNRPIVDINVKDYSIVSSYVCSGLVGDTPRKNDSFSSSHCLDPNNEEGGHGVKGWAFDDGNDVWMGRTISEKLRSGYETFKVIEGWSKPNSKLQINRQVIVERGNRSGYSGIFSVEGKSCINRCFYVELIRGRKEETEVWWTSNSIVVFCGTSGTYGTGSWPDGADINLMPI

SEQ ID NO: 15594 - protein, 469 aa, synthetic construct; identical to SEQ ID NO: 15593
  REGION 1..469: note = neuraminidase__InfluenzaA__ABK80160

SEQ ID NO: 15595 - protein, 469 aa, synthetic construct
  REGION 1..469: note = neuraminidase__InfluenzaA__ABK80171
MNPNQKIITIGSVSLTIATICFLMQIAILVTTVTLHFKQYECNPPPNNQVMLCEPTIIERNITEIVYLTNTTIEKEICPKLAEYRNWSKPQCNITGFAPFSKDNSIRLSAGGDIWVTREPYVSCDPDKCYQFALGQGTTLNNGHSNDTVHDRTPYRTLLMNELGVPFHLGTRQVCIAWSSSSCHDGKAWLHVCVTGDDENATASFIYNGRLVDSIGSWSKKILRTQESECVCINGTCTVVMTDGSASGKADTKILFIEEGKIVHISTLSGSAQHVEECSCYPRYPGVRCVCRDNWKGSNRPIVDINVKDYSIFSSYVCSGLVGDTPRKNDSFSSSHCLDPNNEEGGHGVKGWAFDDGNDVWMGRTISEKLRSGYETFKVIEGWSKPNSKLQTNRQVIVERGNRSGYSGIFSVEGKSCINRCFYVELIRGRKEETEVWWTSNSIVVFCGTSGTYGTGSWPDGADINLMPI

SEQ ID NO: 15596 - protein, 469 aa, synthetic construct
  REGION 1..469: note = neuraminidase__InfluenzaA__ABK80182
MNPNQKIITIGSVSLTIATICFLMQIAILVTTVTLHFKQYECNSPPNNQVMLCEPTIIERNITEIVYLTNTTIEKEICPKLAEYRNWSKPQCNITGFAPFSKDNSIRLSAGGDIWVTREPYVSCDPDKCYQFALGQGTTLNNGHSNDTVHDRTPYRTLLMNELGVPFHLGTRQVCIAWSSSSCHDGKAWLHVCVTGDDKNATASFIYNGKLVDSIGSWSKKILRTQESECVCINGTCAVVMTDGSASGKADTKILFIEEGKIVHISTLSGSAQHVEECSCYPRYPGVRCVCRDNWKGSNRPIVDINVKDYSIVSSYVCSGLVGDTPRKNDSFSSSHCLDPNNEEGGHGVKGWAFDDGNDVWMGRTISEKLRSGYETFKVIEGWSKPNSKLQTNRQVIVERGNRSGYSGIFSVEGKSCINRCFYVELIRGRKEETEVWWTSNSIVVFCGTSGTYGTGSWPDGADINLMPI

SEQ ID NO: 15597 - protein, 469 aa, synthetic construct
  REGION 1..469: note = neuraminidase__InfluenzaA__ABK80193
MNPNQKIITIGSVSLTIATICFLMQIAILVTTVTLHFKQYECNSPPNNQVMLCEPTIIERNITEIVYLTNTTIEKEICPKLAEYRNWSKPQCNITGFAPFSKDNSIRLSAGGDIWVTREPYVSCDPDKCYQFALGQGTTLNNGHSNDTVHDRTPYRTLLMNELGVPFHLGTRQVCIAWSSSSCHDGKAWLHVCVTGDDENATASFIYNGRLVDSIGSWSKKILRTQESECVCINGTCTVVMTDGSASGKADTKILFIEEGKIVHISTLSGSAQHVEECSCYPRYPGVRCVCRDNWKGSNRPIVDINVKDYSIVSSYVCSGLVGDTPRKNDSFSSSHCLDPNNEEGGHGVKGWAFDDGNDVWMGRTIGEKLRSGYETFKVIEGWSKPNSKLQTNRQVIVERGNRSGYSGIFSVEGKSCINRCFYVELIRGRKEETEVWWTSNSIVVFCGTSGTYGTGSWPDGADINLMPI

SEQ ID NO: 15598 - protein, 469 aa, synthetic construct
  REGION 1..469: note = neuraminidase__InfluenzaA__ABK80204
MNPNQKIITIGSVSLTIATICFLMQIAILVTTVTLHFKQYECNSPPNNQVMLCEPTIIERNITEIVYLTNTTIEKEICPKLAEYRNWSKPQCNITGFAPFSKDNSIRLSAGGDIWVTREPYVSCDPDKCYQFALGQGTTLNNGHSNDTVHDRTPYRTLLMNELGVPFHLGTRQVCIAWSSSSCHDGKAWLHVCVTGDDENATASFIYNGKLVDSIGSWSKKILRTQESECVCINGTCAVVMTDGSASGKADTKILFIEEGKIVHISTLSGSAQHVEECSCYPRYPGVRCVCRDNWKGSNRPIVDINVKDYSIVSSYVCSGLVGDTPRKNDSFSSSHCLDPNNEEGGHGVKGWAFDDGNDAWMGRTISEKLRSGYETFKVIEGWSKPNSKLQTNRQVIVERGNRSGYSGIFSVEGKSCINRCFYVELIRGRKEETEVWWTSNSIVVFCGTSGTYGTGSWPDGADINLMPI

SEQ ID NO: 15599 - protein, 469 aa, synthetic construct; identical to SEQ ID NO: 14591
  REGION 1..469: note = neuraminidase__InfluenzaA__ABK80215

SEQ ID NO: 15600 - protein, 469 aa, synthetic construct; identical to SEQ ID NO: 14591
  REGION 1..469: note = neuraminidase__InfluenzaA__ABK80226

SEQ ID NO: 15601 - protein, 469 aa, synthetic construct
  REGION 1..469: note = neuraminidase__InfluenzaA__ABK80237
MNPNQKIITIGSVSLTIATICFLMQIAILVTTVTLHFKQHECNSPPNNQVMLCEPTIIERNITEIVYLTNTTIEKEICPKLVEYRNWSKPQCNITGFAPFSKDNSIRLSAGGDIWVTREPYVSCDPDKCYQFALGQGTTLNNGHSNDTVHDRTPYRTLLMNELGVPFHLGTRQVCIAWSSSSCHDGKAWLHVCVTGDDKNATASFIYNGRLVDSIGSWSKKILRTQESECVCINGTCTVVMTDGSASGKADTKILFIEEGKIVHISTLSGSAQHVEECSCYPRYPGVRCVCRDNWKGSNRPIVDINVKDYSIVSSYVCSGLVGDTPRKTDSFSSSHCLDPNNEEGGHGVKGWAFDDGNDVWMGRTISEKLRSGYETFKVIEGWSKPNSKLQINRQVIVERGNRSGYSGIFSVEGKSCINRCFYVELIRGRKEETEVWWTSNSIVVFCGTSGTYGTGSWPDGADINLMPI

SEQ ID NO: 15602 - protein, 469 aa, synthetic construct
  REGION 1..469: note = neuraminidase__InfluenzaA__ABK80259
MNPNQKIITIGSASLTIATICFLIQIAILVTTVTLHFKQHECNSPPNNQVMLCEPTIIERNITEIVYLTNTTIEKEICPKLAEYRNWSKPQCNITGFAPFSKDNSIRLSAGGDIWVTREPYVSCDPDKCYQFALGQGTTLNNGHSNDTVHDRTPYRTLLMNELGVPFHLGTRQVCIAWSSSSCHDGKAWLHVCVTGDDKNATASFIYNGRLVDSISSWSKKILRTQESECVCINGTCTVVMTDGSASGKADTKILFIEEGKIIHISTLSGSAQHVEECSCYPRYPGVRCVCRDNWKGSNRPIVDINVKDYSIVSSYVCSGLVGDTPRKNDSFSSSHCLDPNNEEGGHGVKGWAFDDGNDVWMGRTISEKLRSGYETFKVIEGWSNPNSKLQINRQVIVERGNRSGYSGIFSVEGKSCINRCFYVELIRGRKEETEVWWTSNSIVVFCGTSGTYGTGSWPDGADINLMPI

SEQ ID NO: 15603 - protein, 469 aa, synthetic construct; identical to SEQ ID NO: 14327
  REGION 1..469: note = neuraminidase__InfluenzaA__ABK80270

SEQ ID NO: 15604 - protein, 469 aa, synthetic construct; identical to SEQ ID NO: 14714
  REGION 1..469: note = neuraminidase__InfluenzaA__ABK80281

SEQ ID NO: 15605 - protein, 469 aa, synthetic construct
  REGION 1..469: note = neuraminidase__InfluenzaA__ABK80292
MNPNQKIITIGSVSLTISTICFFMQIAILITTVTLHFKQYEFNSPPNNQVMLCEPTIIERNITEIVYLTNTTIEKEICPKLAEYRNWSKPQCNITGFAPFSKDNSIRLSAGGDIWVTREPYVSCDPDKCYQFALGQGTTLNNVHSNDTVHDRTPYRTLLMNELGVPFHLGTKQVCIAWSSSSCHDGKAWLHVCVTGDDKNATASFIYNGRLVDSIVSWSKEILRTQESECVCINGTCTVVMTDGSASGKADTKILFIEEGKIIHTSTLSGSAQHVEECSCYPRYPGVRCVCRDNWKGSNRPIVDINIKDYSIVSSYVCSGLVGDTPRKNDSSSSSHCLDPNNEEGGHGVKGWAFDDGNDVWMGRTISEKLRSGYETFKVIEGWSNPNSKLQINRQVIVDRSNRSGYSGIFSVEGKSCINRCFYVELIRGRKEETEVLWTSNSIVVFCGTSGTYGTGSWPDGADINLMPI

SEQ ID NO: 15606 - protein, 469 aa, synthetic construct
  REGION 1..469: note = neuraminidase__InfluenzaA__ABK80303
MNPNQKIITIGSVSLTIATICFLMQIAILVTTVTLHFKQYECNSPPNNQVMLYEPTIIERNITEIVYLTNTTIEKEICPKLAEYRNWSKPQCNITGFAPFSKDNSIRLSAGGDIWVTREPYVSCDPDKCYQFALGQGTTLNNGHSNDTVHDRTPYRTLLMNELGVPFHLGTRQVCIAWSSSSCHDGKAWLHVCVTGDDENATASFIYNGRLVDSIGSWSKKILRTQESECVCINGTCTVVMTDGNASGKADTKILFIEEGKIVHISTLSGSAQHVEECSCYPRYPGVRCVCRDNWKGSNRPIVDINVKDYSIVSSYVCSGLVGDTPRKNDSFSSSHCLDPNNEEGGHGVKGWAFDDGNDVWMGRTISEKLRSGYETFKVIEGWSKPNSKLQINRQVIVERGNRSGYSGIFSVEGKSCINRCFYVELIRGRKEETEVWWTSNSIVVFCGTSGTYGTGSWPDGADINLMPI

SEQ ID NO: 15607 - protein, 469 aa, synthetic construct
  REGION 1..469: note = neuraminidase__InfluenzaA__ABK80314
MNPNQKIITIGSVSLTIATICFLMQIAILVTTVTLHFKQYECDSPPNNQVMLYEPTIIERNITEIVYLTNTTIEKEICPKLAEYRNWSKPQCNITGFAPFSKDNSIRLSAGGDIWVTREPYVSCDPDKCYQFALGQGTTLNNGHSNDTVHDRTPYRTLLMNELGVPFHLGTRQVCIAWSSSSCHDGKAWLHVCVTGDDENATASFIYNGRLVDSIGSWSKKILRTQESECVCINGTCTVVMTDGSASGKADTKILFIEEGKIVHISTLSGSAQHVEECSCYPRYPGVRCVCRDNWKGSNRPIVDINVKDYSIVSSYVCSGLVGDTPRKNDSFSSSHCLDPNNEEGGHGVKGWAFDDGNDVWMGRTISEKLRSGYETFKVIEGWSKPNSKLQINRQVIVERGNRSGYSGIFSVEGKSCINRCFYVELIRGRKEETEVWWTSNSIVVFCGTSGTYGTGSWPDGADINLMPI

SEQ ID NO: 15608 - protein, 449 aa, synthetic construct
  REGION 1..449: note = neuraminidase__InfluenzaA__ABL07021
MNPNQKIITIGSICMVIGIVSLMLQIGNMISIWVSHSIQKGNQHQAESISNTNPLTEKAVASITLAGNSSLCPIRGWAVHSKDNNIRIGSKGDVFVIREPFISCSHLECRTFFLTQGALLNDKHSNGTVKDRSPHRTLMSCPVGEAPSPYNSRFESVAWSASACHDGTSWLTIGISGPDNEAVAVLKYNGIITDTIKSWRNNILRTQESECACVNGSCFTVMTDGPSNGQASYKIFKMKKGKVVKSVELDAPNYHYEECSCYPDAGEITCVCRDNWHGSNRPWVSFNQNLEYQIGYICSGVFGDNPRPNDGTGSCGPMSPNGAYGVKGFSFKYGNGVWIGRTKSTNSRSGFEMIWDPNGWTGTDSSFSVKQDIVAITDWSGYSGSFVQHPELTGLDCIRPCFWVELIRGRPKESTIWTSGSSISFCGVNSDTVSWSWPDGAELPFTIDK

SEQ ID NO: 15609 - protein, 449 aa, synthetic construct
  REGION 1..449: note = neuraminidase__InfluenzaA__ABL07032
MNPNQKIITIGSICMVIGIVSLMLQIGNMVSTWVSHSIQTGNQYQAESISNTNPLTEKAVASVTLAGNSSLCPIRGWAVHSKDNNIRIGSKGDVFVIREPFISCSHLECRTFFLTQGALLNDKHSNGTVKDRSPHRTLMSCPVGEAPSPYNSRFESVAWSASACHDGTSWLTIGISGPDNEAVAVLKYNGIITDTIKSWRNNILRTQESECACVNGSCFTVMTDGPSNGQASYKIFKMEKGKVVKSVELDAPNYHYEECSCYPDAGEITCVCRDNWHGSNRPWVSFNQNLEYQIGYICSGVFGDNPRPNDGTGSCGPMSPNGAYGVKGFSFKYGNGVWIGRTKSTNSRSGFEMIWDPNGWTGTDSSFSVKQDIVAITDWSGYSGSFVQHPELTGLDCIRPCFWVELIRGRPKESTIWTSGSSISFCGVNSDTVSWSWPDGAELPFTIDK

SEQ ID NO: 15610 - protein, 449 aa, synthetic construct
  REGION 1..449: note = neuraminidase__InfluenzaA__ABL31746
MNPNQKIITIGSICMVIGIVSLMLQIGNMISIWVSHSIQTGNQHQAESISNTNPLTEKAVASVTLAGNSSLCPIRGWAVHSKDNNIRIGSKGDVFVIREPFISCSHLECRTFFLTQGALLNDKHSNGTVKDRSPHRTLMSCPVGEAPSPYNSRFESVAWSASACHDGNSWLTIGISGPDNEAVAVLKYNGIITDTIKSWRKNILRTQESECACVNGSCFTVMTDGPSNGQASYKIFKMEKGKVVKSVELDAPNYHYEECSCYPDAGEITCVCRDNWHGSNRPWVSFNQNLEYQIGYICSGVFGDNPRPNDGTGSCGPMSPNGAYGVKGFSFKYGNGVWIGRTKSTNSRSGFEMIWDPNGWTGTDSSFSVKQDIVAITDWSGYSGSFVQHPELTGLDCIRPCFWVELIRGRPKESTIWTSGSSISFCGVNSDTVSWSWPDGAELPFTIDK

SEQ ID NO: 15611 - protein, 449 aa, synthetic construct
  REGION 1..449: note = neuraminidase__InfluenzaA__ABL31757
MNPNQKIITIGSICMVIGIVSLMLQIGNMISIWVSHSIQTGNQHQAESISNTNPLTEKAVASVTLAGNSSLCPIRGWAVHSKDNNIRIGSKGDVFVIREPFISCSHLECRTFFLTQGALLNDKHSNGTVKDRSPHRTLMSCPVGEAPSPYNSRFESVAWSASACHDGTSWLTIGISGPDNEAVAVLKYNGIITDTIKSWRNNILRTQESECACVNGSCFTVMTDGPSNGQASYKIFKMEKGKVVKSVELDAPNYHYEECSCYPDAGEITCVCRDNWHGSNRPWVSFNQNLEYQIGYICSGVFGDNPRPNDGTGSCGPMSPNGAYGVKGFSFKYGNGVWIGRTKSTNSRSGFEMIWDPNGWTGTDSSFSVKQDIVAITDWSGYSGSFVQHPELTGLDCIRPCFWVELIRGRPKESTIWTSGSSISFCGVNSDTVSWSWPDGAELPFTIDK

SEQ ID NO: 15612 - protein, 449 aa, synthetic construct; identical to SEQ ID NO: 15611
  REGION 1..449: note = neuraminidase__InfluenzaA__ABL31768

SEQ ID NO: 15613 - protein, 469 aa, synthetic construct; identical to SEQ ID NO: 14591
  REGION 1..469: note = neuraminidase__InfluenzaA__ABL67168

SEQ ID NO: 15614 - protein, 469 aa, synthetic construct; identical to SEQ ID NO: 14730
  REGION 1..469: note = neuraminidase__InfluenzaA__ABL67179

SEQ ID NO: 15615 - protein, 470 aa, synthetic construct; identical to SEQ ID NO: 15556
  REGION 1..470: note = neuraminidase__InfluenzaA__ABL67190

SEQ ID NO: 15616 - protein, 469 aa, synthetic construct
  REGION 1..469: note = neuraminidase__InfluenzaA__ABL67201
MNPNQKIITISSVSLTISTICFFMQIAILITTVTLHFKQYEFNSPPNNQVMLCEPTIIERNITEIVYLTNTTIEKEICPKLAEYRNWSKPQCDITGFAPFSKDNSIRLSAGGDIWVTREPYVSCDPDKCYQFALGQGTTLNNVHSNDTVHDRTPYRTLLMNELGVPFHLGTKQVCIAWSSSSCHDGKAWLHVCVTGDDKNATASFIYNGRLVDSIVSWSKKILRTQESECVCINGTCTVVMTDGSASGKADTKILFIEEGKIVHTSTLSGSAQHVEECSCYPRYPGVRCVCRDNWKGSNRPIVDINIKDYSIVSSYVCSGLVGDTPRKNDSSSSSHCLDPNNEEGGHGVKGWAFDDGNDVWMGRTISEKLRSGYETFKVIEGWSNPNSKLQINRQVIVDRGNRSGYSGIFSVEGKSCINRCFYVELIRGRKEETEVLWTSNSIVVFCGTSGTYGTGSWPDGADINLMPI

SEQ ID NO: 15617 - protein, 470 aa, synthetic construct; identical to SEQ ID NO: 15556
  REGION 1..470: note = neuraminidase__InfluenzaA__ABL67212

SEQ ID NO: 15618 - protein, 470 aa, synthetic construct; identical to SEQ ID NO: 15059
  REGION 1..470: note = neuraminidase__InfluenzaA__ABL67256

SEQ ID NO: 15619 - protein, 470 aa, synthetic construct; identical to SEQ ID NO: 15059
  REGION 1..470: note = neuraminidase__InfluenzaA__ABL67267

SEQ ID NO: 15620 - protein, 469 aa, synthetic construct; identical to SEQ ID NO: 14061
  REGION 1..469: note = neuraminidase__InfluenzaA__ABL67278

SEQ ID NO: 15621 - protein, 469 aa, synthetic construct
  REGION 1..469: note = neuraminidase__InfluenzaA__ABL67289
MNPNQKIITIGSVSLTIATICFLMQIAILVTTVTLHFKQYECNSPPNNQVMLYEPTIIERNITEIVYLTNTTIEKEICPKLAEYRNWSKPQCNITGFAPFSKDNSIRLSAGGDIWVTREPYVSCDPDKCYQFALGQGTTLNNGHSNDTVHDRTPYRTLLMNELGVPFHLGTRQVCIAWSSSSCHDGKAWLHVCVTGDDENATASFIYNGRLVDSIGSWSKKILRTQESECVCINGTCTVVMTDGSASGKADTKILFIEEGKIVHISTLSGSAQHVEECSCYPRYPGVRCVCRDNWKGSNRPIVDINVKDYSIVSSYVCSGLVGDTPRKNDSFSSSHCLDPNNEEGGHGVKGWAFDDGNDVWMGRTISEKLRSGYETFKVIEGWSKPNSKLQINRQVIVERGNRSGYSGIFSVEGKSCINRCFYVELIRGRKEETEVWWTSNSIVVFCGTSGTYGTGSWPDGADINLMPI

SEQ ID NO: 15622 - protein, 469 aa, synthetic construct
  REGION 1..469: note = neuraminidase__InfluenzaA__ABL67300
MNPNQKIITIGSVSLTIATICFLMQIAILVTTVTLHFKQYECNSPPNNQVMLCEPTIIERNITEIVYLTNTTIEKEICPKLAEYRNWSKPQCNITGFAPFSKDNSIRLSAGGDIWVTREPYVSCDPDKCYQFALGQGTTLNNGHSNDTVHDRTPYRTLLMNELGVPFHLGTRQVCIAWSSSSCHDGKAWLHVCVTGDDENATASFIYNGRLVDSIGSWSKNILRTQESECVCINGTCTVVMTDGSASGKADTKILFIEEGKIVHISTLSGSAQHVEECSCYPRYPGVRCVCRDNWKGSNRPIVDINVKDHSIVSSYVCSGLVGDTPRKNDSFSSSHCLDPNNEEGGHGVKGWAFDDGNDVWMGRTISEKLRSGYETFKVIEGWSKPNSKLQINRQVIVERGNRSGYSGIFSVEGKSCINRCFYVELIRGRKEETEVWWTSNSIVVFCGTSGTYGTGSWPDGADINLMPI

SEQ ID NO: 15623 - protein, 469 aa, synthetic construct; identical to SEQ ID NO: 14180
  REGION 1..469: note = neuraminidase__InfluenzaA__ABL67311

SEQ ID NO: 15624 - protein, 469 aa, synthetic construct
  REGION 1..469: note = neuraminidase__InfluenzaA__ABL67322
MNPNQKIITIGSVSLTIATICFLMQIAILVTTVTLHFKQYECNPPPNNQVMLCEPTIIERNITEIVYLTNTTIEKEICPKLAEYRNWSKPQCNITGFAPFSKDNSIRLSAGGDIWVTREPYVSCDPDKCYQFALGQGTTLNNGHSNDTVHDRTPYRTLLMNELGVPFHLGTRQVCIAWSSSSCHDGKAWLHVCVTGDDENATASFIYNGRLVDSIGSWSKKILRTQESECVCINGTCTVVMTDGSASGKADTKILFIEEGKIVHTSTLSGSAQHVEECSCYPRYPGVRCVCRDNWKGSNRPIVDINVKDYSIVSSYVCSGLVGDTPRKNDSFSSSHCLDPNNEEGGHGVKGWAFDDGNDVWMGRTISEKLRSGYETFKVIEGWSKPNSKLQTNRQVIVERGNRSGYSGIFSVEGKSCINRCFYVELIRGRKEETEVWWTSNSIVVFCGTSGTYGTGSWPDGADINLMPI

SEQ ID NO: 15625 - protein, 469 aa, synthetic construct
  REGION 1..469: note = neuraminidase__InfluenzaA__ABL67333
MNPNQKIITIGSVSLTIATICFLMQIAILVITVTLHFKQYECNSPPNNQVMLCEPTIIERNITEIVYLTNTTIEKEICPKLAEYRNWSKPQCNITGFAPFSKDNSIRLSAGGDIWVTREPYVSCDPDKCYQFALGQGTTLNNGHSNDTVHDRTPYRTLLMNELGVPFHLGTRQVCIAWSSSSCHDGKAWLHVCVTGDDENATASFIYNGKLVDSIGSWSKKILRTQESECVCINGTCAVVMTDGSASGKADTKILFIEEGKIVHISTLSGSAQHVEECSCYPRYPGVRCVCRDNWKGSNRPIVDINVKDYSIVSSYVCSGLVGDTPRKNDSFSSSHCLDPNNEEGGHGVKGWAFDDGNDVWMGRTISEKLRSGYETFKVIEGWSKPNSKLQTNRQVIVERGNRSGYSGIFSVEGKSCINRCFYVELIRGRKEETEVWWTSNSIVVFCGTSGTYGTGSWPDGADINLMPI

SEQ ID NO: 15626 - protein, 469 aa, synthetic construct; identical to SEQ ID NO: 14591
  REGION 1..469: note = neuraminidase__InfluenzaA__ABL67344

SEQ ID NO: 15627 - protein, 469 aa, synthetic construct
  REGION 1..469: note = neuraminidase__InfluenzaA__ABL67355
MNPNQKIITIGSVSLTIATICFLMQIAILVTTVTLHFKQHECNSPPNNQVMLCEPTIIERNITEIVYLTNTTIEKEICPKLVEYRNWSKPQCNITGFAPFSKDNSIRLSAGGDIWVTREPYVSCDPEKCYQFALGQGTTLNNGHSNDTVHDRTPYRTLLMNELGVPFHLGTKQVCIAWSSSSCHDGKAWLHVCVTGDDKNATASFIYNGRLVDSIGSWSKKILRTQESECVCINGTCTVVMTDGSASGKADTKILFIEEGKIVHISTLSGSAQHVEECSCYPRYPGVRCVCRDNWKGSNRPIVDINVKDYSIVSSYVCSGLVGDTPRKNDSFSSSHCLDPNNEEGGHGVKGWAFDDGNDVWMGRTISEKLRSGYETFKVIEGWSKPNSKLQINRQVIVERGNRSGYSGIFSVEGKSCINRCFYVELIRGRKEETEVWWTSNSIVVFCGTSGTYGTGSWPDGADINLMPI

SEQ ID NO: 15628 - protein, 469 aa, synthetic construct
  REGION 1..469: note = neuraminidase__InfluenzaA__ABL67366
MNPNQKIITIGSVSLTIATICFLMQIAILVTTVTLHFKQHECNSPPNNQVMLCEPTIIERNITEIVYLTNTTIEKEICPKLAEYRNWSKPQCNITGFAPFSKDNSIRLSAGGDIWVTREPYVSCDPDKCYQFALGQGTTLNNGHSNDTVHDRTPYRTLLMNELGVPFHLGTRQVCIAWSSSSCHDGKAWLHVCVTGDDKNATASFIYNGRLVDSIGSWSKKILRTQESECVCINGTCTVVMTDGSASGKADTRILFIEEGKIVHISTLSGSAQHVEECSCYPRYPGVRCVCRDNWKGSNRPIVDINVKDYSIVSSYVCSGLVGDTPRKNDSFSSSHCLDPNNEEGGHGVKGWAFDDGNDVWMGRTISEKLRSGYETFKVIEGWSKPNSKLQINRQVIVERGNRSGYSGIFSVEGKSCINRCFYVELIRGRKEETEVWWTSNSIVVFCGTSGTYGTGSWPDGADINLMPI

SEQ ID NO: 15629 - protein, 469 aa, synthetic construct
  REGION 1..469: note = neuraminidase__InfluenzaA__ABL67377
MNPNQKIITIGSASLTIAIICFLIQIAILVTTVTLHFKQHECNSPPNNQVMLCEPTIIERNITEIVYLTNTTIEKEICPKLAEYRNWSKPQCNITGFAPFSKDNSIRLSAGGDIWVTREPYVSCDPDKCYQFALGQGTTLNNGHSNDTVHDRTPYRTLLMNELGVPFHLGTRQVCIAWSSSSCHDGKAWLHVCVTGDDKNATASFIYNGRLVDSISSWSKKILRTQESECVCINGTCTVVMTDGSASGKADTKILFIEEGKIIHISTLSGSAQHVEECSCYPRYPGVRCVCRDNWKGSNRPIVDINVKDYSIVSSYVCSGLVGDTPRKNDSFSSSHCLDPNNEEGGHGVKGWAFDDGNDVWMGRTISEKLRSGYETFKVIEGWSNPNSKLQINRQVIVERGNRSGYSGIFSVEGKSCINRCFYVELIRGRKEETEVWWTSNSIVVFCGTSGTYGTGSWPDGADLNLMPI

SEQ ID NO: 15630 - protein, 469 aa, synthetic construct; identical to SEQ ID NO: 14327
  REGION 1..469: note = neuraminidase__InfluenzaA__ABL67388

SEQ ID NO: 15631 - protein, 469 aa, synthetic construct; identical to SEQ ID NO: 14327
  REGION 1..469: note = neuraminidase__InfluenzaA__ABL67399

SEQ ID NO: 15632 - protein, 469 aa, synthetic construct; identical to SEQ ID NO: 14712
  REGION 1..469: note = neuraminidase__InfluenzaA__ABL67410

SEQ ID NO: 15633 - protein, 469 aa, synthetic construct
  REGION 1..469: note = neuraminidase__InfluenzaA__ABL67421
MNPNQKIITIGSISLTISTICFFMQIAILITTVTLHFKQYEFNSPPNNQVMLCEPTIIERNITEIVYLTNTTIEKEICPKLAEYRNWSKPQCNITGFAPFSKDNSIRLSAGGDIWVTREPYVSCDPDKCYQFALGQGTTLNNVHSNDTVHDRTPYRTLLMNELGVPFHLGTKQVCIAWSSSSCHDGKAWLHVCVTGDDKNATASFIYNGRLVDSIVSWSKEILRTQESECVCINGTCTVVMTDGSASGKADTKILFIEEGKIVHTSTLSGSAQHVEECSCYPRYPGVRCVCRDNWKGSNRPIVDINIKDYSIVSSYVCSGLVGDTPRKNDSSSSSHCLDPNNEEGGHGVKGWAFDDGNDVWMGRTISEKLRSGYETFKVIEGWSNPNSKLQINRQVIVDRGNRSGYSGIFSVEGKSCINRCFYVELIRGRKEETEVLWTSNSIVVFCGTSGTYGTGSWPDGADINLMPI

SEQ ID NO: 15634 - protein, 449 aa, synthetic construct
  REGION 1..449: note = neuraminidase__InfluenzaA__ABL67772
MNPNKKIITIGSICMVTGMVSLMLQIGNLISIWVSHSIHTGNQHKAEPISNTNFLTEKAVASVKLAGNSSLCPINGWAVYSKDNSIRIGSKGDVFVIREPFISCSHLECRTFFLTQGALLNDKHSNGTVKDRSPHRTLMSCPVGEAPSPYNSRFESVAWSASACHDGTSWLTIGISGPDNGAVAVLKYNGIITDTIKSWRNNILRTQESECACVNGSCFTVMTDGPSNGQASHKIFKMEKGKVVKSVELDAPNYHYEECSCYPDAGEITCVCRDNWHGSNRPWVSFNQNLKYQIGYICSGVFGDNPRPNDGTGSCGPVSSNGAYGVKGFSFKYGNGVWIGRTKSTNSRSGFEMIWDPNGWTETDSSFSVKQDIVAITDWSGYSGSFVQHPELTGLDCIRPCFWVELIRGRPKESTIWTSGSSISFCGVNSDTVGWSWPDGAELPFTIDK

SEQ ID NO: 15635 - protein, 449 aa, synthetic construct
  REGION 1..449: note = neuraminidase__InfluenzaA__ABL67783
MNPNKKIITIGSICMVTGMVSLMLQIGNLISIWVSHSIHTGNQHKAEPISNTNFLTEKAVASVKLAGNSSLCPINGWAVYSKDNSIRIGSKGDVFVIREPFISCSHLECRTFFLTQGALLNDKHSNGTVKDRSPHRTLMSCPVGEAPSPYNSRFESVAWSASACHDGTSWLTIGISGPDSGAVAVLKYNGIITDTIKSWRNNILRTQESECACVNGSCFTVMTDGPSNGQASHKIFKMEKGKVVKSVELDAPNYHYEECSCYPDAGEITCVCRDNWHGSNRPWVSFNQNLEYQIGYICSGVFGDNPRPNDGTGSCGPVSSNGAYGVKGFSFKYGNGVWIGRTKSTNSRSGFEMIWDPNGWTETDSSFSVKQDIVAITDWSGYSGSFVQHPELTGLDCIRPCFWVELIRGRPKESTIWTSGSSISFCGVNSDTVGWSWPDGAELPFTIDK

SEQ ID NO: 15636 - protein, 449 aa, synthetic construct
  REGION 1..449: note = neuraminidase__InfluenzaA__ABL67796
MNPNKKIITIGSICMVTGMVSLMLQIGNLISIWVSHSIHTGNQHKAEPISNTNFLTEKAVASVKLAGNSSLCPINGWAVYSKDNSIRIGSKGDVFVIREPFISCSHLECRTFFLTQGALLNDKHSNGTVKDRSPHRTLMSCPVGEAPSPYNSRFESVAWSASACHDGTSWLTIGISGPDNGAVAVLKYNGIITDTIKSWRNNILRTQESECACVNGSCFTVMTDGPSNGQASHKIFKMEKGKVVKSVELDAPNYHYEECSCYPDAGEITCVCRDNWHGSNRPWVSFNQNLEYQIGYICSGVFGDNPRPNDGTGSCGPVSYNGAYGVKGFSFKYGNGVWIGRTKSTNSRSGFEMIWDPNGWTETDSSFSVKQDIVAITDWSGYSGSFVQHPELTGLDCIRPCFWVELIRGRPKESTIWTSGSSISFCGVNSDTVGWSWPDGAELPFTIDK

SEQ ID NO: 15637 - protein, 449 aa, synthetic construct
  REGION 1..449: note = neuraminidase__InfluenzaA__ABL67807
MNPNKKIITIGSICMVTGMVSLMLQIGNLISIWVSHSIHTGNQHKAEPISNTNLLTEKAVASVKLAGNSSLCPIDGWAVYSKDNSIRIGSKGDVFVVREPFISCSHLECRTFFLTQGALLNDKHSNGTVKDRSPHRTLMSCPVGEAPSPYNSRFESVAWSASACHDGTSWLTIGISGPDNGAVAVLKYNGIITDTIKSWRNNILRTQESECACVNGSCFTVMTDGPSNGQASHKIFKMEKGKVVKSVELDAPNYHYEECSCYPDAGEITCVCRDNWHGSNRPWVSFNQNLEYQIGYICSGVFGDNPRPNDGAGSCGPVSSNGAYGVKGFSFKYGNGVWIGRTKSTNSRSGFEMIWDPNGWTETDSSFSVKQDIVAITDWSGYSGSFVQHPELTGLDCIRPCFWVELIRGRPKESTIWTSGSSISFCGVNSDTVGWSWPDGAELPFTIDK

SEQ ID NO: 15638 - protein, 449 aa, synthetic construct
  REGION 1..449: note = neuraminidase__InfluenzaA__ABL67818
MNPNKKIITIGSICMVTGMVSLMLQIGNLISIWVSHSIHTGNQHKAEPISNTNLLTEKAVASVKLAGNSSLCPIDGWAVYSKDNSIRIGSKGDVFVVREPFISCSHLECRTFFLTQGALLNDKHSNGTVKDRSPHRTLMSCPVGEAPSPYNSRFESVAWSASACHDGTSWLTIGISGPDNGAVAVLKYNGIITDTIKSWRNNILRTQESECACVNGYCFTVMTDGPSNGQASHKIFKMEKGKVVKSVELDAPNYHYEECSCYPDAGEITCVCRDNWHGSNRPWVSFNQNLEYQIGYICSGVFGDNPRPNDGAGSCGPVSSNGAYGVKGFSFKYGNGVWIGRTKSTNSRSGFEMIWDPNGWTETDSSFSVKQDIVAITDWSGYSGSFVQHPELTGLDCIRPCFWVELIRGRPKESTIWTSGSSISFCGVNSDTVGWSWPDGAELPFTIDK

SEQ ID NO: 15639 - protein, 449 aa, synthetic construct
  REGION 1..449: note = neuraminidase__InfluenzaA__ABL67829
MNPNKKIITIGSICMVTGMVSLMLQIGNLISIWVSHSIHTGNQHKAEPISNTNLLTEKAVASVKLAGNSSLCPINGWAVYSKDNSIRIGSKGDVFVVREPFISCSHLECRTFFLTQGALLNDKHSNGTVKDRSPHRTLMSCPVGEAPSPYNSRFESVAWSASACHDGTSWLTIGISGPDNGAVAVLKYNGIITDTIKSWRNNILRTQESECACVNGFCFTVMTDGPSNGQASHKIFKMEKGKVVKSVELDAPNYHYEECSCYPDAGEITCVCRDNWHGSNRPWVSFNQNLEYQIGYICSGVFGDNPRPNDGAGSCGPVASNGAYGVKGFSFKYGNGVWIGRTKSTNSRSGFEMIWDPNGWTETDSSFSVKQDIVAITDWSGYSGSFVQHPELTGLDCIRPCFWVELIRGRPKESTIWTSGSSISFCGVNSDTVGWSWPDGAELPFTIDK

SEQ ID NO: 15640 - protein, 469 aa, synthetic construct; identical to SEQ ID NO: 14712
  REGION 1..469: note = neuraminidase__InfluenzaA__ABM22018

SEQ ID NO: 15641 - protein, 470 aa, synthetic construct; identical to SEQ ID NO: 15556
  REGION 1..470: note = neuraminidase__InfluenzaA__ABM22029

SEQ ID NO: 15642 - protein, 469 aa, synthetic construct; identical to SEQ ID NO: 14714
  REGION 1..469: note = neuraminidase__InfluenzaA__ABM22040

SEQ ID NO: 15643 - protein, 469 aa, synthetic construct; identical to SEQ ID NO: 15621
  REGION 1..469: note = neuraminidase__InfluenzaA__ABM22062

SEQ ID NO: 15644 - protein, 469 aa, synthetic construct
  REGION 1..469: note = neuraminidase__InfluenzaA__ABM22073
MNPNQKIITIGSVSLTIATICFLMQIAILVTTVTLHFKQYECNSPPNNQVMLCEPTIIERNITEIVYLTNTTIEKEICPKLAEYRNWSKPQCNITGFAPFSKDNSIRLSAGGDIWVTREPYVSCDPDKCYQFALGQGTTLNNGHSNDTVHDRTPYRTLLMNELGVPFNLGTRQVCIAWSSSSCHDGKAWLHVCVTGDDENATASFIYNGKLVDSIGSWSKKILRTQESECVCINGTCAVVMTDGSASGKADTKILFIEEGKIVHISTLSGSAQHVEECSCYPRYPGVRCVCRDNWKGSNRPIVDINVKDYSIVSSYVCSGLVGDTPRKNDSFSSSHCLDPNNEEGGHGVKGWAFDDGNDVWMGRTISEKLRSGYETFKVIEGWSKPNSKLQTNRQVIVERGNRSGYSGIFSVEGKSCINRCFYVELIRGRKEETEVWWTSNSIVVFCGTSGTYGTGSWPDGADINLMPI

SEQ ID NO: 15645 - protein, 469 aa, synthetic construct; identical to SEQ ID NO: 14591
  REGION 1..469: note = neuraminidase__InfluenzaA__ABM22084

SEQ ID NO: 15646 - protein, 469 aa, synthetic construct
  REGION 1..469: note = neuraminidase__InfluenzaA__ABM22095
MNPNQKIITIGSVSLTIATICFLMQIAILVTTVTLHFKQHECNSPPNNQAMLCEPTIIERNITEIVHLTNTTIEKEICPKLVEYRNWSKPQCNITGFAPFSKDNSIRLSAGGDIWVTREPYVSCDPDKCYQFALGQGTTLNNGHSNDTVHDRTPYRTLLMNELGVPFHLGTRQVCIAWSSSSCHDGKAWLHVCVTGDDKNATASFIYNGRLVDSIGSWSKKILRTQESECVCINGTCTVVMTDGSASGKADTKILFIEEGKIVHISTLSGSAQHVEECSCYPRYPGVRCVCRDNWKGSNRPIVDINVKDYSIVSSYVCSGLVGDTPRKNDSFSSSHCLDPNNEEGGHGVKGWAFDDGNDVWMGRTISEKLRSGYETFKVIEGWSKPNSKLQINRQVIVERGNRSGYSGIFSVEGKSCINRCFYVELIRGRKEETEVWWTSNSIVVFCGTSGTYGTGSWPDGADINLMPI

SEQ ID NO: 15647 - protein, 469 aa, synthetic construct; identical to SEQ ID NO: 14591
  REGION 1..469: note = neuraminidase__InfluenzaA__ABM22106

SEQ ID NO: 15648 - protein, 469 aa, synthetic construct; identical to SEQ ID NO: 14591
  REGION 1..469: note = neuraminidase__InfluenzaA__ABM22117

SEQ ID NO: 15649 - protein, 469 aa, synthetic construct; identical to SEQ ID NO: 15602
  REGION 1..469: note = neuraminidase__InfluenzaA__ABM22128

SEQ ID NO: 15650 - protein, 469 aa, synthetic construct
  REGION 1..469: note = neuraminidase__InfluenzaA__ABM22139
MNPNQKIITIGSVSLTISTICFFMQIAILITTVTLHFKQYEFNSPPNNQVMLCEPTIIERNITEIVYLTNTTIEKEICPKLAEYRNWSKPQCNITGFAPFSKDNSIRLSAGGDIWVTREPYVSCDPDKCYQFALGQGTTLNNVHSNDTVHDRTPYRTLLMNELGVPFHLGTKQVCIAWSSSSCHDGKAWLHVCVTGDDKNATASFIYNGRLVDSIVSWSKEILRTQESECVCINGTCTVVMTDGSASEKADTKILFIEEGKIVHTSTLSGSAQHVEECSCYPRYPGVRCVCRDNWKGSNRPIVDINIKDYSIVSSYVCSGLVGDTPRKNDSSSSSHCLDPNNEEGGHGVKGWAFDDGNDVWMGRTISEKLRSGYETFKVIEGWSNPNSKLQINRQVIVDRGNRSGYSGIFSVEGKSCINRCFYVELIRGRKEETEVLWTSNSIVVFCGTSGTYGTGSWPDGADINLMPI

SEQ ID NO: 15651 - protein, 469 aa, synthetic construct
  REGION 1..469: note = neuraminidase__InfluenzaA__ABM22150
MNPNQKIITIGSVSLTISTICFFMQIAILITTVTLHFKQYEFNSLPNNQVMLCEPTIIERNITEIVYLTNTTIEKEICPELAEYRNWSKPQCDITGFAPFSKDNSIRLSAGGDIWVTREPYVSCDPDKCYQFALGQGTTLNNVHSNDTVHDRTPYRTLLMNELGVPFHLGTKQVCIAWSSSSCHDGKAWLHVCVTGDDKNATASFIYNGRLVDSIVSWSKKILRTQESECVCINGTCTVVMTDGSASGKADTKILFIEEGKIVHTSTLSGSAQHVEECSCYPRYPGVRCVCRDNWKGSNRPIVDINIKDYSIVSSYVCSGLVGDTPRKNDSSSSSHCLDPNNEEGGHGVKGWAFDDGNDVWMGRTISEKLRSGYETFKVIEGWSNPNSKLQINRQVIVDRGNRSGYSGIFSVEGKSCINRCFYVELIRGRKEETEVLWTSNSIVVFCGTSGTYGTGSWPDGADINLMPI

SEQ ID NO: 15652 - protein, 470 aa, synthetic construct; identical to SEQ ID NO: 15059
  REGION 1..470: note = neuraminidase__InfluenzaA__ABM22161

SEQ ID NO: 15653 - protein, 470 aa, synthetic construct; identical to SEQ ID NO: 15059
  REGION 1..470: note = neuraminidase__InfluenzaA__ABM22172

SEQ ID NO: 15654 - protein, 470 aa, synthetic construct; identical to SEQ ID NO: 15059
  REGION 1..470: note = neuraminidase__InfluenzaA__ABM22183

SEQ ID NO: 15655 - protein, 470 aa, synthetic construct; identical to SEQ ID NO: 15059
  REGION 1..470: note = neuraminidase__InfluenzaA__ABM22194

SEQ ID NO: 15656 - protein, 470 aa, synthetic construct; identical to SEQ ID NO: 15059
  REGION 1..470: note = neuraminidase__InfluenzaA__ABM22205

SEQ ID NO: 15657 - protein, 470 aa, synthetic construct; identical to SEQ ID NO: 15059
  REGION 1..470: note = neuraminidase__InfluenzaA__ABM22216

SEQ ID NO: 15658 - protein, 470 aa, synthetic construct; identical to SEQ ID NO: 15059
  REGION 1..470: note = neuraminidase__InfluenzaA__ABM22227

SEQ ID NO: 15659 - protein, 470 aa, synthetic construct; identical to SEQ ID NO: 15059
  REGION 1..470: note = neuraminidase__InfluenzaA__ABM22238

SEQ ID NO: 15660 - protein, 470 aa, synthetic construct
  REGION 1..470: note = neuraminidase__InfluenzaA__ABM22271
MNPNQKIITIGSISIVIGIISLILQIGNIISIWASHSIQTGSQNHTGICNQRIITYENSTWVNQTYVNINNTNVVAGKDKTSMTLAGNSSLCPIRGWAIYTKDNSIRIGSKGDVFVIREPFISCSHLECRTFFLTQGALLNDKHSNGTVKDRSPYRALMSCPLGEAPSPYNSRFESVAWSASACHDGLGWLTIGISGPDNGAVAVLKYNGIITETIKSWKKRILRTQESECVCMNGSCFTIMTDGPSNGAASYRIFKIEKGRVTKSIELGAPNYHYEECSCYPDTGTVMCVCRDNWHGSNRPWVSFNQNLDYQIGYICSGVFGDNPRPKDGEGSCNPVTVDGADGVKGFSYRYGNGVWIGRTKSNRLRKGFEMIWDPNGWTDTDSDFSMKQDIVAMTDWSGYSGSFVQHPELTGLDCMRPCFWVELVRGLPRENTTIWTSGSSISFCGVNSDTANWSWPDGAELPFTIDK

SEQ ID NO: 15661 - protein, 470 aa, synthetic construct; identical to SEQ ID NO: 14968
  REGION 1..470: note = neuraminidase__InfluenzaA__ABM22282

SEQ ID NO: 15662 - protein, 469 aa, synthetic construct; identical to SEQ ID NO: 14343
  REGION 1..469: note = neuraminidase__InfluenzaA__ABM22304

SEQ ID NO: 15663 - protein, 469 aa, synthetic construct; identical to SEQ ID NO: 14343
  REGION 1..469: note = neuraminidase__InfluenzaA__ABM22315

SEQ ID NO: 15664 - protein, 469 aa, synthetic construct; identical to SEQ ID NO: 14343
  REGION 1..469: note = neuraminidase__InfluenzaA__ABM22326

SEQ ID NO: 15665 - protein, 469 aa, synthetic construct; identical to SEQ ID NO: 14343
  REGION 1..469: note = neuraminidase__InfluenzaA__ABM22337

SEQ ID NO: 15666 - protein, 469 aa, synthetic construct; identical to SEQ ID NO: 14346
  REGION 1..469: note = neuraminidase__InfluenzaA__ABM22348

SEQ ID NO: 15667 - protein, 469 aa, synthetic construct; identical to SEQ ID NO: 14346
  REGION 1..469: note = neuraminidase__InfluenzaA__ABM22359

SEQ ID NO: 15668 - protein, 469 aa, synthetic construct; identical to SEQ ID NO: 14346
  REGION 1..469: note = neuraminidase__InfluenzaA__ABM22370

SEQ ID NO: 15669 - protein, 470 aa, synthetic construct; identical to SEQ ID NO: 14925
  REGION 1..470: note = neuraminidase__InfluenzaA__ABM66867

SEQ ID NO: 15670 - protein, 470 aa, synthetic construct; identical to SEQ ID NO: 15059
  REGION 1..470: note = neuraminidase__InfluenzaA__ABM66900

SEQ ID NO: 15671 - protein, 470 aa, synthetic construct; identical to SEQ ID NO: 15059
  REGION 1..470: note = neuraminidase__InfluenzaA__ABM66911

SEQ ID NO: 15672 - protein, 469 aa, synthetic construct; identical to SEQ ID NO: 14346
  REGION 1..469: note = neuraminidase__InfluenzaA__ABM66922

SEQ ID NO: 15673 - protein, 469 aa, synthetic construct; identical to SEQ ID NO: 14346
  REGION 1..469: note = neuraminidase__InfluenzaA__ABM66933

SEQ ID NO: 15674 - protein, 469 aa, synthetic construct; identical to SEQ ID NO: 14346
  REGION 1..469: note = neuraminidase__InfluenzaA__ABM66944

SEQ ID NO: 15675 - protein, 469 aa, synthetic construct; identical to SEQ ID NO: 14346
  REGION 1..469: note = neuraminidase__InfluenzaA__ABM66955

SEQ ID NO: 15676 - protein, 469 aa, synthetic construct; identical to SEQ ID NO: 14346
  REGION 1..469: note = neuraminidase__InfluenzaA__ABM66966

SEQ ID NO: 15677 - protein, 469 aa, synthetic construct; identical to SEQ ID NO: 14346
  REGION 1..469: note = neuraminidase__InfluenzaA__ABM66977

SEQ ID NO: 15678 - protein, 469 aa, synthetic construct; identical to SEQ ID NO: 14346
  REGION 1..469: note = neuraminidase__InfluenzaA__ABM66988

SEQ ID NO: 15679 - protein, 469 aa, synthetic construct; identical to SEQ ID NO: 14346
  REGION 1..469: note = neuraminidase__InfluenzaA__ABM66999

SEQ ID NO: 15680 - protein, 469 aa, synthetic construct; identical to SEQ ID NO: 14346
  REGION 1..469: note = neuraminidase__InfluenzaA__ABM67010

SEQ ID NO: 15681 - protein, 469 aa, synthetic construct; identical to SEQ ID NO: 14346
  REGION 1..469: note = neuraminidase__InfluenzaA__ABM67021

SEQ ID NO: 15682 - protein, 470 aa, synthetic construct
  REGION 1..470: note = neuraminidase__InfluenzaA__ABM67054
MNPNQKIITIGSISIAIGTISLMLQIGNMISIWASHSIQTGSQNHTGICNQRIITYENSTWVNHTYVNINNTNVVAGKDKTSVTLAGNSSLCSISGWAIYTKDNSIRIGSKGDVFVIREPFISCSHLECRTFFLTQGALLNDKHSNGTVKDRSPYRALMSCPLGEAPSPYNSKFESVAWSASACHDGMGWLTIGISGPDNGAVAVLKYNGIITETIKSWKKRILRTQESECVCVNGSCFTIMTDGPSNGAASYKIFKIEKGKVTKSIELNAPNFHYEECSCYPDTGTVMCVCRDNWHGSNRPWVSFNQNLDYQIGYICSGVFGDNPRPKDGKGSCNPVTVDGADGVKGFSYKYGNGVWIGRTKSNRLRKGFEMIWDPNGWTDTDSDFSVKQDVVAITDWSGYSGSFVQHPELTGLDCIRPCFWVELVRGLPRENTTIWTSGSSISFCGVDSDTANWSWPDGAELPFTIDK

SEQ ID NO: 15683 - protein, 449 aa, synthetic construct
  REGION 1..449: note = neuraminidase__InfluenzaA__ABM68048
MNPNQKIITIGSICMVIGIVSLMLQIGNIISIWISHSIQTGNQCQAGPISNTKFLTEKAVASVTLAGNSSLCPISGWAVYSKDNSIRIGSRGDVFVIRESFISCSHLECRTFFLTQGALLNDKHSNGTVKDRSPHRTLMSCPVGEAPSPYNSRFESVAWSASACHDGTSWLTIGISGPDNGAVAVLKYNGIITDTIKSWRNNILRTQESECACVNGSCFTVMTDGPSNGQASYKIFKMEKGKVVKSVELDAPNYHYEECSCYPDAGEITCVCRDSWHGSNRPWVSFNQNLEYQIGYICSGVFGDNPRPNDGTGSCGPVSPNGAYGVKGFSFKYGNGVWIGRTKSTNSRSGFEMIWDPNGWTGTDSSFSVKQDIVAITDWSGYSGSFVQHPELTGLDCIRPCFWVELIRGRPKESTIWTSGSSISFCGVNSDTVSWSWPDGAELPFTIDK

SEQ ID NO: 15684 - protein, 449 aa, synthetic construct
  REGION 1..449: note = neuraminidase__InfluenzaA__ABM68049
MNPNQKIITIGSICMVIGIVSLMLQIGNIISIWISHSIQTGNQCQAEPISNTKFLTEKAVASVTLAGNSSLCPISGWAVYSKDNSIRIGSRGDVFVIREPFISCSHLECRTFFLTQGALLNDKHSNGTVKDRSPHRTLMSCPVGEAPSPYNSRFESVAWSASACHDGTSWLTIGISGPDNGAVAVLKYNGIITDTIKSWRNNILRTQESECACVNGSCFTVMTDGPSSGQASYKIFKMEKGKVVKSVELDAPNYHYEECSCYPDAGEITCVCRDSWHGSNRPWVSFNQNLEYQIGYICSGVFGDNPRPNDGTGSCGPVSPNGAYGVKGFSFKYGNGVWIGRTKSTNSRSGFEMIWDPNGWTGTDSSFSVKQDIVAITDWSGYSGSFVQHPELTGLDCIRPCFWVELIRGRPKESTIWTSGSSISFCGVNSDTVSWSWPDGAELPFTIDK

SEQ ID NO: 15685 - protein, 449 aa, synthetic construct
  REGION 1..449: note = neuraminidase__InfluenzaA__ABM90436
MNPNQKIITIGSICMVIGIVSLMLQIGNMISIWVSHSIQKGNQHQAESISNTNPLTEKAVASVTLAGNSSLCPIRGWAVHSKDNNIRIGSKGDVFVIREPFISCSHLECRTFFLTQGALLNDKHSNGTVKDRSPHRTLMSCPVGEAPSPYNSRFESVAWSASACHDGTSWLTIGISGPDNEAVAVLKYNGIITDTIKSWRNNILRTQESECACVNGSCFTVMTDGPSNGQASYKIFKMKKGKVVKSVELDAPNYHYEECSCYPDAGEITCVCRDNWHGSNRPWVSFNQNLEYQIGYICSGVFGDNPRPNDGTGSCGPMSPNGAYGVKGFSFKYGNGVWIGRTKSTNSRSGFEMIWDPNGWTGTDSSFSVKQDIVAITDWSGYSGSFVQHPELTGLDCIRPCFWVELIRGRPKESTIWTSGSSISFCGVNSDTVSWSWPDGAELPFTIDK

SEQ ID NO: 15686 - protein, 449 aa, synthetic construct; identical to SEQ ID NO: 15685
  REGION 1..449: note = neuraminidase__InfluenzaA__ABM90447

SEQ ID NO: 15687 - protein, 449 aa, synthetic construct; identical to SEQ ID NO: 15685
  REGION 1..449: note = neuraminidase__InfluenzaA__ABM90458

SEQ ID NO: 15688 - protein, 449 aa, synthetic construct; identical to SEQ ID NO: 15685
  REGION 1..449: note = neuraminidase__InfluenzaA__ABM90469

SEQ ID NO: 15689 - protein, 449 aa, synthetic construct
  REGION 1..449: note = neuraminidase__InfluenzaA__ABM90491
MNPNQKIITIGSICMVIGIVSLMLQIGNMISIWVSHSIQKGNQHQAESISNTNPLTEKAVASVTLAGNSSLCPIRGWAVHSKDNNIRIGSKGDVFVIREPFISCSHLECRTFFLTQGALLNDKHSNGTVKDRSPHRTLMSCPVGEAPSPYNSRFESVAWSASACHDGTSWLTIGISGPDNEAVAVLKYNGIITDTIKSWRNNILRTQESECACVNGSCFTVMTDGPSNGQASYKIFKMKKGKVIKSVELDATNYHYEECSCYPDAGEITCVCRDNWHGSNRPWVSFNQNLEYQIGYICSGVFGDNPRPNDGTGSCGPMSPNGAYGVKGFSFKYGNGVWIGRTKSTNSRSGFEMIWDPNGWTGTDSSFSVKQDIVAITDWSGYSGSFVQHPELTGLDCIRPCFWVELIRGRPKESTIWTSGSSISFCGVNSDTVSWSWPDGAELPFTIDK

SEQ ID NO: 15690 - protein, 449 aa, synthetic construct; identical to SEQ ID NO: 15689
  REGION 1..449: note = neuraminidase__InfluenzaA__ABM90502

SEQ ID NO: 15691 - protein, 449 aa, synthetic construct
  REGION 1..449: note = neuraminidase__InfluenzaA__ABM90524
MNPNQKIITIGSICMVIGIVSLMLQIGNMISIWVSHSIQTGNQHQAESISNTNPLTEKAVVSVTLAGNSSLCPIRGWAVHSKDNNIRIGSKGDVFVIREPFISCSHLECRTFFLTQGALLNDKHSNGTVKDRSPHRTLMSCPVGEAPSPYNSRFESVAWSASACHDGTSWLTIGISGPDNEAVAVLKYNGIITDTIKSWRNNILRTQESECACVNGSCFTVMTDGPSNGQASYKIFKMEKGKVVKSVELDAPNYHYEECSCYPDAGEITCVCRDNWHGSNRPWVSFNQNLEYQIGYICSGVFGDNPRPNDGTGSCGPMSPNGAYGVKGFSFKYGNGVWIGRTKSTNSRSGFEMIWDPNGWTGTDSSFSVKQDIVAITDWSGYSGSFVQHPELTGLDCIRPCFWVELIRGRPKESTIWTSGSSISFCGVNSDTVSWSWPDGAELPFTIDK

SEQ ID NO: 15692 - protein, 449 aa, synthetic construct; identical to SEQ ID NO: 15691
  REGION 1..449: note = neuraminidase__InfluenzaA__ABM90535

SEQ ID NO: 15693 - protein, 449 aa, synthetic construct; identical to SEQ ID NO: 15691
  REGION 1..449: note = neuraminidase__InfluenzaA__ABM90546

SEQ ID NO: 15694 - protein, 470 aa, synthetic construct
  REGION 1..470: note = neuraminidase__InfluenzaA__ABN50759
MNPNQKIITIGSICMAIGIISLILQIGNIISIWVSHSIQTGSQNHTGICNQRIITYENSTWVNQTYVNISNTNVVAGKDTTSMTLAGNSSLCPIRGWAIYSKDNSIRIGSKGDVFVIREPFISCSHLECRTFFLTQGALLNDKHSNGTVKDRSPYRALMSCPIGEAPSPYNSRFESVAWSASACHDGMGWLTIGISGPDDGAVAVLKYNGIITETIKSWRKQILRTQESECVCVNGSCFTIMTDGPSDGQASYRIFKIEKGKITKSIELDAPNSHYEECSCYPDTGTVMCVCRDNWHGSNRPWVSFNQNLDYQIGYICSGVFGDNPRPKDGKGSCDPVNVDGADGVKGFSYRYGNGVWIGRTKSNSSRKGFEMIWDPNGWTDTDSNFLVKQDVVAMTDWSGYSGSFVQHPELTGLDCIRPCFWVELIRGRPREKTTIWTSGSSISFCGVNSDTVNWSWPDGAELPFTIDK

SEQ ID NO: 15695 - protein, 469 aa, synthetic construct
  REGION 1..469: note = neuraminidase__InfluenzaA__ABN50770
MNPNQKIITIGSVSLTISTICFFMQIAILITTVTLHFKQYEFNSPPNNQVMLCEPTIIERNITEIVYLTNTTIEKEICPKLAEYRNWSKPQCDITGFAPFSKDNSIRLSAGGDIWVTREPYVSCDPDKCYQFALGQGTTLNNVHSNDTVHDRTPYRTLLMNELGVPFHLGTKQVCIAWSSSSCHDGKAWLHVCVTGDDKNATASFIYNGRLVDSVVSWSKKILRTQESECVCINGTCTVVMTDGSASGKADTKILFIEEGKIVHTSTLSGSAQHVEECSCYPRYPGVRCVCRDNWKGSNRPIVDINIKDYSIVSSYVCSGLVGDTPRKNDSSSSSHCLDPNNEEGGHGVKGWAFDDGNDVWMGRTISEKLRSGYETFKVIEGWSNPNSKLQINRQVIVDRGNRSGYSGIFSVEGKSCINRCFYVELIRGRKEETEVLWTSNSIVVFCGTSGTYGTGSWPDGADINLMPI

SEQ ID NO: 15696 - protein, 470 aa, synthetic construct
  REGION 1..470: note = neuraminidase__InfluenzaA__ABN50903
MNPNQKIITIGSICMAIGIISLILQIGNIISIWVSHSIQTGSQNHTGICNQRIITYENSTWVNQTYVNINNTNVVAGKDTTSVTLAGNSSLCPVRGWAIYSKDNSIRIGSKGDVFVIREPFISCSHLECRTFFLTQGALLNDKHSNGTVKDRSPYRALMSCPIGEAPSPYNSRFESVAWSASACHDGMGWLTIGISGPDDGAVAVLKYNGIITETIKSWRKRILRTQESECVCVNGSCFTIMTDGPSNGPASYRIFKIEKGKITKSIELDAPNSHYEECSCYPDTGTVMCVCRDNWHGSNRPWVSFNQNLDYQIGYICSGVFGDNPRPKDGKGSCGPVTVDGADGVKGFSYRYGNGVWIGRTKSNSSRKGFEMIWDPNGWTDTDSNFLVKQDVVAMTDWSGYSGSFIQHPELTGLDCMRPCFWVELIRGRPREKTTIWTSGSSISFCGVNSDTVNWSWPDGAELPFTIDK

SEQ ID NO: 15697 - protein, 470 aa, synthetic construct; identical to SEQ ID NO: 15059
  REGION 1..470: note = neuraminidase__InfluenzaA__ABN50920

SEQ ID NO: 15698 - protein, 470 aa, synthetic construct
  REGION 1..470: note = neuraminidase__InfluenzaA__ABN50931
MNPNQKIITIGSICMAIGIISLILQIGNIVSIWISHSIQTGSQNYTGICNQRIITYENSTWVNQTYVNINNTNVVAGQDTTSVALAGNSSLCPISGWAIYSKDNSIRIGSKGDVFVIREPFISCSHLECRTFFLTQGALLNDKHSNGTVKDRSPYRALMSCPIGEAPSPYNSRFESVAWSASACHDGMGWLTIGISGPDDGAVAVLKYNGIITETIKSWRKRILRTQESECVCVNGSCFTIMTDGPNNGPASYKIFKIEKGKITKSIELDAPNSHYEECSCYPDAGTVMCVCRDNWHGSNRPWVSFNQNLDYQIGYICSGVFGDNPRPKDGKGSCGPVTVDGADGVKGFSYRYGNGVWIGRTKSNSSRRGFEMIWDPNGWTDTDSKFLVKQDVVAITDWSGYSGSFVQHPELTGLDCMRPCFWVELIRGRPRENTTIWTSGSSISFCGVNGDTANWSWPDGAELPFTIDK

SEQ ID NO: 15699 - protein, 470 aa, synthetic construct
  REGION 1..470: note = neuraminidase__InfluenzaA__ABN50943
MNPNQKIITIGSICMAIGIISLILQIGNIVSIWISHSIQTGSQNYTGICNQRIITYENSTWVNQTYVNINNTNVVAGQDTTSVALAGNSSLCPISGWAIYSKDNSIRIGSKGDVFVIREPFISCSHLECRTFFLTQGALLNDKHSNGTVKDRSPYRALMSCPIGEAPSPYNSRFESVAWSASACHDGMGWLTIGISGPDDGAVAVLKYNGIITETIKSWRKRILRTQESECVCVNGSCFTIMTDGPNNGPASYKIFKIEKGKITKSIELDAPNSHYEECSCYPDAGTVMCVCRDNWHGSNRPWVSFNQNLDYQIGYICSGVFGDNPRPKDGKGSCGPVTVDGADGVKGFSYRYGNGVWIGRTKSNSSRRGFEMIWDPNGWTDTDSKFLVKQDVVAMTDWSGYSGSFVQHPELTGLDCMRPCFWVELIRGRPRENTTIWTSGSSISFCGVNGDTANWSWPDGAELPFTIDK

SEQ ID NO: 15700 - protein, 470 aa, synthetic construct; identical to SEQ ID NO: 14968
  REGION 1..470: note = neuraminidase__InfluenzaA__ABN50954

SEQ ID NO: 15701 - protein, 470 aa, synthetic construct; identical to SEQ ID NO: 14968
  REGION 1..470: note = neuraminidase__InfluenzaA__ABN50965

SEQ ID NO: 15702 - protein, 470 aa, synthetic construct; identical to SEQ ID NO: 14968
  REGION 1..470: note = neuraminidase__InfluenzaA__ABN50976

SEQ ID NO: 15703 - protein, 469 aa, synthetic construct; identical to SEQ ID NO: 14343
  REGION 1..469: note = neuraminidase__InfluenzaA__ABN50987

SEQ ID NO: 15704 - protein, 469 aa, synthetic construct; identical to SEQ ID NO: 14346
  REGION 1..469: note = neuraminidase__InfluenzaA__ABN50998

SEQ ID NO: 15705 - protein, 469 aa, synthetic construct
  REGION 1..469: note = neuraminidase__InfluenzaA__ABN51013
MNPNQKIITIGSVSLTISTICFFMQIAILITTVTLHFKQYEFNSPPNNQVMLCEPTIIERNITEIVYLTNTTIEKEICPKLAEYRNWSKPQCNITGFAPFSKDNSIRLSAGGDIWVTREPYVSCDPDKCYQFALGQGTTLNNVHSNDTVHDRTPYRTLLMNELGVPFHLGTKQVCIAWSSSSCHDGKAWLHVCVTGDDKNATASFIYNGRLVDSIVSWSKEILRTQESECVCINGTCTVVMTDGSASGKADTKILFIEEGKIVHTSTLSGSAQHVEECSCYPRYPGVRCVCRDNWKGSNRPIVDINIKDYSIVSSYVCSGLVGDTPRKNDSSSSSLCLDPNNEEGGHGVKGWAFDDGNDVWMGRTISEKLRSGYETFKVIEGWSNPNSKLQINRQVIVDRGNRSGYSGIFSVEGKSCINRCFYVELIRGRKEETEVLWTSNSIVVFCGTSGTYGTGSWPDGADINLMPI

SEQ ID NO: 15706 - protein, 469 aa, synthetic construct
  REGION 1..469: note = neuraminidase__InfluenzaA__ABN51024
MNPNQKIITIGSVSLTVSTICFFMQIAILITTVTLHFKQYEFNSPPNNQVMLCEPTIIERNITEIVYLTNTTIEKEICPKLAEYRNWSKPQCNITGFAPFSKDNSIRLSAGGDIWVTREPYVSCDPDKCYQFALGQGTTLNNVHSNDTVHDRTPYRTLLMNELGVPFHLGTKQVCIAWSSSSCHDGKAWLHVCVTGDDKNATASFIYNGRLVDSIVSWSKEILRTQESECVCINGTCTVVMTDGSASGKADTKILFIEEGKIVHTSTLSGSAQHVEECSCYPRYPGVRCVCRDNWKGSNRPIVDINIKDYSIVSSYVCSGLVGDTPRKNDSSSSSHCLDPNNEEGGHGVKGWAFDDGNDVWMGRTISEKLRSGYETFKVIEGWSNPNSKLQTNRQVIVDRGNRSGYSGIFSVEGKSCINRCFYVELIRGRKEETEVLWTSNSIVVFCGTSGTYGTGSWPDGADINLMPI

SEQ ID NO: 15707 - protein, 469 aa, synthetic construct
  REGION 1..469: note = neuraminidase__InfluenzaA__ABN51035
MNPNQKIITIGSVSLTISTICFFMQIAILITTVTLHFKQYEFNSPPNNQVMLCEPTIIERNITEIVYLTNTTIEKEICPKLAEYRNWSKPQCDITGFAPFSKDNSIRLSAGGDIWVTREPYVSCDPDKCYQFALGQGTTLNNVHSNDTVHDRTPYRTLLMNELGVPFHLGTKQVCIAWSSSSCHDGKAWLHVCVTGDDKNATASFIYNGRLVDSVVSWSKDILRTQESECVCINGTCTVVMTDGSASGKADTKILFIEEGKIVHTSTLSGSAQHVEECSCYPRYPGVRCVCRDNWKGSNRPIVDINIKNYSIVSSYVCSGLVGDTPRKTDSSSSSHCLDPNNEEGGHGVKGWAFDDGNDVWMGRTISEKLRLGYETFKVIEGWSNPNSKLQINRQVIVDRGNRSGYSGIFSVEGKSCINRCFYVELIRGRKEETEVLWTSNSIVVFCGTSGTYGTGSWPDGADINLMPI

SEQ ID NO: 15708 - protein, 469 aa, synthetic construct; identical to SEQ ID NO: 15707
  REGION 1..469: note = neuraminidase__InfluenzaA__ABN51046

SEQ ID NO: 15709 - protein, 470 aa, synthetic construct
  REGION 1..470: note = neuraminidase__InfluenzaA__ABN51069
MNPNQKIITIGSISIAIGIISLILQIGNIISIWASHSIQTGSQNHTGICNQRIITYENSTWVNQTYVNINNTNVVAGKDKTSMTLAGNSSLCPIRGWAIYTKDNSIRIGSKGDVFVIREPFISCSHLECRTFFLTQGALLNDKHSNGTVKDRSPYRALMSCPLGEAPSPYNSRFESVAWSASACHDGLGWLTIGISGPDNGAVAVLKYNGIITETIKSWKKRILRTQESECVCMNGSCFTIMTDGPSNGAASYRIFKIEKGRVTKSIELDAPNYHYEECSCYPDTGTVMCVCRDNWHGSNRPWVSFNQNLDYQIGYICSGVFGDNPRPKDGEGSCNPVTVDGADGVKGFSYRYGNGVWIGRTKSNRLRKGFEMVWDPNGWTDTDSDFSMKQDIVAMTDWSGYSGSFVQHPELTGLDCMRPCFWVELVRGLPRENTTIWTSGSSISFCGVNSDTANWSWPDGAELPFTIDK

SEQ ID NO: 15710 - protein, 470 aa, synthetic construct
  REGION 1..470: note = neuraminidase__InfluenzaA__ABN51080
MNPNQKIITIGSISIAIGIISLMLQIGNIISIWASHSIQTGSQNHTGVCNQRIITYENSTWVNHTYVNINNTNVIAEKDKTSVTLAGNSSLCSISGWAIYTKDNSIRIGSKGDVFVIREPFISCSHLECRTFFLTQGALLNDKHSNGTVKDRSPYRALMSCPLGEAPSPYNSKFESVAWSASACHDGMGWLTIGISGPDNGAVAVLKYNGIITETIKSWKKQILRTQESECVCVNGSCFTIMTDGPSNGAASYKIFKIEKGKVTKSVELNAPNFHYEECSCYPDTGTVMCVCRDNWHGSNRPWVSFNQNLDYQIGYICSGVFGDNPRPKDGEGSCNPVTVDGANGVKGFSYKYGNGVWIGRTKSNRLRKGFEMIWDPNGWTDTDSDFSVKQDVVAITDWSGYSGSFVQHPELTGLDCIRPCFWVELVRGLPKENTTIWTSGSSISFCGVNSDTANWSWPDGAELPFTIDK

SEQ ID NO: 15711 - protein, 470 aa, synthetic construct; identical to SEQ ID NO: 14386
  REGION 1..470: note = neuraminidase__InfluenzaA__ABN51091

SEQ ID NO: 15712 - protein, 469 aa, synthetic construct; identical to SEQ ID NO: 14095
  REGION 1..469: note = neuraminidase__InfluenzaA__ABN51102

SEQ ID NO: 15713 - protein, 469 aa, synthetic construct; identical to SEQ ID NO: 14103
  REGION 1..469: note = neuraminidase__InfluenzaA__ABN51113

SEQ ID NO: 15714 - protein, 469 aa, synthetic construct
  REGION 1..469: note = neuraminidase__InfluenzaA__ABN51124
MNPNQKIITIGSVSLTIATVCFLMQIAILVTTVTLHFKQYECDSPASNQVMPCEPIIIERNITEIVYLNNTTIEKEICPKVVEYRNWSKPQCQITGFAPFSKDNSIRLSAGGDIWVTREPYVSCDPGKCYQFALGQGTTLDNKHSNDTIHDRVPHRTLLMNELGVPFHLGTRQVCIAWSSSSCHDGKAWLHVCITGDDKNATASFIYDGRLVDSIGSWSQNILRTQESECVCINGTCTVVMTDGSASGRADTRILFIEEGKIVHISPLSGSAQHVEECSCYPRYPGVRCICRDNWKGSNRPVVDINMEDYSIDSSYVCSGLVGDTPRNDDRSSNSNCRNPNNERGNQGVKGWAFDNGDDVWMGRTISKDLRSGYETFKVIGGWSTPNSKSQINRQVIVDSDNRSGYSGIFSVEGKSCINRCFYVELIRGRKQETRVWWTSNSIVVFCGTSGTYGTGSWPDGANINFMPI

SEQ ID NO: 15715 - protein, 469 aa, synthetic construct; identical to SEQ ID NO: 14103
  REGION 1..469: note = neuraminidase__InfluenzaA__ABN51135

SEQ ID NO: 15716 - protein, 470 aa, synthetic construct; identical to SEQ ID NO: 14396
  REGION 1..470: note = neuraminidase__InfluenzaA__ABN51146

SEQ ID NO: 15717 - protein, 469 aa, synthetic construct
  REGION 1..469: note = neuraminidase__InfluenzaA__ABN51157
MNPNQKIITIGSVSLTIATICFLMQIAILVTTVTLHFKQYECNSPPNNQVMLCEPTIIERNITEIVYLTNTTIEKEICPKLAEYRNWSKPQCNITGFAPFSKDNSIRLSAGGDIWVTREPYVSCDPDKCYQFALGQGTTLNNGHSNDTVHDRTPYRTLLMNELGVPFHLGTRQVCIAWSSSSCHDGKAWLHVCVTGDDENATASFIYNGRLVDSIGSWSKKILRTQESECVCINGTCTVVMTDGSASGKAETKILFIEEGKIVHISTLSGSAQHVEECSCYPRYPGVRCVCRDNWKGSNRPIVDINVKDYSIVSSYVCSGLVGDTPRKNDSFSSSHCLDPNNEEGGHGVKGWAFDDGNDVWMGRTISEKLRSGYETFKVIEGWSKPNSKLQTNRQVIVERGNRSGYSGIFSVEGKSCINRCFYVELIRGRKEETEVWWTSNSIVVFCGTSGTYGTGSWPDGADINLMPI

SEQ ID NO: 15718 - protein, 469 aa, synthetic construct; identical to SEQ ID NO: 15706
  REGION 1..469: note = neuraminidase__InfluenzaA__ABN59393

SEQ ID NO: 15719 - protein, 454 aa, synthetic construct
  REGION 1..454: note = neuraminidase__InfluenzaA__ABN59415
MNPNQKIITIGSICLVVGLISLILQIGNIISIWISHSIQTGSQNHTGICNQNIITYKNSTWVKDTTSVILTGNSSLCPIRGWAIYSKDNSIRIGSKGDVFVIREPFISCSHLECRTFFLTQGALLNDKHSSGTVKDRSPYRALMSCPVGEAPSPYNSRFESVAWSASACHDGMGWLTIGISGPDNGAVAVLKYNGIITETIKSWRKKILRTQESECACVNGSCFTIMTDGPSDGLASYKIFKIEKGKVTKSIELNAPNSHYEECSCYPDTGKVMCVCRDNWHGSNRPWVSFDQNLDYQIGYICSGVFGDNPRPEDGTGSCGPVYVDGANGVKGFSYRYGNGVWIGRTKSHSSRHGFEMIWDPNGWTETDSKFSVRQDVVAMTDWSGYSGSFVQHPELTGLDCMRPCFWVELIRGRPKEKTIWTSASSISFCGVNSDTVDWSWPDGAELPFSIDK

SEQ ID NO: 15720 - protein, 470 aa, synthetic construct; identical to SEQ ID NO: 14951
  REGION 1..470: note = neuraminidase__InfluenzaA__ABN59426

SEQ ID NO: 15721 - protein, 469 aa, synthetic construct; identical to SEQ ID NO: 14253
  REGION 1..469: note = neuraminidase__InfluenzaA__ABO32659

SEQ ID NO: 15722 - protein, 469 aa, synthetic construct
  REGION 1..469: note = neuraminidase__InfluenzaA__ABO32670
MNPNQKIITIGSVSLTISTICFFMQIAILVTTVTLHFKQYECNSPPNNQVMLCEPTIIERNITEIVYLTNTTIEKEICPKLAEYRNWSKPQCNITGFAPFSKDNSIRLSAGGDIWVTREPYVSCDPDKCYQFALGQGTTLNNGHSNDTVHDRTPYRTLLMNELGVPFHMGTKQVCIAWSSSSCHDGKAWLHVCVTGDDENATASFIYNGRLVDSIGSWSKKILRTQESECVCINGTCTVVMTDGSASGKADTKILFIEEGKIVHTSTLSGSAQHVEECSCYPRYPGVRCVCRDNWKGSNRPIVDINIKDYSIVSSYVCSGLVGDTPRKNDSSSSSHCLDPNNEEGGHGVKGWAFDDGNDVWMGRTISEKLRSGYETFKVIEGWSKPNSKLQINRQVIVDRGNRSGYSGIFSVEGKSCINRCFYVELIRGRKQETEVLWTSNSIVVFCGTSGTYGTGSWPDGADINLMPI

SEQ ID NO: 15723 - protein, 470 aa, synthetic construct; identical to SEQ ID NO: 15574
  REGION 1..470: note = neuraminidase__InfluenzaA__ABO32681

SEQ ID NO: 15724 - protein, 469 aa, synthetic construct
  REGION 1..469: note = neuraminidase__InfluenzaA__ABO32695
MNPNQKIITIGSVSLTISTICFFMQIAILITTVTLHFKQYEFNSPPNNQVMLCEPTIIERNITEIVYLTNTTIEKEICPKLAEYRNWSKPQCNITGFAPFSKDNSIRLSAGGDIWVTREPYVSCDPDKCYQFALGQGTTLNNVHSNDTVHDRTPYRTLLMNELGVPFHLGTKQVCIAWSSSSCHDGKAWLHVCVTGDDKNATASFIYNGRLVDSIVSWSKEILRTQESECVCINGTCTVVMTDGSASGKADTKILFIEEGKIVHTSTLSGSAQHVEECSCYPRYPGVRCVCRDNWKGSNRPIVDINIKDYSIVSSYVCSGLVGDTPRKNDSSSSSHCSDPNNEEGGHGVKGWAFDDGNDVWMGRTISEKLRSGYETFKVIEGWSNPNSKLQINRQVIVDRGNRSGYSGIFSVEGKSCINRCFYVELIRGRKEETEVLWTSNSIVVFCGTSGTYGTGSWPDGADINLMPI

SEQ ID NO: 15725 - protein, 469 aa, synthetic construct; identical to SEQ ID NO: 14730
  REGION 1..469: note = neuraminidase__InfluenzaA__ABO32754

SEQ ID NO: 15726 - protein, 469 aa, synthetic construct; identical to SEQ ID NO: 14730
  REGION 1..469: note = neuraminidase__InfluenzaA__ABO32765

SEQ ID NO: 15727 - protein, 469 aa, synthetic construct; identical to SEQ ID NO: 15602
  REGION 1..469: note = neuraminidase__InfluenzaA__ABO32778

SEQ ID NO: 15728 - protein, 469 aa, synthetic construct
  REGION 1..469: note = neuraminidase__InfluenzaA__ABO32793
MNPNQKIITIGSVSLTISTICFFMQIVILITTVTLHFKQYEFNSPPNNQVMLCEPTIIERNITEIVYLTNTTIEKEICPKLAEYRNWSKPQCDITGFAPFSKDNSIRLSAGGDIWVTREPYVSCDPDKCYQFALGQGTTLNNVHSNDTVHDRTPYRTLLMNELGVPFHLGTKQVCIAWSSSSCHDGKAWLHVCVTGDDKNATASFIYNGRLVDSIVSWSKEILRTQESECVCINGTCTVVMTDGSASGKTDTKILFIEEGKIVHTSTLSGSAQHVEECSCYPRYPGVRCVCRDNWKGSNRPIVDINIKDYSIVSSYVCSGLVGDTPRKNDSSSSSHCLDPNNEEGGHGVKGWAFDDGNDVWMGRTISEKLRSGYETFKVIEGWSNPNSKLQINRQVIVDRGNRSGYSGIFSVEGKSCINRCFYVELIRGRKEETEVLWTSNSIVVFCGTSGTYGTGSWPDGADINLMPI

SEQ ID NO: 15729 - protein, 469 aa, synthetic construct; identical to SEQ ID NO: 14327
  REGION 1..469: note = neuraminidase__InfluenzaA__ABO32806

SEQ ID NO: 15730 - protein, 469 aa, synthetic construct; identical to SEQ ID NO: 14714
  REGION 1..469: note = neuraminidase__InfluenzaA__ABO32819

SEQ ID NO: 15731 - protein, 469 aa, synthetic construct; identical to SEQ ID NO: 14346
  REGION 1..469: note = neuraminidase__InfluenzaA__ABO32830

SEQ ID NO: 15732 - protein, 469 aa, synthetic construct; identical to SEQ ID NO: 14712
  REGION 1..469: note = neuraminidase__InfluenzaA__ABO32841

SEQ ID NO: 15733 - protein, 469 aa, synthetic construct; identical to SEQ ID NO: 14712
  REGION 1..469: note = neuraminidase__InfluenzaA__ABO32852

SEQ ID NO: 15734 - protein, 469 aa, synthetic construct; identical to SEQ ID NO: 14712
  REGION 1..469: note = neuraminidase__InfluenzaA__ABO32863

SEQ ID NO: 15735 - protein, 469 aa, synthetic construct; identical to SEQ ID NO: 15706
  REGION 1..469: note = neuraminidase__InfluenzaA__ABO32874

SEQ ID NO: 15736 - protein, 469 aa, synthetic construct; identical to SEQ ID NO: 15706
  REGION 1..469: note = neuraminidase__InfluenzaA__ABO32885

SEQ ID NO: 15737 - protein, 469 aa, synthetic construct; identical to SEQ ID NO: 15707
  REGION 1..469: note = neuraminidase__InfluenzaA__ABO32896

SEQ ID NO: 15738 - protein, 469 aa, synthetic construct; identical to SEQ ID NO: 15707
  REGION 1..469: note = neuraminidase__InfluenzaA__ABO32907

SEQ ID NO: 15739 - protein, 469 aa, synthetic construct
  REGION 1..469: note = neuraminidase__InfluenzaA__ABO32918
MNPNQKIITIGSVSLTISTICFFMQIAILITTVTLHFKQYEFNSPPNNQVMLCEPTIIERNITEIVYLTNTTIEKETCPKLAEYRNWSKPQCNITGFAPFSKDNSIRLSAGGDIWVTREPYVSCDPDKCYQFALGQGTTLNNVHSNDTVHDRTPYRTLLMNELGVPFHLGTKQVCIAWSSSSCHDGKAWLHVCVTGDDKNATASFIYNGRLVDSIVSWSKEILRTQESECVCINGTCTVVMTDGSASGKADTKILFIEEGKIVHTSTLSGSAQHVEECSCYPRYPGVRCVCRDNWKGSNRPIVDINIKDYSIVSSYVCSGLVGDTPRKNDSSSSSHCLDPNNEEGGHGVKGWAFDDGNDVWMGRTISEKLRSGYETFKVIEGWSNSNSKLQTNRQVIVDRGNRSGYSGIFSVEGKSCINRCFYVELIRGRKEETEVLWTSNSIVVFCGTSGTYGTGSWPDGADINLMPI

SEQ ID NO: 15740 - protein, 469 aa, synthetic construct; identical to SEQ ID NO: 15739
  REGION 1..469: note = neuraminidase__InfluenzaA__ABO32929

SEQ ID NO: 15741 - protein, 469 aa, synthetic construct; identical to SEQ ID NO: 15739
  REGION 1..469: note = neuraminidase__InfluenzaA__ABO32940

SEQ ID NO: 15742 - protein, 470 aa, synthetic construct
  REGION 1..470: note = neuraminidase__InfluenzaA__ABO32951
MNPNQKIITIGSISIAIGIISLMLQIGNIISIWASHSIQTGSQNHTGVCNQRIITYENSTWVNHTYVNINNTNVIAGKDKTSVTLAGNSSLCSISGWAIYTKDNSIRIGSKGDVFVIREPFISCSHLECRTFFLTQGALLNDKHSNGTVKDRSPYRALMSCPLGEAPSPYNSKFESVAWSASACHDGMGWLTIGISGPDNGAVAVLKYNGIITETIKSWKKQILRTQESECVCVNGSCFTIMTDGPSNGAASYKIFKIEKGKVTKSIELNAPNFHYEECSCYPDTGTVMCVCRDNWHGSNRPWVSFNQNLDYQIGYICSGVFGDNPRPKDGEGSCNPVTVDGANGVKGFSYKYGNGVWIGRTKSNRLRKGFEMIWDPNGWTDTDSDFSVKQDVVAITDWSGYSGSFVQHPELTGLDCIRPCFWVELVRGLPRENTTIWTSGSSISFCGVNSDTANWSWPDGAELPFTIDK

SEQ ID NO: 15743 - protein, 470 aa, synthetic construct
  REGION 1..470: note = neuraminidase__InfluenzaA__ABO32962
MNPNQKIITIGSISIAIGIISLMLQIGNIISIWASHSIQTGSKNHTGVCNQRIITYENSTWVNHTYVNINNTNVVAGKDKTSVTLAGNSSLCSISGWAIYTKDNSIRIGSKGDVFVIREPFISCSHLECRTFFLTQGALLNDKHSNGTVKDRSPYRALMSCPLGEAPSPYNSKFESVAWSANACHDGMGWLTIGISGPDNGAVAVLKYNGIITETIKSWKKQILRTQESECVCVNGSCFTIMTDGPSNGAASYKIFKIKKGKVTKSIELNAPNFHYEECSCYPDTGTVMCVCRDNWHGSNRPWVSFNQNLDYQIGYICSGVFGDNPRPKDGEGSCNPVTVDGANGVKGFSYKYGNGVWIGRTKSNRLRKGFEMIWDPNGWTDTDSDFSVRQDVVAITDWSGYSGSFVQHPELTGLDCIRPCFWVELVRGLPRENTTIWTSGSSISFCGVNSDTANWSWPDGAELPFTIDK

SEQ ID NO: 15744 - protein, 470 aa, synthetic construct; identical to SEQ ID NO: 14386
  REGION 1..470: note = neuraminidase__InfluenzaA__ABO32973

SEQ ID NO: 15745 - protein, 470 aa, synthetic construct; identical to SEQ ID NO: 14951
  REGION 1..470: note = neuraminidase__InfluenzaA__ABO32984

SEQ ID NO: 15746 - protein, 470 aa, synthetic construct; identical to SEQ ID NO: 14951
  REGION 1..470: note = neuraminidase__InfluenzaA__ABO32995

SEQ ID NO: 15747 - protein, 470 aa, synthetic construct
  REGION 1..470: note = neuraminidase__InfluenzaA__ABO33009
MNPNQKIITIGSICMAIGMISLILQIGNIISIWVSHSIQTGSQNHTGICNQRIITYENSTWVNQTYVNISNTNVVAGKDTTSMTLAGNSSLCPIRGWAIYSKDNSIRIGSKGDVFVIREPFISCSHLECRTFFLTQGALLNDKHSNGTVKDRSPYRALMSCPIGEAPSPYNSRFESVAWSASACHDGMGWLTIGISGPDDGAVAVLKYNGIITETIKSWRKQILRTQESECVCVNGSCFTIMTDGPSDGPASYRIFKIEKGKITKSIELDAPNSHYEECSCYPDTGTVMCVCRDNWHGSNRPWVSFNQNLDYQIGYICSGVFGDNPRPKDGKGSCDPVNVDGADGVKGFSYRYGNGVWIGRTKSNSSRKGFEMIWDPNGWTDTDSNFLVKQDVVAMTDWSGYSGSFVQHPELTGLDCMRPCFWVELIRGRPREKTTIWTSGSSISFCGVNSDTVNWSWPDGAELPFTIDK

SEQ ID NO: 15748 - protein, 469 aa, synthetic construct; identical to SEQ ID NO: 15518
  REGION 1..469: note = neuraminidase__InfluenzaA__ABO33039

SEQ ID NO: 15749 - protein, 469 aa, synthetic construct
  REGION 1..469: note = neuraminidase__InfluenzaA__ABO33050
MNPNQKIITIGSVSLTIATICFLMQIAILVTTVTLHFKQYECNSPPNNQVMLCEPTIIERNITEIVYLTNTTIEKEICPKLAEYRNWSKPQCNITGFAPFSKDNSIRLSAGGDIWVTREPYVSCDPDKCYQFALGQGTTLNNGHSNDTVHDRTPYRTLLMNELGVPFHLGTKQVCIAWSSSSCHDGKAWLHVCVTGDDENATASFIYNGRLVDSIGSWSKKILRTQESECVCINGTCTVVMTDGSASGKADTKILFIEEGKIVHTSPLSGSAQHVEECSCYPRYPGVRCVCRDNWKGSNRPIVDINVKDYSIVSSYVCSGLVGDTPRKNDSSSSSHCLDPNNEEGGHGVKGWAFDDGNDVWMGRTISEKLRSGYETFKVIEGWSKPNSKLQINRQVIVDRGNRSGYSGIFSVEGKSCINRCFYVELIRGRKQETEVLWTSNSIVVFCGTSGTYGTGSWPDGADINLMPI

SEQ ID NO: 15750 - protein, 469 aa, synthetic construct; identical to SEQ ID NO: 14730
  REGION 1..469: note = neuraminidase__InfluenzaA__ABO33061

SEQ ID NO: 15751 - protein, 469 aa, synthetic construct
  REGION 1..469: note = neuraminidase__InfluenzaA__ABO33072
MNPNQKIITIGSVSLTIATICFLMQIAILVTTVTLHFKQYECGSPANNQVMPCEPIIIERNITEIVYLTNTTIEKEICPKLVEYRNWSKPQCKITGFAPFSKDNSIRLSAGGDIWVTREPYVSCDPGKCYQFALGQGTTLDNKHSNDTIHDRTPHRTLLMNELGVPFHLGTRQVCIAWSSSSCHDGKAWLHVCVTGYDKNATASFIYDGRLVDSIGSWSKNILRTQESECVCINGTCTVVMTDGSASERADTKILFIEEGKIVHISPLSGSAQHVEECSCYPRYPGVRCVCRDNWKGSNRPVVDINVKDYSIVSSYVCSGLVGDTPRKNDRSSSSYCRNPNNEKGNHGVKGWAFDDGNDVWMGRTISEESRSGYETFKVIGGWSTPNSKLQINRQVIVDSDNRSGYSGIFSVEGKSCINRCFYVELIRGREQETRVWWTSNSIVVFCGTSGTYGTGSWPDGADINLMPI

SEQ ID NO: 15752 - protein, 470 aa, synthetic construct; identical to SEQ ID NO: 15059
  REGION 1..470: note = neuraminidase__InfluenzaA__ABO37991

SEQ ID NO: 15753 - protein, 470 aa, synthetic construct
  REGION 1..470: note = neuraminidase__InfluenzaA__ABO38013
MNPNQKIITIGSISIAIGIISLILQIGNIISIWASHSIQTGSQNHTGICNQRIITYENSTWVNQTYVNINNTNVVAGKDKTSMTLAGNSSLCPIRGWAIYTKDNSIRIGSKGDVFVIREPFISCSHLECRTFFLTQGALLNDKHSNGTVKDRSPYRALMSCPLGEAPSPYNSRFESVAWSASACHDGLGWLTIGISGPDNGAVAVLKYNGIITETIKSWKKRILRTQESECVCMNGSCFTIMTDGPSNGAASYRIFKIEKGRVTKSIELDAPNYHYEECSCYPDTGTVMCVCRDNWHGSNRPWVSFNQNLDYQIGYICSGVFGDNPRPKDGEGSCNPVTVDGADGVKGFSYRYGNGVWIGRTKSNRLRKGYEMIWDPNGWTDTDSDFSMKQDIVAMTDWSGYSGSFVQHPELTGLDCMRPCFWVELVRGLPRENTTIWTSGSSISFCGVNSDTANWSWPDGAELPFTIDK

SEQ ID NO: 15754 - protein, 470 aa, synthetic construct
  REGION 1..470: note = neuraminidase__InfluenzaA__ABO38024
MNPNQKIITIGSISIAIGIISLMLQIGNIISIWASHSIQTGSQNHTGICNQRIITYENNTWVNHTYVNINNTNIVAGKDKTSVTLAGNSSLCSISGWAIYTKDNSIRIGSKGDVFVIREPFISCSHLECRTFFLTQGALLNDKHSNGTVKDRSPYRALMSCPLGEAPSPYNSKFESVAWSASACHDGMGWLTIGISGPDNGAVAVLKYNGIITETIKSWKKRILRTQESECVCVNGSCFTIMTDGPSNGAASYKIFKIEKGKVTKSIELNAPNFHYEECSCYPDTGTVMCVCRDNWHGSNRPWVSFNQNLDYQIGYICSGVFGDNPRPKDGEGSCNPVTVDGADGVKGFSYKYGNGVWIGRTKSNRLRKGFEMVWDPNGWTDTDSDFSVKQDVVAITDWSGYSGSFVQHPELTGLDCIRPCFWVELVRGLPRENTTIWTSGSSISFCGVNSDTANWSWPDGAELPFTIDK

SEQ ID NO: 15755 - protein, 470 aa, synthetic construct
  REGION 1..470: note = neuraminidase__InfluenzaA__ABO38035
MNPNQKIITIGSISIAIGIISLMLQIGNIISIWASHSIQTGSQNHTGTCNQRIITYENSTWVNHTYVNINNTNVVAGKDKTSVTLAGNSSLCSISGWAIYTKDNSIRIGSKGDVFVIREPFISCSHLECRTFFLTQGALLNDKHSNGTVKDRSPYRALMSCPLGEAPSPYNSKFESVAWSASACHDGMGWLTIGISGPDNGAVAVLKYNGIITETIKSWKKRILRTQESECVCVNGSCFTIMTDGPSNGAASYKIFKIEKGKVTKSIELNAPNFHYEECSCYPDTGTVMCVCRDNWHGSNRPWVSFNQNLDYQIGYICSGVFGDNPRPKDGEGSCNPVTVDGADGVKGFSYKYGNGVWIGRTKSNRLRKGFEVIWDPNGWTDTDSDFSVKQDVVAITDWSGYSGSFVQHPELTGLDCIRPCFWVELVRGMPRENTTIWTSGSSISFCGVNSDTANWSWPDGAELPFTIDK

SEQ ID NO: 15756 - protein, 470 aa, synthetic construct; identical to SEQ ID NO: 14396
  REGION 1..470: note = neuraminidase__InfluenzaA__ABO38046

SEQ ID NO: 15757 - protein, 470 aa, synthetic construct; identical to SEQ ID NO: 14951
  REGION 1..470: note = neuraminidase__InfluenzaA__ABO38068

SEQ ID NO: 15758 - protein, 469 aa, synthetic construct; identical to SEQ ID NO: 14327
  REGION 1..469: note = neuraminidase__InfluenzaA__ABO38079

SEQ ID NO: 15759 - protein, 469 aa, synthetic construct
  REGION 1..469: note = neuraminidase__InfluenzaA__ABO38090
MNPNQKIITIGSVSLTIATICFLMQIAILVTTVTLHFKQYECNSPPNNQVMLCEPTIIERNITEIVYLTNTTIEKEICPKLAEYRNWSKPQCNITGFAPFSKDNSIRLSAGGDIWVTREPYVSCDPDKCYQFALGQGTTLNNGHSNDTVHERTPYRTLLMNELGVPFHLGTKQVCIAWSSSSCHDGKAWLHVCVTGDDENATASFIYNGRLVDSIGSWSKKILRTQESECVCINGTCTVVMTDGSASGKADTKILFIEEGKIVHTSLLSGSAQHVEECSCYPRYPGVRCVCRDNWKGSNRPIVDINVKDYSIVSSYVCSGLVGDTPRKNDSSSSSHCLDPNNEEGGHGVKGWAFDDGNDVWMGRTISEKLRSGYETFKVIEGWSKPNSKLQINRQVIVDRGNRSGYSGIFSVEGKSCINRCFYVELIRGRKQETEVLWTSNSIVVFCGTSGTYGTGSWPDGADINLMPI

SEQ ID NO: 15760 - protein, 469 aa, synthetic construct
  REGION 1..469: note = neuraminidase__InfluenzaA__ABO38101
MNPNQKIITIGSVSLTIATVCFLMQIAILATTVTLHFKQHECDSPASNQVMPCEPIIIERNITEIVYLNNTTIEKEICPEVVEYRNWSKPQCQITGFAPFSKDNSIRLSAGGDIWVTREPYVSCDPGKCYQFALGQGTTLDNKHSNGTIHDRIPHRTLLMNELGVPFHLGTKQVCVAWSSSSCHDGKAWLHVCVTGDDRNATASFIYDGRLVDSIGSWSQNILRTQESECVCINGTCTVVMTDGSASGRADTRILFIKEGKIVHISPLSGSAQHIEECSCYPRYPDVRCICRDNWKGSNRPVIDINMEDYSIDSSYVCSGLVGDTPRNDDSSSNSNCRDPNNERGNPGVKGWAFDNGDDVWMGRTINKDSRSGYETFKVIGGWSTPNSKSQVNRQVIVDNNNWSGYSGIFSVEGKSCINRCFYVELIRGRPQETRVWWTSNSIVVFCGTSGTYGTGSWPDGANINFMPI

SEQ ID NO: 15761 - protein, 469 aa, synthetic construct
  REGION 1..469: note = neuraminidase__InfluenzaA__ABO38233
MNPNQKIITIGSVSLTIATICFLMQIAILVTTVTLHFKQYECDSPANNQVMPCEPIIIERNITEIVYLTNTTIEKEICPKLVEYRNWSKPQCKITGFAPFSKDNSIRLSAGGDIWVTREPYVSCDPGKCYQFALGQGTTLDNKHSNDTIHDRTPHRTLLMNELGVPFHLGTRQVCIAWSSSSCHDGKAWLHVCVTGYDKNATASFIYDGRLVDSIGSWSKNILRTQESECVCINGTCTVVMTDGSASERADTKILFIEEGKIVHISPLSGSAQHVEECSCYPRYPGVRCVCRDNWKGSNRPVVDINVKDYSIASSYVCSGLVGDTPRKNDRYSSSYCRNPNNEKGNHGVKGWAFDDGNDVWMGRTISDESRSGYETFKVIGGWSTPNSKLQINRQVIVDSDNRSGYSGIFSVEGKSCINRCFYVELIRGREQETRVWWTSNSIVVFCGTSGTYGTGSWPDGADINLMPI

SEQ ID NO: 15762 - protein, 469 aa, synthetic construct; identical to SEQ ID NO: 15111
  REGION 1..469: note = neuraminidase__InfluenzaA__ABO38244

SEQ ID NO: 15763 - protein, 469 aa, synthetic construct; identical to SEQ ID NO: 14327
  REGION 1..469: note = neuraminidase__InfluenzaA__ABO38255

SEQ ID NO: 15764 - protein, 469 aa, synthetic construct; identical to SEQ ID NO: 14712
  REGION 1..469: note = neuraminidase__InfluenzaA__ABO38277

SEQ ID NO: 15765 - protein, 469 aa, synthetic construct; identical to SEQ ID NO: 15739
  REGION 1..469: note = neuraminidase__InfluenzaA__ABO38288

SEQ ID NO: 15766 - protein, 469 aa, synthetic construct
  REGION 1..469: note = neuraminidase__InfluenzaA__ABO38299
MNPNQKIITIGSVSLTIATVCFIMQIAILATTVTLHFKQHECDSPASNQVMPCEPIIIERNITEIVYLNNTTIEKEICPEAVEYRNWSKPQCQITGFAPFSKDNSIRLSAGGDIWVTREPYVSCDPGKCYQFALGQGTTLDNKHSNGTIHDRIPHRTLLMNELGVPFHLGTKQVCVAWSSSSCHDGKAWLHVCVTGDDRNATASFIYDGRLVDSIGSWSQNILRTQESECVCINGTCTVVMTDGSASGRADTRILFIKEGKIVHISPLSGSAQHVEECSCYPRYPDVRCTCRDNWKGSNRPVIDINMEDYSIDSSYVCSGLVGDTPRNDDSSSNSNCRDPNNERGNPGVKGWAFDNGDDVWMGRTINKDSRSGYETFKVIGGWSTPNSKSQVNRQVIVDNNNWSGYSGIFSVEGKSCINRCFYVELIRGRPQETRVWWTSNSIVVFCGTSGTYGTGSWPDGANINFMPI

SEQ ID NO: 15767 - protein, 469 aa, synthetic construct
  REGION 1..469: note = neuraminidase__InfluenzaA__ABO38310
MNPNQKIITIGSVSLTIATVCFLMQIAILATTVTLHFKQHECDSPTSNQVMPCEPIIIERNITEIVYLNNTTIEKEICPEVVEYRNWSKPQCQITGFAPFSKDNSIRLSAGGDIWVTREPYVSCDPGKCYQFALGQGTTLDNKHSNGTIHDRIPHRTLLMNELGVPFHLGTKQVCVAWSSSSCHDGKAWLHVCVTGDDRNATASFIYDGRLVDSIGSWSQNILRTQESECVCINGTCTVVMTDGSASGRADTRILFIKEGKIVHISPLSGSAQHIEECSCYPRYPDVRCICRDNWKGSNRPVIDINMEDYSIDSSYVCSGLVGDTPRNGDSSSNSNCRDPNNERGNPGVKGWAFDNGDDVWMGRTINKESRSGYETFKVIGGWSTPNSKSQVNRQVIVDNNNWSGYSGIFSVEGKSCINRCFYVELIRGRPQETRVWWTSNSIVVFCGTSGTYGTGSWPDGANINFMPI

SEQ ID NO: 15768 - protein, 470 aa, synthetic construct; identical to SEQ ID NO: 14930
  REGION 1..470: note = neuraminidase__InfluenzaA__ABO38332

SEQ ID NO: 15769 - protein, 470 aa, synthetic construct
  REGION 1..470: note = neuraminidase__InfluenzaA__ABO38343
MNPNQKIITIGSICMTIGIISLILQIGNIISIWVSHSIQTGSQNHTGICNQRIITYENSTWVNQTYVNINNTNVVAGKDTTSVTLAGNSSLCPIRGWAIYSKDNSIRIGSKGDVFVIREPFISCSHLECRTFFLTQGALLNDKHSNGTVKDRSPYRALMSCPIGEAPSPYNSRFESVAWSASACHDGMGWLTIGISGPDDGAVAVLKYNGIITETIKSWRKRILRTQESECVCVNGSCFTIMTDGPSNGPASYRIFKIEKGKITKSIELDAPNSHYEECSCYPDTGTVMCVCRDNWHGSNRPWVSFNQNLDYQIGYICSGVFGDNPRPKDGKGSCDPVTVDGADGVKGFSYRYGNGVWIGRTKSNSSRKGFEMIWDPNGWTDTDSNFLVKQDVVAMTDWSGYSGSFVQHPELTGLDCMRPCFWVELVRGRPREGTTVWTSGSSISFCGVNSDTANWSWPDGAELPFTIDK

SEQ ID NO: 15770 - protein, 469 aa, synthetic construct
  REGION 1..469: note = neuraminidase__InfluenzaA__ABO38354
MNPNQKIITIGSICMVVGIISLILQIGNIISIWISHSIQTGSQNHTGICNQNIITYKNSTWVNQTYVNISNTNVVAGQDTTSVILTGNSSLCPIRGWAIYSKDNSIRIGSKGDVFVIREPFISCSHLECRTFFLTQGALLNDRHSNGTVKDRSPYRALMSCPVGEAPSPYNSRFESVAWSASACHDGMGWLTIGISGPDNGAVAVLKYNGIITETIKSWRKKILRTQESECACVNGSCFTIMTDGPSNGLASYKIFKIEKGKVTKSIELNAPNSHYEECSCYPDTGKVMCVCRDNWHGSNRPWVSFDQNLDYQIGYICSGVFGDNPRPKDGTGSCGPVYVDGANGVKGFSYRYGNGVWIGRTKSNSSRHGFEMIWDPNGWTETDSKFSVRQDVVAMTDWSGYSGSFVQHPELTGLDCMRPCFWVELIRGRPKENTIWTSGSSISFCGVNSDTVDWSWPDGAELPFTIDK

SEQ ID NO: 15771 - protein, 470 aa, synthetic construct
  REGION 1..470: note = neuraminidase__InfluenzaA__ABO38365
MNPNQKIITIGSICMAIGIISLILQMGNIISIWVSHSIQTGSQNHTGICNQRIITYENSTWVNQTYVNINNTNVVAGKDTTSVTLAGNSSLCPIRGWAIYSKDNSIRIGSKGDVFVIREPFISCSHLECRTFFLTQGALLNDKHSNGTVKDRSPYRALMSCPIGEAPSPYNSRFESVAWSASACHDGMGWLTIGISGPDDGAVAVLKYNGIITETIKSWRKRILRTQESECVCVNGSCFTIMTDGPSNGPASYRIFKIEKGKITKSIELDAPNSHYEECSCYPDTGTVMCVCRDNWHGSNRPWVSFNQNLDYQIGYICSGVFGDNPRPKDGKGSCDPVTVDGADGVKGFSYRYGNGVWIGRTKSNSSRKGFEMIWDPNGWTDTDSNFLVKQDVVAMTDWSGYSGSFVQHPELTGLDCMRPCFWVELIRGRPREKTTIWTSGSSISFCGVNSDTANWSWPDGAELPFTIDK

SEQ ID NO: 15772 - protein, 469 aa, synthetic construct
  REGION 1..469: note = neuraminidase__InfluenzaA__ABO38376
MNPNQKIITIGSICMVVGIISLILQIGNIISIWISHSIQTGSQNHTGTCNQSIITYKNSTWVNQTYVNISNTNVVAGKDTTSVILAGNSSLCPIRGWAIYSKDNGVRIGSKGDVFVIREPFISCSHLECRTFFLTQGALLNDKHSNGTVKDRSPYRALMSCPVGEAPSPYNSRFESVAWSASACHDGMGWLTIGISGPDDGAVAVLKYNGIITETIKSWRKEILRTQESECACVNGSCFTIMTDGPSGGPASYKIFKIEKGKVTKSIELDAPNSHYEECSCYPDTGKVMCVCRDNWHGSNRPWVSFDQNLDYQMGYICSGVFGDNPRPKDGKGNCGPVYVDGANGVKGFSYRYGNGVWIGRTKSNSSRQGFEMIWDPNGWTETDSNFFVKQDVVAVTDWSGYSGSFVQHPELTGLDCMRPCFWVELIRGRPKEKTIWTSGSSISFCGVNSDTVDWSWPDGAELPFTIDK

SEQ ID NO: 15773 - protein, 469 aa, synthetic construct
  REGION 1..469: note = neuraminidase__InfluenzaA__ABO38387
MNPNQKIITIGSICMVVGIISLILQIGNIISIWISHSIQTGSQNHTGICNQSIITYKNSTWVNQTYVNISNTNVVAGQDTTSVILTGNSSLCPIRGWAIYSKDNGIRIGSKGDVFVIREPFISCSHLECRTFFLTQGALLNDKHSNGTVKDRSPYRALMSCPVGEAPSPYNSRFESVAWSASACHDGMGWLTIGISGPDNEAVAVLKYNGIITETIKSWRKKILRTQESECACVNGSCFTIMTDGPSDGLASYKIFKIEKGKVTKSIELNAPNSHYEECSCYPDTGKVMCVCRDNWHGSNRPWVSFDQNLDYQIGYICSGVFGDNPRPKDGTGSCGPVYVDGANGVKGFSYRYGNGVWIGRTKSTSSRHGFEMIWDPNGWTETDSKFSVRQDVVAMTDWSGYSGSFVQHPELTGLDCMRPCFWVELIRGQPKEKTIWTSGSSISFCGVNSDTVDWSWPDGAELPFTIDK

SEQ ID NO: 15774 - protein, 470 aa, synthetic construct
  REGION 1..470: note = neuraminidase__InfluenzaA__ABO38398
MNPNQKIITIGSICMAIGIISLILQIGNIVSIWISHSIQTGSQNYTGICNQRIITYENSTWVNQTYVNINNTNVVAGQDTTSVALAGNSSLCPISGWAIYSKDNSIRIGSKGDVFVIREPFISCSHLECRNFFLTQGALLNDKHSNGTVKDRSPYRALMSCPIGEAPSPYNSRFESVAWSASACHDGMGWLTIGISGPDDGAVAVLKYNGIITETIKSWRKRILRTQESECVCVNGSCFTIMTDGPNNGPASYKIFKIEKGKITKSIELDAPNSHYEECSCYPDAGTVMCVCRDNWHGSNRPWVSFNQNLDYQIGYICSGVFGDNPRPKDGKGSCDPVTVDGADGVKGFSYRYGNGVWIGRTKSNSSRRGFEMIWDPNGWTDTDSKFLVKQDVVAMTDWSGYSGSFVQHPELTGLDCMRPCFWVELIRGRPRENTTIWTSGSSISFCGVNGDTANWSWPDGAELPFTIDK

SEQ ID NO: 15775 - protein, 469 aa, synthetic construct; identical to SEQ ID NO: 14253
  REGION 1..469: note = neuraminidase__InfluenzaA__ABO38420

SEQ ID NO: 15776 - protein, 469 aa, synthetic construct
  REGION 1..469: note = neuraminidase__InfluenzaA__ABO38715
MNPNQKIITIGSVSLTIATVCFLMQIAILVTTVTLHFKQHECDSPASNQVMPCEPIIIERNITEIVYLNNTTIEKETCPKVVEYRSWSKPQCKITGFAPFSKDNSIRLSAGGDIWVTREPYVSCDPGKCYQFALGQGTTLDNKHSNDTIHDRIPHRTLLMNELGVPFHLGTRQVCIAWSSSSCHDGKAWLHVCVTGDDKNATASFIYDGRLVDSIGSWSQNILRTQESECVCINGTCTVVMTDGSASGRADTRILFIEEGKIVHISPLSGSAQHVEECSCYPRYPDVRCICRDNWKGSNRPIVDINMEDYSIDSSYVCSGLVGDTPRNDDRSSNSNCRNPNNERGNQGVKGWAFDNGDDVWMGRTISKDLRSGYETFKVIGGWSTPNSKSQINRQVIVDSDNRSGYSGIFSVEGKSCINRCFYVELIRGRKQETRVWWTSNSIVVFCGTSGTYGTGSWPDGANINFMPI

SEQ ID NO: 15777 - protein, 469 aa, synthetic construct; identical to SEQ ID NO: 15776
  REGION 1..469: note = neuraminidase__InfluenzaA__ABO38726

SEQ ID NO: 15778 - protein, 470 aa, synthetic construct
  REGION 1..470: note = neuraminidase__InfluenzaA__ABO44049
MNPNQKIITIGSISIAIGIISLMLQIGNIISIWASHSIQTGSQNHTGICNQRIITYENSTWVNHTYVNINNTNVVAGKDKTSVTLAGNSSLCSISGWAIYTKDNSIRIGSKGDVFVIREPFISCSHLECRTFFLTQGALLNDKHSNGTVKDRSPYRALMSCPLGEAPSPYNSKFESVAWSASACHDGMGWLTIGISGPDNGAVAVLKYNGIITETIKSWKKRILRTQESECVCVNGSCFTIMTDGPSNGAASYKIFKIEKGKVTKSIELNAPNFHYEECSCYPDTGTVICVCRDNWHGSNRPWVSFNQNLDYQIGYICSGVFGDNPRPKDGEGSCNPVTVDGADGVKGFSYKYGNGVWIGRTKSNRLRKGFEMIWDPNGWTDTDSNFSVKQDVVAITDWSGYSGSFVQHPELTGLDCIRPCFWVELVRGLPRENTTIWTSGSSISFCGVNSDTANWSWPDGAELPFTIDK

SEQ ID NO: 15779 - protein, 469 aa, synthetic construct
  REGION 1..469: note = neuraminidase__InfluenzaA__ABO44060
MNPNQKIITIGSVSLTIATVCFLMQIAILVTTVTLHFKQHECDSPASNQVMPCEPIIIERNITEIVYLNNTTIEKEICPKVVEYRNWSKPQCKITGFAPFSKDNSIRLSAGGDIWVTREPYVSCDPGKCYQFALGQGTTLDNKHSNDTIHDRIPHRTLLMNELGVPFHLGTRQVCIAWSSSSCHDGKAWLHVCVTGDDKNATASFIYDGRLVDSIGSWSQNILRTQESECVCINGTCTVVMTDGSASGRADTKILFIEEGKIVHISPLSGSAQHVEECSCYPRYPDVRCICRDNWKGSNRPVVDINMEDYSIDSSYVCSGLVGDTPRNDDRSSNSNCRNPNNERGNQGVKGWAFDNGDDVWMGRTISKDLRSGYETFKVIGGWSTPNSKSQINRQVIVDSDNRSGYSGIFSVEGKSCINRCFYVELIRGRKQETRVWWTSNSIVVFCGTSGTYGTGSWPDGANINLMPI

SEQ ID NO: 15780 - protein, 469 aa, synthetic construct
  REGION 1..469: note = neuraminidase__InfluenzaA__ABO44071
MNPNQKIITIGFVFLTIATVCFLMQIAILVTTVTLHFKQYECDSPASNQVMPCEPIIIERNITEIVYLNNTTIEKEICPKVVEYRNWSKPQCQITGFAPFSKDNSIRLSAGGDIWVTREPYVSCDHGKCYQFALGQGTTLDNKHSNDTIHDRIPHRTLLMNELGVPFHLGTRQVCIAWSSSSCHDGKAWLHVCITGDDKNATASFIYDGRLVDSIGSWSQNILRTQESECVCINGTCTVVMTDGSASGRADTRILFIEEGKIVHISPLSGSAQHVEECSCYPRYPGVRCICRDNWKGSNRPVVDINMEDYSIDSSYVCSGLVGDTPRNDDRSSNSNCKNPNNERGNQGVKGWAFDNGDDVWMGRTISKDLRSGYETFKVIGGWSTPNSKSQINRQVIVDSDNRSGYSGIFSVEGKSCINRCFYVELIRGRKQETRVWWTSNSIVVFCGTSGTYGTGSWPDGANINFMPI

SEQ ID NO: 15781 - protein, 469 aa, synthetic construct; identical to SEQ ID NO: 14346
  REGION 1..469: note = neuraminidase__InfluenzaA__ABO44082

SEQ ID NO: 15782 - protein, 469 aa, synthetic construct
  REGION 1..469: note = neuraminidase__InfluenzaA__ABO44093
MNPNQKIITIGSVSLTIATVCFLMQIAILATTVTLHFKQHECDSPASNQVMPCEPIIIERNITEIVYLNNTTIEKEICPEVVEYRNWSKPQCQITGFAPFSKDNSIRLSAGGDIWVTREPYVSCDPGKCYQFALGQGTTLDNKHSNGTIHDRIPHRTLLMNELGVPFHLGTKQVCVAWSSSSCHDGKAWLHVCVTGDDRNATASFIYDGRLVDSIGSWSQNILRTQESECVCINGTCTVVMTDGSASGRADTRILFIKEGKIVHISPLSGSAQHIEECSCYPRYPDVRCICRDNWKGSNRPVLDISMEDYSIDSSYVCSGLVGDTPRNDDSSSNSNCRDPNNERGNPGVKGWAFDNGDDVWMGRTISKDLRSGYETFKVIGGWSTPNSKSQVNRQVIVDNNNWSGYSGIFSVEGKSCINRCFYVELIRGRSQETRVWWTSNSIVVFCGTSGTYGTGSWPDGANINFMPI

SEQ ID NO: 15783 - protein, 469 aa, synthetic construct
  REGION 1..469: note = neuraminidase__InfluenzaA__ABO44104
MNPNQKIITIGSASLTIATVCFLMQIAILVTTVTLHFKQHECDSPASNQVMPCEPIIIERNITEIVYLNNTTIEKEICPKVVEYRNWSKPQCKITGFAPFSKDNSIRLSAGGDIWVTREPYVSCDPGKCYQFALGQGTTLDNKHSNDTIHDRIPHRTLLMNELGVPFHLGTRQVCIAWSSSSCHDGKAWLHVCVTGDDKNATASFIYDGRLVDSIGSWSQNILRTQESECVCINGTCTVVMTDGSASGRADTRILFIEEGKIVHISPLSGSAQHVEECSCYPRYPDVRCICRDNWKGSNRPVVDINMEDYSIDSSYVCSGLVGDTPRNDDRSSNSNCRNPNNEKGNQGVKGWAFDNGDDVWMGRTISKDLRSGYETFKVIGGWSTPNSKSQINRQVIVDSDNRSGYSGIFSVEGKSCINRCFYVELIRGRKQETRVWWTSNSIVVFCGTSGTYGTGSWPDGANINLMPI

SEQ ID NO: 15784 - protein, 470 aa, synthetic construct
  REGION 1..470: note = neuraminidase__InfluenzaA__ABO44126
MNPNQKIITIGSICMAIGIISLILQIGNIVSIWISHSIQTGSQNYTGICNQRIITYENSTWVNQTYVNINNTNVVAGQDTTSVALAGNSSLCPISGWAIYSKDNSIRIGSKGDVFVIREPFISCSHLECRTFFLTQGALLNDKHSNGTVKDRSPYRALMSCPIGEAPSPYNSRFESVAWSASACHDGMGWLTIGISGPDDGAVAVLKYNGIITETIKSWRKRILRTQESECVCVNGSCFTIMTDGPNNGPASYKIFKIEKGKITKSIELNAPNSHYEECSCYPDAGTVMCVCRDNWHGSNRPWVSFNQNLDYQIGYICSGVFGDNPRPKDGKGSCGPVTVDGADGVKGFSYRYGNGVWIGRTKSNSSRRGFEMIWDPNGWTDTDSKFLVKQDVVAITDWSGYSGSFVQHPELTGLDCMRPCFWVELIRGRPRENTTIWTSGSSISFCGVNGDTANWSWPDGAELPFTIDK

SEQ ID NO: 15785 - protein, 470 aa, synthetic construct
  REGION 1..470: note = neuraminidase__InfluenzaA__ABO52228
MNPNQKIITIGSISIAIGIISLILQIGNIISIWASHSIQTGSQNHTGICNQRIITYENSTWVNQTYVNINNTNVVAGKDKTSMTLAGNSSLCPIRGWAIYTKDNSIRIGSKGDVFVIREPFISCSHLECRTFFLTQGALLNDKHSNGTVKDRSPYRALMSCPLGEAPSPYNSKFESVAWSASACHDGLGWLTIGISGPDNGAVAVLKYNGIITETIKSWKKRILRTQESECVCMNGSCFTIMTDGPSNGAASYRIFKIEKGRVTKSIELDAPNYHYEECSCYPDTGTVMCVCRDNWHGSNRPWVSFNQNLDYQIGYICSGVFGDNPRPKDGEGSCNPVTVDGADGVKGFSYRYGNGVWIGRTKSNRLRKGFEMIWDPNGWTDTDSDFSMKQDIVAMTDWSGYSGSFVQHPELTGLDCMRPCFWVELVRGLPRENTTIWTSGSSISFCGVNSDTANWSWPDGAELPFTIDK

SEQ ID NO: 15786 - protein, 469 aa, synthetic construct
  REGION 1..469: note = neuraminidase__InfluenzaA__ABO52239
MNPNQKIITIGSVSLTIATVCFIMQIAILATTVTLHFKQHECDSPASNQVMPCEPIIIERNITEIVYLNNTTIEKEICPEAVEYRNWSKPQCQITGFAPFSKDNSIRLSAGGDIWVTREPYVSCDPGKCYQFALGQGTTLDNKHSNGTIHDRIPHRTLLMNELGVPFHLGTKQVCVAWSSSSCHDGKAWLHVCVTGDDKNATASFIYDGRLVDSIGSWSQNILRTQESECVCINGTCTVVMTDGSASGRADTRILFIKEGKIVHISPLSGSAQHVEECSCYPRYPDVRCICRDNWKGSNRPVIDINMEDYSIDSSYVCSGLVGDTPRNDDSSSNSNCRDPNNERGNPGVKGWAFDNGDDVWMGRTINKDSRSGYETFKVIGGWSTPNSKSQVNRQVIVDNNNWSGYSGIFSVEGKSCINRCFYVELIRGRPQETRVWWTSNSIVVFCGTSGTYGTGSWPDGANINFMPI

SEQ ID NO: 15787 - protein, 469 aa, synthetic construct; identical to SEQ ID NO: 15783
  REGION 1..469: note = neuraminidase__InfluenzaA__ABO52250

SEQ ID NO: 15788 - protein, 470 aa, synthetic construct
  REGION 1..470: note = neuraminidase__InfluenzaA__ABO52261
MNPNQKIITIGSICMAIGIISLILQIGNIISIWVSHSIQTGSQNHTGICNQRIITYENSTWVNQTYVNINNTNVVAGKDTTSVTLAGNSSLCPIRGWAIYSKDNSIRIGSKGDVFVIREPFISCSHLECRTFFLTQGALLNDKHSNGTVKDRSPYRALMSCPIGEAPSPYNSRFESVAWSASACHDGMGWLTIGISGPDDGAVAVLKYNGIITETIKSWRKRILRTQESECVCVNGSCFTIMTDGPSNGPASYRIFKIEKGKITKSIELDAPNSHYEECSCYPDTGTVMCVCRDNWHGSNRPWVSFNQNLDYQIGYICSGVFGDNPRPKDGKGSCDPVTVDGADGVKGFSYRYGNGVWIGRTKSNSSRKGFEMIWDPDGWTDTDSNFLVKQDVVAMTDWSGYSGSFVQHPELTGLDCIRPCFWVELIRGRPREKTTIWTSGSSISFCGVNSDTVNWSWPDGAELPFTIDK

SEQ ID NO: 15789 - protein, 470 aa, synthetic construct
  REGION 1..470: note = neuraminidase__InfluenzaA__ABO52283
MNPNQKIITIGSICMTIGTISLILQIGNIISIWISHSIQTGSQNHTGICNQRIITYENNTWVNQTYVNISNTNVVAGKDTTSMILAGNSSLCPIRGWAIYSKDNSIRIGSKGDVFVIREPFISCSHLECRTFFLTQGALLNDKHSNGTVKDRSPYRALMSCPIGEAPSPYNSRFESVAWSASACHDGMGWLTIGISGPDDGAVAVLKYNGIITEIIKSWRKQILRTQESECVCVNGSCFTIMTDGPSDGPASYRIFKIEKGKITKSIELDAPNSHYEECSCYPDTGKVMCVCRDNWHGSNRPWVSFNQNLDYQIGYICSGVFGDNPRPKDGKGSCDPVNVDGADGVKGFSYRYGDGVWIGRTKSNSSRKGFEMIWDPNGWTDTDDNFLVKQDVVAMTDWSGYSGSFVQHPELTGLDCMRPCFWVELIRGRPREKTTIWTSGSSISFCGVNSDTVNWSWPDGAELPFTIDM

SEQ ID NO: 15790 - protein, 469 aa, synthetic construct; identical to SEQ ID NO: 15518
  REGION 1..469: note = neuraminidase__InfluenzaA__ABO52294

SEQ ID NO: 15791 - protein, 469 aa, synthetic construct
  REGION 1..469: note = neuraminidase__InfluenzaA__ABO52316
MNPNQKIITIGSVSLTIATICFLMQIAILVTTVTLHFKQYECDSPANNQIMPCEPTIIERNITEIVYLTNITIEKEICPKLVEYRNWSKPQCKITGFAPFSKDNSIRLSAGGDIWVTREPYVSCDPSRCYQFALGQGTTLDNKHSNDTIHDRTPHRTLLMNELGVPFHLGTRQVCIAWSSSSCHDGKAWLHVCVTGYDKNATASFIYDGRLVDSIGSWSQNILRTQESECVCINGTCTVVMTDGSASGRADTKILFIEEGKIVHISPLSGSAQHVEECSCYPRYPGVRCICRDNWKGSNRPVVDINVKDYSIDSSYVCSGLVGDTPRKNDRSSNSYCRNPNNEKGNHGVKGWAFDDGNDVWMGRTISEDSRSGYETFKVIGGWSTPNSKLQINRQVIVDSDNRSGYSGIFSVEGKSCINRCFYVELIRGREQETRVWWTSNSIVVFCGTSGTYGAGSWPDGADINLMPI

SEQ ID NO: 15792 - protein, 469 aa, synthetic construct; identical to SEQ ID NO: 14114
  REGION 1..469: note = neuraminidase__InfluenzaA__ABO52327

SEQ ID NO: 15793 - protein, 469 aa, synthetic construct
  REGION 1..469: note = neuraminidase__InfluenzaA__ABO52338
MNPNQKIITIGSVSLTIATICFLMQIAILVTTVTLHFKQYECDSPANNQVMPCEPIIIERNITEIVYLTNTTIEKEICPKLVEYRNWSKPQCKITGFAPFSKDNSIRLSAGGDIWVTREPYVSCDPGKCYQFALGQGTTLDNKHSNDTIHDRTPHRTLLMNELGVPFHLGTRQVCIAWSSSSCHDGKAWLHVCVTGYDKNATASFIYDGRLVDSIGSWSKNILRTQESECVCINGTCTVVMTDGSASGRADTKILFIEEGKIVHISPLSGSAQHVEECSCYPRYPGVRCICRDNWKGSNRPVVDINVKDYSIDSSYVCSGLVGDTPRNNDRSSSSYCRNPNNEKGNHGVKGWAFDDGNDVWMGRTISEDSRSGYETFKVIGGWSTPNSKLQINRQVIVDSDNRSGYSGIFSVEGKSCINRCFYVELIRGREQETRVWWTSNSIVVFCGTSGTYGTGSWPDGADINLMPI

SEQ ID NO: 15794 - protein, 469 aa, synthetic construct
  REGION 1..469: note = neuraminidase__InfluenzaA__ABO52349
MNPNQKIITIGSVSLTIATICFLMQIAILVTTVTLHFKQYECDSPANNQVMPCEPIIIERNVTEIVYLTNTTIEKEICPKLVEYRNWSKPQCKITGFAPFSKDNSIRLSAGGDIWVTREPYVSCDPGKCYQFALGQGTTLDNKHSNDTIHDRTPYRTLLMNELGVPFHLGTRQVCIAWSSSSCHDGKAWLHVCVTGYDKNATASFIYDGRLVDSIGSWSKNILRTQESECVCINGTCTVVMTDGSASERADTKILFIEEGKIIHISPLSGSAQHVEECSCYPRYPGVRCICRDNWKGSNRPVVDINMRDYSIVSSYVCSGLVGDTPRKNDRSSSSYCRNPNNEKGNHGVKGWAFDDGNDVWMGRTISEESRSGYETFKVIGGWSTPNSKLQINRQVIVDSNNRSGYSGIFSVEGKSCINRCFYVELIRGREQETRVWWTSNSIVVFCGTSGTYGTGSWPDGADINLMPI

SEQ ID NO: 15795 - protein, 469 aa, synthetic construct
  REGION 1..469: note = neuraminidase__InfluenzaA__ABO52360
MNPNQKIITIGSVSLTIATVCFLMQIAILVTTVTLHFKQYECDSPASNQVMPCEPIIIERNITEIVYLNNTTIEKEICPKVVEYRNWSKPQCQITGFAPFSKDNSIRLSAGGDIWVTREPYVSCDHGKCYQFALGQGTTLDNKHSNDTIHDRIPHRTLLMNELGVPFHLGTRQVCIAWSSSSCHDGKAWLHVCITGDDKNATASFIYDGRLVDSIGSWSQNILRTQESECVCINGTCTVVMTDGSASGRADTRILFIEEGKIVHISPLSGSAQHVEECSCYPRYPGVRCICRDNWKGSNRPVVDINMEDYSIDSSYVCSGLVGDTPRNDDRSSNSNCRNPNNERGNQGVKGWAFDNGNDVWMGRTISKDLRSGYETFKVIGGWSTPNSKSQINRQVIVDSDNRSGYSGIFSVEGKSCINRCFYVELIRGRKQETRVWWTSNSIVVFCGTSGTYGTGSWPDGANINFMPI

SEQ ID NO: 15796 - protein, 469 aa, synthetic construct
  REGION 1..469: note = neuraminidase__InfluenzaA__ABO52371
MNPNQKIITIGSVSLTIATVCFLMQIAILVTTVTLHFRQYECDSPANNQVMPCEPIIIERNITEIVYLNNTTIEKEICPKLVEYRNWSKPQCKITGFAPFSKDNSIRLSAGGDIWVTREPYVSCDPGKCYQFALGQGTTLDNKHSNDTIHDRIPHRTLLMNELGVPFHLGTRQVCIAWSSSSCHDGKAWLHVCVTGDDKNATASFIYDGKLVDSIGSWSQNILRTQESECVCINGTCTVVMTDGSASGRADTRILFIEEGKIVHISPLSGSAQHVEECSCYPRYPGVRCICRDNWKGSNRPVVDINVEDYSIDSSYVCSGLVGDTPRNNDRSGNSNCRNPNNERGNHGVKGWAFDDGNDVWMGRTINKDLRSGYETFKVIGGWSTPNSKSQINRQVIVDSDNRSGYSGIFSVEGKSCINRCFYVELIRGREQETRVWWTSNSIVVFCGTSGTYGTGSWPDGADINLMPI

SEQ ID NO: 15797 - protein, 470 aa, synthetic construct
  REGION 1..470: note = neuraminidase__InfluenzaA__ABO52800
MNPNQKIITIGSICMTIGIISLILQIGNIISIWVSHSIQTGSQNHTGICNQRIITYENSTWVNQTYVNINNTNVVAGKDTTSVTLAGNSSLCPIRGWAIYSKDNSIRIGSKGDVFVIREPFISCSHLECRTFFLTQGALLNDKHSNGTVKDRSPYRALMSCPIGEAPSPYNSRFESVAWSASACHDGMGWLTIGISGPDDGAVAVLKYNGIITETIKSWRKRILRTQESECVCVNGSCFTIMTDGPSNGPASYRIFKIEKGKITKSIELDAPNSHYEECSCYPDTGTVMCVCRDNWHGSNRPWVSFNQNLDYQIGYICSGVFGDNPRPKDGKGSCDPVTVDGADGVKGFSYRYGNGVWIGRTKSNSSRKGFEMIWDPNGWTDTDSNFLVKQDVVAMTDWSGYSGSFVQHPELTGLDCMRPCFWVELIRGRPRERTTIWTSGSSISFCGVNSDTANWSWPDGAELPFTIDK

SEQ ID NO: 15798 - protein, 470 aa, synthetic construct; identical to SEQ ID NO: 14828
  REGION 1..470: note = neuraminidase__InfluenzaA__ABP49220

SEQ ID NO: 15799 - protein, 470 aa, synthetic construct
  REGION 1..470: note = neuraminidase__InfluenzaA__ABP49319
MNPNQKIITIGSICMAIGIISLILQIGNIISIWVSHSIQTGSQNHTGICNQRIITYENNTWVNQTYVNISNTNVVAGKDTTSMILAGNSSLCPIRGWAIYSKDNSIRIGSKGDVFVIREPFISCSHLECRTFFLTQGALLNDKHSNGTVKDRSPYRALMSCPIGEAPSPYNSRFESVAWSASACHDGMGWLTIGISGPDDGAVAVLKYNGIITETIKSWRKQILRTQESECVCVNGSCFTIMTDGPSDGPASYRIFKIEKGKITKSIELDAPNSHYEECSCYPDTGKVMCVCRDNWHGSNRPWVSFNQNLDYQIGYICSGVFGDNPRPKDGKGSCDPVNVDGADGVKGFSYRYGNGVWIGRTKSNSSRKGFEMIWDPNGWTDTDGNFLVKQDVVAMTDWSGYSGSFVQHPELTGLDCMRPCFWVELIRGRPREKTTIWTSGSSISFCGVNSDTVNWSWPDGAELPFTIDK

SEQ ID NO: 15800 - protein, 469 aa, synthetic construct
  REGION 1..469: note = neuraminidase__InfluenzaA__ABP49330
MNPNQKIITIGSICMVVGIISLILQIGNIISIWISHSIQTGSQNHTGICNQSIITYKNSTWVNQTYVNISNTNVVAGKGTTPVILAGNSSLCPIRGWAIYSKDNGIRIGSKGDVFVIREPFISCSHLECRTFFLTQGALLNDKHSNGTVKDRSPYRALMSCPVGEAPSPYNSRFESVAWSACACHDGMGWLTIGISGPDDEAVAVLKYNGIITETIKSWRKKILRTQESECVCVNGSCFTIMTDGPSDGPASYKIFKIEKGKVTKSIELDAPNSHYEECSCYPDTGKVMCVCRDNWHGSNRPWVSFDQNLDYQIGYICSGVFGDNPRPKDGKGSCGPVYVDGANGVKGFSYRYGNGVWIGRIKSNSSRQGFEMIWDPNGWTETDSSFFVKQDVVAMTDWSGYSGSFVQHPELTGLDCMRPCFWVELIRGRPKEKTIWTSGSSISFCGVNSDTVDWSWPDGAELPFTIDK

SEQ ID NO: 15801 - protein, 470 aa, synthetic construct
  REGION 1..470: note = neuraminidase__InfluenzaA__ABP49352
MNPNQKIITIGSICMTIGIISLILQIGNIISIWVSHSIQTGSQNHTGICNQRIITYENSTWVNQTYVNINNTNVVAGKDTTSVALAGNSSLCPIRGWAIYSKDNSIRIGSKGDVFVIREPFISCSHLECRTFFLTQGALLNDKHSNGTVKDRSPYRALMSCPIGEAPSPYNSRFESVAWSASACHDGMGWLTIGISGPDDGAVAVLKYNGIITETIKSWRKRILRTQESECVCVNGSCFTIMTDGPSDGPASYRIFKIEKGKITKSIELDAPNSHYEECSCYPDTGTVMCVCRDNWHGSNRPWVSFNQNLDYQIGYICSGVFGDNPRPKDGKGSCGPVTVDGADGVKGFSYKYGNGVWIGRTKSNSSRKGFEMIWDPNGWTDTDSNFLVKQDVVAMTDWSGYSGSFVQHPELTGLDCMRPCFWVELIRGRPRERTTIWTSGSSISFCGVDSDTANWSWPDGAELPFTIDK

SEQ ID NO: 15802 - protein, 470 aa, synthetic construct; identical to SEQ ID NO: 15698
  REGION 1..470: note = neuraminidase__InfluenzaA__ABP49363

SEQ ID NO: 15803 - protein, 469 aa, synthetic construct; identical to SEQ ID NO: 14730
  REGION 1..469: note = neuraminidase__InfluenzaA__ABP49374

SEQ ID NO: 15804 - protein, 470 aa, synthetic construct
  REGION 1..470: note = neuraminidase__InfluenzaA__ABP49385
MNPNQKIITIGSISVAIGIINLTLQIGNIISIWASHSIQTGSQNYTGICNQRIITYENRTWVNQTYVNINNTNVVAGKDKTSMTLAGNSSLCPIRGWAIYTKDNSIRIGSKGDVFVIREPFISCSHLECRTFFLTQGALLNDKHSNGTIKDRSPFRALMSCPLGEAPSPYNSRFESVAWSASACHDGLGWLTIGISGPDNGAVAVLKYNGIITETIKSWKKQILRTQESECVCVNGSCFTIMTDGPSNRAASYRIFKIEKGRVTKSIELDAPNYHYEECSCYPDTGTVMCVCRDNWHGSNRPWVSFNQNLDYQIGYICSGVFGDNPRPKDGEGSCNPVTVDGADGVKGFSYRYGNGVWIGRTKSNRLRKGFEMIWDPNGWTDTDSDFSMKQDVVAMTDWSGYSGSFVQHPELTGLDCMRPCFWVELVRGLPRENTTIWTSGSSISFCGVNSETANWSWPDGAELPFTIDK

SEQ ID NO: 15805 - protein, 470 aa, synthetic construct; identical to SEQ ID NO: 14386
  REGION 1..470: note = neuraminidase__InfluenzaA__ABP49396

SEQ ID NO: 15806 - protein, 469 aa, synthetic construct
  REGION 1..469: note = neuraminidase__InfluenzaA__ABP49407
MNPNQKIITIGSVSLTISTICFFMQIAILITTVTLHFKQYEFNSPPNNQVMLCEPTIIERNITEIVYLTNTTIEKEICPKLAEYRNWSKPQCDITGFAPFSKDNSIRLSAGGDIWVTREPYVSCDPDKCYQFALGQGTTLNNVHSNDTVHDRTPYRTLLMSELGVPFHLGTKQVCIAWSSSSCHDGKAWLHVCVTGDDKNATASFIYNGRLVDSIVSWSKEILRTQESECVCINGTCTVVMTDGSASGKADTKILFIEEGKIVHTSTLSGSAQHVEECSCYPRYPGVRCVCRDNWKGSNRPIVDINIKDYSIVSSYVCSGLVGDTPRKNDSSSSSHCLDPNNEEGGHGVKGWAFDDGNDVWMGRTISEKLRSGYETFKVIEGWSNPNSKLQINRQVIVDRGNRSGYSGIFSVEGKICINRCFYVELIRGRKEETEVLWTSNSIVVFCGTSGTYGTGSWPDGADINLMPI

SEQ ID NO: 15807 - protein, 469 aa, synthetic construct; identical to SEQ ID NO: 14730
  REGION 1..469: note = neuraminidase__InfluenzaA__ABP49418

SEQ ID NO: 15808 - protein, 469 aa, synthetic construct; identical to SEQ ID NO: 14730
  REGION 1..469: note = neuraminidase__InfluenzaA__ABP49429

SEQ ID NO: 15809 - protein, 469 aa, synthetic construct
  REGION 1..469: note = neuraminidase__InfluenzaA__ABP49440
MNPNQKIITIGSVSLTIATVCFLIQIAILATTVTLHFKQHECDSPASNQVMPCEPIIIERNITEIVYLNNTTIEKEICPEVVEYRNWSKPQCQITGFAPFSKDNSIRLSAGGDIWVTREPYVSCDPGKCYQFALGQGTTLDNKHSNGTIHDRIPHRTLLMNELGVPFHLGTKQVCVAWSSSSCHDGKAWLHVCVTGDDRNATASFIYDGRLVDSIGSWSQNILRTQESECVCINGTCTVVMTDGSASGRADTRILFIKEGKIVHISPLSGSAQHIEECSCYPRYPDVRCICRDNWKGSNRPVIDINMEDYSIDSSYVCSGLVGDTPRNDDSSSNSNCRDPNNERGNPGVKGWAFDNGDDVWMGRTISKDSRSGYETFKVIGGWSTPNSKSQANRQVIVDKNNWSGYSGIFSVEGKSCINRCFYVELIRGRPQETRVWWTSNSIVVFCGTSGTYGTGSWPDGANINFMPI

SEQ ID NO: 15810 - protein, 470 aa, synthetic construct; identical to SEQ ID NO: 14951
  REGION 1..470: note = neuraminidase__InfluenzaA__ABP49451

SEQ ID NO: 15811 - protein, 469 aa, synthetic construct
  REGION 1..469: note = neuraminidase__InfluenzaA__ABP49462
MNPNQKIITIGSVSLTIATVCFIMQIAILATTVTLHFKQHECDSPASNQVMPCEPIIIERNITEIVYLNNTTIEKEICPEAVEYRNWSKPQCQITGFAPFSKDNSIRLSAGGDIWVTREPYVSCDPGKCYQFALGQGTTLDNKHSNGTIHDRIPHRTLLMNELGVPFHLGTKQVCVAWSSSSCHDGKAWLHVCVTGDDRNATASFIYDGRLVDSIGSWSQNILRTQESECVCINGTCTVVMTDGSASGRADTRILFIKEGKIVHISPLSGSAQHIEECSCYPRYPDVRCICRDNWKGSNRPVIDINMEDYSIDSSYVCSGLVGDTPRNDDSSSNSNCRDPNNERGNPGVKGWAFDNGDDVWMGRTINKDSRSGYETFKVIGGWSTPNSKSQVNRQVIVDNNNWSGYSGIFSVEGKSCINRCFYVELIRGRPQETRVWWTSNSIVVFCGTSGTYGTGSWPDGANINFMPI

SEQ ID NO: 15812 - protein, 469 aa, synthetic construct; identical to SEQ ID NO: 15760
  REGION 1..469: note = neuraminidase__InfluenzaA__ABP49473

SEQ ID NO: 15813 - protein, 469 aa, synthetic construct
  REGION 1..469: note = neuraminidase__InfluenzaA__ABP49495
MNPNQKIITIGSVSLTIATICFLMQIAILVTTVTLHFKQYECDSPANNQVMPCEPIIIERNITEIVYLTNTTIEKEICPKLVEYRNWSKPQCKITGFAPFSKDNSIRLSAGGDIWVTREPYVSCDPGKCYQFALGQGTTLDNKHSNDTIHDRTPHRTLLMNELGVPFHLGTRQVCIAWSSSSCHDGKAWLHVCVTGYDKNATASFIYDGRLVDSIGSWSQNILRTQESECVCINGTCTVVMTDGSASGRADTKILFIEEGKIVHTSPLSGSAQHVEECSCYPRYPGVRCICRDNWRGSNRPVVDINVKDYSIDSSYVCSGLVGDTPRNNDRSSSSYCRNPNNEKGTHGVKGWAFDDGNDVWMGRTISEDSRSGYETFKVIGGWSTPNSKLQINRQVIVDSDNRSGYSGIFSVEGKSCINRCFYVELIRGREQETRVWWTSNSIVVFCGTSGTYGTGSWPDGADINLMPI

SEQ ID NO: 15814 - protein, 469 aa, synthetic construct; identical to SEQ ID NO: 14103
  REGION 1..469: note = neuraminidase__InfluenzaA__ABP49506

SEQ ID NO: 15815 - protein, 469 aa, synthetic construct; identical to SEQ ID NO: 14095
  REGION 1..469: note = neuraminidase__InfluenzaA__ABP49517

SEQ ID NO: 15816 - protein, 470 aa, synthetic construct
  REGION 1..470: note = neuraminidase__InfluenzaA__ABQ01314
MNPNQKIITIGSICMAIGTISLILQIGNIISIWVSHSIQTGSQNHTGICNQRIITYENNTWVNQTYVNISNTNVVAGKDTTSMILAGNSSLCPIRGWAIYSKDNSIRIGSKGDVFVIREPFISCSHLECRTFFLTQGALLNDKHSNGTVKDRSPYRALMSCPIGEAPSPYNSRFESVAWSASACHDGMGWLTIGISGPDDGAVAVLKYNGIITEIIKSWRKQILRTQESECVCVNGSCFTIMTDGPSDGPASYRIFKIEKGKITKSIELDAPNSHYEECSCYPDTGKVMCVCRDNWHGSNRPWVSFNQNLDYQIGYICSGVFGDNPRPKDGKGSCDPVNVDGADGVKGFSYRYGNGVWIGRTKSNSSRKGFEMIWDPNGWTDTDGNFLVKQDVVAMTDWSGYSGSFVQHPELTGLDCMRPCFWVELIRGRPREKTTIWTSGSSISFCGVNSDTVNWSWPDGAELPFTIDK

SEQ ID NO: 15817 - protein, 470 aa, synthetic construct
  REGION 1..470: note = neuraminidase__InfluenzaA__ABQ01325
MNPNQKIITIGSICMAIGIISLILQIGNIISIWVSHSIQTGSQNHTGICNQRIITYENSTWVNQTYVNISNTNVVAGKDTTSMTLAGNSSLCPIRGWAIYSKDNSIRIGSKGDVFVIREPFISCSHLECRTFFLTQGALLNDKHSNGTVKDRSPYRALMSCPIGEAPSPYNSRFESVAWSASACHDGMGWLTIGISGPDDGAVAVLKYNGIITETIKSWRKQILRTQESECVCVNGSCFTIMTDGPSDGQASYRIFKIEKGKITKSIELDAPNSHYEECSCYPDTGTVMCVCRDNWHGSNRPWVSFNQNLDYQIGYICSGVFGDNPRPKDGKGSCDPVNVDGADGVKGFSYRYGNGVWIGRTKSNSSRKGFEMIWDPNGWTDTDSNFLVKQDVVAMTDWSGYSGSFVQHPELTGLDCMRPCFWVELIRGRPREKTTIWTSGSSISFCGVNSDTVNWSWPDGAELPFTIDK

SEQ ID NO: 15818 - protein, 469 aa, synthetic construct; identical to SEQ ID NO: 14730
  REGION 1..469: note = neuraminidase__InfluenzaA__ABQ01336

SEQ ID NO: 15819 - protein, 469 aa, synthetic construct; identical to SEQ ID NO: 14730
  REGION 1..469: note = neuraminidase__InfluenzaA__ABQ01347

SEQ ID NO: 15820 - protein, 469 aa, synthetic construct
  REGION 1..469: note = neuraminidase__InfluenzaA__ABQ01358
MNPNQKIITIGSVSLTIATVCFLMQIAILATTVTLHFKQHECNSPASNQVMPCEPIIIERNITEIVYLNNTTIEKEICPEVVEYRNWSKPQCQITGFAPFSKDNSIRLSAGGDIWVTREPYVSCDPGKCYQFALGQGTTLDNKHSNGTIHDRIPHRTLLMNELGVPFHLGTKQVCVAWSSSSCHDGKAWLHVCVTGDDRNATASFIYDGRLEDSIGSWSQNILRTQESECVCINGTCTVVMTDGNASGRADTRILFIKEGKIVHISPLSGSAQHIEECSCYPRYPDVRCICRDNWKGSNRPVLDISMEDYSIDSSYVCSGLVGDTPRNDDSSSNSNCRDPNNERGNPGVKGWAFDNGDDVWMGRTISKDLRSGYETFKVIGGWSTPNSKSQVNRQVIVDNNNWSGYSGIFSVEGKSCINRCFYVELIRGRSQETRVWWTSNSIVVFCGTSGTYGTGSWPDGANINFMPI

SEQ ID NO: 15821 - protein, 469 aa, synthetic construct
  REGION 1..469: note = neuraminidase__InfluenzaA__ABQ01369
MNPNQKIITIGSVSLTIATICFVMQIAILVTTVTLHFKQYECDSPANNQVMPCEPIIIERNITEIVYLTNTTIEKEICPKLVEYRNWSKPQCKITGFAPFSKDNSIRLSAGGDIWVTREPYVSCDPGKCYQFALGQGTTLDNKHSNDTIHDRTPHRTLLMNELGVPFHLGTRQVCIAWSSSSCHDGKAWLHVCVTGYDKNATASFIYDGRLVDSIGSWSQNILRTQESECVCINGTCTVVMTDGSASGRADTKILFIEEGKIVHTSPLSGSAQHVEECSCYPRYPGVRCICRDNWKGSNRPVVDINVKDYSIDSSYVCSGLVGDTPRKNDRSSSSYCRNPNNEKGTHGVKGWAFDDGNDVWMGRTISEDSRSGYETFKVIGGWSTPNSKLQINRQVIVDSDNRSGYSGIFSVEGKSCINRCFYVELIRGREQETRVWWTSNSIVVFCGTSGTYGTGSWPDGADINLMPI

SEQ ID NO: 15822 - protein, 469 aa, synthetic construct
  REGION 1..469: note = neuraminidase__InfluenzaA__ABQ44386
MNPNQKIITIGSVSLTIATICFLMQIAILVTTVTLHFKQYECNSPPNNQVMLCEPTIIERNITEIVYLTNTTIEKEICPKLAEYRNWSKPQCNITGFAPFSKDNSIRLSAGGDIWVTREPYVSCDPDKCYQFALGQGTTLNNGHSNDTVHDRTPYRTLLMNELGVPFHLGTKQVCIAWSSSSCHDGKAWLHVCVTGDDENATASFIYNGRLVDSIGSWSKKILRTQESECVCINGTCTVVMTDGSASGKADTKILFIEEGKIVHTSSLSGSAQHVEECSCYPRYPGVRCVCRDNWKGSNRPIVDINVKDYSIVSSYVCSGLVGDTPRKNDSSSSSHCLDPNNEEGGHGVKGWAFDDGNDVWMGRTISEKLRSGYETFKVIEGWSKPNSKLQINRQVIVDRGNRSGYSGIFSVESKSCINRCFYVELIRGRKQENEVLWTSNSIVVFCGTSGTYGTGSWPDGADINLMPI

SEQ ID NO: 15823 - protein, 469 aa, synthetic construct; identical to SEQ ID NO: 14714
  REGION 1..469: note = neuraminidase__InfluenzaA__ABQ44408

SEQ ID NO: 15824 - protein, 470 aa, synthetic construct
  REGION 1..470: note = neuraminidase__InfluenzaA__ABQ44419
MNPNQKIITIGSICMAIGIISLILQIGNIVSIWISHSIQNGSQNYTGICNQRIITYENSTWVNQTYVNINNTNVVAGQDTTSVALAGNSSLCPISGWAIYSKDNSIRIGSKGDVFVIREPFISCSHLECRTFFLTQGALLNDKHSNGTVKDRSPYRALMSCPIGEAPSPYNSRFESVAWSASACHDGMGWLTIGISGPDDGAVAVLKYNGIITETIKSWRKRILRTQESECVCVNGSCFTIMTDGPNNGPASYKIFKIEKGKITKSIELDAPNSHYEECSCYPDAGTVMCVCRDNWHGSNRPWVSFNQNLDYQIGYICSGVFGDNPRPKDGKGSCGPVTVDGADGVKGFSYRYGNGVWIGRTKSNSSRRGFEMIWDPNGWTDTDSKFLVKQDVVAMTDWSGYSGSFVQHPELTGLDCMRPCFWVELIRGRPRENTTIWTSGSSISFCGVNGDTANWSWPDGAELPFTIDK

SEQ ID NO: 15825 - protein, 469 aa, synthetic construct; identical to SEQ ID NO: 14346
  REGION 1..469: note = neuraminidase__InfluenzaA__ABQ44430

SEQ ID NO: 15826 - protein, 469 aa, synthetic construct; identical to SEQ ID NO: 15776
  REGION 1..469: note = neuraminidase__InfluenzaA__ABQ44441

SEQ ID NO: 15827 - protein, 469 aa, synthetic construct; identical to SEQ ID NO: 15760
  REGION 1..469: note = neuraminidase__InfluenzaA__ABQ44463

SEQ ID NO: 15828 - protein, 470 aa, synthetic construct
  REGION 1..470: note = neuraminidase__InfluenzaA__ABQ44474
MNPNQKIITIGSICMTIGTISLILQIGNIISIWVSHSIQTGSQNHTGICNQRIITYENNTWVNQTYVNISNTNVVAGKDTTSMILAGNSSLCPIRGWAIYSKDNSIRIGSKGDVFVIREPFISCSHLECRTFFLTQGALLNDKHSNGTVKDRSPYRALMSCPIGEAPSPYNSRFESVAWSASACHDGMGWLTIGISGPDDGAVAVLKYNGIITEIIKSWRKQILRTQESECVCVNGSCFTIMTDGPSDGPASYRIFKIEKGKITKSIELDAPNSHYEECSCYPDTGKVMCVCRDNWHGSNRPWVSFNQNLDYQIGYICSGVFGDNPRPKDGKGSCDPVNVDGADGVKGFSYRYGNGVWIGRTKSNSSRKGFEMIWDPNGWTDTDGNFLVKQDVVAMTDWSGYSGSFVQHPELTGLDCMRPCFWVELIRGRPREKTTIWTSGSSISFCGVNSDTVNWSWPDGAELPFTIDK

SEQ ID NO: 15829 - protein, 469 aa, synthetic construct; identical to SEQ ID NO: 14095
  REGION 1..469: note = neuraminidase__InfluenzaA__ABR15800

SEQ ID NO: 15830 - protein, 470 aa, synthetic construct; identical to SEQ ID NO: 15816
  REGION 1..470: note = neuraminidase__InfluenzaA__ABR15811

SEQ ID NO: 15831 - protein, 470 aa, synthetic construct; identical to SEQ ID NO: 14828
  REGION 1..470: note = neuraminidase__InfluenzaA__ABR15910

SEQ ID NO: 15832 - protein, 469 aa, synthetic construct; identical to SEQ ID NO: 14154
  REGION 1..469: note = neuraminidase__InfluenzaA__ABR15932

SEQ ID NO: 15833 - protein, 469 aa, synthetic construct
  REGION 1..469: note = neuraminidase__InfluenzaA__ABR15943
MNPNQKIITIGSVSLTIATICFLMQIAILVTTVTLHFRQYECNSPPNNQVMLCEPTIIERNITEIVYLTNTTIEKEICPKLAEYRNWSKPQCNITGFAPFSKDNSIRLSAGGDIWVTREPYVSCDPDKCYQFALGQGTTLNNGHSNDTVHDRTPYRTLLMNELGVPFHLGTRQVCIAWSSSSCHDGKAWLHVCVTGDDENATASFIYNGRLVDSIGSWSKKILRTQESECVCINGTCTVVMTDGSASGKADTKILFIEEGKIVHISTLSGSAQHVEECSCYPRYPGVRCVCRDNWKGSNRPIVDINVKDYSIVSSYVCSGLVGDTPRKNDSFSSSHCLDPNNEEGGHGVKGWAFDDGNDVWMGRTISEKLRSGYETFKVIEGWSKPNSKLQTNRQVIVERGNRSGYSGIFSVEGKSCINRCFYVELIRGRKEETEVWWTSNSIVVFCGTSGTYGTGSWPDGADINLMPI

SEQ ID NO: 15834 - protein, 469 aa, synthetic construct
  REGION 1..469: note = neuraminidase__InfluenzaA__ABR15954
MNPNQKIITIGSVSLTIATICFLMQIAILVTTVTLHFKQYECNSPPNNQVMLCEPTIIERNITEIVYLTNTTIEKEICPKLAEYRNWSKPQCNITGFAPFSKDNSIRLSAGGDIWVTREPYVSCDPDKCYQFALGQGTTLNNGHSNDTVHDRTPYRTLLMNELGVPFHLGTRQVCIAWSSSSCHDGKAWLHVCVTGDDENATASFIYNGRLVDSIGSWSKKILRTQESECVCINGTCTVVMTDGSASGKADTKILFIEEGKIVHISTLSGSAQHVEECSCYPRYPGVRCVCRDNWKGSNRPIVDINVKDYSIVSSYVCSGLVGDTPRKNNSFSSSHCLDPNNEEGGHGVKGWAFDDGNDVWMGRTISEKLRSGYETFKVIEGWSKPNSKLQTNRQVIVERGNRSGYSGIFSVEGKSCINRCFYVELIRGRKEETEVWWTSNSIVVFCGTSGTYGTGSWPDGADINLMPI

SEQ ID NO: 15835 - protein, 469 aa, synthetic construct; identical to SEQ ID NO: 14154
  REGION 1..469: note = neuraminidase__InfluenzaA__ABR15965

SEQ ID NO: 15836 - protein, 469 aa, synthetic construct
  REGION 1..469: note = neuraminidase__InfluenzaA__ABR22243
MNPNQKIITIGSVSLTIATICFLMQIAILVTTVTLHFKQYECNSPPNNQVMLCEPTIIERNITEIVYLTNTTIEKEICPKLAEYRNWSKPQCNITGFAPFSKDNSIRLSAGGDIWVTREPYVSCDPDKCYQFALGQGTTLNNGHSNDTVHDRTPYRTLLMNELGVPFHLGTKQVCIAWSSSSCHDGKAWLHVCVTGDDENATASFIYNGRLVDSIGSWSKKILRTQESECVCINGTCTVVMTDGSASGKADTKILFIEEGKIVHTSPLSGSAQHVEECSCYPRYPGVRCVCRDNWKGSNRPIVDINVKDYSIVSSYVCSGLVGDTPRKTDSSSSSHCLDPNNEEGGHGVKGWAFDDGNDVWMGRTISEKSRSGYETFKVIEGWSKPNSKLQINRQVIVDRGNRSGYSGIFSVEGKSCINRCFYVELIRGRKQETEVLWTSNSIVVFCGTSGTYGTGSWPDGADLNLMPI

SEQ ID NO: 15837 - protein, 469 aa, synthetic construct; identical to SEQ ID NO: 14730
  REGION 1..469: note = neuraminidase__InfluenzaA__ABR28518

SEQ ID NO: 15838 - protein, 469 aa, synthetic construct; identical to SEQ ID NO: 14576
  REGION 1..469: note = neuraminidase__InfluenzaA__ABR28595

SEQ ID NO: 15839 - protein, 470 aa, synthetic construct
  REGION 1..470: note = neuraminidase__InfluenzaA__ABR28771
MNPNQKIITIGSISIAIGIISLMLQIGNIISIWASHSIQTGSQNHTGICNQRIITYENSTWVNHTYVNINNTNVVAGKDKTSVTLAGNSSLCSISGWAIYTKDNSIRIGSKGDVFVIREPFISCSHLECRTFFLTQGALLNDKHSNGTVKDRSPYRALMSCPLGEAPSPYNSKFESVAWSASACHDGMGWLTIGISGPDNGAVAVLKYNGIITETIKSWKKRILRTQESECVCVNGSCFTIMTDGPSNGAASYKIFKIEKGKVTKSRELNAPNFHYEECSCYPDTGTVMCVCRDNWHGSNRPWVSFNQNLDYQIGYICSGVFGDNPRPKDGEGSCNPVTVDGADGVKGFSYKYGNGVWIGRTKSNRLRKGFEMIWDPNGWTDTDSNFSVKQDVVAITDWSGYSGSFVQHPELTGLDCIRPCFWVELVRGLPRENTTIWTSGSSISFCGVNSDTANWSWPDGAELPFTIDK

SEQ ID NO: 15840 - protein, 470 aa, synthetic construct
  REGION 1..470: note = neuraminidase__InfluenzaA__ABR28782
MNPNQKIITIGSISIAIGILSLMLQIGNIISIWASHSIQTGSQNHTGICNQRIITYENSTWVNHTYVNINNTNVVAGKDKTSVTLAGNSSLCSISGWAIYTKDNSIRIGSKGDVFVIREPFISCSHLECRTFFLTQGALLNDKHSNGTVKDRSPYRALMSCPLGEAPSPYNSKFESVAWSASACHDGMGWLTIGISGPDNGAVAVLKYNGIITETIKSWKKRILRTQESECVCVNGSCFTIMTDGPSNGAASYKIFKIEKGKVTKSIELNAPNFHYEECSCYPDTGTVMCVCRDNWHGSNRPWVSFNQNLDYQIGYICSGVFGDNPRPKDGEGSCNPVTVDGADGVKGFSYKYGNGVWIGRTKSNRLRKGFEMIWDPNGWTDTDSNFSVKQDVVAITDWSGYSGSFVQHPELTGLDCIRPCFWVELVRGLPRENTTIWTSGSSISFCGVNSDTANWSWPDGAELPFTIDK

SEQ ID NO: 15841 - protein, 469 aa, synthetic construct; identical to SEQ ID NO: 14844
  REGION 1..469: note = neuraminidase__InfluenzaA__ABR28793

SEQ ID NO: 15842 - protein, 470 aa, synthetic construct; identical to SEQ ID NO: 14828
  REGION 1..470: note = neuraminidase__InfluenzaA__ABR28804

SEQ ID NO: 15843 - protein, 469 aa, synthetic construct; identical to SEQ ID NO: 14730
  REGION 1..469: note = neuraminidase__InfluenzaA__ABR28815

SEQ ID NO: 15844 - protein, 469 aa, synthetic construct; identical to SEQ ID NO: 14154
  REGION 1..469: note = neuraminidase__InfluenzaA__ABR28826

SEQ ID NO: 15845 - protein, 470 aa, synthetic construct; identical to SEQ ID NO: 14396
  REGION 1..470: note = neuraminidase__InfluenzaA__ABR28837

SEQ ID NO: 15846 - protein, 470 aa, synthetic construct
  REGION 1..470: note = neuraminidase__InfluenzaA__ABR28848
MNPNQKIITIGSISIAIGIISLMLQIGNIISIWASHSIQTGSQNHTGVCNQRIITYENSTWVNHTYVNINNTNVIVGKDKTSVTLAGNSSLCSISGWAIYTKDNSIRIGSKGDVFVIREPFISCSHLECRTFFLTQGALLNDKHSNGTVKDRSPYRALMSCPLGEAPSPYNSKFESVAWSASACHDGMGWLTIGISGPDNGAVAVLKYNGIITETIKSWKKQILRTQESECVCVNGSCFTIMTDGPSNGAASYKIFKIEKGKITKSIELNAPNFHYEECSCYPDTGTVMCVCRDNWHGSNRPWVSFNQNLDYQIGYICSGVFGDNPRPKDGEGSCNPVTVDGANGVKGFSYKYGNGVWIGRTKSNRLRKGFEMVWDPNGWTDTDSDFSVKQDVVAITDWSGYSGSFVQHPELTGLNCIRPCFWVELVRGLPKENTTIWTSGSSISFCGVNSDTANWSWPDGAELPFTIDK

SEQ ID NO: 15847 - protein, 469 aa, synthetic construct
  REGION 1..469: note = neuraminidase__InfluenzaA__ABR28859
MNPNQKIITIGSVSLTIATICFLMQIAILVTTVTLHFKQYECNSPPNNQVMLCEPTIIERNITEIVYLTNTTIEKEICPKLAEYRNWSKPQCNITGFAPFSKDNSIRLSAGGDIWVTREPYVSCDPDKCYQFALGQGTTLNNGHSNDTVHGRTPYRTLLMNELGVPFHLGTRQVCIAWSSSSCHDGKAWLHVCVTGDDENATASFIYNGRLVDSIGSWSKKILRTQESECVCINGTCTVVMTDGSASGKADTKILFIEEGKIVHISTLSGSAQHVEECSCYPRYPGVRCVCRDNWKGSNRPIVDINVKDYSIVSSYVCSGLVGDTPRKNDSFSSSHCLDPNNEEGGHGVKGWAFDDGNDVWMGRTISEKLRSGYETFKVIEGWSKPNSKLQINRQVIVERGNRSGYSGIFSVEGKSCINRCFYVELIRGRKEETEVWWTSNSIVVFCGTSGTYGTGSWPDGADINLMPI

SEQ ID NO: 15848 - protein, 469 aa, synthetic construct
  REGION 1..469: note = neuraminidase__InfluenzaA__ABR28870
MNPNQKIITIGSVSLTIATICFLMQIAILVTTVTLHFKQYECNSPPNNQVMLCEPTIIERNITETVYLTNTTIEKEICPKLAEYRNWSKPQCNITGFAPFSKDNSIRLSAGGDIWVTREPYVSCDPDKCYQFALGQGTTLNNGHSNDTVHDRTPYRTLLMNELGVPFHLGTRQVCIAWSSSSCHDGKAWLHVCVTGDDENATASFIYNGRLVDSIGSWSKKILRTQESECVCINGTCTVVMTDGSASGKADTKILFIEEGKIVHISTLSGSAQHVEECSCYPRYPGVRCVCRDNWKGSNRPIVDINVKDYSIVSSYVCSGLVGDTPRKNDSFSSSHCLDPNNEEGGHGVKGWAFDDGNDVWMGRTISEKLRSGYETFKVIEGWSKPNSKLQINRQVIVERGNRSGYSGIFSVEGKSCINRCFYVELIRGRKEETEVWWTSNSIVVFCGTSGTYGTGSWPDGADINLMPI

SEQ ID NO: 15849 - protein, 469 aa, synthetic construct
  REGION 1..469: note = neuraminidase__InfluenzaA__ABR28881
MNPNQKIITIGSVSLTIATVCFLMQIAILVTTVTLHFKQYECNSPPNNQVMLCEPTIIERNITEIVYLTNTTIEKEICPKLAEYRNWSKPQCNITGFAPFSKDNSIRLSAGGDIWVTREPYVSCDPDKCYQFALGQGTTLNNGHSNDTVHDRTPYRTLLMNELGVPFHLGTRQVCIAWSSSSCHDGKAWLHVCVTGDDENATASFIYNGRLVDSIGSWSKKILRTQESECVCINGTCTVVMTDGSASGKADTKILFIEEGKIVHISTLSGSAQHVEECSCYPRYPGVRCVCRDNWKGSNRPIVDINVKDYSIVSSYVCSGLVGDTPRKNDSFSSSHCLDPNNEEGGHGVKGWAFDDGNDVWMGRTISEKLRSGYETFKVIEGWSKPNSKLQTNRQVIVERGNRSGYSGIFSVEGKSCINRCFYVELIRGRKEETEVWWTSNSIVVFCGTSGTYGTGSWPDGADINLMPI

SEQ ID NO: 15850 - protein, 469 aa, synthetic construct; identical to SEQ ID NO: 14714
  REGION 1..469: note = neuraminidase__InfluenzaA__ABR28892

SEQ ID NO: 15851 - protein, 470 aa, synthetic construct; identical to SEQ ID NO: 14386
  REGION 1..470: note = neuraminidase__InfluenzaA__ABR28903

SEQ ID NO: 15852 - protein, 469 aa, synthetic construct
  REGION 1..469: note = neuraminidase__InfluenzaA__ABR28925
MNPNQKIITIGSVSLTISTICFFMQIAILITTVTLHFKQYEFNSPPNNQVMLCEPTIIERNITEIVYLTNTTIEKEICPKLAEYRNWSKPQCDITGFAPFSKDNSIRLSAGGDIWVTREPYVSCDPDKCYQFALGQGTTLNNVHSNDTVHDRTPYRTLLMNELGVPFHLGTKQVCIAWSSSSCHDGKAWLHVCVTGDDKNATASFIYNGRLVDSIVSWSKEVLRTQESECVCINGTCTVVMTDGSASGKADTKILFIEEGKIVHTSTLSGSAQHVEECSCYPRYPGVRCVCRDNWKGSNRPIVDINIKDYSIVSSYVCSGLVGDTPRKNDSSSSSHCLDPNNEEGGHGVKGWAFDDGNDVWMGRTISEKLRSGYETFKVIEGWSNPNSKLQINRQVIVDRGNRSGYSGIFSVEGKSCINRCFYVELIRGRKEETEVLWTSNSIVVFCGTSGTYGTGSWPDGADINLMPI

SEQ ID NO: 15853 - protein, 469 aa, synthetic construct
  REGION 1..469: note = neuraminidase__InfluenzaA__ABR88082
MDPNQKIITIGSVSLTISTICFFMQTAILITTVTLHFKQYEFNSPPNNQVMLCEPTIIERNITEIVYLTNTIIEKEICPKLAEYRNWSKPQCDITGFAPFSKDNSIRLSAGGDIWVTREPYVSCDPDKCYQFALGQGTTLNNVHSNDTVHDRTPYRTLLMNELGVPFHLGTKQVCIAWSSSSCHDGKAWLHVCVTGDDKNATASFIYNGRLVDSVVSWSKDILRTQESECVCINGTCTVVMTDGSASGKADTKILFIEEGKIVHTSTLSGSAQHVEECSCYPRYPGVRCVCRDNWKGSNRPIVDINIKNYSIVSSYVCSGLVGDTPRKTDSSSSSHCLDPNNEEGGHGVKGWAFDDGNDVWMGRTISEKLRLGYETFKVIEGWSNPNSKLQINRQVIVDRGNRSGYSGIFSVEGKSCINRCFYVELIRGRKEETEVLWTSNSIVVFCGTSGTYGTGSWPDGADINLMPI

SEQ ID NO: 15854 - protein, 470 aa, synthetic construct
  REGION 1..470: note = neuraminidase__InfluenzaA__ABS00324
MNPNQKIITIGSICMAIGIISLILQIGNIVSIWISHSIQTGSQNYTGICNQRIITYENSTWVNQTYVNINNTNVVAGQDTTSVALAGNSSLCPISGWAIYSKDNSIRIGSKGDVFVIREPFISCSHLECRTFFLTQGALLNDKHSNGTVKDRSPYRALMSCPIGEAPSPYNSRFESVAWSASACHDGMGWLTIGISGPDDGAVAVLKYNGIITETIKSWRKRILRTQESECVCVNGSCFTIMTDGPNNGPASYKIFKIEKGKITKSIELDAPNSHYEECSCYPDAGTVMCVCRDNWRGSNRPWVSFNQSLDYQIGYICSGVFGDNPRPKDGKGSCDPVTVDGADGVKGFSYRYGNGVWIGRTKSNSSRRGFEMIWDPNGWTDTDSKFLVKQDVVAMTDWSGYSGSFVQHPELTGLDCMRPCFWVELIRGRPRENTTIWTSGSSISFCGVNGDTANWSWPDGSELPFTIDK

SEQ ID NO: 15855 - protein, 469 aa, synthetic construct; identical to SEQ ID NO: 14114
  REGION 1..469: note = neuraminidase__InfluenzaA__ABS49902

SEQ ID NO: 15856 - protein, 469 aa, synthetic construct
  REGION 1..469: note = neuraminidase__InfluenzaA__ABS49913
MNPNQKIITIGSVSLTIATVCFLMQIAILVTTVTLHFRQYECDSPTNNQVMPCEPIIIERNITEIVYLNNTTIEKEICPKLVEYRNWSKPQCKITGFAPFSKDNSIRLSAGGDIWVTREPYVSCDPGKCYQFALGQGTTLDNKHSNDTIHDRIPHRTLLMNELGVPFHLGTRQVCIAWSSSSCHDGKAWLHVCVTGDDKNATASFIYDGRLVDSIGSWSQNILRTQESECVCINGTCTVVMTDGSASGRADTRILFIEEGKIVHISPLSGSAQHVEECSCYPRYPGVRCICRDNWKGSNRPVVDINVEDYSIDSSYVCSGLVGDTPRNNDRSSNSNCRNPNNERGNHGVKGWAFDDGNDVWMGRTISKDLRSGYETFKVIGGWSTPNSKSQINRQVIVDSDNRSGYSGIFSVEGKSCINRCFYVELIRGREQETRVWWTSNSIVVFCGTSGTYGTGSWPDGADINLMPI

SEQ ID NO: 15857 - protein, 469 aa, synthetic construct; identical to SEQ ID NO: 14844
  REGION 1..469: note = neuraminidase__InfluenzaA__ABS49968

SEQ ID NO: 15858 - protein, 470 aa, synthetic construct; identical to SEQ ID NO: 15840
  REGION 1..470: note = neuraminidase__InfluenzaA__ABS49979

SEQ ID NO: 15859 - protein, 470 aa, synthetic construct
  REGION 1..470: note = neuraminidase__InfluenzaA__ABS49990
MNPNQKIITIGSISIAIGIISLMLQIGNIISIWASHSIQTGSQNHTGICNQRIITYENSTWVNHTYVNINNTNVVAGKDKTSVILAGNSSLCSISGWAIYTKDNSIRIGSKGDVFVIREPFISCSHLECRTFFLTQGALLNDKHSNGTVKDRSPYRALMSCPLGEAPSPYNSKFESVAWSASACHDGMGWLTIGISGPDNGAVAVLKYNGIITETIKSWKKRILRTQESECVCVNGSCFTIMTDGPSNGAASYKIFKIEKGKVTKSIELNAPNFHYEECSCYPDTGTVMCVCRDNWHGSNRPWVSFNQNLDYQIGYICSGVFGDNPRPKDGEGSCNPVTVDGADGVKGFSYKYGNGVWIGRTKSNRLRKGFEMIWDPNGWTDTDSNFSVKQDVVAITDWSGYSGSFVQHPELTGLDCIRPCFWVELVRGLPRENTTIWTSGSSISFCGVNSDTANWSWPDGAELPFTIDK

SEQ ID NO: 15860 - protein, 469 aa, synthetic construct; identical to SEQ ID NO: 14730
  REGION 1..469: note = neuraminidase__InfluenzaA__ABS50001

SEQ ID NO: 15861 - protein, 469 aa, synthetic construct; identical to SEQ ID NO: 14730
  REGION 1..469: note = neuraminidase__InfluenzaA__ABS50012

SEQ ID NO: 15862 - protein, 469 aa, synthetic construct
  REGION 1..469: note = neuraminidase__InfluenzaA__ABS50023
MNPNQKIITIGSVSLTIATICFLMQIAVLVTTVTLHFKQYECNPPPNNQVMLCEPTIIERNITEIVYLTNTTIEKEICPKLAEYRNWSKPQCNITGFAPFSKDNSIRLSAGGDIWVTREPYVSCDPDKCYQFALGQGTTLNNGHSNDIVHDRTPYRTLLMNELGVPFHLGTKQVCIAWSSSSCHDGKAWLHVCVTGDDENATASFIYNGRLVDSIGSWSKKILRTQESECVCINGTCTVVMTDGSASGKADTKILFIEEGKIVHTSLLSGSAQHVEECSCYPRYPGVRCVCRDNWKGSNRPIVDINVKDYSIVSSYVCSGLVGDTPRKNDSSSSSHCLDPNNEEGGHGVKGWAFDDGNDVWMGRTISEKLRSGYETFKVIEGWSKPNSKLQINRQVIVDRGNRSGYSGIFSVEGKSCINRCFYVELIRGRKQETEVLWTSNSIVVFCGTSGTYGTGSWPDGADINLMPI

SEQ ID NO: 15863 - protein, 469 aa, synthetic construct; identical to SEQ ID NO: 14730
  REGION 1..469: note = neuraminidase__InfluenzaA__ABS50034

SEQ ID NO: 15864 - protein, 469 aa, synthetic construct
  REGION 1..469: note = neuraminidase__InfluenzaA__ABS50045
MNPNQKIITIGSVSLTIATICFLMQTAILVTTVTLHFKQYECNSPPNNQVMLCEPTIIERNITEIVYLTNTTIEKEICPKLAEYRNWSKPQCNITGFAPFSKDNSIRLSAGGDIWVTREPYVSCDPDKCYQFALGQGTTLNNGHSNDTIHDRTPYRTLLMNELGVPFHLGTRQVCIAWSSSSCHDGKAWLHVCVTGDDENATASFIYNGRLVDSIGSWSKKILRTQESECVCINGTCTVVMTDGSASGKADTKILFIEEGKIVHISTLSGSAQHVEECSCYPRYPGVRCVCRDNWKGSNRPIVDINVKDYSIVSSYVCSGLVGDTPRKNDSFSSSHCLDPNNEEGGHGVKGWAFDDGNDVWMGRTISEKLRSGYETFKVIEGWSKPNSKLQINRQVIVERGNRSGYSGIFSVEGKSCINRCFYVELIRGRKEETEVWWTSNSIVVFCGTSGTYGTGSWPDGADINLMPI

SEQ ID NO: 15865 - protein, 469 aa, synthetic construct; identical to SEQ ID NO: 14154
  REGION 1..469: note = neuraminidase__InfluenzaA__ABS50056

SEQ ID NO: 15866 - protein, 469 aa, synthetic construct; identical to SEQ ID NO: 14180
  REGION 1..469: note = neuraminidase__InfluenzaA__ABS50067

SEQ ID NO: 15867 - protein, 469 aa, synthetic construct; identical to SEQ ID NO: 14714
  REGION 1..469: note = neuraminidase__InfluenzaA__ABS50078

SEQ ID NO: 15868 - protein, 470 aa, synthetic construct
  REGION 1..470: note = neuraminidase__InfluenzaA__ABS71644
MKPNQKIITIGSISIAIGIISLILQIGNIISIWASHSIQTESQNHTGICNQRIITYENSTWVNNTYVNINNTNVVAEKDKTSVTLAGNSSLCSISGWAIYTKDNSIRIGSKGDVFVIREPFISCSHLECRTFFLTQGALLNDKHSNGTVKDRSPYRALMSCPLGEAPSPYNSRFESVAWSASACHDGMGWLTIGISGPDNGAVAVLKYNGIITETIKSWKKRILRTQESECVCMNGSCFTIMTDGPSNGAASYKIFKIEKGKVTKTMELNAPNFHYEECSCYPDTGTVMCVCRDNWHGSNRPWVSFNQNLDYQIGYICSGVFGDNPRPKDGEGSCNPVTVDGADGVKGFSYKYGNGVWMGRTKSNRLRKGFEMIWDPNGWTNTDSDFSVKQDVVAITDWSGYSGSFVQHPELTGLDCIRPCFWVELVRGLPRENTTIWTSGSSISFCGVNSGTANWSWPDGAELPFTIDK

SEQ ID NO: 15869 - protein, 470 aa, synthetic construct
  REGION 1..470: note = neuraminidase__InfluenzaA__ABS71646
MNPNQKIITIGSISIAIGIISLILQIGNIISIWASHSIQTESQNHTGICNQRIITYENSTWVNNTYVNINNTNVVAEKDKTSVTLAGNSSLCSISGWAIYTKDNSIRIGSKGDVFVIREPFISCSHLECRTFFLTQGALLNDKHSNGTVKDRSPYRALMSCPLGEAPSPYNSRFESVAWSASACHDGMGWLTIGISGPDNGAVAVLKYNGIITETIKSWKKRILRTQESECVCMNGSCFTIMTDGPSNGAASYKIFKIEKGKVTKTMELNAPNFHYEECSCYPDTGTVMCVCRDNWHGSNRPWVSFNQNLDYQIGYICSGVFGDNPRPKDGEGSCNPVTVDGADGVKGFSYKYGNGVWMGRTKSNRLRKGFEMIWDPNGWTNTDSDFSVKQDVVAITDWSGYSGSFVQHPELTGLDCIRPCFWVELVRGLPRENTTIWTSGSSISFCGVNSGTANWSWPDGAELPFTIDK

SEQ ID NO: 15870 - protein, 470 aa, synthetic construct
  REGION 1..470: note = neuraminidase__InfluenzaA__ABS71647
MNPNQKIITIGSISIAIGIISLILQIGNIISIWASHSIQTESQNHTGICNQRIITYENSTWVNNTYVNINNTNVVAEKDKTSVTLAGNSSLCSISGWAIYTKDNSIRIGSKGDVFVIREPFISCSHLECRTFFLTQGALLNDKHSNGTVKDRSPYRALMSCPLGEAPSPYNSRFESVAWSASACHDGMGWLTIGISGPDNGAVAVLKYNGIITETIKSWRKRILRTQESECVCMNGSCFTIMTDGPSNGAASYKIFKIEKGKVTKTMELNAPNFHYEECSCYPDTGTVMCVCRDNWHGSNRPWVSFNQNLDYQIGYICSGVFGDNPRPKDGEGSCNPVTVDGADGVKGFSYKYGNGVWMGRTKSNRLRKGFEMIWDPNGWTNTDSDFSVKQDVVAITDWSGYSGSFVQHPELTGLDCIRPCFWVELVRGLPRENTTIWTSGSSISFCGVNSGAANWSWPDGAELPFTIDK

SEQ ID NO: 15871 - protein, 470 aa, synthetic construct
  REGION 1..470: note = neuraminidase__InfluenzaA__ABS71648
MNPNQKIITIGSISIAIGIISLILQIGNIISIWASHSIQTGNQNHTGICNQRIITYENSTWVNNTYVNINNTNVVAEKDKTSVTLAGNSSLCSISGWAIYTKDNSIRIGSKGDVFVIREPFISCSHLECRTFFLTQGALLNDKHSNGTVKDRSPYRALMSCPLGEAPSPYNSRFESVAWSASACHDGMGWLTIGISGPDNGAVAVLKYNGIITETIKSWKKRILRTQESECVCMNGSCFTIMTDGPSNGAASYKIFKIEKGKVTKTIELNAPNFHYEECSCYPDTGTVMCVCRDNWHGSNRPWVSFNQNLDYQIGYICSGVFGDNPRPKDGEGSCNPVTVDGADGVKGFSYKYGNGVWIGRTKSNRLRKGFEMIWDPNGWTNTDSDFSVKQDVVAITDWSGYSGSFVQHPELTGLDCIRPCFWVELVRGLPKENTTIWTSGSSISFCGVNSGTANWSWPDGAELPFTIDK

SEQ ID NO: 15872 - protein, 470 aa, synthetic construct
  REGION 1..470: note = neuraminidase__InfluenzaA__ABS71649
MNPNQKIITIGSISIAIGIISLMLQIGNIISIWASHSIQTGSQNHTGICNQRIITYENSTWVNHTYVNINNTNVVAEKDKTSVTLAGNSSLCSISGWAIYTKDNSIRIGSKGDVFVIREPFISCSHLECRTFFLTQGALLNDKHSNGTVKDRSPYRALMSCPLGEAPSPYNSKFESVAWSASACHDGMGWLTIGISGPDNGAVAVLKYNGIITGTIKSWKKQILRTQESECVCMNGSCFTIMTDGPSNRAASYKIFKIEKGKVTKSIELNAPNFHYEECSCYPDTGIVMCVCRDNWHGSNRPWVSFNQNLDYQIGYICSGVFGDNPRPKDGEGSCNPVTVDGADGVKGFSYKYDNGVWIGRTKSNRLRKGFEMIWDPNGWTNTDSDFSVKQDVVAITDWSGYSGSFVQHPELTGLDCIRPCFWVELVRGLPRENTTIWTSGSSISFCGVNSDTANWSWPDGAELPFTIDK

SEQ ID NO: 15873 - protein, 470 aa, synthetic construct
  REGION 1..470: note = neuraminidase__InfluenzaA__ABS71651
MNPNQKIITIGSISIAIGIISLMLQIGNIISIWASHSIQTGSQNHTGICNQRIITYENNTWVNHTYVNINNTNVVAGKDKTSVTLAGNSSLCSVSGWAIYTKDNSIRIGSKGDVFVIREPFISCSHLECRTFFLTQGALLNDKHSNGTVKDRSPYRALMSCPLGEAPSPYNSKFESVAWSASACHDGMGWLTIGISGPDNGAVAVLKYNGIITGTIKSWKKRILRTQESECVCMNGSCFTIMTDGPSNGAASYKIFKIEKGKVTKSIELNAPSFHYEECSCYPDTGTVMCVCRDNWHGSNRPWVSFNQNLDYQIGYICSGVFGDNPRPKDGEGSCNPVTVDGADGVKGFSYKYGNGVWLGRTKSNRLRKGFEMIWDPNGWTNTDSDFSVKQDVVAITDWSGYSGSFVQHPELTGLDCIRPCFWVELVRGLPRENTTIWTSGSSISFCGVNSNTANWSWPDGAELPFTIDK

SEQ ID NO: 15874 - protein, 470 aa, synthetic construct
  REGION 1..470: note = neuraminidase__InfluenzaA__ABS71652
MNPNQKIITIGSISIAIGIISLMLQIGNIISIWASHSIQTGSQNHTGICNQRIITYENNTWVNHTYVNINNTNVVAGKDKTSVTLAGNSSLCSVSGWAIYTKDNSIRIGSKGDVFVIREPFISCSHLECRTFFLTQGALLNDKHSNGTVKDRSPYRALMSCPLGEAPSPYNSKFESVAWSASACHDGMGWLTIGISGPDNGAVAVLKYNGIITETIKSWKKRILRTQESECVCMNGSCFTIMTDGPSNGAASYKIFKIEKGKVTKSIELNAPSFHYEECSCYPDTGTVMCVCRDNWHGSNRPWVSFNQNLDYQIGYICSGVFGDNPRPKDGEGSCNPVTVDGADGVKGFSYKYGNGVWIGRTKSNRLRKGFEMIWDPNGWTNTDSDFSVKQDVVAITDWSGYSGSFVQHPELTGLDCIRPCFWVELVRGLPRENTTIWTSGSSISFCGVNSNTANWSWPDGAELPFTIDK

SEQ ID NO: 15875 - protein, 470 aa, synthetic construct
  REGION 1..470: note = neuraminidase__InfluenzaA__ABS71653
MNPNQKIITIGSISIAIGIISLMLQIGNIISIWASHSIQTGSQNHTGICNQRIITYENSTWVNHTYVNINNTNVVAGKDKTSVTLAGNSSLCSISGWAIYTKDNSIRIGSKGDVFVIREPFISCSHLECRTFFLTQGALLNDKHSNGTVKDRSPYRALMICPLGEAPSPYNSKFESVAWSASACHDGMGWLTIGISGPDNGAVAVLKYNGIITETIKSWKKRILRTQESECVCVNGSCFTIMTDGPSNGAASYKIFKIEKGKVTKSRELNAPNFHYEECSCYPDIGTVMCVCRDNWHGSNRPWVSFNQNLDYQIGYICSGVFGDNPRPKDGKGSCNPVTADGADGVKGFSYKYGNGVWIGRTKSNRLRKGFEMIWDPNGWTDTDSDFSVKQDVVAITDWSGYSGSFVQHPELTGLDCIRPCFWVELVRGLPRENTTIWTSGSSISFCGVDSDTANWSWPDGAELPFTIDK

SEQ ID NO: 15876 - protein, 469 aa, synthetic construct
  REGION 1..469: note = neuraminidase__InfluenzaA__ABS71655
MNPIKKIITIGSVSLTISTICFFMQIAILITTVTLHFKQYEFNSPPNNQVMLCEPTIIERNITEIVYLTNTTIEKEICPKLAEYRNWSKPQCNITGFAPFSKDNSIRLSAGGDIWVTREPYVSCDPDKCYQFALGQGTTLNNVHSNDTVHDRTPYRTLLMNELGVPFHLGTKQVCIAWSSSSCHDGKAWLHVCVTGDDKNATASFIYNGRLVDSIVSWSKEILRTQESECVCINGTCTVVMTDGSASGKADTKILFIEEGKIVHTSTLSGSAQHVEECSCYPRYPGVRCVCRDNWKGSNRPIVDINIKDYSIVSSYVCSGLVGDTPRKNDSSSSSHCLDPNNEEGGHGVKGWAFDDGNDVWMGRTISEKLRSGYETFKVIEGWSNPNSKLQINRQVIVDRGNRSGYSGIFSVEGKSCINRCFYVELIRGRKEETEVLWTSNSIVVFCGTSGTYGTGSWPDGADINLMPI

SEQ ID NO: 15877 - protein, 469 aa, synthetic construct
  REGION 1..469: note = neuraminidase__InfluenzaA__ABS71657
MNPNQKIITIGSVSLTISTICFFMQIAILITTVTLHFKQYEFSSPPNNQVMLCEPTIIERNITEIVYLTNTTIEKEICPKLAEYRNWSKPQCDITGFAPFSKDNSIRLSAGGDIWVTREPYVSCDPDKCYQFALGQGTTLNNVHSNDTVHDRTPYRTLLMNELGVPFHLGTKQVCIAWSSSSCHDGKAWLHVCVTGDDKNATASFIYNGRLVDSIVSWSKEILRTQESECVCINGTCTVVMTDGSASGKADTKILFIEEGKIVHTSTLSGSAQHVEECSCYPRYPGVRCVCRDNWKGSNRPIVDINIKDYSIVSRYVCSGLVGDTPRKNDSSSSSHCLDPNNEEGGHGVKGWAFDDGNDAWMGRTISEKSRSGYETFKVIEGWSNPNSKLQINRQVIVDRGNRSGYSGIFSVEGKSCINRCFYVELIRGRKEETEVLWTSNSIVVFCGTSGTYGTGSWPDGADINLMPI

SEQ ID NO: 15878 - protein, 469 aa, synthetic construct
  REGION 1..469: note = neuraminidase__InfluenzaA__ABS71659
MNPIKKIITIGSVSLTISTICFFMQIAILITTVTLHFKQYEFSSPPNNQVMLCEPTIIERNITEIVYLTNTTIEKEICPKLAEYRNWSKPQCDITGFAPFSKDNSIRLSAGGDIWVTREPYVSCDPDKCYQFALGQGTTLNNVHSNDTVHDRTPYRTLLMNELGVPFHLGTKQVCIAWSSSSCHDGKAWLHVCVTGDDKNATASFIYNGRLVDSIVSWSKEILRTQESECVCINGTCTVVMTDGSASGKADTKILFIEEGKIVHTSTLSGSAQHVEECSCYPRYPGVRCVCRDNWKGSNRPIVDINIKDYSIVSRYVCSGLVGDTPRKNDSSSSSHCLDPNNEEGGHGVKGWAFDDGNDVWMGRTIGEKSRSGYETFKVIEGWSNPNSKLQINRQVIVDRGNRSGYSGIFSVEGKSCINRCFYVELIRGRKEETEVLWTSNSIVVFCGTSGTYGTGSWPDGADINHMPI

SEQ ID NO: 15879 - protein, 469 aa, synthetic construct
  REGION 1..469: note = neuraminidase__InfluenzaA__ABS71660
MNPIKKIITIGSVSLTISTICFFMQIAILITTVTLHFKQYEFSSPPNNQVMLCEPTIIERNITEIVYLTNTTIEKEICPKLAEYRNWSKPQCDITGFAPFSKDNSIRLSAGGDIWVTREPYVSCDPDKCYQFALGQGTTLNNVHSNDTVHDRTPYRTLLMNELGVPFHLGTKQVCIAWSSSSCHDGKAWLHVCVTGDDKNATASFIYNGRLVDSIVSWSKEILRTQESECVCINGTCTVVMTDGSASGKADTKILFIEEGKIVHTSTLSGSAQHVEECSCYPRYPGVRCVCRDNWKGSNRPIVDINIKDYSIVSRYVCSGLVGDTPRKNDSSSSSHCLDPNNEEGGHGVKGWAFDDGNDVWMGRTISEKSRSGYETFKVIEGWSNPNSKLQINRQVIVDRGNRSGYSGIFSVEGKSCINRCFYVELIRGRKEETEVLWTSNSIVVFCGTSGTYGTGSWPDGADINLMPI

SEQ ID NO: 15880 - protein, 469 aa, synthetic construct
  REGION 1..469: note = neuraminidase__InfluenzaA__ABS71661
MYPIKKIITIGSVSLTISTICFFMQIAILITTVTLHFKQYEFSSPPNNQVMLCEPTIIERNITEIVYLTNTTIEKEICPKLAEYRNWSKPQCDITGFAPFSKDNSIRLSAGGDIWVTREPYVSCDPDKCYQFALGQGTTLNNVHSNDTVHDRTPYRTLLMNELGVPFHLGTKQVCIAWSSSSCHDGKAWLHVCVTGDDKNATASFIYNGRLVDSIVSWSKEILRTQESECVCINGTCTVVMTDGSASGKADTKILFIEEGKIVHTSTLSGSAQHVEECSCYPRYPGVRCVCRDNWKGSNRPIVDINIKDYSIVSRYVCSGLVGDTPRKNDSSSSSHCLDPNNEEGGHGVKGWAFDDGNDVWMGRTISEKSRSGYETFKVIEGWSNPNSKLQINRQVIVDRGNRSGYSGIFSVEGKSCINRCFYVELIRGRKEETEVLWTSNSIVVFCGTSGTYGTGSWPDGADINLMPI

SEQ ID NO: 15881 - protein, 469 aa, synthetic construct
  REGION 1..469: note = neuraminidase__InfluenzaA__ABS71662
MNPIKKIITIGSVSLTISTICFFMQIAILITTVTLHFKQYEFNSPPNNQVMLCEPTIIERNITEIVYLTNTTIEKEICPKLAEYRNWSKPQCDITGFAPFSKDNSIRLSAGGDIWVTREPYVSCDPDKCYQFALGQGTTLNNVHSNDTVRDRTPYRTLLMNELGVPFHLGTKQVCIAWSSSSCHDGKAWLHVCITGDDKNATASFIYNGRLVDSIVSWSKEILRTQESECVCINGTCTVVMTDGSASGKADTKILFIEEGKIVHTSTLSGSAQHVEECSCYPRYPGVRCVCRDNWKGSNRPIVDINIKDHSIVSSYVCSGLVGDTPRKNDSSSSSHCLDPNNEEGGHGVKGWAFDDGNDVWMGRTISEKSRLGYETFKVIEGWSNPNSKLQINRQVIVDRGNRSGYSGIFSVEGKSCINRCFYVELIRGRKEETEVLWTSNSIVVFCGTSGTYGTGSWPDGADINLMPI

SEQ ID NO: 15882 - protein, 469 aa, synthetic construct
  REGION 1..469: note = neuraminidase__InfluenzaA__ABS71663
MYPIKKIITIGSVSLTISTICFFMQIAILITTVTLHFKQYEFNSPPNNQVMLCEPTIIERNITEIVYLTNTTIEKEICPKLAEYRNWSKPQCDITGFAPFSKDNSIRLSAGGDIWVTREPYVSCDPDKCYQFALGQGTTLNNVHSNDTVRDRTPYRTLLMNELGVPFHLGTKQVCIAWSSSSCHDGKAWLHVCITGDDQNATASFIYNGRLVDSIVSWSKEILRTQESECVCINGTCTVVMTDGSASGKADTKILFIEEGKIVHTSTLSGSAQHVEECSCYPRYPGVRCVCRDNWKGSNRPIVDINIKDHSIVSSYVCSGLVGDTPRKNDSSSSSHCLDPNNEEGGHGVKGWAFDDGNDVWMGRTISEKSRLGYETFKVIEGWSNPNSKLQMNRQVIVDRGNRSGYSGIFSVEGKSCINRCFYVELIRGRKEETEVLWTSNSIVVFCGTSGTYGTGSWPDGADINLMPI

SEQ ID NO: 15883 - protein, 469 aa, synthetic construct
  REGION 1..469: note = neuraminidase__InfluenzaA__ABU40956
MNPNQKIITIGSVSLTISTICFFMQIAILITTVTLHFKQYEFNSPPNNQVMLCEPTIIERNITEIVYLTNTTIEKEICPKLAEYRNWSKPQCDITGFAPFSKDNSIRLSAGGDIWVTREPYVSCDPDNCYQFALGQGTTLNNVHSNDTVRDRTPYRTLLMNELGVPFHLGTKQVCIAWSSSSCHDGKAWLHVCITGDDKNATASFIYNGRLVDSIVSWSKEILRTQESECVCINGTCTVVMTDGSASGKADTKILFIEEGKIVHTSTLSGSAQHVEECSCYPRYPGVRCVCRDNWKGSNRPIIDINIKDHSIVSSYVCSGLVGDTPRKNDSSSSSHCLDPNNEEGGHGVKGWAFDDGNDVWMGRTISEKSRLGYETFKVIEGWSNPKSKLQINRQVIVDRGNRSGYSGIFSVEGKSCINRCFYVELIRGRKEETEVLWTSNSIVVFCGTSGTYGTGSWPDGADINLMPI

SEQ ID NO: 15884 - protein, 469 aa, synthetic construct
  REGION 1..469: note = neuraminidase__InfluenzaA__ABU50651
MNPNQKIITIGSVSLTISTICFFMQIAILITTVTLHFKQYEFNSPPNNQVMLCEPTIIERNITEIVYLTNTTIEKEICPKLAEYRNWSKPQCDITGFAPFSKDNSIRLSAGGDIWVTREPYVSCDPDKCYQFALGQGTTLNNVHSNDTVRDRTPYRTLLMNELGVPFHLGTKQVCIAWSSSSCHDGKAWLHVCITGDDKNATASFIYNGRLVDSIVSWSKEILRTQESECVCINGTCTVVMTDGSASGKADTKILFIEEGKIVHTSTLSGSAQHVEECSCYPRYPGVRCVCRDNWKGSNRPIVDINIKDHSIVSSYVCSGLVGDTPRKNDSSSSSHCLDPNNEEGGHGVKGWAFDDGNDVWMGRTISEKSRLGYETFKVIEGWSNPKSKLQINRQVIVDRGNRSGYSGIFSVEGKSCINRCFYVELIRGRKEETEVLWTSNSIVVFCGTSGTYGTGSWPDGADINLMPI

SEQ ID NO: 15885 - protein, 469 aa, synthetic construct
  REGION 1..469: note = neuraminidase__InfluenzaA__ABU80180
MNPNQKIITIGSVSLTIATICFLMQIAILVTTVTLHFKQYECNSFPNNQVMLCEPTIIERNITEIVYLTNTTIEKEICPKLAEYRNWSKPQCNITGFAPFSKDNSIRLSAGGDIWVTREPYVSCDPDKCYQFALGQGTTLNNGHSNDTVHDRTPYRTLLMNELGVPFHLGTKQVCIAWSSSSCHDGKAWLHVCVTGDDENATASFIYNGRLVDSIGSWSKKILRTQESECVCINGTCTVVMTDGSASGKADTKILFIEEGKIVHTSSLSGSAQHVEECSCYPRYPGVRCVCRDNWKGSNRPIVDINVKDYSIVSSYVCSGLVGDTPRKNDSSSSSHCLDPNNEEGGHGVKGWAFDDGNDVWMGRTISEKLRSGYETFKVIEGWSKPNSKLQINRQVIVDRGNRSGYSGIFSVEGKSCINRCFYVELIRGRKQETEVLWTSNSIVVFCGTSGTYGTGSWPDGADINLMPI

SEQ ID NO: 15886 - protein, 470 aa, synthetic construct; identical to SEQ ID NO: 14828
  REGION 1..470: note = neuraminidase__InfluenzaA__ABU80301

SEQ ID NO: 15887 - protein, 470 aa, synthetic construct
  REGION 1..470: note = neuraminidase__InfluenzaA__ABU80312
MNTNQKIITIGSISIAIGIISLMLQIGNIISIWASHSIQTGSQNHTGICNQRIITYENSTWVNHTYVNINNTNVVAGKDKTSVTLAGNSSLCSISGWAIYTKDNSIRIGSKGDVFVMREPFISCSHLECRTFFLTQGALLNDKHSNGTVKDRSPYRALMSCPLGEAPSPYNSKFESVAWSASACHDGMGWLTIGISGPDNGAVAVLKYNGIITETIKSWKKRILRTQESECVCVNGSCFTIMTDGPSNGAASYKIFKIEKGKVTKSIELNAPNFHYEECSCYPDTGTVMCVCRDNWHGSNRPWVSFNQNLDYQIGYICSGVFGDNPRPKDGEGSCNPVTVDGADGVKGFSYKYGNGVWIGRTKSNRLRKGFEMIWDPNGWTDTDSNFSVKQDVVAITDWSGYSGSFVQHPELTGLDCIRPCFWVELVRGLPRENTTIWTSGSSISFCGVNSDTANWSWPDGAELPFTIDK

SEQ ID NO: 15888 - protein, 469 aa, synthetic construct; identical to SEQ ID NO: 14730
  REGION 1..469: note = neuraminidase__InfluenzaA__ABU80323

SEQ ID NO: 15889 - protein, 469 aa, synthetic construct
  REGION 1..469: note = neuraminidase__InfluenzaA__ABU80334
MNPNQKIITIGSVSLTIATICFLMQIAILVTTVTLHFKQYECNSPPNNQVMLCEPTIIERNITEIVYLTNTTIEKEICPKLAEYRNWSKPQCNITGFAPFSKDNSIRLSAGGDIWVTREPYVSCDPDKCYQFALGQGTTLNNGHSNDTVHDRTPYRTLLMNELGVPFHLGTRQVCIAWSSSSCHDGKAWLHVCVTGDDENATASFIYNGRLVDSIGSWSKKTLRTQESECVCINGTCTVVMTDGSASGKADTKILFIEEGKIIHISTLSGSAQHVEECSCYPRYPGVRCVCRDNWKGSNRPIVDINVKDYSIVSSYVCSGLVGDTPRKNDSFSSSHCLDPNNEEGGHGVKGWAFDDGNDVWMGRTISEKLRSGYETFKVIEGWSKPNSKLQINRQVIVERGNRSGYSGIFSVEGKSCINRCFYVELIRGRKEETEVWWTSNSIVVFCGTSGTYGTGSWPDGADINLMPI

SEQ ID NO: 15890 - protein, 469 aa, synthetic construct; identical to SEQ ID NO: 14154
  REGION 1..469: note = neuraminidase__InfluenzaA__ABU92762

SEQ ID NO: 15891 - protein, 469 aa, synthetic construct
  REGION 1..469: note = neuraminidase__InfluenzaA__ABU92764
MNPNQKIITIGSVSLTIATICFLMQIAILVTTVTLHFKQYECNSPPNNQVMLCEPTIMERNITEIVYLTNTTIEKEICPKLAEYRNWSKPQCNVTGFAPFSKDNSIRLSAGGDIWVTREPYVSCDPDKCYQFALGQGTTLNNGHSNDTVHDRTPYRTLLMNELGVPFHLGTRQVCIAWSSSSCHDGKAWLHVCVTGDDENATASFIYNGRLVDSIGSWSKKILRTQESECVCINGTCTVVMTDGSASGKADTKILFIEEGKIVHISTLSGSAQHVEECSCYPRYPGVRCVCRDNWKGSNRPIVDINVKDYSIVSSYVCSGLVGDTPRKNDSFSSSHCLDPNNEEGGHGVKGWAFDDGNDVWMGRTISEKLRSGYETFKVIEGWSKPNSKLQINRQVIVERGNRSGYSGIFSVEGKSCINRCFYVELIRGKKEETEVWWTSNSIVVFCGTSGTYGTGSWPDGADINLMPI

SEQ ID NO: 15892 - protein, 469 aa, synthetic construct; identical to SEQ ID NO: 14154
  REGION 1..469: note = neuraminidase__InfluenzaA__ABU92765

SEQ ID NO: 15893 - protein, 469 aa, synthetic construct; identical to SEQ ID NO: 14154
  REGION 1..469: note = neuraminidase__InfluenzaA__ABU92766

SEQ ID NO: 15894 - protein, 469 aa, synthetic construct; identical to SEQ ID NO: 14154
  REGION 1..469: note = neuraminidase__InfluenzaA__ABU92767

SEQ ID NO: 15895 - protein, 469 aa, synthetic construct; identical to SEQ ID NO: 14154
  REGION 1..469: note = neuraminidase__InfluenzaA__ABU92768

SEQ ID NO: 15896 - protein, 469 aa, synthetic construct; identical to SEQ ID NO: 14061
  REGION 1..469: note = neuraminidase__InfluenzaA__ABU92769

SEQ ID NO: 15897 - protein, 469 aa, synthetic construct; identical to SEQ ID NO: 14253
  REGION 1..469: note = neuraminidase__InfluenzaA__ABU92770

SEQ ID NO: 15898 - protein, 469 aa, synthetic construct
  REGION 1..469: note = neuraminidase__InfluenzaA__ABU92771
MNPNQKIITIGSVSLTIATICFLMQIAILVTTVTLHFKQYECNSPPNNQVMLCEPTIIERNITEIVYLTNTTIEKEICPKLAEYRNWSKPQCNITGFAPFSKDNSIRLSAGGDIWVTREPYVSCDPNKCYQFALGQGTTLNNGHSNDTVHDRTPYRTLLMNELGVPFHLGTKQVCIAWSSSSCHDGKAWLHVCVTGDDENATASFIYNGRLVDSIGSWSKKILRTQESECVCINGTCTVVMTDGSASGKADTKILFIEEGKIVHTSLLSGSAQHVEECSCYPRYPGVRCVCRDNWKGSNRPIVDINVKDYSIVSSYVCSGLVGDTPRKNDSSSSSHCLDPNNEEGGHGVKGWAFDDGNDVWMGRTISEKLRSGYETFKVIEGWSKPNSKLQINRQVIVDRGNRSGYSGIFSVEGKSCINRCFYVELIRGRKQETEVLWTSNSIVVFCGTSGTYGTGSWPDGADINLMPI

SEQ ID NO: 15899 - protein, 469 aa, synthetic construct
  REGION 1..469: note = neuraminidase__InfluenzaA__ABU92772
MNPNQKIITIGSVSLTIATICFLMQIAILVTTVTLHFKQYECNSPPNNQVMLCEPTIIERNITEIVYLTNTTIEKEICPKLAEYRNWSKPQCNITGFAPFSKDNSIRLSAGGDIWVTREPYVSCDPDKCYQFALGQGTTLNNGHSNDTVHDRTPYRTLLMNELGVPFHLGTRQVCIAWSSSSCHDGKAWLHVCVTGDDENATASFIYNGRLVDSIGSWSKNILRTQESECVCINGTCTVVMTDGSASGKADTKILFIEEGKIVHISTLSGSAQHVEECSCYPRYPGVRCVCRDNWKGSNRPIVDINVKDYSIVSSYVCSGLVGDTPRKNDSFSSSHCLDPNNEEGGHGVKGWAFDDGNDVWMGRTISEKLRSGYETFKVIEGWSKPNSKLQINRQVIVERGNRSGYSGIFSVEGKSCINRCFYVELIRGRKEETEVWWTSNSIVVFCGTSGTYGTGSWPDGADINLMPI

SEQ ID NO: 15900 - protein, 469 aa, synthetic construct
  REGION 1..469: note = neuraminidase__InfluenzaA__ABU92773
MNPNQKIITIGSVSLTIATICFLMQIAILVTTVTLHFKQYECNSPPNNQVMLCEPTIIERNITETVYLTNTTIEKEICPKLAEYRNWSKPQCNITGFAPFSKDNSIRLSAGGDIWVTREPYVSCDPDKCYQFALGQGTTLNNGHSNDTVHDRTPYRTLLMNELGVPFHLGTRQVCIAWSSSSCHDGKAWLHVCVTGDDENATASFIYNGRLVDSIGSWSKKILRTQESECVCINGTCTVVMTDGSASGKADTKILFIEEGKIVHISTLSGSAQHVEECSCYPRYPGVRCVCRDNWKGSNRPIVDINVKDYSIVSSYVCSGLVGDTPRKNDSFSSSHCLDPNNEEGGHGVKGWAFDDGNDVWMGRTISEKLRSGYETFKVIEGWSKPNSKLQTNRQVIVERGNRSGYSGIFSVEGKSCINRCFYVELIRGRKEETEVWWTSNSIVVFCGTSGTYGTGSWPDGADINLMPI

SEQ ID NO: 15901 - protein, 469 aa, synthetic construct
  REGION 1..469: note = neuraminidase__InfluenzaA__ABU92774
MNPNRKIITIGSVSLTIATICFLMQIAILVTTVTLHFKQYECNSPPNNQVMLCEPTIIERNITETVYLTNTTIEKEICPKLAEYRNWSKPQCNITGFAPFSKDNSIRLSAGGDIWVTREPYVSCDPDKCYQFALGQGTTLNNGHSNDTVHDRTPYRTLLMNELGVPFHLGTRQVCIAWSSSSCHDGKAWLHVCVTGDDENATASFIYNGRLVDSIGSWSKKILRTQESECVCINGTCTVVMTDGSASGKADTKILFIEEGKIVHISTLSGSAQHVEECSCYPRYPGVRCVCRDNWKGSNRPIVDINVKDYSIVSSYVCSGLVGDTPRKNDSFSSSHCLDPNNEEGGHGVKGWAFDDGNDVWMGRTISEKLRSGYETFKVIEGWSKPNSKLQTNRQVIVERGNRSGYSGIFSVEGKSCINRCFYVELIRGRKEETEVWWTSNSIVVFCGTSGTYGTGSWPDGADINLMPI

SEQ ID NO: 15902 - protein, 469 aa, synthetic construct
  REGION 1..469: note = neuraminidase__InfluenzaA__ABU92775
MNPNQKIITIGSVSLTIATICFLMQIAILVTTVTLHFKQYECNSPPNNQVMLCEPTIIERNITEIVYLTNTTIEKEICPKLAEYRNWSKPQCNITGFAPFSKDNSIRLSAGGDIWVTREPYVSCDPDKCYQFALGQGTTLNNGHSNDTVHDRTPYRTLLMNELGVPFHLGTRQVCIAWSSSSCHDGKAWLHVCVTGDDKNATASFIYNGRLVDSIGSWSKKILRTQESECVCINGTCTVVMTDGSASGKADTKILFIEEGKIVHISTLSGSAQHVEECSCYPRYPGVRCVCRDNWKGSNRPIVDINVKDYSIVSSYVCSGLVGDTPRKNDSFSSSHCLDPNNEEGGHGVKGWAFDDGNDVWMGRTISEKLRSGYETFKVIEGWSKPNSKLQINRQVIVERGNRSGYSGIFSVEGKSCINRCFYVELIRGRKEETEVWWTSNSIVVFCGTSGTYGTGSWPDGADINLMPI

SEQ ID NO: 15903 - protein, 469 aa, synthetic construct; identical to SEQ ID NO: 14327
  REGION 1..469: note = neuraminidase__InfluenzaA__ABU92777

SEQ ID NO: 15904 - protein, 469 aa, synthetic construct
  REGION 1..469: note = neuraminidase__InfluenzaA__ABU92778
MNPNQKIITIGSVSLTISTICFFMQIAILITTVTLHFKQYEFNSPPNNQVMLCEPTIIERNITEIVYLTNTTIEKEVCPKLAEYRNWSKPQCNITGFAPFSKDNSIRLSAGGDIWVTREPYVSCDPDKCYQFALGQGTTLNNVHSNDTVHDRTPYRTLLMNELGVPFHLGTKQVCIAWSSSSCHDGKAWLHVCVTGDDKNATASFIYNGRLVDSIVSWSKEILRTQESECVCINGTCTVVMTDGSASGKADTKILFIEEGKIVHTSTLSGSAQHVEECSCYPRYPGVRCVCRDNWKGSNRPIVDINIKDYSIVSSYVCSGLVGDTPRKNDSSSSSHCLDPNNEEGGHGVKGWAFDDGNDVWMGRTISEKLRSGYETFKVIEGWSNPNSKLQINRQVIVDRGNRSGYSGIFSVEGKSCINRCFYVELIRGRKEETEVLWTSNSIVVFCGTSGTYGTGSWPDGADINLMPI

SEQ ID NO: 15905 - protein, 469 aa, synthetic construct; identical to SEQ ID NO: 14225
  REGION 1..469: note = neuraminidase__InfluenzaA__ABU92779

SEQ ID NO: 15906 - protein, 469 aa, synthetic construct; identical to SEQ ID NO: 14225
  REGION 1..469: note = neuraminidase__InfluenzaA__ABU92780

SEQ ID NO: 15907 - protein, 469 aa, synthetic construct; identical to SEQ ID NO: 14225
  REGION 1..469: note = neuraminidase__InfluenzaA__ABU92781

SEQ ID NO: 15908 - protein, 469 aa, synthetic construct
  REGION 1..469: note = neuraminidase__InfluenzaA__ABU92782
MNPNQKIITIGSVSLTIAAICFLMQIAILVTTVTLHFKQHECNSPPNNQVMLCEPTIIERNITEIVYLTNTTIEKEICPKLAEYRNWSKPQCNITGFAPFSKDNSIRLSAGGDIWVTREPYVSCDPDKCYQFALGQGTTLNNGHSNDTVHDRTPYRTLLMNELGVPFHLGTRQVCIAWSSSSCHDGKAWLHVCVTGDDKNATASFIYNGRLVDSIGSWSKKILRTQESECVCINGTCTVVMTDGSASGKADTKILFIEEGKIVHISTLSGSAQHVEECSCYPRYPGVRCVCRDNWKGSNRPIVDINVKDYSIVSSYVCSGLVGDTPRKNDSFSSSHCLDPNNEEGGHGVKGWAFDDGNDVWMGRTISEKLRSGYETFKVIEGWSKPNSKLQINRQVIVERGNRSGYSGIFSVEGKSCINRCFYVELIRGRREETEVWWTSNSIVVFCGTSGTYGTGSWPDGADINLMPI

SEQ ID NO: 15909 - protein, 469 aa, synthetic construct; identical to SEQ ID NO: 14225
  REGION 1..469: note = neuraminidase__InfluenzaA__ABU92783

SEQ ID NO: 15910 - protein, 469 aa, synthetic construct; identical to SEQ ID NO: 14225
  REGION 1..469: note = neuraminidase__InfluenzaA__ABU92784

SEQ ID NO: 15911 - protein, 469 aa, synthetic construct; identical to SEQ ID NO: 14225
  REGION 1..469: note = neuraminidase__InfluenzaA__ABU92785

SEQ ID NO: 15912 - protein, 469 aa, synthetic construct; identical to SEQ ID NO: 14225
  REGION 1..469: note = neuraminidase__InfluenzaA__ABU92786

SEQ ID NO: 15913 - protein, 469 aa, synthetic construct
  REGION 1..469: note = neuraminidase__InfluenzaA__ABU92787
MNPNQKIITIGSVSLTIAAICFLMQIAILVTTVTLHFKQHECNSPPNNQVMLCEPTIIERNITEIVYLTNTTIEKEICPKLAEYRNWSKPQCNITGFAPFSKDNSIRLSAGGDIWVTREPYVSCDPDKCYQFALGQGTTLNNGHSNDTVHDRTPYRTLLMNELGVPFHLGTRQVCIAWSSSSCHDGKAWLHVCVTGDDKNATASFIYNGRLVDSIGSWSKKILRTQESECVCINGTCTVVMTDGSASGKADTKILFIEEGKIVHISTLSGSAQHVEECSCYPRHPGVRCVCRDNWKGSNRPIVDINVKDYSIVSSYVCSGLVGDTPRKNDSFSSSHCLDPNNEEGGHGVKGWAFDDGNDVWMGRTISEKLRSGYETFKVIEGWSKPNSKLQINRQVIVERGNRSGYSGIFSVEGKSCINRCFYVELIRGRKEETEVWWTSNSIVVFCGTSGTYGTGSWPDGADINLMPI

SEQ ID NO: 15914 - protein, 469 aa, synthetic construct
  REGION 1..469: note = neuraminidase__InfluenzaA__ABU92789
MNPNQKIITIGSVSLTISTICFFMQIAILITTVTLHFKQYEFNPPPNNQVMLCEPTIIERNITEIVYLTNTTIEKEICPKLAEYRNWSKPQCSITGFAPFSKDNSIRLSAGGDIWVTREPYVSCDPDKCYQFALGQGTTLNNVHSNDTVHDRTPYRTLLMNELGVPFHLGTKQVCIAWSSSSCHDGKAWLHVCVTGDDKNATASFIYNGRLVDSIVSWSKEILRTQESECVCINGTCTVVMTDGSASGKADTKILFIEEGKIVHTSTLSGSAQHVEECSCYPRYPGVRCVCRDNWKGSNRPIVDINIKDYSIVSSYVCSGLVGDTPRKNDSSSSSHCLDPNNEEGGHGVKGWAFDDGNDVWMGRTISEKSRSGYETFKVIEGWSNPNSKLQINRQVIVDRGNRSGYSGIFSVEGKSCINRCFYVELIRGRKEETEVLWTSNSIVVFCGTSGTYGTGSWPDGADINLMPI

SEQ ID NO: 15915 - protein, 469 aa, synthetic construct; identical to SEQ ID NO: 14327
  REGION 1..469: note = neuraminidase__InfluenzaA__ABU92790

SEQ ID NO: 15916 - protein, 469 aa, synthetic construct
  REGION 1..469: note = neuraminidase__InfluenzaA__ABU92791
MNPNQKIITIGSVSLTISTICFFMQIAILITTVTLHFKQYEFNSPPNNQVMLCEPTIIERNITEIVYLTNTTIEKEICPKLAEYRNWSKPQCDITGFAPFSKDNSIRLSAGGDIWVTREPYVSCDPDKCYQFALGQGTTLNNVHSNDTVHDRTPYRTLLMNELGVPFHLGTKQVCIAWSSSSCHDGKAWLHVCVTGDDKNATASFIYNGRLVDSIVSWSKKILRTQESECVCINGTCTVVMTDGSASGKADTKILFIEEGKIVHTSTLSGSAQHVEECSCYPRYPGVRCVCRDNWKGSNRPIVDINIKDYSTVSSYVCSGLVGDTPRKNDSSSSSHCLDPNNEEGGHGVKGWAFDDGNDVWMGRTISEKLRSGYETFKVIEGWSNPNSKLQINRQVIVDRGNRSGYSGIFSVEGKSCINRCFYVELIRGRKEETEVLWTSNSIVVFCGTSGTYGTGSWPDGADINLMPI

SEQ ID NO: 15917 - protein, 469 aa, synthetic construct
  REGION 1..469: note = neuraminidase__InfluenzaA__ABU92792
MNPNQKIITIGSVSLTISTICFFMQIAILITTVTLHFKQYVFNSPPNNQVMLCEPTIIERNITEIVYLTNTTIEKEICPKLAEYRNWSKPQCDITGFAPFSKDNSIRLSAGGDIWVTREPYVSCDPDKCYQFALGQGTTLNNVHSNDTVHDRTPYRTLLMNELGVPFHLGTKQVCIAWSSSSCHDGKAWLHVCVTGDDKNATASFIYNGRLVDSVVSWSKDILRTQESECVCINGTCTVVMTDGSASGKADTKILFIEEGKIVHTSTLSGSAQHVEECSCYPRYPGVRCVCRDNWKGSNRPIVDINIKNYSIVSSYVCSGLVGDTPRKTDSSSSSHCLDPNNEEGGHGVKGWAFDDGNDVWMGRTISEKLRLGYETFKVIEGWSNPNSKLQINRQVIVDRGNRSGYSGIFSVEGKSCINRCFYVELIRGRKEETEVLWTSNSIVVFCGTSGTYGTGSWPDGADINLMPI

SEQ ID NO: 15918 - protein, 469 aa, synthetic construct; identical to SEQ ID NO: 14807
  REGION 1..469: note = neuraminidase__InfluenzaA__ABU92793

SEQ ID NO: 15919 - protein, 469 aa, synthetic construct; identical to SEQ ID NO: 15914
  REGION 1..469: note = neuraminidase__InfluenzaA__ABU92794

SEQ ID NO: 15920 - protein, 469 aa, synthetic construct; identical to SEQ ID NO: 14225
  REGION 1..469: note = neuraminidase__InfluenzaA__ABU92795

SEQ ID NO: 15921 - protein, 469 aa, synthetic construct; identical to SEQ ID NO: 14225
  REGION 1..469: note = neuraminidase__InfluenzaA__ABU92796

SEQ ID NO: 15922 - protein, 469 aa, synthetic construct
  REGION 1..469: note = neuraminidase__InfluenzaA__ABU92797
MNPNQKIITIGSVSLTIAAICFLMQIAILVTTVTLHFKQHECNSPPNNQVMLCEPTIIERNITEIVYLTNTTIEKEICPKLAEYRNWSKPQCNITGFAPFSKDNSIRLSAGGDIWVTREPYVSCDPDKCYQFALGQGTTLNNGHSNDTVHDRTPYRTLLMNELGVPFHLGTRQVCIAWSSSSCHDGKAWLHVCVTGDDKNATASFIYNGRLVDSIGSWSKRILRTQESECVCINGTCTVVMTDGSASGKADTKILFIEEGKIVHISTLSGSAQHVEECSCYPRYPGVRCVCRDNWKGSNRPIVDINVKDYSIVSSYVCSGLVGDTPRKNDSFSSSHCLDPNNEEGGHGVKGWAFDDGNDVWMGRTINEKLRSGYETFKVIEGWSKPNSKLQINRQVIVERGNRSGYSGIFSVEGKSCINRCFYVELIRGRKEETEVWWTSNSIVVFCGTSGTYGTGSWPDGADINLMPI

SEQ ID NO: 15923 - protein, 469 aa, synthetic construct; identical to SEQ ID NO: 14225
  REGION 1..469: note = neuraminidase__InfluenzaA__ABU92798

SEQ ID NO: 15924 - protein, 469 aa, synthetic construct; identical to SEQ ID NO: 14225
  REGION 1..469: note = neuraminidase__InfluenzaA__ABU92799

SEQ ID NO: 15925 - protein, 469 aa, synthetic construct; identical to SEQ ID NO: 14225
  REGION 1..469: note = neuraminidase__InfluenzaA__ABU92800

SEQ ID NO: 15926 - protein, 469 aa, synthetic construct
  REGION 1..469: note = neuraminidase__InfluenzaA__ABU92801
MNPNQKIITIGSVSLTIAAICFLMQIAILVTTVTLHFKQHECNSPPNNQVMLCEPTIIERNITEIVHLTNTTIEKEICPKLAEYRNWSKPQCNITGFAPFSKDNSIRLSAGGDIWVTREPYVSCDPDKCYQFALGQGTTLNNGHSNDTVHDRTPYRTLLMNELGVPFHLGTRQVCIAWSSSSCHDGKAWLHVCVTGDDKNATASFIYNGRLVDSIGSWSKKILRTQESECVCINGTCTVVMTDGSASGKADTKILFIEEGKIVHISTLSGSAQHVEECSCYPRYPGVRCVCRDNWKGSNRPIVDINVKDYSIVSSYVCSGLVGDTPRKNDSFSSSHCLDPNNEEGGHGVKGWAFDDGNDVWMGRTISEKLRSGYETFKVIEGWSKPNSKLQINRQVIVERGNRSGYSGIFSVEGKSCINRCFYVELIRGRKEETEVWWTSNSIVVFCGTSGTYGTGSWPDGADINLMPI

SEQ ID NO: 15927 - protein, 469 aa, synthetic construct; identical to SEQ ID NO: 14225
  REGION 1..469: note = neuraminidase__InfluenzaA__ABU92802

SEQ ID NO: 15928 - protein, 469 aa, synthetic construct; identical to SEQ ID NO: 14225
  REGION 1..469: note = neuraminidase__InfluenzaA__ABU92804

SEQ ID NO: 15929 - protein, 469 aa, synthetic construct
  REGION 1..469: note = neuraminidase__InfluenzaA__ABU92805
MNPNQKIITIGSVSLTISTICFFMQIAILITTVTLHFKQYEFNSPPNNQVMLCEPTIIERNITEIVYLTNTTIEKEICPKLAEYRNWSKPQCNITGFAPFSKDNSIRLSAGGDIWVTREPYVSCDPDKCYQFALGQGTTLNNVHSNDTVHDRTPYRTLLMNELGVPFHLGTKQVCIAWSSSSCHDGKAWLHVCVTGDDENATASFIYNGRLVDSIVSWSKKILRTQESECVCINGTCTVVMTDGSASGKADTKILFIEEGKIVHTSTLSGSAQHVEECSCYPRYPGVRCVCRDNWKGSNRPIVDINIKDYSIVSSYVCSGLVGDTPRKNDSSSSSHCLDPNNEEGGHGVKGWAFDDGNDVWMGRTISEKLRSGYETFKVIEGWSNPNSKLQINRQVIVDRGNRSGYSGIFSVEGKSCINRCFYVELIRGRKQETEVLWTSNSIVVFCGTSGTYGTGSWPDGADINLMPI

SEQ ID NO: 15930 - protein, 469 aa, synthetic construct; identical to SEQ ID NO: 15929
  REGION 1..469: note = neuraminidase__InfluenzaA__ABU92806

SEQ ID NO: 15931 - protein, 469 aa, synthetic construct
  REGION 1..469: note = neuraminidase__InfluenzaA__ABU92808
MNPNQKIITIGSVSLTIATICFLMQITILVTTVTLHFKQYECNSPPNNQVMLCEPTIIERNITEIVYLTNTTIEKEICPKLAEYRNWSKPQCNITGFAPFSKDNSIRLSAGGDIWVTREPYVSCDPDKCYQFALGQGTTLNNGHSNDTVHDRTPYRTLLMNELGVPFHLGTRQVCIAWSSSSCHDGKAWLHVCVTGDDKNATASFIYNGRLVDSIGSWSKKILRTQESECVCINGTCTVVMTDGSASGKADTKILFIEEGKIIHISTLSGSAQHVEECSCYPRYPGVRCVCRDNWKGSNRPIVDINVKDYSIVSSYVCSGLVGDTPRKNDSSSSSHCLDPNNEEGGHGVKGWAFDDGNDVWMGRTISEKLRSGYETFKVIEGWSKPNSKLQINRQVIVERGNRSGYSGIFSVEGKSCINRCFYVELIRGRKEETEVWWTSNSIVVFCGTSGTYGTGSWPDGADINLMPI

SEQ ID NO: 15932 - protein, 469 aa, synthetic construct
  REGION 1..469: note = neuraminidase__InfluenzaA__ABU92809
MNPNQKIITIGSVSLTISTICFFMQIAILITTVTLHFKQYEFNSPPNNQVMLCEPTIIERNITEIVYLTNTTIEKEICPKLAEYRNWSKPQCNITGFAPFSKDNSIRLSAGGDIWVTREPYVSCDPDKCYQFALGQGTTLNNVHSNDTVHDRTPYRTLLMNELGVPFHLGTKQVCIAWSSSSCHDGKAWLHVCVTGDDKNATASFIYNGRLVDSIVSWSKEILRTQESECVCINGTCTVVMTDGSASGKADTKILFIEEGKIVHTSTLSGSAQHVEECSCYPRYPGVRCVCRDNWKGSNRPIVDINIKDYSIVSSYVCSGLVGDTPRKNDSSSSGHCLDPNNEEGGHGVKGWAFDDGNDVWMGRTISEKLRSGYETFKVIEGWSNPNSKLQINRQVIVDRGNRSGYSGIFSVEGKSCINRCFYVELIRGRKEETDVLWTSNSIVVFCGTSGTYGTGSWPDGADINLMPI

SEQ ID NO: 15933 - protein, 469 aa, synthetic construct
  REGION 1..469: note = neuraminidase__InfluenzaA__ABU92810
MNPNQKIITIGSVSLTIAAICFLMQIAILVTTVTLHFKQHECNSPPNNQVMLCEPTIIERNITEIVYLTNTTIEKEICPKLAEYRNWSKPQCNITGFAPFSKDNSIRLSAGGDIWVTREPYVSCDPDKCYQFALGQGTTLNNGHSNDTVHDRTPYRTLLMNELGVPFHLGTRQVCIAWSSSSCHDGKAWLHVCVTGDDKNATASFIYNGRLVDSIGSWSKKILRTQESECVCINGTCTVVMTDGSASGKADTKILFIEEGKIVHISTLSGSAQHVEECSCYPRYPGVRCVCRDNWKGSNRPIVDINVKDYSIVSSYVCSGLVGDTPRKNDSFSSSHCLDPNNEEGGHGVKGWAFDDGNDVWMGRTISEKLRSGYETFKVIEGWSKPNSKLQINRQVIVEGGNRSGYSGIFSVEGKSCINRCFYVELIRGRKEETEVWWTSNSIVVFCGTSGTYGTGSWPDGADINLMPI

SEQ ID NO: 15934 - protein, 469 aa, synthetic construct
  REGION 1..469: note = neuraminidase__InfluenzaA__ABU92811
MNPNQKIITIGSVSLTIAAICFLMQIAILVTTVTLHFKQHECNSPPNNQVMLCEPTMIERNITEIVYLTNTTIEKEICPKLAEYRNWSKPQCNITGFAPFSKDNSIRLSAVGDIWVTREPYVSCDPDKCYQFALGQGTTLNNGHSNDTVHDRTPYRTLLMNELGVPFHLGTRQVCIAWSSSSCHDGKAWLHVCVTGDDKNATASFIYNGRLVDSIGSWSKKILRTQESECVCINGTCTVVMTDGSASGKADTKILFIEEGKIVHISTLSGSAQHVEECSCYPRYPGVRCVCRDNWKGSNRPIVDINVKDYSIVSSYVCSGLVGDTPRKNDSFSSSHCLDPNNEEGGHGVKGWAFDDGNDVWMGRTISEKLRSGYETFKVIEGWSKPNSKLQINRQVIVERGNRSGYSGIFSVEGKSCINRCFYVELIRGRKEETEVWWTSNSIVVFCGTSGTYGTGSWPDGADINLMPI

SEQ ID NO: 15935 - protein, 469 aa, synthetic construct; identical to SEQ ID NO: 14225
  REGION 1..469: note = neuraminidase__InfluenzaA__ABU92814

SEQ ID NO: 15936 - protein, 469 aa, synthetic construct; identical to SEQ ID NO: 14714
  REGION 1..469: note = neuraminidase__InfluenzaA__ABU92815

SEQ ID NO: 15937 - protein, 469 aa, synthetic construct; identical to SEQ ID NO: 14225
  REGION 1..469: note = neuraminidase__InfluenzaA__ABU92816

SEQ ID NO: 15938 - protein, 469 aa, synthetic construct
  REGION 1..469: note = neuraminidase__InfluenzaA__ABU92817
MNPNQKIITIGSVSLTIAAICFLMQIAILVTTVTLHFKQHECNSPPNNQVMLCEPTIIERNITEIVYLTNTTIEKEICPKLAEYRNWSKPQCNITGFAPFSKDNSIRLSAGGDIWVTREPYVSCDPDKCYQFALGQGTTLNNGHSNDTVHDRTPYRTLLMNELGVPFHLGTRQVCIAWSSSSCHDGKAWLHVCVTGDDKNATASFIYNGRLVDSIGSWSKKILRTQESECVCINGTCTVVMTDGSASGKADTKILFIEEGKIVHISTLSGSAQHVEECSCYPRYPGVRCVCRDNWKGSNRPIVDINVKDYSIVSSYVCSGLVGDTPRKNDSFSSSHCLDPNNEEGGHGVKGWAFDDGNDVWMGRTISEKLRSGYETFKVIEGWSKPNSKLQINRQVIVERGNRSGYSGIFSVESKSCINRCFYVELIRGRKEETEVWWTSNSIVVFCGTSGTYGTGSWPDGADINLMPI

SEQ ID NO: 15939 - protein, 469 aa, synthetic construct; identical to SEQ ID NO: 14225
  REGION 1..469: note = neuraminidase__InfluenzaA__ABU92818

SEQ ID NO: 15940 - protein, 469 aa, synthetic construct; identical to SEQ ID NO: 14225
  REGION 1..469: note = neuraminidase__InfluenzaA__ABU92819

SEQ ID NO: 15941 - protein, 469 aa, synthetic construct; identical to SEQ ID NO: 14225
  REGION 1..469: note = neuraminidase__InfluenzaA__ABU92821

SEQ ID NO: 15942 - protein, 469 aa, synthetic construct; identical to SEQ ID NO: 14225
  REGION 1..469: note = neuraminidase__InfluenzaA__ABU92822

SEQ ID NO: 15943 - protein, 469 aa, synthetic construct; identical to SEQ ID NO: 14137
  REGION 1..469: note = neuraminidase__InfluenzaA__ABU92823

SEQ ID NO: 15944 - protein, 469 aa, synthetic construct
  REGION 1..469: note = neuraminidase__InfluenzaA__ABU92824
MNPNQKIITIGSVSLTIAAICFLMQIAILVTTVTLHFKQHECNSPPNNQVMLCEPTIIERNITEIVYLTNTTIEKEICPKLAEYRNWSKPQCNITGFAPFSKDNSIRLSAGGDIWVTREPYVSCDPDKCYQFALGQGTTLNNGHSNDTVHDRTPYRTLLMNELGVPFHLGTRQVCIAWSSSSCHDGKAWLHVCVTGDDKNATASFIYNGRLVDSIGSWSKKILRTQESECVCINGTCTVVMTDGSASGKADTKILFIEEGKIVHISTLSGSAQHVEECSCYPRYPGVRCVCRDNWKGSNRPIVDINVKDYSIVSSYVCSGLVGDTPRRNDSFSSSHCLDPNNEEGGHGVKGWAFDDGNDVWMGRTISEKLRSGYETFKVIEGWSKPNSKLQINRQVIVERGNRSGYSGIFSVEGKSCINRCFYVELIRGRKEETEVWWTSNSIVVFCGTSGTYGTGSWPDGADINLMPI

SEQ ID NO: 15945 - protein, 469 aa, synthetic construct
  REGION 1..469: note = neuraminidase__InfluenzaA__ABU92825
MNPNQKIITIGSVSLTISTICFFMQIAILITTVTLHFKQYEFNSPPNNQVMLCEPTIIERNITEIVYLTNTTIEKEICPKLAEYRNWSKPQCDITGFAPFSKDNSIRLSAGGDIWVTREPYVSCDPNKCYQFALGQGTTLNNVHSNDTVHDRTPYRTLLMNELGVPFHLGTKQVCIAWSSSSCHDGKAWLHVCVTGDDKNATASFIYNGRLVDSIVSWSKKILRTQESECVCINGTCTVVMTDGSASGKADTKILFIEEGKIVHTSTLSGSAQHVEECSCYPRYPGVRCVCRDNWKGSNRPIVDINIKDYSIVSSYVCSGLVGDTPRKNDSSSSSHCLDPNNEEGGHGVKGWAFDDGNDVWMGRTISEKSRSGYETFKVIEGWSNPNSKLQINRQVIVDRGNRSGYSGIFSVEGKSCINRCFYVELIRGRKEETEVLWTSNSIVVFCGTSGTYGTGSWPDGADINLMPI

SEQ ID NO: 15946 - protein, 469 aa, synthetic construct; identical to SEQ ID NO: 15945
  REGION 1..469: note = neuraminidase__InfluenzaA__ABU92826

SEQ ID NO: 15947 - protein, 469 aa, synthetic construct; identical to SEQ ID NO: 14225
  REGION 1..469: note = neuraminidase__InfluenzaA__ABU92827

SEQ ID NO: 15948 - protein, 469 aa, synthetic construct; identical to SEQ ID NO: 14225
  REGION 1..469: note = neuraminidase__InfluenzaA__ABU92828

SEQ ID NO: 15949 - protein, 469 aa, synthetic construct; identical to SEQ ID NO: 14714
  REGION 1..469: note = neuraminidase__InfluenzaA__ABU92829

SEQ ID NO: 15950 - protein, 469 aa, synthetic construct
  REGION 1..469: note = neuraminidase__InfluenzaA__ABU92830
MNPNQKIITIGSVSLTIAAICFLMQIAILVTTVTLHFKQHECNSPPNNQVMLCEPTIIERNITEIVYLTNTTIEKEICPKLAEYRNWSKPQCNITGFAPFSKDNSIRLSAGGDIWVTREPYVSCDPDKCYQFALGQGTTLNNGHSNDTVHDRTPYRTLLMNELGVPFHLGTRQVCIAWSSSSCHDGKAWLHVCVTGDDKNATASFIYNGRLVDSIGSWSKKILRTQESECVCINGTCTVVMTDGSASGKADTKILFIEEGKIVHISTLSGSAQHVEECSCYPRYPGVRCVCRDNWKGSNRPIVDINVKDYSIVSSYVCSGLVGDTPRKNDSFSSSRCLDPNNEEGGHGVKGWAFDDGNDVWMGRTISEKLRSGYETFKVIEGWSKPNSKLQINRQVIVERGNRSGYSGIFSVEGKSCINRCFYVELIRGRKEETEVWWTSNSIVVFCGTSGTYGTGSWPDGADINLMPI

SEQ ID NO: 15951 - protein, 469 aa, synthetic construct; identical to SEQ ID NO: 14225
  REGION 1..469: note = neuraminidase__InfluenzaA__ABU92831

SEQ ID NO: 15952 - protein, 469 aa, synthetic construct; identical to SEQ ID NO: 14225
  REGION 1..469: note = neuraminidase__InfluenzaA__ABU92832

SEQ ID NO: 15953 - protein, 469 aa, synthetic construct; identical to SEQ ID NO: 14225
  REGION 1..469: note = neuraminidase__InfluenzaA__ABU92833

SEQ ID NO: 15954 - protein, 469 aa, synthetic construct
  REGION 1..469: note = neuraminidase__InfluenzaA__ABU92834
MNPNQKIITIGSVSLTIAAICFLMHIAILVTTVTLHFKQHECNSPPNNQVMLCEPTIIERNITEIVYLTNTTIEKEICPKLAEYRNWSKPQCNITGFAPFSKDNSIRLSAGGDIWVTREPYVSCDPDKCYQFALGQGTTLNNGHSNDTVHDRTPYRTLLMNELGVPFHLGTRQVCIAWSSSSCHDGKAWLHVCVTGDDENATASFIYNGRLVDSIGSWSKKILRTQESECVCINGTCTVVMTDGSASGKADTKILFIEEGKIVHISTLSGSAQHVEECSCYPRYPGVRCVCRDNWKGSNRPIVDINVKDYSIVSSYVCSGLVGDTPRKNDSFSSSHCLDPNNEEGGHGVKGWAFDDGNDVWMGRTISEKLRSGYETFKVIEGWSKPNSKLQINRQVIVERGNRSGYSGIFSVEGKSCINRCFYVELIRGRKEETEVWWTSNSIVVFCGTSGTYGTGSWPDGADISLMPI

SEQ ID NO: 15955 - protein, 469 aa, synthetic construct; identical to SEQ ID NO: 14225
  REGION 1..469: note = neuraminidase__InfluenzaA__ABU92835

SEQ ID NO: 15956 - protein, 469 aa, synthetic construct; identical to SEQ ID NO: 14225
  REGION 1..469: note = neuraminidase__InfluenzaA__ABU92836

SEQ ID NO: 15957 - protein, 469 aa, synthetic construct
  REGION 1..469: note = neuraminidase__InfluenzaA__ABU92837
MNPNQKIITIGSVSLTISTICFFMQIAILITTVTLHFKQYEFNSPPNNQVMLCEPTIIERNITEIVYLTNTTIEKEICPKLAEYRNWSKPQCDITGFAPFSKDNSIRLSAGGDIWVTREPYVSCDPDKCYQFALGQGTTLNNVHSNDTVHDRTPYRTLLMNELGVPFHLGTKQVCIAWSSSSCHDGKAWLHVCVTGDDKNATASFIYNGRLVDSIVSWSKKILRTQESECVCINGTCTVVMTDGSASGKADTKILFIEEGKIVHTSTLSGSAQHVEECSCYPRYPGVRCVCRDNWKGSNRPIVDINIKDYSIASSYVCSGLVGDTPRKNDSSSSSHCLDPNNEEGGHGVKGWAFDDGNDVWMGRTISEKLRSGYETFKVIEGWSNPNSKLQINRQVIVDRGNRSGYSGIFSVEGKSCVNRCFYVELIRGRKEETEVLWTSNSIVVFCGTSGTYGTGSWPDGADINLMPI

SEQ ID NO: 15958 - protein, 469 aa, synthetic construct; identical to SEQ ID NO: 14225
  REGION 1..469: note = neuraminidase__InfluenzaA__ABU92838

SEQ ID NO: 15959 - protein, 469 aa, synthetic construct; identical to SEQ ID NO: 14061
  REGION 1..469: note = neuraminidase__InfluenzaA__ABU92839

SEQ ID NO: 15960 - protein, 469 aa, synthetic construct
  REGION 1..469: note = neuraminidase__InfluenzaA__ABU92840
MNPNQKIITIGSVSLTIATICFLMQIAILVTTVTLHFKQYECNSPPNNQVMLCEPTIIERNITEIVYLTNTTIEKEICPKLAEYRNWSKPQCNITGFAPFSKDNSIRLSAGGDIWVTREPYVSCDPDKCYQFALGQGTTLNNGHSNDTVHDRTPYRTLLMNELGVPFHLGTKQVCIAWSSSSCHDGKAWLHVCVTGDDENATASFIYNGRLVDSIGSWSKKILRTQESECVCINGTCTVVMTDGSASGKADTKILFIEEGKIVHISLLSGSAQHVEECSCYPRYPGVRCVCRDNWKGSNRPIVDINVKDYSIVSSYVCSGLVGDTPRKNDSSSSSHCLDPNNEEGGHGVKGWAFDDGNDVWMGRTISEKLRSGYETFKVIEGWSKPNSKLQINRQVIVDRDNRSGYSGIFSVEGKSCINRCFYVELIRGRKQETEVLWTSNSIVVFCGTSGTYGTGSWPDGADINLMPI

SEQ ID NO: 15961 - protein, 469 aa, synthetic construct
  REGION 1..469: note = neuraminidase__InfluenzaA__ABU92841
MNPNQKIITIGSVSLTIATICFLMQIAILVTTVTLHFKQYECNSPPNNQVMLCEPTIIERNITEIVYLTNTTIEKEICPKLAEYRNWSKPQCNITGFAPFSKDNSIRLSAGGDIWVTREPYVSCDPDKCYQFALGQGTTLNNGHSNDTVHDRTPYRTLLMNELGVPFHLGTKQVCIAWSSSSCHDGKAWLHVCVTGDDENATASFIYNGRLVDSIGSWSKKILRTQESECVCINGTCTVVMTDGSASGKADTKILFIEEGKIVHTSLLSGSAQHVEECSCYPRYPGVRCVCRDNWKGSNRPIVDINVKDYSIVSSYVCSGLVGDTPRKNDSSSSSHCLDPNNEEGGHGVKGWAFDDGNDVWMGRTISEKLRSGYETFKVIEGWSKPNSKLQINRQVIVDRDNRSGYSGIFSVEGKSCINRCFYVELIRGRKQETEVLWTSNSIVVFCGTSGTYGTGSWPDGADINLMPI

SEQ ID NO: 15962 - protein, 469 aa, synthetic construct
  REGION 1..469: note = neuraminidase__InfluenzaA__ABU92842
MNPNQKIITIGSVSLTIATICFLMQIAILVTTVTLHFKQYDCNSPPNNQVMLCEPTIIERNITEIVYLTNTTIEKEICPKLAEYRNWSKPQCNITGFAPFSKDNSIRLSAGGDIWVTREPYVSCDPDKCYQFALGQGTTLNNGHSNDTVHDRTPYRTLLMNELGVPFHLGTKQVCIAWSSSSCHDGKAWLHVCVTGDDENATASFIYNGRLVDSIGSWSKKILRTQESECVCINGTCTVVMTDGSASGKADTKILFIEEGKIVHTSLLSGSAQHVEECSCYPRYPGVRCVCRDNWKGSNRPIVDINVKDYSIVSSYVCSGLVGDTPRKNDSSSSSHCLDPNNEEGGHGVKGWAFDDGNDVWMGRTISEKLRSGYETFKVIEGWSKPNSKLQINRQVIVDRGNRSGYSGIFSVEGKSCINRCFYVELIRGRKQETEVLWTSNSIVVFCGTSGTYGTGSWPDGADINLMPI

SEQ ID NO: 15963 - protein, 469 aa, synthetic construct; identical to SEQ ID NO: 14061
  REGION 1..469: note = neuraminidase__InfluenzaA__ABU92843

SEQ ID NO: 15964 - protein, 469 aa, synthetic construct; identical to SEQ ID NO: 15749
  REGION 1..469: note = neuraminidase__InfluenzaA__ABU92844

SEQ ID NO: 15965 - protein, 469 aa, synthetic construct; identical to SEQ ID NO: 14061
  REGION 1..469: note = neuraminidase__InfluenzaA__ABU92845

SEQ ID NO: 15966 - protein, 469 aa, synthetic construct; identical to SEQ ID NO: 14061
  REGION 1..469: note = neuraminidase__InfluenzaA__ABU92846

SEQ ID NO: 15967 - protein, 469 aa, synthetic construct; identical to SEQ ID NO: 14061
  REGION 1..469: note = neuraminidase__InfluenzaA__ABU92847

SEQ ID NO: 15968 - protein, 469 aa, synthetic construct; identical to SEQ ID NO: 14061
  REGION 1..469: note = neuraminidase__InfluenzaA__ABU92848

SEQ ID NO: 15969 - protein, 469 aa, synthetic construct; identical to SEQ ID NO: 14714
  REGION 1..469: note = neuraminidase__InfluenzaA__ABU92849

SEQ ID NO: 15970 - protein, 469 aa, synthetic construct
  REGION 1..469: note = neuraminidase__InfluenzaA__ABU92850
MNPNQKIITIGSVSLTISTICFFMQIAILITTVTLHFKQYEFNSPPNNQVMLCEPTIIERNITEIVYLTNTTIEKEICPKLVEYRNWSKPQCDITGFAPFSKDNSIRLSAGGDIWVTREPYVSCDPDKCYQFALGQGTTLNNVHSNDTVHDRTPYRTLLMTELGVPFHLGTKQVCIAWSSSSCHDGKAWLHVCVTGDDKNATASFIYNGRLVDSIVSWSKKILRTQESECVCINGTCTVVMTDGSASGKADTKILFIEEGKIVHTSTLSGSAQHVEECSCYPRYPGVRCVCRDNWKGSNRPIVDINIKDYSIVSSYVCSGLVGDTPRKNDSSSSSHCLDPNNEEGGHGVKGWAFDDGNDVWMGRTISEKLRSGYETFKVIEGWSNPNSKLQINRQVIVDRGNRSGYSGIFSVEGKSCINRCFYVELIRGRKEENEVLWTSNSIVVFCGTSGTYGTGSWPDGADINLMPI

SEQ ID NO: 15971 - protein, 469 aa, synthetic construct
  REGION 1..469: note = neuraminidase__InfluenzaA__ABU92851
MNPNQKIITIGSVSLTISTICFFMQIAILITTVTLHFKQYEFNSPPNNQVMLCEPTIIERNITEIVYLTNTTIEKEICPKLAEYRNWSKPQCSITGFAPFSKDNSIRLSAGGDIWVTREPYVSCDPDKCYQFALGQGTTLNNVHSNDTVHDRTPYRTLLMNELGVPFHLGTKQVCIAWSSSSCHDGKAWLHVCVTGDDKNATASFIYNGRLVDSIVSWSKEILRTQESECVCINGTCTVVMTDGSASGKADTKILFIEEGKIVHTSTLSGSAQHVEECSCYPRYPGVRCVCRDNWKGSNRPIVDINIKDYSIVSSYVCSGLVGDTPRKDDSSSSSHCLDPNNEEGGHGVKGWAFDDGNDVWMGRTISEKSRSGYETFKVIEGWSNPNSKLQINRQVIVDRGNRSGYSGIFSVEGKSCINRCFYVELIRGRKEETEVLWTSNSIVVFCGTSGTYGTGSWPDGADINLMPI

SEQ ID NO: 15972 - protein, 469 aa, synthetic construct; identical to SEQ ID NO: 14225
  REGION 1..469: note = neuraminidase__InfluenzaA__ABU92852

SEQ ID NO: 15973 - protein, 469 aa, synthetic construct
  REGION 1..469: note = neuraminidase__InfluenzaA__ABU92853
MNPNQKIITIGSVSLTIAAICFLMQIAILVTTVTLHFKQHECNSPPKNQVMLCEPTIIERNITEIVYMTNTTIEKEICPKLAEYRNWSKPQCNITGFAPFSKDNSIRLSAGGDIWVTREPYVSCDPDKCYQFALGQGTTLNNGHSNDTVHDRTPYRTLLMNELGVPFHLGTRQVCIAWSSSSCHDGKAWLHVCVTGDDKNATASFIYNGRLVDSIVSWSKKILRTQESECVCINGTCTVVMTDGSASGKADTKILFIEEGKIVHISTLSGSAQHVEECSCYPRYPGVRCVCRDNWKGSNRPIVDINVKDYSIVSSYVCSGLVGDTPRKNDSFSSSHCLDPNNEEGGHGVKGWAFDDGNDVWMGRTISEKLRSGYETFKVIEGWSKPNSKLQINRQVIVERGNRSGYSGIFSVEGKSCINRCFYVELIRGRKEETEVWWTSNSIVVFCGTSGTYGTGSWPDGADINLMPI

SEQ ID NO: 15974 - protein, 469 aa, synthetic construct; identical to SEQ ID NO: 14225
  REGION 1..469: note = neuraminidase__InfluenzaA__ABU92854

SEQ ID NO: 15975 - protein, 469 aa, synthetic construct
  REGION 1..469: note = neuraminidase__InfluenzaA__ABU92855
MNPNQKIITIGSVSLTIAAICFLMQIAILVTTVTLHFKQHECNSPPNNQVMLCEPTIIERNITEIVYLTNTTIEKEICPKLAEYRNWSKPQCNITGFAPFSKDNSIRLSAGGDIWVTREPYVSCDPDKCYQFALGQGTTLNNGHSNDTVHDRTPYRTLLMNELGVPFHLGTRQVCIAWSSSSCHDGKAWLHVCVTGDDKNATASFIYNGRLVDSIGSWSKKILRTQESECVCINGTCTVVMTDGSASGKADTKILFIEEGKIVHISTLSGSAQHVEECSCYPRYPGVRCVCRDNWKGSNRPIVDINVKDYSIVSSYVCSGLVGDTPRKNDSFSSSHCLDPNNEEGGHGVKGWAFDDGNDVWMGRTISEKLRSGYETFKVIEGWSKPNSKLQINRQVIIERGNRSGYSGIFSVEGKSCINRCFYVELIRGRKEETEVWWTSNSIVVFCGTSGTYGTGSWPDGADINLMPI

SEQ ID NO: 15976 - protein, 469 aa, synthetic construct; identical to SEQ ID NO: 14145
  REGION 1..469: note = neuraminidase__InfluenzaA__ABU92856

SEQ ID NO: 15977 - protein, 469 aa, synthetic construct; identical to SEQ ID NO: 14225
  REGION 1..469: note = neuraminidase__InfluenzaA__ABU92857

SEQ ID NO: 15978 - protein, 469 aa, synthetic construct
  REGION 1..469: note = neuraminidase__InfluenzaA__ABU92858
MNPNQKIITIGSVSLTISTICFFMQIAILITTVTLHFKQYEFNSPPNNQVILCEPTIIERNITEIVYLTNTTIEKEICPKLAEYRNWSKPQCDITGFAPFSKDNSIRLSAGGDIWVTREPYVSCDPDKCYQFALGQGTTLNNVHSNDTVHDRTPYRTLLMNELGVPFHLGTKQVCIAWSSSSCHDGKAWLHVCVTGDDKNATASFIYNGRLVDSIVSWSKKILRTQESECVCINGTCTVVMTDGSASGKADTKILFIEEGKIVHTSTLSGSAQHVEECSCYPRYPGVRCVCRDNWKGSNRPIVDINIKDYSIVSSYVCSGLVGDTPRKNDSSSSSHCLDPNNEEGGHGVKGWAFDDGNDVWMGRTISEKLRSGYETFKVIEGWSNPNSKLQINRQVIVDRGNRSGYSGIFSVEGKSCINRCFYVELIRGRKEETEVLWTSNSIVVFCGTSGTYGTGSWPDGADINLMPI

SEQ ID NO: 15979 - protein, 469 aa, synthetic construct
  REGION 1..469: note = neuraminidase__InfluenzaA__ABU92859
MNPNQKIITIGSVSLTIAAICFLMQIAILVTTVTLHFKQHECNSPPNNQVMLCEPTIIERNITEIVYLTNTTIEKEICPKLAGYRNWSKPQCNITGFAPFSKDNSIRLSAGGDIWVTREPYVSCDPDKCYQFALGQGTTLNNGHSNDTVHDRTPYRTLLMNELGVPFHLGTRQVCIAWSSSSCHDGKAWLHVCVTGDDKNATASFIYNGRLVDSIGSWSKKILRTQESECVCINGTCTVVMTDGSASGKADTKILFIEEGKIVHISTLSGSAQHVEECSCYPRYPGVRCVCRDNWKGSNRPIVDINVKDYSIVSSYVCSGLVGDTPRKNDSFSSSHCLDPNNEEGGHGVKGWAFDDGNDVWMGRTISEKLRSGYETFKVIEGWSKPNSKLQINRQVIVERGNRSGYSGIFSVEGKSCINRCFYVELIRGRKEETEVWWTSNSIVVFCGTSGTYGTGSWPDGADINLMPI

SEQ ID NO: 15980 - protein, 469 aa, synthetic construct
  REGION 1..469: note = neuraminidase__InfluenzaA__ABU92860
MNPNQKIITIGSVSLTIAAICFLMQIAILVTTVTLHFKQHECNSPPNNQVMLCEPTIIERNITEIVYLTNTTIEKEICPKLAEYRNWSKPQCNITGFAPFSKDNSIRLSAGGDIWVTREPYVSCDPDKCYQFALGQGTTLNNGHSNDTVHDRTPYRTLLMNELGVPFHLGTRQVCIAWSSSSCHDGKAWLHVCVTGDDKNATASFIYNGRLVDSIGSWYKKILRTQESECVCINGTCTVVMTDGSASGKADTKILFIEEGKIVHISTLSGSAQHVEECSCYPRYPGVRCVCRDNWKGSNRPIVDINVKDYSIISSYVCSGLVGDTPRKNDSFSSSHCLDPNNEEGGHGVKGWAFDDGNDVWMGRTISEKLRSGYETFKVIEGWSKPNSKLQINRQVIVERGNRSGYSGIFSVEGKSCINRCFYVELIRGRKEETEVWWTSNSIVVFCGTSGTYGTGSWPDGADINLMPI

SEQ ID NO: 15981 - protein, 469 aa, synthetic construct
  REGION 1..469: note = neuraminidase__InfluenzaA__ABU92861
MNPNQKIITIGSVSLTIAAICFLMQIAILVTTVTLHFKQHECNSPPNNQVMLCEPTIIERNITEIVYLTNTTIEKEICPKLAEYRNWSKPQCNITGFAPFSKDNSIRLSAGGDIWVTREPYVSCDPDKCYQFALGQGTTLNNGHSNDTVHDRTPYRTLLMNELGVPFHLGTRQVCMAWSSSSCHDGKAWLHVCVTGDDKNATASFIYNGRLVDSIGSWSKKILRTQESECVCINGTCTVVMTDGSASGKADTKILFIEEGKIVHISTLSGSAQHVEECSCYPRYPGVRCVCRDNWKGSNRPIVDINVKDYSIVSSYVCSGLVGDTPRKNDSFSSSHCLDPNNEEGGHGVKGWAFDDGNDVWMGRTISEKLRSGYETFKVIEGWSKPNSKLQINRQVIVERGNRSGYSGIFSVEGKSCINRCFYVELIRGRKEETEVWWTSNSIVVFCGTSGTYGTGSWPDGADINLMPI

SEQ ID NO: 15982 - protein, 469 aa, synthetic construct
  REGION 1..469: note = neuraminidase__InfluenzaA__ABU92862
MNPNQKIITIGSVSLTIAAICFLMQIAILVTTVTLHFKQHECNSPPNNQVMLCEPTIIERNITEIVYLTNTTIEKEICPKLAEYRNWSKPQCNITGFAPFSRDNSIRLSAGGDIWVTREPYVSCDPDKCYQFALGQGTTLNNGHSNDTVHDRTPYRTLLMNELGVPFHLGTRQVCIAWSSSSCHDGKAWLHVCVTGDDKNATASFIYNGRLVDSIGSWSKKILRTQESECVCINGTCTVVMTDGSASGKADTKILFIEEGKIVHISTLSGSAQHVEECSCYPRYPGVRCVCRDNWKGSNRPIVDINVKDYSIVSSYVCSGLVGDTPRKNDSFSSSHCLDPNNEEGGHGVKGWAFDDGNDVWMGRTISEKLRSGYETFKVIEGWSKPNSKLQINRQVIVERGNRSGYSGIFSVEGKSCINRCFYVELIRGRKEETEVWWTSNSIVVFCGTSGTYGTGSWPDGADINLMPI

SEQ ID NO: 15983 - protein, 469 aa, synthetic construct; identical to SEQ ID NO: 14225
  REGION 1..469: note = neuraminidase__InfluenzaA__ABU92863

SEQ ID NO: 15984 - protein, 469 aa, synthetic construct
  REGION 1..469: note = neuraminidase__InfluenzaA__ABU92865
MNPNQKIITIGSVSLTISTICFFMQIAILITTVTLHFKQYEFNSPPNNQVMLCEPTIIERNITEIVYLTNTTIEKEICPKLAEYRNWSKPQCDITGFAPFSKDNSIRLSAGGDIWVTREPYVSCDLDKCYQFALGQGTTLNNVHSNDTVHDRTPYRTLLMNELGVPFHLGTKQVCIAWSSSSCHDGKAWLHVCVTGDDKNATASFIYNGRLVDSIVSWSKKILRTQESECVCINGTCTVVMTDGSASGKADTKILFIEEGKIVHTSTLSGSAQHVEECSCYPRYPGVRCVCRDNWKGSNRPIVDINIKDYSIVSSYVCSGLVGDTPRKNDSSSSSHCLDPNNEEGGHGVKGWAFDDGNDVWMGRTISEKLRSGYETFKVIEGWSNPNSKLQINRQVIVDRGNRSGYSGIFSVEGKSCINRCFYVELIRGRKEETEVLWTSNSIVVFCGTSGTYGTGSWPDGADINLMPI

SEQ ID NO: 15985 - protein, 469 aa, synthetic construct
  REGION 1..469: note = neuraminidase__InfluenzaA__ABU92866
MNPNQKIITIGSVSLTISTICFFMQIAILITTVTLHFKQYEFNSPPNNQVMLCEPTIIERNITEIVYLTNTTIEKEVCPKLAEYRNWSKPQCDITGFAPFSKDNSIRLSAGGDIWVTREPYVSCDPDKCYQFALGQGTTLNNVHSNDTVHDRTPYRTLLMNELGVPFHLGTKQVCIAWSSSSCHDGKAWLHVCVTGDDKNATASFIYNGRLVDSIVSWSKEILRTQESECVCINGTCTVVMTDGSASGKADTKILFIEEGKIVHTSTLSGSAQHVEECSCYPRYPGVRCVCRDNWKGSNRPIVDINIKDYSIVSSYVCSGLVGDTPRKNDSSSNSHCLDPNNEEGGHGVKGWAFDDGNDVWMGRTISEKLRSGYETFKVIEGWSNPNSKLQINRQVIVDRGNRSGYSGIFSVEGKSCINRCFYVELIRGRKEETEVLWTSNSIVVFCGTSGTYGTGSWPDGADINLMPI

SEQ ID NO: 15986 - protein, 469 aa, synthetic construct; identical to SEQ ID NO: 14807
  REGION 1..469: note = neuraminidase__InfluenzaA__ABU92867

SEQ ID NO: 15987 - protein, 469 aa, synthetic construct; identical to SEQ ID NO: 15914
  REGION 1..469: note = neuraminidase__InfluenzaA__ABU92868

SEQ ID NO: 15988 - protein, 469 aa, synthetic construct; identical to SEQ ID NO: 14694
  REGION 1..469: note = neuraminidase__InfluenzaA__ABU92869

SEQ ID NO: 15989 - protein, 469 aa, synthetic construct; identical to SEQ ID NO: 15884
  REGION 1..469: note = neuraminidase__InfluenzaA__ABU92870

SEQ ID NO: 15990 - protein, 469 aa, synthetic construct
  REGION 1..469: note = neuraminidase__InfluenzaA__ABU92872
MNPNQKIITIGSVSLTIAAICFLMQIAILVTTVTLHFKQHECNSPPNNQVMLCEPTIIERNITEIVYLTNTTIEKEICPKLAEYRNWSKPQCNITGFAPFSKDNSIRLSAGGDIWVTREPYVSCDPDKCYQFALGQGTTLNNGHSNDTVHDRTPYRTLLMNELGVPFHLGTRQVCIAWSSSSCHDGKAWLHVCVTGDDKNATASFIYNGRLVDSIGSWSKKILRTQESECVCINGTCTVVMTDGSASGKADTKILFIEEGKIVHISTLSGSAQHVEECSCYPRYPGVRCVCRDNWKGSNRPIVDINVKDYNIVSSYVCSGLVGDTPRKNDSFSSSHCLDPNNEEGGHGVKGWAFDDGNDVWMGRTISEKLRSGYETFKVIEGWSKPNSKLQINRQVIVERGNRSGYSGIFSVEGKSCINRCFYVELIRGRKEETEVWWTSNSIVVFCGTSGTYGTGSWPDGADINLMPI

SEQ ID NO: 15991 - protein, 469 aa, synthetic construct
  REGION 1..469: note = neuraminidase__InfluenzaA__ABU92873
MNPNQKIITIGSVSLTISTICFFMQIAILITTVTLHFKQYEFNSPPNNQVMLCEPTIIERNITEIVYLTNTTIEKEICPKLAEYRNWSKPQCNITGFAPFSKDNSIRLSAGGDIWVTREPYVSCDPDKCYQFALGQGTTLNNVHSNDTVHDRTPYRTLLMNELGVPFHLGTKQVCIAWSSSSCHDGKAWLHVCVTGDDENATASFIYNGRLVDSIVSWSKKILRTQESECVCINGTCTVVMTDGSASGKADTKILFIEEGKIVHTSTLSGSAQHVEECSCYPRYPGVRCVCRDNWKGSNRPIVDINIKDYSIVSSYVCSGLVGDTPRKNDSSSSSHCLDPNNEEGGHGVKGWAFDDGNDVWMGRTISEKLRSGYETFKVIEGWSNPNSKLQINRQVIVDRGNRSGYSGIFSVEGKSCINRCFYVELIRGRKQETEVLWTSNSIVVFCGTSGTYGTGSWPDGADINIMPI

SEQ ID NO: 15992 - protein, 469 aa, synthetic construct; identical to SEQ ID NO: 15929
  REGION 1..469: note = neuraminidase__InfluenzaA__ABU92874

SEQ ID NO: 15993 - protein, 469 aa, synthetic construct; identical to SEQ ID NO: 14225
  REGION 1..469: note = neuraminidase__InfluenzaA__ABU92875

SEQ ID NO: 15994 - protein, 469 aa, synthetic construct; identical to SEQ ID NO: 14225
  REGION 1..469: note = neuraminidase__InfluenzaA__ABU92876

SEQ ID NO: 15995 - protein, 469 aa, synthetic construct; identical to SEQ ID NO: 14145
  REGION 1..469: note = neuraminidase__InfluenzaA__ABU92877

SEQ ID NO: 15996 - protein, 469 aa, synthetic construct; identical to SEQ ID NO: 14225
  REGION 1..469: note = neuraminidase__InfluenzaA__ABU92878

SEQ ID NO: 15997 - protein, 469 aa, synthetic construct
  REGION 1..469: note = neuraminidase__InfluenzaA__ABU92879
MNPNQKIITIGSVSLTIATICFLMQIAILVTTVTLHFKQHECNSPPNNQVMLCEPTIIERNITEIVYLTNTTIEKEICPKLAEYRNWSKPQCNITGFAPFSKDNSIRLSAGGDIWVTREPYVSCDPDKCYQFALGQGTTLNNGHSNDTVHDRTPYRTLLMNELGVPFHLGTRQVCIAWSSSSCHDGKAWLHVCVTGDDKNATASFIYNGRLVDSIGSWSKKILRTQESECVCINGTCTVVMTDGSASGKADTKILFIEEGKIVHISTLSGSAQHVEECSCYPRYPGVRCVCRDNWKGSNRPIVDINVKDYSIVSSYVCSGLVGDTPRKNDSFSSSHCLDPNNEEGGHGVKGWAFDDGNDVWMGRTISEKLRSGYETFKVIEGWSKPNSKLQINRQVIVERGNRSGYSGIFSVEGKSCINRCFYVELIRGRKGETEVWWTSNSIVVFCGTSGTYGTGSWPDGADINLMPI

SEQ ID NO: 15998 - protein, 469 aa, synthetic construct; identical to SEQ ID NO: 15990
  REGION 1..469: note = neuraminidase__InfluenzaA__ABU92880

SEQ ID NO: 15999 - protein, 469 aa, synthetic construct; identical to SEQ ID NO: 14225
  REGION 1..469: note = neuraminidase__InfluenzaA__ABU92881

SEQ ID NO: 16000 - protein, 469 aa, synthetic construct; identical to SEQ ID NO: 14225
  REGION 1..469: note = neuraminidase__InfluenzaA__ABU92882

SEQ ID NO: 16001 - protein, 469 aa, synthetic construct
  REGION 1..469: note = neuraminidase__InfluenzaA__ABU92883
MNPNQKIITIGSVSLTIAAICFLMQIAILVTTVTLHFKQHECNSPPKNQVMLCEPTIIERNITEIVYLTNTTIEKEICPKLAEYRNWSKPQCNITGFAPFSKDNSIRLSAGGDIWVTREPYVSCDPDKCYQFALGQGTTLNNGHSNDTVHDRTPYRTLLMNELGVPFHLGTRQVCIAWSSSSCHDGKAWLHVCVTGDDKNATASFIYNGRLVDSIVSWSKKILRTQESECVCINGTCTVVMTDGSASGKADTKILFIEEGKIVHISTLSGSAQHVEECSCYPRYPGVRCVCRDNWKGSNRPIVDINVKDYSIVSSYVCSGLVGDTPRKNDSFSSSHCLDPNNEEGGHGVKGWAFDDGNDVWMGRTISEKLRSGYETFKVIEGWSKPNSKLQINRQVIVERGNRSGYSGIFSVEGKSCINRCFYVELIRGRKEETEVWWTSNSIVVFCGTSGTYGTGSWPDGADINLMPI

SEQ ID NO: 16002 - protein, 469 aa, synthetic construct; identical to SEQ ID NO: 14225
  REGION 1..469: note = neuraminidase__InfluenzaA__ABU92884

SEQ ID NO: 16003 - protein, 469 aa, synthetic construct; identical to SEQ ID NO: 14225
  REGION 1..469: note = neuraminidase__InfluenzaA__ABU92885

SEQ ID NO: 16004 - protein, 469 aa, synthetic construct; identical to SEQ ID NO: 14714
  REGION 1..469: note = neuraminidase__InfluenzaA__ABU92886

SEQ ID NO: 16005 - protein, 469 aa, synthetic construct; identical to SEQ ID NO: 14225
  REGION 1..469: note = neuraminidase__InfluenzaA__ABU92887

SEQ ID NO: 16006 - protein, 469 aa, synthetic construct
  REGION 1..469: note = neuraminidase__InfluenzaA__ABU92888
MNPNQKIITIGSVSLTISTICFFMQIAILITTVTLHFKQYEFNSPPNNQVMLCEPTIIERNITEIVYLTNTTIEKEICPKLAEYRNWSKPQCNITGFAPFSKDNSIRLSAGGDIWVTREPYVSCDPDKCYQFALGQGTTLNNVHSNDTVHDRTPYRTLLMNELGVPFHLGTKQVCIAWSSSSCHDGKAWLHVCVTGDDENATASFIYNGRLVDSIVSWSKKILRTQESECVCINGTCTVVMTDGSASGKADTKILFIEEGKIVHTSTLSGSAQHVEECSCYPRYPGVRCVCRDNWKGSNRPIVDINIKDYSIISSYVCSGLVGDTPRKNDSSSSSHCLDPNNEEGGHGVKGWAFDDGNDVWMGRTISEKLRSGYETFKVVEGWSNPNSKLQINRQVIVDRDNRSGYSGIFSVEGKSCINRCFYVELIRGRNQETEVLWTSNSIVVFCGTSGTYGTGSWPDGADINLMPI

SEQ ID NO: 16007 - protein, 469 aa, synthetic construct; identical to SEQ ID NO: 15929
  REGION 1..469: note = neuraminidase__InfluenzaA__ABU92889

SEQ ID NO: 16008 - protein, 469 aa, synthetic construct
  REGION 1..469: note = neuraminidase__InfluenzaA__ABU92890
MNPNQKIITIGSVSLTIAAICFLMQIAILVTTVTLHFKQHECNSPPNNQVMLCEPTIIERNITEIVYLTNTTIEKEICPKLAEYRNWSKPQCNITGFAPFSKDNSIRLSAGGDIWVTREPYVSCDPDKCYQFALGQGTTLNNGHSNDTVHDRTPYRTLLMNELGVPFHLGTRQVCIAWSSSSCHDGKAWLHVCVTGDDKNATASFIYNGRLVDSIGSWSKKILRTQESECVCINGTCTVVMTDGSASGKADTKILFIEEGKIVHISTLSGSAQHVEECSCYPRYPGVRCVCRDNWKGSNRPIVDINVKDYSIVSSYVCSGLVGDTPRKNDSFSSSHCLDPNNEEGGHGVKGWAFDDGNDVWMGRTISEKLRSGYETFKVIEGWSKPNSKLQINRQVIVERGNRSGYSGIFSVEGKSCINRCFYVELVRGRKEETEVWWTSNSIVVFCGTSGTYGTGSWPDGADINLMPI

SEQ ID NO: 16009 - protein, 469 aa, synthetic construct; identical to SEQ ID NO: 15945
  REGION 1..469: note = neuraminidase__InfluenzaA__ABU92891

SEQ ID NO: 16010 - protein, 469 aa, synthetic construct
  REGION 1..469: note = neuraminidase__InfluenzaA__ABU92892
MNPNQKIITIGSVSLTISTICFFMQIAILITTVTLHFKQYEFNSPPNNQVMLCEPTIIERNITEIVYLTNTTIEKEICPKLAEYRNWSKPQCDITGFAPFSKDNSIRLSAGGNIWVTREPYVSCDPDKCYQFALGQGTTLNNVHSNDTVHDRTPYRTLLMNELGVPFHLGTKQVCIAWSSSSCHDGKAWLHVCVTGDDKNATASFIYNGRLVDSIVSWSKKILRTQESECVCINGTCTVVMTDGSASGKADTKILFIEEGKIVHTSTLSGSAQHVEECSCYPRYPGVRCVCRDNWKGSNRPIVDINIKDYSIVSSYVCSGLVGDTPRKNDSSSSSHCLDPNNEEGGHGVKGWAFDDGNDVWMGRTISEKLRSGYETFKVIEGWSNPNSKLQINRQVIVDRGNRSGYSGIFSVEGKSCINRCFYVELIRGRKEETEVLWTSNSIVVFCGTSGTYGTGSWPDGADINLMPI

SEQ ID NO: 16011 - protein, 469 aa, synthetic construct; identical to SEQ ID NO: 14807
  REGION 1..469: note = neuraminidase__InfluenzaA__ABU92893

SEQ ID NO: 16012 - protein, 469 aa, synthetic construct
  REGION 1..469: note = neuraminidase__InfluenzaA__ABU92895
MNPNQKIITVGSVSLTISTICFFMQIAILITTVTLHFKQYEFNSPPNNQVMLCEPTIIERNITEIVYLTNTTIEKEICPKLAEYRNWSKPQCDITGFAPFSKDNSIRLSAGGDIWVTREPYVSCDPDKCYQFALGQGTTLNNVHSNDTVHDRTPYRTLLMNELGVPFHLGTKQVCIAWSSSSCHDGKAWLHVCVTGDDKNATASFIYNGRLVDSIVSWSKEILRTQESECVCINGTCTVVMTDGSASGKADTKILFIEEGKIVHTSTLSGSAQHVEECSCYPRYPGVRCVCRDNWKGSNRPIVDINIKDYSIASSYVCSGLVGDTPRKNDSSSSSHCLDPNNEEGGHGVKGWAFDDGNDVWMGRTISEKLRSGYETFKVIEGWSNPNSKLQINRQVIVDRGNRSGYSGIFSVEGKSCINRCFYVELIRGRKEETEVLWTSNSIVVFCGTSGTYGTGSWPDGADINLMPI

SEQ ID NO: 16013 - protein, 469 aa, synthetic construct
  REGION 1..469: note = neuraminidase__InfluenzaA__ABU92896
MNPNQKIITIGSVSLTISTICFFMQIAILITTVTLHFKQYEFNSPPNNQVMLCEPTIIERNITEIVYLTNTTIEKEICPKLAEYRNWSKPQCDITGFAPFSKDNSIRLSAGGDIWVTREPYVSCDPDKCYQFALGQGTTLNNVHSNDTVRDRTPYRTLLMNELGVPFHLGTKQVCIAWSSSSCHDGKAWLHVCITGNDKNATASFIYNGRLVDSIVSWSKEILRTQESECVCINGTCTVVMTDGSASGKADTKILFIEEGKIVHTSTLSGSAQHVEECSCYPRYPGVRCVCRDNWKGSNRPIVDINIKDHSIVSSYVCSGLVGDTPRKNDSSSSSHCLDPNNEEGGHGVKGWAFDDRNDVWMGRTISEKSRLGYETFKVIEGWSNPNSKLQINRQVIVDRGNRSGYSGIFSVEGKSCINRCFYVELIRGRKEETEVLWTSNSIVVFCGTSGTYGTGSWPDGADINLMPI

SEQ ID NO: 16014 - protein, 469 aa, synthetic construct
  REGION 1..469: note = neuraminidase__InfluenzaA__ABU92897
MNPNQKIITIGSVSLTISTICFFMQIAILITTVTLHFKQYELNSPPNNQVMLCEPTIIERNITEIVYLTNTTIEKEICPKLAEYRNWSKPQCNITGFAPFSKDNSIRLSAGGDIWVTREPYVSCDPDKCYQFALGQGTTLNNVHSNDTVHDRTPYRTLLMNELGVPFHLGTKQVCIAWSSSSCHDGKAWLHVCVTGDDKNATASFIYNGRLVDSIVSWSKEILRTQESECVCINGTCTVVMTDGSASGKADTKILFIEEGKIVHTSTLSGSAQHVEECSCYPRYPGVRCVCRDNWKGSNRPIVDINIKDYSIVSSYVCSGLVGDTPRKNDSSSSSHCLDPNNEEGGHGVKGWAFDDGNDVWMGRTISEKSRSGYETFKVIEGWSNPNSKLQINRQVIVDRGNRSGYSGIFSVEGKSCINRCFYVELIRGRKEETEVLWTSNSIVVFCGTSGTYGTGSWPDGADINLMPI

SEQ ID NO: 16015 - protein, 469 aa, synthetic construct
  REGION 1..469: note = neuraminidase__InfluenzaA__ABU92898
MNPNQKIITIGSVSLTISTICFFMQIAILITTVTLHFKQYEFNSPPNNQVMLCEPTIIERNITEIVYLTNTTIEKEICPKLAEYRNWSKPQCDITGFAPFSKDNSIRLSAGGDIWVTREPYVSCDPDKCYQFALGQGTTLNNVHSNDTVHDRTPYRTLLMNELGVPFHLGTKQVCIAWSSSSCHDGKAWLHVCVTGDDKNATASFIYNGRLVDSVVSWSKDILRTQESECVCINGTCTVVMTDGSASGKADTKILFIEEGKIVHTSTLSGSAQHVEECSCYPRYPGVRCVCRDNWKGSNRPIVDINIKNYSIVSSYVCSGLVGDTPRKTDSSSSSHCLDPNNEEGGHGVKGWAFDDGNDVWMGRTISEKLRLGYETFKVIEGWSNPNSKLQINRQVIVDRGNRTGYSGIFSVEGKSCINRCFYVELIRGRKEETEVLWTSNSIVVFCGTSGTYGTGSWPDGADINLMPI

SEQ ID NO: 16016 - protein, 469 aa, synthetic construct; identical to SEQ ID NO: 14225
  REGION 1..469: note = neuraminidase__InfluenzaA__ABU92899

SEQ ID NO: 16017 - protein, 469 aa, synthetic construct
  REGION 1..469: note = neuraminidase__InfluenzaA__ABU92900
MNPNQKIITIGSVSLTIAAICFLMQIAILVTTVTLHFKQHECNPPPNNQVMLCEPTIIERNITEIVYLTNTTIEKEICPKLAEYRNWSKPQCNITGFAPFSKDNSIRLSAGGDIWVTREPYVSCDPDKCYQFALGQGTTLNNGHSNDTVHDRTPYRTLLMNELGVPFHLGTRQVCIAWSSSSCHDGKAWLHVCVTGDDKNATASFIYNGRLVDSIGSWSKKILRTQESECVCINGTCTVVMTDGSASGKADTKILFIEEGKIVHISTLSGSAQHVEECSCYPRYPGVRCVCRDNWKGSNRPIVDINVKDYSIVSSYVCSGLVGDTPRKNDSFSSSHCLDPNNEEGGHGVKGWAFDDGNDVWMGRTISEKLRSGYETFKVIEGWSKPNSKLQINRQVIVERGNRSGYSGIFSVEGKSCINRCFYVELIRGRKEETEVWWTSNSIVVFCGTSGTYGTGSWPDGADINLMPI

SEQ ID NO: 16018 - protein, 469 aa, synthetic construct
  REGION 1..469: note = neuraminidase__InfluenzaA__ABU92901
MNPNQKIITIGSVSLTIAAICFLMQIAILVTTVTLHFKQHECNSPPNNQVMLCEPTIIERNITEIVYLTNTTIEKEICPKLAEYRNWSKPQCNITGFAPFSKDNSIRLSAGGDIWVTREPYVSCDPDKCYQFALGQGTTLNNGHSNDTVHDRTPYRTLLMNELGVPFHLGTRQVCIAWSSSSCHDGKAWLHVCVTGDDKNATASFIYNGRLVDSISSWSKKILRTQESECVCINGTCTVVMTDGSASGKADTKILFIEEGKIVHISTLSGSAQHVEECSCYPRYPGVRCVCRDNWKGSNRPIVDINVKDYSIVSSYVCSGLVGDTPRKNDSFSSSHCLDPNNEEGGHGVKGWAFDDGNDVWMGRTISEKLRSGYETFKVIEGWSKPNSKLQINRQVIVERGNRSGYSGIFSVEGKSCINRCFYVELIRGRKEETEVWWTSNSIVVFCGTSGTYGTGSWPDGADINLMPI

SEQ ID NO: 16019 - protein, 469 aa, synthetic construct; identical to SEQ ID NO: 14225
  REGION 1..469: note = neuraminidase__InfluenzaA__ABU92902

SEQ ID NO: 16020 - protein, 469 aa, synthetic construct; identical to SEQ ID NO: 14225
  REGION 1..469: note = neuraminidase__InfluenzaA__ABU92903

SEQ ID NO: 16021 - protein, 469 aa, synthetic construct; identical to SEQ ID NO: 15180
  REGION 1..469: note = neuraminidase__InfluenzaA__ABU92904

SEQ ID NO: 16022 - protein, 469 aa, synthetic construct; identical to SEQ ID NO: 14225
  REGION 1..469: note = neuraminidase__InfluenzaA__ABU92905

SEQ ID NO: 16023 - protein, 469 aa, synthetic construct
  REGION 1..469: note = neuraminidase__InfluenzaA__ABU92906
MNPNQKIITIGSVSLTIAAICFLMQIAILVTTVTLHFKQHECNSPPNNQVMLCEPTIIERNITEIVYLTNTTIEKEICPKLAEYRNWSKPQCNITGFAPFSKDNSIRLSAGGDIWVTREPYVSCDPDKCYQFALGQGTTLNNGHSNDTVHDRTPYRTLLMNELGVPFHLGTRQVCIAWSSSSCHDGKAWLHVCVTGDDKNATASFIYNGRLVDSIGSWSKKILRTQESECVCINGTCTVVMTDGSASGKADTKILFIEEGKIVHISTLSGSAQHVEECSCYPRYPGVRCVCRDNWKGSNRPIVDINVKDYSIVSSYVCSGLVGDTPRKNDSFSSSHCLDPNNEEGGHGVKGWAFDDGNDVWMGRTISEKLRSGYETFKVIEGWSKPNSKLQINRQVIVERGNRSGYSGIFSVEGKSCINRCFYVELIRGRKEETEVWWTSNSIVVFCGTSGTYGTGSWPDGADIKLMPI

SEQ ID NO: 16024 - protein, 469 aa, synthetic construct
  REGION 1..469: note = neuraminidase__InfluenzaA__ABU92907
MNPNQKIITIGSISLTIAAICFLMQIAILVTTVTLHFKQHECNSPPNNQVMLCEPTIIERNITEIVYLTNTTIEKEICPKLAEYRNWSKPQCNITGFAPFSKDNSIRLSAGGDIWVTREPYVSCDPDKCYQFALGQGTTLNNGHSNDTVHDRTPYRTLLMNELGVPFHLGTRQVCIAWSSSSCHDGKAWLHVCVTGDDKNATASFIYNGRLVDSIGSWSKKILRTQESECVCINGTCTVVMTDGSASGKADTKILFIEEGKIVHISTLSGSAQHVEECSCYPRYPGVRCVCRDNWKGSNRPIVDINVKDYSIVSSYVCSGLVGDTPRKNDSFSSSHCLDPNNEEGGHGVKGWAFDDGNDVWMGRTISEKLRSGYETFKVIEGWSKPNSKLQINRQVIVERGNRSGYSGIFSVEGKSCINRCFYVELIRGRKEETEVWWTSNSIVVFCGTSGTYGTGSWPDGADINLMPI

SEQ ID NO: 16025 - protein, 469 aa, synthetic construct; identical to SEQ ID NO: 14225
  REGION 1..469: note = neuraminidase__InfluenzaA__ABU92908

SEQ ID NO: 16026 - protein, 469 aa, synthetic construct; identical to SEQ ID NO: 14225
  REGION 1..469: note = neuraminidase__InfluenzaA__ABU92909

SEQ ID NO: 16027 - protein, 469 aa, synthetic construct
  REGION 1..469: note = neuraminidase__InfluenzaA__ABU92910
MNPNQKIITIGSVSLTIATICFLTQIAILITTVTLHFKQYECNSPPNNQVMLCEPTIIERNITEIVYLTNTTIEKEICPKLAEYRNWSKPQCNITGFAPFSKDNSIRLSAGGDIWVTREPYVSCDPDKCYQFALGQGTTLNNGHSNDTVHDRTPYRTLLMNELGVPFHLGTKQVCIAWSSSSCHDGKAWLHVCVTGDDKNATASFIYNGRLVDSIGSWSKKILRTQESECVCINGTCTVVMTDGSASGKADTKILFIEEGKIVHTSLLSGSAQHVEECSCYPRYPGVRCVCRDNWKGSNRPIVDINVRDYSIVSSYVCSGLVGDTPRKNDSSSSSHCLDPNNEEGGHGVKGWAFDDGNDVWMGRTISEKLRSGYETFKVIEGWSKPNSKLQINRQVIVDKGNRSGYSGIFSVEGKSCINRCFYVELIRGRNQETEVLWTSNSIVVFCGTSGTYGTGSWPDGADINLMPI

SEQ ID NO: 16028 - protein, 469 aa, synthetic construct
  REGION 1..469: note = neuraminidase__InfluenzaA__ABU92911
MNPNQKIITIGSVSLTIATICFLTQIAILVTTVTLHFKQYECNSPPNNQVMLCEPTIIERNITEIVYLTNTTIEKEICPKQAEYRNWSKPQCNITGFAPFSKDNSIRLSAGGDIWVTREPYVSCDPDKCYQFALGQGTTLNNGHSNDTVHDRTPYRTLLMNELGVPFHLGTKQVCIAWSSSSCHDGKAWLHVCVTGDDKNATASFIYNGRLVDSIGSWSKKILRTQESECVCINGTCTVVMTDGSASGKADTKILFIKEGKIVHTSLLSGSAQHVEECSCYPRYPGVRCVCRDNWKGSNRPIVDINVKDYSIVSSYVCSGLVGDTPRKNDSSSSSHCLDPNNEEGGHGVKGWAFDDGNDVWMGRTISEKLRSGYETFKVIEGWSKPNSKLQINRQVIVDRDNRSGYSGIFSVEGKSCINRCFYVELIRGRNQETEVLWTSNSIVVFCGTSGTYGTGSWPDGADINLMPI

SEQ ID NO: 16029 - protein, 469 aa, synthetic construct
  REGION 1..469: note = neuraminidase__InfluenzaA__ABU92913
MNPNQKIITIGSVSLTIATICFLTQIAILVTTVTLHFKQYECNSPPNNQVMLCEPTIIERNITEIVYLTNTTIEKEICPKLAEYRNWSKPQCNITGFAPFSKDNSIRLSAGGDIWVTREPYVSCDPDKCYQFALGQGTTLNNGHSNDTVHDRTPYRTLLMNELGVPFHLGTKQVCIAWSSSSCHDGKAWLHVCVTGDDKNATASFIYNGRLVDSIGSWSKKILRTQESECVCINGTCTVVMTDGSASGKADTKILFIKEGKIVHTSLLSGSAQHVEECSCYPRYPGVRCVCRDNWKGSNRPIVDINVKDYSIVSSYVCSGLVGDTPRKNDSSSSSHCLDPNNEEGGHGVKGWAFDDGNDVWMGRTISEKLRSGYETFKVIEGWSKPNSKLQINRQVIVDRDNRSGYSGIFSVEGKSCINRCFYVELIRGRNQETEVLWTSNSIVVFCGTSGTYGTGSWPDGADINLMPI

SEQ ID NO: 16030 - protein, 470 aa, synthetic construct
  REGION 1..470: note = neuraminidase__InfluenzaA__ABV29560
MNPNQKIITIGSISIAIGIISLMLQIGNIISIWASHSIQTGSQNHTGICNQRIITYENSTWVNHTYVSINNTNVVAGKDKTSVTLAGNSSLCSISGWAIYTKDNSIRIGSKGDVFVIREPFISCSHLECRTFFLTQGALLNDKHSNGTVKDRSPYRALMSCPLGEAPSPYNSKFESVAWSASACHDGMGWLTIGISGPDNGAVAVLKYNGIITETIKSWKKRILRTQESECVCVNGSCFTIMTDGPSNGAASYKIFKIEKGKVTKSIELNAPNFHYEECSCYPDTGTVMCVCRDNWHGSNRPWVSFNQNLDYQIGYICSGVFGDNPRPKDGKGSCNPVTVDGADGVKGFSYKYGNGVWIGRTKSNRLRKGFEMIWDPNGWTDTDSDFSVKQDVVAITDWSGYSGSFVQHPELTGLDCIRPCFWVELVRGLPRENTTIWTSGSSISFCGVDSDTANWSWPDGAELPFTIDK

SEQ ID NO: 16031 - protein, 470 aa, synthetic construct; identical to SEQ ID NO: 16030
  REGION 1..470: note = neuraminidase__InfluenzaA__ABV29571

SEQ ID NO: 16032 - protein, 470 aa, synthetic construct; identical to SEQ ID NO: 16030
  REGION 1..470: note = neuraminidase__InfluenzaA__ABV29582

SEQ ID NO: 16033 - protein, 470 aa, synthetic construct; identical to SEQ ID NO: 16030
  REGION 1..470: note = neuraminidase__InfluenzaA__ABV29615

SEQ ID NO: 16034 - protein, 470 aa, synthetic construct
  REGION 1..470: note = neuraminidase__InfluenzaA__ABV29637
MNPNQKIITIGSISIAIGIISLMLQIGNIISIWASHSIQTGSQNHTGICNQRIITYENSTWVNHTYVNINNTNVVAGKDKTSVTLAGNSSLCSISGWAIYTKDNSIRIGSKGDVFVIREPFISCSHLECRTFFLTQGALLNDKHSNGTVKDRSPYRALMSCPLGEAPSPYNSKFESVAWSASACHDGMGWLTIGISGPDNGAVAVLKYNGIITETIKSWKKRILRTQESECVCVNGSCFTIMTDGPSNGTASYKIFKIEKGKVTKSIELNAPNFHYEECSCYPDTGTVMCVCRDNWHGSNRPWVSFNQNLDYQVGYICSGVFGDNPRPKDGKGSCNPMTVDGADGVKGFSYKYGNGVWIGRTKSNKLRKGFEMIWDPNGWTDTDSDFSVKQDVVAISDWSGYSGSFVQHPELTGLDCIRPCFWVELVRGLPRENTTIWTSGSSISFCGVDSDTANWSWPDGAELPFTIDK

SEQ ID NO: 16035 - protein, 470 aa, synthetic construct; identical to SEQ ID NO: 16030
  REGION 1..470: note = neuraminidase__InfluenzaA__ABV29648

SEQ ID NO: 16036 - protein, 470 aa, synthetic construct; identical to SEQ ID NO: 16030
  REGION 1..470: note = neuraminidase__InfluenzaA__ABV29659

SEQ ID NO: 16037 - protein, 470 aa, synthetic construct; identical to SEQ ID NO: 16030
  REGION 1..470: note = neuraminidase__InfluenzaA__ABV29670

SEQ ID NO: 16038 - protein, 470 aa, synthetic construct
  REGION 1..470: note = neuraminidase__InfluenzaA__ABV29681
MNPNQKIITIGSISIAIGIISLMLQIGNIISIWASHSIQTGSQNHTGICNQRIITYENSTWVNHTYVSINNTNVVAGKDKTSVTLAGNSSLCSISGWAIYTKDNSIRIGSKGDVFVIREPFISCSHLECRTFFLTQGALLNDKHSNGTVKDRSPYRALMSCPLGEAPSPYNSKFESVAWSASACHDGMGWLTIGISGPDNGAVAVLKYNGIITETIKSWKKRILRTQESECVCVNGSCFTIMTDGPSNGAASYKIFKIEKGKVTKSIELNAPNFHYEECSCYPDTGTVMCVCRDNWHGSNRPWVSFNQNLDYQIGYICSGVFGDNPRPKDGKGSCNPVTVDGADGVKGFSYKYGNGVWIGRTKSNRLRKGFEMIWDPNGWTDTDSDFSVKQDVVAITDWSGYSGSFVQHPELTGLDCIRPCFWVELVRGLPRENTTIWTSGSSISFCGIDSDTANWSWPDGAELPFTIDK

SEQ ID NO: 16039 - protein, 470 aa, synthetic construct; identical to SEQ ID NO: 16030
  REGION 1..470: note = neuraminidase__InfluenzaA__ABV29692

SEQ ID NO: 16040 - protein, 470 aa, synthetic construct; identical to SEQ ID NO: 16030
  REGION 1..470: note = neuraminidase__InfluenzaA__ABV29703

SEQ ID NO: 16041 - protein, 469 aa, synthetic construct
  REGION 1..469: note = neuraminidase__InfluenzaA__ABV29714
MNPNQKIITIGSVSLTISTICFFMQIAILITTVTLHFKQYEFNSPPNNQVMLCEPTIIERNITEIVYLTNTTIEKEICPKLAEYRNWSKPQCDITGFAPFSKDNSIRLSAGGDIWVTREPYVSCDPDKCYQFALGQGTTLNNVHSNDTVRDRTPYRTLLMNELGVPFHLGTKQVCIAWSSSSCHDGKAWLHVCITGDDKNATASFIYNGRLVDSIVSWSKEILRTQESECVCINGTCTVVMTDGSASGEADTKILFIEEGKIVHTSTLSGSAQHVEECSCYPRYPGVRCVCRDNWKGSNRPIVDINIKDHSIVSSYVCSGLVGDTPRKNDSSSSSHCLDPNNEEGGHGVKGWAFDDGNDVWMGRTISEKSRLGYETFKVIEGWSNPKSKLQINRQVIVDRGNRSGYSGIFSVEGKSCINRCFYVELIRGRKEETEVLWTSNSIVVFCGTSGTYGTGSWPDGADINLMPI

SEQ ID NO: 16042 - protein, 469 aa, synthetic construct
  REGION 1..469: note = neuraminidase__InfluenzaA__ABV29725
MNPNQKIITIGSVSLTISTICFFMQTAILITTVTLHFKQYEFNSPPNNQGMLCEPTIIERNITEIVYLTNTTIEKEICPKLAEYRNWSKPQCDITGFAPFSKDNSIRLSAGGDIWVTREPYVSCDPDKCYQFALGQGTTLNNVHSNDTVRDRTPYRTLLMNELGVPFHLGTKQVCIAWSSSSCHDGKAWLHVCITGDDKNATASFIYNGRLVDSIVSWSKEILRTQESECVCINGTCTVVMTDGSASGKADTKILFIEEGKIVHTSTLSGSAQHVEECSCFPRYPGVRCVCRDNWKGSNRPIVDINIKDHSIVSSYVCSGLVGDTPRKNDSSSSSHCLDPNNEEGGHGVKGWAFDDGNDVWMGRTISEKSRLGYETFKVIEGWSNPKSKLQINRQVIVDRGNRSGYSGIFSVEGKSCINRCFYVELIRGRKEETEVLWTSNSIVVFCGTSGTYGTGSWPDGADINLMPI

SEQ ID NO: 16043 - protein, 470 aa, synthetic construct
  REGION 1..470: note = neuraminidase__InfluenzaA__ABV29736
MNPNQKIITIGSISIAIGIISLMLQIGNIISIWASHSIQTGSQNHTGICNQRIITYENSTWVNHTYVNINNTNVVTGKDKTSVTLAGNSSLCSISGWAIYTKDNSIRIGSKGDVFVIREPFISCSHLECRTFFLTQGALLNDKHSNGTVKDRSPYRALMSCPLGEAPSPYNSKFESVAWSASACHDGMGWLTIGISGPDNGAVAVLKYNGIITETIKSWKKRILRTQESECVCVNGSCFTIMTDGPSDGAASYKIFKIEKGKVTKSIELNAPNFHYEECSCYPDTGTVMCVCRDNWHGSNRPWVSFNQNLDYQIGYICSGVFGDNPRPKDGKGSCNPVTVDGADGVKGFSYKYGNGVWIGRTKSNKLRKGFEMIWDPNGWTDTDNDFSVKQDVVAITDWSGYSGSFVQHPELTGLDCIRPCFWVELVRGLPRENTTIWTSGSSISFCGVDSDTANWSWPDGAELPFTIDK

SEQ ID NO: 16044 - protein, 470 aa, synthetic construct
  REGION 1..470: note = neuraminidase__InfluenzaA__ABV29747
MNPNQKIITIGSISIAIGIISLMLQIGNIISIWASHSIQTGSQNHTGICNQRIITYENSTWVNHTYVSINNTNVVAGKDKTSVTLAGNSSLCSISGWAIYTKDNSIRIGSKGDVFVIREPFISCSHLECRTFFLTQGALLNDKHSNGTVKDRSPYRALMSCPLGEAPSPYNSKFESVAWSASACHDGMGWLTIGISGPDNGAVAVLKYNGIITETIKSWKKRILRTQESECVCVNGSCFTIMTDGPSNGAASYKIFKIEKGKVTKSIELNAPNFHYEECSCYPDTGTVMCVCRDNWHGSNRPWVSFNQNLDYQIGYICSGVFGDNPRPKDGKGSCNPVTVDGADGVKGFSYKYGNGVWIGRTKSNRLRKGFEMIWDPNGWTDTDSDFSVRQDVVAITDWSGYSGSFVQHPELTGLDCIRPCFWVELVRGLPRENTTIWTSGSSISFCGVDSDTANWSWPDGAELPFTIDK

SEQ ID NO: 16045 - protein, 470 aa, synthetic construct; identical to SEQ ID NO: 16030
  REGION 1..470: note = neuraminidase__InfluenzaA__ABV29769

SEQ ID NO: 16046 - protein, 470 aa, synthetic construct
  REGION 1..470: note = neuraminidase__InfluenzaA__ABV29780
MNPNQKIITIGSISIAIGIISLMLQIGNIISIWASHSIQTGSQNHTGICNQRIITYENSTWVNHTYVNINNTNVVTGKDKTSVTLAGNSSLCSISGWAIYTKDNSIRIGSKGDVFVIREPFISCSHLECRTFFLTQGALLNDKHSNGTVKDRSPYRALMSCPLGEAPSPYNSKFESVAWSASACHDGMGWLTIGISGPDNGAVAVLKYNGIITETIKSWKKRILRTQESECVCVNGSCFTIMTDGPSDGAASYKIFKIEKGKVTKSIELNAPNFHYEECSCYPDTGTVMCVCRDNWHGSNRPWVSFNQNLDYQIGYICSGVFGDNPRPKDGKGSCNPVTVDGADGVKGFSYKYGNGVWIGRTKSSKLRKGFEMIWDPNGWTDTDNDFSVKQDVVAITDWSGYSGSFVQHPELTGLDCIRPCFWVELVRGLPRENTTIWTSGSSISFCGVDSDTANWSWPDGAELPFTIDK

SEQ ID NO: 16047 - protein, 470 aa, synthetic construct; identical to SEQ ID NO: 16030
  REGION 1..470: note = neuraminidase__InfluenzaA__ABV29791

SEQ ID NO: 16048 - protein, 470 aa, synthetic construct; identical to SEQ ID NO: 16030
  REGION 1..470: note = neuraminidase__InfluenzaA__ABV29802

SEQ ID NO: 16049 - protein, 469 aa, synthetic construct; identical to SEQ ID NO: 15884
  REGION 1..469: note = neuraminidase__InfluenzaA__ABV29824

SEQ ID NO: 16050 - protein, 470 aa, synthetic construct; identical to SEQ ID NO: 16030
  REGION 1..470: note = neuraminidase__InfluenzaA__ABV29835

SEQ ID NO: 16051 - protein, 470 aa, synthetic construct
  REGION 1..470: note = neuraminidase__InfluenzaA__ABV29846
MNPNQKIITIGSISIAIGIISLMLQIGNIISIWASHSIQIGSQNHTGICNQRIITYENSTWVNHTYVNINNTNVVAGKDKTSVTLAGNSSLCSISGWAIYTKDNSIRIGSKGDVFVIREPFISCSHLECRTFFLTQGALLNDKHSNGTVKDRSPYRALMSCPLGEAPSPYNSKFESVAWSASACHDGMGWLTIGISGPDNGAVAVLKYNGIITETIKSWKKRILRTQESECVCVNGSCFTIMTDGPSNGAASYKIFKIEKGKVTKSIELNAPNFHYEECSCYPDTGTVMCVCRDNWHGSNRPWVSFNQNLDYQVGYICSGVFGDNPRPKDGKGSCNPMTVDGADGVKGFSYKYGNGVWIGRTKSNKLRKGFEMIWDPNGWTDTDSDFSVKQDVVAITDWSGYSGSFVQHPELTGLDCIRPCFWVELVRGLPRENTTIWTSGSSISFCGVDSDTANWSWPDGAELPFTIDK

SEQ ID NO: 16052 - protein, 470 aa, synthetic construct
  REGION 1..470: note = neuraminidase__InfluenzaA__ABV29879
MNPNQKIITIGSISIAIGIISLMLQIGNIISIWASHSIQTGSQNHTGICNQRIITYENSTWVNHTYVSINNTNVVAGKDKTSVTLAGNSSLCSISGWAIYTKDNSIRIGSKGDVFIIREPFISCSHLECRTFFLTQGALLNDKHSNGTVKDRSPYRALMSCPLGEAPSPYNSKFESVAWSASACHDGMGWLTIGISGPDNGAVAVLKYNGIITETIKSWKKRILRTQESECVCVNGSCFTIMTDGPSNGAASYKIFKIEKGKVTKSIELNAPNFHYEECSCYPDTGTVMCVCRDNWHGSNRPWVSFNQNLDYQIGYICSGVFGDNPRPKDGKGSCNPVTVDGADGVKGFSYKYGNGVWIGRTKSNRLRKGFEMIWDPNGWTDTDSDFSVKQDVVAITDWSGYSGSFVQHPELTGLDCIRPCFWVELVRGLPRENTTIWTSGSSISFCGVDSDTANWSWPDGAELPFTIDK

SEQ ID NO: 16053 - protein, 470 aa, synthetic construct; identical to SEQ ID NO: 16030
  REGION 1..470: note = neuraminidase__InfluenzaA__ABV29890

SEQ ID NO: 16054 - protein, 469 aa, synthetic construct; identical to SEQ ID NO: 15884
  REGION 1..469: note = neuraminidase__InfluenzaA__ABV29901

SEQ ID NO: 16055 - protein, 469 aa, synthetic construct
  REGION 1..469: note = neuraminidase__InfluenzaA__ABV29912
MNPNQKIITIGSVSLTISTICFFMQIAILITTVTLHFKQYEFNSPPNNQVMLCEPTIIERNITEIVYLTNTTIEKEICPKLAEYRNWSKPQCDITGFAPFSKDNSIRLSAGGDIWVTREPYVSCDPDKCYQFALGQGTTLNNVHSNDTVHDRTPYRTLLMNELGVPFHLGTKQVCIAWSSSSCHDGKAWLHVCVTGDDKNATASFIYNGRLVDSIVSWSKDILRTQESECICINGTCTVVMTDGSASGKADTKILFIEEGKIVHTSTLSGSAQHVEECSCYPRYPGVRCVCRDNWKGSNRPIVDINIKDYSIVSSYVCSGLVGDTPRKNDSSSSSHCLDPNNEEGGHGVKGWAFDDGNDVWMGRTISEKLRLGYETFKVIEGWSNPNSKLQINRQVIVDKGNRSGYSGIFSVEGKSCINRCFYVELIRGRKEETEVLWTSNSIVVFCGTSGTYGTGSWPDGADINLMPI

SEQ ID NO: 16056 - protein, 470 aa, synthetic construct
  REGION 1..470: note = neuraminidase__InfluenzaA__ABV29923
MNPNQKIITIGSISIAIGIISLMLQIGNIISIWASHSIQTGSQNHTGICNQRIITYENSTWVNHTYVNINNTNVVAGKDKTSVTLAGNSSLCSISGWAIYTKDNSIRIGSKGDVFVIREPFISCSHLECRTFFLTQGALLNDKHSNGTVKDRSPYRALMSCPLGEAPSPYNSKFESVAWSASACHDGMGWLTIGISGPDNGAVAVLKYNGIITETIKSWKKRILRTQESECVCVNGSCFTIMTDGPSNGAASYKIFKIEKGKVTKSIELNAPNFHYEECSCYPDTGTVMCVCRDNWHGSNRPWVSFNQNLDYQVGYICSGVFGDNPRPKDGKGSCNPMTVDGADGVKGFSYKYGNGVWIGRTKSNKLRKGFEMIWDPNGWTDTDSDFSVKQDVVAITDWSGYSGSFVQHPELTGLDCIRPCFWVELVRGLPRENATIWTSGSSISFCGVDSDTANWSWPDGAELPFTIDK

SEQ ID NO: 16057 - protein, 469 aa, synthetic construct
  REGION 1..469: note = neuraminidase__InfluenzaA__ABV29934
MNPNQKIITIGSVSLTISTICFFMQIAILITTVTLHFKQYEFNSPPNNQVMLCEPTIIERNITEIVYLTNTTIEKEICPKLAEYRNWSKPQCDITGFAPFSKDNSIRLSAGGDIWVTREPYVSCDPDKCYQFALGQGTTLNNVHSNDTVRDRTPYRTLLMNELGVPFHLGTKQVCIAWSSSSCHDGKAWLHVCITGDDKNATASFIYNGRLVDSIVSWSKEILRTQESECVCINGTCTVVMTDGSASGKADTKILFIEEGKIVHTSTLSGSAQHVEECSCYPRYPGVRCVCRDNWKGSNRPIVDINIKDHSIVSSYVCSGLVGDTPRKNDSSSSSHCLDPNNEEGGHGVKGWAFDDGNDVWMGRTISEKSRLGYETFKVIEGWSNPKSKLQINRQVIVDRGNRTGYSGIFSVEGKSCINRCFYVELIRGRKEETEVLWTSNSIVVFCGTSGTYGTGSWPDGADINLMPI

SEQ ID NO: 16058 - protein, 470 aa, synthetic construct; identical to SEQ ID NO: 16043
  REGION 1..470: note = neuraminidase__InfluenzaA__ABV29945

SEQ ID NO: 16059 - protein, 470 aa, synthetic construct
  REGION 1..470: note = neuraminidase__InfluenzaA__ABV29956
MNPNQKIITIGSISIAIGIISLMLQIGNIISIWASHSIQTGSQNHTGICNQRIITYENSTWVNHTYVSINNTNVVAGKDKTSVTLAGNSSLCSISGWAIYTKDNSIRIGSKGDVFVIREPFISCSHLECRTFFLTQGALLNDKHSNGTVKDRSPYRALMSCPLGEAPSPYNSKFESVAWSASACHDGMGWLTIGISGPDNGAVAVLKYKGIITETIKSWKKRILRTQESECVCVNGSCFTIMTDGPSNGAASYKIFKIEKGKVTKSIELNAPNFHYEECSCYPDTGTVMCVCRDNWHGSNRPWVSFNQNLDYQIGYICSGVFGDNPRPKDGKGSCNPVTVDGADGVKGFSYKYGNGVWIGRTKSNRLRKGFEMIWDPNGWTDTDSDFSVKQDVVAITDWSGYSGSFVQHPELTGLDCIRPCFWVELVRGLPRENTTIWTSGSSISFCGVDSDTANWSWPDGAELPFTIDK

SEQ ID NO: 16060 - protein, 470 aa, synthetic construct
  REGION 1..470: note = neuraminidase__InfluenzaA__ABV29989
MNPNQKIITIGSISIAIGIISLMLQIGNIISIWASHSIQTGSQNHTGICNQRIITYENSTWVNHTYVSINNTNVVAGKDKTSVTLAGNSSLCSISGWAIYTKDNSIRIGSKGDVFVMREPFISCSHLECRTFFLTQGALLNDKHSNGTVKDRSPYRALMSCPLGEAPSPYNSKFESVAWSASACHDGMGWLTIGISGPDNGAVAVLKYNGIITETIKSWKKRILRTQESECVCVNGSCFTIMTDGPSNGAASYKIFKIEKGKVTKSIELNAPNFHYEECSCYPDTGTVMCVCRDNWHGSNRPWVSFNQNLDYQIGYICSGVFGDNPRPKDGKGSCNPVTVDGADGVKGFSYKYGNGVWIGRTKSNRLRKGFEMIWDPNGWTDTDSDFSVKQDVVAITDWSGYSGSFVQHPELTGLDCIRPCFWVELVRGLPRENTTIWTSGSSISFCGVDSDTANWSWPDGAELPFTIDK

SEQ ID NO: 16061 - protein, 470 aa, synthetic construct; identical to SEQ ID NO: 16030
  REGION 1..470: note = neuraminidase__InfluenzaA__ABV30000

SEQ ID NO: 16062 - protein, 470 aa, synthetic construct; identical to SEQ ID NO: 16030
  REGION 1..470: note = neuraminidase__InfluenzaA__ABV30011

SEQ ID NO: 16063 - protein, 470 aa, synthetic construct; identical to SEQ ID NO: 16030
  REGION 1..470: note = neuraminidase__InfluenzaA__ABV30022

SEQ ID NO: 16064 - protein, 470 aa, synthetic construct
  REGION 1..470: note = neuraminidase__InfluenzaA__ABV30044
MNPNQKIITIGSISIAIGIISLMLQIGNIISIWASHSIQTGSQNHTGICNQRIITYENSTWVNHTYVNINNTNVVAGKDKTSGTLAGNSSLCSISGWAIYTKDNSIRIGSKGDVFVIREPFISCSHLECRTFFLTQGALLNDKHSNGTVKDRSPYRALMSCPLGEAPSPYNSKFESVAWSASACHDGMGWLTIGISGPDNGAVAVLKYNGIITETIKSWKKRILRTQESECVCVNGSCFTIMTDGPSNGAASYKIFKIEKGKVTKSIELNAPNFHYEECSCYPDTGTVMCVCRDNWHGSNRPWVSFNQNLDYQVGYICSGVFGDNPRPKDGKGSCNPMTVDGADGVKGFSYKYGNGVWIGRTKSNKLRKGFEMIWDPNGWTDTDSDFSVKQDVVAITDWSGYSGSFVQHPELTGLDCIRPCFWVELVRGLPRENTTIWTSGSSISFCGVDSDTANWSWPDGAELPFTIDK

SEQ ID NO: 16065 - protein, 470 aa, synthetic construct
  REGION 1..470: note = neuraminidase__InfluenzaA__ABV30055
MNPNQKIITIGSISIAIGIISLMLQIGNIISIWASHSIQTGSQNHTGICNQRIITYENSTWVNHTYVNINNTNVVAGKDKTSVTLAGNSSLCSISGWAIYTKDNSIRIGSKGDVFVIREPFISCSHLECRTFFLTQGALLNDKHSNGTVKDRSPYRALMSCPLGEAPSPYNSKFESVAWSASACHDGMGWLTIGISGPDNGAVAVLKYNGIITETIKSWKKRILRTQESECVCVNGSCFTIMTDGPSNGAASYKIFKIEKGKVTKSIELNAPNFHYEECSCYPDTGTVMCVCRDNWHGSNRPWVSFNQNLDYQVGYICSGVFGDNPRPKDGKGSCNPMTVDGADGVKGFSYKYGNGVWIGRTKSNKLRKGFEMIWDPNGWTDTDSDFSVKQDVVAITDWSGYSGSFVQHPELTGLDCIRPCFWVELVRGLPRENTTIWTSGSSISFCGVDSDTANWSWPDGAELPFTIDK

SEQ ID NO: 16066 - protein, 469 aa, synthetic construct
  REGION 1..469: note = neuraminidase__InfluenzaA__ABV30077
MNPNQKIITIGSVSLTISTICFFMQTAILITTVTLHFKQYEFNSPPNNQVMLCEPTIIERNITEIVYLTNTTIEKEICPKLAEYRNWSKPQCDITGFAPFSKDNSIRLSAGGDIWVTREPYVSCDPDKCYQFALGQGTTLNNVHSNDTVRDRTPYRTLLMNELGVPFHLGTKQVCIAWSSSSCHDGKAWLHVCITGDDKNATASFIYNGRLVDSIVSWSKEILRTQESECVCINGTCTVVMTDGSASGKADTKILFIEEGKIVHTSTLSGSAQHVEECSCYPRYPGVRCVCRDNWKGSNRPIVDINIKDHSIVSSYVCSGLVGDTPRKNDSSSSSHCLDPNNEEGGHGVKGWAFDDGNDVWMGRTISEKSRLGYETFKVIEGWSNPKSKLQINRQVIVDRGNRSGYSGIFSVEGKSCINRCFYVELIRGRKEETEVLWTSNSIVVFCGTSGTYGTGSWPDGADINLMPI

SEQ ID NO: 16067 - protein, 470 aa, synthetic construct; identical to SEQ ID NO: 16030
  REGION 1..470: note = neuraminidase__InfluenzaA__ABV30088

SEQ ID NO: 16068 - protein, 470 aa, synthetic construct; identical to SEQ ID NO: 16030
  REGION 1..470: note = neuraminidase__InfluenzaA__ABV30099

SEQ ID NO: 16069 - protein, 470 aa, synthetic construct
  REGION 1..470: note = neuraminidase__InfluenzaA__ABV30110
MNPNQKIITIGSISIAIGIISLMLQIGNIISIWASHSIQTGSQNHTGICNQRIITYENSTWVNHTYVSINNTNVVAGKDKTSVTLAGNSSLCSISGWAIYTKDNSIRIGSKGDVFVIREPFISCSHLECRTFFLTQGALLNDKHSNGTVKDRSPYRALMSCPLGEAPSPYNSKFESVAWSASACHDGMGWLTIGISGPDNGAVAVLKYNGIITGTIKSWKKRILRTQESECVCVNGSCFTIMTDGPSNGAASYKIFKIEKGKVTKSIELNAPNFHYEECSCYPDTGTVMCVCRDNWHGSNRPWVSFNQNLDYQIGYICSGVFGDNPRPKDGKGSCNPVTVDGADGVKGFSYKYGNGVWIGRTKSNRLRKGFEMIWDPNGWTDTDSDFSVKQDVVAITDWSGYSGSFVQHPELTGLDCIRPCFWVELVRGLPRENTTIWTSGSSISFCGVDSDTANWSWPDGAELPFTIDK

SEQ ID NO: 16070 - protein, 470 aa, synthetic construct; identical to SEQ ID NO: 16030
  REGION 1..470: note = neuraminidase__InfluenzaA__ABV30132

SEQ ID NO: 16071 - protein, 470 aa, synthetic construct
  REGION 1..470: note = neuraminidase__InfluenzaA__ABV30143
MNPNQKIITIGSISIAIGIISLMLQIGNIISIWASHSIQTGSQNHTGICNQRIITYENSTWVNHTYVNINNTNVVAGKDKTSVTLAGNSSLCSISGWAIYTKDNSIRIGSKGDVFVIREPFISCSHLECRTFFLTQGALLNDKHSNGTVKDRSPYRALMSCPLGEAPSPYNSKFESVAWSASACHDGMGWLTIGISGPDNGAVAVLKYNGIITETIKSWKKRILRTQESECVCVNGSCFTIMTDGPSNGAASYKIFKIEKGKVTKSIELNAPNFHYEECSCYPDTGTVMCVCRDNWHGSNRPWVSFNQNLDYQIGYICSGVFGDNPRPKDGKGSCNPVTVDGADGVKGFSYKYGNGVWIGRTKSNRLRKGFEMIWDPNGWTNTDSDFSVKQDVVAITDWSGYSGSFVQHPELTGLDCIRPCFWVELVRGLPRENTTIWTSGSSISFCGVDSDTANWSWPDGAELPFTIDK

SEQ ID NO: 16072 - protein, 470 aa, synthetic construct; identical to SEQ ID NO: 16056
  REGION 1..470: note = neuraminidase__InfluenzaA__ABV30154

SEQ ID NO: 16073 - protein, 470 aa, synthetic construct
  REGION 1..470: note = neuraminidase__InfluenzaA__ABV30165
MNPNQKIITIGSISIAIGIISLMLQIGNIISIWASHSIQTGSQNHTGICNQRIITYENSTWVNHTYVSINNTNVVAGKDKTSVTLAGNLSLCSISGWAIYTKDNSIRIGSKGDVFVIREPFISCSHLECRTFFLTQGALLNDKHSNGTVKDRSPYRALMSCPLGEAPSPYNSKFESVAWSASACHDGMGWLTIGISGPDNGAVAVLKYNGIITETIKSWKKRILRTQESECVCVNGSCFTIMTDGPSNGAASYKIFKIEKGKVTKSIELNAPNFHYEECSCYPDTGTVMCVCRDNWHGSNRPWVSFNQNLDYQIGYICSGVFGDNPRPKDGKGSCNPVTVDGADGVKGFSYKYGNGVWIGRTKSNRLRKGFEMIWDPNGWTDTDSDFSVKQDVVAITDWSGYSGSFVQHPELTGLDCIRPCFWVELVRGLPRENTTIWTSGSSISFCGVDSDTANWSWPDGAELPFTIDK

SEQ ID NO: 16074 - protein, 470 aa, synthetic construct; identical to SEQ ID NO: 16030
  REGION 1..470: note = neuraminidase__InfluenzaA__ABV30187

SEQ ID NO: 16075 - protein, 470 aa, synthetic construct; identical to SEQ ID NO: 16030
  REGION 1..470: note = neuraminidase__InfluenzaA__ABV30198

SEQ ID NO: 16076 - protein, 469 aa, synthetic construct; identical to SEQ ID NO: 15884
  REGION 1..469: note = neuraminidase__InfluenzaA__ABV30209

SEQ ID NO: 16077 - protein, 469 aa, synthetic construct; identical to SEQ ID NO: 16066
  REGION 1..469: note = neuraminidase__InfluenzaA__ABV30220

SEQ ID NO: 16078 - protein, 469 aa, synthetic construct; identical to SEQ ID NO: 16066
  REGION 1..469: note = neuraminidase__InfluenzaA__ABV30231

SEQ ID NO: 16079 - protein, 469 aa, synthetic construct
  REGION 1..469: note = neuraminidase__InfluenzaA__ABV30264
MNPNQKIITIGSVSLTISTICFFMQIAILITTVTLHFKQYEFSSPPNNQVMLCEPTIIERNITEVVYLTNTTIEKEICPKLAEYRNWSKPQCDITGFAPFSKDNSIRLSAGGDIWVTREPYVSCDPDKCYQFALGQGTTLNNVHSNDTVHDRTPYRTLLMNELGVPFHLGTKQVCIAWSSSSCHDGKAWLHVCVTGDDKNATASFIYNGRLVDSIVSWSKEILRTQESECVCINGTCTVVMTDGSASGKADTKILFIEEGKIVHTSTLSGSAQHVEECSCYPRYPGVRCVCRDNWKGSNRPIVDINIKDYSIVSRYVCSGLVGDTPRKNDSSSSSHCLDPNNEEGGHGVKGWAFDDGNDVWMGRTISEKSRSGYETFKVIEGWSNPNSKLQINRQVIVDRGNRSGYSGIFSVEGKSCINRCFYVELIRGRKEETEVLWTSNSIVVFCGTSGTYGTGSWPDGADINLMPI

SEQ ID NO: 16080 - protein, 469 aa, synthetic construct
  REGION 1..469: note = neuraminidase__InfluenzaA__ABV30275
MNPNQKIITIGSVSLTISTICFFMQTAILITTVTLHFKQYEFNSTPNNQVMLCEPTIIERNITEIVYLTNTTIEKEICPKLAEYRNWSKPQCDITGFAPFSKDNSIRLSAGGDIWVTREPYVSCDPDKCYQFALGQGTTLNNVHSNDTVRDRTPYRTLLMNELGVPFHLGTKQVCIAWSSSSCHDGKAWLHVCITGDDKNATASFIYNGRLVDSIVSWSKEILRTQESECVCINGTCTVVMTDGSASGKADTKILFIEEGKIVHTSTLSGSAQHVEECSCYPRYPGVRCVCRDNWKGSNRPIVDINIKDHSIVSSYVCSGLVGDTPRKNDSSSSSHCLDPNNEEGGHGVKGWAFDDGNDVWMGRTISEKSRLGYETFKVIEGWSNPKSKLQINRQVIVDRGNRSGYSGIFSVEGKSCINRCFYVELIRGRKEETEVLWTSNSIVVFCGTSGTYGTGSWPDGADINLMPI

SEQ ID NO: 16081 - protein, 470 aa, synthetic construct; identical to SEQ ID NO: 16071
  REGION 1..470: note = neuraminidase__InfluenzaA__ABV30297

SEQ ID NO: 16082 - protein, 470 aa, synthetic construct
  REGION 1..470: note = neuraminidase__InfluenzaA__ABV30308
MNPNQKIITIGSISIAIGIISLMLQIGNIISIWASHSIQTGSQNHTGICNQRIITYENSTWVNHTYVSINNTNVVAGKDKTSVTLAGNSSLCSISGWAIYTKDNSIRIGSKGDVFVIREPFISCSHLECRTFFLTQGALLNDKHSNGTVKDRSPYRALMSCPLGEAPSPYNSKFESVAWSASACHDGMGWLTIGISGPDNGAVAVLKYNGIITETIKSWKKRILRTQESECVCLNGSCFTIMTDGPSNGAASYKIFKIEKGKVTKSIELNAPNFHYEECSCYPDTGTVMCVCRDNWHGSNRPWVSFNQNLDYQIGYICSGVFGDNPRPKDGKGSCNPVTVDGADGVKGFSYKYGNGVWIGRTKSNRLRKGFEMIWDPNGWTDTDSDFSVKQDVVAITDWSGYSGSFVQHPELTGLDCIRPCFWVELVRGLPRENTTIWTSGSSISFCGVDSDTANWSWPDGAELPFTIDK

SEQ ID NO: 16083 - protein, 470 aa, synthetic construct
  REGION 1..470: note = neuraminidase__InfluenzaA__ABV30319
MNPNQKIITIGSISIAIGIISLMLQIGNIVSIWASHSIQTGSQNHTGICNQRIITYENSTWVNHTYVSINNTNVVAGKDKTSVTLAGNSSLCSISGWAIYTKDNSIRIGSKGDVFVIREPFISCSHLECRTFFLTQGALLNDKHSNGTVKDRSPYRALMSCPLGEAPSPYNSKFESVAWSASACHDGMGWLTIGISGPDNGAVAVLKYNGIITETIKSWKKRILRTQESECVCVNGSCFTIMTDGPSNGAASYKIFKIEKGKVTKSIELNAPNFHYEECSCYPDTGTVMCVCRDNWHGSNRPWVSFNQNLDYQIGYICSGVFGDNPRPKDGKGSCNPVTVDGADGVKGFSYKYGNGVWIGRTKSNRLRKGFEMIWDPNGWTDTDSDFSVKQDVVAITDWSGYSGSFVQHPELTGLDCIRPCFWVELVRGLPRENTTIWTSGSSISFCGVDSDTANWSWPDGAELPFTIDK

SEQ ID NO: 16084 - protein, 470 aa, synthetic construct; identical to SEQ ID NO: 16071
  REGION 1..470: note = neuraminidase__InfluenzaA__ABV30330

SEQ ID NO: 16085 - protein, 470 aa, synthetic construct; identical to SEQ ID NO: 16030
  REGION 1..470: note = neuraminidase__InfluenzaA__ABV30341

SEQ ID NO: 16086 - protein, 470 aa, synthetic construct; identical to SEQ ID NO: 16030
  REGION 1..470: note = neuraminidase__InfluenzaA__ABV30363

SEQ ID NO: 16087 - protein, 470 aa, synthetic construct; identical to SEQ ID NO: 16030
  REGION 1..470: note = neuraminidase__InfluenzaA__ABV30374

SEQ ID NO: 16088 - protein, 469 aa, synthetic construct
  REGION 1..469: note = neuraminidase__InfluenzaA__ABV30385
MNPNQKIITIGSVSLTISTICFFMQIAILITTVTLHFKQYEFSPPPNNQVMLCEPTIIERNITEIVYLTNTTIEKEICPKLAEYRNWSKPQCDITGFAPFSKDNSIRLSAGGDIWVTREPYVSCDPDKCYQFALGQGTTLNNVHSNDTVHDRTPYRTLLMNELGVPFHLGTKQVCIAWSSSSCHDGKAWLHVCVTGDDKNATASFIYNGRLVDSIVSWSKEILRTQESECVCINGTCTVVMTDGSASGKADTKILFIEEGKIVHTSTLSGSAQHVEECSCYPRYPGVRCVCRDNWKGSNRPIVDINIKDYSIVSRYVCSGLVGDTPRKNDSSSSSHCLDPNNEEGGHGVKGWAFDDGNDVWMGRTISEKSRSGYETFKVIEGWSNPNSKLQINRQVIVDRGNRSGYSGIFSVEGKSCINRCFYVELIRGRKEETEVLWTSNSIVVFCGTSGTYGTGSWPDGADINLMPI

SEQ ID NO: 16089 - protein, 469 aa, synthetic construct
  REGION 1..469: note = neuraminidase__InfluenzaA__ABV30396
MNPNQKIITIGSVSLTISTICFFMQIAILITTVTLHFKQYEFNSSPNNQVMLCEPTIIERNITEIVYLTNTTIEKEICPKLSEYRNWSKPQCNITGFAPFSKDNSIRLSAGGDIWVTREPYVSCDPDKCYQFALGQGTTLNNVHSNDTVHDRTPYRTLLMNELGVPFHLGTKQVCIAWSSSSCHDGKAWLHVCVTGDDKNATASFIYNGRLVDSIVSWSKEILRTQESECVCINGTCTVVMTDGSASGKADTKILFIEEGKIVHTSTLSGSAQHVEECSCYPRYPGVRCVCRDNWKGSNRPIVDINIKDYSIVSSYVCSGLVGDTPRKNDSSSSSHCLDPNNEEGGHGVKGWAFDDGNDVWMGRTISEKLRSGYETFKVIEGWSNPNSKLQINRQVIVDRGNRSGYSGIFSVEGKSCINRCFYVELIRGRKEENEVLWTSNSIVVFCGTSGTYGTGSWPDGADINLMPI

SEQ ID NO: 16090 - protein, 469 aa, synthetic construct
  REGION 1..469: note = neuraminidase__InfluenzaA__ABV30407
MNPNQKIITIGSVSLTISTICFFMQIAILITTVTLHFKQYEFNSPPNNQVMLCEPTIIERNITEIVYLTNTTIEKEICPKLAEYRNWSKPQCDITGFAPFSKDNSIRLSAGGDIWVTREPYVSCDPDKCYQFALGQGTTLNNVHSNDTVRDRTPYRTLLMNELGVPFHLGTKQVCIAWSSSSCHDGKAWLHVCITGDDKNATASFIYNGRLVDSIVSWSKEILRTQESECVCINGTCTVVMTDGSASGKADTKILFIEEGKIVHTSTLSGSAQHVEECSCYPRYPGVRCVCRDNWKGSNRPIVDINIKDHSIVSSYVCSGLVGDTPRKNDSSSSGHCLDPNNEEGGHGVKGWAFDDGNDVWMGRTISEKSRLGYETFKVIEGWSNPKSKLQINRQVIVDRGNRSGYSGIFSVEGKSCINRCFYVELIRGRKEETEVLWTSNSIVVFCGTSGTYGTGSWPDGADINLMPI

SEQ ID NO: 16091 - protein, 469 aa, synthetic construct
  REGION 1..469: note = neuraminidase__InfluenzaA__ABV30418
MNPNQKIITIGSVSLTISTICFFMQIAILITTVTLHFKQYEFSSLPNNQVMLCEPTIIERNITEIVYLTNTTIEKEICPKLAEYRNWSKPQCDITGFAPFSKDNSIRLSAGGDIWVTREPYVSCDPDKCYQFALGQGTTLNNVHSNDTVHDRTPYRTLLMNELGVPFHLGTKQVCIAWSSSSCHDGKAWLHVCVTGDDKNATASFIYNGRLVDSIVSWSKEILRTQESECVCINGTCTVVMTDGSASGKADTKILFIEEGKIVHTSTLSGSAQHVEECSCYPRYPGVRCVCRDNWKGSNRPIVDINIKDYSIVSRYVCSGLVGDTPRKNDSSSSSHCLDPNNEEGGHGVKGWAFDDGNDVWMGRTISEKSRSGYETFKVIEGWSNPNSKLQINRQVIVDRGNRSGYSGIFSVEGKSCINRCFYVELIRGRREETEVLWTSNSIVVFCGTSGTYGTGSWPDGADINLMPI

SEQ ID NO: 16092 - protein, 469 aa, synthetic construct; identical to SEQ ID NO: 16057
  REGION 1..469: note = neuraminidase__InfluenzaA__ABV30429

SEQ ID NO: 16093 - protein, 469 aa, synthetic construct; identical to SEQ ID NO: 16057
  REGION 1..469: note = neuraminidase__InfluenzaA__ABV30440

SEQ ID NO: 16094 - protein, 469 aa, synthetic construct; identical to SEQ ID NO: 16057
  REGION 1..469: note = neuraminidase__InfluenzaA__ABV30451

SEQ ID NO: 16095 - protein, 470 aa, synthetic construct; identical to SEQ ID NO: 16030
  REGION 1..470: note = neuraminidase__InfluenzaA__ABV30462

SEQ ID NO: 16096 - protein, 469 aa, synthetic construct; identical to SEQ ID NO: 16057
  REGION 1..469: note = neuraminidase__InfluenzaA__ABV30473

SEQ ID NO: 16097 - protein, 469 aa, synthetic construct
  REGION 1..469: note = neuraminidase__InfluenzaA__ABV30484
MNPNQKIITIGSVSLTISTICFFMQIAILITTVTLHFKQYEFNSPPNNQVMLCEPTIIERNITEIVYLTNTTIEKEICPKLAEYRNWSKPQCDITGFAPFSKDNSIRLSAGGDIWVTREPYVSCDPDKCYQFALGQGTTLNNVHSNDTVHDRTPYRTLLMNELGVPFHLGTKQVCIAWSSSSCHDGKAWLHVCVTGDDKNATASFIYNGRLVDSIVSWSKEILRTQESECVCINGTCTVVMTDGSASGKADTKILFIEEGKIVHTSTLSGSAQHVEECSCYPRYPGVRCVCRDNWKGSNRPIVDINIKDYSIVSRYVCSGLVGDTPRKNDSSSNSHCLDPNNEEGGHGVKGWAFDDGNDVWMGRTISEKSRSGYETFKVIEGWSNPNSKLQINRQVIVDRGNRSGYSGIFSVEGKSCINRCFYVELIRGRKEETEVLWTSNSIVVFCGTSGTYGTGSWPDGADINLMPI

SEQ ID NO: 16098 - protein, 470 aa, synthetic construct; identical to SEQ ID NO: 16069
  REGION 1..470: note = neuraminidase__InfluenzaA__ABV30495

SEQ ID NO: 16099 - protein, 470 aa, synthetic construct; identical to SEQ ID NO: 16030
  REGION 1..470: note = neuraminidase__InfluenzaA__ABV30506

SEQ ID NO: 16100 - protein, 469 aa, synthetic construct; identical to SEQ ID NO: 16066
  REGION 1..469: note = neuraminidase__InfluenzaA__ABV30517

SEQ ID NO: 16101 - protein, 470 aa, synthetic construct
  REGION 1..470: note = neuraminidase__InfluenzaA__ABV30528
MNSNQKIITIGSISIAIGIISLMLQIGNIISMWASHSIQTGSQNHTGICNQRIITYENSTWVNHTYVNINNTNVVAGKDKTSVTLAGNSSLCSISGWAIYTKDNSIRIGSKGDVFVIREPFISCSHLECRTFFLTQGALLNDKHSNGTVKDRSPYRALMSCPLGEAPSPYNSKFESVAWSASACHDGMGWLTIGISGPDNGAVAVLKYNGIITETIKSWKKRILRTQESECVCVNGSCFTIMTDGPSNGAASYKIFKIEKGKVTKSIELNAPNFHYEECSCYPDTGTVMCVCRDNWHGSNRPWVSFNQNLDYQVGYICSGVFGDNPRPKDGKGSCNPMTVDGADGVKGFSYKYGNGVWIGRTKSNKLRKGFEMIWDPNGWTDTDSDFSVKQDVVAITDWSGYSGSFVQHPELTGLDCIRPCFWVELVRGLPRENATIWTSGSSISFCGVDSDTANWSWPDGAELPFTIDK

SEQ ID NO: 16102 - protein, 470 aa, synthetic construct; identical to SEQ ID NO: 16030
  REGION 1..470: note = neuraminidase__InfluenzaA__ABV30539

SEQ ID NO: 16103 - protein, 470 aa, synthetic construct; identical to SEQ ID NO: 16030
  REGION 1..470: note = neuraminidase__InfluenzaA__ABV30561

SEQ ID NO: 16104 - protein, 470 aa, synthetic construct; identical to SEQ ID NO: 16030
  REGION 1..470: note = neuraminidase__InfluenzaA__ABV30572

SEQ ID NO: 16105 - protein, 470 aa, synthetic construct; identical to SEQ ID NO: 16030
  REGION 1..470: note = neuraminidase__InfluenzaA__ABV30583

SEQ ID NO: 16106 - protein, 470 aa, synthetic construct; identical to SEQ ID NO: 16030
  REGION 1..470: note = neuraminidase__InfluenzaA__ABV30594

SEQ ID NO: 16107 - protein, 470 aa, synthetic construct
  REGION 1..470: note = neuraminidase__InfluenzaA__ABV30605
MNPNQKIITIGSISIAIGIISLMLQIGNIISIWASHSIQTGSQNHTGICNQRIITYENSTWVNHTYVSINNTNVVVGKDKTSVTLAGNSSLCSISGWAIYTKDNSIRIGSKGDVFVIREPFISCSHLECRTFFLTQGALLNDKHSNGTVKDRSPYRALMSCPLGEAPSPYNSKFESVAWSASACHDGMGWLTIGISGPDNGAVAVLKYNGIITETIKSWKKRILRTQESECVCVNGSCFTIMTDGPSNGAASYKIFKIEKGKVTKSIELNAPNFHYEECSCYPDTGTVMCVCRDNWHGSNRPWVSFNQNLDYQIGYICSGVFGDNPRPKDGKGSCNPVTVDGADGVKGFSYKYGNGVWIGRTKSNRLRKGFEMIWDPNGWTDTDSDFSVKQDVVAITDWSGYSGSFVQHPELTGLDCIRPCFWVELVRGLPRENTTIWTSGSSISFCGVDSDTANWSWPDGAELPFTIDK

SEQ ID NO: 16108 - protein, 470 aa, synthetic construct; identical to SEQ ID NO: 16030
  REGION 1..470: note = neuraminidase__InfluenzaA__ABV30616

SEQ ID NO: 16109 - protein, 470 aa, synthetic construct; identical to SEQ ID NO: 16030
  REGION 1..470: note = neuraminidase__InfluenzaA__ABV30627

SEQ ID NO: 16110 - protein, 469 aa, synthetic construct
  REGION 1..469: note = neuraminidase__InfluenzaA__ABV30649
MNPNQKIITIGSVSLTISTICFFMQIAILITTVTLHFKQYEFNSPPNNQVMLCEPTIIERNITEIVYLTNTTIEKEICPKLAEYRNWSKPQCDITGFAPFSKDNSIRLSAGGDIWVTREPYVSCDPDKCYQFALGQGTTLNNVHSNDTVRDRTPYRTLLMNELGVPFHLGTKQVCIAWSSSSCHDGKAWLHVCITGDDKNATASFIYNGRLVDSIVSWSKEILRTQESECVCINGTCTVVMTDGSASGNADTKILFIEEGKIVHTSTLSGSAQHVEECSCYPRYPGVRCVCRDNWKGSNRPIVDINIKDHSIVSSYVCSGLVGDTPRKNDSSSSSHCLDPNNEEGGHGVKGWAFDDGNDVWMGRTISEKSRLGYETFKVIEGWSNPKSKLQINRQVIVDRGNRSGYSGIFSVEGKSCINRCFYVELIRGRKEETEVLWTSNSIVVFCGTSGTYGTGSWPDGADINLMPI

SEQ ID NO: 16111 - protein, 469 aa, synthetic construct; identical to SEQ ID NO: 15884
  REGION 1..469: note = neuraminidase__InfluenzaA__ABV30660

SEQ ID NO: 16112 - protein, 470 aa, synthetic construct
  REGION 1..470: note = neuraminidase__InfluenzaA__ABV45852
MNPNQKIITIGSISIAIGIISLMLQIGNIISIWASHSIQTGSQNHTGICNQRIITYENSTWVNHTYVNINNTNVVAGKDKTSVTLAGNSSLCSISGWAIYTKDNSIRIGSKGDVFVIREPFISCSHLECRTFFLTQGALLNDKHSNGTVKDRSPYRALMSCPLGEAPSPYNSKFESVAWSASACHDGMGWLTIGISGPDNGAVAVLKYNGIITETIKSWKKRILRTQESECVCVNGSCFTIMTDGPNNGAASYKIFKIEKGKVTKSIELNAPNFHYEECSCYPDTGTVMCVCRDNWHGSNRPWVSFNQNLDYQIGYICSGVFGDNPRPKDGEGSCNPVTVDGADGVKGFSYKYGNGVWIGRTKSNRLRKGFEMIWDPNGWTDTDSNFSVKQDVVAITDWSGYSGSFVQHPELTGLDCIRPCFWVELVRGLPRENTTIWTSGSSISFCGVNSDTANWSWPDGAELPFTIDK

SEQ ID NO: 16113 - protein, 469 aa, synthetic construct; identical to SEQ ID NO: 15884
  REGION 1..469: note = neuraminidase__InfluenzaA__ABV45863

SEQ ID NO: 16114 - protein, 470 aa, synthetic construct
  REGION 1..470: note = neuraminidase__InfluenzaA__ABV45874
MNPNQKIITIGSISIAIGIISLMLQIGNIISIWASYSIQTGSQNHTGICNQRIITYENSTWVNHTYVSINNTNVVAGKDKTSVTLAGNSSLCSISGWAIYTKDNSIRIGSKGDVFVIREPFISCSHLECRTFFLTQGALLNDKHSNGTVKDRSPYRALMSCPLGEAPSPYNSKFESVAWSASACHDGMGWLTIGISGPDNGAVAVLKYNGIITETIKSWKKRILRTQESECVCVNGSCFTIMTDGPSNGAASYKIFKIEKGKVTKSIELNAPNFHYEECSCYPDTGTVMCVCRDNWHGSNRPWVSFNQNLDYQIGYICSGVFGDNPRPKDGKGSCNPVTVDGADGVKGFSYKYGNGVWIGRTKSNRLRKGFEMIWDPNGWTDTDSDFSVKQDVVAITDWSGYSGSFVQHPELTGLDCIRPCFWVELVRGLPRENTTIWTSGSSISFCGVDSDTANWSWPDGAELPFTIDK

SEQ ID NO: 16115 - protein, 470 aa, synthetic construct; identical to SEQ ID NO: 16030
  REGION 1..470: note = neuraminidase__InfluenzaA__ABV45885

SEQ ID NO: 16116 - protein, 470 aa, synthetic construct; identical to SEQ ID NO: 16043
  REGION 1..470: note = neuraminidase__InfluenzaA__ABV45896

SEQ ID NO: 16117 - protein, 470 aa, synthetic construct; identical to SEQ ID NO: 16030
  REGION 1..470: note = neuraminidase__InfluenzaA__ABV45918

SEQ ID NO: 16118 - protein, 470 aa, synthetic construct
  REGION 1..470: note = neuraminidase__InfluenzaA__ABV45929
MNPNQKIITIGSISIAIGIISLMLQIGNIISMWASHSIQTGSQNHTGICNQRIITYENSTWVNHTYVNINNTNVVTGKDKTSVTLAGNSSLCSISGWAIYTKDNSIRIGSKGDVFVIREPFISCSHLECRTFFLTQGALLNDKHSNGTVKDRSPYRALMSCPLGEAPSPYNSKFESVAWSASACHDGMGWLTIGISGPDNGAVAVLKYNGIITETIKSWKKRILRTQESECVCVNGSCFTIMTDGPSDGAASYKIFKIEKGKVTKSIELNAPNFHYEECSCYPDTGTVMCVCRDNWHGSNRPWVSFNQNLDYQIGYICSGVFGDNPRPKDGKGSCNPVTVDGADGVKGFSYKYGNGVWIGRTKSNKLRKGFEMIWDPNGWTDTDNDFSVKQDVVAITDWSGYSGSFVQHPELTGLDCIRPCFWVELVRGLPRENATIWTSGSSISFCGVDSDTANWSWPDGAELPFTIDK

SEQ ID NO: 16119 - protein, 470 aa, synthetic construct
  REGION 1..470: note = neuraminidase__InfluenzaA__ABV45940
MNPNQKIITIGSISIAIGIISLMLQIGNIISIWASHSIQTGSQNHTGICNQRIIRYENSTWVNHTYVNINNTNVVAGKDKTSVTLAGNSSLCSISGWAIYTKDNSIRIGSKGDVFVIREPFISCSHLECRTFFLTQGALLNDKHSNGTVKDRSPYRALMSCPLGEAPSPYNSKFESVAWSASACHDGMGWLTIGISGPDNGAVAVLKYNGIITETIKSWKKQILRTQESECVCVNGSCFTIMTDGPSNGAASYKIFKIEKGKVTKSIELNAPNFHYEECSCYPDTGTVMCVCRDNWHGSNRPWVSFNQSLDYQVGYICSGVFGDNPRPKDGKGSCNPMTVDGADGVKGFSYKYGNGVWIGRTKSNKLRKGFEMIWDPNGWTDTDSDFSVKQDVVAITDWSGYSGSFVQHPELTGLDCIRPCFWVELVRGLPRENTTIWTSGSSISFCGVDSDTANWSWPDGAELPFTIDK

SEQ ID NO: 16120 - protein, 470 aa, synthetic construct; identical to SEQ ID NO: 16056
  REGION 1..470: note = neuraminidase__InfluenzaA__ABV45951

SEQ ID NO: 16121 - protein, 469 aa, synthetic construct
  REGION 1..469: note = neuraminidase__InfluenzaA__ABV45973
MNPNQKIITIGSVSLTISTICFFMQIAILITTVTLHFKQYEFNSPPNNQVMLCEPTIIERNITEIVYLTNTTIEKEICPKLAEYRNWSKPQCDITGFAPFSKDNSIRLSAGGDIWVTREPYVSCDPDKCYQFALGQGTTLNNVHSNDTVRDRTPYRTLLMNELGVPFHLGTKQVCIAWSSSSCHDGKAWLHVCITGDDKNATASFIYNGRLVDSIVSWSKEILRTQESECVCINGTCTVVMTDGSASGEADTKILFIEEGKIVHTSTLSGSAQHVEECSCYPRYPGVRCVCRDNWKGSNRPIVDINIKDHSIVSSYVCSGLVGDTPRKNDSSSSSHCLDPNNEEGGHGVKGWAFDDGNDVWMGRTISEKSRLGYETFKVIEGWSNPKSKLQINRQVIVDRGNRSGYSGIFSVEGKSCINRCFYVELIRGRKEETDVLWTSNSIVVFCGTSGTYGTGSWPDGADINLMPI

SEQ ID NO: 16122 - protein, 469 aa, synthetic construct
  REGION 1..469: note = neuraminidase__InfluenzaA__ABV45984
MNPNQKIITIGSVSLTISTICFFMQIAILVTTVTLHFKQYEFNSPPNNQVMLCEPTIIERNITEIVYLTNTTIEKEICPKLAEYRNWSKPQCDITGFAPFSKDNSIRLSAGGDIWVTREPYVSCDPDKCYQFALGQGTTLNNVHSNDTVRDRTPYRTLLMNELGVPFHLGTKQVCIAWSSSSCHDGKAWLHVCITGDDKNATASFIYNGRLVDSIVSWSKEILRTQESECVCINGTCTVVMTDGSASGKADTKILFIEEGKIVHTSTLSGSAQHVEECSCYPRYPGVRCVCRDNWKGSNRPIVDINIKDHSIVSSYVCSGLVGDTPRKNDSSSSSHCLDPNNEEGGHGVKGWAFDDGNDVWMGRTISEKSRLGYETFKVIEGWSNPKSKLQINRQVIVDRGNRSGYSGIFSVEGKSCINRCFYVELIRGRKEETEVLWTSNSIVVFCGTSGTYGTGSWPDGADINLMPI

SEQ ID NO: 16123 - protein, 469 aa, synthetic construct; identical to SEQ ID NO: 15884
  REGION 1..469: note = neuraminidase__InfluenzaA__ABV45995

SEQ ID NO: 16124 - protein, 470 aa, synthetic construct; identical to SEQ ID NO: 16043
  REGION 1..470: note = neuraminidase__InfluenzaA__ABV82554

SEQ ID NO: 16125 - protein, 469 aa, synthetic construct; identical to SEQ ID NO: 16066
  REGION 1..469: note = neuraminidase__InfluenzaA__ABV82565

SEQ ID NO: 16126 - protein, 469 aa, synthetic construct; identical to SEQ ID NO: 16066
  REGION 1..469: note = neuraminidase__InfluenzaA__ABW36171

SEQ ID NO: 16127 - protein, 470 aa, synthetic construct; identical to SEQ ID NO: 16082
  REGION 1..470: note = neuraminidase__InfluenzaA__ABW36193

SEQ ID NO: 16128 - protein, 470 aa, synthetic construct; identical to SEQ ID NO: 16030
  REGION 1..470: note = neuraminidase__InfluenzaA__ABW36204

SEQ ID NO: 16129 - protein, 470 aa, synthetic construct
  REGION 1..470: note = neuraminidase__InfluenzaA__ABW36215
MNPNQKIITIGSISIAIGIISLMLQIGNIISIWASHSIQTGSQNHTGICNQRIITYENSTWVNHTYVNINNTNVVAGKDKTSVTLAGNSSLCSISGWAIYTKDNSIRIGSKGDVFVIREPFISCSHLECRTFFLTQGALLNDKHSNGTVKDRSPYRALMSCPLGEAPSPYNSKFESVAWSASACHDGKGWLTIGISGPDNGAVAVLKYNGIITETIKSWNKQILRTQESECVCVNGSCFTIMTDGPSNGAASYKIFKIEKGKVTKSIELNAPNFHYEECSCYPDTGTVMCVCRDNWHGSNRPWVSFNQNLDYQIGYICSGVFGDNPRPKDGRGSCNPVTVDGADGVKGFSYKYGNGVWIGRTKSNRLRKGFEMIWDPNGWTDTDSHFSVKQDVVAITDWSGYSGSFVQHPELTGLDCIKPCFWVELVRGLPRENTTIWTSGSSISFCGVDSDTANWSWPDGAELPFIIDK

SEQ ID NO: 16130 - protein, 470 aa, synthetic construct; identical to SEQ ID NO: 16030
  REGION 1..470: note = neuraminidase__InfluenzaA__ABW36226

SEQ ID NO: 16131 - protein, 470 aa, synthetic construct
  REGION 1..470: note = neuraminidase__InfluenzaA__ABW36237
MNPNQKIITIGSISITIGIISLMLQIGNIISIWASHSIQTGSQNHTGICNQRIITYENSTWVNHTYVNINNTNVVAGKDKTSVTLAGNSSLCSISGWAIYTKDNSIRIGSKGDVFVIREPFISCSHLECRTFFLTQGALLNDKHSNGTVKDRSPYRALMSCPLGEAPSPYNSKFESVAWSASACHDGMGWLTIGISGPDNGAVAVLKYNGIITETIKSWKKRILRTQESECVCVNGSCFTIMTDGPSNGAASYKIFKIEKGKVTKSIELNAPNFHYEECSCYPDTGTVMCVCRDNWHGSNRPWVSFNQNLDYQVGYICSGVFGDNPRPKDGKGSCNPMTVDGADGVKGFSYKYGNGVWIGRTKSNKLRKGFEMIWDPNGWTDTDSDFSVKQDVVAITDWSGYSGSFVQHPELTGLDCIRPCFWVELVRGLPRENTTIWTSGSSISFCGVDSDTANWSWPDGAELPFTIDK

SEQ ID NO: 16132 - protein, 470 aa, synthetic construct; identical to SEQ ID NO: 16030
  REGION 1..470: note = neuraminidase__InfluenzaA__ABW36248

SEQ ID NO: 16133 - protein, 470 aa, synthetic construct
  REGION 1..470: note = neuraminidase__InfluenzaA__ABW36259
MNPNQKIITIGSISIAIGIISLMLQIGNIISIWASHSIQTGSQNNTGICNQRIITYENSTWVNHTYVNINNTNVVAGKDKTSVTLAGNSSLCSISGWAIYTKDNSIRIGSKGDVFVIREPFISCSHLECRTFFLTQGALLNDKHSNGTVKDRSPYRALMSCPLGEAPSPYNSKFESVAWSASACHDGMGWLTIGISGPDNGAVAVLKYNGIITGTIKSWKKQILRTQESECVCMNGSCFTIMTDGPSNRAASYKIFKIEKGKVTKSIELNAPNFHYEECSCYPDTGIVMCVCRDNWHGSNRPWVSFNQNLDYQIGYICSGVLGDNPRPEDGEGSCNPVTVDGADGVKGFSYKYDNGVWIGRTKSNRLRKGFEMIWDPNGWTNTDSDFSVKQDVVAITDWSGYSGSFVQHPELTGLDCIRPCFWVELVRGLPRENTTIWTSGSSISFCGVSSDTANWSWPDGAELPFTIDK

SEQ ID NO: 16134 - protein, 470 aa, synthetic construct; identical to SEQ ID NO: 16030
  REGION 1..470: note = neuraminidase__InfluenzaA__ABW36281

SEQ ID NO: 16135 - protein, 470 aa, synthetic construct; identical to SEQ ID NO: 16030
  REGION 1..470: note = neuraminidase__InfluenzaA__ABW36292

SEQ ID NO: 16136 - protein, 470 aa, synthetic construct; identical to SEQ ID NO: 16043
  REGION 1..470: note = neuraminidase__InfluenzaA__ABW36303

SEQ ID NO: 16137 - protein, 470 aa, synthetic construct
  REGION 1..470: note = neuraminidase__InfluenzaA__ABW36314
MNPNQKIITIGSICMAIGIISLILQIGNIISIWVSHSIQTGSQNHTGICNQRIITYENSTWVNQTYVNISNTNVVAGKDTTSMTLAGNSSLCPIRGWAIYSKDNSIRIGSKGDVFVIREPFISCSHLECRTFFLTQGALLNDKHSNGTVKDRSPYRALMSCPIGEAPSPYNSRFESVAWSASACHDGMGWLTIGISGPDDGAVAVLKYNGIITETIKSWRKQILRTQESECVCVNGSCFTIMTDGPSDGQASYRIFKIEKGKITKSIELDAPNFHYEECSCYPDTGTVMCVCRDNWHGSNRPWVSFNQNLDYQIGYICSGVFGDNPRPKDGKGSCDPVNVDGADGVKGFSYRYGNGVWIGRTKSNSSRKGFEMIWDPNGWTDTDSNFLVKQDVVAMTDWSGYSGSFVQHPELTGLDCMRPCFWVELIRGRPREKTTIWTSGSSISFCGVNSDTVNWSWPDGAELPFTIDK

SEQ ID NO: 16138 - protein, 469 aa, synthetic construct
  REGION 1..469: note = neuraminidase__InfluenzaA__ABW38366
MNPNQKIITIGSVSLTISTICFFMQIAILITTVTLHFKQYEFNSPPNNQVMLCEPTIIERNITEIVYLTNTTIEKEICPKLAEYRNWSKPQCNITGFAPFSKDNSIRLSAGGDIWVTREPYVSCDPDKCYQFALGQGTTLNNVHSNDTVHDRTPYRTLLMNELGVPFHLGTKQVCIAWSSSSCHDGKAWLHVCVTGDDKNATASFIYNGRLVDSIASWSKEILRTQESECVCINGTCTVVMTDGSASGKADTKILFIEEGKIVHTSTLSGSAQHVEECSCYPRYPGVRCVCRDNWKGSNRPIVDINIKDYSIVSSYVCSGLVGDTPRKNDSSSSSHCLDPNNEEGGHGVKGWAFDDGNDVWMGRTISEKLRSGYETFKVIEGWSNPNSKLQINRQVIVDRGNRSGYSGIFSVEGKSCINRCFYVELIRGRKEETEVLWTSNSIVVFCGTSGTYGTGSWPDGADINLMPI

SEQ ID NO: 16139 - protein, 470 aa, synthetic construct; identical to SEQ ID NO: 16129
  REGION 1..470: note = neuraminidase__InfluenzaA__ABW39780

SEQ ID NO: 16140 - protein, 470 aa, synthetic construct
  REGION 1..470: note = neuraminidase__InfluenzaA__ABW39809
MNPNQKIITIGSISIAIGIISLMLQIGNIISIWASHSIQTGSQNHTGICNQRIITYENSTWVNHTYVSINNTNVVAGKDKTLVTLAGNSSLCSISGWAIYTKDNSIRIGSKGDVFVIREPFISCSHLECRTFFLTQGALLNDKHSNGTVKDRSPYRALMSCPLGEAPSPYNSKFESVAWSASACHDGMGWLTIGISGPDNGAVAVLKYNGIITETIKSWKKRILRTQESECVCVNGSCFTIMTDGPSNGAASYKIFKIEKGKVTKSIELNAPNFHYEECSCYPDTGTVMCVCRDNWHGSNRPWVSFNQNLDYQIGYICSGVFGDNPRPKDGKGSCNPVTVDGADGVKGFSYKYGNGVWIGRTKSNRLRKGFEMIWDPNGWTDTDSDFSVKQDVVAITDWSGYSGSFVQHPELTGLDCIRPCFWVELVRGLPRENTTIWTSGSSISFCGVDSDTANWSWPDGAELPFTIDK

SEQ ID NO: 16141 - protein, 470 aa, synthetic construct; identical to SEQ ID NO: 16043
  REGION 1..470: note = neuraminidase__InfluenzaA__ABW39820

SEQ ID NO: 16142 - protein, 470 aa, synthetic construct
  REGION 1..470: note = neuraminidase__InfluenzaA__ABW39831
MNPNQKIITIGSISIAIGIISLMLQIGNIISIWASHSIQTGSQNHTGICNQRIITYENSTWVNHTYVNINNTNVVAGKDKTPVTLVGNSSLCSISGWAIYTKDNSIRIGSKGDVFVIREPFISCSHLECKTFFLTQGALLNDKHSNGTVKDRSPYRALMSCPLGEAPSPYNSKFESVAWSASACHDGIGWLTIGISGPDNGAVAVLKYNGIITGTIKSWKKQILRTQESECVCMNGSCFTIMTDGPSNGAASYKIFKIEKGKVTKSMELNAPNFHYEECSCYPDTGTVMCVCRDNWHGSNRPWVSFNQNLDYQIGYICSGVFGDNPRPKDGEGSCNPVTVDGANGVKGFSYKYGNGVWIGRTKSNRIRKGFEMIWDPNGWTNTDSDFSVKQDIVAITDWSGYSGSFVQHPELTGLDCIRPCFWVELVRGLPRENTTIWTSGSSISFCGVNGDIANWSWPDGAELPFTIDK

SEQ ID NO: 16143 - protein, 470 aa, synthetic construct; identical to SEQ ID NO: 16056
  REGION 1..470: note = neuraminidase__InfluenzaA__ABW39842

SEQ ID NO: 16144 - protein, 470 aa, synthetic construct; identical to SEQ ID NO: 16030
  REGION 1..470: note = neuraminidase__InfluenzaA__ABW39864

SEQ ID NO: 16145 - protein, 469 aa, synthetic construct; identical to SEQ ID NO: 16066
  REGION 1..469: note = neuraminidase__InfluenzaA__ABW39875

SEQ ID NO: 16146 - protein, 470 aa, synthetic construct
  REGION 1..470: note = neuraminidase__InfluenzaA__ABW39886
MNPNQKIITIGSISIAIGIISLILQIGNIISIWASHSIQTRNQNHTGICNQRIITYENSTWVNHTYVSINNTNVVAGKDKTSVTLAGNSSLCSISGWAIYTKDNSIRIGSKGDVFVIREPFISCSHLECRTFFLTQGALLNDKHSNGTVKDRSPYRALMSCPLGEAPSPYNSKFESVAWSASACHDGMGWLTIGISGPDNGAVAVLKYNGIITETIKSWKKRILRTQESECVCVNGSCFTIMTDGPSNGAASYKIFKIEKGKVTKSIELNAPNFHYEECSCYPDTGTVMCVCRDNWHGSNRPWVSFNQNLDYQIGYICSGVFGDNPRPKDGKGSCNPVTVDGADGVKGFSYKYGNGVWIGRTKSNRLRKGFEMIWDPNGWTDTDSDFSVKQDVVAITDWSGYSGSFVQHPELTGLDCIRPCFWVELVRGLPRENTTIWTSGSSISFCGVDSDTANWSWPDGAELPFTIDK

SEQ ID NO: 16147 - protein, 470 aa, synthetic construct; identical to SEQ ID NO: 16030
  REGION 1..470: note = neuraminidase__InfluenzaA__ABW39897

SEQ ID NO: 16148 - protein, 470 aa, synthetic construct
  REGION 1..470: note = neuraminidase__InfluenzaA__ABW39908
MNPNQKIITIGSISIAIGITSLMLQIGNIISIWASHSIQTGSQNHTGICNQRIITYENSTWVNHTYVSINNTNVVAGKDKTSVTLAGNSSLCSISGWAIYTKDNSIRIGSKGDVFVIREPFISCSHLECRTFFLTQGALLNDKHSNGTVKDRSPYRALMSCPLGEAPSPYNSKFESVAWSASACHDGMGWLTIGISGPDNGAVAVLKYNGIITETIKSWKKRILRTQESECVCVNGSCFTIMTDGPSNGAASYKIFKIEKGKVTKSIELNAPNFHYEECSCYPDTGTVMCVCRDNWHGSNRPWVSFNQNLDYQIGYICSGVFGDNPRPKDGKGSCNPVTVDGADGVKGFSYKYGNGVWIGRTKSNRLRKGFEMIWDPNGWTDTDSDFSVKQDVVAITDWSGYSGSFVQHPELTGLDCIRPCFWVELVRGLPRENTTIWTSGSSISFCGVDSDTANWSWPDGAELPFTIDK

SEQ ID NO: 16149 - protein, 470 aa, synthetic construct
  REGION 1..470: note = neuraminidase__InfluenzaA__ABW39930
MNPNQKIITIGSISIAIGIISLMLQIGNIISIWASHSIQTGSQNHTGICNQRIITYENSTWVNHTYVSINNTNVVAGKDKTSVTLAGNSSLCSISGWAIYTKDNSIRIGSKGDVFVIREPFISCSHLECRTFFLTQGALLNDKHSNGTVKDRSPYRALMSCPLGEAPSPYNSKFESVAWSASACHDGMGWLTIGISGPDNGAVAVLKYNGIITETIKSWKKRILRTQESECVCVNGSCFTIMTDGPSDGAASYKIFKIEKGKVTKSIELNAPNFHYEECSCYPDTGTVMCVCRDNWHGSNRPWVSFNQNLDYQIGYICSGVFGDNPRPKDGKGSCNPVTVDGADGVKGFSYKYGNGVWIGRTKSNRLRKGFEMIWDPNGWTDTDSDFSVKQDVVAITDWSGYSGSFVQHPELTGLDCIRPCFWVELVRGLPRENTTIWTSGSSISFCGVDSDTANWSWPDGAELPFTIDK

SEQ ID NO: 16150 - protein, 470 aa, synthetic construct
  REGION 1..470: note = neuraminidase__InfluenzaA__ABW39952
MNPNQKIITIGSISITIGIISLMLQIGNIISIWASHSIQTGSQNHTGMCNQRIITYENSTWVNHTYVSINNTNVVAGKDKTSVTLAGNSSLCSISGWAIYTKDNSIRIGSKGDVFVIREPFISCSHLECRTFFLTQGALLNDKHSNGTVKDRSPYRALMSCPLGEAPSPYNSKFESVAWSASACHDGMGWLTIGISGPDNGAVAVLKYNGIITETIKSWKKRILRTQESECVCVNGSCFTIMTDGPSNGAASYKIFKIEKGKVTKSIELNAPNFHYEECSCYPDTGTVMCVCRDNWHGSNRPWVSFNQNLDYQIGYICSGVFGDNPRPKDGKGSCNPVTVDGADGVKGFSYKYGNGVWIGRTKSNRLRKGFEMIWDPNGWTDTDSDFSVKQDVVAITDWSGYSGSFVQHPELTGLDCIRPCFWVELVRGLPRENTTIWTSGSSISFCGVDSDTANWSWPDGAELPFTIDK

SEQ ID NO: 16151 - protein, 470 aa, synthetic construct; identical to SEQ ID NO: 16030
  REGION 1..470: note = neuraminidase__InfluenzaA__ABW39963

SEQ ID NO: 16152 - protein, 470 aa, synthetic construct; identical to SEQ ID NO: 16030
  REGION 1..470: note = neuraminidase__InfluenzaA__ABW39985

SEQ ID NO: 16153 - protein, 470 aa, synthetic construct
  REGION 1..470: note = neuraminidase__InfluenzaA__ABW39996
MNPNQKIITIGSISIAIGIISLMLQIGNIISIWASHSIQTGSQNHTGICNQRIITYENSTWVNHTYVNINNTNVVAGKDKTSVTLAGNSSLCSISGWAIYTKDNSIRIGSKGDVFVIREPFISCSHLECRTFFLTQGALLNDKHSNGTVKDRSPYRALMSCPLGEAPSPYNSKFESVAWSASACHDGMGWLTIGISGPDNGAVAVLKYNGIITETIKSWKKRILRTQESECVCVNGSCFTIMTDGPSNGTASYKIFKIEKGKVTKSIELNAPNFHYEECSCYPDTGTVMCVCRDNWHGSNRPWVSFNQNLDYQVGYICSGVFGDNPRPKDGKGSCNPMTVDGADGVKGFSYKYGNGVWIGRTKSNKLRKGFEMIWDPNGWTDTDSDFSVKQDVVAITDWSGYSGSFVQHPELTGLDCIRPCFWVELVRGLPRENTTIWTSGSSISFCGVDSDTANWSWPDGAELPFTIDK

SEQ ID NO: 16154 - protein, 470 aa, synthetic construct; identical to SEQ ID NO: 16030
  REGION 1..470: note = neuraminidase__InfluenzaA__ABW40007

SEQ ID NO: 16155 - protein, 470 aa, synthetic construct
  REGION 1..470: note = neuraminidase__InfluenzaA__ABW40018
MNPNQKIITIGSISIAIGIISLMLQIGNIISIWASHSIQTGSQNHTGICNQRIITYENSTWVNHTYVNINNTNVVAGKDKTSVTLAGNSSLCSISGWAIYTKDNSIRIGSKGDVFVIREPFISCSHLECRTFFLTQGALLNDKHSNGTVKDRSPYRALMSCPLGEAPSPYNSKFESVAWSASACHDGMGWLTIGISGPDNGAVAVLKYNGIITETIKSWKKRILRTQESECVCVNGSCFTIMTDGPSNGAASYKIFKIEKGKVTKSIELNAPNFHYEECSCYPDTGTVMCVCRDNWHGSNRPWVSFNQNLDYQIGYICSGVFGDNPRPKDGKGSCNPVTVDGADGIKGFSYKYGNGVWIGRTKSNRLRKGFEMIWDPNGWTNTDSDFSVKQDVVAITDWSGYSGSFVQHPELTGLDCIRPCFWVELVRGLPRENTTIWTSGSSISFCGVDGDTANWSWPDGAELPFTIDK

SEQ ID NO: 16156 - protein, 469 aa, synthetic construct; identical to SEQ ID NO: 15884
  REGION 1..469: note = neuraminidase__InfluenzaA__ABW40029

SEQ ID NO: 16157 - protein, 470 aa, synthetic construct
  REGION 1..470: note = neuraminidase__InfluenzaA__ABW40040
MNPNQKIITIGSISIAIGIISLMLQIGNIISIWASHSIQTGSQNHTGICNQRIITYENSTWVNHTYVSINNTNVVAGKDKTSVTLAGNSSLCSISGWAIYTKDNSIRIGSKGDVFVIREPFISCSHLECRTFFLTQGALLNDKHSNGTVKDRSPYRALMSCPLGEAPSPYNSKFESVAWSASACHDGMGWLTIGISGPDNGAVAVLKYNGIITETIKSWKKRILRTQESECVCVNGSCFTIMTDGPSNGAASYKIFKIEKGKVTKSIELNAPNFHYEECSCYPDTGTVMCVCRDNWHGSNRPWVSFNQNLDYQIGYICSGVFGDNPRPKDGKGSCNPVTVDGADGVKGFSYKYGNGIWIGRTKSNRLRKGFEMIWDPNGWTDTDSDFSVKQDVVAITDWSGYSGSFVQHPELTGLDCIRPCFWVELVRGLPRENTTIWTSGSSISFCGVDSDTANWSWPDGAELPFTIDK

SEQ ID NO: 16158 - protein, 470 aa, synthetic construct; identical to SEQ ID NO: 16030
  REGION 1..470: note = neuraminidase__InfluenzaA__ABW40051

SEQ ID NO: 16159 - protein, 470 aa, synthetic construct; identical to SEQ ID NO: 16030
  REGION 1..470: note = neuraminidase__InfluenzaA__ABW40062

SEQ ID NO: 16160 - protein, 469 aa, synthetic construct; identical to SEQ ID NO: 16066
  REGION 1..469: note = neuraminidase__InfluenzaA__ABW40084

SEQ ID NO: 16161 - protein, 470 aa, synthetic construct
  REGION 1..470: note = neuraminidase__InfluenzaA__ABW40095
MNPNQKIITIGSISVAIGIISLMLQIGNIISIWASHSIQTGSQNHTGICNQRIITYENSTWVNHTYVSINNTNVVAGKDKTSVTLAGNSSLCSISGWAIYTKDNSIRIGSKGDVFVIREPFISCSHLECRTFFLTQGALLNDKHSNGTVKDRSPYRALMSCPLGEAPSPYNSKFESVAWSASACHDGMGWLTIGISGPDNGAVAVLKYNGIITETIKSWKKRILRTQESECVCVNGSCFTIMTDGPSNGAASYKIFKIEKGKVTKSIELNAPNFHYEECSCYPDTGTVMCVCRDNWHGSNRPWVSFNQNLDYQIGYICSGVFGDNPRPKDGKGSCNPMTVDGADGVKGFSYKYGNGVWIGRTKSNRLRKGFEMIWDPNGWTDTDSDFSVKQDVVAITDWSGYSGSFVQHPELTGLDCIRPCFWVELVRGLPRENTTIWTSGSSISFCGVDSDTANWSWPDGAELPFTIDK

SEQ ID NO: 16162 - protein, 470 aa, synthetic construct
  REGION 1..470: note = neuraminidase__InfluenzaA__ABW40106
MNPNQKIITIGSISIAIGIISLMLQIGNIISIWASHSIQTGSQNHTGICNQRIITYENSTWVNHTYVSINNTNVVAGKDKTSVTLAGNSSLCSISGWAIYTKDNSIRIGSKGDVFVIREPFISCSHLECRTFFLTQGALLNDKHSNGTVKDRSPYRALMSCPLGEAPSPYNSKFESVAWSASACHDGMGWLTIGISGPDNGAVAVLKYNGIITETIKSWKKRILRTQESECVCLNGSCFTIMTDGPSNGAASYKIFKIEKGKVTKSIELNAPNFHYEECSCYPDTGTVMCVCRDNWHGSNRPWVSFNQNLDYQIGYICSGVFGDNPRPKDGKGSCNPVTVDGADGVKGFSYKYGNGVWIGRTKSNRLRKGFEMVWDPNGWTDTDSDFSVKQDVVAITDWSGYSGSFVQHPELTGLDCIRPCFWVELVRGLPRENTTIWTSGSSISFCGVDSDTANWSWPDGAELPFTIDK

SEQ ID NO: 16163 - protein, 470 aa, synthetic construct; identical to SEQ ID NO: 16030
  REGION 1..470: note = neuraminidase__InfluenzaA__ABW40117

SEQ ID NO: 16164 - protein, 470 aa, synthetic construct; identical to SEQ ID NO: 16030
  REGION 1..470: note = neuraminidase__InfluenzaA__ABW40128

SEQ ID NO: 16165 - protein, 469 aa, synthetic construct; identical to SEQ ID NO: 15884
  REGION 1..469: note = neuraminidase__InfluenzaA__ABW40139

SEQ ID NO: 16166 - protein, 470 aa, synthetic construct; identical to SEQ ID NO: 16030
  REGION 1..470: note = neuraminidase__InfluenzaA__ABW40150

SEQ ID NO: 16167 - protein, 470 aa, synthetic construct; identical to SEQ ID NO: 16030
  REGION 1..470: note = neuraminidase__InfluenzaA__ABW40161

SEQ ID NO: 16168 - protein, 469 aa, synthetic construct
  REGION 1..469: note = neuraminidase__InfluenzaA__ABW40172
MNPNQKIITIGSVSLTISTICFFMQIAILITTVTLHFKQYEFNSPPNNQVMLCEPTIIERNITEIVYLTNTTIEKEICPKLAEYRNWSKPQCDITGFAPFSKDNSIRLSAGGDIWVTREPYVSCDPDKCYQFALGQGTTLNNVHSNDTVRDRTPYRTLLMNELGVPFHLGTKQVCIAWSSSSCHDGKAWLHVCITGDDKNATASFIYNGRLVDSIVSWSKEILRTQESECVCINGTCTVVMTDGSASGKADTKILFIEEGKIVHTSTLSGSAQHVEECSCYPRYPGVRCVCRDNWKGSNRPIVDINIKDHSIVSSYVCSGLVGDTPRKNDSSSSSHCLDPNNEEGGHGVKGWAFDDGNDVWMGRTISEKSRLGYETFKVIEGWSNPKSKLQINRQVIVDRGNRSGYSGIFSVEGKSCINRCFYVELTRGRKEETEVLWTSNSIVVFCGTSGTYGTGSWPDGADINLMPI

SEQ ID NO: 16169 - protein, 470 aa, synthetic construct; identical to SEQ ID NO: 16030
  REGION 1..470: note = neuraminidase__InfluenzaA__ABW40183

SEQ ID NO: 16170 - protein, 469 aa, synthetic construct; identical to SEQ ID NO: 15884
  REGION 1..469: note = neuraminidase__InfluenzaA__ABW40194

SEQ ID NO: 16171 - protein, 470 aa, synthetic construct; identical to SEQ ID NO: 16065
  REGION 1..470: note = neuraminidase__InfluenzaA__ABW40205

SEQ ID NO: 16172 - protein, 470 aa, synthetic construct; identical to SEQ ID NO: 16069
  REGION 1..470: note = neuraminidase__InfluenzaA__ABW40216

SEQ ID NO: 16173 - protein, 470 aa, synthetic construct; identical to SEQ ID NO: 16069
  REGION 1..470: note = neuraminidase__InfluenzaA__ABW40227

SEQ ID NO: 16174 - protein, 470 aa, synthetic construct; identical to SEQ ID NO: 16030
  REGION 1..470: note = neuraminidase__InfluenzaA__ABW40238

SEQ ID NO: 16175 - protein, 469 aa, synthetic construct
  REGION 1..469: note = neuraminidase__InfluenzaA__ABW40249
MNPNQKIITIGSVSLTISTICFFMQIAILITTVTLHFKQYEFNSPPNNQVMLCEPTIIERNITEIVYLTNTTIEKEICPKLAEYRNWSKPQCDITGFAPFSKDNSIRLSAGGDIWVTREPYVSCDPDKCYQFALGQGTTLNNVHSNDTVRDRTPYRTLLMNELGVPFHLGTKQVCIAWSSSSCHDGKAWLHVCITGDDKNATASFIYNGRLVDSIVSWSKEILRTQESECVCINGTCTVVMTDGSASGKADTKILFIEEGKIVHTSTLSGSAQHVEECSCYPRYPGVRCVCRDNWKGSNRPIVDINIKDHSIVSSYVCSGLVGDTPRKNDSSSSSHCLDPNNEEGGHGVKGWAFDDGNDVWMGRTISEKSRLGYETFKVIEGWSNHKSKLQINRQVIVDRGNRSGYSGIFSVEGKSCINRCFYVELIRGRKEETEVLWTSNSIVVFCGTSGTYGTGSWPDGADINLMPI

SEQ ID NO: 16176 - protein, 470 aa, synthetic construct; identical to SEQ ID NO: 16030
  REGION 1..470: note = neuraminidase__InfluenzaA__ABW40260

SEQ ID NO: 16177 - protein, 469 aa, synthetic construct
  REGION 1..469: note = neuraminidase__InfluenzaA__ABW40271
MNPNQKIITIGSVSLTISTICFFMQIAILITTVTLHFKQYEFNSPPNNQVMLCEPTIIERNITEIVYLTNTTIEKEICPKLAEHRNWSKPQCDITGFAPFSKDNSIRLSAGGDIWVTREPYVSCDPDKCYQFALGQGTTLNNVHSNDTVRDRTPYRTLLMNELGVPFHLGTKQVCIAWSSSSCHDGKAWLHVCITGDDKNATASFIYNGRLVDSIVSWSKEILRTQESECVCINGTCTVVMTDGSASGKADTKILFIEEGKIVHTSTLSGSAQHVEECSCYPRYPGVRCVCRDNWKGSNRPIVDINIKDHSIVSSYVCSGLVGDTPRKNDSSSSSHCLDPNNEEGGHGVKGWAFDDGNDVWMGRTISEKSRLGYETFKVIEGWSNPKSKLQINRQVIVDRGNRSGYSGIFSVEGKSCINRCFYVELIRGRKEETEVLWTSNSIVVFCGTSGTYGTGSWPDGADINLMPI

SEQ ID NO: 16178 - protein, 470 aa, synthetic construct; identical to SEQ ID NO: 16030
  REGION 1..470: note = neuraminidase__InfluenzaA__ABW40282

SEQ ID NO: 16179 - protein, 470 aa, synthetic construct; identical to SEQ ID NO: 16065
  REGION 1..470: note = neuraminidase__InfluenzaA__ABW40293

SEQ ID NO: 16180 - protein, 470 aa, synthetic construct; identical to SEQ ID NO: 16030
  REGION 1..470: note = neuraminidase__InfluenzaA__ABW40304

SEQ ID NO: 16181 - protein, 470 aa, synthetic construct; identical to SEQ ID NO: 16030
  REGION 1..470: note = neuraminidase__InfluenzaA__ABW40315

SEQ ID NO: 16182 - protein, 469 aa, synthetic construct; identical to SEQ ID NO: 15884
  REGION 1..469: note = neuraminidase__InfluenzaA__ABW40326

SEQ ID NO: 16183 - protein, 470 aa, synthetic construct; identical to SEQ ID NO: 16071
  REGION 1..470: note = neuraminidase__InfluenzaA__ABW40337

SEQ ID NO: 16184 - protein, 470 aa, synthetic construct; identical to SEQ ID NO: 16065
  REGION 1..470: note = neuraminidase__InfluenzaA__ABW40359

SEQ ID NO: 16185 - protein, 470 aa, synthetic construct
  REGION 1..470: note = neuraminidase__InfluenzaA__ABW40370
MNPNQKIITIGSISIAIGIISLMLQIGNIISIWASHSIQTGSQNHTGICNQRIITYENSTWVNHTYVSINNTNVVAGKDKTSVTLAGNSSLCSISGWAIYTKDNSIRIGSKGDVFVIREPFISCSHLECRTFFLTQGALLNDKHSNGTVKDRSPYRALMSCPLGEAPSPYNSKFESVAWSASACHDGMGWLTIGISGPDNGAVAVLKYNGIITETIKSWKKRILRTQESECVCVNGSCFTIMTDGPSNGAASYKIFKIEKGKVTKSIELNAPNFHYEECSCYPDSGTVMCVCRDNWHGSNRPWVSFNQNLDYQIGYICSGVFGDNPRPKDGKGSCNPVTVDGADGVKGFSYKYGNGVWIGRTKSNRLRKGFEMIWDPNGWTDTDSDFSVKQDVVAITDWSGYSGSFVQHPELTGLDCIRPCFWVELVRGLPRENTTIWTSGSSISFCGVDSDTANWSWPDGAELPFTIDK

SEQ ID NO: 16186 - protein, 470 aa, synthetic construct; identical to SEQ ID NO: 16030
  REGION 1..470: note = neuraminidase__InfluenzaA__ABW40403

SEQ ID NO: 16187 - protein, 470 aa, synthetic construct
  REGION 1..470: note = neuraminidase__InfluenzaA__ABW40414
MNPNQKIITIGSISIAIGIISLMLQIGNIISIWASHSIQTGSQNHTGICNQRIITYENSTWVNHTYVSINNTNVVAGKDKTSVTLAGNSSLCSISGWAIYTKDNSIRIGSKGDVFVIREPFISCSHLECRTFFLTQGALLNDKHSNGTVKDRSPYRALMSCPLGEAPSPYNSKFESVAWSASACHDGMGWLTIGISGPDNGAVAVLKYNGIITETIKSWKKRILRTQESECVCVNGSCFTIMTDGPSNGAASYKIFKIEKGKVTKSIELNAPNFHYEECSCYPDTGTVMCVCRDNWHGSNRPWVSFDQNLDYQIGYICSGVFGDNPRPKDGKGSCNPVTVDGADGVKGFSYKYGNGVWIGRTKSNRLRKGFEMIWDPNGWTDTDSDFSVKQDVVAITDWSGYSGSFVQHPELTGLDCIRPCFWVELVRGLPRENTTIWTSGSSISFCGVDSDTANWSWPDGAELPFTIDK

SEQ ID NO: 16188 - protein, 470 aa, synthetic construct; identical to SEQ ID NO: 16030
  REGION 1..470: note = neuraminidase__InfluenzaA__ABW40425

SEQ ID NO: 16189 - protein, 470 aa, synthetic construct; identical to SEQ ID NO: 16071
  REGION 1..470: note = neuraminidase__InfluenzaA__ABW40436

SEQ ID NO: 16190 - protein, 470 aa, synthetic construct
  REGION 1..470: note = neuraminidase__InfluenzaA__ABW40447
MNPNQKIITIGSISIAIGIISLMLQIGNIISIWASHSIQTGSQNHTGICNQRIITYENSTWVNHTYVNINNTNVVAGKDKTSVTLAGNSSLCSISGWAIYTKDNSIRIGSKGDVFVIREPFISCSHLECRTFFLTQGALLNDKHSNGTVKDRSPYRALMSCPLGEAPSPYNSKFESVAWSASACHDGMGWLTIGISGPDNGAVAVLKYNGIITETIKSWKKRILRTQESECVCVNGSCFTIMTDGPSNGAASYKIFKIEKGKVTKSIELNAPNFHYEECSCYPDTGTVMCVCRDNWHGSNRPWVSFNQNLDYQVGYICSGVFGDNPRPKDGKGSCNPMTVDGADGVKGFSYKYGNGVWIGRTKSNKLRKGFEMIWDPNGWTDTDSDFSVKQDVVAITDWSGYSGSFVQHPELTGLNCIRPCFWVELVRGLPRENTTIWTSGSSISFCGVDSDTANWSWPDGAELPFTIDK

SEQ ID NO: 16191 - protein, 470 aa, synthetic construct; identical to SEQ ID NO: 16056
  REGION 1..470: note = neuraminidase__InfluenzaA__ABW40458

SEQ ID NO: 16192 - protein, 470 aa, synthetic construct; identical to SEQ ID NO: 16030
  REGION 1..470: note = neuraminidase__InfluenzaA__ABW40469

SEQ ID NO: 16193 - protein, 470 aa, synthetic construct; identical to SEQ ID NO: 16030
  REGION 1..470: note = neuraminidase__InfluenzaA__ABW40491

SEQ ID NO: 16194 - protein, 470 aa, synthetic construct; identical to SEQ ID NO: 16030
  REGION 1..470: note = neuraminidase__InfluenzaA__ABW40502

SEQ ID NO: 16195 - protein, 470 aa, synthetic construct; identical to SEQ ID NO: 16071
  REGION 1..470: note = neuraminidase__InfluenzaA__ABW40513

SEQ ID NO: 16196 - protein, 470 aa, synthetic construct; identical to SEQ ID NO: 16030
  REGION 1..470: note = neuraminidase__InfluenzaA__ABW40524

SEQ ID NO: 16197 - protein, 470 aa, synthetic construct
  REGION 1..470: note = neuraminidase__InfluenzaA__ABW40546
MNPNQKIITIGSISIAIGIISLMLQIGNIISIWASHSIQTGSQNHTGICNQRIITYENSTWVNHTYVNINNTNVVAGKDKTSVTLAGNSSLCSISGWAIYTKDNSIRIGSKGDVFVIREPFISCSHLECRTFFLTQGALLNDKHSNGTVKDRSPYRALMSCPLGEAPSPYNSKFESVAWSASACHDGMGWLTIGISGPDNGAVAVLKYNGIITETIKSWKKRILRTQESECVCVNGSCFTIMTDGPSNGAASYKIFKIEKGKVTKSMELNAPNFHYEECSCYPDTGTVMCVCRDNWHGSNRPWVSFNQNLDYQIGYICSGVFGDNPRPKDGKGSCNPVTVDGADGVKGFSYKYGNGVWIGRTKSNRLRKGFEMIWDPNGWTDTDSDFSVKQDVVAITDWSGYSGSFVQHPELTGLDCIRPCFWVELVRGLPRENTTIWTSGSSISFCGVDSDTANWSWPDGAELPFTIDK

SEQ ID NO: 16198 - protein, 470 aa, synthetic construct; identical to SEQ ID NO: 16030
  REGION 1..470: note = neuraminidase__InfluenzaA__ABW40557

SEQ ID NO: 16199 - protein, 470 aa, synthetic construct
  REGION 1..470: note = neuraminidase__InfluenzaA__ABW40568
MNPNQKIITIGSISIAIGIISLMLQIGNIISIWASHSIQTGSQNHTGICNQRIITYENSTWVNHTYVSINNTNVVAGKDKTSVTLAGNSSLCSISGWAIYTKDNSIRIGSKGDVFVIREPFISCSHLECRTFFLTQGALLNDKHSNGTVKDRSPYRALMSCPLGEAPSPYNSKFESVAWSASACHDGMGWLTIGISGPDNGAVAVLKYNGIITETIKSWKKQILRTQESECVCVNGSCFTIMTDGPSNGAASYKIFKIEKGKVTKSIELNAPNFHYEECSCYPDTGTVMCVCRDNWHGSNRPWVSFNQNLDYQIGYICSGVFGDNPRPKDGKGSCNPVTVDGADGVKGFSYKYGNGVWIGRTKSNRLRKGFEMIWDPNGWTDTDSDFSVKQDVVAITDWSGYSGSFVQHPELTGLDCIRPCFWVELVRGLPRENTTIWTSGSSISFCGVDSDTANWSWPDGAELPFTIDK

SEQ ID NO: 16200 - protein, 470 aa, synthetic construct
  REGION 1..470: note = neuraminidase__InfluenzaA__ABW40579
MNPNQKIITIGSISIAIGIISLMLQIGNIISIWASHSIQTGSQNHTGICNQRIITYENSTWVNHTYVSINNTNVVAGKDKTSVTLAGNSSLCSISGWAIYTKDNSIRIGSKGDVFVIREPFISCSHLECRTFFLTQGALLNDKHSNGTVKDRSPYRALMSCPLGEAPSPYNSKFESVAWSASACHDGMGWLTIGISGPDNGAVAVLKYNGIITETIKSWKKRILRTQESECVCVNGSCFTIMTDGPNNGAASYKIFKIEKGKVTKSIELNAPNFHYEECSCYPDTGTVMCVCRDNWHGSNRPWVSFNQNLDYQIGYICSGVFGDNPRPKDGKGSCNPVTVDGADGVKGFSYKYGNGVWIGRTKSNRLRKGFEMIWDPNGWTDTDSDFSVKQDVVAITDWSGYSGSFVQHPELTGLDCIRPCFWVELVRGLPRENTTIWTSGSSISFCGVDSDTANWSWPDGAELPFTIDK

SEQ ID NO: 16201 - protein, 470 aa, synthetic construct
  REGION 1..470: note = neuraminidase__InfluenzaA__ABW40601
MNPNQKIITIGSISIAIGVISLMLQIGNIISIWASHSIQTGSQNHTGICNQRIITYENSTWVNHTYVNINNTNVVAGKDKTSVTLAGNSSLCSISGWAIYTKDNSIRIGSKGDVFVIREPFISCSHLECRTFFLTQGALLNDKHSNGTVKDRSPYRALMSCPLGEAPSPYNSKFESVAWSASACHDGMGWLTIGISGPDNGAVAVLKYNGIITETIKSWKKRILRTQESECVCVNGSCFTIMTDGPSNGAASYKIFKIEKGKVTKSIELNAPNFHYEECSCYPDTGTVMCVCRDNWHGSNRPWVSFNQNLDYQIGYICSGVFGDNPRPKDGKGSCNPVTVDGADGIKGFSYKYGNGVWIGRTKSNRLRKGFEMIWDPNGWTNTDSDFSVKQDVVAITDWSGYSGSFVQHPELTGLDCIRPCFWVELVRGLPRENTTIWTSGSSISFCGVDGDTANWSWPDGAELPFTIDK

SEQ ID NO: 16202 - protein, 470 aa, synthetic construct; identical to SEQ ID NO: 16065
  REGION 1..470: note = neuraminidase__InfluenzaA__ABW40612

SEQ ID NO: 16203 - protein, 470 aa, synthetic construct; identical to SEQ ID NO: 16030
  REGION 1..470: note = neuraminidase__InfluenzaA__ABW40623

SEQ ID NO: 16204 - protein, 469 aa, synthetic construct; identical to SEQ ID NO: 15884
  REGION 1..469: note = neuraminidase__InfluenzaA__ABW40634

SEQ ID NO: 16205 - protein, 470 aa, synthetic construct; identical to SEQ ID NO: 16030
  REGION 1..470: note = neuraminidase__InfluenzaA__ABW40645

SEQ ID NO: 16206 - protein, 469 aa, synthetic construct
  REGION 1..469: note = neuraminidase__InfluenzaA__ABW40656
MNPNQKIITIGSVSLTISTICFFMQIAILITTVTLHFKQYEFNSPPNNQVMLCEPTIIERNITEIVYLTNTTIEKEICPKLAEYRNWSKPQCDITGFAPFSKDNSIRLSAGGGIWVTREPYVSCDPDKCYQFALGQGTTLNNVHSNDTVRDRTPYRTLLMNELGVPFHLGTKQVCIAWSSSSCHDGKAWLHVCITGDDKNATASFIYNGRLVDSIVSWSKEILRTQESECVCINGTCTVVMTDGSASGKADTKILFIEEGKIVHTSTLSGSAQHVEECSCYPRYPGVRCVCRDNWKGSNRPIVDINIKDHSIVSSYVCSGLVGDTPRKNDSSSSSHCLDPNNEEGGHGVKGWAFDDGNDVWMGRTISEKSRLGYETFKVIEGWSNPKSKLQINRQVIVDRGNRSGYSGIFSVEGKSCINRCFYVELIRGRKEETEVLWTSNSIVVFCGTSGTYGTGSWPDGADINLMPI

SEQ ID NO: 16207 - protein, 470 aa, synthetic construct; identical to SEQ ID NO: 16071
  REGION 1..470: note = neuraminidase__InfluenzaA__ABW40667

SEQ ID NO: 16208 - protein, 470 aa, synthetic construct; identical to SEQ ID NO: 16056
  REGION 1..470: note = neuraminidase__InfluenzaA__ABW40678

SEQ ID NO: 16209 - protein, 470 aa, synthetic construct; identical to SEQ ID NO: 16065
  REGION 1..470: note = neuraminidase__InfluenzaA__ABW71297

SEQ ID NO: 16210 - protein, 470 aa, synthetic construct; identical to SEQ ID NO: 16071
  REGION 1..470: note = neuraminidase__InfluenzaA__ABW71308

SEQ ID NO: 16211 - protein, 470 aa, synthetic construct; identical to SEQ ID NO: 16030
  REGION 1..470: note = neuraminidase__InfluenzaA__ABW71319

SEQ ID NO: 16212 - protein, 470 aa, synthetic construct; identical to SEQ ID NO: 16030
  REGION 1..470: note = neuraminidase__InfluenzaA__ABW71330

SEQ ID NO: 16213 - protein, 470 aa, synthetic construct
  REGION 1..470: note = neuraminidase__InfluenzaA__ABW71341
MNPNQKIITIGSISIAIGIISLMLQIGNIISIWASHSIQTGSQNHTGICNQRIITYENSTWVNHTYVSINNTNVVAGKDKTSVTLAGNSSLCSISGWAIYTKDNSIRIGSKGDVFVIREPFISCSHLECRTFFLTQGALLNDKHSNGTVKDRSPYRALMSCPLGEAPSPYNSKFESVAWSASACHDGMGWLTIGISGPDNGAVAVLKYNGIITETIKSWKKRILRTQESECVCVNGSCFTIMTDGPSNGAASYKIFKIEKGKVTKSIELNAPNFHYEECSCYPDTGTVMCVCRDNWHGSNRPWVSFNQNLDYQIGYICSGVFGDNPRPKDGKGSCNPVTVDGADGVKGFSYKYGNGVWLGRTKSNRLRKGFEMIWDPNGWTDTDSDFSVKQDVVAITDWSGYSGSFVQHPELTGLDCIRPCFWVELVRGLPRENTTIWTSGSSISFCGVDSDTANWSWPDGAELPFTIDK

SEQ ID NO: 16214 - protein, 469 aa, synthetic construct; identical to SEQ ID NO: 16057
  REGION 1..469: note = neuraminidase__InfluenzaA__ABW71352

SEQ ID NO: 16215 - protein, 470 aa, synthetic construct; identical to SEQ ID NO: 16071
  REGION 1..470: note = neuraminidase__InfluenzaA__ABW71363

SEQ ID NO: 16216 - protein, 470 aa, synthetic construct; identical to SEQ ID NO: 16056
  REGION 1..470: note = neuraminidase__InfluenzaA__ABW71374

SEQ ID NO: 16217 - protein, 470 aa, synthetic construct; identical to SEQ ID NO: 16030
  REGION 1..470: note = neuraminidase__InfluenzaA__ABW71385

SEQ ID NO: 16218 - protein, 470 aa, synthetic construct
  REGION 1..470: note = neuraminidase__InfluenzaA__ABW71396
MNPNQKIITIGSISIAIGIISLMLQIGNIISIWASHSVQTGSQNHTGICNQRIITYENSTWVNHTYVNINNTNVVAGKDKTSVTLAGNSSLCSISGWAIYTKDNSIRIGSKGDVFVIREPFISCSHLECRTFFLTQGALLNDKHSNGTVKDRSPYRALMSCPLGEAPSPYNSKFESVAWSASACHDGMGWLTIGISGPDNGAVAVLKYNGIITETIKSWKKRILRTQESECVCVNGSCFTIMTDGPSNGAASYKIFKIEKGKVTKSIELNAPNFHYEECSCYPDTGTVMCVCRDNWHGSNRPWVSFNQNLDYQVGYICSGVFGDNPRPKDGKGSCNPMTVDGADGVKGFSYKYGNGVWIGRTKSNKLRKGFEMIWDPNGWTDTDSDFSVKQDVVAITDWSGYSGSFVQHPELTGLDCIRPCFWVELVRGLPRENATIWTSGSSISFCGVDSDTANWSWPDGAELPFTIDK

SEQ ID NO: 16219 - protein, 470 aa, synthetic construct
  REGION 1..470: note = neuraminidase__InfluenzaA__ABW71407
MNPNQKIITIGSISIAIGIISLMLQIGNIISIWASHSIQTGSQNHTGICNQRIITYENSTWVNHTYVNINNTNVVAGKDKTSVTLAGNSSLCSISGWAIYTKDNSIRIGSKGDVFVIREPFISCSHLECRTFFLTQGALLNDKHSNGTVKDRSPYRALMSCPLGEAPSPYNSKFESVAWSASACHDGMGWLTIGISGPDNGAVAVLKYNGIITETIKSWKKRILRTQESECVCVNGSCFTIMTDGPSNGAASYKIFKIEKGKVTKSIELNAPNFHYEECSCYPDTGTVMCVCRDNWHGSNRPWVSFNQNLDYQVGYICSGVFGDNPRPKDGKGSCNPMTVDGADGVKGFSYKYGNGVWIGRTKSNKIRKGFEMIWDPNGWTDTDSDFSVKQDVVAITDWSGYSGSFVQHPELTGLDCIRPCFWVELVRGLPRENTTIWTSGSSISFCGVDSDTANWSWPDGAELPFTIDK

SEQ ID NO: 16220 - protein, 470 aa, synthetic construct; identical to SEQ ID NO: 16056
  REGION 1..470: note = neuraminidase__InfluenzaA__ABW71418

SEQ ID NO: 16221 - protein, 470 aa, synthetic construct; identical to SEQ ID NO: 16030
  REGION 1..470: note = neuraminidase__InfluenzaA__ABW71440

SEQ ID NO: 16222 - protein, 470 aa, synthetic construct; identical to SEQ ID NO: 16030
  REGION 1..470: note = neuraminidase__InfluenzaA__ABW71451

SEQ ID NO: 16223 - protein, 470 aa, synthetic construct; identical to SEQ ID NO: 16065
  REGION 1..470: note = neuraminidase__InfluenzaA__ABW71462

SEQ ID NO: 16224 - protein, 469 aa, synthetic construct; identical to SEQ ID NO: 14327
  REGION 1..469: note = neuraminidase__InfluenzaA__ABW80980

SEQ ID NO: 16225 - protein, 469 aa, synthetic construct; identical to SEQ ID NO: 14171
  REGION 1..469: note = neuraminidase__InfluenzaA__ABW80981

SEQ ID NO: 16226 - protein, 470 aa, synthetic construct
  REGION 1..470: note = neuraminidase__InfluenzaA__ABW81474
MNPNQKIITIGSISVAIGIISLILQIGNIISIWASHSIQTGSQNYTGICNQKIITYENRTWVNQTYVNFNNTNVVAGKDKPSMTLAGNSSLCPIRGWAIYTKDNSIRIGSKGDVFVIREPFISCSHLECRTFFLTQGALLNDKHSNGTIKDRSPFRALMSCPLGEAPSPYNSRFESVAWSASACHDGLGWLTIGISGPDNGAVAVLKYNGIITETIKSWKKQILRTQESECVCVNGSCFTIMTDGPSNRAASYRIFKIEKGRVTKSIELDAPNYHYEECSCYPDTGTVMCVCRDNWHGSNRPWVSFNQNLDYQIGYICSGVFGDNPRPKDGEGSCNPVTVDGADGVKGFSYRYGNGVWIGRTKSNRLRKGFEMIWDPNGWTDTDSDFSMKQDVVAMTDWSGYSGSFVQHPELTGLDCMRPCFWVELVRGLPRENTTIWTSGSSISFCGVNSETANWSWPDGAELPFTIDK

SEQ ID NO: 16227 - protein, 470 aa, synthetic construct
  REGION 1..470: note = neuraminidase__InfluenzaA__ABW81475
MNPNQKIITIGSISIAIGIISLMLQIGNIISIWASHSIQTGSQNHTGICNQRIITYENSTWVNHTYVNINNTNVVAGKDKSSVTLAGNSSLCSISGWAIYTKDNSIRIGSKGDVFVIREPFISCSHLECRTFFLTQGALLNDKHSNGTVKDRSPYRALMSCPLGEAPSPYNSKFESVAWSASACHDGMGWLTIGISGPDNGAVAVLKYNGIITETIKSWKKRILRTQESECVCVNGSCFTIMTDGPSNGAASYKIFKIEKGKVTKSIELNAPNFHYEECSCYPDTGTVMCVCRDNWHGSNRPWVSFNQNLDYQIGYICSGVFGDNPRPKDGEGSCNPVTVDGADGVKGFSYKYGNGVWIGRTKSNRLRKGFEMIWDPNGWTDTDSDFSLKQDVVAITDWSGYSGSFVQHPELTGLDCIRPCFWVELVRGLPRENTTIWTSGSSISFCGVNSDTANWSWPDGAELPFTIDK

SEQ ID NO: 16228 - protein, 470 aa, synthetic construct
  REGION 1..470: note = neuraminidase__InfluenzaA__ABW81477
MNPNQKIITIGSISIAIGIISLMLQIGNIISIWASHSIQTGSQNHTGVCNQRIITYENSTWVNHTYVNINNTNVIAGKDKTSVTLAGNSSLCSISGWAIYTKDNSIRIGSKGDVFVIREPFISCSHLECRTFFLTQGALLNDKHSNGTVKDRSPYRALMSCPLGEAPSPYNSKFESVAWSASACHDGMGWLTIGISGPDNGAVAVLKYNGIITETIKSWKKQILRTQESECVCVNGSCFTIMTDGPSNGAASYKIFKIEKGKVTKSIELSAPNFHYEECSCYPDTGTVMCVCRDNWHGSNRPWVSFNQNLDYQIGYICSGVFGDNPRPKDGEGSCNPVTVDGANGVKGFSYKYGNGVWIGRTKSNRLRKGFEMIWDPNGWPDTDSDFSVKQDVVAITDWSGYSGSFVQHPELTGLDCIRPCFWVELVRGLPKENTTIWTSGSSISFCGVNSDTANWSWPDGAELPFTIDK

SEQ ID NO: 16229 - protein, 470 aa, synthetic construct
  REGION 1..470: note = neuraminidase__InfluenzaA__ABW81478
MNPNQKIITIGSISIAIGIISLMLQIGNIISIWASHSIQTGSQNHTGICNQRIITYENSTWVNHTYVNINNTNVVAGKDKTSVTLAGNSSLCSISGWAIYTKDNSIRIGSKGDVFVIREPFISCSHLECRTFFLTQGALLNDKHSNGTVKDRSPYRALMSCPLGEAPSPYNSKFESVAWSASACHDGMGWLTIGISGPDNGAVAVLKYNGIITETIKSWKKRILRTQESECVCVNGSCFTIMTDGPSNGAASYKIFKIEKGKVTKSIELNAPNFHYEECSCYPDTGTVMCVCRDNWHGSNRPWVSFNQNLDYQIGYICSGVFGDNPRPKDGEGSCNPVTVDGADGVKGFSYKYGNGVWIGRTKNNRLRKGFEMIWDPNGWTDTDSDFSVKQDVVAITDWSGYSGSFVQHPELTGLDCIRPCFWVELVRGLPRENTTIWTSGSSISFCGVNSDTANWSWPDGAELPFTIDK

SEQ ID NO: 16230 - protein, 470 aa, synthetic construct
  REGION 1..470: note = neuraminidase__InfluenzaA__ABW81479
MNPNQKIITIGSISVAIGIISLILQIGNIISIWASHSIQTGSQNYTGICNQKIITYENRTWVNQTYVNINNTNVVAGKDKPSMTLAGNSSLCPIRGWAIYTKDNSIRIGSKGDVFVIREPFISCSHLECRTFFLTQGALLNDKHSNGTIKDRSPFRALMSCPLGEAPSPYNSRFESVAWSASACHDGLGWLTIGISGPDNGAVAVLKYNGIITETIKSWKKQILRTQESECVCVNGSCFTIMTDGPSNRAASYRIFKIEKGRVTKSIELDAPNYHYEECSCYPDTGTVMCVCRDNWHGSNRPWVSFNQNLDYQIGYICSGVFGDNPRPKDGEGSCNPVTVDGADGIKGFSYRYGNGVWIGRTKSNRLRKGFEMIWDPNGWTDTDSDFSMKQDVVAMTDWSGYSGSFVQHPELTGLDCMRPCFWVELVRGLPRENTTIWTSGSSISFCGVNSETANWSWPDGAELPFTIDK

SEQ ID NO: 16231 - protein, 470 aa, synthetic construct; identical to SEQ ID NO: 14396
  REGION 1..470: note = neuraminidase__InfluenzaA__ABW81480

SEQ ID NO: 16232 - protein, 470 aa, synthetic construct
  REGION 1..470: note = neuraminidase__InfluenzaA__ABW81481
MNPNQKIITIGSISVAIGIISLILQIGNIISIWASHSIQTGSQNYTGICNQKIITYENRTWVNQTYVNINNTNVVAGKDKPSMTLAGNSSLCPIRGWAIYTKDNSIRIGSKGDVFVIREPFISCSHLECRTFFLTQGALLNDKHSNGTIKDRSPFRALMSCPLGEAPSPYNSRFESVAWSASACHDGLGWLTIGISGPDNGAVAVLKYNGIITETIKSWKKQILRTQESECVCVNGSCFTIMTDGPSNRAASYRIFKIEKGRVTKSIELDAPNYHYEECSCYPDTGTVMCVCRDNWHGSNRPWVSFNQNLDYQIGYICSGVFGDNPRPKDGEGSCNPVTVDGADGVKGFSYRYGNGVWIGRTKSNRLRKGFEMIWDPNGWTDTDSDFSMKQDVVAMTDWSGYSGSFVQHPELTGLDCMRPCFWVELVRGLPRENTTIWTSGSSISFCGVNSETANWSWPDGAELPFTIDK

SEQ ID NO: 16233 - protein, 470 aa, synthetic construct
  REGION 1..470: note = neuraminidase__InfluenzaA__ABW81482
MNPNQKIITIGSISVAIGIISLILQIGNIISIWASHSIQTGSQNYTGICNQKIITYENRTWVNQTYVNINNTNVVAGKDKPSMTLAGNSSLCPIRGWAIYTKDNSIRIGSKGDVFVIREPFISCSHLECRTFFLTQGALLNDKHSNGTIKDRSPFRALMSCPLGEAPSPYNSRFESVAWSASACHDGLGWLTIGISGPDNGAVAVLKYNGIITETIKSWKKQILRTQESECVCVNGSCFTIMTDGPSNRAASYRIFKIEKGRVTKSIELDAPNYHYEECSCYPDTGTVMCVCRDNWHGSNRPWVSFNQNLDYQIGYICSGVFGDNPRPKDGEGSCNPVTVDGADGVKGFSYRYGNGVWIGRTKSNRLRKGFEMIWDPNGWTDTDSDFSMKQDVVAMTDWSGYSGSFVQHPELTGLACMRPCFWVELVRGLPRENTTIWTSGSSISFCGVNSETANWSWPDGAELPFTIDK

SEQ ID NO: 16234 - protein, 470 aa, synthetic construct; identical to SEQ ID NO: 14386
  REGION 1..470: note = neuraminidase__InfluenzaA__ABW81483

SEQ ID NO: 16235 - protein, 470 aa, synthetic construct
  REGION 1..470: note = neuraminidase__InfluenzaA__ABW81484
MNPNQKIITIGSISIAIGIISLMLQIGNIISIWASHSIQTGNQNHTGICNQRIITYENSTWVNHTYVNINNTNVVAGKGKTSVTLAGNSSLCSISGWAIYTKDNSIRIGSKGDVFVIREPFISCSHLECRTFFLTQGALLNDKHSNGTVKDRSPYRALMSCPLGEAPSPYNSKFESVAWSASACHDGMGWLTIGISGPDNGAVAVLKYNGIITETIKSWKKRILRTQESECVCVNGSCFTIMTDGPSNGAASYKIFKIEKGKVTKSIELNAPNFHYEECSCYPDTGTVMCVCRDNWHGSNRPWVSFNQNLDYQIGYICSGVFGDNPRPKDGKGSCNPVTVDGADGVKGFSYKYGNGVWIGRTKSNRLRKGFEMIWDPNGWTDTDSDFSVKQDVVAITDWSGYSGSFVQHPELTGLDCIRPCFWVELVRGLPRENTTIWTSGSSISFCGVDSDTANWSWPDGAELPFTIDK

SEQ ID NO: 16236 - protein, 470 aa, synthetic construct
  REGION 1..470: note = neuraminidase__InfluenzaA__ABW81487
MNPNQKIITIGSISIAIGIISLMLQIGNIISIWASHSIQTGSQNHTGICNQRIITYENSTWVNHTYVNINNTNVVAGKDKTSVTLAGNSSLCSISGWAIYTKDNSIRIGSKGDVFVIREPFISCSHLECRTFFLTQGALLNDKHSNGTVKDRSPYRALMSCPLGEAPSPYNSKFESVAWSASACHDGMGWLTIGISGPDNGAVAVLKYNGIITETIKSWKKRILRTQESECVCVNGSCFTIMTDGPSNGAASYKIFKIEKGKVTKSIELNAPNFHYEECSCYPDTGTVMCVCRDNWHGSNRPWVSFNQNLDYQIGYICSGVFGDNPRPKDGKGSCNPVTVDGADGVKGFSYKYGNGVWIGRTKSNRLRKGFEMIWDPNGWTDTDSDFSVKQDVVAITDWSGYSGSFIQHPELTGLDCIRPCFWVELVRGLPRENTTIWTSGSSISFCGVDSDTANWSWPDGAELPFTIDK

SEQ ID NO: 16237 - protein, 470 aa, synthetic construct; identical to SEQ ID NO: 14386
  REGION 1..470: note = neuraminidase__InfluenzaA__ABW81488

SEQ ID NO: 16238 - protein, 470 aa, synthetic construct; identical to SEQ ID NO: 14386
  REGION 1..470: note = neuraminidase__InfluenzaA__ABW81489

SEQ ID NO: 16239 - protein, 470 aa, synthetic construct
  REGION 1..470: note = neuraminidase__InfluenzaA__ABW81490
MNPNQKIITIGSISIAIGIISLMLQIGNIISIWASHSIQTGSQNHTGICNQRIITYENSTWVNHTYVNINNTNVVAGKDKTSVTLAGNSSLCSISGWAIYTKDNSIRIGSKGDVFVIREPFISCSHLECKTFFLTQGALLNDKHSNGTVKDRSPYRALMSCPLGEAPSPYNSKFESVAWSASACHDGMGWLTIGISGPDNGAVAVLKYNGIITETIKSWKKRILRTQESECVCVNGSCFTIMTDGPSNGAASYKIFKIEKGKVTKSIELNAPNFHYEECSCYPDTGTVMCVCRDNWHGSNRPWVSFNQNLDYQIGYICSGVFGDNPRPKDGKGSCNPVTVDGADGVKGFSYKYGNGVWIGRTKSNRLRKGFEMIWDPNGWTDTDSDFSVKQDVVAITDWSGYSGSFVQHPELTGLDCIRPCFWVELVRGLPRENTTIWTSGSSISFCGVDSDTANWSWPDGAELPFTIDK

SEQ ID NO: 16240 - protein, 470 aa, synthetic construct
  REGION 1..470: note = neuraminidase__InfluenzaA__ABW81491
MNPNQKIITIGSISIAIGIISLMLQIGNIISIWASHSIQTGSQNHTGICNQRIITYENSTWVNHTYVNINNTNVVAGKDKTSVTLAGNSSLCSISGWAIYTKDNSIRIGSKGDVFVIREPFISCSHLECRTFFLTQGALLNDKHSNGTVKDRSPYRALMSCPLGEAPSPYNSKFESVAWSASACHDGMGWLTIGISGPDNGAVAVLKYNGIITETIKSWEKRILRTQESECVCVNGSCFTIMTDGPSNGAASYKIFKIEKGKVTKSIELNAPNFHYEECSCYPDTGTVMCVCRDNWHGSNRPWVSFNQNLDYQIGYICSGVFGDNPRPKDGKGSCNPVTVDGADGVKGFSYKYGNGVWIGRTKSNRLRKGFEMIWDPNGWTDTDSDFSVKQDVVAITDWSGYSGSFVQHPELTGLDCIRPCFWVELVRGLPRENTTIWTSGSSISFCGVDSDTANWSWPDGAELPFTIDK

SEQ ID NO: 16241 - protein, 470 aa, synthetic construct
  REGION 1..470: note = neuraminidase__InfluenzaA__ABW81492
MNPNQKIITIGSISIAIGIISLMLQIGNIISIWASHSIQTGSQNHTGICNQRIITYENSTWVNHTYVNINNTNVVAGKDKTSVTLAGNSSLCSISGWAIYTKDNSIRIGSKGDVFVIREPFISCSHLECRTFFLTQGALLNDKHSNGTVKDRSPYRALMSCPLGEAPSPYNSKFESVAWSASACHDGMGWLTIGISGPDNGAVAVLKYNGIITETIKSWKKRILRTQESECVCVNGSCFTIMTDGPSNGAASYKIFKIEKGKVTKSIELNAPNFHYEECSCYPDTGTVMCVCRDNWHGSNRPWVSFNQNLDYQIGYICSGVFGDNPRPKDGKGSCNPVTVDGADGVKGFSYKYGNGVWIGRTKSNRLRKGFEMIWDPNGWTDTDSDFSVKQDVVAITDWSGYSGSFVQHPELTGLDCIRPCFWVELVRGLPRENTTIWASGSSISFCGVDSDTANWSWPDGAELPFTIDK

SEQ ID NO: 16242 - protein, 470 aa, synthetic construct; identical to SEQ ID NO: 14386
  REGION 1..470: note = neuraminidase__InfluenzaA__ABW81493

SEQ ID NO: 16243 - protein, 470 aa, synthetic construct; identical to SEQ ID NO: 14386
  REGION 1..470: note = neuraminidase__InfluenzaA__ABW81494

SEQ ID NO: 16244 - protein, 470 aa, synthetic construct; identical to SEQ ID NO: 14386
  REGION 1..470: note = neuraminidase__InfluenzaA__ABW81495

SEQ ID NO: 16245 - protein, 470 aa, synthetic construct; identical to SEQ ID NO: 16240
  REGION 1..470: note = neuraminidase__InfluenzaA__ABW81497

SEQ ID NO: 16246 - protein, 470 aa, synthetic construct
  REGION 1..470: note = neuraminidase__InfluenzaA__ABW81498
MNPNQKIITIGSISIAIGIISLMLQIGNIISIWASHSIQTGSQNHTGICNQRIITYENSTWVNHTYVNINNTNVVAGKDKTSVTLAGNSSLCSISGWAIYTKDNSIRIGSKGDVFVIREPFISCSHLECRTFFLTQGALLNDKHSNGTVKDRSPYRALMSCPLGEAPSPYNSKFESVAWSASACHDGMGWLTIGISGPDNGAVAVLKYNGIITETIKSWEKRILRTQESECVCVNGSCFTIMTDGPSNGAASYKIFKIEKGKVTKSIELNAPNFHYEECSCYPDTGTVMCVCRDNWHGSNRPWVSFNQNLDYQVGYICSGVFGDNPRPKDGKGSCNPVTVDGADGVKGFSYKYGNGVWIGRTKSNRLRKGFEMIWDPNGWTDTDSDFSVKQDVVAITDWSGYSGSFVQHPELTGLDCIRPCFWVELVRGLPRENTTIWTSGSSISFCGVDSDTANWSWPDGAELPFTIDK

SEQ ID NO: 16247 - protein, 470 aa, synthetic construct
  REGION 1..470: note = neuraminidase__InfluenzaA__ABW81499
MNPNQKIITIGSISIAIGIISLMLQIGNIISIWASHSIQTGSQNHTGICNQRIITYENSTWVNHTYVNINNTNVVAGRDKTSVTLAGNSSLCSISGWAIYTKDNSIRIGSKGDVFVIREPFISCSHLECRTFFLTQGALLNDKHSNGTVKDRSPYRALMSCPLGEAPSPYNSKFESVAWSASACHDGMGWLTIGISGPDNGAVAVLKYNGIITETIKSWKKRILRTQESECVCVNGSCFTIMTDGPSNGAASYKIFKIEKGKVTKSIELNAPNFHYEECSCYPDTGTVMCVCRDNWHGSNRPWVSFNQNLDYQIGYICSGVFGDNPRPKDGKGSCNPVTVDGADGVKGFSYKYGNGVWIGRTKSNRLRKGFEMIWDPNGWTDTDSDFSVKQDVVAITDWSGYSGSFVQHPELTGLDCIRPCFWVELVRGLPRENTTIWTSGSSISFCGVDSDTANWSWPDGAELPFTIDK

SEQ ID NO: 16248 - protein, 470 aa, synthetic construct
  REGION 1..470: note = neuraminidase__InfluenzaA__ABW81500
MNPNQKIITIGSISIAIGIISLMLQIGNIISIWASHSIQTGSQNHTGICNQRIITYENSTWVNHTYVNINNTNVVAGKDKTSVTLAGNSSLCSISGWAIYTKDNSIRIGSKGDVFVIREPFISCSHLECRTFFLTQGALLNDKHSNGTVKDRSPYRALMSCPLGEAPSPYNSKFESVAWSASACHDGMGWLTIGISGPDNGAVAVLKYNGIITETIKSWKKRILRTQESECVCVNGSCFTIMTDGPSNGAASYKIFKIEKGKVTKSIELNAPNFHYEECSCYPDTGTVMCVCRDNWHGSNRPWVSFNQNLDYQIGYICSGVFGDNPRPKDGKGSCNPVTADGADGVKGFSYKYGNGVWIGRTKSNRLRKGFEMIWDPNGWTDTDSDFSVKQDVVAITDWSGYSGSFVQHPELTGLDCIRPCFWVELVRGLPRENTTIWTSGSSISFCGVDSDTANWSWPDGAELPFTIDK

SEQ ID NO: 16249 - protein, 470 aa, synthetic construct
  REGION 1..470: note = neuraminidase__InfluenzaA__ABW81501
MNPNQKIITIGSISIAIGIISLMLQIGNIISIWASHSIQTGSQNHTGICNQKIITYENSTWVNHTYVNINNTNVVAGKDKTSVTLAGNSSLCSVSGWAIYTKDNSIRIGSKGDVFVIREPFISCSHLECRTFFLTQGALLNDKHSNGTVKDRSPYRALMSCPLGEAPSPYNSKFESVAWSASACHDGMGWLTIGISGPDNGAVAVLKYNGIITETIKSWKKRILRTQESECVCVNGSCFTIMTDGPSNGAASYKIFKIEKGKVTKSIELNAPNFHYEECSCYPDTGTVMCVCRDNWHGSNRPWVSFNQNLDYQIGYICSGVFGDNPRPKDGKGSCNPVTVDGADGVKGFSYKYGNGVWIGRTKSNRLRKGFEMIWDPNGWTDTDSDFSVKQDVVAITDWSGYSGSFVQHPELTGLDCIRPCFWVELVRGLPRENTTIWTSGSSISFCGVDSDTANWSWPDGAELPFTIDK

SEQ ID NO: 16250 - protein, 470 aa, synthetic construct; identical to SEQ ID NO: 16071
  REGION 1..470: note = neuraminidase__InfluenzaA__ABW86324

SEQ ID NO: 16251 - protein, 470 aa, synthetic construct; identical to SEQ ID NO: 16043
  REGION 1..470: note = neuraminidase__InfluenzaA__ABW86335

SEQ ID NO: 16252 - protein, 470 aa, synthetic construct; identical to SEQ ID NO: 16030
  REGION 1..470: note = neuraminidase__InfluenzaA__ABW86346

SEQ ID NO: 16253 - protein, 470 aa, synthetic construct; identical to SEQ ID NO: 16030
  REGION 1..470: note = neuraminidase__InfluenzaA__ABW86357

SEQ ID NO: 16254 - protein, 470 aa, synthetic construct; identical to SEQ ID NO: 16030
  REGION 1..470: note = neuraminidase__InfluenzaA__ABW86368

SEQ ID NO: 16255 - protein, 470 aa, synthetic construct; identical to SEQ ID NO: 16056
  REGION 1..470: note = neuraminidase__InfluenzaA__ABW86379

SEQ ID NO: 16256 - protein, 470 aa, synthetic construct; identical to SEQ ID NO: 16030
  REGION 1..470: note = neuraminidase__InfluenzaA__ABW86390

SEQ ID NO: 16257 - protein, 470 aa, synthetic construct; identical to SEQ ID NO: 16071
  REGION 1..470: note = neuraminidase__InfluenzaA__ABW86401

SEQ ID NO: 16258 - protein, 470 aa, synthetic construct; identical to SEQ ID NO: 16030
  REGION 1..470: note = neuraminidase__InfluenzaA__ABW86412

SEQ ID NO: 16259 - protein, 470 aa, synthetic construct
  REGION 1..470: note = neuraminidase__InfluenzaA__ABW86423
MNPNQKIITIGSISIAIGIISLMLQIGNIISIWASHSIQTGSQNHTGICNQRIITYENSTWVNHTYVNINNTNVVAGKDKTSVTLAGNSSLCSISGWAIYTKDNSIRIGSKGDVFVIREPFISCSHLECRTFFLTQGALLNDKHSNGTVKDRSPYRALMSCPLGEAPSPYNSKFESVAWSASACHDGMGWLTIGISGPDNGAVAVLKYNGIITETIKSWKKRILRTQESECVCVNGSCFAIMTDGPSNGAASYKIFKIEKGKVTKSIELNAPNFHYEECSCYPDTGTVMCVCRDNWHGSNRPWVSFNQNLDYQVGYICSGVFGDNPRPKDGKGSCNPMTVDGADGVKGFSYKYGNGVWIGRTKSNKLRKGFEMIWDPNGWTDTDSDFSVKQDVVAITDWSGYSGSFVQHPELTGLDCIRPCFWVELVRGLPRENTTIWTSGSSISFCGVDSDTANWSWPDGAELPFTIDK

SEQ ID NO: 16260 - protein, 470 aa, synthetic construct; identical to SEQ ID NO: 16030
  REGION 1..470: note = neuraminidase__InfluenzaA__ABW86434

SEQ ID NO: 16261 - protein, 470 aa, synthetic construct; identical to SEQ ID NO: 16030
  REGION 1..470: note = neuraminidase__InfluenzaA__ABW86445

SEQ ID NO: 16262 - protein, 470 aa, synthetic construct; identical to SEQ ID NO: 16065
  REGION 1..470: note = neuraminidase__InfluenzaA__ABW86456

SEQ ID NO: 16263 - protein, 470 aa, synthetic construct
  REGION 1..470: note = neuraminidase__InfluenzaA__ABW86467
MNTNQKIITIGSISIAIGIISLMLQIGNIISIWASHSIQTGSQNHTGICNQRIITYENSTWVNHTYVSINNTNVVAGKDKTSVTLAGNSSLCSISGWAIYTKDNSIRIGSKGDVFVIREPFISCSHLECRTFFLTQGALLNDKHSNGTVKDRSPYRALMSCPLGEAPSPYNSKFESVAWSASACHDGMGWLTIGISGPDNGAVAVLKYNGIITETIKSWKKRILRTQESECVCVNGSCFTIMTDGPSNGAASYKIFKIEKGKVTKSIELNAPNFHYEECSCYPDTGTVMCVCRDNWHGSNRPWVSFNQNLDYQIGYICSGVFGDNPRPKDGKGSCNPVTVDGADGVKGFSYKYGNGVWIGRTKSNRLRKGFEMIWDPNGWTDTDSDFSIKQDVVAITDWSGYSGSFVQHPELTGLDCIRPCFWVELVRGLPRENTTIWTSGSSISFCGVDSDTANWSWPDGAELPFTIDK

SEQ ID NO: 16264 - protein, 470 aa, synthetic construct; identical to SEQ ID NO: 16065
  REGION 1..470: note = neuraminidase__InfluenzaA__ABW86478

SEQ ID NO: 16265 - protein, 470 aa, synthetic construct
  REGION 1..470: note = neuraminidase__InfluenzaA__ABW86489
MNPNQKIITIGSISIAIGIISLMLQIGNIISIWASHSIQTGSQNHTGICNQRIITYENSTWVNHTYVSINNTNVVAGKDKTSVTLAGNSSLCSISGWAIYTKDNSIRIGSKGDVFVIREPFISCSHLECRTFFLTQGALLNDKHSNGTVKDRSPYRALMSCPLGEAPSPYNSKFESVAWSASACHDGMGWLTIGISGPDNGAVAVLKYNGIITETIKSWKKRILRTQESECVCVNGSCFTIMTDGPSNGAASYKIFKIEKGKVTKSIELNAPNFHYEECSCYPDTGTVMCVCRDNWHGSNRPWVSFNQNLDYQIGYICSGVFGDNPRPKDGKGSCNPVTVDGADGVKGFSYKYGNGVWIGRTKSNRLRKGFEMIWDPNGWTDTDSDFSVKQDVVGITDWSGYSGSFVQHPELTGLDCIRPCFWVELVRGLPRENTTIWTSGSSISFCGVDSDTANWSWPDGAELPFTIDK

SEQ ID NO: 16266 - protein, 470 aa, synthetic construct
  REGION 1..470: note = neuraminidase__InfluenzaA__ABW86500
MNPNQKIMTIGSISIAIGIISLMLQIGNIISIWASHSIQTGSQNHTGICNQRIITYENSTWVNHTYVNINNTNVVAGKDKTSVTLAGNSSLCSISGWAIYTKDNSIRIGSKGDVFVIREPFISCSHLECRTFFLTQGALLNDKHSNGTVKDRSPYRALMSCPLGEAPSPYNSKFESVAWSASACHDGMGWLTIGISGPDNGAVAVLKYNGIITETIKSWKKRILRTQESECVCVNGSCFTIMTDGPSNGAASYKIFKIEKGKVTKSIELNAPNFHYEECSCYPDTGTVMCVCRDNWHGSNRPWVSFNQNLDYQIGYICSGVFGDNPRPKDGKGSCNPVTVDGADGVKGFSYKYGNGVWIGRTKSNRLRKGFEMIWDPNGWTNTDSDFSMKQDVVAITDWSGYSGSFVQHPELTGLDCIRPCFWVELVRGLPRENTTIWTSGSSISFCGVDSDTANWSWPDGAELPFTIDK

SEQ ID NO: 16267 - protein, 470 aa, synthetic construct; identical to SEQ ID NO: 16030
  REGION 1..470: note = neuraminidase__InfluenzaA__ABW86511

SEQ ID NO: 16268 - protein, 470 aa, synthetic construct
  REGION 1..470: note = neuraminidase__InfluenzaA__ABW86522
MNPNQKIITIGSISIAIGIISLMLQIGNIISIWASHSIQTGSQNHTGICNQRIITYENSTWVNHTYVNINNTNVVAGKDKTSVTLAGNSSLCSISGWAIYTKDNSIRIGSKGDVFVIREPFISCSHLECRTFFLTQGALLNDKHSNGTVKDRSPYRALMSCPLGEAPSPYNSKFESVAWSASACHDGMGWLTIGISGPDNGAVAVLKYNGIITETIKSWKKRILRTQESECVCVNGSCFTIMTDGPSNGAASYKIFKIEKGKVTKSIELNAPNFHYEECSCYPDTGTVMCVCRDNWHGSNRPWVSFNQNLDYQVGYICSGVFGDNPRPKDGKGSCNPMTVDGADGVKGFSYKYGNGVWIGRTKSNKLRKGFEMIWDPNGWTDTDSDFSVKQDVVAVTDWSGYSGSFVQHPELTGLDCIRPCFWVELVRGLPRENATIWTSGSSISFCGVDSDTANWSWPDGAELPFTIDK

SEQ ID NO: 16269 - protein, 470 aa, synthetic construct; identical to SEQ ID NO: 16030
  REGION 1..470: note = neuraminidase__InfluenzaA__ABW86533

SEQ ID NO: 16270 - protein, 470 aa, synthetic construct; identical to SEQ ID NO: 16065
  REGION 1..470: note = neuraminidase__InfluenzaA__ABW86544

SEQ ID NO: 16271 - protein, 470 aa, synthetic construct; identical to SEQ ID NO: 16030
  REGION 1..470: note = neuraminidase__InfluenzaA__ABW86555

SEQ ID NO: 16272 - protein, 469 aa, synthetic construct
  REGION 1..469: note = neuraminidase__InfluenzaA__ABW86566
MNPNQKIITIGSVSLTISTICFFMQTAILITTVTLHFKQYEFNSPPNNQVMLCEPTVIERNITEIVYLTNTTIEKEICPKLAEYRNWSKPQCDITGFAPFSKDNSIRLSAGGDIWVTREPYVSCDPDKCYQFALGQGTTLNNVHSNDTVRDRTPYRTLLMNELGVPFHLGTKQVCIAWSSSSCHDGKAWLHVCITGDDKNATASFIYNGRLVDSIVSWSKEILRTQESECVCINGTCTVVMTDGSASGKADTKILFIEEGKIVHTSTLSGSAQHVEECSCYPRYPGVRCVCRDNWKGSNRPIVDINIKDHSIVSSYVCSGLVGDTPRKNDSSSSSHCLDPNNEEGGHGVKGWAFDDGNDVWMGRTISEKSRLGYETFKVIEGWSNPKSKLQINRQVIVDRGNRSGYSGIFSVEGKSCINRCFYVELIRGRKEETEVLWTSNSIVVFCGTSGTYGTGSWPDGADINLMPI

SEQ ID NO: 16273 - protein, 470 aa, synthetic construct; identical to SEQ ID NO: 16056
  REGION 1..470: note = neuraminidase__InfluenzaA__ABW86609

SEQ ID NO: 16274 - protein, 470 aa, synthetic construct; identical to SEQ ID NO: 15059
  REGION 1..470: note = neuraminidase__InfluenzaA__ABW91188

SEQ ID NO: 16275 - protein, 469 aa, synthetic construct
  REGION 1..469: note = neuraminidase__InfluenzaA__ABW91210
MNPNQKIITIGSVSLTISTICFFMQIAILITTVTLHFKQYEFNSPPNNQVILCEPTIIERNITEIVYLTNTTIEKEICPKLAEYRNWSKPQCDITGFAPFSKDNSIRLSAGGDIWVTREPYVSCDPDKCYQFALGQGTTLNNVHSNDTVRDRTPYRTLLMNELGVPFHLGTKQVCIAWSSSSCHDGKAWLHVCITGDDKNATASFIYNGRLVDSIVSWSKEILRTQESECVCINGTCTVVMTDGSASGKADTKILFIEEGKIVHTSTLSGSAQHVEECSCYPRYPGVRCVCRDNWKGSNRPIVDINIKDHSIVSSYVCSGLVGDTPRKNDSSSSSHCLDPNNEEGGHGVKGWAFDDGNDVWMGRTISEKSRLGYETFKVIEGWSNPKSKLQINRQVIVDRGNRSGYSGIFSVEGKSCINRCFYVELIRGRKEETEVLWTSNSIVVFCGTSGTYGTGSWPDGADINLMPI

SEQ ID NO: 16276 - protein, 470 aa, synthetic construct; identical to SEQ ID NO: 16030
  REGION 1..470: note = neuraminidase__InfluenzaA__ABW91221

SEQ ID NO: 16277 - protein, 469 aa, synthetic construct
  REGION 1..469: note = neuraminidase__InfluenzaA__ABW91232
MNPNQKIITIGSVSLTISTICFFMQIAILITTVTLHFKQYEFNSPPNNQVMLCESTIIERNITEIVYLTNTTIEKEICPKLAEYRNWSKPQCDITGFAPFSKDNSIRLSAGGDIWVTREPYVSCDPDKCYQFALGQGTTLNNVHSNDTVRDRTPYRTLLMNELGVPFHLGTKQVCIAWSSSSCHDGKAWLHVCITGDDKNATASFIYNGRLVDSIVSWSKEILRTQESECVCINGTCTVVMTDGSASGKADTKILFIEEGKIVHTSTLSGSAQHVEECSCYPRYPGVRCVCRDNWKGSNRPIVDINIKDHSIVSSYVCSGLVGDTPRKNDSSSSGHCLDPNNEEGGHGVKGWAFDDGNDVWMGRTISEKSRLGYETFKVIEGWSNPKSKLQINRQVIVDRGNRSGYSGIFSVEGKSCINRCFYVELIRGRKEETEVLWTSNSIVVFCGTSGTYGTGSWPDGADINLMPI

SEQ ID NO: 16278 - protein, 469 aa, synthetic construct; identical to SEQ ID NO: 16066
  REGION 1..469: note = neuraminidase__InfluenzaA__ABW91243

SEQ ID NO: 16279 - protein, 469 aa, synthetic construct; identical to SEQ ID NO: 15884
  REGION 1..469: note = neuraminidase__InfluenzaA__ABW91254

SEQ ID NO: 16280 - protein, 469 aa, synthetic construct; identical to SEQ ID NO: 15884
  REGION 1..469: note = neuraminidase__InfluenzaA__ABW91265

SEQ ID NO: 16281 - protein, 470 aa, synthetic construct; identical to SEQ ID NO: 16030
  REGION 1..470: note = neuraminidase__InfluenzaA__ABW91276

SEQ ID NO: 16282 - protein, 470 aa, synthetic construct
  REGION 1..470: note = neuraminidase__InfluenzaA__ABW91287
MNPNQKIITIGSISIAIGIISLILQIGNIISIWASHSIQTGSQNHTGICNQRIITYENSTWVNNTYVNINNTNVVAEKDKTSVTLAGNSSLCSISGWAIYTKDNSIRIGSKGDIFVIREPFISCSHLECRTFFLTQGALLNDKHSNGTVKDRSPYRALMSCPLGEAPSPYNSRFESVAWSASACHDGMGWLTIGISGPDNGAVAVLKYNGIITETIKSWKKRILRTQESECVCMNGSCFTIMTDGPSNGAASYKIFKIEKGKVTKTIELNAPNFHYEECSCYPDTGTVMCVCRDNWHGSNRPWVSFNQNLDYQIGYICSGVFGDNPRPKDGEGSCNPVTVDGADGVKGFSYKYGNGVWIGRTKSNRLRKGFEMIWDPNGWTNTDSDFSVKQDIVAITDWSGYSGSFVQHPELTGLDCIRPCFWVELVRGLPRENTTIWTSGSSISFCGVNSGTANWSWPDGAELPFTIDK

SEQ ID NO: 16283 - protein, 470 aa, synthetic construct; identical to SEQ ID NO: 16030
  REGION 1..470: note = neuraminidase__InfluenzaA__ABW91298

SEQ ID NO: 16284 - protein, 470 aa, synthetic construct
  REGION 1..470: note = neuraminidase__InfluenzaA__ABW91309
MNPNQKIITIGSISIAIGIISLMLQIGNIISIWASHSIQTGSQNHTGICNQRIITYENSTWVNHTYVSINNTNVVAGKDKTSVTLAGNSSLCSISGWAIYTKDNSIRIGSKGDVFVIREPFISCSHLECRTFFLTQGALLNDKHSNGTVKDRSPYRALMSCPLGEAPSPYNSKFESVAWSASACHDGMGWLTIGISGPDNGAVAVLKYNGIITETIKSWKKRILRTQESECVCVNGSCFTIMTDGPSDGAASYKIFKIEKGKVTKSIELNAPNFHYEECSCYPDTGTVMCVCRDNWHGSNRPWVSFNQNLDYQIGYICSGVFGDNPRPKDGKGSCNPVTADGADGVKGFSYKYGNGVWIGRTKSNRLRKGFEMIWDPNGWTDTDSDFSVKQDVVAITDWSGYSGSFVQHPELTGLDCIRPCFWVELVRGLPRENTTIWTSGSSISFCGVDSDTANWSWPDGAELPFTIDK

SEQ ID NO: 16285 - protein, 470 aa, synthetic construct; identical to SEQ ID NO: 16030
  REGION 1..470: note = neuraminidase__InfluenzaA__ABW91320

SEQ ID NO: 16286 - protein, 470 aa, synthetic construct; identical to SEQ ID NO: 16030
  REGION 1..470: note = neuraminidase__InfluenzaA__ABW91331

SEQ ID NO: 16287 - protein, 470 aa, synthetic construct; identical to SEQ ID NO: 16030
  REGION 1..470: note = neuraminidase__InfluenzaA__ABW91342

SEQ ID NO: 16288 - protein, 470 aa, synthetic construct; identical to SEQ ID NO: 16030
  REGION 1..470: note = neuraminidase__InfluenzaA__ABW91353

SEQ ID NO: 16289 - protein, 470 aa, synthetic construct
  REGION 1..470: note = neuraminidase__InfluenzaA__ABW91364
MNTNQKIITIGSISIAIGIISLMLQIGNIISIWASHSIQTGSQNHTGICNQRIITYENSTWVNHTYVNINNTNVVTGKDKTSVTLAGNSSLCSISGWAIYTKDNSIRIGSKGDVFVIREPFISCSHLECRTFFLTQGALLNDKHSNGTVKDRSPYRALMSCPLGEAPSPYNSKFESVAWSASACHDGMGWLTIGISGPDNGAVAVLKYNGIITETIKSWKKRILRTQESECVCVNGSCFTIMTDGPSDGAASYKIFKIEKGKVTKSIELNAPNFHYEECSCYPDTGTVMCVCRDNWHGSNRPWVSFNQNLDYQIGYICSGVFGDNPRPKDGKGSCNPVTVDGADGVKGFSYKYGNGVWIGRTKSNKLRKGFEMIWDPNGWTDTDNDFSVKQDVVAITDWSGYSGSFVQHPELTGLDCIRPCFWVELVRGLPRENTTIWTSGSSISFCGVDSDTANWSWPDGAELPFTIDK

SEQ ID NO: 16290 - protein, 470 aa, synthetic construct; identical to SEQ ID NO: 16030
  REGION 1..470: note = neuraminidase__InfluenzaA__ABW91375

SEQ ID NO: 16291 - protein, 470 aa, synthetic construct; identical to SEQ ID NO: 16056
  REGION 1..470: note = neuraminidase__InfluenzaA__ABW91386

SEQ ID NO: 16292 - protein, 469 aa, synthetic construct
  REGION 1..469: note = neuraminidase__InfluenzaA__ABW91397
MNPNQKIITIGSVSLTISTICFFMQIAILITTVTLHFKQYEFNSPPNNQVMLCEPTIIERNITEIVYLTNTTIEKEICPKLAEYRNWSKPQCDITGFAPFSKDNSIRLSAGGDIWVTREPYVSCDPDKCYQFALGQGTTLNNVHSNDTVRDRTPYRTLLMNELGVPFHLGTKQVCIAWSSSSCHDGKAWLHVCITGDDKNATASFIYNGRLVDSIVSWSKEILRTQESECICINGTCTVVMTDGSASGKADTKILFIEEGKIVHTSTLSGSAQHVEECSCYPRYPGVRCVCRDNWKGSNRPIVDINIKDHSIVSSYVCSGLVGDTPRKNDSSSSSHCLDPNNEEGGHGVKGWAFDDGNDVWMGRTISEKSRLGYETFKVIEGWSNPKSKLQINRQVIVDRGNRSGYSGIFSVEGKSCINRCFYVELIRGRKEETEVLWTSNSIVVFCGTSGTYGTGSWPDGADINLMPI

SEQ ID NO: 16293 - protein, 470 aa, synthetic construct; identical to SEQ ID NO: 16201
  REGION 1..470: note = neuraminidase__InfluenzaA__ABW91408

SEQ ID NO: 16294 - protein, 470 aa, synthetic construct
  REGION 1..470: note = neuraminidase__InfluenzaA__ABW91419
MNPNQKIITIGSISIAIGIISLMLQIGNIISIWASHSIQTGSQNHTGICNQRIITYENSTWVNHTYVNINNTNVVAEKDKTSVTLAGNSSLCSISGWAIYTKDNSIRIGSKGDVFVIREPFISCSHLECRTFFLTQGALLNDKHSNGTVKDRSPYRALMSCPLGEAPSPYNSKFESVAWSASACHDGMGWLTIGISGPDNGAVAVLKYNGIITETIKSWKKRILRTQESECVCVNGSCFTIMTDGPSNGAASYKIFKIEKGKVTKSIELNAPNFHYEECSCYPDTGTVMCVCRDNWHGSNRPWVSFNQNLDYQVGYICSGVFGDNPRPKDGKGSCNPMTVDGADGVKGFSYKYGNGVWIGRTKSNKLRKGFEMIWDPNGWTDTDSDFSVKQDVVAITDWSGYSGSFVQHPELTGLDCIRPCFWVELVRGLPRENTTIWTSGSSISFCGVDSDTANWSWPDGAELPFTIDK

SEQ ID NO: 16295 - protein, 470 aa, synthetic construct
  REGION 1..470: note = neuraminidase__InfluenzaA__ABW91430
MNPNQKIITIGSISIAIGIISLMLQIGNIISIWASHSIQTGSQNHTGICNQRIITYENSTWVNHTYVNINNTNVVAGKDKTSVTLAGNSSLCSISGWAIYTKDNSIRIGSKGDVFVIREPFISCSHLECRTFFLTQGALLNDKHSNGTVKDRSPYRALMSCPLGEAPSPYNSKFESVAWSASACHDGMGWLTIGISGPDNGSVAVLKYNGIITETIKSWKKRILRTQESECVCVNGSCFTIMTDGPSNGAASYKIFKIEKGKVTKSIELNAPNFHYEECSCYPDTGTVMCVCRDNWHGSNRPWVSFNQNLDYQVGYICSGVFGDNPRPKDGKGSCNPMTVDGADGVKGFSYKYGNGVWIGRTKSNKLRKGFEMIWDPNGWTDTDSDFSVKQDVVAITDWSGYSGSFVQHPELTGLDCIRPCFWVELVRGLPRENTTIWTSGSSISFCGVDSDTANWSWPDGAELPFTIDK

SEQ ID NO: 16296 - protein, 469 aa, synthetic construct; identical to SEQ ID NO: 15884
  REGION 1..469: note = neuraminidase__InfluenzaA__ABW91441

SEQ ID NO: 16297 - protein, 470 aa, synthetic construct; identical to SEQ ID NO: 16071
  REGION 1..470: note = neuraminidase__InfluenzaA__ABW91452

SEQ ID NO: 16298 - protein, 470 aa, synthetic construct; identical to SEQ ID NO: 16071
  REGION 1..470: note = neuraminidase__InfluenzaA__ABW91463

SEQ ID NO: 16299 - protein, 470 aa, synthetic construct; identical to SEQ ID NO: 16030
  REGION 1..470: note = neuraminidase__InfluenzaA__ABW91474

SEQ ID NO: 16300 - protein, 470 aa, synthetic construct; identical to SEQ ID NO: 16071
  REGION 1..470: note = neuraminidase__InfluenzaA__ABW91485

SEQ ID NO: 16301 - protein, 470 aa, synthetic construct; identical to SEQ ID NO: 16030
  REGION 1..470: note = neuraminidase__InfluenzaA__ABW91496

SEQ ID NO: 16302 - protein, 470 aa, synthetic construct; identical to SEQ ID NO: 16056
  REGION 1..470: note = neuraminidase__InfluenzaA__ABW91507

SEQ ID NO: 16303 - protein, 470 aa, synthetic construct; identical to SEQ ID NO: 16071
  REGION 1..470: note = neuraminidase__InfluenzaA__ABW91518

SEQ ID NO: 16304 - protein, 470 aa, synthetic construct
  REGION 1..470: note = neuraminidase__InfluenzaA__ABW91529
MNPNQKIITIGSISIAIGTISLMLQIGNIISIWASHSIQTGSQNHTGICNQRIITYENSTWVNHTYVSINNTNVVAGKDKTSVTLAGNSSLCSISGWAIYTKDNSIRIGSKGDVFVIREPFISCSHLECRTFFLTQGALLNDKHSNGTIKDRSPYRALMSCPLGEAPSPYNSKFESVAWSASACHDGMGWLTIGISGPDNGAVAVLKYNGIITETIKSWKKRILRTQESECVCVNGSCFTIMTDGPSNGAASYKIFKIEKGKVTKSIELNAPNFHYEECSCYPDTGTVMCVCRDNWHGSNRPWVSFNQNLDYQIGYICSGVFGDNPRPKDGKGSCNPVTVDGADGVKGFSYKYGNGVWIGRTKSNRLRKGFEMIWDPNGWTDTDSDFSVKQDVVAITDWSGYSGSFVQHPELTGLDCIRPCFWVELVRGLPRENTTIWTSGSSISFCGVDSDTANWSWPDGAELPFTIDK

SEQ ID NO: 16305 - protein, 470 aa, synthetic construct
  REGION 1..470: note = neuraminidase__InfluenzaA__ABW91540
MNPNQKIITIGSISIAIGIISLMLQIGNIISIWASHSIQTGSQNHTGICNQRIITYENSTWMNHTYVSINNTNVVAGKDKTSVTLAGNSSLCSISGWAIYTKDNSIRIGSKGDVFVIREPFISCSHLECRTFFLTQGALLNDKHSNGTVKDRSPYRALMSCPLGEAPSPYNSKFESVAWSASACHDGMGWLTIGISGPDNGAVAVLKYNGIITETIKSWKKRILRTQESECVCVNGSCFTIMTDGPSNGAASYKIFKIEKGKVTKSVELNAPNFHYEECSCYPDTGTVMCVCRDNWHGSNRPWVSFNQNLDYQIGYICSGVFGDNPRPKDGKGSCNPVTVDGADGVKGFSYKYGNGVWIGRTKSNRLRKGFEMIWDPNGWTDTDSDFSVKQDVVAITDWSGYSGSFVQHPELTGLDCIRPCFWVELVRGLPRENTTIWTSGSSISFCGVDSDTANWSWPDGAELPFTIDK

SEQ ID NO: 16306 - protein, 469 aa, synthetic construct
  REGION 1..469: note = neuraminidase__InfluenzaA__ABW91551
MNPNQKIITIGSVSLTISTICFFMQIAILITTVTLHFKQYEFNFPPNNQVMLCEPTIIERNITEIVYLTNTTIEKEICPKLAEYRNWSKPQCDITGFAPFSKDNSIRLSAGGDIWVTREPYVSCDPDKCYQFALGQGTTLNNVHSNDTVRDRTPYRTLLMNELGVPFHLGTKQVCIAWSSSSCHDGKAWLHVCITGDDKNATASFIYNGRLVDSIVSWSKEILRTQESECVCINGTCTVVMTDGSASGKADTKILFIEEGKIVHTSTLSGSAQHVEECSCYPRYPGVRCVCRDNWKGSNRPIVDINIKDHSIVSSYVCSGLVGDTPRKNDSSSSSHCLDPNNEEGGHGVKGWAFDDGNDVWMGRTISEKSRLGYETFKVIEGWSNPKSKLQINRQVIVDRGNRSGYSGIFSVEGKSCINRCFYVELIRGRKEETEVLWTSNSIVVFCGTSGTYGTGSWPDGADINLMPI

SEQ ID NO: 16307 - protein, 470 aa, synthetic construct; identical to SEQ ID NO: 16030
  REGION 1..470: note = neuraminidase__InfluenzaA__ABW91562

SEQ ID NO: 16308 - protein, 470 aa, synthetic construct; identical to SEQ ID NO: 16065
  REGION 1..470: note = neuraminidase__InfluenzaA__ABW91584

SEQ ID NO: 16309 - protein, 470 aa, synthetic construct; identical to SEQ ID NO: 16030
  REGION 1..470: note = neuraminidase__InfluenzaA__ABW91595

SEQ ID NO: 16310 - protein, 470 aa, synthetic construct; identical to SEQ ID NO: 16071
  REGION 1..470: note = neuraminidase__InfluenzaA__ABW91606

SEQ ID NO: 16311 - protein, 470 aa, synthetic construct; identical to SEQ ID NO: 16065
  REGION 1..470: note = neuraminidase__InfluenzaA__ABW91617

SEQ ID NO: 16312 - protein, 470 aa, synthetic construct; identical to SEQ ID NO: 16030
  REGION 1..470: note = neuraminidase__InfluenzaA__ABW91628

SEQ ID NO: 16313 - protein, 470 aa, synthetic construct; identical to SEQ ID NO: 16030
  REGION 1..470: note = neuraminidase__InfluenzaA__ABW91639

SEQ ID NO: 16314 - protein, 469 aa, synthetic construct; identical to SEQ ID NO: 15884
  REGION 1..469: note = neuraminidase__InfluenzaA__ABW91650

SEQ ID NO: 16315 - protein, 449 aa, synthetic construct
  REGION 1..449: note = neuraminidase__InfluenzaA__ABX10517
MNPNKKIITIGSICMVTGMVSLMLQIGNLISIWVSHSIHTGNQHKAEPISNTNFLTEKAVASVKLAGNSSLCPINGWAVHSKDNSIRIGSKGDVFVIREPFISCSHLECRTFFLTQGALLNDKHSNGTVKDRSPHRTLMSCPVGEAPSPYNSRFESVAWSASACHDGTSWLTIGISGPDNGAVAVLKYNGIITDTIKSWRNNILRTQESECACVNGSCFTVMTDGPSNGQASHKIFKMEKGKVVKSVELDAPNYHYEECSCYPDAGEITCVCRDNWHGSNRPWVSFNQNLEYQIGYICSGVFGDNPRPNDGTGSCGPVSSNGAYGVKGFSFKYGNGVWIGRTKSTNSRSGFEMIWDPNGWTETDSSFSVKQDIVAITDWSGYSGSFVQHPELTGLDCIRPCFWVELIRGRPKESTIWASGSSISFCGVNSDTVGWSWPDGAELPFTIDK

SEQ ID NO: 16316 - protein, 469 aa, synthetic construct; identical to SEQ ID NO: 15929
  REGION 1..469: note = neuraminidase__InfluenzaA__ABX10527

SEQ ID NO: 16317 - protein, 470 aa, synthetic construct
  REGION 1..470: note = neuraminidase__InfluenzaA__ABX58242
MNPNQKIITIGSISIAIGIISLMLQIGNIISIWTSHSIQTGSQNHTGICNQRIITYENSTWVNHTYVSINNTNVVAGKDKTSVTLAGNSSLCSISGWAIYTKDNSIRIGSKGDVFVIREPFISCSHLECRTFFLTQGALLNDKHSNGTVKDRSPYRALMSCPLGEAPSPYNSKFESVAWSASACHDGMGWLTIGISGPDNGAVAVLKYNGIITETIKSWKKRILRTQESECVCVNGSCFTIMTDGPSNGAASYKIFKIEKGKVTKSIELNAPNFHYEECSCYPDTGTVMCVCRDNWHGSNRPWVSFNQNLDYQIGYICSGVFGDNPRPKDGKGSCNPVTVDGADGVKGFSYKYGNGVWIGRTKSNRLRKGFEMIWDPNGWTDTDSDFSVKQDVVAITDWSGYSGSFVQHPELTGLDCIRPCFWVELVRGLPRENTTIWTSGSSISFCGVDSDTANWSWPDGAELPFTIDK

SEQ ID NO: 16318 - protein, 470 aa, synthetic construct; identical to SEQ ID NO: 16129
  REGION 1..470: note = neuraminidase__InfluenzaA__ABX58253

SEQ ID NO: 16319 - protein, 470 aa, synthetic construct; identical to SEQ ID NO: 16030
  REGION 1..470: note = neuraminidase__InfluenzaA__ABX58264

SEQ ID NO: 16320 - protein, 470 aa, synthetic construct; identical to SEQ ID NO: 16030
  REGION 1..470: note = neuraminidase__InfluenzaA__ABX58275

SEQ ID NO: 16321 - protein, 470 aa, synthetic construct; identical to SEQ ID NO: 16030
  REGION 1..470: note = neuraminidase__InfluenzaA__ABX58286

SEQ ID NO: 16322 - protein, 470 aa, synthetic construct
  REGION 1..470: note = neuraminidase__InfluenzaA__ABX58297
MNPNQKIITIGSISIAIGIISLMLQIGNIISIWASHSIQTGSQNHTGICNQKIITYENSTWVNHTYVSINNTNVVAGKDKTSVTLAGNSSLCSISGWAIYTKDNSIRIGSKGDVFVIREPFISCSHLECRTFFLTQGALLNDKHSNGTVKDRSPYRALMSCPLGEAPSPYNSKFESVAWSASACHDGMGWLTIGISGPDNGAVAVLKYNGIITETIKSWKKRILRTQESECVCVNGSCFTIMTDGPSNGAASYKIFKIEKGKVTKSIELNAPNFHYEECSCYPDTGTVMCVCRDNWHGSNRPWVSFNQNLDYQIGYICSGVFGDNPRPKDGKGSCNPVTVDGADGVKGFSYKYGNGVWIGRTKSNRLRKGFEMIWDPNGWTDTDSDFSVKQDVVAITDWSGYSGSFVQHPELTGLDCIRPCFWVELVRGLPRENTTIWTSGSSISFCGVDSDTANWSWPDGAELPFTIDK

SEQ ID NO: 16323 - protein, 470 aa, synthetic construct; identical to SEQ ID NO: 16201
  REGION 1..470: note = neuraminidase__InfluenzaA__ABX58308

SEQ ID NO: 16324 - protein, 470 aa, synthetic construct
  REGION 1..470: note = neuraminidase__InfluenzaA__ABX58319
MNPNQKIITIGSISIAIGIISLMLQIGNIISIWASHSIQTGSQNHTGICNQRIITYENSTWVNHTYVSINNTNVVAGKDKTSVTLAGNSSLCSISGWAIYTKDNSIRIGSKGDVFVIREPFISCSHLECRTFFLTQGALLNDKHSNGTIKDRSPYRALMSCPLGEAPSPYNSKFESVAWSASACHDGMGWLTIGISGPDNGAVAVLKYNGIITETIKSWKKRILRTQESECVCVNGSCFTIMTDGPSNGAASYKIFKIEKGKVTKSIELNAPNFHYEECSCYPDTGTVMCVCRDNWHGSNRPWVSFNQNLDYQIGYICSGVFGDNPRPKDGKGSCNPVTVDGADGVKGFSYKYGNGVWIGRTKSNRLRKGFEMIWDPNGWTDTDSDFSVKQDVVAITDWSGYSGSFVQHPELTGLDCIRPCFWVELVRGLPRENTTIWTSGSSISFCGVDSDTANWSWPDGAELPFTIDK

SEQ ID NO: 16325 - protein, 470 aa, synthetic construct; identical to SEQ ID NO: 16201
  REGION 1..470: note = neuraminidase__InfluenzaA__ABX58352

SEQ ID NO: 16326 - protein, 470 aa, synthetic construct; identical to SEQ ID NO: 16030
  REGION 1..470: note = neuraminidase__InfluenzaA__ABX58363

SEQ ID NO: 16327 - protein, 470 aa, synthetic construct; identical to SEQ ID NO: 16030
  REGION 1..470: note = neuraminidase__InfluenzaA__ABX58385

SEQ ID NO: 16328 - protein, 470 aa, synthetic construct; identical to SEQ ID NO: 16030
  REGION 1..470: note = neuraminidase__InfluenzaA__ABX58396

SEQ ID NO: 16329 - protein, 470 aa, synthetic construct
  REGION 1..470: note = neuraminidase__InfluenzaA__ABX58407
MNPNQKIITIGSISIAIGIISLMLQIGNIISIWASHSIQTGSQNHTGICNQRIITYENSTWVNHTYVSINNTNVVAGKDKTSVTLAGNSSLCPISGWAIYTKDNSIRIGSKGDVFVIREPFISCSHLECRTFFLTQGALLNDKHSNGTVKDRSPYRALMSCPLGEAPSPYNSKFESVAWSASACHDGMGWLTIGISGPDNGAVAVLKYNGIITETIKSWKKRILRTQESECVCVNGSCFTIMTDGPSNGAASYKIFKIEKGKVTKSIELNAPNFHYEECSCYPDTGTVMCVCRDNWHGSNRPWVSFNQNLDYQIGYICSGVFGDNPRPKDGKGSCNPVTVDGADGVKGFSYKYGNGVWIGRTKSNRLRKGFEMIWDPNGWTDTDSDFSVKQDVVAITDWSGYSGSFVQHPELTGLDCIRPCFWVELVRGLPRENTTIWTSGSSISFCGVDSDTANWSWPDGAELPFTIDK

SEQ ID NO: 16330 - protein, 470 aa, synthetic construct; identical to SEQ ID NO: 16071
  REGION 1..470: note = neuraminidase__InfluenzaA__ABX58418

SEQ ID NO: 16331 - protein, 470 aa, synthetic construct; identical to SEQ ID NO: 16030
  REGION 1..470: note = neuraminidase__InfluenzaA__ABX58429

SEQ ID NO: 16332 - protein, 470 aa, synthetic construct; identical to SEQ ID NO: 16030
  REGION 1..470: note = neuraminidase__InfluenzaA__ABX58440

SEQ ID NO: 16333 - protein, 470 aa, synthetic construct
  REGION 1..470: note = neuraminidase__InfluenzaA__ABX58451
MNPNQKIITIGSISIAIGTISLMLQIGNIISIWASHSIQTGSQNHTGICNQRIITYENSTWVNHTYVSINNTNVVAGKDKTSVTLAGNSSLCSISGWAIYTKDNSIRIGSKGDVFVIREPFISCSHLECRTFFLTQGALLNDKHSNGTVKDRSPYRALMSCPLGEAPSPYNSKFESVAWSASACHDGMGWLTIGISGPDNGAVAVLKYNGIITETIKSWKKRILRTQESECVCVNGSCFTIMTDGPSNGAASYKIFKIEKGKVTKSIELNAPNFHYEECSCYPDTGTVMCVCRDNWHGSNRPWVSFNQNLDYQIGYICSGVFGDNPRPKDGKGSCNPVTVDGADGVKGFSYKYGNGVWIGRTKSNRLRKGFEMIWDPNGWTDTDSDFSVKQDVVAITDWSGYSGSFVQHPELTGLDCIRPCFWVELVRGLPRENTTIWTSGSSISFCGVDSDTANWSWPDGAELPFTIDK

SEQ ID NO: 16334 - protein, 470 aa, synthetic construct; identical to SEQ ID NO: 16071
  REGION 1..470: note = neuraminidase__InfluenzaA__ABX58462

SEQ ID NO: 16335 - protein, 470 aa, synthetic construct; identical to SEQ ID NO: 16030
  REGION 1..470: note = neuraminidase__InfluenzaA__ABX58473

SEQ ID NO: 16336 - protein, 470 aa, synthetic construct; identical to SEQ ID NO: 16071
  REGION 1..470: note = neuraminidase__InfluenzaA__ABX58484

SEQ ID NO: 16337 - protein, 470 aa, synthetic construct
  REGION 1..470: note = neuraminidase__InfluenzaA__ABX58495
MNPNQKIITIGSISIAIGIISLMLQIGNIISIWASHSIQTGSQNHTGICNQRIITYENSTWVNHTYVSINNTNVVAGKDKTSVTLAGNSSLCSISGWAIYTKDNSIRIGSKGDVFVIREPFISCSHLECRTFFLTQGALLNDKHSNRTVKDRSPYRALMSCPLGEAPSPYNSKFESVAWSASACHDGMGWLTIGISGPDNGAVAVLKYNGIITETIKSWKKRILRTQESECVCVNGSCFTIMTDGPSNGAASYKIFKIEKGKVTKSIELNAPNFHYEECSCYPDTGTVMCVCRDNWHGSNRPWVSFNQNLDYQIGYICSGVFGDNPRPKDGKGSCNPVTVDGADGVKGFSYKYGNGVWIGRTKSNRLRKGFEMIWDPNGWTDTDSDFSVKQDVVAITDWSGYSGSFVQHPELTGLDCIRPCFWVELVRGLPRENTTIWTSGSSISFCGVDSDTANWSWPDGAELPFTIDK

SEQ ID NO: 16338 - protein, 470 aa, synthetic construct; identical to SEQ ID NO: 16065
  REGION 1..470: note = neuraminidase__InfluenzaA__ABX58506

SEQ ID NO: 16339 - protein, 470 aa, synthetic construct; identical to SEQ ID NO: 16071
  REGION 1..470: note = neuraminidase__InfluenzaA__ABX58528

SEQ ID NO: 16340 - protein, 470 aa, synthetic construct; identical to SEQ ID NO: 16071
  REGION 1..470: note = neuraminidase__InfluenzaA__ABX58539

SEQ ID NO: 16341 - protein, 470 aa, synthetic construct
  REGION 1..470: note = neuraminidase__InfluenzaA__ABX58550
MNPNQKIITIGSISIAIGIISLMLQIGNIISIWASHSIQTGSQNHTGICNQRIITYENSTWVNHTYVSINNTNVVAGKDKTSVTLAGNSSLCSISGWAIYTKDNSIRIGSKGDVFVIREPFISCSHLECRTFFLTQGALLNDKHSNGTVKDRSPYRALMSCPLGEAPSPYNSKFESVAWSASACHDGMGWLTIGISGPDNGAVAVLKYNGIITETIKSWKKRILRTQESECVCVNGSCFTIMTDGPSNGAASYKIFKIEKGKVTKSIELNAPNFHYEECSCYPDTGTVMCVCRDNWHGSNRPWVSFNQNLDYQIGYICSGVFGDNPRPKDGKGSCNPVTVDGADGVKGFSYKYGNGVWIGRTKSNRLRKGFEMIWDPNGWTDTDSDFSVKQDVVAITDWSGYSGSFVQHPELTGLDCIRPCFWVELVRGLPRENTTIWTSGSSISFCGVDSDTANWSWPDGAELPFTVDK

SEQ ID NO: 16342 - protein, 470 aa, synthetic construct; identical to SEQ ID NO: 16030
  REGION 1..470: note = neuraminidase__InfluenzaA__ABX58561

SEQ ID NO: 16343 - protein, 470 aa, synthetic construct
  REGION 1..470: note = neuraminidase__InfluenzaA__ABX58572
MNPNQKIITIGSISIAIGIISLMLQIGNIISIWASHSIQTGSQNHTGICNQRIITYENSTWVNHTYVSINNTNVVAGKDKTSVTLAGNSSLCSISGWAIYTKDNSIRIGSKGDVFVIREPFISCSHLECRTFFLTQGALLNDKHSNGTVKDRSPYRALMSCPLGEAPSPYNSKFESVAWSASACHDGMGWLTIGISGPDNGAVAVLKYNGIITETIKSWKKRILRTQESECVCVNGSCFTIMTDGPSNGAASYKIFKIEKGKVTKSIELNAPNFHYEECSCYPDTGTVMCVCRDNWHGSNRPWVSFNQNLDYQIGYICSGVFGDNPRPKDGKGSCNPMTVDGADGVKGFSYKYGNGVWIGRTKSNRLRKGFEMIWDPNGWTDTDSDFSVKQDVVAITDWSGYSGSFVQHPELTGLDCIRPCFWVELVRGLPRENTTIWTSGSSISFCGVDSDTANWSWPDGAELPFTIDK

SEQ ID NO: 16344 - protein, 470 aa, synthetic construct; identical to SEQ ID NO: 16030
  REGION 1..470: note = neuraminidase__InfluenzaA__ABX58583

SEQ ID NO: 16345 - protein, 470 aa, synthetic construct; identical to SEQ ID NO: 16030
  REGION 1..470: note = neuraminidase__InfluenzaA__ABX58594

SEQ ID NO: 16346 - protein, 470 aa, synthetic construct; identical to SEQ ID NO: 16056
  REGION 1..470: note = neuraminidase__InfluenzaA__ABX58605

SEQ ID NO: 16347 - protein, 470 aa, synthetic construct; identical to SEQ ID NO: 16056
  REGION 1..470: note = neuraminidase__InfluenzaA__ABX58616

SEQ ID NO: 16348 - protein, 470 aa, synthetic construct; identical to SEQ ID NO: 16030
  REGION 1..470: note = neuraminidase__InfluenzaA__ABX58627

SEQ ID NO: 16349 - protein, 470 aa, synthetic construct; identical to SEQ ID NO: 16030
  REGION 1..470: note = neuraminidase__InfluenzaA__ABX58638

SEQ ID NO: 16350 - protein, 470 aa, synthetic construct
  REGION 1..470: note = neuraminidase__InfluenzaA__ABX58682
MNPNQKIITIGSISIAIGIISLMLQIGNIISIWASHSIQTGSQNHTGICNQRIITYENSTWVNHTYVSINNTNVVAGKDKTSVTLAGNSSLCSISGWAIYTKDNSIRIGSKGDVFVIREPFISCSHLECRTFFLTQGALLNDKHSNGTVKDRSPYRALMSCPLGEAPSPYNSKFESVAWSASACHDGMGWLTIGISGPDNGAVAVLKYNGIITETIKSWKKRILRTQESECVCVNGSCFTIMTDGPSNGAASYKIFKIEKGKVTKSIELNAPNFHYEECSCYPDTGTMMCVCRDNWHGSNRPWVSFNQNLDYQIGYICSGVFGDNPRPKDGKGSCNPVTVDGADGVKGFSYKYGNGVWIGRTKSNRLRKGFEMIWDPNGWTDTDSDFSVKQDVVAITDWSGYSGSFVQHPELTGLDCIRPCFWVELVRGLPRENTTIWTSGSSISFCGVDSDTANWSWPDGAELPFTIDK

SEQ ID NO: 16351 - protein, 470 aa, synthetic construct
  REGION 1..470: note = neuraminidase__InfluenzaA__ABX58693
MNPNQKIITIGSISIAIGIISLMLQIGNIISIWASHSIQTGSQNNTGICNQRIITYENSTWVNHTYVNINNTNVVAGKDKTSVTLAGNSSLCSISGWAIYTKDNSIRIGSKGDVFVIREPFISCSHLECRTFFLTQGALLNDKHSNGTVKDRSPYRALMSCPLGEAPSPYNSKFESVAWSASACHDGMGWLTIGISGPDNGAVAVLKYNGIITGTIKSWKKQILRTQESECVCMNGSCFTIMTDGPSNRAASYKIFKIEKGKVTKSIELNAPNFHYEECSCYPDTGIVMCVCRDNWHGSNRPWVSFNQNLDYQIGYICSGVLGDNPRPEDGEGSCNPVTVDGADGVKGFSYKYDNGVWIGRTKSNRLRKGFEMIWDPNGWTNTDSDFSVKQDVVAITDWSGYSGSFVQHPELTGLDCIRPCFWVELVRGLPRENTTIWTSGSSISFCGVNSDTANWSWPDGAELPFTIDK

SEQ ID NO: 16352 - protein, 470 aa, synthetic construct; identical to SEQ ID NO: 16201
  REGION 1..470: note = neuraminidase__InfluenzaA__ABX58704

SEQ ID NO: 16353 - protein, 470 aa, synthetic construct; identical to SEQ ID NO: 16129
  REGION 1..470: note = neuraminidase__InfluenzaA__ABX58715

SEQ ID NO: 16354 - protein, 449 aa, synthetic construct
  REGION 1..449: note = neuraminidase__InfluenzaA__ABY19420
MNPNQKVITIGSICMVIGIVSLMLQIGNMISIWVSHSIQTGNQNQVEPIINTNFLTGKAVASITLAGNSSLCPIRGWAIHSKDNSIRIGSKGDVFVIREPFISCSHLECRTFFLTQGALLNDKHSNGTVKDRSPHRTLMSCPVGEAPSPYNSRFESVAWSASACHDGTSWLTIGISGPDNGAVAVLKYNGIITDTIKSWRNNILRTQESECACVNGSCFTVMTDGPSNGQASYKIFKMEKGKVIKSVELDAPNYHYEECSCYPDAGEITCVCRDNWHGSNRPWVSFNQNLEYQIGYICSGVFGDNPRPNDGTGSCGPVSHNGAYGVKGFSFKYGNGVWIGRTKSPNSRSGFEMIWDPNGWSETDSSFSVKQDIVAITDWSGYSGSFVQHPELTGLDCIRPCFWVELIRGRPKESTVWTSGSSISFCGVNSDTVSWSWPDGAELPFSIDK

SEQ ID NO: 16355 - protein, 449 aa, synthetic construct
  REGION 1..449: note = neuraminidase__InfluenzaA__ABY19421
MNPNQKIITIGSICMVIGIVSLMLQIGNMISIWVSHSIQTGNQNQVEPIINTNFLTGKAVASITLAGNSSLCPIRGWAIHSKDNSIRIGSKGDVFVIREPFISCSHLECRTFFLTQGALLNDKHSNGTVKDRSPHRTLMSCPVGEAPSPYNSRFESVAWSASACHDGTSWLTIGISGPDNGAVAVLKYNGIITDTIKSWRNNILRTQESECACVNGSCFTVMTDGPSNGQASYKIFKMEKGKVIKSVELDAPNYHYEECSCYPDAGEITCVCRDNWHGSNRPWVSFNQNLEYQIGYICSGVFGDNPRPNDGTGSCGPVSHNGAYGVKGFSFKYGNGVWIGRTKSPNSRSGFEMIWDPNGWSETDSSFSVKQDIVAITDWSGYSGSFVQHPELTGLDCIRPCFWVELIRGRPKESTVWTSGSSISFCGVNSDTVSWSWPDGAELPFSIDK

SEQ ID NO: 16356 - protein, 470 aa, synthetic construct
  REGION 1..470: note = neuraminidase__InfluenzaA__ABY51020
MNPNQKIITIGSISIAIGIISLMLQIGNIISIWASHSIQTGSQNHTGICNQRIITYENSTWVNHTYVSINNTNVVAGKDKTSVTLAGNSSLCSISGWAIYTKDNSIRIGSKGDVFVIREPFISCSHLECRTFFLTQGALLNDKHSNGTVKDRSPYRALMSCPLGEAPSPYNSKFESVAWSASACHDGMGWLTIGISGPDNGAVAVLKYNGIITETIKSWKKRILRTQESECVCVNGSCFTIMTDGPSNGAASYKIFKIEKGKVTKSIELNAPNFHYEECSCYPDTGTVMCVCRDNWHGSNRPWVSFNQNLDYQIGYICSGVFGDNPRPKDGKGSCNPLTVDGADGVKGFSYKYGNGVWIGRTKSNRLRKGFEMIWDPNGWTDTDSDFSVKQDVVAITDWSGYSGSFVQHPELTGLDCIRPCFWVELVRGLPRENTTIWTSGSSISFCGVDSDTANWSWPDGAELPFTIDK

SEQ ID NO: 16357 - protein, 469 aa, synthetic construct; identical to SEQ ID NO: 16066
  REGION 1..469: note = neuraminidase__InfluenzaA__ABY51031

SEQ ID NO: 16358 - protein, 470 aa, synthetic construct
  REGION 1..470: note = neuraminidase__InfluenzaA__ABY51042
MNPNQKIITIGSISIAIGIISLMLQIGNIISIWASHSIQTGSQNHTGICNQRIITYENSTWVNHTYVNINNTNVVAGKDKTSVTLAGNSSLCSISGWAIYTKDNSIRIGSKGDVFVIREPFISCSHLECRTFFLTQGALLNDKHSNGTVKDRSPYRALMSCPLGEAPSPYNSKFESVAWSASACHDGMGWLTIGISGPDNGAVAVLKYNGIITGTIKSWKKQILRTQESECVCMNGSCFTIMTDGPSNRAASYKIFKIEKGKVTKSIELNAPNFHYEECSCYPDTGIVMCVCRDNWHGSNRPWVSFNQNLDYQIGYICSGVFGDNPRPKDGEGSCNPVTVDGADGVKGFSYKYDNGVWIGRTKSNRLRKGFEMIWDPNGWTNTDSDFSVKQDVVAITDWSGYSGSFVQHPELTGLDCIRPCFWVELVRGLPRENTTIWTSGSSISFCGVNSDTANWSWPDGAELPFTIDK

SEQ ID NO: 16359 - protein, 470 aa, synthetic construct
  REGION 1..470: note = neuraminidase__InfluenzaA__ABY51053
MNPNQKIITIGSISIAIGIISLMLQIGNIISIWASHSIQTGSQNNTGICNQRIITYENSTWVNHTYVNINNTNVVAGKDKTSVTLAGNSSLCSISGWAIYTKDNSIRIGSKGDVFVIREPFISCSHLECRTFFLTQGALLNDKHSNGTVKDRSPYRALMSCPLGEAPSPYNSKFESVAWSASACHDGMGWLTIGISGPDNGAVAVLKYNGIITGTIKSWKKQILRTQESECVCMNGSCFTIMTDGPSNRAASYKIFKIEKGKVTKSIELNAPNFHYEECSCYPDTGIVMCVCRDNWHGSNRPWVSFNQNLDYQIGYICSGVFGDNPRPEDGEGSCNPVTVDGTDGVKGFSYKYDNGVWIGRTKSNRLRKGFEMIWDPNGWTNTDSDFSVKQDVVAITDWSGYSGSFVQHPELTGLDCIRPCFWVELVRGLPRENTTIWTSGSSISFCGVNSDTANWSWPDGAELPFTIDK

SEQ ID NO: 16360 - protein, 470 aa, synthetic construct; identical to SEQ ID NO: 16129
  REGION 1..470: note = neuraminidase__InfluenzaA__ABY51064

SEQ ID NO: 16361 - protein, 470 aa, synthetic construct; identical to SEQ ID NO: 16030
  REGION 1..470: note = neuraminidase__InfluenzaA__ABY51075

SEQ ID NO: 16362 - protein, 470 aa, synthetic construct
  REGION 1..470: note = neuraminidase__InfluenzaA__ABY51086
MNPNQKIITIGSISIAIGIISIMLQIGNIISIWASHSIQTGSQNHTGICNQRIITYENSTWVNHTYVNINNTNVVAEKDKTSVTLAGNSSLCSISGWAIYTKDNSIRIGSKGDVFVIREPFISCSHLECRTFFLTQGALLNDKHSNGTVKDRSPYRALMSCPLGEAPSPYNSKFESVAWSASACHDGMGWLTIGISGPDNGAVAVLKYNGIITETIKSWKKRILRTQESECVCVNGSCFTIMTDGPSNGAASYKIFKIEKGKVTKSIELNAPNFHYEECSCYPDTGTVMCVCRDNWHGSNRPWVSFNQNLDYQIGYICSGVFGDNPRPKDGKGSCNPVTVDGADGIKGFSYKYGNGVWIGRTKSNRLRKGFEMIWDPNGWTNTDSDFSVKQDVVAITDWSGYSGSFVQHPELTGLDCIRPCFWVELVRGLPRENTTIWTSGSSISFCGVDGDTANWSWPDGAELPFTIDK

SEQ ID NO: 16363 - protein, 470 aa, synthetic construct
  REGION 1..470: note = neuraminidase__InfluenzaA__ABY51097
MNPNQKIITIGSISIAIGIISLMLQIGNIISIWASHSIQTGSQNHTGICNQRIITYENSTWVNHTYVSINNTNVVAGKDKTSVTLAGNSSLCSISGWAIYTKDNSIRIGSKGDVFVIREPFISCSHLECRTFFLTQGALLNDKHSNGTVKDRSPYRALMSCPLGEAPSPYNSKFESVAWSASACHDGMGWLTIGISGPDNGAVAVLKYNGIITETIKSWKKRILRTQESECVCVNGSCFTIMTDGPSNGAASYKIFKIEKGKVTKSVELNAPNFHYEECSCYPDTGTVMCVCRDNWHGSNRPWVSFNQNLDYQIGYICSGVFGDNPRPKDGKGSCNPVTVDGADGVKGFSYKYGNGVWIGRTKSNRLRKGFEMIWDPNGWTDTDSDFSVKQDVVAITDWSGYSGSFVQHPELTGLDCIRPCFWVELVRGLPRENTTIWTSGSSISFCGVDSDTANWSWPDGAELPFTIDK

SEQ ID NO: 16364 - protein, 470 aa, synthetic construct
  REGION 1..470: note = neuraminidase__InfluenzaA__ABY51108
MNPNQKIITIGSISIAIGIISLMLQIGNIISIWASHSIQTGSQNHTGICNQRIITYENSTWVNHTYVSINNTNVVAGKDKTSVTLAGNSSLCSISGWAIYTKDNSIRIGSKGDVFVIREPFISCSHLECRTFFLTQGALLNDKHSNGTVKDRSPYRALMSCPLGEAPSPYNSKFESVAWSASACHDGMGWLTIGISGPDNGAVAVLKYNGIITETIKSWKKRILRTQESECVCVNGSCFTIMTDGPSNGAASYKIFKIEKGKVTKSIELNAPNFHYEECSCYPDTGTVMCVCRDNWHGSNRPWVSFNQNLDYQIGYICSGVFGDNPRPKDGKGSCNPVTVDGADGVKGFSYKYGNGVWIGRTKSNRLRKGFEMIWDPNGWTDTDSDFSVKQDIVAITDWSGYSGSFVQHPELTGLDCIRPCFWVELVRGLPRENTTIWTSGSSISFCGVDSDTANWSWPDGAELPFTIDK

SEQ ID NO: 16365 - protein, 470 aa, synthetic construct; identical to SEQ ID NO: 16030
  REGION 1..470: note = neuraminidase__InfluenzaA__ABY51119

SEQ ID NO: 16366 - protein, 469 aa, synthetic construct; identical to SEQ ID NO: 15884
  REGION 1..469: note = neuraminidase__InfluenzaA__ABY51130

SEQ ID NO: 16367 - protein, 470 aa, synthetic construct; identical to SEQ ID NO: 16071
  REGION 1..470: note = neuraminidase__InfluenzaA__ABY51141

SEQ ID NO: 16368 - protein, 470 aa, synthetic construct
  REGION 1..470: note = neuraminidase__InfluenzaA__ABY51152
MNPNQKIITIGSISIAIGIISLMLQIGNIISIWASHSIQTGSQNHTGICNQRIITYENSTWVNHTYVSINNTNVVAGKDKTSVTLAGNSSLCSISGWAIYTKDNSIRIGSKGDVFVIREPFISCSHLECRTFFLTQGALLNDKHSNGTVKDRSPYRALMSCPLGEAPSPYNSKFESVAWSASACHDGMGWLTIGISGPDNGAVAVLKYNGIITETIKSWKKRILRTQESECVCVNGSCFTIMTDGPSNGAASYKIFKIEKGKVTKSIELNAPNFHYEECSCYPDTGTVMCVCRDNWHGSNRPWVSFNQNLDYQIGYICSGVFGDNPRPKDGKGSCNPVTVDGADGVKGFSYKYGNGVWIGRTKSNRLRKGFEMIWDPNGWTDTDSDFSVKQDVVAITDWSGYSGSFVQHPELTGLDCIRPCFWVELVRGLPRENTTIWTSGSSISFCGVNSDTANWSWPDGAELPFTIDK

SEQ ID NO: 16369 - protein, 470 aa, synthetic construct
  REGION 1..470: note = neuraminidase__InfluenzaA__ABY51163
MNPNQKIITIGSISIAIGIISLMLQIGNIISIWASHSIQTGSQNHTGICNQRIITYENSTWVNHTYVNINNTNVVAGKDKTSVILAGNSSLCSISGWAIYTKDNSIRIGSKGDVFVIREPFISCSHLECRTFFLTQGALLNDKHSNGTVKDRSPYRALMSCPLGEAPSPYNSKFESVAWSASACHDGMGWLTIGISGPDNGAVAVLKYNGIITETIKSWKKRILRTQESECVCVNGSCFTIMTDGPSNGAASYKIFKIEKGKVTKSIELNAPNFHYEECSCYPDTGTVMCVCRDNWHGSNRPWVSFNQNLDYQIGYICSGVFGDNPRPKDGKGSCNPVTVDGADGVKGFSYKYGNGVWIGRTKSNRLRKGFEMIWDPNGWTDTDSDFSVKQDVVAITDWSGYSGSFVQHPELTGLDCIRPCFWVELVRGLPRENTTIWTSGSSISFCGVDSDTANWSWPDGAELPFTIDK

SEQ ID NO: 16370 - protein, 470 aa, synthetic construct
  REGION 1..470: note = neuraminidase__InfluenzaA__ABY51174
MNPNQKMITIGSISIAIGIISLMLQIGNIISIWASHSIQTGSQNHTGICNQRIITYENSTWVNHTYVNINNTNVVAGKDKTSVTLAGNSSLCSISGWAIYTKDNSIRIGSKGDVFVIREPFISCSHLECRTFFLTQGALLNDKHSNGTVKDRSPYRALMSCPLGEAPSPYNSKFESVAWSASACHDGMGWLTIGISGPDNGAVAVLKYNGIITETIKSWKKRILRTQESECVCVNGSCFTIMTDGPSNGAASYKIFKIEKGKVTKSIELNAPNFHYEECSCYPDTGTVMCVCRDNWHGSNRPWVSFNQNLDYQVGYICSGVFGDNPRPKDGKGSCNPMTVDGADGVKGFSYKYGNGVWIGRTKSNKLRKGFEMIWDPNGWTDTDSDFSVKQDVVAITDWSGYSGSFVQHPELTGLDCIRPCFWVELVRGLPRENTTIWTSGSSISFCGVDSDTANWSWPDGAELPFTIDK

SEQ ID NO: 16371 - protein, 470 aa, synthetic construct; identical to SEQ ID NO: 16030
  REGION 1..470: note = neuraminidase__InfluenzaA__ABY51185

SEQ ID NO: 16372 - protein, 470 aa, synthetic construct; identical to SEQ ID NO: 16065
  REGION 1..470: note = neuraminidase__InfluenzaA__ABY51196

SEQ ID NO: 16373 - protein, 469 aa, synthetic construct; identical to SEQ ID NO: 16066
  REGION 1..469: note = neuraminidase__InfluenzaA__ABY51229

SEQ ID NO: 16374 - protein, 470 aa, synthetic construct
  REGION 1..470: note = neuraminidase__InfluenzaA__ABY51240
MNPNQKIITIGSISIAIGIISLMLQIGNIISVWASHSIQTGSQNHTGICNQRIITYENSTWVNHTYVSINNTNVVAGKDKTSVTLAGNSSLCSISGWSIYTKDNSIRIGSKGDVFVIREPFISCSHLECRTFFLTQGALLNDKHSNGTVKDRSPYRALMSCPLGEAPSPYNSKFESVAWSASACHDGMGWLTIGISGPDNGAVAVLKYNGIITETIKSWKKRILRTQESECVCVNGSCFTIMTDGPSNGAASYKIFKIEKGKVTKSIELNAPNFHYEECSCYPDTGTVMCVCRDNWHGSNRPWVSFNQNLDYQIGYICSGVFGDNPRPKDGKGSCNPVTVDGADGVKGFSYKYGNGVWIGRTKSNRLRKGFEMIWDPNGWTDTDSDFSVKQDVVAITDWSGYSGSFVQHPELTGLDCIRPCFWVELVRGLPRENTTIWTSGSSISFCGVDSDTANWSWPDGAELPFTIDK

SEQ ID NO: 16375 - protein, 470 aa, synthetic construct; identical to SEQ ID NO: 16056
  REGION 1..470: note = neuraminidase__InfluenzaA__ABY51251

SEQ ID NO: 16376 - protein, 470 aa, synthetic construct
  REGION 1..470: note = neuraminidase__InfluenzaA__ABY51262
MNPNQKIITIGSISIAIGIISLMLQIGNIISIWASHSIQTGSQNHTGICNQRIITYENSTWVNHTYVSINNTNVVAGKDKTSVTLAGNSSLCSISGWAIYTKDNSIRIGSKGDVFVIREPFISCSHLECRTFFLTQGALLNDKHSNGTVKDRSPYRALMSCPLGEAPSPYNSKFESVAWSASACHDGMGWLTIGISGPDNGAVAVLKYNGIITETIKSWKKRILRTQESECVCVNGSCFTIMTDGPSNGAASYKIFKIEKGKVTKSIELNAPNFHYEECSCYPDTGTVMCVCRDNWHGSNRPWVSFNQNLDYQIGYICSGVFGDNPRPKDGKGSCNPVTVDGADGVKGFSYKYGNGVWIGRTKSNRLRKGFEMIWDPNGWTDTDSDFSVKQDVVAITDWSGYSGSFVQHPELTGLDCIRPCFWVELVRGLPRENATIWTSGSSISFCGVDSDTANWSWPDGAELPFTIDK

SEQ ID NO: 16377 - protein, 469 aa, synthetic construct; identical to SEQ ID NO: 15884
  REGION 1..469: note = neuraminidase__InfluenzaA__ABY51273

SEQ ID NO: 16378 - protein, 449 aa, synthetic construct
  REGION 1..449: note = neuraminidase__InfluenzaA__ABY76285
MNPNQKIITIGSICMVIGIVSLMLQIGNMISIWVSHSIQTGNQRQAEPISNTKFLTEKAVASVTLAGNSSLCPISGWAVYSKDNSIRIGSKGDVFVIREPFISCSHLECRTFFLTQGALLNDKHSNGTVKDRSPHRTLMSCPVGEAPSPYNSRFESVAWSASACHDGTSWLTIGISGPDNGAVAVLKYNGIITDTIKSWRNNILRTQESECACVNGSCFTVMTDGPSNGQASYKIFKMEKGKVVKSVELDAPNYHYEECSCYPDAGEITCVCRDNWHGSNRPWVSFNQNLEYQIGYICSGVFGDNPRPNDGTGSCGPVSPNGAYGVKGFSFKYGNGVWIGRTKSTNSRSGFEMIWDPNGWTGTDSSFSVKQDIVAITDWSGYSGSFVQHPELTGLDCIRPCFWVELIRGRPKESTIWTSGSSISFCGVNSDTVSWSWPDGAELPFTIDK

SEQ ID NO: 16379 - protein, 470 aa, synthetic construct
  REGION 1..470: note = neuraminidase__InfluenzaA__ABY81352
MNPNQKIITIGSICMAIGIISLILQIGSIISIWVSHSIQTGSQNHTGICNQRIITYENSTWVNQTYVNISNTNVVAGKDTTSMTLAGNSSLCPIRGWAIYSKDNSIRIGSKGDVFVIREPFISCSHLECRTFFLTQGALLNDKHSNGTVKDRSPYRALMSCPIGEAPSPYNSRFESVAWSASACHDGMGWLTIGISGPDDGAVAVLKYNGIITETIKSWRKQILRTQESECVCVNGSCFTIMTDGPSDGQASYRIFKIEKGKITKSIELDAPNSHYEECSCYPDTGTVMCVCRDNWHGSNRPWVSFNQNLDYQIGYICSGVFGDNPRPKDGKGSCDPVNVDGADGVKGFSYRYGNGVWIGRTKSNSSRKGFEMIWDPNGWTDTDSNFLVKQDVVAMTDWSGYSGSFVQHPELTGLDCMRPCFWVELIRGRPREKTTIWTSGSSISFCGVNSDTVNWSWPDGAELPFTIDK

SEQ ID NO: 16380 - protein, 470 aa, synthetic construct
  REGION 1..470: note = neuraminidase__InfluenzaA__ABY81363
MNPNQKIITIGSISIAIGIISLMLQIGNIISIWASHSIQIGSQNHTGICNQRIITYENSTWVNHTYVSINNTNVVAGKDKTSVTLAGNSSLCSISGWAIYTKDNSIRIGSKGDVFVIREPFISCSHLECRTFFLTQGALLNDKHSNGTVKDRSPYRALMSCPLGEAPSPYNSKFESVAWSASACHDGMGWLTIGISGPDNGAVAVLKYNGIITETIKSWKKRILRTQESECVCVNGSCFTIMTDGPSNGAASYKIFKIEKGKVTKSIELNAPNFHYEECSCYPDTGTVMCVCRDNWHGSNRPWVSFNQNLDYQIGYICSGVFGDNPRPKDGKGSCNPVTVDGADGVKGFSYKYGNGVWIGRTKSNRLRKGFEMIWDPNGWTDTDSDFSVKQDVVAITDWSGYSGSFVQHPELTGLDCIRPCFWVELVRGLPRENTTIWTSGSSISFCGVDSDTANWSWPDGAELPFTIDK

SEQ ID NO: 16381 - protein, 469 aa, synthetic construct; identical to SEQ ID NO: 16066
  REGION 1..469: note = neuraminidase__InfluenzaA__ABY81374

SEQ ID NO: 16382 - protein, 470 aa, synthetic construct; identical to SEQ ID NO: 16030
  REGION 1..470: note = neuraminidase__InfluenzaA__ABY81385

SEQ ID NO: 16383 - protein, 470 aa, synthetic construct
  REGION 1..470: note = neuraminidase__InfluenzaA__ABY81407
MNPNQKIITIGSISIAIGTISLMLQIGNIISIWASHSIQTGSQNHTGICNQRIITYENSTWVNHTYVSINNTNVVAGKDKTSVTLAGNSSLCSISGWAIYTKDNSIRIGSKGDVFVIREPFISCSHLECRTFFLTQGALLNDKHSNGTVKDRSPYRALMSCPLGEAPSPYNSKFESVAWSASACHDGMGWLTIGISGPDNGAVAVLKYNGIITETIKSWKKRILRTQESECVCVNGSCFTIMTDGPSNGAASYKIFKIEKGKVTKSIELNAPNFHYEECSCYPDTGTVMCVCRDNWHGSNRPWVSFNQNLDYQIGYICSGVFGDNPRPKDGKGSCNPVTVDGADGVKGFSYKYGNGVWIGRTKSNRLRKGFEMIWDPNGWTDTDSDFLVKQDVVAITDWSGYSGSFVQHPELTGLDCIRPCFWVELVRGLPRENTTIWTSGSSISFCGVDSDTANWSWPDGAELPFTIDK

SEQ ID NO: 16384 - protein, 469 aa, synthetic construct; identical to SEQ ID NO: 16066
  REGION 1..469: note = neuraminidase__InfluenzaA__ACA24505

SEQ ID NO: 16385 - protein, 470 aa, synthetic construct; identical to SEQ ID NO: 16030
  REGION 1..470: note = neuraminidase__InfluenzaA__ACA24516

SEQ ID NO: 16386 - protein, 470 aa, synthetic construct; identical to SEQ ID NO: 16030
  REGION 1..470: note = neuraminidase__InfluenzaA__ACA24527

SEQ ID NO: 16387 - protein, 469 aa, synthetic construct
  REGION 1..469: note = neuraminidase__InfluenzaA__ACA24692
MNPNQKIITIGSVSLTISTICFFMQIAILITTVTLHFKQYEFSPPPNNQVMLCEPTIIERNITEIVYLTNTTIEKEICPKLAEYRNWSKPQCDITGFAPFSKDNSIRLSAGGDIWVTREPYVSCDPDKCYQFALGQGTTLNNVHSNDTVHDRTPYRTLLMNELGVPFHLGTKQVCIAWSSSSCHDGKAWLHVCVTGDDKNATASFIYNGRLVDSIVSWSKEILRTQESECVCINGTCTVVMTDGSASGKADTKILFIEEGKIVHTSTLSGSAQHVEECSCYPRYPGVRCVCRDNWKGSNRPIVDINIKDYSIVSKYVCSGLVGDTPRKNDSSSSSHCLDPNNEEGGHGVKGWAFDDGNDVWMGRTISEKSRSGYETFKVIEGWSNPNSKLQINRQVIVDRGNRSGYSGIFSVEGKSCINRCFYVELIRGRNEETEVLWTSNSIVVFCGTSGTYGTGSWPDGADINLMPI

SEQ ID NO: 16388 - protein, 469 aa, synthetic construct
  REGION 1..469: note = neuraminidase__InfluenzaA__ACA24703
MNPNQKIITIGSVSLTISTICFFMQIAILITTVTLHFKQYEFSSPPNNQVMLCEPTIIERNITEIVYLTNITIEKETCPKLAEYRNWSKPQCDITGFAPFSKDNSIRLSAGGDIWVTREPYVSCDPDKCYQFALGQGTTLNNVHSNDTVHDRTPYRTLLMNELGVPFHLGTKQVCIAWSSSSCHDGKAWLHVCVTGDDKNATASFIYNGRLVDSIVSWSKEILRTQESECVCINGTCTVVMTDGSASGNADTKILFIEEGKIVHTSTLSGSAQHVEECSCYPRYPGVRCVCRDNWKGSNRPIVDINIKDYSIVSRYVCSGLVGDTPRKNDSSSSSHCLDPNNEEGGHGVKGWAFDDGNDVWMGRTISEKSRSGYETFKVIEGWSNPNSKLQINRQVIVDRGNRSGYSGIFSVEGKSCINRCFYVELIRGRKEETEVLWTSNSIVVFCGTSGTYGTGSWPDGADINLMPI

SEQ ID NO: 16389 - protein, 470 aa, synthetic construct
  REGION 1..470: note = neuraminidase__InfluenzaA__ACA33539
MNPYQKIITIGSISIAIGIISLMLQIGNIISIWASHSIQTGSQNHTGICNQRIITYENSTWVNHTYVSINNTNVVAGKDKTSVTLAGNSSLCSISGWAIYTKDNSIRIGSKGDVFVIREPFISCSHLECRTFFLTQGALLNDKHSNGTVKDRSPYRALMSCPLGEAPSPYNSKFESVAWSASACHDGMGWLTIGISGPDNGAVAVLKYNGIITETIKSWKKRILRTQESECVCVNGSCFTIMTDGPSNGAASYKIFKIEKGKVTKSIELNAPNFYYEECSCYPDTGTVMCVCRDNWHGSNRPWVSFNQNLDYQIGYICSGVFGDNPRPKDGKGSCNPVTVDGADGVKGFSYKYGNGVWIGRTKSNRLRKGFEMIWDPNGWTDTDSDFSVKQDVVAITDWSGYSGSFVQHPELTGLDCIRPCFWVELVRGLPRENTTIWTSGSSISFCGVDSDTANWSWPDGAELPFTIDK

SEQ ID NO: 16390 - protein, 470 aa, synthetic construct
  REGION 1..470: note = neuraminidase__InfluenzaA__ACA33540
MNPNQKIITIGSISIAIGIISLMLQIGNIISIWASHSIQTGSQNHTGICNQRIITYENSTWVNHTYVSINNTNVVAGKDKTSVTLAGNSSLCSISGWAIYTKDNSIRIGSKGDVFVIREPFISCSHLECRTFFLTQGALLNDKHSNGTVKDRSPYRALMSCPLGEAPSPYNSKFESVAWSASACHDGMGWLTIGISGPDNGAVAVLKYNGIITETIKSWKKRILRTQESECVCVNGSCFTIMTDGPSNGAASYKIFKIEKGKVTKSIELNAPNFYYEECSCYPDTGTVMCVCRDNWHGSNRPWVSFNQNLDYQIGYICSGVFGDNPRPKDGKGSCNPVTVDGADGVKGFSYKYGNGVWIGRTKSNRLRKGFEMIWDPNGWTDTDSDFSVKQDVVAITDWSGYSGSFVQHPELTGLDCIRPCFWVELVRGLPRENTTIWTSGSSISFCGVDSDTANWSWPDGAELPFTIDK

SEQ ID NO: 16391 - protein, 470 aa, synthetic construct
  REGION 1..470: note = neuraminidase__InfluenzaA__ACA33582
MNPNQKIITIGSISIAIGIISLMLQIGNIISIWASHSIQTGSQNHTGICNQRIITYENSTWVNHTYVSINNTNVVAGKDKTSVTLAGNSSLCSISGWAIYTKDNSIRIGSKGDVFVIREPFISCSHLECRTFFLTQGALLNDKHSNGTVKDRSPYRALMSCPLGEAPSPYNSKFESVAWSASACHDGMGWLTIGISGPDNGAVAVLKYNGIITETIKSWKKRILRTQESECVCVNGSCFTIMTDGPSNGAASYKIFKIEKGKVTKSIELNAPNFYYEECSCYPDTGTVMCVCRDNWHGSNRPWVSFNQNLDYQIGYICSGVFGDNPRPKDGKGSCNPMTVDGADGVKGFSYKYGNGVWIGRTKSNRLRKGFEMIWDPNGWTDTDSDFSVKQDVVAITDWSGYSGSFVQHPELTGLDCIRPCFWVELVRGLPRENTTIWTSGSSISFCGVDSDTANWSWPDGAELPFTIDK

SEQ ID NO: 16392 - protein, 470 aa, synthetic construct
  REGION 1..470: note = neuraminidase__InfluenzaA__ACA33622
MNPNQKIITIGSISIAIGIISLMLQIGNIISIWASHSIQTGSQNHTGICNQRIITYENSTWVNHTYVNINNTNVVAGKDKTSVTLAGNSSLCSISGWAIYTKDNSIRIGSKGDVFVIREPFISCSHLECRTFFLTQGALLNDKHSNGTVKDRSPYRALMSCPLGEAPSPYNSKFESVAWSASACHDGMGWLTIGISGPDNGAVAVLKYNGIITETIKSWKKRILRTQESECVCVNGSCFTIMTDGPSNGAASYKIFKIEKGKVTKSIELNAPNFYYEECSCYPDTGTVMCVCRDNWHGSNRPWVSFNQNLDYQIGYICSGVFGDNPRPKDGKGSCNPVTVDGADGVKGFSYKYGNGVWIGRTKSNRLRKGFEMIWDPNGWTNTDSDFSVKQDVVAITDWSGYSGSFVQHPELTGLDCIRPCFWVELVRGLPRENTTIWTSGSSISFCGVDSDTANWSWPDGAELPFTIDK

SEQ ID NO: 16393 - protein, 470 aa, synthetic construct; identical to SEQ ID NO: 16069
  REGION 1..470: note = neuraminidase__InfluenzaA__ACA96522

SEQ ID NO: 16394 - protein, 453 aa, synthetic construct
  REGION 1..453: note = neuraminidase__InfluenzaA__ACC55274
MNPNQKIITIGSVSLTIATVCFLMQIAILAMTVTLHFRQNECSISANSQVVPCEPTTEKEVCSKVVDYRSWSKPQCQITGFAPFSKDNSIRLSAGGDIWITREPYVSCDTSKCYQFALGQGTTLDNEHSNGTIHDRIPHRTLLMNELGVPFHLGTRQVCIAWSSSSCHDGKAWLHVCVTGDDRNATASFIYNGMLVDSIGSWSQNILRTQESECVCINGSCTVVMTDGSASGKADTRILFVKEGKIVHISPLSGSAQHIEECSCYPRYPNVRCVCRDNWKGSNRPVIDINMTDYSIDSSYVCSGLVGDTPRNEDSSSSSNCRDPNEERGNPGVKGWAFDSGDDVWMGRTISRDSRSGYETFRVIGGWTTANSKSQTNRQVIVDNNNWSGYSGIFSVEHKSCINRCFYVELIRGRPKETRVWWTSNSIVVFCGTSGTYGTGSWPDGANINFMPI

SEQ ID NO: 16395 - protein, 470 aa, synthetic construct; identical to SEQ ID NO: 16329
  REGION 1..470: note = neuraminidase__InfluenzaA__ACC61967

SEQ ID NO: 16396 - protein, 470 aa, synthetic construct
  REGION 1..470: note = neuraminidase__InfluenzaA__ACD11077
MNPNQKIITIGSICMAIGIISLILQIGNIISIWVSHSIQTGSQNHTGICNQRIITYENSTWVNQTYVNISNTNVVAGKVTTSMTLAGNSSLCPIRGWAIYSKDNSIRIGSKGDVFVIREPFISCSHLECRTFFLTQGALLNDKHSNGTVKDRSPYRALMSCPIGEAPSPYNSRFESVAWSASACHDGMGWLTIGISGPDDGAVAVLKYNGIITETIKSWRKQILRTQESECVCVNGSCFTIMTDGPSDGPASYRIFKIEKGKITKSIELDAPNSHYEECSCYPDTGTVMCVCRDNWHGSNRPWVSFNQNLDYQIGYICSGVFGDNPRPKDGKGSCDPVNVDGADGVKGFSYRYGNGVWIGRTKSNNSRKGFEMIWDPNGWTDTDSNFLVKQDVVAMTDWSGYSGSFVQHPELTGLDCMRPCFWVELIRGRPREKTTIWTSGSSISFCGVNSDTVNWSWPDGAELPLTIDK

SEQ ID NO: 16397 - protein, 470 aa, synthetic construct
  REGION 1..470: note = neuraminidase__InfluenzaA__ACD11078
MNPNQKIITIGSICMAIGIISLILQIGNIISIWVSHSIQTGSQNHTGICNQRIITYENSTWVNQTYVNISNTNVVAGKDTTSMTLAGNSSLCPIRGWAIYSKDNSIRIGSKGDVFVIREPFISCSHLECRTFFLTQGALLNDKHSNGTVKDRSPYRALMSCPIGEAPSPYNSRFESVAWSASACHDGMGWLTIGISGPDDGAVAVLKYNGIITETIKSWRKQILRTQESECVCVNGSCFTIMTDGPSDGPASYRIFKIEKGKITKSIELDAPNSHYEECSCYPDTGTVMCVCRDNWHGSNRPWVSFNQNLDYQIGYICSGVFGDNPRPKDGKGSCDPVNVDGADGVKGFSYRYGNGVWIGRTKSNSSRKGFEMIWDPNGWTDTDSNFLVKQDVVAMTDWSGYSGSFVQHPELTGLDCMRPCFWVELIRGRPREKTTIWTSGSSISFCGVNSDTVNWSWPDGAELPLTIDK

SEQ ID NO: 16398 - protein, 470 aa, synthetic construct
  REGION 1..470: note = neuraminidase__InfluenzaA__ACD11079
MNPNQKIITIGSICMAIGIISLILQIGNIISIWVSHSIQTGSQNHTGICNQRIITYENSTWVNQTYVNISNTNVVAGKDTTSMTLAGNSSLCPIRGWAIYSKDNSIRIGSKGDVFVIREPFISCSHLECRTFFLTQGALLNDKHSNGTVKDRSPYRALMSCPIGEAPSPYNSRFESVAWSASACHDGMGWLTIGISGPDDGAVAVIKYNGIITETIKSWRKQILRTQESECVCVNGSCFTIMTDGPSDGPASYRIFKIEKGKITKSIELDAPNSHYEECSCYPDTGTVMCVCRDNWHGSNRPWVSFNQNLDYQIGYICSGVFGDNPRPKDGKGSCDPVNVDGADGVKGFSYRYGNGVWIGRTKSNSSRKGFEMIWDPNGWTDTDSNFLVKQDVVAMTDWSGYSGSFVQHPELTGLDCMRPCFWVELIRGRPREKTTIWTSGSSISFCGVNSDTVNWSWPDGAELPLTIDK

SEQ ID NO: 16399 - protein, 470 aa, synthetic construct; identical to SEQ ID NO: 16030
  REGION 1..470: note = neuraminidase__InfluenzaA__ACD56116

SEQ ID NO: 16400 - protein, 470 aa, synthetic construct; identical to SEQ ID NO: 16030
  REGION 1..470: note = neuraminidase__InfluenzaA__ACD56127

SEQ ID NO: 16401 - protein, 469 aa, synthetic construct; identical to SEQ ID NO: 15884
  REGION 1..469: note = neuraminidase__InfluenzaA__ACD56261

SEQ ID NO: 16402 - protein, 469 aa, synthetic construct
  REGION 1..469: note = neuraminidase__InfluenzaA__ACD56272
MNPNQKIITIGSVSLTISTICFFMQIAILITTVTLHFKQYEFSSPPNNQVMLCEPTIIERNITEIVYLTNTTIEKEICPKLAEYRNWSKPQCDITGFAPFSKDNSIRLSAGGDIWVTREPYVSCDPDKCYQFALGQGTTLNNVHSNDTVHDRTPYRTLLMNELGVPFHLGTKQVCIAWSSSSCHDGKAWLHVCVTGDDKNATASFIYNGRLVDSIVSWSKEILRTQESECVCINGTCTVVMTDGSASGKADTKILFIEEGKIVHTSTLSGSAQHVEECSCYPRYPGVRCVCRDNWKGSNRPIVDINIKDYSIVSRYVCSGLVGDTPRKNDSSSSSHCLDPNNEEGGHGVKGWAFDDGNDVWMGRTISEKSRSGYETFKVIEGWSNPNSKLQINRQVIVDRGNRSGYSGIFSVEGKSCINRCFYVELIRGRKEETEVLWTSNSIVVFCGTSGTYGTGSWPDGADINLMPI

SEQ ID NO: 16403 - protein, 470 aa, synthetic construct
  REGION 1..470: note = neuraminidase__InfluenzaA__ACD56283
MNPNQKIITIGSISMAIGIISLMLQIGNIISIWASHSIQTGSQNHTGICNQRIITYENSTWVNHTYVSINNTNVVAGKDKTSVTLAGNSSLCSISGWAIYTKDNSIRIGSKGDVFVIREPFISCSHLECRTFFLTQGALLNDKHSNGTVKDRSPYRALMSCPLGEAPSPYNSKFESVAWSASACHDGMGWLTIGISGPDNGAVAVLKYNGIITETIKSWKKRILRTQESECVCVNGSCFTIMTDGPSNGAASYKIFKIEKGKVTKSIELNAPNFHYEECSCYPDTGTVMCVCRDNWHGSNRPWVSFNQNLDYQIGYICSGVFGDNPRPKDGKGSCNPVTVDGADGVKGFSYKYGNGVWIGRTKSNRLRKGFEMIWDPNGWTDTDSDFSVKQDVVAITDWSGYSGSFVQHPELTGLDCIRPCFWVELVRGLPRENTTIWTSGSSISFCGVDSDTANWSWPDGAELPFTIDK

SEQ ID NO: 16404 - protein, 469 aa, synthetic construct
  REGION 1..469: note = neuraminidase__InfluenzaA__ACD56305
MNPNQKIITIGSVSLTIATVCFLMQIAILVTTVTLHFKQHECDSPASNQVMPCEPIIIERNITEIVYLNNTTIEKEICPEVVEYRNWSKPQCQITGFAPFSKDNSIRLSAGGDIWVTREPYVSCDPGKCYQFALGQGTTLDNKHSNDTIHDRIPHRTLLMNELGVPFHLGTRQVCVAWSSSSCHDGKAWLHVCVTGDDKNATASFIYDGRLVDSIGSWSQNILRTQESECVCINGTCTVVMTDGSASGRADTRILFIEEGKIVHISPLSGSAQHVEECSCYPRYPDVRCICRDNWKGSNRPVIDINMEDYSIDSSYVCSGLVGDTPRNDDRSSNSNCRDPNNERGNPGVKGWAFDNGDDVWMGRTISKDLRSGYETFKVIGGWSTPNSKSQINRQVIVDSNNWSGYSGIFSVEGKSCINRCFYVELIRGRQQETRVWWTSNSIVVFCGTSGTYGTGSWPDGANINFMPI

SEQ ID NO: 16405 - protein, 469 aa, synthetic construct
  REGION 1..469: note = neuraminidase__InfluenzaA__ACD56316
MNPNQKIITIGSVSLTIATVCFLMQIAILVTTVTLHFKQHECDSPASNQVMPCEPIIIERNITEIVYLNNTTIEKEICPEVVEYRNWSKPQCQITGFAPFSKDNSIRLSAGGDIWVTREPYVSCDPGKCYQFALGQGTTLDNKHSNDTIHDRIPHRTLLMNELGVPFHLGTRQVCVAWSSSSCHDGKAWLHVCVTGDDKNATASFIYDGRLMDSIGSWSQNILRTQESECVCINGTCTVVMTDGSASGRADTRILFIEEGKIVHISPLSGSAQHVEECSCYPRYPDVRCICRDNWKGSNRPVIDINMEDYSIDSSYVCSGLVGDTPRNDDRSSNSNCRNPNNERGNPGVKGWAFDNGDDVWMGRTISKDLRSGYETFKVIGGWSTPNSKSQINRQVIVDSNNWSGYSGIFSVEGKRCINRCFYVELIRGRQQETRVWWTSNSIVVFCGTSGTYGTGSWPDGANINFMPI

SEQ ID NO: 16406 - protein, 469 aa, synthetic construct
  REGION 1..469: note = neuraminidase__InfluenzaA__ACD56327
MNPNQKIITIGSVSLTIATVCFLMQIAILATTVTLHFKQHECDSPASNQVMPCEPIIIERNITEIVYLNNTTIEKEICPEVVEYRNWSKPQCQITGFAPFSKDNSIRLSAGGDIWVTREPYVSCDPSKCHQFALGQGTTLENKHSNGTKHDRIPHRTLLMNELGVPFHLGTKQVCVAWSSSSCHDGKAWLHVCVTGDDRNATASFIYGGRLVDSIVSWSQNILRTQESECVCINGTCTVVMTDGSASGRADTRILFIKEGKIVHISPLSGSAQHIEECSCYPRYPDVRCICRDNWKGSNRPVIDINMEDYSIDSSYVCSGLVGDTPRNDDSSSNSNCRDPNNERGNPGVKGWAFDNGDDVWMGRTISKDSRSGYETFKVIGGWSTPNSKSQVNRQVIVDSNNWSGYSGIFSVEGKSCINRCFYVELIRGRPQETRVWWTSNSIVVFCGTSGTYGTGSWPDGANINFMPI

SEQ ID NO: 16407 - protein, 469 aa, synthetic construct
  REGION 1..469: note = neuraminidase__InfluenzaA__ACD85190
MNPNQKIITIGSVSLTIATVCFLMQIAILVTTVTLHFKQHECDSPASNQVMPCEPIIIERNITEIVYLNNTTIEKEICPKVVEYRNWSKPQCQITGFAPFSKDNSIRLSAGGDIWVTREPYVSCDPGKCYQFALGQGTTLDNKHSNDTIHDRIPHRTLLMNELGVPFHLGTRQVCIAWSSSSCHDGKAWLHVCVTGDDKNATASFIYDGRLVDSIGSWSQNILRTQESECVCINGTCTVVMTDGSASGRADTRILFIEEGKIVHISPLSGSAQHVEECSCYPRYPDVRCICRDNWKGSNRPIIDINMEDYSIDSSYVCSGLVGDTPRNDDRSSNSNCRNPNNERGNPGVKGWAFDNGDDVWMGRTISKDLRSGYETFKVIGGWSTPNSKSQINRQVIVDSNNWSGYSGIFSVEGKSCINRCFYVELIRGRQQETRVWWTSNSIVVFCGTSGTYGTGSWPDGANINFMPI

SEQ ID NO: 16408 - protein, 469 aa, synthetic construct
  REGION 1..469: note = neuraminidase__InfluenzaA__ACD85201
MNPNQKIITIGSVSLTIATVCFLMQIAILVTTVTLHFKQHECDSPASNQVMPCEPIIIERNITEIVYLNNTTIEKEICPKVVEYRNWSKPQCQITGFAPFSKDNSIRLSAGGDIWVTREPYVSCDPGKCYQFALGQGTTLDNKHSNDTIHDRIPHRTLLMNELGVPFHLGTRQVCIAWSSSSCHDGKAWLHVCVTGDDKNATASFIYDGRLVDSISSWSQNILRTQESECVCINGTCTVVMTDGSASGRADTRILFIEEGKIVHISPLSGSAQHVEECSCYPRYPDVRCICRDNWKGSNRPVIDINMEDYSIDSSYVCSGLVGDTPRNDDRSSNSNCRNPNNERGNPGVKGWAFDNGDDVWMGRTISKDLRSGYETFKVIGGWSTPNSKSQINRQVIVDSNNWSGYSGIFSVEGKSCINRCFYVELIRGRQQETRVWWTSNSIVVFCGTSGTYGTGSWPDGANINFMPI

SEQ ID NO: 16409 - protein, 469 aa, synthetic construct
  REGION 1..469: note = neuraminidase__InfluenzaA__ACD85212
MNPNQKIITIGSVSLTIATVCFLMQIAILATTVTLHFKQHECDSPASNQVMPCEPIIIERNIKEIVYLNNTTIEKEICPEVVEYRNWSKPQCQITGFAPFSKDNSIRLSAGGDIWVTREPYVSCDPGKCYQFALGQGTTLDNKHSNGTIHDRIPHRTLLMNELGVPFHLGTKQVCVAWSSSSCHDGKAWLHVCVTGDDRNATASFIYDGRLVDSIGSWSQNILRTQESECVCINGTCTVVMTDGSASGRADTRILFIKEGKIVHISPLSGSAQHIEECSCYPRYPDVRCICRDNWKGSNRPVIDINMEDYSIDSSYVCSGLVGDTPRNDDSSSNSNCRDPNNERGNPGVKGWAFDNGDDVWMGRTINKDSRSGYETFKVIGGWSTPNSKSQVNRQVIVDNNNWSGYSGIFSVEGKSCINRCFYVELIRGRPQETRVWWTSNSIVVFCGTSGTYGTGSWPDGANINFMPI

SEQ ID NO: 16410 - protein, 469 aa, synthetic construct
  REGION 1..469: note = neuraminidase__InfluenzaA__ACD85223
MNPNQKIITIGSVSLTIATACFLMQIAILVTTVTLHFKQHECDSPASNQVMPCEPIIIERNITEIVYLNNTTIEKEICPKVVEYRNWSKPQCQITGFAPFSKDNSIRLSAGGDIWVTREPYVSCDPGKCYQFALGQGTTLDNKHSNDTIHDRIPHRTLLMNELGVPFHLGTRQVCIAWSSSSCHDGKAWLHVCVTGDDKNATASFIYDGRLVDSIGSWSQNILRTQESECVCINGTCTVVMTDGSASGRADTRILFIEEGKIVHISPLSGSAQHVEECSCYPRYPDVRCICRDNWKGSNRPIIDINMEDYSIDSSYVCSGLVGDTPRNDDRSSNSNCRNPNNERGNPGVKGWAFDNGDDVWMGRTISKDLRSGYETFKVIGGWSTPNSKSQINRQVIVDSNNWSGYSGIFSVEGKSCINRCFYVELIRGRQQETRVWWTSNSIVVFCGTSGTYGTGSWPDGANINFMPI

SEQ ID NO: 16411 - protein, 469 aa, synthetic construct
  REGION 1..469: note = neuraminidase__InfluenzaA__ACD85234
MNPNQKIITIGSVSLTIATVCFLMQIAILATTVTLHFKQHECDSPASNQVMPCEPIIIERNITEIVYLNNTTIEKEICPEVVEYRNWSKPQCQITGFAPFSKDNSIRLSADGDIWVTREPYVSCDPGKCYQFALGQGTTLDNKHSNGTIHDRIPHRTLLMNELGVPFHLGTKQVCVAWSSSSCHDGKAWLHVCVTGDDRNATASFIYDGRLVDSIGSWSQNILRTQESECVCINGTCTVVMTDGSASGRADTRILFIKEGKIVHISPLSGSAQHIEECSCYPRYPDVRCICRDNWKGSNRPVIDINMEDYSIDSSYVCSGLVGDTPRNDDSSSNSNCRDPNNERGNPGVKGWAFDNGDDVWMGRTISKDLRSGYETFKVIGGWSTPNSKSQVNRQVIVDNNNWSGYSGIFSVEGKSCINRCFYVELIRGRPQETRVWWTSNSIVVFCGTSGTYGTGSWPDGANINFMPI

SEQ ID NO: 16412 - protein, 469 aa, synthetic construct
  REGION 1..469: note = neuraminidase__InfluenzaA__ACD85245
MNPNQKIITIGSVSLIIATVCFLMQIAILVTTVTLHFKQHECDSPASNQVMPCEPIIIERNITEIVYLNNTTIEKEICPRVVEYRNWSKPQCQITGFAPFSKDNSIRLSAGGDIWVTREPYVSCDPGKCYQFALGQGTTLDNKHSNDTIHDRIPHRTLLMNELGVPFHLGTRQVCIAWSSSSCHDGKAWLHVCITGDDKNATASFIYDGRLVDSIGSWSQNILRTQESECVCINGTCTVVMTDGSASGRADTRILFIEEGKIVHISPLSGSAQHVEECSCYPRYPGVRCICRDNWKGSNRPVVDINMEDYSIDSSYVCSGLVGDTPRNDDRSSNSNCRNPNNERGNQGVKGWAFDNGDDVWMGRTISKDLRSGYETFKVIGGWSTPNSKSQINRQVIVDSDDRSGYSGIFSVEGKSCINRCFYVELIRGRKQETRVWWTSNSIVVFCGTSGTYGTGSWPDGANINFMPI

SEQ ID NO: 16413 - protein, 469 aa, synthetic construct
  REGION 1..469: note = neuraminidase__InfluenzaA__ACD85454
MNPNQKIITIGSVSLTISTIGFFMQTAILITTVTLHFKQYEFNSPPNNQVMLCEPTIIERNITEIVYLTNTTIEKEICPKLAEYRNWSKPQCDITGFAPFSKDNSIRLSAGGDIWVTREPYVSCDPDKCYQFALGQGTTLNNVHSNDTVRNRTPYRTLLMNELGVPFHLGTKQVCIAWSSSSCHDGKAWLHVCITGDDKNATASFIYNGRLVDSIVSWSKEILRTQESECVCINGTCTVVMTDGSASGKADTKILFIEEGKIVHTSTLSGSAQHVEECSCYPRYPGVRCVCRDNWKGSNRPIVDINIKDHSIVSSYVCSGLVGDTPRKNDSSSSSHCLDPNNEEGGHGVKGWAFDDGNDVWMGRTISEKSRLGYETFKVIEGWSNPKSKLQINRQVIVDRGNRSGYSGIFSVEGKSCINRCFYVELIRGRKEETEVLWTSNSIVVFCGTSGTYGTGSWPDGADINLMPI

SEQ ID NO: 16414 - protein, 469 aa, synthetic construct
  REGION 1..469: note = neuraminidase__InfluenzaA__ACD85465
MNPNQKIITIGSVSLTISTIGFFMQTAILITTVTLHFKQYEFNSPPNNQVMLCEPTIIERNITEIVYLTNTTIEKEICPKLAEYRNWSKPQCDITGFAPFSKDNSIRLSAGGDIWVTREPYVSCDPDKCYQFALGQGTTLNNVHSNDTVRDRTPYRTLLMNELGVPFHLGTKQVCIAWSSSSCHDGKAWLHVCITGDDKNATASFIYNGRLVDSIVSWSKEILRTQESECVCINGTCTVVMTDGSASGKADTKILFIEEGKIVHTSTLSGSAQHVEECSCYPRYPGVRCVCRDNWKGSNRPIVDINIKDHSIVSSYVCSGLVGDTPRKNDSSSSSHCLDPNNEEGGHGVKGWAFDDGNDVWMGRTISEKSRLGYETFKVIEGWSNPKSKLQINRQVIVDRGNRSGYSGIFSVEGKSCINRCFYVELIRGRKEETEVLWTSNSIVVFCGTSGTYGTGSWPDGADINLMPI

SEQ ID NO: 16415 - protein, 469 aa, synthetic construct
  REGION 1..469: note = neuraminidase__InfluenzaA__ACD85487
MNPNQKIITIGSVSLIISTICFFMQTAILITTVTLHFKQYEFNSPPNNQVMLCEPTIIERNITEIVYLTNTTIEKEICPKLAEYRNWSKPQCDITGFAPFSKDNSIRLSAGGDIWVTREPYVSCDPDKCYQFALGQGTTLNNVHSNDTVRNRTPYRTLLMNELGVPFHLGTKQVCIAWSSSSCHDGKAWLHVCITGDDKNATASFIYNGRLVDSIVSWSKEILRTQESECVCINGTCTVVMTDGSASGKADTKILFIEEGKIVHTSTLSGSAQHVEECSCYPRYPGVRCVCRDNWKGSNRPIVDINIKDHSIVSSYVCSGLVGDTPRKNDSSSSSHCLDPNNEEGGHGVKGWAFDDGNDVWMGRTISEKSRLGYETFKVIEGWSNPNSKLQINRQVIVDRGNRSGYSGIFSVEGKSCINRCFYVELIRGRKEETEVLWTSNSIVVFCGTSGTYGTGSWPDGADINLMPI

SEQ ID NO: 16416 - protein, 469 aa, synthetic construct
  REGION 1..469: note = neuraminidase__InfluenzaA__ACD85498
MNPNQKIITIGSVSLIISTICFFMQTAILITTVTLHFKQYEFNSPPNNQVMLCEPTIIERNITEIVYLTNTTIEKEICPKLAEYRNWSKPQCDITGFAPFSKDNSIRLSAGGDIWVTREPYVSCDPDKCYQFALGQGTTLNNVHSNDTVRDRTPYRTLLMNELGVPFHLGTKQVCIAWSSSSCHDGKAWLHVCITGDDKNATASFIYNGRLVDSIVSWSKEILRTQESECVCINGTCTVVMTDGSASGKADTKILFIEEGKIVHTSTLSGSAQHVEECSCYPRYPGVRCVCRDNWKGSNRPIVDINIKDHSIVSSYVCSGLVGDTPRKNDSSSSSHCLDPNNEEGGHGVKGWAFDDGNDVWMGRTISEKSRLGYETFKVIEGWSNPKSKLQINRQVIVDRGNRSGYSGIFSVEGKSCINRCFYVELIRGRKEETEVLWTSNSIVVFCGTSGTYGTGSWPDGADINLMPI

SEQ ID NO: 16417 - protein, 469 aa, synthetic construct
  REGION 1..469: note = neuraminidase__InfluenzaA__ACD85509
MNPNQKIITIGSVSLTISTICFFMQTAILITTVTLHFKQYEFNSPPNNQVMLCEPTIIERNITEIVYLTNTTIEKEICPKLAEYRNWSKPQCDITGFAPFSKDNSIRLSAGGDIWVTREPYVSCDPDKCYQFALGQGTTLNNVHSNDTVRNRTPYRTLLMNELGVPFHLGTKQVCIAWSSSSCHDGKAWLHVCITGDDKNATASFIYNGRLVDSIVSWSKEILRTQESECVCINGTCTVVMTDGSASGKADTKILFIEEGKIVHTSTLSGSAQHVEECSCYPRYPGVRCVCRDNWKGSNRPIVDINIKDHSIVSSYVCSGLVGDTPRKNDSSSSSHCLDPNNEEGSRGVKGWAFDDGNDVWMGRTISEKSRLGYETFKVIEGWSNPKSKLQINRQVIVDRGNRSGYSGIFSVEGKSCINRCFYVELIRGRKEETEVLWTSNSIVVFCGTSGTYGTGSWPDGADINLMPI

SEQ ID NO: 16418 - protein, 469 aa, synthetic construct
  REGION 1..469: note = neuraminidase__InfluenzaA__ACD85520
MNPNQKIITIGSVSLIISTIGFFMQTAILITTVTLHFKQYEFNSPPNNQVMLCEPTIIERNITEIVYLTNTTIEKEICPKLAEYRNWSKPQCDITGFAPFSKDNSIRLSAGGDIWVTREPYVSCDPDKCYQFALGQGTTLNNVHSNDTVRDRTPYRTLLMNELGVPFHLGTKQVCIAWSSSSCHDGKAWLHVCITGDDKNATASFIYNGRLVDSIVSWSKEILRTQESECVCINGTCTVVMTDGSASGKADTKILFIEEGKIVHTSTLSGSAQHVEECSCYPRYPGVRCVCRDNWKGSNRPIVDINIKDHSIVSSYVCSGLVGDTPRKNDSSSSSHCLDPNNEEGGHGVKGWAFDDGNDVWMGRTISEKSRLGYETFKVIEGWSNPKSKLQINRQVIVDRGNRSGYSGIFSVEGKSCINRCFYVELIRGRKEETEVLWTSNSIVVFCGTSGTYGTGSWPDGADINLMPI

SEQ ID NO: 16419 - protein, 469 aa, synthetic construct; identical to SEQ ID NO: 16414
  REGION 1..469: note = neuraminidase__InfluenzaA__ACD85553

SEQ ID NO: 16420 - protein, 469 aa, synthetic construct
  REGION 1..469: note = neuraminidase__InfluenzaA__ACD85564
MNPNQKIITIGSVSLIISTICFFMQTAILITTVTLHFKQYEFNSPPNNQVMLCEPTIIERNITETAHLTNTTIEKEICPKLAEYRNWSKPQCDITGFAPFSKDNSIRLSAGGDIWVTREPYVSCDPDKCYQFALGQGTTLNNVHSNDTVRDRTPYRTLLMNELGVPFHLGTKQVCIAWSSSSCHDGKAWLHVCITGDDKNATASFIYNGRLVDSIVSWSKEILRTQESECVCINGTCTVVMTDGSASGKADTKILFIEEGKIVHTSTLSGSAQHVEECSCYPRYPGVRCVCRDNWKGSNRPIVDINIKDHSIVSSYVCSGLVGDTPRKNDSSSSSHCLDPNNEEGGHGVKGWAFDDGNDVWMGRTISEKSRLGYETFKVIEGWSNPKSKLQINRQVIVDRGNRSGYSGIFSVEGKSCINRCFYVELIRGRKEETEVLWTSNSIVVFCGTSGTYGTGSWPDGADINLMPI

SEQ ID NO: 16421 - protein, 469 aa, synthetic construct
  REGION 1..469: note = neuraminidase__InfluenzaA__ACD85575
MNPNQKIITIGSVSLIISTICFFMQTAILITTVTLHFKQYEFNSPPNNQVMLCEPTIIERNITEIVYLTNTTIEKEICPKLAEYRNWSKPQCDITGFAPFSKDNSIRLSAGGDIWVTREPYVSCDPDKCYQFALGQGTTLNNVHSNDTVRDRTPYRTLLMNELGVPFHLGTKQVCIAWSSSSCHDGKAWLHVCITGDDKNATASFIYNGRLVDSIVSWSKEILRTQESECVCINGTCTVVMTDGSASGKADTKILFIEEGKIVHTSTLSGSAQHVEECSCYPRYPGVRCVCRDNWKGSNRPIVDINIKDHSIVSSYVCSGLVGDTPRKNDSSSSSHCLDPNNEEGGHGVKGWAFDDGNDVWMGRTISEKSRLGYETFKVIEGWSNHKSKLQINRQVIVDRGNRSGYSGIFSVEGKSCINRCFYVELIRGRKEETEVLWTSNSIVVFCGTSGTYGTGSWPDGADINLMPI

SEQ ID NO: 16422 - protein, 469 aa, synthetic construct
  REGION 1..469: note = neuraminidase__InfluenzaA__ACD85586
MNPNQKIITIGSVSLTISTICFFMQTAILITTVTLHFKQYEFNSPPNNQVMLCEPTIIERNITEIVYLTNTTIEKEICPKLAEYRNWSKPQCDITGFAPFSKDNSIRLSAGGDIWVTREPYVSCDPDKCYQFALGQGTTLNNVHSNDTVRDRTPYRTLLMNELGVPFHLGTKQVCIAWSSSSCHDGKAWLHVCITGDDKNATASFIYNGRLVDSIVSWSKEILRTQESECVCINGTCTVVMTDGSASGKADTKILFIEEGKIVHTSTLSGSAQHVEECSCYPRYPGVRCVCRDNWKGSNRPIVDINIKDHSIVSSYVCSGLVGDTPRKNDSSSSSHCLDPNNEEGGRGVKGWAFDDGNDVWMGRTISEKSRLGYETFKVIEGWSNPKSKLQTNRQVIVDRGNRSGYSGIFSVEGKSCINRCFYVELIRGRKEETEVLWTSNSIVVFCGTSGTYGTGSWPDGADINLMPI

SEQ ID NO: 16423 - protein, 469 aa, synthetic construct
  REGION 1..469: note = neuraminidase__InfluenzaA__ACD93582
MNPNQKIITIGSVSLTISTICFFMQIAILATTVTLHFKQYEFNSPPNNQVMLCEPTIIERNITEIVYLTNTTIEKEICPKLAEYRNWSKPQCDITGFAPFSKDNSIRLSAGGDIWVTREPYVSCDPDKCYQFALGQGTTLNNVHSNDTVRGRTPYRTLLMNELGVPFHLGTKQVCIAWSSSSCHDGKAWLHVCITGDDKNATASFIYNGRLVDSIVSWSKEILRTQESECVCINGTCTVVMTDGSASGKADTKILFIEEGKIVHTSTLSGSAQHVEECSCYPRYPGVRCVCRDNWKGSNRPIVDINIKDHSIVSSYVCSGLVGDTPRKNDSSSSSHCLDPNNEEGGHGVKGWAFDDGNDVWMGRTISEKSRLGYETFKVIEGWSNPKSKLQINRQVIVDKGNRSGYSGIFSVEGKSCINRCFYVELIRGRKEETEVLWTSNSIVVFCGTSGTYGTGSWPDGADINLMPI

SEQ ID NO: 16424 - protein, 469 aa, synthetic construct; identical to SEQ ID NO: 14712
  REGION 1..469: note = neuraminidase__InfluenzaA__ACF09403

SEQ ID NO: 16425 - protein, 469 aa, synthetic construct; identical to SEQ ID NO: 15929
  REGION 1..469: note = neuraminidase__InfluenzaA__ACF22151

SEQ ID NO: 16426 - protein, 469 aa, synthetic construct; identical to SEQ ID NO: 14095
  REGION 1..469: note = neuraminidase__InfluenzaA__ACF22246

SEQ ID NO: 16427 - protein, 469 aa, synthetic construct; identical to SEQ ID NO: 14095
  REGION 1..469: note = neuraminidase__InfluenzaA__ACF22257

SEQ ID NO: 16428 - protein, 469 aa, synthetic construct; identical to SEQ ID NO: 14095
  REGION 1..469: note = neuraminidase__InfluenzaA__ACF22279

SEQ ID NO: 16429 - protein, 469 aa, synthetic construct; identical to SEQ ID NO: 14095
  REGION 1..469: note = neuraminidase__InfluenzaA__ACF22290

SEQ ID NO: 16430 - protein, 469 aa, synthetic construct; identical to SEQ ID NO: 14095
  REGION 1..469: note = neuraminidase__InfluenzaA__ACF22301

SEQ ID NO: 16431 - protein, 469 aa, synthetic construct; identical to SEQ ID NO: 14095
  REGION 1..469: note = neuraminidase__InfluenzaA__ACF22312

SEQ ID NO: 16432 - protein, 469 aa, synthetic construct
  REGION 1..469: note = neuraminidase__InfluenzaA__ACF22323
MNPNQKIITIGSVSLTIATVCFLMQIAILVTTVTLHFKQYECDSPASNQVMPYEPIIIERNITEIVYLNNTTIEKEICPKVVEYRNWSKPQCQITGFAPFSKDNSIRLSAGGDIWVTREPYVSCDHGKCYQFALGQGTTLDNKHSNDTIHDRIPHRTLLMNELGVPFHLGTRQVCIAWSSSSCHDGKAWLHVCITGDDKNATASFIYDGRLVDSIGSWSQNILRTQESECVCINGTCTVVMTDGSASGRADTRILFIEEGKIVHISPLSGSAQHVEECSCYPRYPGVRCICRDNWKGSNRPVVDINMEDYSIDSSYVCSGLVGDTPRNDDRSSNSNCRNPNNERGNQGVKGWAFDNGDDVWMGRTISKDLRSGYETFKVIGGWSTPNSKSQINRQVIVDSDNRSGYSGIFSVEGKSCINRCFYVELIRGRKQETRVWWTSNSIVVFCGTSGTYGTGSWPDGANINFMPI

SEQ ID NO: 16433 - protein, 469 aa, synthetic construct; identical to SEQ ID NO: 14095
  REGION 1..469: note = neuraminidase__InfluenzaA__ACF22334

SEQ ID NO: 16434 - protein, 469 aa, synthetic construct; identical to SEQ ID NO: 14095
  REGION 1..469: note = neuraminidase__InfluenzaA__ACF22367

SEQ ID NO: 16435 - protein, 469 aa, synthetic construct
  REGION 1..469: note = neuraminidase__InfluenzaA__ACF22378
MNPNQKIITIGSVSLTIATVCFLMQIAILVTTVTLHFKQYECDSPASNQVMPCEPIIIERNITEIVYLNNTTIEKEICPKVVEYRNWSKPQCQITGFAPFSKDNSIRLSAGGDIWVTREPYVSCDHGKCYQFALGQGTTLDNKHSNDTIHDRIPHRTLLMNELGVPFHLGTRQVCIAWSSSSCHDGKAWLHVCITGDDKNATASFIYDGRLVDSIGSWSQNILRTQESECVCINGTCTVVMTDGSASGRADTRILFIEEGKIVHISPLSGSAQHVEECSCYPRYPGVRCICRDNWKGSNRPVVDINMEDYSIDSSYVCSGLVGDTPRNDDRSSNSNCKNPNNERGNQGVKGWAFDNGDDVWMGRTISKDLRSGYETFKVIGGWSTPNSKSQINRQVIVDSDNRSGYSGIFSVEGKSCINRCFYVELIRGRKQETRVWWTSNSIVVFCGTSGTYGTGSWPDGANINFMPI

SEQ ID NO: 16436 - protein, 469 aa, synthetic construct
  REGION 1..469: note = neuraminidase__InfluenzaA__ACF22389
MNPNQKIITIGSVSLTIATVCFLMQIAILVTTVTLHFKQYECDSPASNQVMPCEPIIIERNITEIVYLNNTTIEKEICPKVVEYRNWSKPQCQITGFVPFSKDNSIRLSAGGDIWVTREPYVSCDHGKCYQFALGQGTTLDNKHSNDTIHDRIPHRTLLMNELGVPFHLGTRQVCIAWSSSSCHDGKAWLHVCITGDDKNATASFIYDGRLVDSIGSWSQNILRTQESECVCINGTCTVVMTDGSASGRADTRILFIEEGKIVHISPLSGSAQHVEECSCYPRYPGVRCICRDNWKGSNRPVVDINMEDYSIDSSYVCSGLVGDTPRNDDRSSNSNCRNPNNERGNQGVKGWAFDNGDDVWMGRTISKDLRSGYETFKVIGGWSTPNSKSQINRQVIVDSDNRSGYSGIFSVEGKSCINRCFYVELIRGRKQETRVWWTSNSIVVFCGTSGTYGTGSWPDGANINFMPI

SEQ ID NO: 16437 - protein, 469 aa, synthetic construct
  REGION 1..469: note = neuraminidase__InfluenzaA__ACF22400
MNPNQKIITIGSVSLTIATVCFLMQIAILVTTVTLHFKQYECDSPASNQVMPCEPIIIERNITEIVYLNNTTIEKEICPKVVEYRNWSKPQCQITGFAPFSKDNSIRLSAGGDIWVTREPYVSCDHGKCYQFALGQGTTLDNKHSNDTIHDRIPHRTLLMNELGVPFHLGTRQVCIAWSSSSCHDGKAWLHVCITGDDKNATASFIYDGRLMDSIGSWSQNILRTQESECVCINGTCTVVMTDGSASGRADTRILFIEEGKIVHISPLSGSAQHVEECSCYPRYPGVRCICRDNWKGSNRPVVDINMEDYSIDSSYVCSGLVGDTPRNDDRSSNSNCRNPNNERGNQGVKGWAFDNGDDVWMGRTISKDLRSGYETFKVIGGWSTPNSKSQINRQVIVDSDNRSGYSGIFSVEGKSCINRCFYVELIRGRKQETRVWWTSNSIVVFCGTSGTYGTGSWPDGANINFMPI

SEQ ID NO: 16438 - protein, 469 aa, synthetic construct; identical to SEQ ID NO: 16066
  REGION 1..469: note = neuraminidase__InfluenzaA__ACF22411

SEQ ID NO: 16439 - protein, 470 aa, synthetic construct
  REGION 1..470: note = neuraminidase__InfluenzaA__ACF33772
MNPNQKIITIGSISIAIGIISLMLQIGNIISIWASHSIQTGSQNHTGICNQRIITYENSTWVNHTYVNINNTNVVAGKDKTPVTLAGNSSLCSISGWAIYTKDNSIRIGSKGDVFVIREPFISCSHLECKTFFLTQGALLNDKHSNGTVKDRSPYRALMSCPLGEAPSPYNSKFESVAWSASACHDGIGWLTIGISGPDNGAVAVLKYNGIITGTIKSWKKQILRTQESECVCMNGSCFTIMTDGPSNGAASYKIFKIEKGKVTKSMELNAPNFYYEECSCYPDTGTVMCVCRDNWHGSNRPWVSFNQNLDYQIGYICSGVFGDNPRPKDGEGSCNPVTVDGANGVKGFSYKYGNGVWIGRTKSNRIRKGFEMIWDPNGWTNTDSDFSVKQDIVAITDWSGYSGSFVQHPELTGLDCIRPCFWVELVRGLPRENTTIWTSGSSISFCGVNSDIANWSWPDGAELPFTIDK

SEQ ID NO: 16440 - protein, 469 aa, synthetic construct
  REGION 1..469: note = neuraminidase__InfluenzaA__ACF33778
MNPNQKIITIGSVSLTISTICFFMQIAILITTVTLHFKQYEFSSPPNNQVMLCEPTIIERNITEIVYLTNTTIEKEICPKLAEYRNWSKPQCDITGFAPFSKDNSIRLSAGGDIWVTREPYVSCDPDKCYQFALGQGTTLNNVHSNDTVHDRTPYRTLLMNELGIPFHLGTKQVCIAWSSSSCHDGKAWLHVCVTGDDKNATASFIYNGRLVDSIVSWSKEILRTQESECVCINGTCTVVMTDGSASGKADTKILFIEEGKIVHTSTLSGSAQNVEECSCYPRYPGVRCVCRDNWKGSNRPIVDINIKDYSIVSRYVCSGLVGDTPRKNDSSSSSHCLNPNNEEGGHGVKGWAFDDGNDVWMGRTISEKSRSGYETFKVIEGWSNPNSKLQINRQVIVDRGNRSGYSGIFSVEGKSCINRCFYVELIRGRKEETEVLWTSNSIVVFCGTSGTYGTGSWPDGADINLMPI

SEQ ID NO: 16441 - protein, 469 aa, synthetic construct
  REGION 1..469: note = neuraminidase__InfluenzaA__ACF33785
MNPNQKIITIGSVSLTISTICFFMQIAILITTVTLHFKQYEFNSPPNNQVMLCEPTIIERNITEIVYLTNTTIEKEMCPKLAEYRNWSKPQCDITGFAPFSKDNSIRLSAGGDIWVTREPYVSCDPDKCYQFALGQGTTLNNVHSNDTVHVRTPYRTLLMNELGVPFHLGTKQVCIAWSSSSCHDGKAWLHVCVTGDDKNATASFIYNGRLVDSIVSWSKDILRTQESECVCINGTCTVVMTDGSASGKADTKILFIEEGKIVHTSTLSGSAQHVEECSCYPRYPGVRCVCRDNWKGSNRPIVDINIKDYSIVSSYVCSGLVGDTPRKTDSSSSSHCLDPNNEEGGHGVKGWAFDDGNDVWMGRTISEKLRLGYETFKVIEGWSNPNSKLQINRQVIVDRGNRSGYSGIFSVEGKSCINRCFYVELIRGRKEETEVLWTSNSIVVFCGTSGTYGTGSWPDGADINLMPI

SEQ ID NO: 16442 - protein, 470 aa, synthetic construct
  REGION 1..470: note = neuraminidase__InfluenzaA__ACF33787
MNPNQKIITIGSISIAIGIISLMLQIGNIISIWASHSIQTGSQNHTGICNQRIITYENSTWVNHTYVNINNTNVVAGKDKTPVTLAGNSSLCSISGWAIYTKDNSIRIGSKGDVFVIREPFISCSHLECKTFFLTQGALLNDKHSNGTVKDRSPYRALMSCPLGEAPSPYNSKFESVAWSASACHDGIGWLTIGISGPDNGAVAVLKYNGIITGTIKSWKKQILRTQESECVCMNGSCFTIMTDGPGNGAASYKIFKIEKGKVTKSMELNAPNFHYEECSCYPDTGTVMCVCRDNWHGSNRPWVSFNQNLDYQIGYICSGVFGDNPRPKDGEGSCNPVTVDGANGVKGFSYKYGNGVWIGRTKSNRIRKGFEMIWDPNGWTNTDSDFSVKQDIVAITDWSGYSGSFVQHPELTGLDCIRPCFWVELVRGLPKENTTIWTSGSSISFCGVNSGIANWSWPDGAELPFTIDK

SEQ ID NO: 16443 - protein, 469 aa, synthetic construct; identical to SEQ ID NO: 15884
  REGION 1..469: note = neuraminidase__InfluenzaA__ACF33798

SEQ ID NO: 16444 - protein, 469 aa, synthetic construct; identical to SEQ ID NO: 16057
  REGION 1..469: note = neuraminidase__InfluenzaA__ACF41672

SEQ ID NO: 16445 - protein, 470 aa, synthetic construct; identical to SEQ ID NO: 16030
  REGION 1..470: note = neuraminidase__InfluenzaA__ACF41683

SEQ ID NO: 16446 - protein, 469 aa, synthetic construct
  REGION 1..469: note = neuraminidase__InfluenzaA__ACF41749
MNPNQKIITIGSVSLTIATVCFLMQIAILVTTVTLHFKQYECDSPASNQVMPCEPIIIERNITGIVYLNNTTIEKEICPKVVEYRNWSKPQCQITGFAPFSKDNSIRLSAGGDIWVTREPYVSCDHGKCYQFALGQGTTLDNKHSNDTIHDRIPHRTLLMNELGVPFHLGTRQVCIAWSSSSCHDGKAWLHVCITGDDKNATASFIYDGRLVDSIGSWSQNILRTQESECVCINGTCTVVMTDGSASGRADTRILFIEEGKIVHISPLSGSAQHVEECSCYPRYPGVRCICRDNWKGSNRPVVDINMEDYSIDSSYVCSGLVGDTPRNDDRSSNSNCRNPNNERGNQGVKGWAFDNGDDVWMGRTISKDLRSGYETFKVIGGWSTPNSKSQINRQVIVDSDNRSGYSGIFSVEGKSCINRCFYVELIRGRKQETRVWWTSNSIVVFCGTSGTYGTGSWPDGANINFMPI

SEQ ID NO: 16447 - protein, 469 aa, synthetic construct
  REGION 1..469: note = neuraminidase__InfluenzaA__ACF41760
MNPNQKIITIGSVSLTIATVCFLMQIAILVTTVTLHFKQYECDSPASNQVMPCEPIIIERNITEIVYLNNTTIEKEICPKVVEYRNWSKPQCQITGFAPFSKDNSIRLSAGGDIWVTREPYVSCDRGKCYQFALGQGTTLDNKHSNDTIHDRIPHRTLLMNELGVPFHLGTRQVCIAWSSSSCHDGKAWLHVCITGDDKNATASFIYDGRLVDSIGSWSQNILRTQESECVCINGTCTVVMTDGSASGRADTRILFIEEGKIVHISPLSGSAQHVEECSCYPRYPGVRCICRDNWKGSNRPVVDINMEDYSIDSSYVCSGLVGDTPRNDDRSSNSNCRNPNNERGNQGVKGWAFDNGDDVWMGRTISKDLRSGYETFKVIGGWSTPNSKSQINRQVIVDSDNRSGYSGIFSVEGKSCINRCFYVELIRGRKQETRVWWTSNSIVVFCGTSGTYGTGSWPDGANINFMPI

SEQ ID NO: 16448 - protein, 469 aa, synthetic construct
  REGION 1..469: note = neuraminidase__InfluenzaA__ACF41771
MNPNQKIITIGSVSLTIATVCFLMQIAILVTTVTLHFKQYECDSPASNQVMPCEPIIIERNITEIVYLNNTTIEKEICPKVVEYRNWSKPQCQITGFAPFSKDNSIRLSAGGDIWVTREPYVSCDHGKCYQFALGQGTTLDNKHSNDTIHDRIPHRTLLMNELGVPFHLGTRQVCIAWSSSSCHDGKAWLHVCITGDDKNATASFIYDGRLVDSIGSWSQNILRTQESECVCINGTCTVVITDGSASGRADTRILFIEEGKIVHISPLSGSAQHVEECSCYPRYPGVRCICRDNWKGSNRPVVDINMEDYSIDSSYVCSGLVGDTPRNDDRSSNSNCRNPNNERGNQGVKGWAFDNGDDVWMGRTISKDLRSGYETFKVIGGWSTPNSKSQINRQVIVDSDNRSGYSGIFSVEGKSCINRCFYVELIRGRKQETRVWWTSNSIVVFCGTSGTYGTGSWPDGANINFMPI

SEQ ID NO: 16449 - protein, 469 aa, synthetic construct; identical to SEQ ID NO: 14095
  REGION 1..469: note = neuraminidase__InfluenzaA__ACF41793

SEQ ID NO: 16450 - protein, 469 aa, synthetic construct; identical to SEQ ID NO: 14095
  REGION 1..469: note = neuraminidase__InfluenzaA__ACF41804

SEQ ID NO: 16451 - protein, 469 aa, synthetic construct; identical to SEQ ID NO: 14095
  REGION 1..469: note = neuraminidase__InfluenzaA__ACF41826

SEQ ID NO: 16452 - protein, 454 aa, synthetic construct; identical to SEQ ID NO: 15719
  REGION 1..454: note = neuraminidase__InfluenzaA__ACF41837

SEQ ID NO: 16453 - protein, 470 aa, synthetic construct
  REGION 1..470: note = neuraminidase__InfluenzaA__ACF41881
MNPNQKIITIGSISIAIGIISLMLQIGNIISIWASHSIQTGSQNHTGVCNQRIITYENSTWVNHTYVNINNTNVVAGKDKTSVTLAGNSSLCSISGWAIYTKDNSIRIGSKGDVFVIREPFISCSHLECRTFFLTQGALLNDKHSNGTVKDRSPYRALMSCPLGEAPSPYNSKFESVAWSASACHDGMGWLTIGISGPDNGAVAVLKYNGIITETIKSWKKRILRTQESECVCVNGSCFTIMTDGPSNGAASYKIFKIEKGKVTKSIELNAPNFHYEECSCYPDTGTVMCVCRDNWHGSNRPWVSFNQNLDYQIGYICSGVFGDNPRPKDGEGSCNPVTVDGADGVKGFSYKYGNGVWIGRTKSNRLRKGFEMIWDPNGWTDTDSDFSVKQDVVAITDWSGYSGSFVQHPELTGLDCIRPCFWVELVRGLPRENTTIWTSGSSISFCGVNSDTANWSWPDGAELPFTIDK

SEQ ID NO: 16454 - protein, 469 aa, synthetic construct; identical to SEQ ID NO: 15929
  REGION 1..469: note = neuraminidase__InfluenzaA__ACF41892

SEQ ID NO: 16455 - protein, 469 aa, synthetic construct; identical to SEQ ID NO: 14327
  REGION 1..469: note = neuraminidase__InfluenzaA__ACF41903

SEQ ID NO: 16456 - protein, 469 aa, synthetic construct
  REGION 1..469: note = neuraminidase__InfluenzaA__ACF41914
MNPNQKIITIGSVSLTISTICFFMQIAILITTVTLHFKQYEFNSPPNNQVMLCEPTIIERNITEIVYLTNTTIEKEICPKLAEYRNWSKPQCNITGFAPFSKDNSIRLSAGGDIWVTREPYVSCDPDKCYQFALGQGTTLNNVHSNDTVHDRTPYRTLLMNELGVPFHLGTKQVCIAWSSSSCHDGKAWLHVCVTGDDKNATASFIYNGRLVDSIVSWSKEILRTQESECVCINGTCTVVMTDGSASGKADTKILFIEEGKIVHTSTLSGSAQHVEECSCYPRYLGVRCVCRDNWKGSNRPIVDINIKDYSIVSSYVCSGLVGDTPRKNDSSSSSHCLDPNNEEGGHGVKGWAFDDGNDVWMGRTISEKLRSGYETFKVIEGWSNPNSKLQINRQVIVDRGNRSGYSGIFSVEGKSCINRCFYVELIRGRKEETEVLWTSNSIVVFCGTSGTYGTGSWPDGADINLMPI

SEQ ID NO: 16457 - protein, 470 aa, synthetic construct
  REGION 1..470: note = neuraminidase__InfluenzaA__ACF41925
MNPNQKIITIGSISMAIGIISLILQIGNIISIWASHSIQTGSQNHTGICNQRIITYENSTWVNQTYVNINNTNVVAGKDKTSVTLAGNSSLCPIRGWAIYTKDNSIRIGSKGDVFVIREPFISCSHLECRTFFLTQGALLNDKHSNGTVKDRSPYRALMSCPLGEAPSPYNSRFESVAWSASACHDGMGWLTIGISGPDNGAVAVLKYNGIITETIKSWKKRILRTQESECVCVNGSCFTIMTDGPSNGAASYRIFKIEKGKVTKSIELDAPNYHYEECSCYPDTGTVMCVCRDNWHGSNRPWVSFNQNLDYQIGYICSGVFGDNPRPKDGEGSCNPVTVDGADGVKGFSYRYGNGVWIGRTKSNRLRKGFEMIWDPNGWTDTDSDFSVKQDVVAMTDWSGYSGSFVQHPELTGLDCMRPCFWVELIRGRPRENTTIWTSGSSISFCGVNSDTANWSWPDGAELPFTIDK

SEQ ID NO: 16458 - protein, 470 aa, synthetic construct; identical to SEQ ID NO: 16457
  REGION 1..470: note = neuraminidase__InfluenzaA__ACF41936

SEQ ID NO: 16459 - protein, 469 aa, synthetic construct
  REGION 1..469: note = neuraminidase__InfluenzaA__ACF54392
MNPNQKIITIGSVSLTTATACFLTQIAILVTTVTLHFKQHECDSPASNQVMPCEPIIIERNITEIVYLNNTTIEKEICPKVVEYRNWSKPQCQITGFAPFSKDNSIRLSAGGDIWVTREPYVSCDSGKCYQFALGQGTTLDNKHSNDTIHDRIPHRTLLMNELGVPFHLGTRQVCIAWSSSSCHDGKAWLHVCITGDDKNATASFIYDGRLVDSIGSWSQNILRTQESECVCINGTCTVVMTDGSASGRADTRILFIEEGKIVHISPLSGSAQHVEECSCYPRYPGVRCICRDNWKGSNRPVVDINMEDYSIDSSYVCSGLVGDTPRNDDRFSNSNCRNPNNERGNQGVKGWAFDNGDDVWMGRTISKDLRSGYETFKVIGGWSTPNSKSQINRQVIVDSDNRSGYSGIFSVEGKSCINRCFYVELIRGRKQETRVWWTSNSIVVFCGTSGTYGTGSWPDGANINFMPI

SEQ ID NO: 16460 - protein, 469 aa, synthetic construct; identical to SEQ ID NO: 14095
  REGION 1..469: note = neuraminidase__InfluenzaA__ACF54403

SEQ ID NO: 16461 - protein, 469 aa, synthetic construct; identical to SEQ ID NO: 14095
  REGION 1..469: note = neuraminidase__InfluenzaA__ACF54414

SEQ ID NO: 16462 - protein, 469 aa, synthetic construct; identical to SEQ ID NO: 14095
  REGION 1..469: note = neuraminidase__InfluenzaA__ACF54425

SEQ ID NO: 16463 - protein, 469 aa, synthetic construct; identical to SEQ ID NO: 14095
  REGION 1..469: note = neuraminidase__InfluenzaA__ACF54436

SEQ ID NO: 16464 - protein, 469 aa, synthetic construct
  REGION 1..469: note = neuraminidase__InfluenzaA__ACF54447
MNPNQKIITIGSVSLTIATVCFLMQIAILVTTVTLHFKQYECDSPASNQVMPCEPIIIERNITEIVYLNNTTIEKEICPKVVEYRNWSKPQCQITGFAPFSKDNSIRLSAGGDIWVTREPYVSCDHGKCYQFALGQGTTLDNKHSNDTIHDRIPHRTLLMNELGVPFHLGTKQVCIAWSSSSCHDGKAWLHVCITGDDKNATASFIYDGRLVDSIGSWSQNILRTQESECVCINGTCTVVMTDGSASGRADTRILFIEEGKIVHISPLSGSAQHVEECSCYPRYPGVRCICRDNWKGSNRPVVDINMEDYSIDSSYVCSGLVGDTPRNDDRSSNSNCRNPNNERGNQGVKGWAFDNGDDVWMGRTISKDLRSGYETFKVIGGWSTPNSKSQINRQVIVDSDNRSGYSGIFSVEGKSCINRCFYVELIRGRKQETRVWWTSNSIVVFCGTSGTYGTGSWPDGANINFMPI

SEQ ID NO: 16465 - protein, 469 aa, synthetic construct
  REGION 1..469: note = neuraminidase__InfluenzaA__ACF54469
MNPNQKIITIGSVSLTIATVCFLMQIAILVTTVTLHFKQYECDSPASNQVMPCEPIIIERNITEIVYLNNTTIEKEICPKVVEYRNWSKPQCQITGFAPFSKDNSIRLSAGGDIWVTREPYVSCDHGKCYQFALGQGTTLDNKHSNDTIHDRIPHRTLLMNELGVPFHLGTRQVCMAWSSSSCHDGKAWLHVCITGDDKNATASFIYDGRLVDSIGSWSQNILRTQESECVCINGTCTVVMTDGSASGRADTRILFIEEGKIVHISPLSGSAQHVEECSCYPRYPGVRCICRDNWKGSNRPVVDINMEDYSIDSSYVCSGLVGDTPRNDDRSSNSNCRNPNNERGNQGVKGWAFDNGDDVWMGRTISKDLRSGYETFKVIGGWSTPNSKSQINRQVIVDSDNRSGYSGIFSVEGKSCINRCFYVELIRGRKQETRVWWTSNSIVVFCGTSGTYGTGSWPDGANINFMPI

SEQ ID NO: 16466 - protein, 469 aa, synthetic construct; identical to SEQ ID NO: 15760
  REGION 1..469: note = neuraminidase__InfluenzaA__ACF54480

SEQ ID NO: 16467 - protein, 469 aa, synthetic construct
  REGION 1..469: note = neuraminidase__InfluenzaA__ACF54502
MNPNQKIITIGSVSLTIATVCFLMQIAILATTVTLHFKQHECDSPASNQVMPCEPIIIERNITEIVYLNNTTIEKEICPEVVEYRNWSKPQCQITGFAPFSKDNSIRLSAGGDIWVTREPYVSCDPGKCYQFALGQGTTLDNKHSNGTIHDRIPHRTLLMNELGVSFHLGTKQVCVAWSSSSCHDGKAWLHVCVTGDDRNATASFIYDGRLVDSIGSWSQNILRTQESECVCINGTCTVVMTDGSASGRADTRILFIKEGKIVHISPLSGSAQHIEECSCYPRYPDVRCICRDNWKGSNRPVIDINMEDYSIDSSYVCSGLVGDTPRNDDSSSNSNCRDPNNERGNPGVKGWAFDNGDDVWMGRTINKDSRSGYETFKVIGGWSTPNSKSQVNRQVIVDNNNWSGYSGIFSVEGKSCINRCFYVELIRGRPQETRVWWTSNSIVVFCGTSGTYGTGSWPDGANINFMPI

SEQ ID NO: 16468 - protein, 469 aa, synthetic construct; identical to SEQ ID NO: 16467
  REGION 1..469: note = neuraminidase__InfluenzaA__ACF54513

SEQ ID NO: 16469 - protein, 469 aa, synthetic construct
  REGION 1..469: note = neuraminidase__InfluenzaA__ACF54524
MNPNQKIITIGSVSLTIATVCFFMQIAILATTVTLHFKQHECDSPASNQVMPCEPIIIERNITEIVYLNNTTIEKEICPEVVEYRNWSKPQCQITGFAPFSKDNSIRLSAGGDIWVTREPYVSCDPGKCYQFALGQGTTLDNKHSNGTIHDRIPHRTLLMNELGVSFHLGTKQVCVAWSSSSCHDGKAWLHVCVTGDDRNATASFIYDGRLVDSIGSWSQNILRTQESECVCINGTCTVVMTDGSASGRADTRILFIKEGKIVHISPLSGSAQHIEECSCYPRYPDVRCICRDNWKGSNRPVIDINMEDYSIDSSYVCSGLVGDTPRNDDSSSNSNCRDPNNERGNPGVKGWAFDNGDDVWMGRTINKDSRSGYETFKVIGGWSTPNSKSQVNRQVIVDNNNWSGYSGIFSVEGKSCINRCFYVELIRGRPQETRVWWTSNSIVVFCGTSGTYGTGSWPDGANINFMPI

SEQ ID NO: 16470 - protein, 469 aa, synthetic construct
  REGION 1..469: note = neuraminidase__InfluenzaA__ACF54535
MNPNQKIITIGSVSLIISTICFFMQTAILITTVTLHFKQYEFNSPPNNQVMLCEPTIIERNITKIVYLTNTTIEKEICPKLAEYRNWSKPQCDITGFAPFSKDNSIRLSAGGDIWVTREPYVSCDPDKCYQFALGQGTTLNNVHSNDTVRDRTPYRTLLMNELGVPFHLGTKQVCIAWSSSSCHDGKAWLHVCITGDDKNATASFIYNGRLVDSIVSWSKEILRTQESECVCINGTCTVVMTDGSASGKADTKILFIEEGKIVHTSTLSGSAQHVEECSCYPRYPGVRCVCRDNWKGSNRPIVDINIKDHSIVSSYVCSGLVGDTPRKNDSSSSSHCLDPNNEEGGHGVKGWAFDDGNDVWMGRTISEKSRLGYETFKVIEGWSNPKSKLQINRQVIVDRGNRSGYSGIFSVEGKSCINRCFYVELIRGRKEETEVLWTSNSIVVFCGTSGTYGTGSWPDGADINLMPI

SEQ ID NO: 16471 - protein, 469 aa, synthetic construct; identical to SEQ ID NO: 14284
  REGION 1..469: note = neuraminidase__InfluenzaA__ACF54557

SEQ ID NO: 16472 - protein, 469 aa, synthetic construct; identical to SEQ ID NO: 15929
  REGION 1..469: note = neuraminidase__InfluenzaA__ACF54568

SEQ ID NO: 16473 - protein, 469 aa, synthetic construct
  REGION 1..469: note = neuraminidase__InfluenzaA__ACF54579
MNPNQKIITIGSVSLTISTICFFMQIAILITTVTLHFKQYEFNSPPNNQVMLCEPTIIERNITEIVYLTNTTIEKEICPKLAEYRNWSKPQCNITGFAPFSKDNSIRLSAGGDIWVTREPYVSCDPDKCYQFALGQGTTLNNVHSNDTVHDRTPYRTLLMNELGVPFHLGTKQVCIAWSSSSCHDGKAWLHVCVTGDDKNATASFIYNGRLVDSIVSWSKEILRTQESECVCINGTCTVVITDGSASGKADTKILFIEEGKIVHTSTLSGSAQHVEECSCYPRYPGVRCVCRDNWKGSNRPIVDINIKDYSIVSSYVCSGLVGDTPRKNDSSSSSHCLDPNNEEGGHGVKGWAFDDGNDVWMGRTISEKLRSGYETFKVIEGWSNPNSKLQINRQVIVDRGNRSGYSGIFSVEGKSCINRCFYVELIRGRKEETEVLWTSNSIVVFCGTSGTYGTGSWPDGADINLMPI

SEQ ID NO: 16474 - protein, 453 aa, synthetic construct
  REGION 1..453: note = neuraminidase__InfluenzaA__ACF54601
MNPNQKIITIGSICMVVGIISLILQIGNIISIWISHSIQTGNQNHTGICNQGSITYKVVAGQDSTSVILTGNSSLCPIRGWAIHSKDNGIRIGSKGDVFVIREPFISCSHLECRTFFLTQGALLNDKHSRGTFKDRSPYRALMSCPVGEAPSPYNSRFESVAWSASACHDGMGWLTIGISGPDDGAVAVLKYNGIITETIKSWRKNILRTQESECTCVNGSCFTIMTDGPSDGLASYKIFKIEKGKVTKSIELNAPNSHYEECSCYPDTGKVMCVCRDNWHGSNRPWVSFDQNLDYKIGYICSGVFGDNPRPKDGTGSCGPVSADGANGVKGFSYKYGNGVWIGRTKSDSSRHGFEMIWDPNGWTETDSRFSMRQDVVAMTDRSGYSGSFVQHPELTGLDCMRPCFWVELIRGLPEENAIWTSGSIISFCGVNSDTVDWSWPDGAELPFTIDK

SEQ ID NO: 16475 - protein, 449 aa, synthetic construct
  REGION 1..449: note = neuraminidase__InfluenzaA__ACG50700
MNPNQKIITIGSICMVIGIVSLMLQIGNMISIWVSHSIQTGNQHQAEPISNTNFLTEKAVASVTLAGNSPLCPISGWAVHSKDNSIRIGSKGDVFVIREPFISCSHLECRTFFLTQGALLNDKHSNGTVKDRSPHRTLMSCPVGEAPSPYNSRFESVAWSASACHDGTSWLTIGISGPDNGAVAVLKYNGIITDTIKSWRNNILRTQESECACVNGSCFTVMTDGPSNGQASYKIFKMEKGKVVKSVELDAPNYHYEECSCYPDASEVTCVCRDNWHGSNRPWVSFNQNLEYQIGYICSGVFGDNPRPNDGTGSCGPVSTNGAYGVKGFSFKYGNGVWIGRTKSTNSRSGFEMIWDSNGWTGTDSSFSVKQDIVAITDWSGYSGSFVQHPELTGLDCIRPCFWVELIRGRPKESTIWTSGSSISFCGVNSDTVGWSWPDGAELPFTIDK

SEQ ID NO: 16476 - protein, 469 aa, synthetic construct; identical to SEQ ID NO: 16057
  REGION 1..469: note = neuraminidase__InfluenzaA__ACG70145

SEQ ID NO: 16477 - protein, 469 aa, synthetic construct; identical to SEQ ID NO: 15884
  REGION 1..469: note = neuraminidase__InfluenzaA__ACG70156

SEQ ID NO: 16478 - protein, 469 aa, synthetic construct
  REGION 1..469: note = neuraminidase__InfluenzaA__ACG80407
MNPNQKIITIGSVSLTISTICFFMQIAILITTVTLHFKQYEFNSPPNNQMMLCEPTIIERNITEIVYLTNTTIEKEICPKLAKYRNWSKPQCDITGFAPFSKDNSIRLSAGGDIWVTREPYVSCDPDKCYQFALGQGTTLNNVHSNDTARGRTPYRTLLMNELGVPFHLGTKQVCIAWSSSSCHDGKAWLHVCITGDDKNATASFIYNGRLVDSVVSWSKEILRTQESECVCINGTCTVVMTDGSASGEADTKILFIEEGKIVHTSTLSGSAQHVEECSCYPRYPGVRCVCRDNWKGSNRPIVDINIKDHSIVSSYVCSGLVGDTPRKNDSSSSSHCLDPNNEEGGHGVKGWAFDDGNDVWMGRTISEKSRLGYETFKVIEGWSNPKSKLQINRQVIVDRGNRSGYSGIFSVEGKSCINRCFYVELIRGRKEETEVLWTSNSIVVFCGTSGTYGTGSWPDGADINLMPI

SEQ ID NO: 16479 - protein, 469 aa, synthetic construct
  REGION 1..469: note = neuraminidase__InfluenzaA__ACG80411
MDSNSKIITIGSVSLTISTICFFMQIAILITTVTLHFKQYEFNSPPNNQMMLCEPTIIERNITEIVYLTNTTIEKEICPKLAEYRNWSKPQCDITGFAPFSKDNSIRLSAGGDIWVTREPYVSCDPDKCYQFALGQGTTLNNVHSNDTAGGRTPYRTLLMNELGVPFHLGTKQVCIAWSSSSCHDGKAWLHVCITGDDKNATASFIYDGRLVDGVVSWSKEILRTQESECVCINGTCTVVMTDGSASGEADTKILFIEEGKIVHTSTLSGSAQHVEECSCYPRYPGVRCVCRDNWKGSNRPIVDINIKDHSIVSSYVCSGLVGDTPRKNDSSSSSHCLDPNNEEGGHGVKGWAFDDGNDVWMGRTISEKSRLGYETFKVIEGWSNPKSKLQINRQVIVDRGNRSGYSGIFSVEGKSCINRCFYVELIRGRKEETEVLWTSNSIVVFCGTSGTYGTGSWPDGADINLMPI

SEQ ID NO: 16480 - protein, 468 aa, synthetic construct
  REGION 1..468: note = neuraminidase__InfluenzaA__ACG80421
MNPIQKIITIGSVSLTISTICFFMQIAILITTVTLHFKQYEFNSPPNNQMMLCEPTIIERNITEIVYLTNTTIEKEICPKLAEYRNWSKPQCDITGFAPFSKDNSIRLSAGGDIWVTREPYVSCDPDKCYQFALGQGTTLNNVHSDTARDRTPYRTLLMNELGVPFHLGTKQVCIAWSSSSCHDGKAWLHVCITGDDKNATASFIYNGRLVDSVVSWSKEILRTQESECVCINGTCTVVMTDGSASGEADTKILFIEEGKIVHTSTLSGSAQHVEECSCYPRYPGVRCVCRDNWKGSNRPIVDINIKDHSIVSSYVCSGLVGDTPRKNDSSSSSHCLDPNNEEGGHGVKGWAFDDGNDVWMGRTISEKSRLGYETFKVIEGWSNPKSKLQINRQVIVDRGNRSGYSGIFSVEGKSCINRCFYVELIRGRKEETEVLWTSNSIVVFCGTSGTYGTGSWPDGADINLMPI

SEQ ID NO: 16481 - protein, 468 aa, synthetic construct
  REGION 1..468: note = neuraminidase__InfluenzaA__ACG80427
MDPNSKIITIGSVSLTISTICFFMQIAILITTVTLHFKQYEFNSPPNNQMMLCEPTIIERNITEIVYLTNTTIEKEICPKLAEYRNWSKPQCDITGFAPFSKDNSIRLSAGGDIWVTREPYVSCDPDKCYQFALGQGTTLNNVHSDTARDRTPYRTLLMNELGVPFHLGTKQVCIAWSSSSCHDGKAWLHVCITGDDKNATASFIYNGRLVDSVVSWSKEILRTQESECVCINGTCTVVMTDGSASGEADTKILFIEEGKIVHTSTLSGSAQHVEECSCYPRYPGVRCVCRDNWKGSNRPIVDINIKDHSIVSSYVCSGLVGDTPRKNDSSSSSHCLDPNNEEGGHGVKGWAFDDGNDVWMGRTISEKSRLGYETFKVIEGWSNPKSKLQINRQVIVDRGNRSGYSGIFSVEGKSCINRCFYVELIRGRKEETEVLWTSNSIVVFCGTSGTYGTGSWPDGADINLMPI

SEQ ID NO: 16482 - protein, 469 aa, synthetic construct
  REGION 1..469: note = neuraminidase__InfluenzaA__ACG80437
MNPNQKIITIGSVSLTISTICFFMQIAILITTVTLHFKQYEFNSSPNNQVMLCEPTIIERNITEIVYLTNTTIEKEICPKLAEYRNWSKPQCDITGFAPFSKDNSIRLSAGGDIWVTREPYVSCDPDKCYQFALGQGTTLNNVHSNNTVRDRTPYRTLLMNELGVPFHLGTKQVCIAWSSSSCHDGKAWLHVCITGDDKNATANFIYNGRLVDSIVSWSKEIFRTQESECVCINGTCTVVMTDGSASGKADTKILFIEEGKIVHTSTLSGSAQHVEECSCYPRYPGVRCVCRDNWKGSNRPIVDINIKDHSIVSSYVCSGLVGDTPRKNDSSSSSHCLDPNNEEGGHGVKGWAFDDGNDVWMGRTISEKSRSGYETFKVIEGWSNPKSKLQINRQVIVDRGNRSGYSGIFSVEGKSCINRCFYVELIRGRKEETEVLWTSNSIVVFCGTSGTYGTGSWPDGADINLMPI

SEQ ID NO: 16483 - protein, 468 aa, synthetic construct
  REGION 1..468: note = neuraminidase__InfluenzaA__ACG80446
MNPNQKIITIGSVSLTISTICFFMQIAILITTVTLHFKQYEFNSPPNNQMMLCEPTIIERNITEIVYLTNTTIEKEICPKLAEYRNWSKPQCDITGFAPFSKDNSIRLSAGGDIWVTREPYVSCDPDKCYQFALGQGTTLNNVHSDTARDRTPYRTLLMNELGVPFHLGTKQVCIAWSSSSCHDGKAWLHVCITGDDKNATASFIYNGRLVDSVVSWSKEILRTQESECVCINGTCTVVMTDGSASGEADTKILFIEEGKIVHTSTLSGSAQHVEECSCYPRYPGVRCVCRDNWKGSNRPIVDINIKDHSIVSSYVCSGLVGDTPRKNDSSSSSHCLDPNNEEGGHGVKGWAFDDGNDVWMGRTISEKSRLGYETFKVIEGWSNPKSKLQINRQVIVDRGNRSGYSGIFSVEGKSCINRCFYVELIRGRKEETEVLWTSNSIVVFCGTSGTYGTGSWPDGADINLMPI

SEQ ID NO: 16484 - protein, 469 aa, synthetic construct
  REGION 1..469: note = neuraminidase__InfluenzaA__ACG80455
MNPNQKIITIGSVSFIISSICFFMQIAILITTVTLHFKQYEFNSPPNNQMMLCEPTIIERNITEIVYLTNTTIEKEICPKLAEYRNWSKPQCDITGFAPFSKDNSIRLSAGGDIWVTREPYVSCDPDKCYQFALGQGTTLNNVHSNDTARGRTPYRTLLMNELGVPFHLGTKQVCIAWSSSSCHDGKAWLHVCITGDDKNATASFIYDGRLVDSVVSWSKEILRTQESECVCINGTCTVVMTDGSASGEADTKILFIEEGKIVHTSTLSGSAQHVEECSCYPRYPGVRCVCRDNWKGSNRPIVDINIKDHSIVSSYVCSGLVGDTPRKNDSSSSSHCLDPNNEEGGHGVKGWAFDDGNDVWMGRTISEKSRLGYETFKVIEGWSNPKSKLQINRQVIVDRGNRSGYSGIFSVEGKSCINRCFYVELIRGRKEETEVLWTSNSIVVFCGTSGTYGTGSWPDGADINLMPI

SEQ ID NO: 16485 - protein, 468 aa, synthetic construct; identical to SEQ ID NO: 16483
  REGION 1..468: note = neuraminidase__InfluenzaA__ACG80464

SEQ ID NO: 16486 - protein, 469 aa, synthetic construct
  REGION 1..469: note = neuraminidase__InfluenzaA__ACG80473
MDPIQKIITIGSVSLTISTICFFMQIAILITTVTLHFKQYEFNSPPNNQMMLCEPTIIERNITEIVYLTNTTIEKEICPKLAEYRNWSKPQCDITGFAPFSKDNSIRLSAGGDIWVTREPYVSCDPDKCYQFALGQGTTLNNVHSNDTARGRTPYRTLLMNELGVPFHLGTKQVCIAWSSSSCHDGKAWLHVCITGDDKNATASFIYDGRLVDSVVSWSKEILRTQESECVCINGTCTVVMTDGSASGEADTKILFIEEGKIVHTSTLSGSAQHVEECSCYPRYPGVRCVCRDNWKGSNRPIVDINIKDHSIVSSYVCSGLVGDTPRKNDSSSSSHCLDPNNEEGGHGVKGWAFDDGNDVWMGRTISEKSRLGYETFKVIEGWSNPKSKLQINRQVIVDRGNRSGYSGIFSVEGKSCINRCFYVELIRGRKEETEVLWTSNSIVVFCGTSGTYGTGSWPDGADINLMPI

SEQ ID NO: 16487 - protein, 469 aa, synthetic construct; identical to SEQ ID NO: 14712
  REGION 1..469: note = neuraminidase__InfluenzaA__ACH69559

SEQ ID NO: 16488 - protein, 469 aa, synthetic construct
  REGION 1..469: note = neuraminidase__InfluenzaA__ACH69570
MNPNQKIITIGSVSLTISTICFFMQIAILITTVTLHFKQYEFNSPPNNQVMLCEPTIIERNITEIVYLTNTTIEKEICPKLAEYRNWSKPQCNITGFAPFSKDNSIRLSAGGDIWVTREPYVSCDPDKCYQFALGQGTTLNNVHSNDTVHDRTPYRTLLMNELGVPFHLGTKQVCIAWSSSSCHDGKAWLHVCVTGDDKNATASFIYNGRLVDSIVSWSKEILRTQESECVCINGTCTVVMTDGSASGKADTKILFIEEGKIVHTSTLSGSAQHVEECSCYPRYPGVRCVCRDNWKGSNRPIVDINIKDYSIVSSYVCSGLVGDTPRNNDSSSSSHCLDPNNEEGGHGVKGWAFDDGNDVWMGRTISEKLRSGYETFKVIEGWSNPNSKLQINRQVIVDRGNRSGYSGIFSVEGKSCINRCFYVELIRGRKEETEVLWTSNSIVVFCGTSGTYGTGSWPDGADINLMPI

SEQ ID NO: 16489 - protein, 469 aa, synthetic construct; identical to SEQ ID NO: 14712
  REGION 1..469: note = neuraminidase__InfluenzaA__ACH69581

SEQ ID NO: 16490 - protein, 469 aa, synthetic construct
  REGION 1..469: note = neuraminidase__InfluenzaA__ACH69592
MNPNQKIITIGSVSLTIATICFLMQIAILVTTVTLHFKQYECNSPPNNQVMLCEPTIIERNITEIVYLTNTTIEKEICPKLAEYRNWSKPQCNITGFAPFSKDNSIRLSAGGDIWVTREPYVSCDPDKCYQFALGQGTTLNNGHSNDTVHDRTPYRTLLMNELGVPFHLGTKQVCIAWSSSSCHDGKAWLHVCVTGDDENATASFIYNGRLVDSIGSWSKKILRTQESECVCINGTCTVVMTDGSASGKADTKILFIEEGKIVHTSPLSGSAQHVEECSCYPRYPGVRCVCRDNWKGSNRPIVDINVKDYSIVSSYVCSGLVGDTPRKNDSSSSSHCLDPNNEEGGHGVKGWAFDDGNDVWMGRTISEKSRSGYETFKVIEGWSKPNSKLQINRQVIVDRGNRSGYSGIFSVEGKSCINQCFYVELIRGRKQETEVLWTSNSIVVFCGTSGTYGTGSWPDGADLNLMPI

SEQ ID NO: 16491 - protein, 469 aa, synthetic construct
  REGION 1..469: note = neuraminidase__InfluenzaA__ACH69603
MNPNQKIITIGSVSLTIATICFLMQIVILVTTVTLHFKQYECNSPPNNQVMLCEPTIIERNITEIVYLTNTTIEKEICPKLAEYRNWSKPQCNITGFAPFSKDNSIRLSAGGDIWVTREPYVSCDPDKCYQFALGQGTTLNNGHSNDTVHDRTPYRTLLMNELGVPFHLGTKQVCIAWSSSSCHDGKAWLHVCVTGDDENATASFIYNGRLVDSIGSWSKKILRTQESECVCINGTCTVVMTDGSASGKADTKILFIEEGKIVHTSPLSGSAQHVEECSCYPRYPGVRCVCRDNWKGSNRPIVDINVKDYSIVSSYVCSGLVGDTPRKNDSSSSSHCLDPNNEEGGHGVKGWAFDDGNDVWMGRTISEKSRSGYETFKVIEGWSKPNSKLQINRQVIVDRGNRSGYSGIFSVEGKSCINRCFYVELIRGRKQETEVLWTSNSIVVFCGTSGTYGTGSWPDGADLNLMPI

SEQ ID NO: 16492 - protein, 469 aa, synthetic construct
  REGION 1..469: note = neuraminidase__InfluenzaA__ACH69614
MNPNQKIITIGSVSLTIATICFLMQIAILVTTVTLHFKQYECNSPPNNQVMLCEPTIIERNITEIVYLTNTTIEKEICPKLAEYRNWSKPQCNITGFAPFSKDNSIRLSAGGDIWVTREPYVSCDPDKCYQFALGQGTTLNNGHSNDTVHDRTPYRTLLMNELGVPFHLGTKQVCIAWSSSSCHDGKAWLHVCVTGDDENATASFIYNGRLVDSIGSWSKKILRTQESECVCINGTCTVVMTDGSASGKADTKILFIEEGKIVHTSPLSGSAQHVEECSCYPRYPGVRCVCRDNWKGSNRPIVDINVKDYSIVSSYVCSGLVGDTPRKNDSSSSSHCLDPNNEEGGHGVKGWAFDDGNDVWMGRTISEKSRSGYETFKVIEGWSKPNSKLQINRQVIVDRGNRSGYSGIFSVEGKSCINRCFYVELIRGRKQETEVLWTSNSIVVFCGTSGTYGTGSWPDGADLNLMPI

SEQ ID NO: 16493 - protein, 470 aa, synthetic construct
  REGION 1..470: note = neuraminidase__InfluenzaA__ACI22525
MNPNQKIITIGSISIAIGIISLMLQIGNIISIWASHSIQTGSQNHTGICNQRIITYENSTWVNNTYVNINNTNVVAEKDKTSVTLAGNSSLCSISGWAIYTKDNSIRIGSKGDVFVIREPFISCSHLECRTFFLTQGALLNDKHSNGTVKDRSPYRALMSCPLGEAPSPYNSKFESVAWSASACHDGMGWLTIGISGPDNGAVAVLKYNGIITETIKSWKKRILRTQESECVCMNGSCFTIMTDGPSNGAASYKIFKIEKGKVTKSIELNAPNFHYEECSCYPDTGTVMCVCRDNWHGSNRPWVSFNQNLDYQIGYICSGVFGDNPRPKDGEGSCNPVTVDGADGVKGFSYKYGNGVWIGRTKSNRLRKGFEMIWDPNGWTNTDSDFSVKQDVVAITDWSGYSGSFVQHPELTGLDCIRPCFWVELVRGLPRENTTIWTSGSSISFCGVNSDTANWSWPDGAELPFTIDK

SEQ ID NO: 16494 - protein, 470 aa, synthetic construct; identical to SEQ ID NO: 16493
  REGION 1..470: note = neuraminidase__InfluenzaA__ACI22526

SEQ ID NO: 16495 - protein, 470 aa, synthetic construct; identical to SEQ ID NO: 16493
  REGION 1..470: note = neuraminidase__InfluenzaA__ACI22527

SEQ ID NO: 16496 - protein, 470 aa, synthetic construct; identical to SEQ ID NO: 16493
  REGION 1..470: note = neuraminidase__InfluenzaA__ACI22528

SEQ ID NO: 16497 - protein, 470 aa, synthetic construct; identical to SEQ ID NO: 16493
  REGION 1..470: note = neuraminidase__InfluenzaA__ACI22529

SEQ ID NO: 16498 - protein, 470 aa, synthetic construct; identical to SEQ ID NO: 16493
  REGION 1..470: note = neuraminidase__InfluenzaA__ACI22530

SEQ ID NO: 16499 - protein, 470 aa, synthetic construct
  REGION 1..470: note = neuraminidase__InfluenzaA__ACI22532
MNPNQKIITIGSISIAIGIISLMLQIGNIISIWASHSIQTGSQNHTGICNQRIITYENSTWVNNTYVNINNTNVVAGKDKTSVTLAGNSSLCSISGWAIYTKDNSIRIGSKGDVFVIREPFISCSHLECRTFFLTQGALLNDKHSNGTVKDRSPYRALMSCPLGEAPSPYNSKFESVAWSASACHDGMGWLTIGISGPDNGAVAVLKYNGIITETIKSWKKRILRTQESECVCMNGSCFTIMTDGPSNGAASYKIFKIEKGKVTKSIELNAPNFHYEECSCYPDTGTVMCVCRDNWHGSNRPWVSFNQNLDYQIGYICSGVFGDNPRPKDGEGSCNPVTVDGADGVKGFSYKYGNGVWIGRTKSNRLRKGFEMIWDPNGWTNTDSDFSVKQDVVAITDWSGYSGSFVQHPELTGLDCIRPCFWVELVRGLPRENTTIWTSGSSISFCGVNSDTANWSWPDGAELPFTIDK

SEQ ID NO: 16500 - protein, 470 aa, synthetic construct; identical to SEQ ID NO: 16499
  REGION 1..470: note = neuraminidase__InfluenzaA__ACI22533

SEQ ID NO: 16501 - protein, 470 aa, synthetic construct; identical to SEQ ID NO: 16493
  REGION 1..470: note = neuraminidase__InfluenzaA__ACI22534

SEQ ID NO: 16502 - protein, 469 aa, synthetic construct
  REGION 1..469: note = neuraminidase__InfluenzaA__ACI25727
MNPNQKIITIGSVSLTIATVCFLMQIAILVTTVTLHFKQHECNSPASNQVMPCEPIIIERNITEIVYLNNTTIEKEICPKVVEYRNWSKPQCQITGFAPFSKDNSIRLSAGGDIWVTREPYVSCDPGKCYQFALGQGTTLDNKHSNDTIHDRIPHRTLLMNELGVPFHLGTRQVCIAWSSSSCHDGKAWLHVCITGDDKNATASFIYDGRLVDSIGSWSQNILRTQESECVCINGTCTVVMTDGSASGRADTRILFIKEGKIVHISPLSGSAQHVEECSCYPRYPGVRCICRDNWKGSNRPVVDINMEDYSIDSSYVCSGLVGDTPRNDDRSSNSNCRNPNNERGNQGVKGWAFDNGDDVWMGRTISKDLRSGYETFKVIGGWSTPNSKSQINRQVIVDSDNRSGYSGIFSVEGKSCINRCFYVELIRGRKQETRVWWTSNSIVVFCGTSGTYGTGSWPDGANINFMPI

SEQ ID NO: 16503 - protein, 469 aa, synthetic construct
  REGION 1..469: note = neuraminidase__InfluenzaA__ACI25749
MNPNQKIITIGSVSLTIATVCFLMQIAILVTTVTLHFKQYECDSPASNQVMPCEPIIIERNITEIVYLNNTTIEKEICPKVVEYRNWSKPQCQITGFAPFSKDNSIRLSAGGDIWVTREPYVSCDHGKCYQFALGQGTTLDNKHSNDTIHDRIPHRTLLMNELGVPFHLGTRQVCIAWSSSSCHDGKAWLHVCITGDDKNATASFIYDGRLVDSIGSWSQNILRTQESECVCINGTCTVVMTDGSASGRADTRILFIEEGKIVHISPLSGSAQHVEECSCYPRYPGVRCICRDNWKGSNRPVVDINMEDYSIDSSYVCSGLVGDTPRNDDRSSNSNCRNPNNERGNQGVKGWAFDNGDDVWMGRTISKDLRSGYETFKVIGGWSTPNSKSQINRQVIVDSDNRSGYSGIFSVEGKSCINRCFYVELIRGRKQETRVWWTSNSIVVFCGTSGTYGTGSWPDGANINFMHI

SEQ ID NO: 16504 - protein, 469 aa, synthetic construct; identical to SEQ ID NO: 16503
  REGION 1..469: note = neuraminidase__InfluenzaA__ACI25760

SEQ ID NO: 16505 - protein, 469 aa, synthetic construct; identical to SEQ ID NO: 16503
  REGION 1..469: note = neuraminidase__InfluenzaA__ACI25771

SEQ ID NO: 16506 - protein, 469 aa, synthetic construct; identical to SEQ ID NO: 14095
  REGION 1..469: note = neuraminidase__InfluenzaA__ACI25782

SEQ ID NO: 16507 - protein, 469 aa, synthetic construct
  REGION 1..469: note = neuraminidase__InfluenzaA__ACI25793
MNPNQKIITIGSVSLTIATVCFLMQIAILVTTVTLHFKQYECDSPASNQVMPCEPIIIERNITEIVYLNNTTIEKEICPKVVEYRNWSKPQCQITGFAPFSKDNSIRLSVGGDIWVTREPYVSCDHGKCYQFALGQGTTLDNKHSNDTIHDRIPHRTLLMNELGVPFHLGTRQVCIAWSSSSCHDGKAWLHVCITGDDKNATASFIYDGRLVDSIGSWSQNILRTQESECVCINGTCTVVMTDGSASGRADTRILFIEEGKIVHISPLSGSAQHVEECSCYPRYPGVRCICRDNWKGSNRPVVDINMEDYSIDSSYVCSGLVGDTPRNDDRSSNSNCRNPNNERGNQGVKGWAFDNGDDVWMGRTISKDLRSGYETFKVIGGWSTPNSKSQINRQVIVDSDNRSGYSGIFSVEGKSCINRCFYVELIRGRKQETRVWWTSNSIVVFCGTSGTYGTGSWPDGANINFMPI

SEQ ID NO: 16508 - protein, 469 aa, synthetic construct
  REGION 1..469: note = neuraminidase__InfluenzaA__ACI25804
MNPNQKIITIGSVSLTIATVCFLMQIAILVTTVTLHFKQYECDSPASNQVMPCEPIIIERNITEIVYLNNTTIEKEICPKVVEYRNWSKPQCQITGFAPFSKDNSIRLSAGGDIWVTREPYVSCDHGKCYQFALGQGTTLDNKHSNDTIHDRIPHRTLLMNELGVPFHLGTRQVCIAWSSSSCHDGKAWLHVCITGDDKNATASFIYDGRLVDSIGSWSQNILRTQESECVCINGTCTVVMTDGSASGRADTRILFIEEGKIVHISPLSGSAQHVEECSCYPRYPGVRCICRDNWKGSNRPVVDINMEDYSIDSSYVCSGLVGDTPRNDDRSSNSNCRNPNNERGNQGVKGWAFDNGDDVWMGRTISKDLRSGYETFKVIGGWSTPNSKSQINRQVIVDSDHRSGYSGIFSVEGKSCINRCFYVELIRGRKQETRVWWTSNSIVVFCGTSGTYGTGSWPDGANINFMPI

SEQ ID NO: 16509 - protein, 469 aa, synthetic construct; identical to SEQ ID NO: 16467
  REGION 1..469: note = neuraminidase__InfluenzaA__ACI26277

SEQ ID NO: 16510 - protein, 469 aa, synthetic construct; identical to SEQ ID NO: 14327
  REGION 1..469: note = neuraminidase__InfluenzaA__ACI26299

SEQ ID NO: 16511 - protein, 469 aa, synthetic construct
  REGION 1..469: note = neuraminidase__InfluenzaA__ACI26321
MNPNQKIITIGSVSLTISTICFFMQIAILITTVTLHFKQYEFNSPPNNQVMLCEPTIIERNITEIVYLTNTTIEKEICPKLAEYRNWSKPQCDITGFAPFSKDNSIRLSAGGDIWVTREPYVSCDPDKCYQFALGQGTTLNNVHSNDTVRDRTPYRTLLMNELGVPFHLGTKQVCIAWSSSSCHDGKAWLHVCITGDDKNATASFIYNGRLVDSIVSWSKEILRTQESECVCINGTCTVVMTDGSASGKADTKILFIEEGKIVHTSTLSGSAQHVEECSCYPRYPGVRCVCRDNWKGSNRPIVDINIKDHSTVSSYVCSGLVGDTPRKNDSSSSSHCLDPNNEEGGHGVKGWAFDDGNDVWMGRTISEKSRLGYETFKVIEGWSNPKSKLQINRQVIVDRGNRSGYSGIFSVEGKSCINRCFYVELIRGRKEETEVLWTSNSIVVFCGTSGTYGTGSWPDGADINLMPI

SEQ ID NO: 16512 - protein, 469 aa, synthetic construct
  REGION 1..469: note = neuraminidase__InfluenzaA__ACI26354
MNPNQKIITIGSVSLTISTICFFMQIAILITTVTLHFKQYEFNSPPNNQVMLCEPTIIERNITEIVYLTNTTIEKEICPKLAEYRNWSKPQCDITGFAPFSKDNSIRLSAGGDIWVTREPYVSCDPDKCYQFALGQGTTLNNVHSNDTVRDRTPYRTLLMNELGVPFHLGTKQVCIAWSSSSCHDGKAWLHVCITGDDKNATASFIYNGRLVDSVVSWSKEILRTQESECVCINGTCTVVMTDGSASGKADTKILFIEEGKIVHTSTLSGSAQHVEECSCYPRYPGVRCVCRDNWKGSNRPIVDINIKDHSIVSSYVCSGLVGDTPRKNDSSSSSHCLDPNNEEGGHGVKGWAFDDGNDVWMGRTISEKSRLGYETFKVIEGWSNPKSKLQINRQVIVDRGNRSGYSGIFSVEGKSCINRCFYVELIRGRKEETEVLWTSNSIVVFCGTSGTYGTGSWPDGADINLMPI

SEQ ID NO: 16513 - protein, 469 aa, synthetic construct
  REGION 1..469: note = neuraminidase__InfluenzaA__ACI26365
MNPNQKIITIGSVSLTISTICFFMQIAILITTVTLHFKQYEFNSPPNNQVMLCEPTIIERNITEIVYLTNTTIEKEICPKLAEYRNWSKPQCDITGFAPFSKDNSIRLSAGGDIWVTREPYVSCDPDKCYQFALGQGTTLNNVHSNDTVRDRTPYRTLLMNELGVPFHLGTKQVCIAWSSSSCHDGKAWLHVCITGDDKNATASFIYNGRLVDSVVSWSKEILRTQESECVCINGTCTVVMTDGSASGKADTKILFIEEGKIVHTSTLTGSAQHVEECSCYPRYPGVRCVCRDNWKGSNRPIVDINIKDHSIVSSYVCSGLVGDTPRKNDSSSSSHCLDPNNEEGVHGVKGWAFDDGNDVWMGRTISEKSRLGYETFKVIEGWSNPKSKLQINRQVIVDRGNRSGYSGIFSVEGKSCINRCFYVELIRGRKEETEVLWTSNSIVVFCGTSGTYGTGSWPDGADINLMPI

SEQ ID NO: 16514 - protein, 469 aa, synthetic construct; identical to SEQ ID NO: 16512
  REGION 1..469: note = neuraminidase__InfluenzaA__ACI26376

SEQ ID NO: 16515 - protein, 469 aa, synthetic construct; identical to SEQ ID NO: 16404
  REGION 1..469: note = neuraminidase__InfluenzaA__ACI26387

SEQ ID NO: 16516 - protein, 469 aa, synthetic construct; identical to SEQ ID NO: 16416
  REGION 1..469: note = neuraminidase__InfluenzaA__ACI26420

SEQ ID NO: 16517 - protein, 469 aa, synthetic construct; identical to SEQ ID NO: 14327
  REGION 1..469: note = neuraminidase__InfluenzaA__ACI26431

SEQ ID NO: 16518 - protein, 470 aa, synthetic construct
  REGION 1..470: note = neuraminidase__InfluenzaA__ACI26442
MNPNQKIITIGSISIAIGIISLMLQIGNIISIWASHSIQTGSQNHTGICNQRIITYENSTWVNHTYVNINNTNVVAGKDKTSVTLAGNSSLCSISGWAIYTKDNSIRIGSKGDVFVIREPFISCSHLECKTFFLTQGALLNDKHSNGTVKDRSPYRALMSCPLGEAPSPYNSKFESVAWSASACHDGMGWLTIGISGPDNGAVAVLKYNGIITGTIKSWKKQILRTQESECVCMNGSCFTIMTDGPSNGAASYKIFKIEKGKVTKSIELNAPNFHYEECSCYPDTGTVMCVCRDNWHGSNRPWVSFNQNLDYQIGYICSGVFGDNPRPKDREGSCNPVTIDGADGVKGFSYKYGNGVWIGRTKSNRLRKGFEMIWDPNGWTNTDSDFSVKQDVVAITDWSGYSGSFVQHPELTGLDCIRPCFWVELVRGLPRENTTIWTSGSSISFCGVNSDTANWSWPDGAELPFTIDK

SEQ ID NO: 16519 - protein, 470 aa, synthetic construct; identical to SEQ ID NO: 16518
  REGION 1..470: note = neuraminidase__InfluenzaA__ACI26453

SEQ ID NO: 16520 - protein, 469 aa, synthetic construct
  REGION 1..469: note = neuraminidase__InfluenzaA__ACI26464
MNPNQKIITIGSVSLTISTICFFMQIAILIATVTLHFKQYEFNSPPNNQVMLCEPTIIERNITEIVYLTNTTIEKEICPKLAEYRNWSKPQCDITGFAPFSKDNSIRLSAGGDIWVTREPYVSCDPDKCYQFALGQGTTLNNVHSNDTVRDRTPYRTLLMNELGVPFHLGTKQVCIAWSSSSCHDGKAWLHVCITGDDKNATASFIYNGRLVDSIVSWSKEILRTQESECVCINGTCTVVMTDGSASGKADTKILFIEEGKIVHTSTLSGSAQHVEECSCYPRYPGVRCVCRDNWKGSNRPIVDINIKDHSTVSSYVCSGLVGDTPRKNDSSSSSHCLDPNNEEGGHGVKGWAFDDGNDVWMGRTISEKSRLGYETFKVIEGWSNPKSKLQINRQVIVDRGNRSGYSGIFSVEGKSCINRCFYVELIRGRKEETEVLWTSNSIVVFCGTSGTYGTGSWPDGADINLMPI

SEQ ID NO: 16521 - protein, 469 aa, synthetic construct; identical to SEQ ID NO: 16511
  REGION 1..469: note = neuraminidase__InfluenzaA__ACI26475

SEQ ID NO: 16522 - protein, 469 aa, synthetic construct; identical to SEQ ID NO: 16512
  REGION 1..469: note = neuraminidase__InfluenzaA__ACI26486

SEQ ID NO: 16523 - protein, 469 aa, synthetic construct; identical to SEQ ID NO: 16512
  REGION 1..469: note = neuraminidase__InfluenzaA__ACI26497

SEQ ID NO: 16524 - protein, 469 aa, synthetic construct; identical to SEQ ID NO: 16512
  REGION 1..469: note = neuraminidase__InfluenzaA__ACI26508

SEQ ID NO: 16525 - protein, 469 aa, synthetic construct
  REGION 1..469: note = neuraminidase__InfluenzaA__ACI26519
MNPNQKIITIGSVSLTISTICFFMQIAILITTVTLHFKQYEFNSPPNNQVMLCEPTIIERNITEIVYLTNTTIEKEICPKLAEYRNWSKPQCDITGFAPFSKDNSIRLSAGGDIWVTREPYVSCDPDKCYQFALGQGTTLNNVHSNDTVRDRTPYRTLLMNELGVPFHLGTKQVCIAWSSSSCHDGKAWLHVCITGDDKNATASFIYNGRLVDSVVSWSKEILRTQESECVCINGTCTVVMTDGSASGKADTKILFIEEGKIVHTSTLSGSAQHVEECSCYPRYPGVRCVCRDNWKGSNRPIVDINIKDHSIVSSYVCSGLVGDTPRKNDSSSSSHCLDPNNEEGGHGVKGWAFDDGNDVWMGRTISEKSRLGYETFKVIEGWSNPKSKLQINRQVIVDRGNRSGYSGIFSVEGKSCINRCFYVELIRGRKEETEVLWTSNSIVVFCGTSGTYGTGSWPDGANINLMPI

SEQ ID NO: 16526 - protein, 469 aa, synthetic construct; identical to SEQ ID NO: 16512
  REGION 1..469: note = neuraminidase__InfluenzaA__ACI26530

SEQ ID NO: 16527 - protein, 469 aa, synthetic construct; identical to SEQ ID NO: 16512
  REGION 1..469: note = neuraminidase__InfluenzaA__ACI26541

SEQ ID NO: 16528 - protein, 469 aa, synthetic construct
  REGION 1..469: note = neuraminidase__InfluenzaA__ACI26552
MNPNQKIITIGSVSLTIATMCFLMQIAILVTTVTLHFKQYECSSPPNNQVMPCEPTIIERNITEIVYLTNTTIEKEICPKLVEYRNWSKPQCKITGFAPFSKDNSIRLSAGGDIWVTREPYVSCDPGKCYQFALGQGTTLNNRHSNDTVHDRTPYRTLLMNELGVPFHLGTKQVCIAWSSSSCHDGKAWLHVCVTGHDKNATASFIYDGRLVDSIGSWSKNILRTQESECVCINGTCTVVMTDGSASERADTKILFIEEGKIVHISPLSGSAQHVEECSCYPRYPGVRCVCRDNWKGSNRPIVDINVKDYSIVSSYVCSGLVGDTPRKNDRSSSSYCRNPNNEKGSHGVKGWAFDDGNDVWMGRTISEELRSGYETFKVIGGWSTPNSKLQINRQVIVDSGNRSGYSGIFSVEGKSCINRCFYVELIRGREQETRVWWTSNSIVVFCGTSGTYGTGSWPDGADINLMPI

SEQ ID NO: 16529 - protein, 469 aa, synthetic construct
  REGION 1..469: note = neuraminidase__InfluenzaA__ACI26574
MNPNQKIITIGSVSLTLATICFLMQIAILVTTVTLHFKQYECSSPPNNQVMPCEPTIIERNITEIVYLTNITIEKEICPKLVEYRNWSKPQCKITGFAPFSKDNSIRLSAGGDIWVTREPYVSCDPSKCYQFALGQGTTLNNRHSNDTVHDRTPYRTLLMNELGVPFHLGTRQVCMAWSSSSCHDGKAWLHVCVTGHDENATASFIYDGRLVDSIGSWSKNILRTQESECVCINGTCTVVMTDGSASERADTKILFIEEGKIVHISPLSGSAQHVEECSCYPRYPGVRCVCRDNWKGSNRPIVDINVKDYSIVSSYVCSGLVGDTPRKNDRSSSSYCRNPNNEKGSHGVKGWAFDDGNDVWMGRTIGEELRSGYETFKVIGGWSTPNSKLQINRQVIVDSGNRSGYSGIFSVEGKSCINRCFYVELIRGRKQETRVWWTSNSIVVFCGTSGTYGTGSWPDGADINLMPI

SEQ ID NO: 16530 - protein, 469 aa, synthetic construct
  REGION 1..469: note = neuraminidase__InfluenzaA__ACI26585
MNPNQKIITIGSVSLTIATICFLMQIAILVTTVTLHFKQHECNSPPNNQVMPCEPTIIERNITEIVYLTNTTIEKEICPKLVEYRNWSKPQCKITGFAPFSKDNSIRLSAGGDIWVTREPYVSCDPGKCYQFALGQGTTLNNRHSNDTVHDRTPYRTLLMNELGVPFHLGTKQVCIAWSSSSCHDGKAWLHVCVTGHDENATASFIYDGRLVDSIVSWSKNVLRTQESECVCINGTCTVVMTDGSASERADTKILFIEEGKIVHISPLSGSAQHVEECSCYPRYPGVRCVCRDNWKGSNRPIVDINVKDYSIVSSYVCSGLVGDTPRKNDSSSSSYCRNPNNEKGSHGVKGWAFDDGNDVWMGRTIGEELRSGYETFKVIGGWSTPNSKLQTNRQVIVDRGNRSGYSGIFSVEGKSCINRCFYVELIRGRKQETKVWWTSNSIVVFCGTSGTYGTGSWPDGADINLMPI

SEQ ID NO: 16531 - protein, 470 aa, synthetic construct
  REGION 1..470: note = neuraminidase__InfluenzaA__ACI32764
MNPNQKIITIGSISMAIGIISLMLQIGNIISIWASHSIQTGSQNHTGICNQRIITYENSTWVNHTYVNINNTNVVAGKDKTSVTLAGNSSLCSISGWAIYTKDNSIRIGSKGDVFVIREPFISCSHLECRTFFLTQGALLNDKHSNGTVKDRSPYRALMSCPLGEAPSPYNSKFESVAWSASACHDGMGWLTIGISGPDNGAVAVLKYNGIITETIKSWKKRILRTQESECVCVNGSCFTIMTDGPSNGAASYKIFKIEKGKVTKSIELNAPNFHYEECSCYPDTGTVMCVCRDNWHGSNRPWVSFNQNLDYQIGYICSGVFGDNPRPKDGKGSCNPVTVDGADGVKGFSYKYGNGVWIGRTKSNRLRKGFEMIWDPNGWTDTDSDFSVKQDVVAITDWSGYSGSFVQHPELTGLDCIRPCFWVELVRGLPRENTTIWTSGSSISFCGVDSDTANWSWPDGAELPFTIDK

SEQ ID NO: 16532 - protein, 470 aa, synthetic construct
  REGION 1..470: note = neuraminidase__InfluenzaA__ACI32765
MNPNQKIITIGSISIAIGIISLMLQIGNIISIWASHSIQTGSQNHTGICNQRIITYENNTWVNHTYVNINNTNVVARKDKTSVTLAGNSSLCSISGWAIYTKDNSIRIGSKGDVFVIREPFISCSHLECRTFFMTQGALLNDKHSNGTVKDRSPYRALMSCPLGEAPSPYNSKFESVAWSASACHDGMGWLTIGISGPDNGAVAVLKYNGIITETIKSWKKRILRTQESECVCVNGSCFTIMTDGPSNGAASYKIFKIEKGKVTKSVELNAPNFHYEECSCYPDTGTVMCVCRDNWHGSNRPWVSFNQNLDYQIGYICSGVFGDNPRPKDGKGSCNPVTVDGADGVKGFSYKYGNGVWIGRTKSNRLRKGFEMIWDPNGWTDTDSDFSVKQDVVAITDWSGYSGSFVQHPELTGLDCIRPCFWVELVRGLPRENTTIWTSGSSISFCGVDSDTANWSWPDGAELPFTIDK

SEQ ID NO: 16533 - protein, 470 aa, synthetic construct; identical to SEQ ID NO: 14386
  REGION 1..470: note = neuraminidase__InfluenzaA__ACI32766

SEQ ID NO: 16534 - protein, 470 aa, synthetic construct
  REGION 1..470: note = neuraminidase__InfluenzaA__ACI32767
MNPNQKIITIGSISIAIGIISLMLQIGNIISIWASHSTQTGSQNHTGICNQRIITYENSTWVNHTYVNINNTNVVAGKDKTSVTLAGNSSLCSISGWAIYTKDNSVRIGSKGDVFVIREPFISCSHLECRTFFLTQGALLNDKHSNGTVKDRSPYRALMSCPLGEAPSPYNSKFESVAWSASACHDGMGWLTIGISGPDNGAVAVLKYNGIITETIKSWKKRILRTQESECVCVNGSCFTIMTDGPSNGAASYKIFKIEKGKVTKSIELNAPNFHYEECSCYPDTGTVMCVCRDNWHGSNRPWVSFNQNLDYQIGYICSGVFGDNPRPKDGKGSCNPVTVDGADGVKGFSYKYGNGVWIGRTKSNRLRKGFEMIWDPNGWTDTDSDFSVKQDVVAITDWSGYSGSFVQHPELTGLDCIRPCFWVELVRGLPRENTTIWTSGSSISFCGVDSDTANWSWPDGAELPFTIDK

SEQ ID NO: 16535 - protein, 470 aa, synthetic construct
  REGION 1..470: note = neuraminidase__InfluenzaA__ACI32768
MNPNQKIITIGSISIAIGIISLMSQIGNIISIWASHSIQTGSQNHTGICNQRIITYENSTWVNHTYVNINNTNVVAGKDKTSVTLAGNSSLCSISGWAIYTKDNSIRIGSKGDVFVIREPFISCSHLECRTFFLTQGALLNDKHSNGTVKDRSPYRALMSCPLGEAPSPYNSKFESVAWSASACHDGMGWLTIGISGPDNGAVAVLKYNGIITETIKSWKKRILRTQESECVCVNGSCFTIMTDGPSNGAASYKIFKIEKGKVTKSIELNAPNFHYEECSCYPDTGTVMCVCRDNWHGSNRPWVSFNQNLDYQIGYICSGVFGDNPRPKDGKGSCNPVTVDGADGVKGFSYKYGNGVWIGRTKSNRLRKGFEMIWDPNGWTDTDSDFSVKQDVVAITDWSGYSGSFVQHPELTGLDCIRPCFWVELVRGLPRENTTIWTSGSSISFCGVDSDTANWSWPDGAELPFTIDK

SEQ ID NO: 16536 - protein, 470 aa, synthetic construct
  REGION 1..470: note = neuraminidase__InfluenzaA__ACI32769
MNPNQKIITIGSISIAIGIISLMLQIGNIISIWASHSIQTGSQNHTGICNQRIITYENSTWVNHTYVNINNTNVVAGKDKISVTLAGNSSLCSISGWAIYTKDNSIRIGSKGDVFVIREPFISCSHLECRTFFLTQGALLNDKHSNGTVKDRSPYRALMSCPLGEAPSPYNSKFESVAWSASACHDGMGWLTIGISGPDNGAVAVLKYNGIITETIKSWKKRILRTQESECVCVNGSCFTIMTDGPSNGAASYKIFKIEKGKVTKSIELNAPNFHYEECSCYPDTGTVMCVCRDNWHGSNRPWVSFNQNLDYQIGYICSGVFGDNPRPKDGKGSCNPVTVDGADGVKGFSYKYGNGVWIGRTKSNRLRKGFEMIWDPNGWTDTDSDFSVKQDVVAITDWSGYSGSFVQHPELTGLDCIRPCFWVELVRGLPRENTTIWTSGSSISFCGVDSDTANWSWPDGAELPFTIDK

SEQ ID NO: 16537 - protein, 470 aa, synthetic construct; identical to SEQ ID NO: 14386
  REGION 1..470: note = neuraminidase__InfluenzaA__ACI32770

SEQ ID NO: 16538 - protein, 470 aa, synthetic construct
  REGION 1..470: note = neuraminidase__InfluenzaA__ACI32771
MNPNQKIITIGSISIAIGIISLMLQIGNIISIWASHSIQTGSQNHTGICNQRIITYKNSTWVNHTYVNINNTNVVAGKGKTSVTLAGNSSLCSISGWAIYTKDNSIRIGSKGDVFVIREPFISCSHLECRTFFLTQGALLNDKHSNGTVKDRSPYRALMSCPLGEAPSPYNSKFESVAWSASACHDGMGWLTIGISGPDNGAVAVLKYNGIITETIKSWKKRILRTQESECVCVNGSCFTIMTDGPSNGAASYKIFKIEKGKVTKSIELNAPNFHYEECSCYPDTGTVMCVCRDNWHGSNRPWVSFNQNLDYQIGYICSGVFGDNPRPKDGKGSCNPVTVDGADGVKGFSYKYGNGVWIGRTKSNRLRKGFEMIWDPNGWTDTDSDFSVKQDVVAITDWSGYSGSFVQHPELTGLDCIRPCFWVELVRGLPRENTTIWTSGSSISFCGVDSDTANWSWPDGAELPFTIDK

SEQ ID NO: 16539 - protein, 470 aa, synthetic construct; identical to SEQ ID NO: 14386
  REGION 1..470: note = neuraminidase__InfluenzaA__ACI32772

SEQ ID NO: 16540 - protein, 470 aa, synthetic construct; identical to SEQ ID NO: 14386
  REGION 1..470: note = neuraminidase__InfluenzaA__ACI32773

SEQ ID NO: 16541 - protein, 470 aa, synthetic construct; identical to SEQ ID NO: 14386
  REGION 1..470: note = neuraminidase__InfluenzaA__ACI32774

SEQ ID NO: 16542 - protein, 470 aa, synthetic construct; identical to SEQ ID NO: 14386
  REGION 1..470: note = neuraminidase__InfluenzaA__ACI32775

SEQ ID NO: 16543 - protein, 470 aa, synthetic construct
  REGION 1..470: note = neuraminidase__InfluenzaA__ACI32776
MNPNQKIITIGSISIAIGIISLMLQIGNIISIWASHSIQTGSQNHTGICNQRIITYKNSTWVNHTYVNINNTNVVAGKDKTSVTLAGNSSLCSISGWAIYTKDNSIRIGSKGDVFVIREPFISCSHLECRTFFLTQGALLNDKHSNGTVKDRSPYRALMSCPLGEAPSPYNSKFESVAWSASACHDGMGWLTIGISGPDNGAVAVLKYNGIITETIKSWKKRILRTQESECVCVNGSCFTIMTDGPSNGAASYKIFKIEKGKVTKSIELNAPNFHYEECSCYPDTGTVMCVCRDNWHGSNRPWVSFNQNLDYQIGYICSGVFGDNPRPKDGKGSCNPVTVDGADGVKGFSYKYGNGVWIGRTKSNRLRKGFEMIWDPNGWTDTDSDFSVKQDVVAITDWSGYSGSFVQHPELTGLDCIRPCFWVELVRGLPRENTTIWTSGSSISFCGVDSDTANWSWPDGAELPFTIDK

SEQ ID NO: 16544 - protein, 470 aa, synthetic construct
  REGION 1..470: note = neuraminidase__InfluenzaA__ACI32777
MNPNQKIITIGSISIAIGIISLMLQIGNIISIWASHSIQTGSQNHTGICNQRIITYKNSTWVNHTYVNINNTNVVAGKDKTSVTLAGNSSLCSISGWAIYTKDNSIRIGSKGDVFVIREPFISCSHLECRTFFLTQGALLNDKHSNGTVKDRSPYRALMSCPLGEAPSPYNSKFESVAWSASACHDGMGWLTIGISGPDNGAVAVLKYNGIITETIKSWKKRILRTQESECVCVNGSCFTIMTDGPSNGAASYKIFKIEKGKVTKSIELNAPNFHYEECSCYPDTGTVMCVCRDNWHGSNRPWVSFNQNLDYQIGYICSGVFGDNPRPKDGKGSCNPVTVDGADGVKGFSYKYGNGVWIGRTKSNRLRKGFEMIWDPNGWTDTDSDFSVKQDVVAITDWSGYSGSFVQHPELTGLDCIRPCFWVELVRGLPRENTTIWTSGSSISFCGVDSDTANWSWPDGAELPFAIDK

SEQ ID NO: 16545 - protein, 470 aa, synthetic construct; identical to SEQ ID NO: 14386
  REGION 1..470: note = neuraminidase__InfluenzaA__ACI32778

SEQ ID NO: 16546 - protein, 470 aa, synthetic construct; identical to SEQ ID NO: 14386
  REGION 1..470: note = neuraminidase__InfluenzaA__ACI32779

SEQ ID NO: 16547 - protein, 470 aa, synthetic construct; identical to SEQ ID NO: 14386
  REGION 1..470: note = neuraminidase__InfluenzaA__ACI32780

SEQ ID NO: 16548 - protein, 470 aa, synthetic construct; identical to SEQ ID NO: 14386
  REGION 1..470: note = neuraminidase__InfluenzaA__ACI32781

SEQ ID NO: 16549 - protein, 470 aa, synthetic construct
  REGION 1..470: note = neuraminidase__InfluenzaA__ACI32782
MNPNQKIITIGSISIAIGIISLMLQIGNIISIWASHSIQTGSQNHTGICNQRIITYENSTWVNHTYVNINNTNVVAGKDKTSVTLAGNSSLCSISGWAIYTKDNSIRIGSKGDVFVIREPFISCSHLECRTFFLTQGALLNDKHSNGTVKDRSPYRALMSCPLGEAPSPYNSKFESVAWSASACHDGMGWLTIGISGPDNGAVAVLKYNGIITGTIKSWKKQILRTQESECVCMNGSCFTIMTDGPSNGAASYKIFKIEKGKATKSIELNAPNFHYEECSCYPDTGTVMCVCRDNWHGSNRPWVSFNQNLDYQIGYICSGVFGDNPRPKDRKGSCNPVTVDGADGVKGFSYKYGNGVWIGRTKSNRLRKGFEMIWDPNGWTNTDSDFSVKQDVVAITDWSGYSGSFVQHPELTGLDCIRPCFWVELVRGLPRENTTIWTSGSSISFCGVNSDTANWSWPDGAELPFTIDK

SEQ ID NO: 16550 - protein, 470 aa, synthetic construct
  REGION 1..470: note = neuraminidase__InfluenzaA__ACI32783
MNPNQKIITIGSISIAIGIISLMLQIGNIISIWASHSIQTGSQNHTGICNQRIITYENSTWVNHTYVNINNTNVVAGKDKTSVTLAGNSSLCSISGWAIYTKDNSIRIGSKGDVFVIREPFISCSHLECRTFFLTQGALLNDKHSNGTVKDRSPYRALMSCPLGEAPSPYNSKFESVAWSASACHDGMGWLTIGISGPDNGAVAVLKYNGIITETIKSWKKQILRTQESECVCVNGSCFTIMTDGPSNGAASYKIFKIEKGKVTKSIELNAPNFHYEECSCYPDTGTVMCVCRDNWHGSNRPWLSFNQNLDYQIGYICSGVIGDNPRPKDGKGSCNPVTVDGADGVKGFSYKYGNGVWIGRTKSNRLRKGFEMIWDPNGWTDTDSDFSVKQDVVAITDWSGYSGSFVQHPELTGLDCIRPCFWVELVRGLPRENTTIWTSGSSISFCGVDGDTANWSWPDGAELPFTIDK

SEQ ID NO: 16551 - protein, 470 aa, synthetic construct
  REGION 1..470: note = neuraminidase__InfluenzaA__ACI32784
MNPNQKIITIGSISIAIGIISLMLQIGNIISIWASHSIQTGSQNHTGICNQRIITYENSTWVNHTYVNINNTNVVAGKDKTSVTLAGNSSLCSISGWAIYTKDNSIRIGSKGDVFVIREPFISCSHLECRTFFLTQGALLNDKHSNGTVKDRSPYRALMSCPLGEAPSPYNSKFESVAWSASACHDGMGWLTIGISGPDNGAVAVLKYNGIITGTIKSWKKQILRTQESECVCMNGSCFTIMTDGPSNGAASYKIFKIEKGKATKSIELNAPNFHYEECSCYPDTGTVMCVCRDNWHGSNRPWVSFNQNLDYQIGYICSGVFGDNPRPKDREGSCNPVTVDGADGVKGFSYKYGNGVWIGRTKSNRLRKGFEMIWDPNGWTNTDSDFSVKQDVVAITDWSGYSGSFVQHPELTGLDCIRPCFWVELVRGLPRENTTIWTSGSSISFCGVNSDTANWSWPDGAELPFTIDK

SEQ ID NO: 16552 - protein, 470 aa, synthetic construct
  REGION 1..470: note = neuraminidase__InfluenzaA__ACI32785
MNPNQKIITIGSISIAIGIISLMLQIGNIISIWASHSIQTGSQNHTGMCNQRIITYENSTWVNHTYVNINNTNVVAEKDKTSVTLAGNSSLCSISGWAIYTKDNSIRIGSKGDVFVIREPFISCSHLECRTFFLTQGALLNDKHSNGTVKDRSPYRALMSCPLGEAPSPYNSKFESVAWSASACHDGMGWLTIGISGPDNGAVAVLKYNGIITETIKSWKKRILRTQESECVCVNGSCFTIMTDGPSNGAASYKIFKIEKGKVTKSIELNAPNFHYEECSCYPDTGTVMCVCRDNWHGSNRPWVSFNQNLDYQIGYICSGVFGDNPRPKDGKGSCNPVTVDGADGVKGFSYKYGNGVWIGRTKSNRLRKGFEMIWDPNGWADTDSDFSVKQDVVAITDWSGYSGSFVQHPELTGLNCIRPCFWVELVRGLPRENTTIWTSGSSISFCGVDSDTANWSWPDGAELPFTIDK

SEQ ID NO: 16553 - protein, 470 aa, synthetic construct
  REGION 1..470: note = neuraminidase__InfluenzaA__ACI32787
MNPNQKIITIGSISIAIGIISLILQIGNIISIWASHSIQTGSQNHTGICNQRIITYENSTWVNNTYVNINNTNVVAEKDKTSVTLAGNSSLCSISGWAIYTKDNSIRIGSKGDVFVIREPFISCSHLECRTFFLTQGALLNDKHSNGTVKDRSPYRALMSCPLGEAPSPYNSRFESVAWSASACHDGMGWLTIGISGPDNGAVAVLKYNGIITETIKSWKKRILRTQESECVCMNGSCFTIMTDGPSNGAASYKIFKIEKGKVTKTIELNAPNFHYEECSCYPDTGTVMCVCRDNWHGSNRPWVSFNQNLDYQIGYICSGVFGDNPRPKDGEGSCNPVTVDGADGVKGFSYKYGNGVWIGRTKSNRLRKGFEMIWDPNGWTNTDSDFSVKQDVVAITDWSGYSGSFVQHPELTGLDCIRPCFWVELVRGLPRENTTIWTSGSSISFCGVNGGTADWSWPDGAELPFTIDK

SEQ ID NO: 16554 - protein, 470 aa, synthetic construct
  REGION 1..470: note = neuraminidase__InfluenzaA__ACI32788
MNPNQKIITIGSISIAIGIISLMLQIGNIISIWASHSIQTGSQNHTGTCNQRIITYENNTWVNHTCVNINNTNVVAGKDKTSVTLVGNSSLCSISGWAIYTKDNSIRIGSKGDVFVIREPFISCSHLECRTFFLTQGALLNDKHSNGTVKDRSPYRALMSCPLGEAPSPYNSKFESVAWSASACHDGKGWLTIGISGPDNGAVAVLKYNGIITETIKSWKKRILRTQESECVCVNGSCFTIMTDGPSNGAASYKIFKIEKGKVTKSIELNAPNFHYEECSCYPDTGTVMCVCRDNWHGSNRPWVSFNQNLDYQIGYICSGVFGDNPRPKDGKGSCNPMTVDGADGVKGFSYKYGNGVWIGRTKSNRLRKGFEMIWDPNGWTDTDSDFSVKQDVVAITDWSGYSGSFVQHPELTGLDCIRPCFWVELVRGLPRENTTIWTSGSSISFCGVDSDTANWSWPDGAELPFTIDK

SEQ ID NO: 16555 - protein, 469 aa, synthetic construct
  REGION 1..469: note = neuraminidase__InfluenzaA__ACI32790
MNPNQKIITIGSVSLTIATICFLTQIAILVTTVTLHFKQYECNSPPNNQVMLCEPTIIERNITEIVYLTNTTIEKEICPKLAEYRNWSKPQCNITGFAPFSKDNSIRLSAGGDIWVTREPYVSCDPDKCYQFALGQGTTLNNGHSNDTVHDRTPYRTLLMNELGVPFHLGTKQVCIAWSSSSCHDGKAWLHVCVTGDDKNATASFIYNGRLVDSIGSWSKKILRTQESECVCINGTCTVVMTDGSASGKADTKILFIEEGKIVHTSLLSGSAQHVEECSCYPRYPGVRCVCRDNWKGSNRPIVDINVKDYSIVSSYVCSGLVGDTPRKNDSSSSSHCLDPNNEEGGHGVKGWAFDDGNDVWMGRTISEKLRSGYETFKVIEGWSKPNSKLQINRQVIVDRGNRSGYSGIFSVEGKSCINRCFYVELIRGRNQETEVLWTSNSIVVFCGTSGTYGTGSWPDGADINLMPI

SEQ ID NO: 16556 - protein, 469 aa, synthetic construct; identical to SEQ ID NO: 14382
  REGION 1..469: note = neuraminidase__InfluenzaA__ACI32791

SEQ ID NO: 16557 - protein, 469 aa, synthetic construct; identical to SEQ ID NO: 14382
  REGION 1..469: note = neuraminidase__InfluenzaA__ACI32793

SEQ ID NO: 16558 - protein, 469 aa, synthetic construct; identical to SEQ ID NO: 14382
  REGION 1..469: note = neuraminidase__InfluenzaA__ACI32794

SEQ ID NO: 16559 - protein, 469 aa, synthetic construct; identical to SEQ ID NO: 14712
  REGION 1..469: note = neuraminidase__InfluenzaA__ACI32795

SEQ ID NO: 16560 - protein, 469 aa, synthetic construct
  REGION 1..469: note = neuraminidase__InfluenzaA__ACI32796
MNPNQKIITIGSVSLTISTICFFMQIAILITTVTLHFKQYEFNSPPNNQVMLCEPTIIERNITEIVYLTNTTIEKEICPKLAEYRNWSKPQCSITGFAPFSKDNSIRLSAGGDIWVTREPYVSCDPDKCYQFALGQGTTLNNVHSNDTVHDRTPYRTLLMNELGVPFHLGTKQVCIAWSSSSCHDGKAWLHVCVTGDDKNATASFIYNGRLVDSIVSWSKEILRTQESECVCINGTCTVVMTDGSASGKADTKILFIEEGKIVHTSTLSGSAQHVEECSCYPRYPGVRCVCRDNWKGSNRPIVDINIKDYSIVSSYVCSGLVGDTPRKNDSSSSSHCLDPNNEEGGHGVKGWAFDDGNDVWMGRTISEKSRSGYETFKVIEGWSNPNSKLQINRQVIVDRGNRSGYSGIFSVEGKSCINRCFYVELIRGRKEETEVLWTSNSIVVFCGTSGTYGTGSWPDGADINLMPI

SEQ ID NO: 16561 - protein, 469 aa, synthetic construct
  REGION 1..469: note = neuraminidase__InfluenzaA__ACI32797
MNPNQMIITIGSVSLTISTICFFMQIAILITTVTLHFKQYEFNSPPNNQVMLCEPTIIERNITEIVYLTNTTIEKEICPKLAEYRNWSKPQCSITGFAPFSKDNSIRLSAGGDIWVTREPYVSCDPDKCYQFALGQGTTLNNVHSNDTVHDRTPYRTLLMNELGVPFHLGTKQVCIAWSSSSCHDGKAWLHVCVTGDDKNATASFIYNGRLVDSIVSWSKEILRTQESECVCINGTCTVVMTDGSASGKADTKILFIEEGKIVHTSTLSGSAQHVEECSCYPRYPGVRCVCRDNWKGSNRPIVDINIKDYSIVSSYVCSGLVGDTPRKNDSSSSSHCLDPNNEEGGHGVKGWAFDDGNDVWMGRTISEKSRSGYETFKVIEGWSNPNSKLQINRQVIVDRGNRSGYSGIFSVEGKSCINRCFYVELIRGRKEETEVLWTSNSIVVFCGTSGTYGTGSWPDGADINLMPI

SEQ ID NO: 16562 - protein, 469 aa, synthetic construct
  REGION 1..469: note = neuraminidase__InfluenzaA__ACI32798
MNPNQKIITIGSVSLTISTICFFMQIAILITTVTLHFKQYEFNSPPNNQVMLCEPTIIERNITEIVYLTNTTIEKEICPKLAEYRNWSKPQCNITGFAPFSKDNSIRLSAGGDIWVTREPYVSCDPDKCYQFALGQGTTLNNVHSNDTVHDRTPYRTLLMNELGVPFHLGTKQVCIAWSSSSCHDGKAWLHVCVTGDDKNATASFIYNGRLVDSIVSWSNEILRTQESECVCINGTCTVVMTDGSASGKADTKILFIEEGKIVHTSTLSGSAQHVEECSCYPRYPGVRCVCRDNWKGSNRPIVDINIKDYSIVSSYVCSGLVGDTPRKNDSSSSSHCLDPNNEEGGHGVKGWAFDDGNDVWMGRTISEKLRSGYETFKVIEGWSNPNSKLQINRQVIVDRGNRSGYSGIFSVEGKSCINRCFYVELIRGRKEETEVLWTSNSIVVFCGTSGTYGTGSWPDGADINLMPI

SEQ ID NO: 16563 - protein, 469 aa, synthetic construct
  REGION 1..469: note = neuraminidase__InfluenzaA__ACI32799
MNPNQRIITIGSVSLTISTICFFMQIAILITTVTLHFKQYEFNSPPNNQVMLCEPTIIERNITEIVYLTNTTIEKEICPKLAEYRNWSKPQCDITGFAPFSKDNSIRLSAGGDIWVTREPYVSCDPDKCYQFALGQGTTLNNVHSNDTVHDRTPYRTLLMNELGVPFHLGTKQVCIAWSSSSCHDGKAWLHVCVTGDDKNATASFIYNGRLVDSVVSWSKDILRTQESECVCINGTCTVVMTDGSASGKANTKILFIEEGKIVHTSTLSGSAQHVEECSCYPRYPGVRCVCRDNWKGSNRPIVDINIKNYSIVSSYVCSGLVGDTPRKTDSSSSSHCLDPNNEEGGHGVKGWAFDDGNDVWMGRTISEKLRLGYETFKVIEGWSNPNSKLQINRQVIVDRGNRSGYSGIFSVEGKSCINRCFYVELIRGRKEETEVLWTSNSIVVFCGTSGTYGTGSWPDGADINLMPI

SEQ ID NO: 16564 - protein, 469 aa, synthetic construct
  REGION 1..469: note = neuraminidase__InfluenzaA__ACI32800
MNPNQKIITIGSVSLTISTICFFMQIAILITTVTLHFKQYEFNSPPNNQVMLCEPTIIERNITEIVYLTNTTIEKEICPKLAEYRNWSKPQCNITGFAPFSKDNSIRLSAGGDIWVTREPYVSCDPDKCYQFALGQGTTLNNVHSNDTVHDRTPYRTLLMNELGVPFHLGTKQVCIAWSSSSCHDGKAWLHVCVTGDDKNATASFIYNGRLVDSIVSWSKEILRTQESECVCINGTCTVVMTDGSASGKADTKILFIEEGKIVHTSTLSGSAQHVEECSCYPRYPGVRCVCRDNWKGSNRPIVDINIKDYSIVSSYVCSGLVGDTPRKNDSSSSSHCLDPNNEEGGHGVKGWAFDDGNDVWMGRTISEKLRSGYETFKVIEGWSNPNSKLQTNRQVIVDRGNRSGYSGIFSVEGKSCINRCFYVELIRGRKEETEVLWTSNSIVVFCGTSGTYGTGSWPDGADINLMPI

SEQ ID NO: 16565 - protein, 469 aa, synthetic construct; identical to SEQ ID NO: 16564
  REGION 1..469: note = neuraminidase__InfluenzaA__ACI32802

SEQ ID NO: 16566 - protein, 469 aa, synthetic construct; identical to SEQ ID NO: 16564
  REGION 1..469: note = neuraminidase__InfluenzaA__ACI32803

SEQ ID NO: 16567 - protein, 469 aa, synthetic construct; identical to SEQ ID NO: 15707
  REGION 1..469: note = neuraminidase__InfluenzaA__ACI32804

SEQ ID NO: 16568 - protein, 469 aa, synthetic construct
  REGION 1..469: note = neuraminidase__InfluenzaA__ACI32805
MNPNQKIITIGSVSLTISTICFFMQIAILITTVTLHFKQYEFNSPPNNQVMLCEPTIIERNITEIVYLTNTTIEKEICPKLAEYRNWSKPQCNITGFAPFSKDNSIRLSAGGDIWVTREPYVSCDPDKCYQFALGQGTTLNNVHSNDTVHDRTPYRTLLMNELGVPFHLGTKQVCIAWSSSSCHDGKAWLHVCVTGDDKNATASFIYNGRLVDSIVSWSKEILRTQESECVCINGTCTVVMTDGSASGKAVTKILFIEEGKIVHTSTLSGSAQHVEECSCYPRYPGVRCVCRDNWKGSNRPIVDINIKDYSIVSSYVCSGLVGDTPRKNDRSSSSHCLDPNNEEGGHGVKGWAFDDGNDVWMGRTISEKSRSGYETFKVIEGWSNPNSKLQTNRQVIVDRGNRSGYSGIFSVEGKSCINRCFYVELIRGRKEETEVLWTSNSIVVFCGTSGTYGTGSWPDGADINLMPI

SEQ ID NO: 16569 - protein, 469 aa, synthetic construct; identical to SEQ ID NO: 14712
  REGION 1..469: note = neuraminidase__InfluenzaA__ACI32806

SEQ ID NO: 16570 - protein, 469 aa, synthetic construct
  REGION 1..469: note = neuraminidase__InfluenzaA__ACI32807
MNPNQKIITIGSVSLTISTICFFMQIAILITTVTLHFKQYEFNSPPNNQVMLCEPTIIERNITEIVYLTNTTIEKEVCPKLAEYRNWSKPQCDITGFAPFSKDNSIRLSAGGDIWVTREPYVSCDPDKCYQFALGQGTTLNNVHSNDTVRDRTPYRTLLMNELGVPFHLGTKQVCIAWSSSSCHDGKAWLHVCITGDDKNATASFIYNGRLVDSIVSWSKEILRTQESECVCINGTCTVVMTDGSASGKADTKILFIEEGKIVHTSTLSGSAQHVEECSCYPRYPGVRCVCRDNWKGSNRPIVDINIKDHSIVSSYVCSGLVGDTPRKNDSSSSSHCLDPNNEEGGHGVKGWAFDDGNDVWMGRTISEKSRLGYETFKVIEGWSNPNSKLQINRQVIVDRGNRSGYSGIFSVEGKSCINRCFYVELIRGRKEETEVLWTSNSIVVFCGTSGTYGTGSWPDGADINLMPI

SEQ ID NO: 16571 - protein, 469 aa, synthetic construct
  REGION 1..469: note = neuraminidase__InfluenzaA__ACI32808
MNPNQKIITIGSVSLTISTICFFMQIAILITTVTLHFKQYEFNSPPNNQVMLCEPTIIERNITEIVYLTNTTIEKEICPKLAEYRNWSKPQCDITGFAPFSKDNSIRLSAGGDIWVTREPYVSCDPDKCYQFALGQGTTLNNVHSNDTVHDRTPYRTLLMNELGVPFHLGTKQVCIAWSSSSCHDGKAWLHVCVTGDDKNATASFIYNGRLVDSVVSWSKDILRTQESECVCINGTCTVVMTDGSASGKADTKILFIEEGKIVHTSTLSGSAQHVEECSCYPRYPGVRCVCRDNWKGSNRPIVDINIKNYSIVSSYVCSGLVGDTPRKTDSSSSSHCLDPNNEEGGHGVKGWAFDDGNDVWMGRTISEKLRLGYETFKVIEGWSNPNSKLQINRQVIVDRGNRSGYSGIFSVEGKSCINRCFYVELIRGRKEKTEVLWTSNSIVVFCGTSGTYGTGSWPDGADINLMPI

SEQ ID NO: 16572 - protein, 469 aa, synthetic construct; identical to SEQ ID NO: 15707
  REGION 1..469: note = neuraminidase__InfluenzaA__ACI32809

SEQ ID NO: 16573 - protein, 469 aa, synthetic construct
  REGION 1..469: note = neuraminidase__InfluenzaA__ACI32810
MNPNQKIITIGSVSLTISTICFFMQIAILITTVTLHFKQYEFNSPPNNQVMLCEPTIIERNITEIVYLTNTTIEKEICPKLAEYRNWSKPQCDITGFAPFSKDNSIRLSAGGDIWVTREPYVSCDPDKCYQFALGQGTTLNNVHSNDTVHDRTPHRTLLMNELGVPFHLGTKQVCIAWSSSSCHDGKAWLHVCVTGDDKNATASFIYNGRLVDSVVSWSKDILRTQESECVCINGTCTVVMTDGSASGKADTKILFIEEGKIVHTSTLSGSAQHVEECSCYPRYPGVRCVCRDNWKGSNRPIVDINIKNYSIVSSYVCSGLVGDTPRKTDSSSSSHCLDPNNEEGGHGVKGWAFDDGNDVWMGRTISEKLRLGYETFKVIEGWSNPNSKLQINRQVIVDRGNRSGYSGIFSVEGKSCINRCFYVELIRGRKEETEVLWTSNSIVVFCGTSGTYGTGSWPDGADINLMPI

SEQ ID NO: 16574 - protein, 469 aa, synthetic construct
  REGION 1..469: note = neuraminidase__InfluenzaA__ACI32811
MNPNQKIITIGSVSLTISTICFFMQIAILITTVTLHFKQYEFNSPPNNQVMLCEPTIIERNITEIVYLTNTTIEKEICPKLAEYRNWSKPQCNITGFAPFSKDNSIRLSAGGDIWVTREPYVSCDPDKCYQFALGQGTTLNNVHSNDTVHDRTPYRTLLMNELGVPFHLGTKQVCIAWSSSSCHDGKAWLHVCVTGDDKNATASFIYNGRLVDSIVSWSKEILRTQESECVCINGTCTVVMTDGSASGKADTKILFIEEGKIVHTSTLSGSAQHVEECSCYPRYPGVRCVCRDNWKGSNRPIVDINIKDYSIVSSYVCSGLVGDTPRKNDSSSSSHCLDPNNEEGGHGVKGWAFDDGNDVWMGRTISEKLRSGYETFKVIEGWSNPKSKLQINRQVIVDRGNRSGYSGIFSVEGKSCINRCFYVELIRGRKEETEVLWTSNSIVVFCGTSGTYGTGSWPDGADINLMPI

SEQ ID NO: 16575 - protein, 469 aa, synthetic construct
  REGION 1..469: note = neuraminidase__InfluenzaA__ACI32812
MNPNQKIITIGSVSLTISTICFFMQIAILITTVTLHFKQYEFNSPPNNQVMLCEPTIIERNITEIVYLTNTTIEKEICPKLAEYRNWSKPQCDITGFAPFSKDNSIRLSAGGDIWVTREPYVSCDPDKCYQFALGQGTTLNNVHSNDTVHDRTPYRTLLMNELGVPFHLGTKQVCIAWSSSSCHDGKAWLHVCVTGDDKNATASFIYNGRLVDSVVSWSKDILRTQESECVCINGTCTVVMTDGSASGKANTKILFIEEGKIVHTSTLSGSAQHVEECSCYPRYPGVRCVCRDNWKGSNRPIVDINIKNYSIVSSYVCSGLVGDTPRKTDSSSSSHCLDPNNEEGGHGVKGWAFDDGNDVWMGRTISEKLRLGYETFKVIEGWSNPNSKLQINRQVIVDRGNRSGYSGIFSVEGKSCINRCFYVELIRGRKEETEVLWTSNSIVVFCGTSGTYGTGSWPDGADINLMPI

SEQ ID NO: 16576 - protein, 469 aa, synthetic construct; identical to SEQ ID NO: 14799
  REGION 1..469: note = neuraminidase__InfluenzaA__ACI32814

SEQ ID NO: 16577 - protein, 449 aa, synthetic construct
  REGION 1..449: note = neuraminidase__InfluenzaA__ACJ53848
MNPNQKIITIGSICMVIGIVSLMLQIGNMISIWVSHSIQTGNQCQAEPISNTKFLTEKAVASVTLAGNSSLCPISGWAVYSKDNSIRIGSRGDVFVIREPFISCSHLECRTFFLTQGALLNDKHSNGTVKDRSPHRTLMSCPVGEAPSPYNSRFESVAWSASACHDGTSWLTIGISGPDNGAVAVLKYNGIITDTIKSWRNNILRTQESECACVNGSCFTVMTDGPSSGQASYKIFKMEKGKVVKSVELDAPNYHYEECSCYPDAGEITCVCRDNWHGSNRPWVSFNQNLEYQIGYICSGVFGDNPRPNDGTGSCGPVSPNGAYGVKGFSFKYGNGVWIGRTKSTNSRSGFEMIWDPNGWTGTDSSFSVKQDIVAITDWSGYSGSFVQHPELTGLDCIRPCFWVELIRGRPKESTIWTSGSSISFCGVNSDTVSWSWPDGAELPFTIDK

SEQ ID NO: 16578 - protein, 449 aa, synthetic construct
  REGION 1..449: note = neuraminidase__InfluenzaA__ACJ53849
MNPNQKIITIGSICMVIGIVSLMLQIGNMISIWVSHSIQTGNQCQAEPISNTKFLTEKAVASVTLAGNSSLCPISGWAVYSKDNSIRIGSRGDVFVIREPFISCSHLECRTFFLTQGALLNDKHSNGTVKDRSPHRTLMSCPVGEAPSPYNSRFESVAWSASACHDGTSWLTIGISGPDNGAVAVLKYNGIITDTIKSWRNNILRTQESECACVNGSCFTVMTDGPSSGQASYKIFKMEKGKVVKSVELDAPNYHYEECSCYPDAGEITCVCRDNWHGSNRPWVSFNQNLEYQIGYICSGVFGDNPRPNDGTGSCSPVSPNGAYGVKGFSFKYGNGVWIGRTKSTNSRSGFEMIWDPNGWTGTDSSFSVKQDIVAITDWSGYSGSFVQHPELTGLDCIRPCFWVELIRGRPKESTIWTSGSSISFCGVNSDTVSWSWPDGAELPFTIDK

SEQ ID NO: 16579 - protein, 449 aa, synthetic construct
  REGION 1..449: note = neuraminidase__InfluenzaA__ACJ53853
MNPNQKIITIGSICMVIGIVSLMLQIGNMISIWVSHSIQTGNQCQDEPISNTKFLTEKAVASVTLAGNSSLCPISGWAVYSKDNSIRIGSRGDVFVIREPFISCSHLECRTFFLTQGALLNDKHSNGTVKDRSPHRTLMSCPVGEAPSPYNSRFESVAWSASACHDGTSWLTIGISGPDNGAVAVLKYNGIITDTIKSWRNNILRTQESECACVNGSCFTVMTDGPSSGQASYKIFKMEKGKVVKSVELDAPNYHYEECSCYPDAGEITCVCRDNWHGSNRPWVSFNQNLEYQIGYICSGVFGDNPRPNDGTGSCGPVFPNGAYGVKGFSFKYGNGVWIGRTKSTNSRSGFEMIWDPNGWTGTDSSFSVKQDIVAITDWSGYSGSFVQHPELTGLDCIRPCFWVELIRGRPKESTIWTSGSSISFCGVNSDTVSWSWPDGAELPFTIDK

SEQ ID NO: 16580 - protein, 449 aa, synthetic construct; identical to SEQ ID NO: 16579
  REGION 1..449: note = neuraminidase__InfluenzaA__ACJ53866

SEQ ID NO: 16581 - protein, 449 aa, synthetic construct
  REGION 1..449: note = neuraminidase__InfluenzaA__ACJ53867
MNPNQKIITIGSICMAIGIVSLMLQIGNMISLWVSHSIQTGNQCQAEPISNTKFLTEKAVASVTLAGNSSLCPISGWAVYSKDNSIRIGSRGDVFVIREPFISCSHLECRTFFLTQGALLNDKHSNGTVKDRSPHRTLMSCPVGEAPSPYNSRFESVAWSASACHDGTSWLTIGISGPDNGAVAVLKYNGIITDTIKSWRNNILRTQESECACVNGSCFTVMTDGPSSGQASYKIFKMEKGKVVKSVELDAPNYHYEECSCYPDAGEITCVCRDNWHGSNRPWVSFNQNLEYQIGYICSGVFGDNPRPNDGTGSCGPVSPNGAYGVKGFSFKYGNGVWIGRTKSTNSRSGFEMIWDPNGWTGTDSSFSVKQDIVAITDWSGYSGSFVQHPELTGLDCIRPCFWVELIRGRPKESTIWTSGSSISFCGVNSDTVSWSWPDGAELPFTIDK

SEQ ID NO: 16582 - protein, 449 aa, synthetic construct
  REGION 1..449: note = neuraminidase__InfluenzaA__ACJ53875
MNPNQKIITIGSICMVIGIVSLMLQIGNMISIWVSHSIQTGNQCQAEPISNTKFLTEKAVASVTLAGNSSLCPISGWAVYSKDNSIRIGSRGDVFVIREPFISCSHLECRTFFLTQGALLNDKHSNGTVKDRSPHRTLMSCPVGEAPSPYNSRFESVAWSASACHDGISWLTIGISGPDNGAVAVLKYNGIITDTIKSWRNNILRTQESECACVNGSCFTVMTDGPSSGQASYKIFKMEKGKVVKSVELEAPNYHYEECSCYPDAGEITCVCRDNWHGSNRPWVSFNQNLEYQIGYICSGVFGDNPRPNDGTGSCGPVSPNGAYGVKGFSFKYGNGVWIGRTKSTNSRSGFEMIWDPNGWTGTDSSFSVKQDIVAITDWSGYSGSFVQHPELTGLDCIRPCFWVELIRGRPKESTIWTSGSSISFCGVNSDTVSWSWPDGAELPFTIDK

SEQ ID NO: 16583 - protein, 449 aa, synthetic construct
  REGION 1..449: note = neuraminidase__InfluenzaA__ACJ53876
MNPNQKIITIGSICMVIGIVSLMLQIGNIISIWVSHSIQTGNQCQAEPISNTKFLTEKAVASVTLAGNSSLCPISGWAVYSKDNSIRIGSRGDVFVIREPFISCSHLECRTFFLTQGALLNDKHSNGTVKDRSPHRTLMSCPVGEAPSPYNSRFESVAWSASACHDGTSWLTIGISGPDNGAVAVLKYNGIITDTIKSWRNNILRTQESECACVNGSCFTVMTDGPSSGQASYKIFKMEKGKVVKSVELDAPNYHYEECSCYPDAGEITCVCRDNWHGSNRPWVSFNQNLEYQIGYICSGVFGDNPRPNDGTGSCGPVSPNGAYGVKGFSFKYGNGVWIGRTKSTNSRSGFEMIWDPNGWTGTDSSFSVKQDIVAITDWSGYSGSFVQHPELTGLDCIRPCFWVELIRGRPKESTIWTSGSSISFCGVNSDTVGWSWPDGAELPFTIDK

SEQ ID NO: 16584 - protein, 467 aa, synthetic construct
  REGION 1..467: note = neuraminidase__InfluenzaA__ACJ67535
MNPNQKIIALGSVSITIATICLIMQIAVLATTMTLHFNECTNPSNNQAMPCEPIIIERNMTEIVHLNNTTIEKESCPKVAEYKNWSKPQCQITGFAPFSKDNSIRLSAGGDIWVTREPYVSCGLGNCYQFALGQGTTLNNKHSNDTIHDRSPHRTLLMNELGVPFHLGTKQVCIAWSSSSCHDGKAWLHVCVTGDDRNATASIIYDGMLTDSIGSWSKNILRTQESECVCINGTCTVVMTDGSASGRADTKILFIREGKIVHISPLSGSAQHVEECSCYPRYPEVRCVCRDNWKGSNRPVLYINVADYSVDSSYVCSGLVGDTPRNDDSSSSSNCRDPNNERGGPGVKGWAFDNGNDVWMGRTIKKDSRSGYETFRVVGGWTTANSKSQINRQVIVDSDNWSGYSGIFSVEGKTCINRCFYVELIRGRPQETRVWWTSNSIIVFCGTSGTYGTGSWPDGANINFMSI

SEQ ID NO: 16585 - protein, 469 aa, synthetic construct
  REGION 1..469: note = neuraminidase__InfluenzaA__ACK99424
MNPNQKIITIGSVSLTIATICFLMQIAILVTTVTLHFKQYECSSPPNNQVIPCQPTIIERNITEIVYLTNTTIEKEICPKLVEYRNWSKPQCKITGFAPFSKDNSIRLSAGGDIWVTREPYVSCDPSKCYQFALGQGTTLNNRHSNDTVHDRTPYRTLLMNELGVPFHLGTKQVCIAWSSSSCHDGKAWLHVCVTGHDENATASFIYDGRLVDSIGSWSKNILRTQESECVCINGTCTVVMTDGSASERADTKILFIEEGKVVHISPLSGSAQHVEECSCYPRYPGVRCVCRDNWKGSNRPIVDINVKDYSIVSSYVCSGLVGDTPRKNDSSSSSYCRNPNNEKGSHGVKGWAFDDGNDVWMGRTISEELRSGYETFKVIGGWSTPNSKLQINRQVIVDSGNRSGYSGIFSVEGKSCINRCFYVELIRGRKQETKVWWTSNSIVVFCGTSGTYGTGSWPDGADINLMPI

SEQ ID NO: 16586 - protein, 469 aa, synthetic construct; identical to SEQ ID NO: 16405
  REGION 1..469: note = neuraminidase__InfluenzaA__ACK99435

SEQ ID NO: 16587 - protein, 470 aa, synthetic construct
  REGION 1..470: note = neuraminidase__InfluenzaA__ACK99446
MNPNQKIITIGSISMAIGIISLTLQIGNIISIWVSHSIQTGSQNHTGICNQRIITYENSTWVNQTYVNINNTNVVAGKDKTSVTLAGNSSLCPIRGWAIYTKDNSIRIGSKGDVFVIREPFISCSHLECRTFFLTQGALLNDKHSNGTVKDRSPHRALMSCPLGEAPSPYNSRFESVAWSASACHDGMGWLTIGISGPDDGAVAVLKYNGIITETIKSWKKRILRTQESECVCVNGSCFTIMTDGPSNGAASYRIFKIEKGKVTKSIELDAPNSHYEECSCYPDTGTVMCVCRDNWHGSNRPWVSFNQNLDYQIGYICSGVFGDNPRPKDGKGSCNPVTVDGADGVKGFSYRYGNGVWIGRTKSNRFRKGFEMIWDPNGWTDTDSDFSVKQDVVAMTDWSGYSGSFVQHPELTGLDCMRPCFWVELVRGRPRENTTIWTSGSSISFCGVNSDTANWSWPDGAELPFTIDK

SEQ ID NO: 16588 - protein, 469 aa, synthetic construct
  REGION 1..469: note = neuraminidase__InfluenzaA__ACK99457
MNPNQKIITIGSVSLTIATICFLMQIAILVTTVTLHFKQHECNSPPNNQVMPCEPTIIERNITEIVYLTNTTIEKEICPKLVEYRNWSKPQCKITGFAPFSKDNSIRLSAGGDIWVTREPYVSCDPGKCYQFALGQGTTLNNRHSNDTVHDRTPYRTLLMNELGVPFHLGTKQVCIAWSSSSCHDGKAWLHVCVTGHDENATASFIYDGRLVDSIVSWSKNILRTQESECVCINGTCTVVMTDGSASERADTKILFIEEGKIVHISPLSGSAQHVEECSCYPRYPGVRCVCRDNWKGSNRPIVDINVKDYSIVSSYVCSGLVGDTPRKNDSSSSSYCRNPNNEKGSHGVKGWAFDDGNDVWMGRTIGEELRSGYETFKVIGGWSTPNSKLQTNRQVIVDRGNRSGYSGIFSVEGKSCINRCFYVELIRGRKQETKVWWTSNSIVVFCGTSGTYGTGSWPDGADINLMPI

SEQ ID NO: 16589 - protein, 470 aa, synthetic construct
  REGION 1..470: note = neuraminidase__InfluenzaA__ACK99468
MNPNQKIITIGSISIAIGIISLILQIGNIISIWASHSIQTGSQNHTGICNQRIITYENSTWVNQTYVNINNTNVVAGKDKTSMTLAGNSSLCPIRGWAIYTKDNSIRIGSKGDVFVIREPFISCSHLECRTFFLTQGALLNDKHSNGTVKDRSPYRALMSCPLGEAPSPYNSRFESVAWSASACHDGLGWLTIGISGPDNGAVAVLKYNGIITETIKSWKKRILRTQESECVCMNSSCFTIMTDGPSNGAASYRIFKIEKGRVTKSIELDAPNYHYEECSCYPDTGTVMCVCRDNWHGSNRPWVSFNQNLDYQIGYICSGVFGDNPRPKDGEGSCNPVTVDGADGVKGFSYRYGNGVWIGRTKSNRLRKGFEMIWDPNGWTDTDSDFSMKQDIVAMTDWSGYSGSFVQHPELTGLDCMRPCFWVELVRGLPRENTTIWTSGSSISFCGVNSDTANWSWPDGAELPFTIDK

SEQ ID NO: 16590 - protein, 469 aa, synthetic construct
  REGION 1..469: note = neuraminidase__InfluenzaA__ACK99479
MNPNQKIITIGSVSLTIATICFLMQIAILVTTVTLHFKQYECNSPPNNQVMLCEPTIIERNITEIVYLTNTTIEKEICPKLAEYRNWSKPQCKITGFAPFSKDNSIRLSAGGDIWVTREPYVSCDPDKCYQFALGQGTTLNNRHSNDTVHDRTPYRTLLMNELGVPFHLGTKQVCIAWSSSSCHDGKAWLHVCVTGHDENATASFIYDGRLVDSIGSWSKKILRTQESECVCINGTCTVVMTDGSASGRADTKILFIEEGKIVHISPLLGSAQHVEECSCYPRYPGVRCVCRDNWKGSNRPIVDINVKDYSIVSSYVCSGLVGDTPRKNDSSSSSHCLNPNNEEGGHGVKGWAFDDGNDVWMGRTISEKLRSGYETFKVIEGWSKPNSKLQINRQVIVDRGNRSGYSGIFSVEGKSCINRCFYVELIRGRKQETEVWWTSNSIVVFCGTSGTYGTGSWPDGANINLMPI

SEQ ID NO: 16591 - protein, 470 aa, synthetic construct; identical to SEQ ID NO: 16284
  REGION 1..470: note = neuraminidase__InfluenzaA__ACL12066

SEQ ID NO: 16592 - protein, 469 aa, synthetic construct; identical to SEQ ID NO: 15185
  REGION 1..469: note = neuraminidase__InfluenzaA__ACL12132

SEQ ID NO: 16593 - protein, 470 aa, synthetic construct; identical to SEQ ID NO: 16518
  REGION 1..470: note = neuraminidase__InfluenzaA__ACL12154

SEQ ID NO: 16594 - protein, 469 aa, synthetic construct; identical to SEQ ID NO: 16512
  REGION 1..469: note = neuraminidase__InfluenzaA__ACL12165

SEQ ID NO: 16595 - protein, 469 aa, synthetic construct; identical to SEQ ID NO: 16512
  REGION 1..469: note = neuraminidase__InfluenzaA__ACL12176

SEQ ID NO: 16596 - protein, 469 aa, synthetic construct
  REGION 1..469: note = neuraminidase__InfluenzaA__ACL12198
MNPNQKIITIGSVSLTISTICFFMQIAILITTVTLHFKQYEFNSTPNNQVMLCEPTIIERNITEIVYLTNTTIEKEICPKLAEYRNWSKPQCDITGFAPFSKDNSIRLSAGGDIWVTREPYVSCDPDKCYQFALGQGTTLNNVHSNDTVRDRTPYRTLLMNELGVPFHLGTKQVCIAWSSSSCHDGKAWLHVCITGDDKNATASFIYNGRLVDSVVSWSKEILRTQESECVCINGTCTVVMTDGSASGKADTKILFIEEGKIVHTSTLSGSAQHVEECSCYPRYPGVRCVCRDNWKGSNRPIVDINIKDHSIVSSYVCSGLVGDTPRKNDSSSSSHCLDPNNEEGGHGVKGWAFDDGNDVWMGRTISEKSRLGYETFKVIEGWSNPKSKLQINRQVIVDRGNRSGYSGIFSVEGKSCINRCFYVELIRGRKEETEVLWTSNSIVVFCGTSGTYGTGSWPDGADINLMPI

SEQ ID NO: 16597 - protein, 469 aa, synthetic construct; identical to SEQ ID NO: 16090
  REGION 1..469: note = neuraminidase__InfluenzaA__ACL12209

SEQ ID NO: 16598 - protein, 469 aa, synthetic construct; identical to SEQ ID NO: 16512
  REGION 1..469: note = neuraminidase__InfluenzaA__ACL12220

SEQ ID NO: 16599 - protein, 469 aa, synthetic construct
  REGION 1..469: note = neuraminidase__InfluenzaA__ACL12242
MNPNQKIITIGSVSLTISTICFFMQIAILITTVTLHFKQYEFNSPPNNQVMLCEPTIIERNITEIVYLTNTTIEKEICPKLAEYRNWSKPQCDITGFAPFSKDNSIRLSAGGDIWVTREPYVSCDPDKCYQFALGQGTTLNNVHSNNTVRDRTPYRTLLMNELGVPFHLGTKQVCIAWSSSSCHDGKAWLHVCITGDDKNATASFIYNGRLVDSVVSWSKEILRTQESECVCINGTCTVVMTDGSASGKADTKILFIEEGKIVHTSTLSGSAQHVEECSCYPRYPGVRCVCRDNWKGSNRPIVDINIKDHSIVSSYVCSGLVGDTPRKNDSSSSSHCLDPNNEEGGHGVKGWAFDDGNDVWMGRTISEKSRLGYETFKVIEGWSNPKSKLQINRQVIVDRGNRSGYSGIFSVEGKSCINRCFYVELIRGRKEETEVLWTSNSIVVFCGTSGTYGTGSWPDGADINLMPI

SEQ ID NO: 16600 - protein, 470 aa, synthetic construct
  REGION 1..470: note = neuraminidase__InfluenzaA__ACL12264
MNPNQKIITIGSISMAIGIISLILQIVNIISIWVSHSIQTGSQNHTGICNQRIITYENSTWVNQTYVNINNTNVVAGKDKTSVTLAGNSSLCPIRGWAIYTKDNSIRIGSKGDVFVIREPFISCSHLECRTFFLTQGALLNDKHSNGTVKDRSPYRALMSCPLGEAPSPYNSRFESVAWSASACHDGMGWLTIGISGPDDGAVAVLKYNGIITETIKSWKKRILRTQESECVCVNGSCFTIMTDGPSNGAASYRIFKIEKGKVTKSIELDAPNSHYEECSCYPDTGTVMCVCRDNWHGSNRPWVSFNQNLDYQIGYICSGVFGDNPRPKDGKGSCDPVTVDGADGVKGFSYRYGNGVWIGRTKSNRFRKGFEMIWDPNGWTDTDSDFSVKQDVVAMTDWSGYSGSFVQHPELTGLDCMRPCFWVELVRGRPRENTTIWTSGSSISFCGVNSDTANWSWPDGAELPFTIDK

SEQ ID NO: 16601 - protein, 469 aa, synthetic construct; identical to SEQ ID NO: 16405
  REGION 1..469: note = neuraminidase__InfluenzaA__ACN32275

SEQ ID NO: 16602 - protein, 469 aa, synthetic construct
  REGION 1..469: note = neuraminidase__InfluenzaA__ACN32286
MNPNKKIITIGSVSLTISTICFFMQIAILITTVTLHFKQYEFNSPPNNQVMLCEPTIIERNITEIVYLTNTTIEKEICPKLAEYRNWSKPQCDITGFAPFSKDNSIRLSAGGDIWVTREPYVSCDPDKCYQFALGQGTTLNNVHSNDTVRDRTPYRTLLMNELGVPFHLGTKQVCIAWSSSSCHDGKAWLHVCITGDDKNATASFIYNGRLVDSIVSWSKEILRTQESECVCINGTCTVVMTDGSASGKADTKILFIEEGKIVHTSTLLGSAQHVEECSCYPRYPGVRCVCRDNWKGSNRPIVDINIKDHSIVSSYVCSGLVGDTPRKNDSSSSGHCLDPNNEEGGHGVKGWAFDDGNDVWMGRTISEKSRLGYETFKVIEGWSNPKSKLQINRQVIVDRGNRSGYSGIFSVEGKSCINRCFYVELIRGRKEETEVLWTSNSIVVFCGTSGTYGTGSWPDGADINLMPI

SEQ ID NO: 16603 - protein, 469 aa, synthetic construct
  REGION 1..469: note = neuraminidase__InfluenzaA__ACN32493
MNPNQKIITIGSVSLTISTICFFMQIAILITTVTLHFKQYEFNSSPNNQVMLCEPTIIERNITEIVYLTNTTIEKEICPKLAEYRNWSKPQCDITGFAPFSKDNSIRLSAGGDIWVTREPYVSCDPDKCYQFALGQGTTLNNVHSNNTVRDRTPYRTLLMNELGVPFHLGTKQVCIAWSSSSCHDGKAWLHVCITGDDKNATASFIYNGRLVDSIVSWSKEILRTQESECVCINGTCTVVMTDGSASGKADTKILFIEEGKIVHTSTLSGSAQHVEECSCYPRYPGVRCVCRDNWKGSNRPIVDINIKDHSIVSSYVCSGLVGDTPRKNDSSSSSHCLDPNNEEGGHGVKGWAFDDGNDVWMGRTISEKSRLGYETFKVIEGWSNPKSKLQINRQVIVDRGNRSGYSGIFSVEGKSCINRCFYVELIRGRKEETEVLWTSNSIVVFCGTSGTYGTGSWPDGADINLMPI

SEQ ID NO: 16604 - protein, 469 aa, synthetic construct; identical to SEQ ID NO: 14154
  REGION 1..469: note = neuraminidase__InfluenzaA__ACN32526

SEQ ID NO: 16605 - protein, 469 aa, synthetic construct
  REGION 1..469: note = neuraminidase__InfluenzaA__ACN32537
MNPNQKIITIGSVSLTIATICFLMQIAILVTTVTLHFKQYECNSPPNNQVMLCEPTIIERNITEIVYLTNTTIEKEICPKLAEYRNWSKPQCNITGFAPFSKDNSIRLSAGGDIWVTREPYVSCDPDKCYQFALGQGTTLNNGHSNDTVHDRTPYRTLLMNELGVPFHLGTRQVCIAWSSSSCHDGKAWLHVCVTGDDENATASFIYNGRLVDSIGSWSKKILRTQESECVCINGTCTVVMTDGSASGKADTKILFIEEGKIVHISTLSGSAQHVEECSCYPRYPDVRCVCRDNWKGSNRPIVDINVKDYSIVSSYVCSGLVGDTPRKNDSFSSSHCLDPNNEEGGHGVKGWAFDDGNDVWMGRTISEKLRSGYETFKVIDGWSKPNSKLQINRQVIVERGNRSGYSGIFSVEGKSCINRCFYVELIRGRKEETEVWWTSNSIVVFCGTSGTYGTGSWPDGADINLMPI

SEQ ID NO: 16606 - protein, 470 aa, synthetic construct; identical to SEQ ID NO: 16082
  REGION 1..470: note = neuraminidase__InfluenzaA__ACN32807

SEQ ID NO: 16607 - protein, 470 aa, synthetic construct; identical to SEQ ID NO: 16030
  REGION 1..470: note = neuraminidase__InfluenzaA__ACN32818

SEQ ID NO: 16608 - protein, 470 aa, synthetic construct; identical to SEQ ID NO: 16030
  REGION 1..470: note = neuraminidase__InfluenzaA__ACN32829

SEQ ID NO: 16609 - protein, 470 aa, synthetic construct
  REGION 1..470: note = neuraminidase__InfluenzaA__ACN32840
MNPNQKIITIGSISIAIGIISLMLQIGNIISIWASHSIQTGSQNHTGICNQRIITYENSTWVNHTYVSINNTNVVAGKDKTSVTLAGNSSLCSISGWAIYTKDNSIRIGSKGDVFVIREPFISCSHLECRTFFLTQGALLNDKHSNGTVKDRSPYRALMSCPLGEAPSPYNSKFESVAWSASACHDGMGWLTIGISGPDNGAVAVLKYNGIITETIKSWKKRILRTQESECVCVNGSCFTIMTDGPSNGAASYKIFKIEKGKVTKSIELNAPNFHYEECSCYPDTGTVMCVCRDNWHGSNRPWVSFNQNLDYQIGYICSGVFGDNPRPKDGKGSCNPVTVDGADGVKGFSYKYGNGVWIGRTKSNRLRKGFEMIWDPNGWTDTDSDFSVKQDVVAITDWSGYSGSFVQHPELTGLDCIRPCFWVELVRGLPRENTTIWTSGSSISFCGVDSDTVNWSWPDGAELPFTIDK

SEQ ID NO: 16610 - protein, 469 aa, synthetic construct; identical to SEQ ID NO: 16512
  REGION 1..469: note = neuraminidase__InfluenzaA__ACN32851

SEQ ID NO: 16611 - protein, 469 aa, synthetic construct; identical to SEQ ID NO: 16599
  REGION 1..469: note = neuraminidase__InfluenzaA__ACN32862

SEQ ID NO: 16612 - protein, 469 aa, synthetic construct; identical to SEQ ID NO: 16603
  REGION 1..469: note = neuraminidase__InfluenzaA__ACN32873

SEQ ID NO: 16613 - protein, 469 aa, synthetic construct; identical to SEQ ID NO: 16599
  REGION 1..469: note = neuraminidase__InfluenzaA__ACN32884

SEQ ID NO: 16614 - protein, 469 aa, synthetic construct; identical to SEQ ID NO: 16603
  REGION 1..469: note = neuraminidase__InfluenzaA__ACN32895

SEQ ID NO: 16615 - protein, 469 aa, synthetic construct; identical to SEQ ID NO: 16512
  REGION 1..469: note = neuraminidase__InfluenzaA__ACN32906

SEQ ID NO: 16616 - protein, 469 aa, synthetic construct
  REGION 1..469: note = neuraminidase__InfluenzaA__ACN32917
MNPNQKIITIGSVSLTISTICFFMQIAILITTVTLHFKQYEFNSPPNNQVMLCKPTIIERNITEIVYLTNTTIEKEICPKLAEYRNWSKPQCDITGFAPFSKDNSIRLSAGGDIWVTREPYVSCDPDKCYQFALGQGTTLNNVHSNNTVRDRTPYRTLLMNELGVPFHLGTKQVCIAWSSSSCHDGKAWLHVCITGDDKNATASFIYNGRLVDSVVSWSKEILRTQESECVCINGTCTVVMTDGSASGKADTKILFIEEGKIVHTSTLSGSAQHVEECSCYPRYPGVRCVCRDNWKGSNRPIVDINITDHSIVSSYVCSGLVGDTPRKNDSSSSSHCLDPNNEEGGHGVKGWAFDDGNDVWMGRTISEKSRLGYETFKVIEGWSNPKSKLQINRQVIVDRGNRSGYSGIFSVEGKSCINRCFYVELIRGRKEETEVLWTSNSIVVFCGTSGTYGTGSWPDGADINLMPI

SEQ ID NO: 16617 - protein, 469 aa, synthetic construct
  REGION 1..469: note = neuraminidase__InfluenzaA__ACN32928
MNPNQKIITIGSVSLTISTICFFMQIAILITTVTLHFKQYEFNSPPNNQVMLCEPTIIERNITEIVYLTNTTIEKEICPKLAEYRNWSKPQCDITGFAPFSKDNSIRLSAGGDIWVTREPYVSCDPDKCYQFALGQGTTLNNVHSNNTVRDRTPYRTLLMNELGVPFHLGTKQVCIAWSSSSCHDGKAWLHVCITGDDKNATASFIYNGRLVDSVVSWSKEILRTQESECVCINGTCTVVMTDGSASGKADTKILFIEEGKIVHTSTLSGSAQHVEECSCYPRYPGVRCVCRDNWKGSNRPIVDINITDHSIVSSYVCSGLVGDTPRKNDSSSSSHCLDPNNEEGGHGVKGWAFDDGNDVWMGRTISEKSRLGYETFKVIEGWSNPKSKLQINRQVIVDRGNRSGYSGIFSVEGKSCINRCFYVELIRGRKEETEVLWTSNSIVVFCGTSGTYGTGSWPDGADINLMPI

SEQ ID NO: 16618 - protein, 469 aa, synthetic construct; identical to SEQ ID NO: 16603
  REGION 1..469: note = neuraminidase__InfluenzaA__ACN32939

SEQ ID NO: 16619 - protein, 469 aa, synthetic construct; identical to SEQ ID NO: 16512
  REGION 1..469: note = neuraminidase__InfluenzaA__ACN32950

SEQ ID NO: 16620 - protein, 469 aa, synthetic construct
  REGION 1..469: note = neuraminidase__InfluenzaA__ACN32961
MNPNQKIITIGSVSLTISTICFFMQIAILITTVTLHFKQYEFNSPPNNQVMLCEPTIIERNITEIVYLTNTTIEKEICPKLAEYRNWSKPQCDITGFAPFSKDNSIRLSAGGDIWVTREPYVSCDPDKCYQFALGQGTTLNNVHSNNTVRDRTPYRTLLMNELGVPFHLGTKQVCIAWSSSSCHDGKAWLHVCITGDDKNATASFIYNGRLVDSVVSWSKEILRTQESECVCINGTCTVVMTDGSASGKADTKILFIEEGKIVHTSTLSGSAQHVEECSCYPRYPGVRCVCRDNWKGSNRPIVDINITDHSIVSSYVCSGLVGDTPRKNDSSSSSHCLDPNNEEGGHGVKGWAFDDGNDVWMGRTISEKSRLGYETFKVIEGWSNPKSKLQINRQVIVDRGNRSGYSGIFSVEGKSCINRCFYVELIRGRKEETEVLWTSNSIVVFCGTSGTYGTGSWPDGADINIMPI

SEQ ID NO: 16621 - protein, 469 aa, synthetic construct; identical to SEQ ID NO: 16599
  REGION 1..469: note = neuraminidase__InfluenzaA__ACN32972

SEQ ID NO: 16622 - protein, 469 aa, synthetic construct; identical to SEQ ID NO: 16599
  REGION 1..469: note = neuraminidase__InfluenzaA__ACN32994

SEQ ID NO: 16623 - protein, 469 aa, synthetic construct
  REGION 1..469: note = neuraminidase__InfluenzaA__ACN33005
MNPNQKIITIGSVSLTISTICFFMQIAILITTVTLHFKQYEFNSPPNNQVMLCEPTIIERNITEIVYLTNTTIEKEICPKLAEYRNWSKPQCDITGFAPFSKDNSIRLSAGGDIWVTREPYVSCDPDKCYQFALGQGTTLNNVHSNDTVRDRTPYRTLLMNELGVPFHLGTKQVCIAWSSSSCHDGKAWLHVCITGDDKNATASFIYNGRLVDSVVSWSKEILRTQESECVCINGTCTVVMTDGSASGKADTKILFIEEGKIVHTSTLSGSAQHVEECSCYPRYPGVRCVCRDNWKGSNRPIVDINIKDHSIVSSYVCSGLVGDTPRKNDSSSSSHCLDPNNEEGGHGVKGWAFDDGNDVWMGRTISEKSRLGYETFKVIEGWSNPKSKLQINRQVIVDRGNRSGYSGIFSVEGESCINRCFYVELIRGRKEETEVLWTSNSIVVFCGTSGTYGTGSWPDGADINLMPI

SEQ ID NO: 16624 - protein, 469 aa, synthetic construct; identical to SEQ ID NO: 16599
  REGION 1..469: note = neuraminidase__InfluenzaA__ACN33016

SEQ ID NO: 16625 - protein, 469 aa, synthetic construct; identical to SEQ ID NO: 16599
  REGION 1..469: note = neuraminidase__InfluenzaA__ACN33049

SEQ ID NO: 16626 - protein, 469 aa, synthetic construct; identical to SEQ ID NO: 16599
  REGION 1..469: note = neuraminidase__InfluenzaA__ACN33060

SEQ ID NO: 16627 - protein, 469 aa, synthetic construct; identical to SEQ ID NO: 16603
  REGION 1..469: note = neuraminidase__InfluenzaA__ACN33082

SEQ ID NO: 16628 - protein, 470 aa, synthetic construct; identical to SEQ ID NO: 16069
  REGION 1..470: note = neuraminidase__InfluenzaA__ACN33093

SEQ ID NO: 16629 - protein, 470 aa, synthetic construct; identical to SEQ ID NO: 16030
  REGION 1..470: note = neuraminidase__InfluenzaA__ACN33104

SEQ ID NO: 16630 - protein, 469 aa, synthetic construct; identical to SEQ ID NO: 16603
  REGION 1..469: note = neuraminidase__InfluenzaA__ACN33115

SEQ ID NO: 16631 - protein, 470 aa, synthetic construct
  REGION 1..470: note = neuraminidase__InfluenzaA__ACN33126
MNPNQKIITIGSISIAIGIISLMLQIGNIISIWASHSIQTGSQNNTGICNQRIITYENSTWVNHTYVNINNTNVVAGEDKTSVTLAGSSSLCSISGWAIYTKDNSIRIGSKGDVFVIREPFISCSHLECRTFFLTQGALLNDKHSNGTVKDRSPYRALMSCPLGEAPSPYNSKFESVAWSASACHDGMGWLTIGISGPDNGAVAVLKYNGIITGTIKSWKKQILRTQESECVCMNGSCFTIMTDGPSNKAASYKIFKIEKGKVTKSIELNAPNFHYEECSCYPDTGIVMCVCRDNWHGSNRPWVSFNQNLDYQIGYICSGVFGDNPRPEDGEGSCNPVTVDGANGVKGFSYKYDNGVWIGRTKSNRLRKGFEMIWDPNGWTNTDSDFSVKQDVVAITDWSGYSGSFVQHPELTGLDCIRPCFWVELVRGLPRENTTIWTSGSSISFCGVNSDTANWSWPDGAELPFTIDK

SEQ ID NO: 16632 - protein, 470 aa, synthetic construct
  REGION 1..470: note = neuraminidase__InfluenzaA__ACN33148
MNPNQKIITIGSISIAIGIISLMLQIGNIISIWASHSIQTGSQNNTGICNQRIITYENSTWVNHTYVNINNTNVVAGEDKTSVTLAGNSSLCSISGWAIYTKDNSIRIGSKGDVFVIREPFISCSHLECRTFFLTQGALLNDKHSNGTVKDRSPYRALMSCPLGEAPSPYNSKFESVAWSASACHDGMGWLTIGISGPDNGAVAVLKYNGIITGTIKSWKKQILRTQESECVCMNGSCFTIMTDGPSNKAASYKIFKIEKGKVTKSIELNAPNFHYEECSCYPDTGIVMCVCRDNWHGSNRPWVSFNQNLDYQIGYICSGVFGDNPRPEDGEGSCNPVTVDGANGVKGFSYKYDNGVWIGRTKSNRLRKGFEMIWDPNGWTNTDSDFSVKQDVVAITDWSGYSGSFVQHPELTGLDCIRPCFWVELVRGLPRENTTIWTSGSSISFCGVNSDTANWSWPDGAELPFTIDK

SEQ ID NO: 16633 - protein, 469 aa, synthetic construct
  REGION 1..469: note = neuraminidase__InfluenzaA__ACN33159
MNPNQKIITIGSVSLTISTICFFMQIAILITTVTLHFKQYEFNSPPNNQVMLCEPTIIERNITEIVYLTNTTIEKEKCPKLAEYRNWSKPQCDITGFAPFSKDNSIRLSAGGDIWVTREPYVSCDPDKCYQFALGQGTTLNNVHSNNTVRDRTPYRTLLMNELGVPFHLGTKQVCIAWSSSSCHDGKAWLHVCITGDDKNATASFIYNGRLVDSVVSWSKEILRTQESECVCINGTCTVVMTDGSASGKADTKILFIEEGKIVHTSTLSGSAQHVEECSCYPRYPGVRCVCRDNWKGSNRPIVDINIKDHSIVSSYVCSGLVGDTPRKNDSSSSSHCLDPNNEEGGHGVKGWAFDDGNDVWMGRTISEKSRLGYETFKVIEGWSNPKSKLQINRQVIVDRGNRSGYSGIFSVEGKSCINRCFYVELIRGRKEETEVLWTSNSIVVFCGTSGTYGTGSWPDGADINLMPI

SEQ ID NO: 16634 - protein, 469 aa, synthetic construct; identical to SEQ ID NO: 16512
  REGION 1..469: note = neuraminidase__InfluenzaA__ACN33170

SEQ ID NO: 16635 - protein, 469 aa, synthetic construct; identical to SEQ ID NO: 16603
  REGION 1..469: note = neuraminidase__InfluenzaA__ACN33181

SEQ ID NO: 16636 - protein, 469 aa, synthetic construct; identical to SEQ ID NO: 16603
  REGION 1..469: note = neuraminidase__InfluenzaA__ACN33203

SEQ ID NO: 16637 - protein, 469 aa, synthetic construct
  REGION 1..469: note = neuraminidase__InfluenzaA__ACN33214
MNPNQKIITIGSVSLTISTICFFMQIAILITTVTLHFKQYEFNSPPNNQVMLCEPTIIERNITETVYLTNTTIEKEICPKLAEYRNWSKPQCDITGFAPFSKDNSIRLSAGGDIWVTREPYVSCDPDKCYQFALGQGTTLNNVHSNNTVRDRTPYRTLLMNELGVPFHLGTKQVCIAWSSSSCHDGKAWLHVCITGDDKNATASFIYNGRLVDSVVSWSKEILRTQESECVCINGTCTVVMTDGSASGKADTKILFIEEGKIVHTSTLSGSAQHVEECSCYPRYPGVRCVCRDNWKGSNRPIVDINIKDHSIVSSYVCSGLVGDTPRKNDSSSSSHCLDPNNEEGGHGVKGWAFDDGNDVWMGRTISEKSRLGYETFKVIEGWSNPKSKLQINRQVIVDRGNRSGYSGIFSVEGKSCINRCFYVELIRGRKEETEVLWTSNSIVVFCGTSGTYGTGSWPDGADINLMPI

SEQ ID NO: 16638 - protein, 470 aa, synthetic construct; identical to SEQ ID NO: 16071
  REGION 1..470: note = neuraminidase__InfluenzaA__ACN42984

SEQ ID NO: 16639 - protein, 470 aa, synthetic construct; identical to SEQ ID NO: 16071
  REGION 1..470: note = neuraminidase__InfluenzaA__ACN42995

SEQ ID NO: 16640 - protein, 469 aa, synthetic construct
  REGION 1..469: note = neuraminidase__InfluenzaA__ACN43006
MNPNQKIITIGSVSLTISTICFFMQIAILITTVTLHFKQYEFNSPPNNRVMLCEPTIIERNITEIVYLTNTTIEKEICPKLAEYRNWSKPQCDITGFAPFSKDNSIRLSAGGDIWVTREPYVSCDPDKCYQFALGQGTTLNNVHSNNTVRDRTPYRTLLMNELGVPFHLGTKQVCIAWSSSSCHDGKAWLHVCITGDDKNATASFIYNGRLVDSVVSWSKEILRTQESECVCINGTCTVVMTDGSASGKADTKILFIEEGKIVHTSTLSGSAQHVEECSCYPRYPGVRCVCRDNWKGSNRPIVDINIKDHSIVSSYVCSGLVGDTPRKNDSSSSSHCLDPNNEEGGHGVKGWAFDDGNDVWMGRTISEKSRLGYETFKVIEGWSNPKSKLQINRQVIVDRGNRSGYSGIFSVEGKSCINRCFYVELIRGRKEETEVLWTSNSIVVFCGTSGTYGTGSWPDGADINLMPI

SEQ ID NO: 16641 - protein, 469 aa, synthetic construct; identical to SEQ ID NO: 16603
  REGION 1..469: note = neuraminidase__InfluenzaA__ACN43017

SEQ ID NO: 16642 - protein, 469 aa, synthetic construct; identical to SEQ ID NO: 16599
  REGION 1..469: note = neuraminidase__InfluenzaA__ACN43028

SEQ ID NO: 16643 - protein, 469 aa, synthetic construct
  REGION 1..469: note = neuraminidase__InfluenzaA__ACN43039
MNPNQKIITIGSVSLTISTICFFMQIAILITTVTLHFKQYEFNSPPNNQVMLCEPTIIERNITEIVYLTNTTIEKEICPKLAEYRNWSKPQCDITGFAPFSKDNSIRLSAGGDIWVTREPYVSCDPDKCYQFALGQGTTLNNVHSNDTVRDRTPYRTLLMNELGVPFHLETKQVCIAWSSSSCHDGKAWLHVCITGDDKNATASFIYNGRLVDSVVSWSKEILRTQESECVCINGTCTVVMTDGSASGKADTKILFIEEGKIVHTSTLSGSAQHVEECSCYPRYPGVRCVCRDNWKGSNRPIVDINIKDHSIVSSYVCSGLVGDTPRKNDSSSSSHCLDPNNEEGGHGVKGWAFDDGNDVWMGRTISEKSRLGYETFKVIEGWSNPKSKLQINRQVIVDRGNRSGYSGIFSVEGKSCINRCFYVELIRGRKEETEVLWTSNSIVVFCGTSGTYGTGSWPDGADINLMPI

SEQ ID NO: 16644 - protein, 469 aa, synthetic construct; identical to SEQ ID NO: 16512
  REGION 1..469: note = neuraminidase__InfluenzaA__ACN43050

SEQ ID NO: 16645 - protein, 469 aa, synthetic construct; identical to SEQ ID NO: 16599
  REGION 1..469: note = neuraminidase__InfluenzaA__ACN43061

SEQ ID NO: 16646 - protein, 469 aa, synthetic construct
  REGION 1..469: note = neuraminidase__InfluenzaA__ACN43072
MNPNQKIITIGSVSLTISTICFFMQIAILITTVTLHFKQYEFNSPPNNQVMLCEPTIIERNITEIVYLTNTTIEKEICPKLAEYRNWSKPQCDITGFAPFSKDNSIRLSAGGDIWVTREPYVSCDPDKCYQFALGQGTTLNNVHSNNTVRDRTPYRTLLMNELGVPFHLGTKQVCIAWSSSSCHDGKAWLHVCITGDDKNATASFIYNGRLVDSVVSWSKEILRTQESECVCINGTCTVVMTDGSASGKADTKILFIEEGKIVHTSTLSGSAQHVEECSCYPRYPGVRCVCRDNWKGSNRPIVDINIKDHSIVSSYVCSGLVGDTPRKNDSSSSSHCLDPNNEEGGHGVKGWAFDDGNDVWMGRTISEKSRLGYETFKVIEGWSNPKSKLQINRQVIVDRGNRSGYSGIFSVEGKSCINRCFYVELIRGRKEETEVLWTSNSVVVFCGTSGTYGTGSWPDGADINLMPI

SEQ ID NO: 16647 - protein, 469 aa, synthetic construct
  REGION 1..469: note = neuraminidase__InfluenzaA__ACN43083
MNPNQKIITIGSVSLTISTICFFMQIAILITTVTLHFKQYEFNSSPNNQVMLCEPTIIERNITEIVYLTNTTIEKEICPKLAEYRNWSKPQCDITGFAPFSKDNSIRLSAGGDIWVTREPYVSCDPDKCYQFALGQGTTLNNVHSNNTVRDRTPYRTLLMNELGVPFHLGTKQVCIAWSSSSCHDGKAWLHVCITGDDKNATASFIYNGRLVDSIVSWSNEILRTQESECVCINGTCTVVMTDGSASGKADTKILFIEEGKIVHTSTLSGSAQHVEECSCYPRYPGVRCVCRDNWKGSNRPIVDINIKDHSIVSSYVCSGLVGDTPRKNDSSSSSHCLDPNNEEGGHGVKGWAFDDGNDVWMGRTISEKSRLGYETFKVIEGWSNPKSKLQINRQVIVDRGNRSGYSGIFSVEGKSCINRCFYVELIRGRKEETEVLWTSNSIVVFCGTSGTYGTGSWPDGADINLMPI

SEQ ID NO: 16648 - protein, 469 aa, synthetic construct; identical to SEQ ID NO: 14327
  REGION 1..469: note = neuraminidase__InfluenzaA__ACN50231

SEQ ID NO: 16649 - protein, 469 aa, synthetic construct
  REGION 1..469: note = neuraminidase__InfluenzaA__ACN50233
MNPNQKIITIGSVSLTISTICFFMQIAILITTVTLHFKQYEFNSPPNNQVMLCEPTIIERNITEIVYLTNTTIEKEICPKLAEYRNWSKPQCDITGFAPFSKDNSIRLSAGGDIWVTREPYVSCDPDKCYQFALGQGTTLNNVHSNDTVHDRTPYRTLLMNELGVPFHLGTKQVCIAWSSSSCHDGKAWLHVCVTGDDKNATASFIYNGRLVDSIVSWSKEILRTQESECVCINGTCTVVLTDGSASGKADTKILFIEEGKIVHTSKLSGSAQHVEECSCYPRYPGVRCVCRDNWKGSNRPIVDINIKDYSIVSSYVCSGLVGDTPRKNDSSSSGHCLDPNNEEGGHGVKGWAFDDGNDVWMGRTISEKLRSGYETFKVIEGWSNPNSKLQINRQVIVDRGNRSGYSGIFSVEGKSCINRCFYVELIRGRKEETEVLWTSNSIVVFCGTSGTYGTGSWPDGADINLMPI

SEQ ID NO: 16650 - protein, 469 aa, synthetic construct
  REGION 1..469: note = neuraminidase__InfluenzaA__ACN50245
MNPNQKIITIGSVSLTISTICFFMQIAILITTVTLHFKQYEFNSPPNNQVVLCEPTIIERNITEIVYLTNTTIEKEICPKLAEYRNWSKPQCDITGFAPFSKDNSIRLSAGGDIWVTREPYVSCDPDKCYQFALGQGTTLNNVHSNDTVRDRTPYRTLLMNELGVPFHLGTKQVCIAWSSSSCHDGKAWLHVCITGDDKNATASFIYNGRLVDSIVSWSKEILRTQESECVCINGTCTVVMTDGSASGKADTKILFIEEGKIVHTSTLSGSAQHVEECSCYPRYPGVRCVCRDNWKGSNRPIVDINIKDHSIVSSYVCSGLVGDTPRKNDSSSSSHCLDPNNEEGGHGVKGWAFDDGNDVWMGRTISEKSRLGYETFKVIEGWSNPKSKLQINRQVIVDRGDRSGYSGIFSVEGKSCINRCFYVELIRGRKEETEVLWTSNSIVVFCGTSGTYGTGSWPDGADINLMPI

SEQ ID NO: 16651 - protein, 470 aa, synthetic construct
  REGION 1..470: note = neuraminidase__InfluenzaA__ACN72609
MNPNQKIITIGSISIAIGIISLMLQIGNIISIWASHSIQTGSQNNTGICNQRIITYENSTWVNHTYVNINNTNVVAGEDKTSVTLAGNSSLCSISGWAIYTKDNSIRIGSKGDVFVIREPFISCSHLECRTFFLTQGALLNDKHSNGTVKDRSPYRALMSCPLGEAPSPYNSKFESVAWSASACHDGMGWLTIGISGPDNGAVAVLKYNGIITGTIKSWKKQILRTQESECVCMNGSCFTIMTDGPSNKAASYKIFKIEKGKVTKSIELNAPNFHYEECSCYPDTGIVMCVCRDNWHGSNRPWVSFNQNLDYKIGYICSGVFGDNPRPEDGEGSCNPVTVDGANGVKGFSYKYDNGVWIGRTKSNRLRKGFEMIWDPNGWTNTDSDFSVKQDVVAITDWSGYSGSFVQHPELTGLDCIRPCFWVELVRGLPRENTTIWTSGSSISFCGVNSDTANWSWPDGAELPFTIDK

SEQ ID NO: 16652 - protein, 469 aa, synthetic construct
  REGION 1..469: note = neuraminidase__InfluenzaA__ACN72621
MNPNQKIIIISSICMTNGIASLILQIGNIISIWISHSIQTGNQNQTETCNQSVIIYENNTWVNQTYVNISNNNFVAEQTVVPVKLVGSSPLCPVSGWAIYSKDNSVRIGSKGDVFVIREPFISCSHLECRTFFLTQGALLNDKHSNGTVKDRSPYRTLMSCPIGEVPSPYNSRFESVAWSASACHDGSSWLTIGISGPDNGAVAVLKYNDIITDTIKSWKNNILRTQESECACLNGSCFTVMTDGPSNGQASYKIFKIEKGKVVKSVELNAPNYHYEECSCYPDSGEIICVCRDNWHGSNRPWVSFNQNLEYQIGYICSGVLGDNPRPNDRTGNCGPVSSHGANGVKGFSFKYGDGIWIGRTKSTSSRSGFEMIWDPNGWTGTDNNFSVKQDIVGITDWTGYSGSFVQHPELTGLDCIRPCFWVELIRGRPKENTIWTSGSSISFCGVNSDTVGWSWPDGAELPFTIDK

SEQ ID NO: 16653 - protein, 469 aa, synthetic construct; identical to SEQ ID NO: 16512
  REGION 1..469: note = neuraminidase__InfluenzaA__ACN76503

SEQ ID NO: 16654 - protein, 469 aa, synthetic construct
  REGION 1..469: note = neuraminidase__InfluenzaA__ACO36345
MNPNQKIITIGSVSLTISTICFFMQIAILITTVTLHFKQYEFNSSPNNQVMQCEPTIIERNITEIVYLTNTTIEKEICPKLAEYRNWSKPQCDITGFAPFSKDNSIRLSAGGDIWVTREPYVSCDPDKCYQFALGQGTTLNNVHSNNTVRDRTPYRTLLMNELGVPFHLGTKQVCIAWSSSSCHDGKAWLHVCITGDDKNATASFIYNGRLVDSIVSWSKEILRTQESECVCINGTCTVVMTDGSASGKADTKILFIEEGKIVHTSTLSGSAQHVEECSCYPRYPGVRCVCRDNWKGSNRPIVDINIKDHSIVSSYVCSGLVGDTPRKNDSSSSSHCLDPNNEEGGHGVKGWAFDDGNDVWMGRTISEKSRLGYETFKVIEGWSNPKSKLQINRQVIVDRGNRSGYSGIFSVEGKSCINRCFYVELIRGRKEETEVLWTSNSIVVFCGTSGTYGTGSWPDGADINLMPI

SEQ ID NO: 16655 - protein, 469 aa, synthetic construct; identical to SEQ ID NO: 14980
  REGION 1..469: note = neuraminidase__InfluenzaA__ACO36356

SEQ ID NO: 16656 - protein, 469 aa, synthetic construct
  REGION 1..469: note = neuraminidase__InfluenzaA__ACO36367
MNPNQKIITIGSVSLIISTICFFMQTAILITTVTLHFKQYEFNSPPNNQVMLCEPTIIERNITEIVYLTNTTIEKEICPKLAEYRNWSKPQCDITGFAPFSKDNSIRLSAGGDIWVTREPYVSCDPDKCYQFALGQGTTLNNVHSNDTVRNRTPYRTLLMNELGVPFHLGTKQVCIAWSSSSCHDGKAWLHVCITGDDKNATASFIYNGRLVDSIVSWSKEILRTQESECVCINGTCTVVMTDGSASGKADTKILFIEEGKIVHTSTLSGSAQHVEECSCYPRYPGVRCVCRDNWKGSNRPIVDINIKDHSIVSSYVCSGLVGDTPRKNDSSSSSHCLDPNNEEGGHGVKGWAFDDGNDVWMGRTISEKSRLGYETFKVIEGWSNPKSKLQINRQVIVDRGNRSGYSGIFSVEGKSCINRCFYVELIRGRKEETEVLWTSNSIVVFCGTSGTFGTGSWPDGADINLMPI

SEQ ID NO: 16657 - protein, 470 aa, synthetic construct; identical to SEQ ID NO: 16632
  REGION 1..470: note = neuraminidase__InfluenzaA__ACO36400

SEQ ID NO: 16658 - protein, 469 aa, synthetic construct
  REGION 1..469: note = neuraminidase__InfluenzaA__ACO36411
MNPNQKIITIGSVSLTISTIGFFMQTAILITTVTLHFKQYEFNSPPNNQVMLCEPTIIERNITEIVYLTNTTIEKEICPKLAEYRNWSKPQCDITGFAPFSKDNSIRLSAGGDIWVTREPYVSCDPDKCYQFALGQGTTLNNVHSNDTVRGRTPYRTLLMNELGVPFHLGTKQVCIAWSSSSCHDGKAWLHVCITGDDKNATASFIYNGRLVDSIVSWSKEILRTQESECVCINGTCTVVMTDGSASGKADTKILFIEEGKIVHTSTLSGSAQHVEECSCYPRYPGVRCVCRDNWKGSNRPIVDINIKDHSIVSSYVCSGLVGDTPRKNDSSSSSHCLDPNNEEGGHGVKGWAFDDGNDVWMGRTISEKSRLGYETFKVIEGWSNPKSKLQINRQVIVDRGNRSGYSGIFSVEGKSCINRCFYVELIRGRKEETEVLWTSNSIVVFCGTSGTYGTGSWPDGADINLMPI

SEQ ID NO: 16659 - protein, 469 aa, synthetic construct
  REGION 1..469: note = neuraminidase__InfluenzaA__ACO36422
MNPNQKIITIGSVSLIISTICFFMQTAILITTVTLHFKQYEFNSPPNNQVMLCEPTIIERNITEIVYLTNTTIEKEICPKLAEYRNWSKPQCDITGFAPFSKDNSIRLSAGGDIWVTREPYVSCDPDKCYQFALGQGTTLNNVHSNDTVRGRTPYRTLLMNELGVPFHLGTKQVCIAWSSSSCHDGKAWLHVCITGDDKNATASFIYNGRLVDSIVSWSKEILRTQESECVCINGTCTVVMTDGSASGKADTKILFIEEGKIVHTSTLSGSAQHVEECSCYPRYPGVRCVCRDNWKGSNRPIVDINIKDHSIVSSYVCSGLVGDTPRKNDSSSSSHCLDPNNEEGGHGVKGWAFDDGNDVWMGRTISEKSRLGYETFKVIEGWSNPKSKLQINRQVIVDRGNRSGYSGIFSVEGKSCINRCFYVELIRGRKEETEVLWTSNSIVVFCGTSGTYGTGSWPDGADINLMPI

SEQ ID NO: 16660 - protein, 469 aa, synthetic construct; identical to SEQ ID NO: 16416
  REGION 1..469: note = neuraminidase__InfluenzaA__ACO36433

SEQ ID NO: 16661 - protein, 469 aa, synthetic construct
  REGION 1..469: note = neuraminidase__InfluenzaA__ACO36444
MNPNQKIITIGSVSLTIATICFLMQIAILVTTVTLHFKQHECNSPPNNQVMLCEPTIIERNITEIVYLTNTTIEKEKCPKLAEYRNWSKPQCNITGFAPFSKDNSIRLSAGGDIWVTREPYVSCDPDKCYQFALGQGTTLNNGHSNNTVHDRTPYRTLLMNELGVPFHLGTRQVCIAWSSSSCHDGKAWLHVCVTGDDKNATASFIYNGRLVDSIGSWSKKILRTQESECVCINGTCTVVMTDGSASEKADTKILFIEEGKIVHISTLSGSAQHVEECSCYPRYPGVRCVCRDNWKGSNRPIVDINVKDYSIVSSYVCSGLVGDTPRKNDSFSSSHCLDPNNEEGGHGVKGWAFDDGNDVWMGRTISEKLRSGYETFKVIEGWSKPNSKLQINRQVIVERGNRSGYSGIFSVEGKSCINRCFYVELIRGRKEETEVWWTSNSIVVFCGTSGTYGTGSWPDGADINLMPI

SEQ ID NO: 16662 - protein, 469 aa, synthetic construct
  REGION 1..469: note = neuraminidase__InfluenzaA__ACO36466
MNPNQKIITIGSVSLTISTICFFMQIAILITTVTLHFKQYEFNSPPNNQVMLCEPTIIERNITEIAYLTNTTIEKEICPKLAEYRNWSKPQCNITGFAPFSKDNSIRLSAGGDIWVTREPYVSCDPDKCYQFALGQGTTLNNVHSNDTVHDRTPYRTLLMNELGVPFHLGTKQVCIAWSSSSCHDGKAWLHVCVTGDDENATASFIYNGRLVDSVVSWSKKILRTQESECVCINGTCTVVMTDGSASGKADTKILFIEEGKIVHTSTLSGSAQHVEECSCYPRYPGVRCVCRDNWKGSNRPIVDINIKDYSIVSSYVCSGLVGDTPRKNDSSSSSHCLDPNNEEGGHGVKGWAFDDGNDVWMGRTISEKLRSGYETFKVIEGWSNPNSKLQINRQVIVDRGNRSGYSGIFSVEGKSCINRCFYVELIRGRNQETEVLWTSNSIVVFCGTSGTYGTGSWPDGADINLMPI

SEQ ID NO: 16663 - protein, 469 aa, synthetic construct
  REGION 1..469: note = neuraminidase__InfluenzaA__ACO36477
MNPNQKIITIGSVSLTIATICFLMQIAILVTTVTLHFKQHECNSPPNNQVMLCEPTIIERNITEIVYLTNTTIEKEICPKLAEYRNWSKPQCNITGFAPFSKDNSIRLSAGGDIWVTREPYVSCDPDKCYQFALGQGTTLNNGHSNDTVHDRTPYRTLLMNELGVPFHLGTRQVCIAWSSSSCHDGKAWLHVCVTGDDKNATASFIYNGRLVDSIGSWSKNILRTQESECVCINGTCTVVMTDGSASGKADTKILFIEEGKIVHISTLSGSAQHVEECSCYPRYPGVRCVCRDNWKGSNRPIVDINVKDYSIVSSYVCSGLVGDTPRKNDSFSSSHCLDPNNEEGGHGVKGWAFDDGNDVWMGRTISEKLRSGYETFKVIEGWSKPNSKLQINRQVIVERGNRSGYSGIFSVEGKSCINRCFYVELIRGRKEETEVWWTSNSIVVFCGTSGTYGTGSWPDGADINLMPI

SEQ ID NO: 16664 - protein, 469 aa, synthetic construct
  REGION 1..469: note = neuraminidase__InfluenzaA__ACO36499
MNPNQKIITIGSVSLTISTICFFMQIAILITTVTLHFKQYEFNSPPNNQVMLCEPTIIERNITEIVYLTNTTIEKEICPKLAEYRNWSKPQCNITGFAPFSKDNSIRLSAGGDIWVTREPYVSCDPDKCYQFALGQGTTLNNVHSNDTVHDRTPYRTLLMNELGVPFHLGTKQVCIAWSSSSCHDGKAWLHVCVTGDDKNATASFIYNGRLVDSVVSWSKKILRTQESECVCINGTCTVVMTDGSASGKADTKILFIEEGKIVHTSTLSGSAQHVEECSCYPRYPGVRCVCRDNWKGSNRPIVDINIKDYSIVSSYVCSGLVGDTPRKNDSSSSSHCLDPNNEEGGHGVKGWAFDDGNDVWMGRTISEKLRSGYETFKVIEGWSNPNSKLQINRQVIVDRGNRSGYSGIFSVEGKSCINRCFYVELIRGRNQETEVLWTSNSIVVFCGTSGTYGTGSWPDGADINLMPI

SEQ ID NO: 16665 - protein, 469 aa, synthetic construct; identical to SEQ ID NO: 14327
  REGION 1..469: note = neuraminidase__InfluenzaA__ACO36510

SEQ ID NO: 16666 - protein, 469 aa, synthetic construct; identical to SEQ ID NO: 14327
  REGION 1..469: note = neuraminidase__InfluenzaA__ACO36543

SEQ ID NO: 16667 - protein, 469 aa, synthetic construct; identical to SEQ ID NO: 14327
  REGION 1..469: note = neuraminidase__InfluenzaA__ACO36554

SEQ ID NO: 16668 - protein, 469 aa, synthetic construct; identical to SEQ ID NO: 14327
  REGION 1..469: note = neuraminidase__InfluenzaA__ACO36565

SEQ ID NO: 16669 - protein, 469 aa, synthetic construct
  REGION 1..469: note = neuraminidase__InfluenzaA__ACO36576
MNPNQKIITIGSVSLTISTICFFMQIAILITTVTLHFKQYEFNSPPNNQVMLCEPTIIERNITEIVYLTNTTIEKEICPKLAEYRNWSKPQCDITGFAPFSKDNSIRLSAGGDIWVTREPYVSCDPDKCYQFALGQGTTLNNVHSNDTVHDRTPYRTLLMNELGVPFHLGTKQVCIAWSSSSCHDGKAWLHVCVTGDDKNATASFIYNGRLVDSIVSWSKEILRTQESECVCINGTCTVVMTDGSASGKADTKILFIEEGKIVHTSTLSGSAQHVEECSCYPRYPGVRCVCRDNWKGSNRPIVDINIKDYSIVSSYVCSGLVGDTPRKNDSSSSSHCLDPNNEEGGHGVKGWAFDDGNDVWMGRTISEKLRSGYETFKVIEGWSNPNSKLQINRQVIVGRGNRSGYSGIFSVEGKSCINRCFYVELIRGRKEETEVLWTSNSIVVFCGTSGTYGTGSWPDGADINLMPI

SEQ ID NO: 16670 - protein, 469 aa, synthetic construct; identical to SEQ ID NO: 14327
  REGION 1..469: note = neuraminidase__InfluenzaA__ACO36587

SEQ ID NO: 16671 - protein, 469 aa, synthetic construct; identical to SEQ ID NO: 14712
  REGION 1..469: note = neuraminidase__InfluenzaA__ACO36609

SEQ ID NO: 16672 - protein, 469 aa, synthetic construct
  REGION 1..469: note = neuraminidase__InfluenzaA__ACO36620
MNPNQKIITIGSVSLTISTICFFMQIAILITTVTLHFKQYEFNSPPNNQVMLCEPTIIERNITEIVYLTNTTIEKEICPKLAEYRNWSKPQCNITGFAPFSKDNSIRLSAGGDIWVTREPYVSCDPDKCYQFALGQGTTLNNVHSNDTVHDRTPYRTLLMNELGVPFHLGTKQVCIAWSSSSCHDGKAWLHVCVTGDDKNATASFIYNGRLVDSIVSWSKEILRTQESECVCINGTCTVVMTDGSASGKADTKILFIEEGKIVHTSTLSGSAQHVEECSCYPRYPGVRCVCRDNWKGSNRPIVDINIKDYSIVSSYVCSGLVGDTPRKNDSSSSSHCLDPNNEEGGHGVKGWAFDDGNDVWMGRTISEKLRSGYETFKVIEGWSNPNSKLQVNRQVIVDRGNRSGYSGIFSVEGKSCINRCFYVELIRGRKEETEVLWTSNSIVVFCGTSGTYGTGSWPDGADINLMPI

SEQ ID NO: 16673 - protein, 469 aa, synthetic construct; identical to SEQ ID NO: 14712
  REGION 1..469: note = neuraminidase__InfluenzaA__ACO36631

SEQ ID NO: 16674 - protein, 469 aa, synthetic construct; identical to SEQ ID NO: 14712
  REGION 1..469: note = neuraminidase__InfluenzaA__ACO36653

SEQ ID NO: 16675 - protein, 469 aa, synthetic construct
  REGION 1..469: note = neuraminidase__InfluenzaA__ACO36675
MNPNQKIITIGSVSLTISTICLFMQIAILITTVTLHFKQYEFNSPPNNQVMLCEPTIIERNITEIVYLTNTTIEKEICPKLAEYRNWSKPQCNITGFAPFSKDNSIRLSAGGDIWVTREPYVSCDPDKCYQFALGQGTTLNNVHSNDTVHDRTPYRTLLMNELGVPFHLGTKQVCIAWSSSSCHDGKAWLHVCVTGDDKNATASFIYNGRLVDSIVSWSKEILRTQESECVCINGTCTVVMTDGSASGKADTKILFIEEGKIVHTSTLSGSAQHVEECSCYPRYPGVRCVCRDNWKGSNRPIVDINIKDYSIVSSYVCSGLVGDTPRKNDSSSSSHCLDPNNEEGGHGVKGWAFDDGNDVWMGRTISEKLRSGYETFKVIEGWSNPNSKLQINRQVIVDRGNRSGYSGIFSVEGKSCINRCFYVELIRGRKEETEVLWTSNSIVVFCGTSGTYGTGSWPDGADINLMPI

SEQ ID NO: 16676 - protein, 469 aa, synthetic construct
  REGION 1..469: note = neuraminidase__InfluenzaA__ACO36686
MNPNQKIITIGSVSLTISTICFFMQIAILITTVTLHFKQYEFNSPPNNQVMLCEPTIIERNITEIVYLTNTTIEKEICPKLAEYRNWSKPQCNITGFAPFSKDNSIRLSAGGDIWVTREPYVSCDHDKCYQFALGQGTTLNNVHSNDTVHDRTPYRTLLMNELGVPFHLGTKQVCIAWSSSSCHDGKAWLHVCVTGDDKNATASFIYNGRLVDSIVSWSKEILRTQESECVCINGTCTVVMTDGSASGKADTKILFIEEGKIVHTSTLSGSAQHVEECSCYPRYPGVRCVCRDNWKGSNRPIVDINIKDYSIVSSYVCSGLVGDTPRKNDSSSSSHCLDPNNEEGGHGVKGWAFDDGNDVWMGRTISEKLRSGYETFKVIEGWSNPNSKLQINRQVIVDRGNRSGYSGIFSVEGKSCINRCFYVELIRGRKEETEVLWTSNSIVVFCGTSGTYGTGSWPDGADINLMPI

SEQ ID NO: 16677 - protein, 469 aa, synthetic construct
  REGION 1..469: note = neuraminidase__InfluenzaA__ACO37125
MNPNQKIITIGSVSLTISTICFFMQIAILITTVTLHFKQYEFNSPPNNQVMLCEPTIIERNITEIVYLTNTTIEKEICPKLAEYRNWSKPQCDITGFAPFSKDNSIRLSAGGDIWVTREPYVSCDPDKCYQFALGQGTTLNNVHSNDTVHDRTPYRTLLMNELGVPFHLGTKQVCIAWSSSSCHDGKAWLHVCVTGDDKNATASFIYNGMLVDSIVSWSKEILRTQESECVCINGTCTVVMTDGSASGKADTKILFIEEGKIVHTSTLSGSAQHVEECSCYPRYPGVRCVCRDNWKGSNRPIVDINIKDYSIVSSYVCSGLVGDTPRKNDSSSSSHCLDPNNEEGGHGVKGWAFDDGNDVWMGRTISEKLRSGYETFKVIEGWSNPNSKLQINRQVIVDRGNRSGYSGIFSVEGKSCINRCFYVELIRGRKEETEVLWTSNSIVVFCGTSGTYGTGSWPDGADINLMPI

SEQ ID NO: 16678 - protein, 469 aa, synthetic construct
  REGION 1..469: note = neuraminidase__InfluenzaA__ACO94511
MNPNQKIITIGSVSLTISTICFFMQIAILITTVTLHFKQYEFNSPPNNQVMLCEPTIIERNITEIVYLTNTTIEKEICPKLAEYRNWSKPQCDITGFAPFSKDNSIRLSAGGDIWVTREPYVSCDPDKCYQFALGQGTTLNNVHSNDTVRDRTPYRTLLMNELGVPFHLGTKQVCIAWSSSSCHDGKAWLHVCITGDDKNATASFIYNGRLVDSVVSWSKEILRTQESECVCINGTCTVVMTDGSASGKADTKILFIEEGKIVHTSTLSGSAQHVEECSCYPRYPGVRCVCRDNWKGSNRPIVDINIKDHSIVSSYVCSGLVGDTPRKNDSSSSSNCLDPNNEEGGHGVKGWAFDDGNDVWMGRTISEKSRLGYETFKVIEGWSNPKSKLQINRQVIVDRGNRSGYSGIFSVEGKSCINRCFYVELIRGRKEETEVLWTSNSIVVFCGTSGTYGTGSWPDGADINLMPI

SEQ ID NO: 16679 - protein, 469 aa, synthetic construct; identical to SEQ ID NO: 16512
  REGION 1..469: note = neuraminidase__InfluenzaA__ACO94512

SEQ ID NO: 16680 - protein, 469 aa, synthetic construct; identical to SEQ ID NO: 16599
  REGION 1..469: note = neuraminidase__InfluenzaA__ACO94513

SEQ ID NO: 16681 - protein, 469 aa, synthetic construct
  REGION 1..469: note = neuraminidase__InfluenzaA__ACO94675
MNPNQKIITIGSVSLTISTICFFMQIAILITTVTLHFKQYEFNSPPNNQVMLCEPTIIERNITEIVYLTNTTIEKEICPKLAEYRNWSKPQCDITGFAPFSKDNSIRLSAGGDIWVTREPYVSCDPDKCYQFALGQGTTLNNVHSNDTVRDRTPYRTLLMNELGVPFHLGTKQVCIAWSSSSCHDGKAWLHVCITGDDKNATASFIYNGRLVDSVVSWSKEILRTQESECVCINGTCTVVMTDGSASGKADTKILFIEEGKIVHTSTLSGSAQHVEECSCYPRYPGVRCVCRDNWKGSNRPIVDINIKNHSIVSSYVCSGLVGDTPRKNDSSSSSHCLDPNNEEGGHGVKGWAFDDGNDVWMGRTISEKSRLGYETFKVIEGWSNPKSKLQINRQVIVDRGNRSGYSGIFSVEGKSCINRCFYVELIRGRKEETEVLWTSNSIVVFCGTSGTYGTGSWPDGADINLMPI

SEQ ID NO: 16682 - protein, 469 aa, synthetic construct
  REGION 1..469: note = neuraminidase__InfluenzaA__ACO94686
MNPNQKIITIGSVSLTISTICFFMQIAILITTVTLHFKQYEFNSPPNNQVMLCEPTTIERNITEIVYLTNTTIEKEICPKLAEYRNWSKPQCDITGFAPFSKDNSIRLSAGGDIWVTREPYVSCDPDKCYQFALGQGTTLNNVHSNDTVRDRTPYRTLLMNELGVPFHLGTKQVCIAWSSSSCHDGKAWLHVCITGDDKNATASFIYNGRLVDSIVSWSKDILRTQESECVCINGTCTVVMTDGSASGKADTKILFIEEGKIVHTSTLSGSAQHVEECSCYPRYPGVRCVCRDNWKGSNRPIVDINIKDHSIVSSYVCSGLVGDTPRKNDSSSSGHCLDPNNEEGGHGVKGWAFDDGNDVWMGRTISEKSRLGYETFKVIEGWSNPKSKLQINRQVIVDRGNRSGYSGIFSVEGKSCINRCFYVELIRGRKEETEVLWTSNSIVVFCGTSGTYGTGSWPDGAEINLMPI

SEQ ID NO: 16683 - protein, 469 aa, synthetic construct; identical to SEQ ID NO: 16599
  REGION 1..469: note = neuraminidase__InfluenzaA__ACO94697

SEQ ID NO: 16684 - protein, 470 aa, synthetic construct; identical to SEQ ID NO: 16632
  REGION 1..470: note = neuraminidase__InfluenzaA__ACO94708

SEQ ID NO: 16685 - protein, 469 aa, synthetic construct
  REGION 1..469: note = neuraminidase__InfluenzaA__ACO94719
MNPNQKIITIGSVSLTISTICFFMQIAILITTVTLHFKQYEFNSPPNNQVMLCEPTIIERNITEIVYLTNTTIEKEICPKLAEYRNWSKPQCDITGFAPFSKDNSIRLSAGGDIWVTREPYVSCDPDKCYQFALGQGTTLNNVHSNDTVRDRTPYRTLLMNELGVPFHLGTKQVCIAWSSSSCHDGKAWLHVCITGDDKNATASFIYNGRLVDSIVSWSKDILRTQESECVCINGTCTVVMTDGSASGKADTKILFIEEGKIVHTSTLSGSAQHVEECSCYPRYPGVRCVCRDNWKGSNRPIVDINIKDHSIVSSYVCSGLVGDTPRKNDSSSSGHCLDPNNEEGGHGVKGWAFDDGNDVWMGRTISEKSRLGYETFKVIEGWSNPKSKLQINRQVIVDRGNRSGYSGIFSVEGKSCINRCFYVELIRGRKEETEVLWTSNSIVVFCGTSGTYGTGSWPDGAEINLMPI

SEQ ID NO: 16686 - protein, 469 aa, synthetic construct
  REGION 1..469: note = neuraminidase__InfluenzaA__ACO94741
MNPNQKIITIGSVSLTISTICFFMQIAILITTVTLHFKQYEFNSSPNNQVMLCEPTIIERNITEIVYLTNTTIEKEICPKLAEYRNWSKPQCDITGFAPFSKDNSIRLSAGGDIWVTREPYVSCDPDKCYQFALGQGTTLNNVHSNNTVRDRTPYRTLLMNELGVPFHLGTKQVCIAWSSSSCHDGKAWLHVCITGDDKNATASFIYNGRLVDSIVSWSKEILRTQESECVCINGTCTVVMTDGSASGKADTKILFIEEGKIVHTSTLSGSAQHVEECSCYPRYPGVRCVCRDNWKGSNRPIVDINIKDHSIVSSYVCSGLVGDTPRKNDSSSSSHCLDPNNEEGGHGVKGWAFDDGNDVWMGRTISEKSRLGYETFKVIEGWSNPKSKLQINRQVIVDRGNRSGYSGIFSVESKSCINRCFYVELIRGRKEETEVLWTSNSIVVFCGTSGTYGTGSWPDGADINLMPI

SEQ ID NO: 16687 - protein, 469 aa, synthetic construct; identical to SEQ ID NO: 16603
  REGION 1..469: note = neuraminidase__InfluenzaA__ACO94763

SEQ ID NO: 16688 - protein, 469 aa, synthetic construct
  REGION 1..469: note = neuraminidase__InfluenzaA__ACO94774
MNPNQKIITIGSVSLTISTICFFMQIAILITTVTLHFKQYEFNSPPNNQVMLCEPTIIERNITEIVYLTNTTIEKEICPKLAEYRNWSKPQCDITGFAPFSKDNSIRLSAGGDIWVTREPYVSCDPDKCYQFALGQGTTLNNVHSNNTVRDRTPYRTLLMNELGVPFHLGTKQVCMAWSSSSCHDGRAWLHVCITGDDKNATASFIYNGRLVDSVVSWSKEILRTQESECVCINGTCTVVMTDGSASGKADTKILFIEEGKIVHTSTLSGSAQHVEECSCYPRYPGVRCVCRDNWKGSNRPIVDINIKDHSIVSSYVCSGLVGDTPRKNDSSSSSHCLDPNNEEGGHGVKGWAFDDGNDVWMGRTISEKSRLGYETFKVIEGWSNPKSKLQINRQVIVDRGNRSGYSGIFSVEGKSCINRCFYVELIRGRKEETEVLWTSNSIVVFCGTSGTYGTGSWPDGADINLMPI

SEQ ID NO: 16689 - protein, 469 aa, synthetic construct
  REGION 1..469: note = neuraminidase__InfluenzaA__ACO94785
MNPNQKIITIGSVSLTISTICFFMQIAILITTVTLHFKQYEFNSPPNNQVMLCKPTIIERNITEIVYLTNTTIEKEICPKLAEYRNWSKPQCDITGFAPFSKDNSIRLSAGGDIWVTREPYVSCDPDKCYQFALGQGTTLNNVHSNNTVRDRTPYRTLLMNELGVPFHLGTKQVCIAWSSSSCHDGKAWLHVCITGDDKNATASFIYNGRLVDSVVSWSKEILRTQESECVCINGTCTVVMTDGSASGKADTKILFIEEGKIVHTSTLSGSAQHVEECSCYPRYPGVRCVCRDNWKGSNRPIVDINIKDHSIVSSYVCSGLVGDTPRKNDSSSSSHCLDPNNEEGGHGVKGWAFDDGNDVWMGRTISEKSRLGYETFKVIEGWSNPKSKLQINRQVIVDRGNRSGYSGIFSVEGKSCINRCFYVELIRGRKEETEVLWTSNSIVVFCGTSGTYGTGSWPDGADINLMPI

SEQ ID NO: 16690 - protein, 469 aa, synthetic construct; identical to SEQ ID NO: 16599
  REGION 1..469: note = neuraminidase__InfluenzaA__ACO94796

SEQ ID NO: 16691 - protein, 470 aa, synthetic construct
  REGION 1..470: note = neuraminidase__InfluenzaA__ACO94807
MNPNQKIITIGSISIAIGIISLILQIGNIISIWASHSIQTGSQNHTGICNQRIITYENSTWVNNTYVNINNTNVVAEKDKTSVTLAGNSSLCSISGWAIYTKDNSIRIGSKGDVFVIREPFISCSHLECRTFFLTQGALLNDKHSNGTVKDRSPYRALMSCPLGEAPSPYNSRFESVAWSASACHDGMGWLTIGISGPDNGAVAVLKYNGIITETIKSWKKRILRTQESECVCMNGSCFTIMTDGPSNGTASYKIFKIEKGKVTKTIELNAPNFHYEECSCYPDTGTVMCVCRDNWHGSNRPWVSFNQNLDYQIGYICSGVFGDNPRPKDGEGSCNPVTVDGADGVKGFSYKYGNGVWIGRTKSNRLRKGFEMIWDPNGWTNTDSDFSVKQDVVAITDWSGYSGSFVQHPELTGLDCIRPCFWVELVRGLPRENTTIWTSGSSISFCGVNSGTANWSWPDGAELPFTIDK

SEQ ID NO: 16692 - protein, 469 aa, synthetic construct; identical to SEQ ID NO: 16414
  REGION 1..469: note = neuraminidase__InfluenzaA__ACO94818

SEQ ID NO: 16693 - protein, 454 aa, synthetic construct; identical to SEQ ID NO: 15719
  REGION 1..454: note = neuraminidase__InfluenzaA__ACO94829

SEQ ID NO: 16694 - protein, 454 aa, synthetic construct; identical to SEQ ID NO: 15719
  REGION 1..454: note = neuraminidase__InfluenzaA__ACO94840

SEQ ID NO: 16695 - protein, 469 aa, synthetic construct
  REGION 1..469: note = neuraminidase__InfluenzaA__ACO94851
MNPNQKIITIGSVSLTISTICFFMQTAILITTVTLHFKQYEFNSPPNNQVMLCEPTIIERNITEIVYLTNTTIEKEICPKLAEYRNWSKPQCDITGFAPFSKDNSIRLSAGGDIWVTREPYVSCDPDKCYQFALGQGTTLNNVHSNDIVRDRTPYRTLLMNELGVPFHLGTKQVCIAWSSSSCHDGKAWLHVCITGDDKNATASFIYNGRLVDSIVSWSKEILRTQESECVCINGTCTVVMTDGSASGKADTKILFIEEGKIVHTSTLSGSAQHVEECSCYPRYPGVRCVCRDNWKGSNRPIVDINIKDHSIVSSYVCSGLVGDTPRKNDSSSSSHCLDPNNEEGGHGVKGWAFDDGNDVWMGRTISEKSRLGYETFKVIEGWSNPKSKLQINRQVIVDRGNRSGYSGIFSVEGKSCINRCFYVELIRGRKEETEVLWTSNSIVVFCGTSGTYGTGSWPDGADINLMPI

SEQ ID NO: 16696 - protein, 470 aa, synthetic construct; identical to SEQ ID NO: 16632
  REGION 1..470: note = neuraminidase__InfluenzaA__ACO94873

SEQ ID NO: 16697 - protein, 469 aa, synthetic construct
  REGION 1..469: note = neuraminidase__InfluenzaA__ACO94884
MNPNQKIITIGSVSLTIATICFLMQIAILVTTVTLHFKQHECNSPPNNQVMLCEPTIIERNITEIVYLTNTTIEKEMCPKLAEYRNWSKPQCNITGFAPFSKDNSIRLSAGGDIWVTREPYVSCDPDKCYQFALGQGTTLNNGHSNDTVHDRTPYRTLLMNELGVPFHLGTRQVCIAWSSSSCHDGKAWLHVCVTGDDKNATASFIYNGRLVDSIGSWSKKILRTQESECVCINGTCTVVMTDGSASGKADTKILFIEEGKIVHISTLSGSAQHVEECSCYPRYPGVRCVCRDNWKGSNRPIVDINVKDYSIVSSYVCSGLVGDTPRKNDSFSSSHCLDPNNEEGGHGVKGWAFDDGNDVWMGRTISEKLRSGYETFKVIEGWSKPNSKLQINRQVIVERGNRSGYSGIFSVEGKSCINRCFYVELIRGRKEETEVWWTSNSIVVFCGTSGTYGTGSWPDGADINLMPI

SEQ ID NO: 16698 - protein, 469 aa, synthetic construct; identical to SEQ ID NO: 14714
  REGION 1..469: note = neuraminidase__InfluenzaA__ACO94906

SEQ ID NO: 16699 - protein, 469 aa, synthetic construct; identical to SEQ ID NO: 14145
  REGION 1..469: note = neuraminidase__InfluenzaA__ACO94917

SEQ ID NO: 16700 - protein, 469 aa, synthetic construct; identical to SEQ ID NO: 14714
  REGION 1..469: note = neuraminidase__InfluenzaA__ACO94928

SEQ ID NO: 16701 - protein, 469 aa, synthetic construct; identical to SEQ ID NO: 14145
  REGION 1..469: note = neuraminidase__InfluenzaA__ACO94939

SEQ ID NO: 16702 - protein, 469 aa, synthetic construct
  REGION 1..469: note = neuraminidase__InfluenzaA__ACO94950
MNPNQKIITIGSVSLTISTICFLMQIAILITTVTLHFKQYEFNSPPNNQVMLCEPTIIERNITEIVYLTNTTIEKEICPKLAEYRNWSKPQCDITGFAPFSKDNSIRLSAGGDIWVTREPYVSCDPDKCYQFALGQGTTLNNVHSNDTVHDRTPYRTLLMNELGVPFHLGTKQVCIAWSSSSCHDGKAWLHVCVTGDDKNATASFIYNGRLVDSIVSWSKKILRTQESECVCINGTCTVVMTDGSASGKADTKILFIEEGKIVHTSTLSGSAQHVEECSCYPRYPGVRCVCRDNWKGSNRPIVDINIKDYSIVSSYVCSGLVGDTPRKNDSSSSSHCLDPNNEEGGHGVKGWAFDDGNDVWMGRTISEKLRSGYETFKVIEGWSNPNSKLQINRQVIVDRGNRSGYSGIFSVEGKSCINRCFYVELIRGRKEETEVLWTSNSIVVFCGTSGTYGTGSWPDGADINLMPI

SEQ ID NO: 16703 - protein, 469 aa, synthetic construct
  REGION 1..469: note = neuraminidase__InfluenzaA__ACO94961
MNPNQKIITIGSVSLTISTICFFMQIAILITTVTLHFKQYEFNSPPNNQVMLCEPTIIERNITEIVYLTNTTIEKELCPKLAEYRNWSKPQCDITGFAPFSKDNSIRLSAGGDIWVTREPYVSCDPDKCYQFALGQGTTLNNVHSNDTVHDRTPYRTLLMNELGVPFHLGTKQVCIAWSSSSCHDGKAWLHVCVTGDDKNATASFIYNGRLVDSIVSWSKKILRTQESECVCINGTCTVVMTDGSASGKADTKILFIEEGKIVHTSTLSGSAQHVEECSCYPRYPGVRCVCRDNWKGSNRPIVDINIKDYSIVSSYVCSGLVGDTPRKNDSSSSSHCLDPNNEEGGHGVKGWAFDDGNDVWMGRTISEKLRSGYETFKVIEGWSNPNSKLQINRQVIVDRGNRSGYSGIFSVEGKSCINRCFYVELIRGRKEETEVLWTSNSIVVFCGTSGTYGTGSWPDGADINLMPI

SEQ ID NO: 16704 - protein, 469 aa, synthetic construct
  REGION 1..469: note = neuraminidase__InfluenzaA__ACO94972
MNPNQKIITIGSVSLTISTICFFMQIAILITTVTLHFKQYEFNSPPNNQVMLCEPTIIERNITEIVYLTNTTIEKEICPKLAEYRNWSKPQCNITGFAPFSKDNSIRLSAGGDIWVTREPYVSCDPDKCYQFALGQGTTLNNVHSNDTVHDRTPYRTLLMNELGVPFHLGTKQVCIAWSSSSCHDGKAWLHVCVTGDDENATASFIYNGRLVDSVVSWSKKILRTQESECVCINGTCTVVMTDGSASGKADTKILFIEEGKIVHTSTLSGSAQHVEECSCYPRYPGVRCVCRDNWKGSNRPIVDINIKDYSIVSSYVCSGLVGDTPRKNDSSSSSHCLDPNNEEGGHGVKGWAFDDGNDVWMGRTISEKLRSGYETFKVIEGWSNPNSKLQINRQVIVDRGNRSGYSGIFSVEGKSCINRCFYVELIRGRNQETEVLWTSNSIVVFCGTSGTYGTGSWPDGADINLMPI

SEQ ID NO: 16705 - protein, 469 aa, synthetic construct
  REGION 1..469: note = neuraminidase__InfluenzaA__ACO95156
MNPNQKIITIGSVSLTISTICFFMQIAILITTVTLHFKQYEFNSPPNNQVMLCEPTIIERNITEIVYLTNTTIEKETCPKLAEYRNWSKPQCNITGFAPFSKDNSIRLSAGGDIWVTREPYVSCDPDKCYQFALGQGTTLNNVHSNDTVHDRTPYRTLLMNELGVPFHLGTKQVCIAWSSSSCHDGKAWLHVCITGDDKNATASFIYNGRLVDSVVSWSKKILRTQESECVCINGTCTVVMTDGSASGKADTKILFIEEGKIVHTSTLSGSAQHVEECSCYPRYPGVRCVCRDNWKGSNRPIVDINIKDYSIVSSYVCSGLVGDTPRKNDSSSSSHCLDPNNEEGGHGVKGWAFDDGNDVWMGRTISEKLRSGYETFKVIEGWSNPNSKLQINRQVIVDRGNRSGYSGIFSVEGKSCINRCFYVELIRGRNQETEVLWTSNSIVVFCGTSGTYGTGSWPDGADINLMPI

SEQ ID NO: 16706 - protein, 469 aa, synthetic construct; identical to SEQ ID NO: 14327
  REGION 1..469: note = neuraminidase__InfluenzaA__ACO95174

SEQ ID NO: 16707 - protein, 469 aa, synthetic construct; identical to SEQ ID NO: 14327
  REGION 1..469: note = neuraminidase__InfluenzaA__ACO95185

SEQ ID NO: 16708 - protein, 469 aa, synthetic construct
  REGION 1..469: note = neuraminidase__InfluenzaA__ACO95196
MNPNQKIITIGSVSLTISTICFFMQIAILITTVTLHFKQYEFNSPPNNQVMLCEPTIIERNITEIVYLTNTTIEKEICPKLAEYRNWSKPQCNITGFAPFSKDNSIRLSAGGDIWVTREPYVSCDPDKCYQFALGQGTTLNNVHSNDTIHDRTPYRTLLMNELGVPFHLGTKQVCIAWSSSSCHDGKAWLHVCVTGDDKNATASFIYNGRLVDSVVSWSKKILRTQESECVCINGTCTVVMTDGSASGKADTKILFIEEGKIVHTSTLSGSAQHVEECSCYPRYPGVRCVCRDNWKGSNRPIVDINIKDYSIVSSYVCSGLVGDTPRKNDSSSSSHCLDPNNEEGGHGVKGWAFDDGNDVWMGRTISEKLRSGYETFKVIEGWSNPNSKLQINRQVIVDRGNRSGYSGIFSVEGKSCINRCFYVELIRGRNQETEVLWTSNSIVVFCGTSGTYGTGSWPDGADINLMPI

SEQ ID NO: 16709 - protein, 469 aa, synthetic construct; identical to SEQ ID NO: 14327
  REGION 1..469: note = neuraminidase__InfluenzaA__ACO95207

SEQ ID NO: 16710 - protein, 469 aa, synthetic construct; identical to SEQ ID NO: 14327
  REGION 1..469: note = neuraminidase__InfluenzaA__ACO95218

SEQ ID NO: 16711 - protein, 469 aa, synthetic construct; identical to SEQ ID NO: 14330
  REGION 1..469: note = neuraminidase__InfluenzaA__ACO95229

SEQ ID NO: 16712 - protein, 469 aa, synthetic construct; identical to SEQ ID NO: 14712
  REGION 1..469: note = neuraminidase__InfluenzaA__ACO95240

SEQ ID NO: 16713 - protein, 469 aa, synthetic construct; identical to SEQ ID NO: 14573
  REGION 1..469: note = neuraminidase__InfluenzaA__ACO95262

SEQ ID NO: 16714 - protein, 469 aa, synthetic construct; identical to SEQ ID NO: 16511
  REGION 1..469: note = neuraminidase__InfluenzaA__ACO95273

SEQ ID NO: 16715 - protein, 469 aa, synthetic construct; identical to SEQ ID NO: 16603
  REGION 1..469: note = neuraminidase__InfluenzaA__ACO95306

SEQ ID NO: 16716 - protein, 470 aa, synthetic construct
  REGION 1..470: note = neuraminidase__InfluenzaA__ACO95385
MNPNQKIITIGSISIAIGIISLMLQIGNIISIWASHSIQTGSQNNTGICNQRIITYENSTWVNHTYVNINNTNVVAGEDKTSVTLAGNSSLCSISGWAIYTKDNSIRIGSKGDVFVIREPFISCSHLECRTFFLTQGALLNDKHSNGTVKDRSPYRALMSCPLGEAPSPYNSKFESVAWSASACHDGMGWLTIGISGPDNGAVAVLKYNGIITGTIKSWKKQILRTQESECVCMNGSCFTIMTDGPSDKAASYKIFKIEKGKVTKSIELNAPNFHYEECSCYPDTGIVMCVCRDNWHGSNRPWVSFNQNLDYQIGYICSGVFGDNPRPEDGEGSCNPVTVDGANGVKGFSYKYDNGVWIGRTKSNRLRKGFEMIWDPNGWTNTDSDFSVKQDVVAITDWSGYSGSFVQHPELTGLDCIRPCFWVELVRGLPRENTTIWTSGSSISFCGVNSDTANWSWPDGAELPFTIDK

SEQ ID NO: 16717 - protein, 470 aa, synthetic construct; identical to SEQ ID NO: 16632
  REGION 1..470: note = neuraminidase__InfluenzaA__ACO95407

SEQ ID NO: 16718 - protein, 470 aa, synthetic construct; identical to SEQ ID NO: 16632
  REGION 1..470: note = neuraminidase__InfluenzaA__ACO95418

SEQ ID NO: 16719 - protein, 469 aa, synthetic construct; identical to SEQ ID NO: 14145
  REGION 1..469: note = neuraminidase__InfluenzaA__ACO95429

SEQ ID NO: 16720 - protein, 469 aa, synthetic construct; identical to SEQ ID NO: 14714
  REGION 1..469: note = neuraminidase__InfluenzaA__ACO95440

SEQ ID NO: 16721 - protein, 469 aa, synthetic construct
  REGION 1..469: note = neuraminidase__InfluenzaA__ACO95462
MNPNQKIITIGSVSLTISTICFFMQIAILITTVTLHFKQYEFNSPPNNQVMLCEPTIIERNITEIVYLTNTTIEKEICPKLAEYRNWSKPQCNITGFAPFSKDNSIRLSAGGDIWVTREPYVSCDPDKCYQFALGQGTTLNNVHSNDTVHDRTPYRTLLMNELGVPFHLGTKQVCIAWSSSSCHDGKAWLHVCVTGDDKNATASFIYNGRLVDSIVSWSKEILRTQESECVCINGTCTVVMTDGSASGKADTKILFIEEGKIVHTSTLSGSAQHVEECSCYPRYPGVRCVCRDNWKGSNRPIVDINIKDYSIVSSYVCSGLVGDTPRKNDSSSSSHCLDPNNEEGGHGVKGWAFDDGNDVWMGRTISEKLRSGYETFKVIEGWSNPNSKLQINRQVIVDRGNRSGYSGIFSVEGKSCINRCFYVELIRGRKEETEVLWTSNSIVVFCGTSGTYGTGSWPDGADINLMLI

SEQ ID NO: 16722 - protein, 469 aa, synthetic construct; identical to SEQ ID NO: 14712
  REGION 1..469: note = neuraminidase__InfluenzaA__ACO95484

SEQ ID NO: 16723 - protein, 469 aa, synthetic construct; identical to SEQ ID NO: 14712
  REGION 1..469: note = neuraminidase__InfluenzaA__ACO95495

SEQ ID NO: 16724 - protein, 469 aa, synthetic construct; identical to SEQ ID NO: 14712
  REGION 1..469: note = neuraminidase__InfluenzaA__ACO95506

SEQ ID NO: 16725 - protein, 469 aa, synthetic construct
  REGION 1..469: note = neuraminidase__InfluenzaA__ACO95517
MNPNQKIITIGSVSLTISTICFFMQIAILITTVTLHFKQYEFNSPPNNQVMLCEPTIIERNITEIVYLTNTTIEKEICPKLAEYRNWSKPQCNITGFAPFSKDNSIRLSAGGDIWVTREPYVSCDPDKCYQFALGQGTTLNNVHSNDTVHDRTPYRTLLMNELGVPFHLGTKQVCIAWSSSSCHDGKAWLHVCVTGDDKNATASFIYNGRLVDSIVSWSKEILRTQESECVCINGTCTVVMTDGSASGKADTKILFIEEGKIVHTSTLSGSAQHVEECSCYPRYPGVRCVCRDNWKGSNRPIVDINIKDYSIVSSYVCSGLVGDTPRKNDSSSSSHCLDPNNEEGGHGVKGWAFDDGNDVWMGRTISEKLRLGYETFKVIEGWSNPNSKLQINRQVIVDRGNRSGYSGIFSVEGKSCINRCFYVELIRGRKEETEVLWTSNSIVVFCGTSGTYGTGSWPDGADINLMPI

SEQ ID NO: 16726 - protein, 469 aa, synthetic construct
  REGION 1..469: note = neuraminidase__InfluenzaA__ACO95539
MNPNQKIITIGSVSLTISTICFFMQIAILITTVTLHFKQYEFNSPPNNQVMLCEPTIIERNITEIVYLTNTTIEKEICPKLAEYRNWSKPQCNITGFAPFSKDNSIRLSAGGDIWVTREPYVSCDPDKCYQFALGQGTTLNNVHSNDTVHDRTPYRTLLMNELGVPFHLGTKQVCIAWSSSSCHDGKAWLHVCVTGDDKNATASFIYNGRLVDSIVSWSKEILRTQESECVCINGTCTVVMTDGSASGKANTKILFIEEGKIVHTSTLSGSAQHVEECSCYPRYPGVRCVCRDNWKGSNRPIVDINIKDYSIVSSYVCSGLVGDTPRKNDSSSSSHCLDPNNEEGGHGVKGWAFDDGNDVWMGRTISEKLRSGYETFKVIEGWSNPNSKLQINRQVIVDRGNRSGYSGIFSVEGKSCINRCFYVELIRGRKEETEVLWTSNSIVVFCGTSGTYGTGSWPDGADINLMPI

SEQ ID NO: 16727 - protein, 470 aa, synthetic construct
  REGION 1..470: note = neuraminidase__InfluenzaA__ACP20223
MNPNQKIITIGSISIAIGIISLMLQIGNIISIWASHSIQTGSQNNTGICNQRIITYENSTWVNHTYVNINNTNVVAGEDKTSVTLAGNSSLCSISGWAIYTKDNSIRIGSKGDVFVIREPFISCSHLECRTFFLTQGALLNDKHSNGTVKDRSPYRALMSCPLGEAPSPYNSKFESVAWSASACHDGMGWLTIGISGPDNGAVAVLKYNGIITGTIKSWKKQILRTQESECVCMNGSCFTIMTDGPSNKAASYKIFKIEKGKVTKSIELNAPNFHYEECSCYPDTGIVMCVCRDNWHGSNRPWVSFNQNLDYQIGYICSGVFGDNPRPEDGEGSCNPVTVDGANGVKGFSYKYDNGVWIGRTKSNRLRKGFEMIWDPNGWTNTDSDFSVKQDVVAVTDWSGYSGSFVQHPELTGLDCIRPCFWVELVRGLPRENTTIWTSGSSISFCGVNSDTANWSWPDGAELPFTIDK

SEQ ID NO: 16728 - protein, 469 aa, synthetic construct
  REGION 1..469: note = neuraminidase__InfluenzaA__ACP41952
MNPNQKIITIGSVCMTIGMANLILQIGNIISIWISHSIQLGNQNQIETCNQSVITYENNTWVNQTYVNISNTNFAAGQSVVSVKLAGNSSLCPVSGWAIYSKDNSVRIGSKGDVFVIREPFISCSPLECRTFFLTQGALLNDKHSNGTIKDRSPYRTLMSCPIGEVPSPYNSRFESVAWSASACHDGINWLTIGISGPDNGAVAVLKYNGIITDTIKSWRNNILRTQESECACVNGSCFTVMTDGPSNGQASYKIFRIEKGKIVKSVEMNAPNYHYEECSCYPDSSEITCVCRDNWHGSNRPWVSFNQNLEYQIGYICSGIFGDNPRPNDKTGSCGPVSSNGANGVKGFSFKYGNGVWIGRTKSISSRNGFEMIWDPNGWTGTDNNFSIKQDIVGINEWSGYSGSFVQHPELTGLDCIRPCFWVELIRGRPKENTIWTSGSSISFCGVNSDTVGWSWPDGAELPFTIDK

SEQ ID NO: 16729 - protein, 469 aa, synthetic construct; identical to SEQ ID NO: 16728
  REGION 1..469: note = neuraminidase__InfluenzaA__ACP44158

SEQ ID NO: 16730 - protein, 470 aa, synthetic construct
  REGION 1..470: note = neuraminidase__InfluenzaA__ACP44195
MNPNQKIITIGSISIAIGIISLMLQIGNIISIWASHSIQTGSQNNTGICNQRIITYENSTWVNHTYVNINNTNVVAGEDKTSVTLAGNSSLCSISGWAIYTKDNSIRIGSKGDVFVIREPFISCSHLECRTFFLTQGALLNDKHSNGTVKDRSPYRALMSCPLGEAPSPYNSKFESVAWSASACHDGMGWLTIGISGPDNGAVAVLKYNGIITGTIKSWKKQILRTQESECVCMNGSCFTIMTDGPSDKAASYKIFKIEKGKVTKSIELNAPNFHYEECSCYPDTGIVMCVCRDNWHGSNRPWVSFNQNLDYQIGYICSGVFGDNPRPEDGEGSCNPVTVDGANGVKGFSYKYDNGVWIGRTKSNRLRKGFEMIWDPNGWTNTDSDFSVKQDVVAITDWSGYSGSFVQHPELTGLNCIRPCFWVELVRGLPRENTTIWTSGSSISFCGVNSDTANWSWPDGAELPFTIDK

SEQ ID NO: 16731 - protein, 470 aa, synthetic construct; identical to SEQ ID NO: 16632
  REGION 1..470: note = neuraminidase__InfluenzaA__ACP44217

SEQ ID NO: 16732 - protein, 470 aa, synthetic construct; identical to SEQ ID NO: 16632
  REGION 1..470: note = neuraminidase__InfluenzaA__ACP44228

SEQ ID NO: 16733 - protein, 469 aa, synthetic construct; identical to SEQ ID NO: 14714
  REGION 1..469: note = neuraminidase__InfluenzaA__ACP44239

SEQ ID NO: 16734 - protein, 469 aa, synthetic construct
  REGION 1..469: note = neuraminidase__InfluenzaA__ACP44250
MNPNQKIITIGSVSLTISTICFFMQIAILMTTVTLHFKQYEFNSPPNNQVMLCEPTIIERNITEIVYLTNTTIEKEICPKLAEYRNWSKPQCDITGFAPFSKDNSIRLSAGGDIWVTREPYVSCDPDKCYQFALGQGTTLNNVHSNDTVHDRTPYRTLLMNELGVPFHLGTKQVCIAWSSSSCHDGKAWLHVCVTGDDKNATASFIYNGRLVDSIVSWSKEILRTQESECVCINGTCTVVMTDGSASGKADTKILFIEEGKIVHTSTLSGSAQHVEECSCYPRYPGVRCVCRDNWKGSNRPIVDINIKDYSIVSSYVCSGLVGDTPRKNDSSSSSHCLDPNNEEGGHGVKGWAFDDGNDVWMGRTISEKLRSGYETFKVIEGWSNPNSKLQINRQVIVDRGNRSGYSGIFSVEGKSCINRCFYVELIRGRKEETEVLWTSNSIVVFCGTSGTYGTGSWPDGADINLMPI

SEQ ID NO: 16735 - protein, 469 aa, synthetic construct
  REGION 1..469: note = neuraminidase__InfluenzaA__ACP44261
MNPNQKIITIGSVSLTISTICFFMQIAILITTVTLHFKQYEFNSPPNNQVMLCEPTIIERNITEIVYLTNTTIEKEICPKLAEYRNWSKPQCNITGFAPFSKDNSIRLSAGGDIWVTREPYVSCDPDKCYQFALGQGTTLNNMHSNDTVHDRTPYRTLLMNELGVPFHLGTKQVCIAWSSSSCHDGKAWLHVCVTGDDKNATASFIYNGRLVDSIVSWSKEILRTQESECVCINGTCTVVMTDGSASGKADTKILFIEEGKIVHTSTLSGSAQHVEECSCYPRYPGVRCVCRDNWKGSNRPIVDINIKDYSIVSSYVCSGLVGDTPRKNDSSSSSHCLDPNNEEGGHGVKGWAFDDGNDVWMGRTISEKLRSGYETFKVIEGWSNPNSKLQINRQVIVDRGNRSGYSGIFSVEGKSCINRCFYVELIRGRKEETEVLWTSNSIVVFCGTSGTYGTGSWPDGADINLMPI

SEQ ID NO: 16736 - protein, 469 aa, synthetic construct
  REGION 1..469: note = neuraminidase__InfluenzaA__ACP44272
MNPNQKIITIGSVSLTISTICFFMQIAILITTVTLHFKQYEFNSPPNNQVMLCEPTIIERNITEIVYLTNTTIEKEICPKLAEYRNWSKPQCNITGFAPFSKDNSIRLSAGGDIWVTREPYVSCDPDKCYQFALGQGTTLNNVHSNDTVHDRTPYRTLLMNELGVPFHLGTKQVCIAWSSSSCHDGKAWLHVCVTGDDKNATASFIYNGRLVDSIVSWSKEILRTQESECVCINGTCTVIMTDGSASGKADTKILFIEEGKIVHTSTLSGSAQHVEECSCYPRYPGVRCVCRDNWKGSNRPIVDINIKDYSIVSSYVCSGLVGDTPRKNDSSSSSHCLDPNNEEGGHGVKGWAFDDGNDVWMGRTISEKLRSGYETFKVIEGWSNPNSKLQINRQVIVDRGNRSGYSGIFSVEGKSCINRCFYVELIRGRKEETEVLWTSNSIVVFCGTSGTYGTGSWPDGADINLMPI

SEQ ID NO: 16737 - protein, 469 aa, synthetic construct; identical to SEQ ID NO: 16728
  REGION 1..469: note = neuraminidase__InfluenzaA__ACQ55360

SEQ ID NO: 16738 - protein, 469 aa, synthetic construct
  REGION 1..469: note = neuraminidase__InfluenzaA__ACQ63236
MNPNQKIITIGSVCMTIGMANLILQIGNIISIWISHSIQLGNQNQIETCNQSVITYENNTWVNQTYVNISNTNFAAGQSVVSVKLAGNSSLCPVSGWAIYSKDNSIRIGSKGDVFVIREPFISCSPLECRTFFLTQGALLNDKHSNGTIKDRSPYRTLMSCPIGEVPSPYNSRFESVAWSASACHDGINWLTIGISGPDNGAVAVLKYNGIITDTIKSWRNNILRTQESECACVNGSCFTVMTDGPSDGQASYKIFRIEKGKIVKSVEMNAPNYHYEECSCYPDSSEITCVCRDNWHGSNRPWVSFNQNLEYQIGYICSGIFGDNPRPNDKTGSCGPVSSNGANGVKGFSFKYGNGVWIGRTKSISSRNGFEMIWDPNGWTGTDNNFSIKQDIVGINEWSGYSGSFVQHPELTGLDCIRPCFWVELIRGRPKENTIWTSGSSISFCGVNSDTVGWSWPDGAELPFTIDK

SEQ ID NO: 16739 - protein, 469 aa, synthetic construct; identical to SEQ ID NO: 16738
  REGION 1..469: note = neuraminidase__InfluenzaA__ACQ63242

SEQ ID NO: 16740 - protein, 469 aa, synthetic construct; identical to SEQ ID NO: 16738
  REGION 1..469: note = neuraminidase__InfluenzaA__ACQ63253

SEQ ID NO: 16741 - protein, 469 aa, synthetic construct; identical to SEQ ID NO: 16738
  REGION 1..469: note = neuraminidase__InfluenzaA__ACQ63262

SEQ ID NO: 16742 - protein, 469 aa, synthetic construct
  REGION 1..469: note = neuraminidase__InfluenzaA__ACQ65694
MNPNQKIITIGSVSLTISTICFFMQIAILITTVTLHFKQYEFNSPPNNQVMLCEPTIIERNITEIVYLTNTTIEKEICPKLAEYRKWSKPQCNITGFAPFSKDNSIRLSAGGDIWVTREPYVSCDPDKCYQFALGQGTTLNNVHSNDTVRDRTPYRTLLMNELGVPFHLGTKQVCIAWSSSSCHDGKAWLHVCVTGDDKNATASFIYNGRLVDSIVSWSKDILRTQESECVCINGTCTVVMTDGSASGKADTKILFIEEGKIVHTSTLSGSAQHVEECSCYPRYPGVRCVCRDNWRGSNRPIVDINMKDYSIVSSYVCSGLVGDTPRKNDSSSSGHCLDPNNEEGGHGVKGWAFDDGNDVWMGRTISEKLRSGYETFKVIEGWSNPNSKLQINRQVIVDRGNRSGYSGIFSVEGKSCINRCFYVELIRGRKEETEVLWTSNSIVVFCGTSGTYGTGSWPDGADINLMPI

SEQ ID NO: 16743 - protein, 469 aa, synthetic construct
  REGION 1..469: note = neuraminidase__InfluenzaA__ACQ65705
MNPNQKIITIGSVSLTISTICFFMQIAILITTVTLHFKQYEFNSPPNNQVMLCEPTIIERNITEIVYLTNTTIEKEICPKLAEYRKWSKPQCNITGFAPFSKDNSIRLSAGGDIWVTREPYVSCDPDKCYQFALGQGTTLNNVHSNDTVRDRTPYRTLLMNELGVPFHLGTKQVCIAWSSSSCHDGKAWLHVCVTGDDKNATASFIYNGRLVDSIVSWSKEILRTQESECVCINGTCTVVMTDGSASGKADTKILFIEEGKIVHTSTLSGSAQHVEECSCYPRYPGVRCVCRDNWRGSNRPIVDINMKDYSIVSSYVCSGLVGDTPRKNDSSSSGHCLDPNNEEGGHGVKGWAFDDGNDVWMGRTISEKLRSGYETFKVIEGWSNPNSKLQINRQVIVDRGNRSGYSGIFSVEGKSCINRCFYVELIRGRKEETEVLWTSNSIVVFCGTSGTYGTGSWPDGADINLMPI

SEQ ID NO: 16744 - protein, 469 aa, synthetic construct; identical to SEQ ID NO: 16512
  REGION 1..469: note = neuraminidase__InfluenzaA__ACQ65716

SEQ ID NO: 16745 - protein, 469 aa, synthetic construct; identical to SEQ ID NO: 16512
  REGION 1..469: note = neuraminidase__InfluenzaA__ACQ65727

SEQ ID NO: 16746 - protein, 469 aa, synthetic construct; identical to SEQ ID NO: 16599
  REGION 1..469: note = neuraminidase__InfluenzaA__ACQ65739

SEQ ID NO: 16747 - protein, 469 aa, synthetic construct
  REGION 1..469: note = neuraminidase__InfluenzaA__ACQ65750
MNPNQKIITIGSVSLTISTICFFMQTAILITTVTLHFKQYEFNSPPNNQVMLCEPTIIERNITEIVYLTNTTIEKEICPKLAEYRNWSKPQCDITGFAPFSKDNSIRLSAGGDIWVTREPYVSCDPDKCYQFALGQGTTLNNVHSNDTVRNRTPYRTLLMNELGVPFHLGTKQVCIAWSSSSCHDGKAWLHVCITGDDKNATASFIYNGRLVDSIVSWSKEILRTQESECVCINGTCTVVMTDGSASGKADTKILFIEEGKIVHTSTLSGSAQHVEECSCYPRYPGVRCVCRDNWKGSNRPIVDINIKDHSIVSSYVCSGLVGDTPRKNDSSSSSHCLDPNNEEGGHGVKGWAFDDGNDVWMGRTISEKSRLGYETFKVIEGWSNPKSKLQINRQVIVDRGNRSGYSGIFSVEGKSCINRCFYVELIRGRKEETEVLWTSNSIVVFCGTSGTYGTGSWPDGADINLMPI

SEQ ID NO: 16748 - protein, 470 aa, synthetic construct; identical to SEQ ID NO: 16632
  REGION 1..470: note = neuraminidase__InfluenzaA__ACQ65761

SEQ ID NO: 16749 - protein, 469 aa, synthetic construct; identical to SEQ ID NO: 16728
  REGION 1..469: note = neuraminidase__InfluenzaA__ACQ73394

SEQ ID NO: 16750 - protein, 469 aa, synthetic construct; identical to SEQ ID NO: 16728
  REGION 1..469: note = neuraminidase__InfluenzaA__ACQ73395

SEQ ID NO: 16751 - protein, 469 aa, synthetic construct; identical to SEQ ID NO: 16738
  REGION 1..469: note = neuraminidase__InfluenzaA__ACQ73396

SEQ ID NO: 16752 - protein, 469 aa, synthetic construct; identical to SEQ ID NO: 16738
  REGION 1..469: note = neuraminidase__InfluenzaA__ACQ76291

SEQ ID NO: 16753 - protein, 469 aa, synthetic construct
  REGION 1..469: note = neuraminidase__InfluenzaA__ACQ76298
MNPNQKIITIGSVCMTIGMANLILQIGNIISIWISHSIQLGNQNQIETCNQSVITYENNTWVNQTYVNISNTNFAAGQSVVSVKLAGNSSLCPVSGWAIYSKDNSVRIGSKGDVFVIREPFISCSPLECRTFFLTQGALLNDKHSNGTIKDRSPYRTLMSCPIGEVPSPYNSRFESVAWSASACHDGINWLTIGISGPDNGAVAVLKYNGIITDTIKSWRNNILRTQESECACVNGSCFTIMTDGPSNGQASYKIFRIEKGKIVKSVEMNAPNYHYEECSCYPDSSEITCVCRDNWHGSNRPWVSFNQNLEYQIGYICSGIFGDNPRPNDKTGSCGPVSSNGANGVKGFSFKYGNGVWIGRTKSISSRNGFEMIWDPNGWTGTDNNFSIKQDIVGINEWSGYSGSFVQHPELTGLDCIRPCFWVELIRGRPKENTIWTSGSSISFCGVNSDTVGWSWPDGAELPFTIDK

SEQ ID NO: 16754 - protein, 469 aa, synthetic construct; identical to SEQ ID NO: 16738
  REGION 1..469: note = neuraminidase__InfluenzaA__ACQ76308

SEQ ID NO: 16755 - protein, 469 aa, synthetic construct; identical to SEQ ID NO: 16738
  REGION 1..469: note = neuraminidase__InfluenzaA__ACQ76316

SEQ ID NO: 16756 - protein, 469 aa, synthetic construct; identical to SEQ ID NO: 16728
  REGION 1..469: note = neuraminidase__InfluenzaA__ACQ76322

SEQ ID NO: 16757 - protein, 469 aa, synthetic construct; identical to SEQ ID NO: 16728
  REGION 1..469: note = neuraminidase__InfluenzaA__ACQ76328

SEQ ID NO: 16758 - protein, 469 aa, synthetic construct; identical to SEQ ID NO: 16728
  REGION 1..469: note = neuraminidase__InfluenzaA__ACQ76335

SEQ ID NO: 16759 - protein, 469 aa, synthetic construct; identical to SEQ ID NO: 16728
  REGION 1..469: note = neuraminidase__InfluenzaA__ACQ76342

SEQ ID NO: 16760 - protein, 469 aa, synthetic construct; identical to SEQ ID NO: 16728
  REGION 1..469: note = neuraminidase__InfluenzaA__ACQ76351

SEQ ID NO: 16761 - protein, 469 aa, synthetic construct; identical to SEQ ID NO: 16728
  REGION 1..469: note = neuraminidase__InfluenzaA__ACQ76359

SEQ ID NO: 16762 - protein, 469 aa, synthetic construct; identical to SEQ ID NO: 16738
  REGION 1..469: note = neuraminidase__InfluenzaA__ACQ76364

SEQ ID NO: 16763 - protein, 469 aa, synthetic construct; identical to SEQ ID NO: 16738
  REGION 1..469: note = neuraminidase__InfluenzaA__ACQ76367

SEQ ID NO: 16764 - protein, 469 aa, synthetic construct
  REGION 1..469: note = neuraminidase__InfluenzaA__ACQ76379
MNPNQKIITIGSVCMTIGMANLILQIGNIISIWISHSIQLGNQNQIETCNQSVITYKNNTWVNQTYVNISNTNFAAGQSVVSVKLAGNSSLCPVSGWAIYSKDNSVRIGSKGDVFVIREPFISCSPLECRTFFLTQGALLNDKHSNGTIKDRSPYRTLMSCPIGEVPSPYNSRFESVAWSASACHDGINWLTIGISGPDNGAVAVLKYNGIITDTIKSWRNNILRTQESECACVNGSCFTVMTDGPSNGQASYKIFRIEKGKIVKSVEMNAPNYHYEECSCYPDSSEITCVCRDNWHGSNRPWVSFNQNLEYQIGYICSGIFGDNPRPNDKTGSCGPVSSNGANGVKGFSFKYGNGVWIGRTKSISSRNGFEMIWDPNGWTGTDNNFSIKQDIVGINEWSGYSGSFVQHPELTGLDCIRPCFWVELIRGRPKENTIWTSGSSISFCGVNSDTVGWSWPDGAELPFTIDK

SEQ ID NO: 16765 - protein, 469 aa, synthetic construct; identical to SEQ ID NO: 16738
  REGION 1..469: note = neuraminidase__InfluenzaA__ACQ76385

SEQ ID NO: 16766 - protein, 469 aa, synthetic construct; identical to SEQ ID NO: 16738
  REGION 1..469: note = neuraminidase__InfluenzaA__ACQ76388

SEQ ID NO: 16767 - protein, 469 aa, synthetic construct; identical to SEQ ID NO: 16738
  REGION 1..469: note = neuraminidase__InfluenzaA__ACQ76403

SEQ ID NO: 16768 - protein, 469 aa, synthetic construct
  REGION 1..469: note = neuraminidase__InfluenzaA__ACQ76407
MNPNQKIITIGSVCMTIGMANLILQIGNIISIWISHSIQLGNQNQIETCNQSVITYENNTWVNQTYVNISNTNFAAGQSVVSVKLAGNSSLCPVGGWAIYSKDNSVRIGSKGDVFVIREPFISCSPLECRTFFLTQGALLNDKHSNGTIKDRSPYRTLMSCPIGEVPSPYNSRFESVAWSASACHDGINWLTIGISGPDNGAVAVLKYNGIITDTIKSWRNNILRTQESECACVNGSCFTVMTDGPSNGQASYKIFRIEKGKIVKSVEMNAPNYHYEECSCYPDSSEITCVCRDNWHGSNRPWVSFNQNLEYQIGYICSGIFGDNPRPNDKTGSCGPVSSNGANGVKGFSFKYGNGVWIGRTKSISSRNGFEMIWDPNGWTGTDNNFSIKQDIVGINEWSGYSGSFVQHPELTGLDCIRPCFWVELIRGRPKENTIWTSGSSISFCGVNSDTVGWSWPDGAELPFTIDK

SEQ ID NO: 16769 - protein, 469 aa, synthetic construct
  REGION 1..469: note = neuraminidase__InfluenzaA__ACQ77603
MNPNQKIITIGSVSLTIATICFLMQIAILVTTVTLHFKQYECNSPPNNQVMLCEPTIIERNITEIVYLTNTTIEKEICPKLAEYRNWSKPQCNITGFAPFSKDNSIRLSAGGDIWVTREPYVSCDPDKCYQFALGQGTTLNNGHSNDTVHDRTPYRTLLMNELGVPFHLGTKQVCIAWSSSSCHDGKAWLHVCVTGDDENATASFIYNGRLVDSIGSWSKKILRTQESECVCINGTCTVVMTDGSASGKADTKILFIEEGKIVHTSPLSGSAQHVEECSCYPRYPGVRCVCRDNWKGSNRPIVDINVKDYSIVSSYVCSGLVGDTPRKNDSSSSSHCLDPNNEEGGHGVKGWAFDDGNDVWMGRTISEKSRSGYETFKVIEGWSKPNSKLQINRQVIVDRGNRSGYSGIFSVEGKSCINRCFYVELIRGRKQETEVLWTSNSIVVFCGTSGTYGTGSWPDGADINLMPI

SEQ ID NO: 16770 - protein, 469 aa, synthetic construct; identical to SEQ ID NO: 16728
  REGION 1..469: note = neuraminidase__InfluenzaA__ACQ83309

SEQ ID NO: 16771 - protein, 469 aa, synthetic construct; identical to SEQ ID NO: 16728
  REGION 1..469: note = neuraminidase__InfluenzaA__ACQ84460

SEQ ID NO: 16772 - protein, 469 aa, synthetic construct; identical to SEQ ID NO: 16728
  REGION 1..469: note = neuraminidase__InfluenzaA__ACQ84470

SEQ ID NO: 16773 - protein, 469 aa, synthetic construct
  REGION 1..469: note = neuraminidase__InfluenzaA__ACQ84480
MNTNQRIITIGTVCLIVGIVSLLLQIGNIVSLWISHSIKTGEKNHSEICNQNIITYENKTWVNQTYVNISNTNIADGQGVTSIILAGNSSLCPISGWAIYSKDNSIRIGSKGDIFVIREPFISCSHLECRTFFLTQGALLNDRHSNGTVKDRSPYRTLMSCPTGEAPSPYNSRFESVAWSASACHDGMGWLTIGISGPDNGAVAVLKYNGIITDTIKSWRNKILRTQESECVCINGSCFTIMTDGPSNGQASYKIFKMEKGKIIKSVELDAPNYHYEECSCYPDTGKVVCVCRDNWHASNRPWVSFDQNLDYQIGYICSGVFGDNPRSNDGKGNCGPVLSNGANGVKGFSFRYGNGVWIGRTKSISSRSGFEMIWDPNGWTETDSSFSIKQDIIALTDWSGYSGSFVQHPELTGMNCIRPCFWVELIRGQPKESTIWTSGSSISFCGVDSETASWSWPDGADLPFTIDK

SEQ ID NO: 16774 - protein, 469 aa, synthetic construct
  REGION 1..469: note = neuraminidase__InfluenzaA__ACQ89891
MNPNQKIITIGSVCMTIGMANLILQIGNIISIWISHSIQLGNQNQIETCNQSVITYENNTWVNQTYVNISNTNFAAGQSVVSVKLAGNSSLCPVSGWAIYSKDNSIRIGSKGDVFVIREPFISCSPLECRTFFLTQGALLNDKHSNGTIKDRSPYRTLMSCPIGEVPSPYNSRFESVAWSASACHDGINWLTIGISGPDNGAVAVLKYNGIITDTIKSWRNNILRTQESECACVNGSCFTVMTDGPSNGQASYKIFRIEKGKIVKSVEMNAPNYHYEECSCYPDSSEITCVCRDNWHGSNRPWVSFNQNLEYQIGYICRGIFGDNPRPNDKTGSCGPVSSNGANGVKGFSFKYGNGVWIGRTKSISSRNGFEMIWDPNGWTGTDNNFSIKQDIVGINEWSGYSGSFVQHPELTGLDCIRPCFWVELIRGRPKENTIWTSGSSISFCGVNSDTVGWSWPDGAELPFTIDK

SEQ ID NO: 16775 - protein, 469 aa, synthetic construct; identical to SEQ ID NO: 16728
  REGION 1..469: note = neuraminidase__InfluenzaA__ACQ89918

SEQ ID NO: 16776 - protein, 469 aa, synthetic construct
  REGION 1..469: note = neuraminidase__InfluenzaA__ACQ89919
MNPNQKIITIGSVCMTIGMANLILQIGNIISIWISRSIQLGNQNQIETCNQSVITYENNTWVNQTYVNISNTNFAAGQSVVSVKLAGNSSLCPVSGWAIYSKDNSVRIGSKGDVFVIREPFISCSPLECRTFFLTQGALLNDKHSNGTIKDRSPYRTLMSCPIGEVPSPYNSRFESVAWSASACHDGINWLTIGISGPDNGAVAVLKYNGIITDTIKSWRNNILRTQESECACVNGSCFTVMTDGPSNGQASYKIFRIEKGKIVKSVEMNAPNYHYEECSCYPDSSEITCVCRDNWHGSNRPWVSFNQNLEYQIGYICSGIFGDNPRPNDKTGSCGPVSSNGANGVKGFSFKYGNGVWIGRTKSISSRNGFEMIWDPNGWTGTDNNFSIKQDIVGINEWSGYSGSFVQHPELTGLDCIRPCFWVELIRGRPKENTIWTSGSSISFCGVNSDTVGWSWPDGAELPFTIDK

SEQ ID NO: 16777 - protein, 469 aa, synthetic construct; identical to SEQ ID NO: 16738
  REGION 1..469: note = neuraminidase__InfluenzaA__ACQ89920

SEQ ID NO: 16778 - protein, 469 aa, synthetic construct; identical to SEQ ID NO: 16738
  REGION 1..469: note = neuraminidase__InfluenzaA__ACQ89921

SEQ ID NO: 16779 - protein, 469 aa, synthetic construct; identical to SEQ ID NO: 16728
  REGION 1..469: note = neuraminidase__InfluenzaA__ACQ89922

SEQ ID NO: 16780 - protein, 469 aa, synthetic construct; identical to SEQ ID NO: 16738
  REGION 1..469: note = neuraminidase__InfluenzaA__ACQ89923

SEQ ID NO: 16781 - protein, 469 aa, synthetic construct; identical to SEQ ID NO: 16728
  REGION 1..469: note = neuraminidase__InfluenzaA__ACQ99623

SEQ ID NO: 16782 - protein, 469 aa, synthetic construct; identical to SEQ ID NO: 16738
  REGION 1..469: note = neuraminidase__InfluenzaA__ACQ99624

SEQ ID NO: 16783 - protein, 469 aa, synthetic construct; identical to SEQ ID NO: 16728
  REGION 1..469: note = neuraminidase__InfluenzaA__ACQ99626

SEQ ID NO: 16784 - protein, 469 aa, synthetic construct; identical to SEQ ID NO: 16728
  REGION 1..469: note = neuraminidase__InfluenzaA__ACQ99627

SEQ ID NO: 16785 - protein, 469 aa, synthetic construct; identical to SEQ ID NO: 16728
  REGION 1..469: note = neuraminidase__InfluenzaA__ACQ99628

SEQ ID NO: 16786 - protein, 469 aa, synthetic construct; identical to SEQ ID NO: 16728
  REGION 1..469: note = neuraminidase__InfluenzaA__ACQ99629

SEQ ID NO: 16787 - protein, 469 aa, synthetic construct; identical to SEQ ID NO: 16728
  REGION 1..469: note = neuraminidase__InfluenzaA__ACQ99630

SEQ ID NO: 16788 - protein, 469 aa, synthetic construct; identical to SEQ ID NO: 16738
  REGION 1..469: note = neuraminidase__InfluenzaA__ACQ99632

SEQ ID NO: 16789 - protein, 469 aa, synthetic construct; identical to SEQ ID NO: 16738
  REGION 1..469: note = neuraminidase__InfluenzaA__ACQ99633

SEQ ID NO: 16790 - protein, 469 aa, synthetic construct; identical to SEQ ID NO: 16728
  REGION 1..469: note = neuraminidase__InfluenzaA__ACQ99635

SEQ ID NO: 16791 - protein, 469 aa, synthetic construct; identical to SEQ ID NO: 16728
  REGION 1..469: note = neuraminidase__InfluenzaA__ACQ99636

SEQ ID NO: 16792 - protein, 469 aa, synthetic construct
  REGION 1..469: note = neuraminidase__InfluenzaA__ACQ99684
MNPNQKIITIGSVCMTIGMANLILQIGNIISIWISHSIQLGNQNQIETCNQSVITYENNTWVNQTYVNISNTNFAAGQSVVSVKLAGNSSLCPVSGWAIYSKDNSIRIGSKGDVFVIREPFISCSPLECRTFFLTQGALLNDKHSNGTIKDRSPYRTLMSCPIGEVPSPYNSRFESVAWSASACHDGINWLTIGISGPDNGAVAVLKYNGIITDTIKSWRNNILRTQESECACVNGSCFTVMTDGPSDEQASYKIFRIEKGKIVKSVEMNAPNYHYEECSCYPDSSEITCVCRDNWHGSNRPWVSFNQNLEYQIGYICSGIFGDNPRPNDKTGSCGPVSSNGANGVKGFSFKYGNGVWIGRTKSISSRNGFEMIWDPNGWTGTDNNFSIKQDIVGINEWSGYSGSFVQHPELTGLDCIRPCFWVELIRGRPKENTIWTSGSSISFCGVNSDTVGWSWPDGAELPFTIDK

SEQ ID NO: 16793 - protein, 469 aa, synthetic construct
  REGION 1..469: note = neuraminidase__InfluenzaA__ACQ99824
MNTNQRIITIGTICLIVGIISLLLQIGNIILLWMSHSIQTGEKSHPKVCNQSVITYENNTWVNQTYVNISNTNIAAGQGVTPIILAGNSSLCPISGWAIYSKDNSIRIGSKGDIFVMREPFISCSHLECRTFFLTQGALLNDRHSNGTVKDRSPYRTLMSCPIGEAPSPYNSRFESVAWSASACHDGMGWLTIGISGPDNGAVAVLKYNGIITDTIKSWRNKILRTQESECVCINGSCFTIMTDGPSNGQASYKLFKMEKGKIIKSIELDAPNYHYEECSCYPDTGKVVCVCRDNWHASNRPWVSFDQNLDYQIGYICSGVFGDNPRSNDGKGNCGPVLSNGANGVKGFSFRYGNGVWIGRTKSISSRSGFEMIWDPNGWTETDSSFSMKQDIIALTDWSGYSGSFVQHPELTGMNCIRPCFWVELIRGQPKESTIWTSGSSISFCGVNSGTASWSWPDGADLPFTIDK

SEQ ID NO: 16794 - protein, 469 aa, synthetic construct; identical to SEQ ID NO: 16738
  REGION 1..469: note = neuraminidase__InfluenzaA__ACR01015

SEQ ID NO: 16795 - protein, 469 aa, synthetic construct; identical to SEQ ID NO: 16738
  REGION 1..469: note = neuraminidase__InfluenzaA__ACR08422

SEQ ID NO: 16796 - protein, 469 aa, synthetic construct; identical to SEQ ID NO: 16738
  REGION 1..469: note = neuraminidase__InfluenzaA__ACR08432

SEQ ID NO: 16797 - protein, 469 aa, synthetic construct; identical to SEQ ID NO: 16738
  REGION 1..469: note = neuraminidase__InfluenzaA__ACR08442

SEQ ID NO: 16798 - protein, 469 aa, synthetic construct; identical to SEQ ID NO: 16738
  REGION 1..469: note = neuraminidase__InfluenzaA__ACR08452

SEQ ID NO: 16799 - protein, 469 aa, synthetic construct
  REGION 1..469: note = neuraminidase__InfluenzaA__ACR08462
MSPNQKIITIGSVCMTIGMANLILQIGNIISIWISHSIQLGNQNQIETCNQSVITYENNTWVNQTYVNISNTNFAAGQSVVSVKLAGNSSLCPVSGWAIYSKDNSVRIGSKGDVFVIREPFISCSPLECRTFFLTQGALLNDKHSNGTIKDRSPYRTLMSCPIGEVPSPYNSRFESVAWSASACHDGINWLTIGISGPDNGAVAVLKYNGIITDTIKSWRNNILRTQESECACVNGSCFTVMTDGPSNGQASYKIFRIEKGKIVKSVEMNAPNYHYEECSCYPDSSEITCVCRDNWHGSNRPWVSFNQNLEYQIGYICSGIFGDNPRPNDKTGSCGPVSSNGANGVKGFSFKYGNGVWIGRTKSISSRNGFEMIWDPNGWTGTDNNFSIKQDIVGINEWSGYSGSFVQHPELTGLDCIRPCFWVELIRGRPKENTIWTSGSSISFCGVNSDTVGWSWPDGAELPFTIDK

SEQ ID NO: 16800 - protein, 469 aa, synthetic construct
  REGION 1..469: note = neuraminidase__InfluenzaA__ACR08565
MNPNQKIITIGSVCMTIGMANLILQIGNIISIWISHSIQLGNQNQIETCNQSVITYENNTWVNQTYVNISNTNFAAGQSVVPVKLAGNSSLCPVSGWAIYSKDNSVRIGSKGDVFVIREPFISCSPLECRTFFLTQGALLNDKHSNGTIKDRSPYRTLMSCPIGEVPSPYNSRFESVAWSASACHDGINWLTIGISGPDNGAVAVLKYNGIITDTIKSWRNNILRTQESECACVNGSCFTVMTDGPSNGQASYKIFRIEKGKIVKSVEMNAPNYHYEECSCYPDSSEITCVCRDNWHGSNRPWVSFNQNLEYQIGYICSGIFGDNPRPNDKTGSCGPVSSNGANGVKGFSFKYGNGVWIGRTKSISSRNGFEMIWDPNGWTGTDNNFSIKQDIVGINEWSGYSGSFVQHPELTGLDCIRPCFWVELIRGRPKENTIWTSGSSISFCGVNSDTVGWSWPDGAELPFTIDK

SEQ ID NO: 16801 - protein, 469 aa, synthetic construct; identical to SEQ ID NO: 16728
  REGION 1..469: note = neuraminidase__InfluenzaA__ACR08566

SEQ ID NO: 16802 - protein, 469 aa, synthetic construct; identical to SEQ ID NO: 16738
  REGION 1..469: note = neuraminidase__InfluenzaA__ACR08567

SEQ ID NO: 16803 - protein, 469 aa, synthetic construct; identical to SEQ ID NO: 16728
  REGION 1..469: note = neuraminidase__InfluenzaA__ACR08568

SEQ ID NO: 16804 - protein, 469 aa, synthetic construct; identical to SEQ ID NO: 16728
  REGION 1..469: note = neuraminidase__InfluenzaA__ACR08569

SEQ ID NO: 16805 - protein, 469 aa, synthetic construct; identical to SEQ ID NO: 16738
  REGION 1..469: note = neuraminidase__InfluenzaA__ACR08570

SEQ ID NO: 16806 - protein, 469 aa, synthetic construct; identical to SEQ ID NO: 16728
  REGION 1..469: note = neuraminidase__InfluenzaA__ACR08571

SEQ ID NO: 16807 - protein, 469 aa, synthetic construct; identical to SEQ ID NO: 16728
  REGION 1..469: note = neuraminidase__InfluenzaA__ACR08572

SEQ ID NO: 16808 - protein, 469 aa, synthetic construct; identical to SEQ ID NO: 16728
  REGION 1..469: note = neuraminidase__InfluenzaA__ACR08573

SEQ ID NO: 16809 - protein, 469 aa, synthetic construct; identical to SEQ ID NO: 16728
  REGION 1..469: note = neuraminidase__InfluenzaA__ACR08574

SEQ ID NO: 16810 - protein, 469 aa, synthetic construct; identical to SEQ ID NO: 16738
  REGION 1..469: note = neuraminidase__InfluenzaA__ACR08576

SEQ ID NO: 16811 - protein, 469 aa, synthetic construct; identical to SEQ ID NO: 16728
  REGION 1..469: note = neuraminidase__InfluenzaA__ACR08577

SEQ ID NO: 16812 - protein, 469 aa, synthetic construct; identical to SEQ ID NO: 16728
  REGION 1..469: note = neuraminidase__InfluenzaA__ACR09378

SEQ ID NO: 16813 - protein, 469 aa, synthetic construct; identical to SEQ ID NO: 16728
  REGION 1..469: note = neuraminidase__InfluenzaA__ACR09379

SEQ ID NO: 16814 - protein, 469 aa, synthetic construct; identical to SEQ ID NO: 16738
  REGION 1..469: note = neuraminidase__InfluenzaA__ACR09380

SEQ ID NO: 16815 - protein, 469 aa, synthetic construct; identical to SEQ ID NO: 16728
  REGION 1..469: note = neuraminidase__InfluenzaA__ACR09381

SEQ ID NO: 16816 - protein, 469 aa, synthetic construct; identical to SEQ ID NO: 16728
  REGION 1..469: note = neuraminidase__InfluenzaA__ACR09382

SEQ ID NO: 16817 - protein, 469 aa, synthetic construct; identical to SEQ ID NO: 16738
  REGION 1..469: note = neuraminidase__InfluenzaA__ACR09383

SEQ ID NO: 16818 - protein, 469 aa, synthetic construct; identical to SEQ ID NO: 16728
  REGION 1..469: note = neuraminidase__InfluenzaA__ACR09384

SEQ ID NO: 16819 - protein, 469 aa, synthetic construct; identical to SEQ ID NO: 16738
  REGION 1..469: note = neuraminidase__InfluenzaA__ACR09385

SEQ ID NO: 16820 - protein, 469 aa, synthetic construct; identical to SEQ ID NO: 16728
  REGION 1..469: note = neuraminidase__InfluenzaA__ACR09386

SEQ ID NO: 16821 - protein, 469 aa, synthetic construct; identical to SEQ ID NO: 16738
  REGION 1..469: note = neuraminidase__InfluenzaA__ACR10189

SEQ ID NO: 16822 - protein, 469 aa, synthetic construct; identical to SEQ ID NO: 16738
  REGION 1..469: note = neuraminidase__InfluenzaA__ACR10226

SEQ ID NO: 16823 - protein, 469 aa, synthetic construct; identical to SEQ ID NO: 16728
  REGION 1..469: note = neuraminidase__InfluenzaA__ACR10236

SEQ ID NO: 16824 - protein, 469 aa, synthetic construct; identical to SEQ ID NO: 16728
  REGION 1..469: note = neuraminidase__InfluenzaA__ACR10237

SEQ ID NO: 16825 - protein, 469 aa, synthetic construct
  REGION 1..469: note = neuraminidase__InfluenzaA__ACR15186
MNPNQKIITIGSVSLTISTICFFMQIAILITTVTLHFKQYEFNSPPNNQVMLCEPTIIERNITEIVYLTNTTIEKEICPKLAEYRKWSKPQCNITGFAPFSKDNSIRLSAGGDIWVTREPYVSCDPDKCYQFALGQGTTLNNVHSNDTVRDRTPYRTLLMNELGVPFHLGTKQVCIAWSSSSCHDGKAWLHVCVTGDDKNATASFIYNGRLVDSIVSWSKEILRTQESECVCINGTCTVVMTDGSASGKADTKILFIEEGKIVHTSTLSGSAQHVEECSCYPRHPGVRCVCRDNWRGSNRPIVDINMKDYSIVSSYVCSGLVGDTPRKNDSSSSGHCLDPNNEEGGHGVKGWAFDDGNDVWMGRTISEKLRSGYETFKVIEGWSNPNSKLQINRQVIVDRGNRSGYSGIFSVEGKSCINRCFYVELIRGRKEETEVLWTSNSIVVFCGTSGTYGTGSWPDGADINLMPI

SEQ ID NO: 16826 - protein, 470 aa, synthetic construct; identical to SEQ ID NO: 16632
  REGION 1..470: note = neuraminidase__InfluenzaA__ACR15197

SEQ ID NO: 16827 - protein, 469 aa, synthetic construct
  REGION 1..469: note = neuraminidase__InfluenzaA__ACR15208
MNPNQKIITIGSVSLTISTICFFMQIAILITTVTLHFKQYEFNSPPNNQVMLCEPTIIERNITEIVYLTNTTIEKEICPKLAEYRNWSKPQCDITGFAPFSKDNSIRLSAGGDIWVTREPYVSCDPDKCYQFALGQGTTLNNVHSNDTVRDRTPYRTLLMNELGVPFHLGTKQVCIAWSSSSCHDGKAWLHVCITGDDKNATASFIYNGRLVDSIVSWSKEILRTQESECVCINGTCTVVMTDGSASGKADTKILFIEEGKIVHTSTLSGSAQHVEECSCYPRYPGVRCVCRDNWKGSNRPIVDINIKDHSIVSSYVCSGLVGDTPRKNDSSSSSHCLDPNNEEGGHGVKGWAFDDGNDVWMGRTISEKSRLGYETFKVIEGWSNPKSKLQINRQVIVDKGNRSGYSGIFSVEGKSCINRCFYVELIRGRKEETEVLWTSNSIVVFCGTSGTYGTGSWPDGADINLMPI

SEQ ID NO: 16828 - protein, 469 aa, synthetic construct
  REGION 1..469: note = neuraminidase__InfluenzaA__ACR15230
MDPNQKIITIGSVSLTISAICFFMQIAILITTVTLHFKQYEFNSPPNNQVMLCEPTIIERNITEIVYLTNTTIEKEICPKLAEYRNWSKPQCNITGFAPFSKDNSIRLSAGGDIWVTREPYVSCDPDKCYQFALGQGTTLNNVHSNDTVHDRTPYRTLLMNELGVPFHLGTKQVCIAWSSSSCHDGKAWLHVCVTGDDENATASFIYNGRLVDSVVSWSKKILRTQESECVCINGTCTVVMTDGSASGKADTKILFIEEGKIVHTSTLSGSAQHVEECSCYPRYPGVRCVCRDNWKGSNRPIVDINIKDYSIVSSYVCSGLVGDTPRKNDSSSNSHCLDPNNEEGGHGVKGWAFDDGNDVWMGRTISEKLRSGYETFKVIEGWSNPNSKLQINRQVIVDRGNRSGYSGIFSVEGKSCINRCFYVELIRGRNQETEVLWTSNSIVVFCGTSGTYGTGSWPDGADINLMPI

SEQ ID NO: 16829 - protein, 470 aa, synthetic construct; identical to SEQ ID NO: 16632
  REGION 1..470: note = neuraminidase__InfluenzaA__ACR15241

SEQ ID NO: 16830 - protein, 469 aa, synthetic construct; identical to SEQ ID NO: 15884
  REGION 1..469: note = neuraminidase__InfluenzaA__ACR15252

SEQ ID NO: 16831 - protein, 470 aa, synthetic construct
  REGION 1..470: note = neuraminidase__InfluenzaA__ACR15263
MNPNQKIITIGSISIAIGIISLMLQIGNIISIWASHSIQTGSQNNTGICNQRIITYENSTWVNHTYVNINNTNVVAGEDKTSVTLAGNSSLCSISGWAIYTKDNSIRIGSKGDVFVIREPFISCSHLECRTFFLTQGALLNDKHSNGTVKDRSPYRALMSCPLGEAPSPYNSKFESVAWSASACHDGMGWLTIGISGPDNGAVAVLKYNGIITGTIKSWKKQILRTQESECVCMNGSCFTIMTDGPSNKAASYKIFKIEKGKVTKSIELNAPNFHYEECSCYPDTGIVMCVCRDNWHGSNRPWVSFNQNLDYQIGYICSGVFGDNPRPEDGEGSCNPVTVDGANGVKGFSYKYDNGVWIGRTKSNRLRKGFEMIWDPNGWTNTDSDFSVKQDVVAITDWSGYSGSFVQHPELTGLDCIRPCFWVELVRGLPRENTTIWSSGSSISFCGVNSDTANWSWPDGAELPFTIDK

SEQ ID NO: 16832 - protein, 470 aa, synthetic construct; identical to SEQ ID NO: 16632
  REGION 1..470: note = neuraminidase__InfluenzaA__ACR15274

SEQ ID NO: 16833 - protein, 470 aa, synthetic construct
  REGION 1..470: note = neuraminidase__InfluenzaA__ACR15307
MNPNQKIITIGSISITIGIISLMLQIGNIISIWASHSIQTGSQNHTGICNQRIITYENNTWVNHTYVNINNTNVVAGKDKTSVTLAGNSSLCSISGWAIYTKDNSIRIGSKGDVFVIREPFISCSHLECRTFFLTQGALLNDKHSNGTVKDRSPYRALMSCPLGEAPSPYNSKFESVAWSASACHDGMGWLTIGISGPDNGAVAVLKYNGIITETIKSWKKRILRTQESECVCVNGSCFTIMTDGPSNGAASYKIFKIEKGKVTKSIELNAPNFHYEECSCYPDTGTVMCVCRDNWHGSNRPWVSFNQNLDYQIGYICSGVFGDNPRPKDGEGSCNPVTVDGADGVKGFSYKYGNGVWIGRTKSNRLRKGFEMIWDPNGWTDTDSDFSVKQDVVAITDWSGYSGSFVQHPELTGLDCIRPCFWVELVRGLPRENTTIWTSGSSISFCGVNSDTANWSWPDGAELPFTIDK

SEQ ID NO: 16834 - protein, 470 aa, synthetic construct
  REGION 1..470: note = neuraminidase__InfluenzaA__ACR15318
MNPNQKIITIGSISIAIGIISLMLQIGNIISIWASHSIQTGSQNHTGVCNQRIITYENSTWVNHTYVNINNTNVIAGKDKTSVTLAGNSSLCSISGWAIYTKDNSIRIGSKGDVFVIREPFISCSHLECRTFFLTQGALLNDKHSNGTVKDRSPYRALMSCPLGEAPSPYNSKFESVAWSASACHDGMGWLTIGISGPDNGAVAVLKYNGIITETIKSWKRQILRTQESECVCVNGSCFTIMTDGPSNGAASYKIFKIEKGKVTKSIELNAPNFHYEECSCYPDTGTVMCVCRDNWHGSNRPWVSFNQNLDYQIGYICSGVFGDNPRPKDGEGSCNPVTVDGANGVKGFSYKYGNGVWIGRTKSNRLRKGFEMIWDPNGWTDTDSDFSVKQDVVAITDWSGYSGSFVQHPELTGLDCIRPCFWVELVRGLPKENTTIWTSGSSISFCGVNSDTANWSWPDGAELPFTIDK

SEQ ID NO: 16835 - protein, 470 aa, synthetic construct
  REGION 1..470: note = neuraminidase__InfluenzaA__ACR15329
MNPNQKIITIGSISIAIGIISLMLQIGNIISIWASHSIQTRSQNHTGVCNQRIITYENSTWVNHTYVNINNTNVIAGKDKTSVTLAGNSSLCSISGWAIYTKDNSIRIGSKGDVFVIREPFISCSHLECRTFFLTQGALLNDKHSNGTVKDRSPYRALMSCPLGEAPSPYNSKFESVAWSASACHDGMGWLTIGISGPDNGAVAVLKYNGIITETIKSWKKQILRTQESECVCVNGSCFTIMTDGPSNGAASYKIFKIEKGKVTKSIELNAPNFHYEECSCYPDTGTVMCVCRDNWHGSNRPWVSFNQNLDYQIGYICSGVFGDNPRPKDGEGSCNPVTVDGANGVKGFSYKYGNGVWIGRTKSNRLRKGFEMIWDPNGWTDTDSDFSVKQDVVAITDWSGYSGSFVQHPELTGLDCIRPCFWVELVRGLPKENTTIWTSGSSISFCGVNSDTANWSWPDGAELPFTIDK

SEQ ID NO: 16836 - protein, 470 aa, synthetic construct; identical to SEQ ID NO: 16632
  REGION 1..470: note = neuraminidase__InfluenzaA__ACR15340

SEQ ID NO: 16837 - protein, 470 aa, synthetic construct; identical to SEQ ID NO: 16632
  REGION 1..470: note = neuraminidase__InfluenzaA__ACR15362

SEQ ID NO: 16838 - protein, 470 aa, synthetic construct; identical to SEQ ID NO: 16632
  REGION 1..470: note = neuraminidase__InfluenzaA__ACR15373

SEQ ID NO: 16839 - protein, 470 aa, synthetic construct
  REGION 1..470: note = neuraminidase__InfluenzaA__ACR15428
MNPNQKIITIGSISIAIGIISLMLQIGNIISIWASHSIQTGSQNNTGICNQRIITYENSTWVNHTYVNINNTNVVAGEDKTSVTLAGNSSLCSVSGWAIYTKDNSIRIGSKGDVFVIREPFISCSHLECRTFFLTKGALLNDKHSNGTVKDRSPYRALMSCPLGEAPSPYNSKFESVAWSASACHDGMGWLTIGISGPDNGAVAVLKYNGIITGTIKSWKKQILRTQESECVCMNGSCFTIMTDGPSNKAASYKIFKIEKGKVTKSIELNAPNFHYEECSCYPDTGIVMCVCRDNWHGSNRPWVSFNQNLDYQIGYICSGVFGDNPRPEDGEGSCNPVTVDGANGVKGFSYKYDNGVWIGRTKSNRLRKGFEMIWDPNGWTNTDSDFSVKQDVVAITDWSGYSGSFVQHPELTGLDCIRPCFWVELVRGLPRENTTIWTSGSSISFCGVNSDTANWSWPDGAELPFTIDK

SEQ ID NO: 16840 - protein, 470 aa, synthetic construct
  REGION 1..470: note = neuraminidase__InfluenzaA__ACR15472
MNPNQKIITIGSISIAIGIISLMLQIGNIISIWASHSIQTGSQNNTGICNQRIITYENSTWVNHTYVNINNTNVVAGEDKTPVTLAGNSSLCSISGWAIYTKDNSIRIGSKGDVFVIREPFIACSHLECRTFFLTQGALLNDKHSNGTVKDRSPYRALMSCPLGEAPSPYNSKFESVAWSASACHDGMGWLTIGISGPDNGAVAVLKYNGIITGTIKSWKKQILRTQESECVCMNGSCFTIMTDGPSNKAASYKIFKIEKGKVTKSIELNAPNFHYEECSCYPDTGIVMCVCRDNWHGSNRPWVSFNQNLDYQIGYICSGVFGDNPRPEDGEGSCNPVTVDGANGVKGFSYKYDNGVWIGRTKSNRLRKGFEVIWDPNGWTNTDSDFSVKQDVVAITDWSGYSGSFVQHPELTGLDCIRPCFWVELVRGLPRENTTIWTSGSSISFCGVNSDTANWSWPDGAELPFTIDK

SEQ ID NO: 16841 - protein, 470 aa, synthetic construct; identical to SEQ ID NO: 16632
  REGION 1..470: note = neuraminidase__InfluenzaA__ACR15483

SEQ ID NO: 16842 - protein, 470 aa, synthetic construct; identical to SEQ ID NO: 16632
  REGION 1..470: note = neuraminidase__InfluenzaA__ACR15505

SEQ ID NO: 16843 - protein, 470 aa, synthetic construct; identical to SEQ ID NO: 16716
  REGION 1..470: note = neuraminidase__InfluenzaA__ACR15516

SEQ ID NO: 16844 - protein, 469 aa, synthetic construct; identical to SEQ ID NO: 14714
  REGION 1..469: note = neuraminidase__InfluenzaA__ACR15527

SEQ ID NO: 16845 - protein, 469 aa, synthetic construct
  REGION 1..469: note = neuraminidase__InfluenzaA__ACR15538
MIPIQKIITIGSVSLTISTICFFMQIAILITTVTLHFKQYEFNSPPNNQVMLCEPTIIERNITEIVYLTNTTIEKEICPKLAEYRNWSKPQCDITGFAPFSKDNSIRLSAGGDIWVTREPYVSCDPDKCYQFALGQGTTLNNVHSNDTVHDRTPYRTLLMNELGVPFHLGTKQVCIAWSSSSCHDGKAWLHVCVTGDDKNATASFIYNGRLVDSIVSWSKEILRTQESECVCINGTCTVVMTDGSASGKADTKILFIEEGKIVHTSTLSGSAQHVEECSCYPRYPGVRCVCRDNWKGSNRPIVDINIKDYSIVSSYVCSGLVGDTPRKNDSSSSSHCLDPNNEEGGHGVKGWAFDDGNDVWMGRTISEKLRSGYETFKVIEGWSNPNSKLQINRQVIVDRGNRSGYSGIFSVEGKSCINRCFYVELIRGRKEETEVLWTSNSIVVFCGTSGTYGTGSWPDGADINLMPI

SEQ ID NO: 16846 - protein, 469 aa, synthetic construct; identical to SEQ ID NO: 14327
  REGION 1..469: note = neuraminidase__InfluenzaA__ACR15549

SEQ ID NO: 16847 - protein, 469 aa, synthetic construct; identical to SEQ ID NO: 14712
  REGION 1..469: note = neuraminidase__InfluenzaA__ACR15560

SEQ ID NO: 16848 - protein, 469 aa, synthetic construct; identical to SEQ ID NO: 14712
  REGION 1..469: note = neuraminidase__InfluenzaA__ACR15582

SEQ ID NO: 16849 - protein, 469 aa, synthetic construct
  REGION 1..469: note = neuraminidase__InfluenzaA__ACR15593
MNPNQKIITIGSVSLTISTICFFMQIAILITTVTLHFKQYEFNSPPNNQVMLCEPTIIERNITEIVYLTNTTIEKEICPKQAEYRNWSKPQCNITGFAPFSKDNSIRLSAGGDIWVTREPYVSCDPDKCYQFALGQGTTLNNVHSNDTVHDRTPYRTLLMNELGVPFHLGTKQVCIAWSSSSCHDGKAWLHVCVTGDDKNATASFIYNGRLVDSIVSWSKEILRTQESECVCINGTCTVVMTDGSASGKADTKILFIEEGKIVHTSTLSGSAQHVEECSCYPRYPGVRCVCRDNWKGSNRPIVDINIKDYSIVSSYVCSGLVGDTPRKNDSSSSSHCLDPNNEEGGHGVKGWAFDDGNDVWMGRTISEKLRSGYETFKVIEGWSNPNSKLQINRQVIVDRGNRSGYSGIFSVEGKSCINRCFYVELIRGRKEETEVLWTSNSIVVFCGTSGTYGTGSWPDGADINLMPI

SEQ ID NO: 16850 - protein, 469 aa, synthetic construct
  REGION 1..469: note = neuraminidase__InfluenzaA__ACR15604
MNPNQKIITIGSVSLTISTICFFMQIAILITTVTLHFKQYEFNSPPNNQVMLCEPTIIERNITEIVYLTNTTIEKEICPKLAEYRNWSKPQCNITGFAPFSKDNSIRLSAGGDIWVTREPYVSCDPDKCYQFALGQGTTLNNVHSNDTVHDRTPYRTLLMNELGVPFHLGTKQVCIAWSSSSCHDGKAWLHVCVTGDDKNATASFIYNGRLVDSIVSWSKEILRTQESECVCINGTCTVVMTDGSASGKADTKILFIEEGKIVHTSTLSGSAQHVEECSCYPRYPGVRCVCRDNWKGSNRPIVDINIKDYSIVSSYVCSGLVGDTPRKNDSSSSSHCLDPNNEEGGHGVKGWAFDDGNDVWMGRTISEKLRSGYETFKVIEGWSNPNSKLQINRQVIVDRGDRSGYSGIFSVEGKSCINRCFYVELIRGRKEETEVLWTSNSIVVFCGTSGTYGTGSWPDGADINLMPI

SEQ ID NO: 16851 - protein, 469 aa, synthetic construct; identical to SEQ ID NO: 16728
  REGION 1..469: note = neuraminidase__InfluenzaA__ACR15618

SEQ ID NO: 16852 - protein, 469 aa, synthetic construct; identical to SEQ ID NO: 16728
  REGION 1..469: note = neuraminidase__InfluenzaA__ACR18924

SEQ ID NO: 16853 - protein, 469 aa, synthetic construct; identical to SEQ ID NO: 16728
  REGION 1..469: note = neuraminidase__InfluenzaA__ACR18925

SEQ ID NO: 16854 - protein, 469 aa, synthetic construct; identical to SEQ ID NO: 16738
  REGION 1..469: note = neuraminidase__InfluenzaA__ACR18926

SEQ ID NO: 16855 - protein, 469 aa, synthetic construct; identical to SEQ ID NO: 16738
  REGION 1..469: note = neuraminidase__InfluenzaA__ACR18927

SEQ ID NO: 16856 - protein, 469 aa, synthetic construct; identical to SEQ ID NO: 16738
  REGION 1..469: note = neuraminidase__InfluenzaA__ACR18928

SEQ ID NO: 16857 - protein, 469 aa, synthetic construct; identical to SEQ ID NO: 16738
  REGION 1..469: note = neuraminidase__InfluenzaA__ACR18929

SEQ ID NO: 16858 - protein, 469 aa, synthetic construct; identical to SEQ ID NO: 16738
  REGION 1..469: note = neuraminidase__InfluenzaA__ACR18930

SEQ ID NO: 16859 - protein, 469 aa, synthetic construct; identical to SEQ ID NO: 16738
  REGION 1..469: note = neuraminidase__InfluenzaA__ACR18931

SEQ ID NO: 16860 - protein, 469 aa, synthetic construct; identical to SEQ ID NO: 16738
  REGION 1..469: note = neuraminidase__InfluenzaA__ACR18933

SEQ ID NO: 16861 - protein, 469 aa, synthetic construct; identical to SEQ ID NO: 16728
  REGION 1..469: note = neuraminidase__InfluenzaA__ACR18934

SEQ ID NO: 16862 - protein, 469 aa, synthetic construct; identical to SEQ ID NO: 16738
  REGION 1..469: note = neuraminidase__InfluenzaA__ACR18935

SEQ ID NO: 16863 - protein, 469 aa, synthetic construct; identical to SEQ ID NO: 16738
  REGION 1..469: note = neuraminidase__InfluenzaA__ACR23301

SEQ ID NO: 16864 - protein, 469 aa, synthetic construct; identical to SEQ ID NO: 16738
  REGION 1..469: note = neuraminidase__InfluenzaA__ACR32997

SEQ ID NO: 16865 - protein, 469 aa, synthetic construct
  REGION 1..469: note = neuraminidase__InfluenzaA__ACR33740
MNPNQKIITIGSVCMTIGMANLILQIGNIISIWISHSIQLGNQNQIETCNQSVITYENNTWVNQTYVNISNTNFAAGQSVVSVKLAGNSSLCPVSGWAIYSKDNSIRIGSKGDVFVIREPFISCSPLECRTFFLTQGALLNDKHSNGTIKDRSPYRTLMSCPIGEVPSPYNSRFESVAWSASACHDGINWLTIGISGPDNGAVAVLKYNGIITDTIKSWRNNILRTQESECACVNGSCFTVMTDGPSDGQASYKIFRIEKGKIVKSVEMNAPNYHYEECSCYPDSSEITCVCRDNWHGSNRPWVSFNQNLEYQIGYICSGIFGDNPRPNDKTGSCGPVSSNGANGVKGFSFKYGNGVWIGRTKSISSRNGFEMIWDPNGWTGTDNNFSIKQDIVGINEWSGYSGSFVQHPELTGLDCIRPCFWVELIRGRPKENTIWTSGSSISFCGVNSGTVGWSWPDGAELPFTIDK

SEQ ID NO: 16866 - protein, 469 aa, synthetic construct; identical to SEQ ID NO: 16728
  REGION 1..469: note = neuraminidase__InfluenzaA__ACR38792

SEQ ID NO: 16867 - protein, 469 aa, synthetic construct; identical to SEQ ID NO: 16738
  REGION 1..469: note = neuraminidase__InfluenzaA__ACR38793

SEQ ID NO: 16868 - protein, 469 aa, synthetic construct; identical to SEQ ID NO: 16738
  REGION 1..469: note = neuraminidase__InfluenzaA__ACR38794

SEQ ID NO: 16869 - protein, 469 aa, synthetic construct; identical to SEQ ID NO: 16738
  REGION 1..469: note = neuraminidase__InfluenzaA__ACR38878

SEQ ID NO: 16870 - protein, 469 aa, synthetic construct; identical to SEQ ID NO: 16738
  REGION 1..469: note = neuraminidase__InfluenzaA__ACR39357

SEQ ID NO: 16871 - protein, 469 aa, synthetic construct; identical to SEQ ID NO: 16738
  REGION 1..469: note = neuraminidase__InfluenzaA__ACR39396

SEQ ID NO: 16872 - protein, 469 aa, synthetic construct; identical to SEQ ID NO: 16738
  REGION 1..469: note = neuraminidase__InfluenzaA__ACR39406

SEQ ID NO: 16873 - protein, 469 aa, synthetic construct; identical to SEQ ID NO: 16738
  REGION 1..469: note = neuraminidase__InfluenzaA__ACR39416

SEQ ID NO: 16874 - protein, 469 aa, synthetic construct; identical to SEQ ID NO: 16738
  REGION 1..469: note = neuraminidase__InfluenzaA__ACR39426

SEQ ID NO: 16875 - protein, 469 aa, synthetic construct; identical to SEQ ID NO: 16738
  REGION 1..469: note = neuraminidase__InfluenzaA__ACR39436

SEQ ID NO: 16876 - protein, 469 aa, synthetic construct; identical to SEQ ID NO: 16738
  REGION 1..469: note = neuraminidase__InfluenzaA__ACR39446

SEQ ID NO: 16877 - protein, 469 aa, synthetic construct; identical to SEQ ID NO: 16738
  REGION 1..469: note = neuraminidase__InfluenzaA__ACR39456

SEQ ID NO: 16878 - protein, 469 aa, synthetic construct; identical to SEQ ID NO: 16738
  REGION 1..469: note = neuraminidase__InfluenzaA__ACR39466

SEQ ID NO: 16879 - protein, 469 aa, synthetic construct; identical to SEQ ID NO: 16738
  REGION 1..469: note = neuraminidase__InfluenzaA__ACR39476

SEQ ID NO: 16880 - protein, 469 aa, synthetic construct; identical to SEQ ID NO: 16738
  REGION 1..469: note = neuraminidase__InfluenzaA__ACR39486

SEQ ID NO: 16881 - protein, 469 aa, synthetic construct; identical to SEQ ID NO: 16738
  REGION 1..469: note = neuraminidase__InfluenzaA__ACR39496

SEQ ID NO: 16882 - protein, 469 aa, synthetic construct; identical to SEQ ID NO: 16738
  REGION 1..469: note = neuraminidase__InfluenzaA__ACR40291

SEQ ID NO: 16883 - protein, 469 aa, synthetic construct; identical to SEQ ID NO: 16738
  REGION 1..469: note = neuraminidase__InfluenzaA__ACR40301

SEQ ID NO: 16884 - protein, 469 aa, synthetic construct
  REGION 1..469: note = neuraminidase__InfluenzaA__ACR40311
MNPNQKIITIGSVCMTIGMANLILQIGNIISIWISHSIQLGNQNQTETCNQSVITYENNTWVNQTYVNISNTNFAAGQSVVSVKLAGNSSLCPVSGWAIYSKDNSVRIGSKGDVFVIREPFISCSPLECRTFFLTQGALLNDKHSNGTIKDRSPYRTLMSCPIGEVPSPYNSRFESVAWSASACHDGINWLTIGISGPDNGAVAVLKYNGIITDTIKSWRNNILRTQESECACVNGSCFTVMTDGPSNGQASYKIFRIEKGKIVKSVEMNAPNYHYEECSCYPDSSEITCVCRDNWHGSNRPWVSFNQNLEYQIGYICSGIFGDNPRPNDKTGSCGPVSSNGANGVKGFSFKYGNGVWIGRTKSISSRNGFEMIWDPNGWTGTDNNFSIKQDIVGINEWSGYSGSFVQHPELTGLDCIRPCFWVELIRGRPKENTIWTSGSSISFCGVNSDTVGWSWPDGAELPFTIDK

SEQ ID NO: 16885 - protein, 469 aa, synthetic construct
  REGION 1..469: note = neuraminidase__InfluenzaA__ACR40321
MNPNQKIITIGSVCMTIGMANLILQIGNIISIWISHSIQLGNQNQIETCNQSVITYENNTWVNQTYVNISNTNFAAGQSVVSVKLAGNSSLCPVSGWAIYSKDNSIRIGSKGDVFVIREPFISCSPLECRTFFLTQGALLNDKHSNGTIKDRSPYRTLMSCPIGEVPSPYNSRFESVAWSASACHDGINWLTIGISGPDNGAVAVLKYNGIITDTIKSWRNNILRTQESECACVNGSCFTVMTDGPSDGQASYKIFRIEKGKIVKSVEMNAPNYHYEECSCYPDSSEITCVCRDNWHGSNRPWVSFNQNLEYQIGYICSGIFGDNPRPNDKTGSCGPVSSNGANGVKGFSFKYGNGVWIGRTKSISSRNGFEMIWDPNGWNGTDNNFSIKQDIVGINEWSGYSGSFVQHPELTGLDCIRPCFWVELIRGRPKENTIWTSGSSISFCGVNSDTVGWSWPDGAELPFTIDK

SEQ ID NO: 16886 - protein, 469 aa, synthetic construct; identical to SEQ ID NO: 16738
  REGION 1..469: note = neuraminidase__InfluenzaA__ACR40341

SEQ ID NO: 16887 - protein, 469 aa, synthetic construct; identical to SEQ ID NO: 16738
  REGION 1..469: note = neuraminidase__InfluenzaA__ACR40351

SEQ ID NO: 16888 - protein, 469 aa, synthetic construct; identical to SEQ ID NO: 16738
  REGION 1..469: note = neuraminidase__InfluenzaA__ACR40361

SEQ ID NO: 16889 - protein, 469 aa, synthetic construct; identical to SEQ ID NO: 16738
  REGION 1..469: note = neuraminidase__InfluenzaA__ACR40371

SEQ ID NO: 16890 - protein, 469 aa, synthetic construct; identical to SEQ ID NO: 16738
  REGION 1..469: note = neuraminidase__InfluenzaA__ACR40391

SEQ ID NO: 16891 - protein, 469 aa, synthetic construct; identical to SEQ ID NO: 16728
  REGION 1..469: note = neuraminidase__InfluenzaA__ACR46663

SEQ ID NO: 16892 - protein, 469 aa, synthetic construct; identical to SEQ ID NO: 16728
  REGION 1..469: note = neuraminidase__InfluenzaA__ACR46673

SEQ ID NO: 16893 - protein, 469 aa, synthetic construct
  REGION 1..469: note = neuraminidase__InfluenzaA__ACR46996
MNPNQKIITIGSVCMTIGMANLILQIGNIISIWISHSIQLGNQNQIETCNQSVITYENNTWVNQTYVNISNTNFAAGQSVVSVKLAGNSSLCPVSGWAIYSKDNSIRIGSKGDVFVIREPFISCSPLECRTFFLTQGALLNDKHSNGTIKDRSPYRTLMSCPIGEVPSPYNSRFESVAWSASACHDGINWLTIGISGPDNGAVAVLKYNGIITDTIKSWRNNILRTQESECACVNGSCFTVMTDGPSNGQASYKIFRIEKGKIVKSVEMNAPNYHYEECSCYPDSSEITCVCRDNWHGSNRPWVSFNQNLEYQIGYICSGIFGDNPRPNDKTGSCGPVSSNGANGVKGFSFKYGNGVWIGRTKSISSRNGFEMIWDPNGWTGTDNNFSIKQDIVGINEWSGYSGSFVQHPELTGLDCIRPCFWVELIRGRPKENTIWTSGSSISFCGVNSDTVGWSWPDGAELPFTIDK

SEQ ID NO: 16894 - protein, 469 aa, synthetic construct; identical to SEQ ID NO: 16893
  REGION 1..469: note = neuraminidase__InfluenzaA__ACR46997

SEQ ID NO: 16895 - protein, 469 aa, synthetic construct; identical to SEQ ID NO: 16893
  REGION 1..469: note = neuraminidase__InfluenzaA__ACR46998

SEQ ID NO: 16896 - protein, 469 aa, synthetic construct; identical to SEQ ID NO: 16893
  REGION 1..469: note = neuraminidase__InfluenzaA__ACR46999

SEQ ID NO: 16897 - protein, 469 aa, synthetic construct; identical to SEQ ID NO: 16893
  REGION 1..469: note = neuraminidase__InfluenzaA__ACR47000

SEQ ID NO: 16898 - protein, 469 aa, synthetic construct; identical to SEQ ID NO: 16893
  REGION 1..469: note = neuraminidase__InfluenzaA__ACR47001

SEQ ID NO: 16899 - protein, 469 aa, synthetic construct; identical to SEQ ID NO: 16893
  REGION 1..469: note = neuraminidase__InfluenzaA__ACR47002

SEQ ID NO: 16900 - protein, 469 aa, synthetic construct; identical to SEQ ID NO: 16893
  REGION 1..469: note = neuraminidase__InfluenzaA__ACR47003

SEQ ID NO: 16901 - protein, 469 aa, synthetic construct
  REGION 1..469: note = neuraminidase__InfluenzaA__ACR47008
MNPNQKIITIGSVCMTIGMANLILQIGNIISIWPVHSIQLGNQNQIETCNQSVITYENNTWVNQTYVNISNTNFAAGQSVVSMKLAGNSSLCPVGGWAIYSKDNSVRIGSKGDVFVIREPFISCSPLECRTFFLTQGALLNDKHSNGTIKDRSPYRTLMSCPIGEVPSPYNSRFESVAWSASACHDGINWLTIGISGPDNGAVAVLKYNGIITDTIKSWRNNILRTQESECACVNGSCFTVMTDGPSNGQASYKIFRIEKGKIVKSVEMNAPNYHYEECSCYPDSSEITCVCRDNWHGSNRPWVSFNQNLEYQIGYICSGIFGDNPRPNDKTGSCGPVSSNGANGVKGFSFKYGNGVWIGRTKSISSRNGFEMIWDPNGWTGTDNNFSIKQDIVGINEWSGYSGSFVQHPELTGLDCIRPCFWVELIRGRPKENTIWTSGSSISFCGVNSDTVGWSWPDGAELPFTIDK

SEQ ID NO: 16902 - protein, 469 aa, synthetic construct; identical to SEQ ID NO: 16738
  REGION 1..469: note = neuraminidase__InfluenzaA__ACR49267

SEQ ID NO: 16903 - protein, 469 aa, synthetic construct; identical to SEQ ID NO: 16728
  REGION 1..469: note = neuraminidase__InfluenzaA__ACR49268

SEQ ID NO: 16904 - protein, 469 aa, synthetic construct; identical to SEQ ID NO: 16728
  REGION 1..469: note = neuraminidase__InfluenzaA__ACR49269

SEQ ID NO: 16905 - protein, 469 aa, synthetic construct; identical to SEQ ID NO: 16728
  REGION 1..469: note = neuraminidase__InfluenzaA__ACR49270

SEQ ID NO: 16906 - protein, 469 aa, synthetic construct; identical to SEQ ID NO: 16768
  REGION 1..469: note = neuraminidase__InfluenzaA__ACR49271

SEQ ID NO: 16907 - protein, 469 aa, synthetic construct; identical to SEQ ID NO: 16738
  REGION 1..469: note = neuraminidase__InfluenzaA__ACR49272

SEQ ID NO: 16908 - protein, 469 aa, synthetic construct; identical to SEQ ID NO: 16728
  REGION 1..469: note = neuraminidase__InfluenzaA__ACR49273

SEQ ID NO: 16909 - protein, 469 aa, synthetic construct; identical to SEQ ID NO: 16728
  REGION 1..469: note = neuraminidase__InfluenzaA__ACR49274

SEQ ID NO: 16910 - protein, 469 aa, synthetic construct; identical to SEQ ID NO: 16768
  REGION 1..469: note = neuraminidase__InfluenzaA__ACR49275

SEQ ID NO: 16911 - protein, 469 aa, synthetic construct; identical to SEQ ID NO: 16768
  REGION 1..469: note = neuraminidase__InfluenzaA__ACR49277

SEQ ID NO: 16912 - protein, 469 aa, synthetic construct; identical to SEQ ID NO: 16768
  REGION 1..469: note = neuraminidase__InfluenzaA__ACR49278

SEQ ID NO: 16913 - protein, 469 aa, synthetic construct; identical to SEQ ID NO: 16728
  REGION 1..469: note = neuraminidase__InfluenzaA__ACR49279

SEQ ID NO: 16914 - protein, 469 aa, synthetic construct; identical to SEQ ID NO: 16728
  REGION 1..469: note = neuraminidase__InfluenzaA__ACR50994

SEQ ID NO: 16915 - protein, 469 aa, synthetic construct; identical to SEQ ID NO: 16738
  REGION 1..469: note = neuraminidase__InfluenzaA__ACR50998

SEQ ID NO: 16916 - protein, 469 aa, synthetic construct; identical to SEQ ID NO: 16738
  REGION 1..469: note = neuraminidase__InfluenzaA__ACR51008

SEQ ID NO: 16917 - protein, 469 aa, synthetic construct; identical to SEQ ID NO: 16738
  REGION 1..469: note = neuraminidase__InfluenzaA__ACR51018

SEQ ID NO: 16918 - protein, 469 aa, synthetic construct; identical to SEQ ID NO: 16738
  REGION 1..469: note = neuraminidase__InfluenzaA__ACR51028

SEQ ID NO: 16919 - protein, 469 aa, synthetic construct
  REGION 1..469: note = neuraminidase__InfluenzaA__ACR51038
MNPNQKIITIGSVCMSIGMANLILQIGNIISIWISHSIQLGNQNQIETCNQSVITYENNTWVNQTYVNISNTNFAAGQSVVSVKLAGNSSLCPVSGWAIYSKDNSIRIGSKGDVFVIREPFISCSPLECRTFFLTQGALLNDKHSNGTIKDRSPYRTLMSCPIGEVPSPYNSRFESVAWSASACHDGINWLTIGISGPDNGAVAVLKYNGIITDTIKSWRNNILRTQESECACVNGSCFTVMTDGPSDGQASYKIFRIEKGKIVKSVEMNAPNYHYEECSCYPDSSEITCVCRDNWHGSNRPWVSFNQNLEYQIGYICSGIFGDNPRPNDKTGSCGPVSSNGANGVKGFSFKYGNGVWIGRTKSISSRNGFEMIWDPNGWTGTDNNFSIKQDIVGINEWSGYSGSFVQHPELTGLDCIRPCFWVELIRGRPKENTIWTSGSSISFCGVNSDTVGWSWPDGAELPFTIDK

SEQ ID NO: 16920 - protein, 469 aa, synthetic construct; identical to SEQ ID NO: 16738
  REGION 1..469: note = neuraminidase__InfluenzaA__ACR51048

SEQ ID NO: 16921 - protein, 469 aa, synthetic construct; identical to SEQ ID NO: 16738
  REGION 1..469: note = neuraminidase__InfluenzaA__ACR51058

SEQ ID NO: 16922 - protein, 469 aa, synthetic construct; identical to SEQ ID NO: 16728
  REGION 1..469: note = neuraminidase__InfluenzaA__ACR51068

SEQ ID NO: 16923 - protein, 469 aa, synthetic construct; identical to SEQ ID NO: 16738
  REGION 1..469: note = neuraminidase__InfluenzaA__ACR52371

SEQ ID NO: 16924 - protein, 469 aa, synthetic construct; identical to SEQ ID NO: 16738
  REGION 1..469: note = neuraminidase__InfluenzaA__ACR52381

SEQ ID NO: 16925 - protein, 469 aa, synthetic construct; identical to SEQ ID NO: 16738
  REGION 1..469: note = neuraminidase__InfluenzaA__ACR52391

SEQ ID NO: 16926 - protein, 469 aa, synthetic construct; identical to SEQ ID NO: 16738
  REGION 1..469: note = neuraminidase__InfluenzaA__ACR52401

SEQ ID NO: 16927 - protein, 469 aa, synthetic construct; identical to SEQ ID NO: 16738
  REGION 1..469: note = neuraminidase__InfluenzaA__ACR52411

SEQ ID NO: 16928 - protein, 469 aa, synthetic construct; identical to SEQ ID NO: 16738
  REGION 1..469: note = neuraminidase__InfluenzaA__ACR52421

SEQ ID NO: 16929 - protein, 469 aa, synthetic construct; identical to SEQ ID NO: 16738
  REGION 1..469: note = neuraminidase__InfluenzaA__ACR52431

SEQ ID NO: 16930 - protein, 469 aa, synthetic construct; identical to SEQ ID NO: 16738
  REGION 1..469: note = neuraminidase__InfluenzaA__ACR52441

SEQ ID NO: 16931 - protein, 469 aa, synthetic construct; identical to SEQ ID NO: 16738
  REGION 1..469: note = neuraminidase__InfluenzaA__ACR52451

SEQ ID NO: 16932 - protein, 469 aa, synthetic construct; identical to SEQ ID NO: 16738
  REGION 1..469: note = neuraminidase__InfluenzaA__ACR52471

SEQ ID NO: 16933 - protein, 469 aa, synthetic construct; identical to SEQ ID NO: 16738
  REGION 1..469: note = neuraminidase__InfluenzaA__ACR52481

SEQ ID NO: 16934 - protein, 469 aa, synthetic construct; identical to SEQ ID NO: 16738
  REGION 1..469: note = neuraminidase__InfluenzaA__ACR52491

SEQ ID NO: 16935 - protein, 469 aa, synthetic construct; identical to SEQ ID NO: 16738
  REGION 1..469: note = neuraminidase__InfluenzaA__ACR54046

SEQ ID NO: 16936 - protein, 469 aa, synthetic construct; identical to SEQ ID NO: 16728
  REGION 1..469: note = neuraminidase__InfluenzaA__ACR54052

SEQ ID NO: 16937 - protein, 469 aa, synthetic construct; identical to SEQ ID NO: 16738
  REGION 1..469: note = neuraminidase__InfluenzaA__ACR54966

SEQ ID NO: 16938 - protein, 469 aa, synthetic construct; identical to SEQ ID NO: 16738
  REGION 1..469: note = neuraminidase__InfluenzaA__ACR54976

SEQ ID NO: 16939 - protein, 469 aa, synthetic construct; identical to SEQ ID NO: 16738
  REGION 1..469: note = neuraminidase__InfluenzaA__ACR54986

SEQ ID NO: 16940 - protein, 469 aa, synthetic construct; identical to SEQ ID NO: 16728
  REGION 1..469: note = neuraminidase__InfluenzaA__ACR54996

SEQ ID NO: 16941 - protein, 469 aa, synthetic construct; identical to SEQ ID NO: 16738
  REGION 1..469: note = neuraminidase__InfluenzaA__ACR55006

SEQ ID NO: 16942 - protein, 469 aa, synthetic construct; identical to SEQ ID NO: 16728
  REGION 1..469: note = neuraminidase__InfluenzaA__ACR56383

SEQ ID NO: 16943 - protein, 469 aa, synthetic construct; identical to SEQ ID NO: 16728
  REGION 1..469: note = neuraminidase__InfluenzaA__ACR56393

SEQ ID NO: 16944 - protein, 469 aa, synthetic construct; identical to SEQ ID NO: 16738
  REGION 1..469: note = neuraminidase__InfluenzaA__ACR56403

SEQ ID NO: 16945 - protein, 469 aa, synthetic construct; identical to SEQ ID NO: 16738
  REGION 1..469: note = neuraminidase__InfluenzaA__ACR56413

SEQ ID NO: 16946 - protein, 469 aa, synthetic construct; identical to SEQ ID NO: 16738
  REGION 1..469: note = neuraminidase__InfluenzaA__ACR56423

SEQ ID NO: 16947 - protein, 469 aa, synthetic construct; identical to SEQ ID NO: 16738
  REGION 1..469: note = neuraminidase__InfluenzaA__ACR56433

SEQ ID NO: 16948 - protein, 469 aa, synthetic construct; identical to SEQ ID NO: 16738
  REGION 1..469: note = neuraminidase__InfluenzaA__ACR56443

SEQ ID NO: 16949 - protein, 469 aa, synthetic construct; identical to SEQ ID NO: 16738
  REGION 1..469: note = neuraminidase__InfluenzaA__ACR56453

SEQ ID NO: 16950 - protein, 470 aa, synthetic construct; identical to SEQ ID NO: 16716
  REGION 1..470: note = neuraminidase__InfluenzaA__ACR58555

SEQ ID NO: 16951 - protein, 470 aa, synthetic construct
  REGION 1..470: note = neuraminidase__InfluenzaA__ACR61658
MNPNQKIITIGSISIAIGIISLMLQIGNIISIWASHSIQTGSQNHTGICNQRIITYENSTWVNHTYVSINNTNVVTGKDKTSVTLAGNSSLCSISGWAIYTKDNSIRIGSKGDVFVIREPFISCSHLECRTFFLTQGALLNDKHSNGTVKDRSPYRALMSCPLGEAPSPYNSKFESVAWSASACHDGMGWLTIGISGPDNGAVAVLKYNGIITETIKSWKKRILRTQESECVCVNGSCFTIMTDGPSNGAASYKIFKIEKGKVTKSIELNAPNFHYEECSCYPDTGTVMCVCRDNWHGSNRPWVSFNQNLDYQIGYICSGVFGDNPRPKDGKGSCNPVTVDGADGVKGFSYKYGNGVWIGRTKSNRLRKGFEMIWDPNGWTDTDSDFSVKQDVVAITDWSGYSGSFVQHPELTGLDCIRPCFWVELVRGLPRENTTIWTSGSSISFCGVDSDTANWSWPDGAELPFTIDK

SEQ ID NO: 16952 - protein, 469 aa, synthetic construct
  REGION 1..469: note = neuraminidase__InfluenzaA__ACR61680
MNPNQKIITIGSVSLTISTICFFMQIAILITTVTLHFKQYEFNSPPNNQVMLCEPTIIERNITEIVYLTNTTIEKEICPKLAEYRNWSKPQCDITGFAPFSKDNSIRLSAGGDIWVTREPYVSCDPDKCYQFALGQGTTLNNVHSNDTVRDRTPYRTLLMNELGVPFHLGTKQVCIAWSSSSCHDGKAWLHVCITGDDKNATASFIYNGRLVDSVVSWSKEILRTQESECVCINGTCIVVMTDGSASGKADTKILFIEEGKIVHTSTLSGSAQHVEECSCYPRYPGVRCVCRDNWKGSNRPIVDINIKDHSIVSSYVCSGLVGDTPRKNDSSSSSHCLDPNNEEGGHGVKGWAFDDGNDVWMGRTISEKSRLGYETFKVIEGWSNPKSKLQINRQVIVDRGNRSGYSGIFSVEGKSCINRCFYVELIRGRKEETEVLWTSNSIVVFCGTSGTYGTGSWPDGADINLMPI

SEQ ID NO: 16953 - protein, 469 aa, synthetic construct
  REGION 1..469: note = neuraminidase__InfluenzaA__ACR61691
MNPNQKIITIGSVSLTISTICFFMQIAILITTVTLHFKQYEFNSPPNNQVMLCEPTIIERNITEIVYLTNTTIEKEICHKLAEYRNWSKPQCDITGFAPFSKDNSIRLSAGGDIWVTREPYVSCDPDKCYQFALGQGTTLNNVHSNNTVRDRTPYRTLLMNELGVPFHLGTKQVCIAWSSSSCHDGKAWLHVCITGDDKNATASFIYNGRLVDSVVSWSKEILRTQESECVCINGTCTVVMTDGSASGKADTKILFIEEGKIVHTSTLSGSAQHVEECSCYPRYPGVRCVCRDNWKGSNRPIVDINIKDHSIVSSYVCSGLVGDTPRKNDSSSSSHCLDPNNEEGGHGVKGWAFDDGNDVWMGRTISEKSRLGYETFKVIEGWSNPKSKLQINRQVIVDRGNRSGYSGIFSVEGKSCINRCFYVELIRGRKEETEVLWTSNSIVVFCGTSGTYGTGSWPDGADINLMPI

SEQ ID NO: 16954 - protein, 469 aa, synthetic construct
  REGION 1..469: note = neuraminidase__InfluenzaA__ACR61702
MNPNQKIITIGSVSLTISTICFFMQIAILITTVTLHFKQYEFNSPPNNQVMLCEPTIIERNITEIVYLTNTTIEKEICPKLAEYRNWSKPQCDITGFAPFSKDNSIRLSAGGDIWVTREPYVSCDPDKCYQFALGQGTTLNNVHSNNTVRDRTPYRTLLMNELGVPFHLGTKQVCIAWSSSSCHDGKAWLHVCITGDDKNATASFIYNGRLVDSVVSWSKEILRTQESECVCINGTCTVVMTDGSASGKADTKILFIEEGKIVHTSTLSGSAQHVEECSCYPRYPGVRCVCRDNWKGSNRPIVDINIKDHSIVSSYVCSGLVGDTPRKNDSSSSSNCLDPNNEEGGHGVKGWAFDDGNDVWMGRTISEKSRLGYETFKVIEGWSNPKSKLQINRQVIVDRGNRSGYSGIFSVEGKSCINRCFYVELIRGRKEETEVLWTSNSIVVFCGTSGTYGTGSWPDGADINLMPI

SEQ ID NO: 16955 - protein, 469 aa, synthetic construct; identical to SEQ ID NO: 16728
  REGION 1..469: note = neuraminidase__InfluenzaA__ACR67201

SEQ ID NO: 16956 - protein, 469 aa, synthetic construct; identical to SEQ ID NO: 16738
  REGION 1..469: note = neuraminidase__InfluenzaA__ACR67202

SEQ ID NO: 16957 - protein, 469 aa, synthetic construct; identical to SEQ ID NO: 16728
  REGION 1..469: note = neuraminidase__InfluenzaA__ACR67203

SEQ ID NO: 16958 - protein, 469 aa, synthetic construct; identical to SEQ ID NO: 16738
  REGION 1..469: note = neuraminidase__InfluenzaA__ACR67204

SEQ ID NO: 16959 - protein, 469 aa, synthetic construct; identical to SEQ ID NO: 16738
  REGION 1..469: note = neuraminidase__InfluenzaA__ACR67246

SEQ ID NO: 16960 - protein, 469 aa, synthetic construct; identical to SEQ ID NO: 16728
  REGION 1..469: note = neuraminidase__InfluenzaA__ACR67256

SEQ ID NO: 16961 - protein, 469 aa, synthetic construct; identical to SEQ ID NO: 16738
  REGION 1..469: note = neuraminidase__InfluenzaA__ACR77451

SEQ ID NO: 16962 - protein, 469 aa, synthetic construct; identical to SEQ ID NO: 16738
  REGION 1..469: note = neuraminidase__InfluenzaA__ACR77461

SEQ ID NO: 16963 - protein, 469 aa, synthetic construct; identical to SEQ ID NO: 16738
  REGION 1..469: note = neuraminidase__InfluenzaA__ACR77471

SEQ ID NO: 16964 - protein, 469 aa, synthetic construct; identical to SEQ ID NO: 16738
  REGION 1..469: note = neuraminidase__InfluenzaA__ACR77481

SEQ ID NO: 16965 - protein, 469 aa, synthetic construct; identical to SEQ ID NO: 16738
  REGION 1..469: note = neuraminidase__InfluenzaA__ACR77491

SEQ ID NO: 16966 - protein, 469 aa, synthetic construct; identical to SEQ ID NO: 16738
  REGION 1..469: note = neuraminidase__InfluenzaA__ACR77501

SEQ ID NO: 16967 - protein, 469 aa, synthetic construct; identical to SEQ ID NO: 16738
  REGION 1..469: note = neuraminidase__InfluenzaA__ACR83527

SEQ ID NO: 16968 - protein, 469 aa, synthetic construct; identical to SEQ ID NO: 16738
  REGION 1..469: note = neuraminidase__InfluenzaA__ACR83539

SEQ ID NO: 16969 - protein, 469 aa, synthetic construct; identical to SEQ ID NO: 16738
  REGION 1..469: note = neuraminidase__InfluenzaA__ACS14669

SEQ ID NO: 16970 - protein, 469 aa, synthetic construct; identical to SEQ ID NO: 16738
  REGION 1..469: note = neuraminidase__InfluenzaA__ACS14679

SEQ ID NO: 16971 - protein, 469 aa, synthetic construct; identical to SEQ ID NO: 16738
  REGION 1..469: note = neuraminidase__InfluenzaA__ACS14689

SEQ ID NO: 16972 - protein, 469 aa, synthetic construct; identical to SEQ ID NO: 16738
  REGION 1..469: note = neuraminidase__InfluenzaA__ACS14699

SEQ ID NO: 16973 - protein, 469 aa, synthetic construct; identical to SEQ ID NO: 16738
  REGION 1..469: note = neuraminidase__InfluenzaA__ACS14709

SEQ ID NO: 16974 - protein, 469 aa, synthetic construct; identical to SEQ ID NO: 16738
  REGION 1..469: note = neuraminidase__InfluenzaA__ACS14719

SEQ ID NO: 16975 - protein, 469 aa, synthetic construct; identical to SEQ ID NO: 16738
  REGION 1..469: note = neuraminidase__InfluenzaA__ACS14729

SEQ ID NO: 16976 - protein, 469 aa, synthetic construct; identical to SEQ ID NO: 16738
  REGION 1..469: note = neuraminidase__InfluenzaA__ACS14739

SEQ ID NO: 16977 - protein, 469 aa, synthetic construct; identical to SEQ ID NO: 16728
  REGION 1..469: note = neuraminidase__InfluenzaA__ACS27192

SEQ ID NO: 16978 - protein, 469 aa, synthetic construct; identical to SEQ ID NO: 16738
  REGION 1..469: note = neuraminidase__InfluenzaA__ACS27202

SEQ ID NO: 16979 - protein, 469 aa, synthetic construct; identical to SEQ ID NO: 16738
  REGION 1..469: note = neuraminidase__InfluenzaA__ACS27212

SEQ ID NO: 16980 - protein, 469 aa, synthetic construct; identical to SEQ ID NO: 16728
  REGION 1..469: note = neuraminidase__InfluenzaA__ACS27222

SEQ ID NO: 16981 - protein, 469 aa, synthetic construct; identical to SEQ ID NO: 16738
  REGION 1..469: note = neuraminidase__InfluenzaA__ACS27232

SEQ ID NO: 16982 - protein, 469 aa, synthetic construct; identical to SEQ ID NO: 16728
  REGION 1..469: note = neuraminidase__InfluenzaA__ACS27242

SEQ ID NO: 16983 - protein, 469 aa, synthetic construct; identical to SEQ ID NO: 16738
  REGION 1..469: note = neuraminidase__InfluenzaA__ACS27252

SEQ ID NO: 16984 - protein, 469 aa, synthetic construct; identical to SEQ ID NO: 16728
  REGION 1..469: note = neuraminidase__InfluenzaA__ACS27771

SEQ ID NO: 16985 - protein, 469 aa, synthetic construct; identical to SEQ ID NO: 16893
  REGION 1..469: note = neuraminidase__InfluenzaA__ACS34969

SEQ ID NO: 16986 - protein, 469 aa, synthetic construct; identical to SEQ ID NO: 16893
  REGION 1..469: note = neuraminidase__InfluenzaA__ACS34970

SEQ ID NO: 16987 - protein, 469 aa, synthetic construct; identical to SEQ ID NO: 16893
  REGION 1..469: note = neuraminidase__InfluenzaA__ACS34971

SEQ ID NO: 16988 - protein, 469 aa, synthetic construct; identical to SEQ ID NO: 16738
  REGION 1..469: note = neuraminidase__InfluenzaA__ACS34972

SEQ ID NO: 16989 - protein, 469 aa, synthetic construct; identical to SEQ ID NO: 16738
  REGION 1..469: note = neuraminidase__InfluenzaA__ACS50081

SEQ ID NO: 16990 - protein, 469 aa, synthetic construct; identical to SEQ ID NO: 16738
  REGION 1..469: note = neuraminidase__InfluenzaA__ACS50087

SEQ ID NO: 16991 - protein, 469 aa, synthetic construct; identical to SEQ ID NO: 16738
  REGION 1..469: note = neuraminidase__InfluenzaA__ACS50094

SEQ ID NO: 16992 - protein, 469 aa, synthetic construct; identical to SEQ ID NO: 16728
  REGION 1..469: note = neuraminidase__InfluenzaA__ACS54264

SEQ ID NO: 16993 - protein, 469 aa, synthetic construct; identical to SEQ ID NO: 16893
  REGION 1..469: note = neuraminidase__InfluenzaA__ACS54265

SEQ ID NO: 16994 - protein, 469 aa, synthetic construct; identical to SEQ ID NO: 16738
  REGION 1..469: note = neuraminidase__InfluenzaA__ACS54266

SEQ ID NO: 16995 - protein, 469 aa, synthetic construct; identical to SEQ ID NO: 16738
  REGION 1..469: note = neuraminidase__InfluenzaA__ACS54267

SEQ ID NO: 16996 - protein, 469 aa, synthetic construct; identical to SEQ ID NO: 16738
  REGION 1..469: note = neuraminidase__InfluenzaA__ACS54268

SEQ ID NO: 16997 - protein, 469 aa, synthetic construct; identical to SEQ ID NO: 16738
  REGION 1..469: note = neuraminidase__InfluenzaA__ACS54303

SEQ ID NO: 16998 - protein, 469 aa, synthetic construct; identical to SEQ ID NO: 16738
  REGION 1..469: note = neuraminidase__InfluenzaA__ACS68823

SEQ ID NO: 16999 - protein, 469 aa, synthetic construct; identical to SEQ ID NO: 16738
  REGION 1..469: note = neuraminidase__InfluenzaA__ACS75824

SEQ ID NO: 17000 - protein, 469 aa, synthetic construct; identical to SEQ ID NO: 16738
  REGION 1..469: note = neuraminidase__InfluenzaA__ACS77929

SEQ ID NO: 17001 - protein, 469 aa, synthetic construct; identical to SEQ ID NO: 16738
  REGION 1..469: note = neuraminidase__InfluenzaA__ACS77939

SEQ ID NO: 17002 - protein, 469 aa, synthetic construct; identical to SEQ ID NO: 16728
  REGION 1..469: note = neuraminidase__InfluenzaA__ACS77949

SEQ ID NO: 17003 - protein, 469 aa, synthetic construct; identical to SEQ ID NO: 16738
  REGION 1..469: note = neuraminidase__InfluenzaA__ACS77959

SEQ ID NO: 17004 - protein, 469 aa, synthetic construct; identical to SEQ ID NO: 16738
  REGION 1..469: note = neuraminidase__InfluenzaA__ACS77969

SEQ ID NO: 17005 - protein, 469 aa, synthetic construct; identical to SEQ ID NO: 16738
  REGION 1..469: note = neuraminidase__InfluenzaA__ACS77979

SEQ ID NO: 17006 - protein, 469 aa, synthetic construct; identical to SEQ ID NO: 16738
  REGION 1..469: note = neuraminidase__InfluenzaA__ACS77989

SEQ ID NO: 17007 - protein, 469 aa, synthetic construct; identical to SEQ ID NO: 16738
  REGION 1..469: note = neuraminidase__InfluenzaA__ACS77999

SEQ ID NO: 17008 - protein, 469 aa, synthetic construct; identical to SEQ ID NO: 16738
  REGION 1..469: note = neuraminidase__InfluenzaA__ACS78009

SEQ ID NO: 17009 - protein, 469 aa, synthetic construct; identical to SEQ ID NO: 16738
  REGION 1..469: note = neuraminidase__InfluenzaA__ACS78019

SEQ ID NO: 17010 - protein, 469 aa, synthetic construct; identical to SEQ ID NO: 16738
  REGION 1..469: note = neuraminidase__InfluenzaA__ACS78039

SEQ ID NO: 17011 - protein, 469 aa, synthetic construct; identical to SEQ ID NO: 16738
  REGION 1..469: note = neuraminidase__InfluenzaA__ACS78049

SEQ ID NO: 17012 - protein, 469 aa, synthetic construct; identical to SEQ ID NO: 16738
  REGION 1..469: note = neuraminidase__InfluenzaA__ACS88274

SEQ ID NO: 17013 - protein, 469 aa, synthetic construct; identical to SEQ ID NO: 16738
  REGION 1..469: note = neuraminidase__InfluenzaA__ACS88275

SEQ ID NO: 17014 - protein, 469 aa, synthetic construct; identical to SEQ ID NO: 16728
  REGION 1..469: note = neuraminidase__InfluenzaA__ACS92572

SEQ ID NO: 17015 - protein, 469 aa, synthetic construct; identical to SEQ ID NO: 16728
  REGION 1..469: note = neuraminidase__InfluenzaA__ACS92582

SEQ ID NO: 17016 - protein, 469 aa, synthetic construct; identical to SEQ ID NO: 16738
  REGION 1..469: note = neuraminidase__InfluenzaA__ACS92592

SEQ ID NO: 17017 - protein, 469 aa, synthetic construct; identical to SEQ ID NO: 16738
  REGION 1..469: note = neuraminidase__InfluenzaA__ACS92603

SEQ ID NO: 17018 - protein, 469 aa, synthetic construct; identical to SEQ ID NO: 16728
  REGION 1..469: note = neuraminidase__InfluenzaA__ACS92614

SEQ ID NO: 17019 - protein, 469 aa, synthetic construct; identical to SEQ ID NO: 16738
  REGION 1..469: note = neuraminidase__InfluenzaA__ACT09115

SEQ ID NO: 17020 - protein, 469 aa, synthetic construct; identical to SEQ ID NO: 16738
  REGION 1..469: note = neuraminidase__InfluenzaA__ACT10309

SEQ ID NO: 17021 - protein, 469 aa, synthetic construct; identical to SEQ ID NO: 16738
  REGION 1..469: note = neuraminidase__InfluenzaA__ACT10315

SEQ ID NO: 17022 - protein, 469 aa, synthetic construct; identical to SEQ ID NO: 16728
  REGION 1..469: note = neuraminidase__InfluenzaA__ACT11059

SEQ ID NO: 17023 - protein, 449 aa, synthetic construct
  REGION 1..449: note = neuraminidase__InfluenzaA__ACT15313
MNPNQKIITIGSICMVIGIVSLMLQIGNMISIWVSHSIQTGNQCQDEPISNTKFLTEKAVASVTLAGNSSLCPISGWAVYSKDNSIRIGSRGDVFVIREPFISCSHLECRTFFLTQGALLNDKHSNGTVKDRSPHRTLMSCPVGEAPSPYNSRFESVAWSASACHDGTSWLTIGISGPDNGAVAVLKYNGIITDTIKSWRNNIMRTQESECACVNGSCFTVMTDGPSSGQASYKIFKMEKGKVVKSVELDAPNYHYEECSCYPDAGEITCVCRDNWHGSNRPWVSFNQNLEYQIGYICSGVFGDNPRPNDGTGSCGPVFPNGAYGVKGFSFKYGNGVWIGRTKSTNSRSGFEMIWDPNGWTGTDSSFSVKQDIVAITDWSGYSGSFVQHPELTGLDCIRPCFWVELIRGRPKESTIWTSGSSISFCGVNGDTVSWSWPDGAELPFTIDK

SEQ ID NO: 17024 - protein, 449 aa, synthetic construct
  REGION 1..449: note = neuraminidase__InfluenzaA__ACT15315
MNPNQKIITIGSICMVIGIVSLMLQIGNMISIWVSHSIQTGNQCQDEPISNTKFLTEKAVASVTLAGNSSLCPISGWAVYSKDNSIRIGSRGDVFVMREPFISCSHLECRTFFLTQGALLNDKHSNGTVKDRSPHRTLMSCPVGEAPSPYNSRFESVAWSASACHDGTSWLTIGISGPDNGAVAVLKYNGIITDTIKSWRNNIMRTQESECACVNGSCFTVMTDGPSSGQASYKIFKMEKGKVVKSVELDAPNYHYEECSCYPDAGEITCVCRDNWHGSNRPWVSFNQNLEYQIGYICSGVFGDNPRPNDGTGSCGPVFPNGAYGVKGFSFKYGNGVWIGRTKSTNSRSGFEMIWDPNGWTGTDSSFSVKQDIVAITDWSGYSGSFVQHPELTGLDCIRPCFWVELIRGRPKESTIWTSGSSISFCGVNGDTVSWSWPDGAELPFTIDK

SEQ ID NO: 17025 - protein, 449 aa, synthetic construct; identical to SEQ ID NO: 17023
  REGION 1..449: note = neuraminidase__InfluenzaA__ACT15319

SEQ ID NO: 17026 - protein, 449 aa, synthetic construct
  REGION 1..449: note = neuraminidase__InfluenzaA__ACT15321
MNPNQKIITIGSICMVIGIVSLMLQIGNMISIWVSHSIQTGNQCQDEPISNTKFLTERAVASVTLAGNSSLCPISGWAVYSKDNSIRIGSRGDVFVIREPFISCSHLECRTFFLTQGALLNDKHSNGTVKDRSPHRTLMSCPVGEAPSPYNSRFESVAWSASACHDGTSWLTIGISGPDNGAVAVLKYNGIITDTIKSWRNNIMRTQESECACVNGSCFTVMTDGPSSGQASYKIFKMEKGKVVKSVELDAPNYHYEECSCYPDAGEITCVCRDNWHGSNRPWVSFNQNLEYQIGYICSGVFGDNPRPNDGTGSCGPVFPNGAYGVKGFSFKYGNGVWIGRTKSTNSRSGFEMIWDPNGWTGTDSSFSVKQDIVAITDWSGYSGSFVQHPELTGLDCIRPCFWVELIRGRPKESTIWTSGSSISFCGVNGDTVSWSWPDGAELPFTIDK

SEQ ID NO: 17027 - protein, 449 aa, synthetic construct; identical to SEQ ID NO: 17023
  REGION 1..449: note = neuraminidase__InfluenzaA__ACT15323

SEQ ID NO: 17028 - protein, 449 aa, synthetic construct; identical to SEQ ID NO: 17023
  REGION 1..449: note = neuraminidase__InfluenzaA__ACT15325

SEQ ID NO: 17029 - protein, 449 aa, synthetic construct
  REGION 1..449: note = neuraminidase__InfluenzaA__ACT15327
MNPNQKIITIGSICMVIGIVSLMLQIGNMISIWVSHSIQTGNRCQDEPISNTKFLTEKAVASVTLAGNSSLCPISGWAVYSKDNSIRIGSRGDVFVIREPFISCSHLECRTFFLTQGALLNDKHSNGTVKDRSPHRTLMSCPVGEAPSPYNSRFESVAWSASACHDGTSWLTIGISGPDNGAVAVLKYNGIITDTIKSWRNNIMRTQESECACVNGSCFTVMTDGPSSGQASYKIFKMEKGKVVKSVELDAPNYHYEECSCYPDAGEITCVCRDNWHGSNRPWVSFNQNLEYKIGYICSGIFGDNPRPNDGTGSCGPVFPNGAYGVKGFSFKYGNGVWIGRTKSTNSRSGFEMIWDPNGWTGTDSSFSVKQDIVAITDWSGYSGSFVQHPELTGLDCIRPCFWVELIRGRPKESTIWTSGSSISFCGVNGDTVSWSWPDGAELPFTIDK

SEQ ID NO: 17030 - protein, 449 aa, synthetic construct
  REGION 1..449: note = neuraminidase__InfluenzaA__ACT15331
MNPNQKIITIGSICMVIGIVSLMLQIGNMISIWVSHSIQTGNQCQDEPISNTKFLTEKAVASVTLAGNSSLCPISGWAVYSKDNSIRIGSRGDVFVIREPFISCSHLECRTFFLTQGALLNDKHSNGTVKDRSPHRTLMSCPVGEAPSPYNSRFESVAWSASACHDGTSWLTIGISGPDNGAVAVLKYNGIITDTIKSWRNNIMRTQESECACVNGSCFTVMTDGPSSGQASYKIFKMEKGKVVKSVELDAPNYHYEECSCYPDAGEITCVCRDNWHGSNRPWVSFNQNLEYQIGYICSGVFGDNPRPNDGTGSCGPVFPNGAYGVKGFSFKYGNGVWIGRTKSTNSRSGFEMIWDPNGWTGTDSSFSVKQDIVAITDWSGYSGSFVQHPELTGLDCIRPCFWVELIRGRPKESTIWTSGSSISFCGVNSDTVSWSWPDGAELPFTIDK

SEQ ID NO: 17031 - protein, 449 aa, synthetic construct
  REGION 1..449: note = neuraminidase__InfluenzaA__ACT15333
MNPNQKIITIGSICMVIGIVSLMLQIGNMISIWVSHSIQTGNQCQGEPISNTKFLTEKAVASVTLAGNSSLCPISGWAVYSKDNSIRIGSRGDVFVIREPFISCSHLECRTFFLTQGALLNDKHSNGTVKDRSPHRTLMSCPVGEAPSPYNSRFESVAWSASACHDGTSWLTIGISGPDNGAVAVLKYNGIITDTIKSWRNNILRTQESECACVNGSCFTVMTDGPSSGQASYKIFKMEKGKVVKSVELDAPNYHYEECSCYPDAGEITCVCRDNWHGSNRPWVSFNQNLEYQIGYICSGVFGDNPRPNDGTGSCGPVVSNGAYGVKGFSFKYGNGVWIGRTKSTNSRSGFEMIWDPNGWTGTDSSFSGKQDIVAITDWSGYSGSFVQHPELTGLDCIRPCFWVELIRGRPKESTIWTSGSSISFCGVNSDTVSWSWPDGAELPFTIDK

SEQ ID NO: 17032 - protein, 449 aa, synthetic construct
  REGION 1..449: note = neuraminidase__InfluenzaA__ACT15335
MNPNQKIITIGSICMVIGIVSLMLQIGNMISIWVSHSIQTGNRCQDEPISNTKFLTEKAVASVTLAGNSSLCPISGWAVYSKDNSIRIGSRGDVFVIREPFISCSHLECRTFFLTQGALLNDKHSNGTVKDRSPHRTLMSCPVGEAPSPYNSRFESVAWSASACHDGTSWLTIGISGPDNGAVAVLKYNGIITDTIKSWRNNIMRTQESECACVNGSCFTVMTDGPSSGQASYKIFKMEKGKVVKSVELDAPNYHYEECSCYPDAGEITCVCRDNWHGSNRPWVSFNQNLEYKIGYICSGIFGDNPRPNDGTGSCGPVLPNGAYGVKGFSFKYGNGVWIGRTKSTNSRSGFEMIWDPNGWTGTDSSFSVKQDIVAITDWSGYSGSFVQHPELTGLDCIRPCFWVELIRGRPKESTIWTSGSSISFCGVNGDTVSWSWPDGAELPFTIDK

SEQ ID NO: 17033 - protein, 449 aa, synthetic construct
  REGION 1..449: note = neuraminidase__InfluenzaA__ACT15337
MNPNQKIITIGSICMVIGIVSLMLQIGNMISIWVSHSIQTGNQCQDEPISNTKFLTEKAVASVTLAGNSSLCPISGWAVYSKDNSIRIGSRGDVFVIREPFISCSHLECRTFFLTQGALLNDKHSNGTVKDRSPHRTLMSCPVGEAPSPYNSRFESVAWSASACHDGTSWLTIGISGPDNGAVAVLKYNGIITDTIKSWRNNIMRTQESECACVNGSCFTVMTDGPSSGQASYKIFKMEKGKVVKSVELDAPNYHYEECSCYPDAGEITCVCRDNWHGSNRPWVSFNQNLEYQIGYICSGVFGDNPRPNDGTGSCGPVFPNGAYGVKGFSFKYGNGVWIGRTKSTNSRSGFEMIWDPNGWTGTDSSFSVKQDIVAVTDWSGYSGSFVQHPELTGLDCIRPCFWVELIRGRPKESTIWTSGSSISFCGVNGDTVSWSWPDGAELPFTIDK

SEQ ID NO: 17034 - protein, 449 aa, synthetic construct; identical to SEQ ID NO: 17023
  REGION 1..449: note = neuraminidase__InfluenzaA__ACT15341

SEQ ID NO: 17035 - protein, 449 aa, synthetic construct
  REGION 1..449: note = neuraminidase__InfluenzaA__ACT15344
MNPNQKIITIGSICMVIGIVSLMLQIGNMISIWVSHSIQTGNQCQDEPISNTKFLTEKAVASVTLAGNSSLCPISGWAVYSKDNSIRIGSRGDVFVIREPFISCSHLECRTFFLTQGALLNDKHSNGTVKDRSPHRTLMSCPVGEAPSPYNSRFESVAWSASACHDGTSWLTIGISGPDNGAVAVLKYNGIITDTIKSWRSNIMRTQESECACVNGSCFTVMTDGPSSGQASYKIFKMEKGKVVKSVELDAPNYHYEECSCYPDAGEITCVCRDNWHGSNRPWVSFNQNLEYQIGYICSGVFGDNPRPNDGTGSCGPVFPNGAYGVKGFSFKYGNGVWIGRTKSTNSRSGFEMIWDPNGWTGTDSSFSVKQDIVAITDWSGYSGSFVQHPELTGLDCIRPCFWVELIRGRPKESTIWTSGSSISFCGVNGDTVSWSWPDGAELPFTIDK

SEQ ID NO: 17036 - protein, 449 aa, synthetic construct
  REGION 1..449: note = neuraminidase__InfluenzaA__ACT15346
MNPNQKIITIGSICMVIGIVSLMLQIGNMISIWVSHSIQTGNQCQDEPISNTKFLTEKAVASVTLAGNSSLCPISGWAVYSKDNNIRIGSRGDVFVIREPFISCSHLECRTFFLTQGALLNDKHSNGTVKDRSPHRTLMSCPVGEAPSPYNSRFESVAWSASACHDGTSWLTIGISGPDNGAVAVLKYNGIITDTIKSWRNNIMRTQESECACVNGSCFTVMTDGPSSGQASYKIFKMEKGKVVKSVELDAPNYHYEECSCYPDAGEITCVCRDNWHGSNRPWVSFNQNLEYQIGYICSGVFGDNPRPNDGTGSCGPVFPNGAYGVKGFSFKYGNGVWIGRTKSTNSRSGFEMIWDPNGWTGTDSSFSVKQDIVAITDWSGYSGSFVQHPELTGLDCIRPCFWVELIRGRPKESTIWTSGSSISFCGVNGDTVSWSWPDGAELPFTIDK

SEQ ID NO: 17037 - protein, 449 aa, synthetic construct
  REGION 1..449: note = neuraminidase__InfluenzaA__ACT15348
MNPNQKIITIGSICMVIGTVSLMLQIGNMISIWVSHSIQTGNQCQGEPISNTKFLTEKAVASVTLAGNSSLCPISGWAVYSKDNSIRIGSRGDVFVIREPFISCSHLECRTFFLTQGALLNDKHSNGTVKDRSPHRTLMSCPVGEAPSPYNSRFESVAWSASACHDGTSWLTIGISGPDNGAVAVLKYNGIITDTIKSWRNNILRTQESECACVNGSCFTVMTDGPSSGQASYKIFKMEKGKVVKSVELDAPNYHYEECSCYPDAGEITCVCRDNWHGSNRPWVSFNQNLEYQIGYICSGVFGDNPRPNDGTGSCGPVVSNGAYGVKGFSFKYGNGVWIGRTKSTNSRSGFEMIWDPNGWTGTDSSFSGKQDIVAITDWSGYSGSFVQHPELTGLDCIRPCFWVELIRGRPKESTIWTSGSSISFCGVNSDTVSWSWPDGAELPFTIDK

SEQ ID NO: 17038 - protein, 449 aa, synthetic construct
  REGION 1..449: note = neuraminidase__InfluenzaA__ACT15350
MNPNQKIITIGSICMVIGIVSLMLQIGNMISIWVSHSIQTGNRCQDEPISNTKFLTEKAVASVTLAGNSSLCPISGWAVYSKDNSIRIGSRGDVFVIREPFISCSHLECRTFFLTQGALLNDKHSNGTVKDRSPHRTLMSCPVGEAPSPYNSRFESVAWSASACHDGTSWLTIGISGPDNGAVAVLKYNGIITDTIKSWRNNIMRTQESECACVNGSCFTVMTDGPSSGQASYKIFKMEKGKVVKSVELDAPNYHYEECSCYPDAGEITCVCRDNWHGSNRPWVSFNQNLEYKIGYICSGIFGDNPRPNDGTGSCGPVFPNGAYGVKGFSFKYGNGVWIGRTKSTNSRSGFEMIWDPNGWTGTDSSFSVKQDIVAITDWSGYSGSFVQHPELTGLDCIRPCFWVELIRGRPKERTIWTSGSSISFCGVNGDTVSWSWPDGAELPFTIDK

SEQ ID NO: 17039 - protein, 449 aa, synthetic construct
  REGION 1..449: note = neuraminidase__InfluenzaA__ACT15352
MNPNQKIITIGSICMVIGIVSLMLQIGNMISIWVSHSIQTGNQCQDEPISNTKFLTEKAVASVTLAGNSSLCPISGWAVYSKDNSIRIGSRGDVFVIREPFISCSHLECRTFFLTQGALLNDKHSNGTVKDRSPHRTLMSCPVGEAPSPYNSRFESVAWSASACHDGTSWLTIGISGPDNGAVAVLKYNGIITDTIKSWRNNILRTQESECACVNGSCFTVMTDGPSSGQASYKIFKMEKGKVVKSVELDAPNYHYEECSCYPDAGEITCVCRDNWHGSNRPWVSFNQNLEYQIGYICSGVFGDNPRPNDGTGSCGPVVSNGAYGVKGFSFKYGNGVWIGRTKSTNSRSGFEMIWDPNGWTGTDSSFSGKQDIVAITDWSGYSGSFVQHPELTGLDCIRPCFWVELIRGRPKESTIWTSGSSISFCGVNSDTVSWSWPDGAELPFTIDK

SEQ ID NO: 17040 - protein, 449 aa, synthetic construct
  REGION 1..449: note = neuraminidase__InfluenzaA__ACT15354
MNPSQKIITIGSICMVIGIVSLMLQIGNMISIWISHSIQTGNQCQDEPISNTKFLTEKAVASVTLAGNSSLCPISGWAVYSKDNSIRIGSRGDVFVIREPFISCSHLECRTFFLTQGALLNDKHSNGTVKDRSPHRTLMSCPVGEAPSPYNSRFESVAWSASACHDGTSWLTIGISGPDNGAVAVLKYNGIITDTIKSWRNNIMRTQESECACVNGSCFTVMTDGPSSGQASYKIFKMEKGKVVKSVELDAPNYHYEECSCYPDAGEITCVCRDNWHGSNRPWVSFNQNLEYQIGYICSGVFGDNPRPNDGTGSCGPVFPNGAYGVKGFSFKYGNGVWIGRTKSTNSRSGFEMIWDPNGWTGTDSSFSVKQDIVAITDWSGYSGSFVQHPELTGLDCIRPCFWVELIRGRPKESTIWTSGSSISFCGVNGDTVSWSWPDGAELPFTIDK

SEQ ID NO: 17041 - protein, 449 aa, synthetic construct
  REGION 1..449: note = neuraminidase__InfluenzaA__ACT15356
MNPNQKIITIGSICMVIGIVSLMLQIGNMISIWVSHSIQTGNQCQDEPISNTKFLTEKAVASVTLAGNSSLCPISGWAVYSKDNSIRIGSRGDVFVIREPFISCSHLECRTFFLTQGALLNDKHSNGTVKDRSPHRTLMSCPVGEAPSPYNSRFESVAWSASACHDGTSWLTIGISGPDNGAVAVLKYNGIITDTIKSWRNNILRTQESECACVNGSCFTVMTDGPSSGQASYKIFKMEKGKVVKSVELDAPNYHYEECSCYPDAGEITCVCRDNWHGSNRPWVSFNQNLEYQIGYICSGVFGDNPRPNDGTGSCGPVFSNGAYGVKGFSFKYGNGVWIGRTKSTNSRSGFEMIWDPNGWTGTDSSFSGKQDIVAITDWSGYSGSFVQHPELTGLDCIRPCFWVELIRGRPKESTIWTSGSSISFCGVNSDTVSWSWPDGAELPFTIDK

SEQ ID NO: 17042 - protein, 449 aa, synthetic construct
  REGION 1..449: note = neuraminidase__InfluenzaA__ACT15358
MNPNQKIITIGSICMVIGIVSLMLQIGNMISIWVSHSIQTGNRCQDEPISNTKFLTEKAVASVTLAGNSSLCPISGWAVYSKDNSIRIGSRGDVFVIREPFISCSHLECRTFFLTHGALLNDKHSNGTVKDRSPHRTLMSCPVGEAPSPYNSRFESVAWSASACHDGTSWLTIGISGPDNGAVAVLKYNGIITDTIKSWRNNIMRTQESECACVNGSCFTVMTDGPSSGQASYKIFKMEKGKVVKSVELDAPNYHYEECSCYPDAGEITCVCRDNWHGSNRPWISFNQNLEYKIGYICSGIFGDNPRPNDGTGSCGPVLPNGAYGVKGFSFKYGNGVWIGRTKSTNSRSGFEMIWDPNGWTGTDSSFSVKQDIVAITDWSGYSGSFVQHPELTGLDCIRPCFWVELIRGRPKESTIWTSGSSISFCGVNGDTVSWSWPDGAELPFTIDK

SEQ ID NO: 17043 - protein, 469 aa, synthetic construct; identical to SEQ ID NO: 14327
  REGION 1..469: note = neuraminidase__InfluenzaA__ACT21515

SEQ ID NO: 17044 - protein, 469 aa, synthetic construct
  REGION 1..469: note = neuraminidase__InfluenzaA__ACT21516
MNPNQKIITIGSVSLTISTICFFMQIAILITTVTLHFKQYEFNSPPNNQVMLCEPTIIERNITEIAYLTNTTIEKEICPKLAEYRNWSKPQCDITGFAPFSKDNSIRLSAGGDIWVTREPYVSCDPDKCYQFALGQGTTLNNVHSNDTVHDRTPYRTLLMNELGVPFHLGTKQVCVAWSSSSCHDGKAWLHVCVTGDEKNATASFIYNGRLVDSIVSWSKEILRTQESECVCINGTCTVVMTDGSASGKADTKILFIEEGKIVHTSTLSGSAQHVEECSCYPRYPGVRCVCRDNWKGSNRPIVDINIKDYSIVSSYVCSGLVGDTPRKNDSSSSSHCLDPNNEEGGHGVKGWAFDDGNDVWMGRTISEKLRSGYETFKVIEGWSNPNSKLQINRQVIVDRGNRSGYSGIFSVEGKSCINRCFYVELIRGRKEENEVLWTSNSIVVFCGTSGTYGTGSWPDGADINLMPI

SEQ ID NO: 17045 - protein, 469 aa, synthetic construct
  REGION 1..469: note = neuraminidase__InfluenzaA__ACT21517
MNPNQKIITIGSVSLTISTICFFMQIAILITTVTLHFKQYEFNSPPNNQVMLCEPTIIERNITEIVYLTNTTIEKEICPKLAEYRNWSEPQCDITGFAPFSKDNSIRLSAGGDIWVTREPYVSCDPDKCYQFALGQGTTLNNVHSNDTVHDRTPYRTLVMNELGVPFHLGTKQVCIAWSSSSCHDGKAWLHVCVTGDDKNATASFIYNGRLVDSIVSWSKEILRTQESECVCINGTCTVVMTDGSASGKADTKILFIEEGKIVHTSTLSGSAQHVEECSCYPRYPGVRCVCRDNWKGSNRPIVDINIKDYSIVSSYVCSGLAGDTPRKNDSSSSSHCLDPNNEEGGHGVKGWAFDDGNDVWMGRTISEKLRSGYETFKVIEGWSNPNSKLQINRQVIVDRGNRSGYSGIFSVEGKSCINRCFYVELIRGRKEETEVLWTSNSIVVFCGTSGTYGTGSWPDGADINLMPI

SEQ ID NO: 17046 - protein, 469 aa, synthetic construct; identical to SEQ ID NO: 16738
  REGION 1..469: note = neuraminidase__InfluenzaA__ACT21574

SEQ ID NO: 17047 - protein, 469 aa, synthetic construct; identical to SEQ ID NO: 16738
  REGION 1..469: note = neuraminidase__InfluenzaA__ACT21585

SEQ ID NO: 17048 - protein, 469 aa, synthetic construct; identical to SEQ ID NO: 16738
  REGION 1..469: note = neuraminidase__InfluenzaA__ACT22011

SEQ ID NO: 17049 - protein, 469 aa, synthetic construct; identical to SEQ ID NO: 16738
  REGION 1..469: note = neuraminidase__InfluenzaA__ACT22012

SEQ ID NO: 17050 - protein, 469 aa, synthetic construct; identical to SEQ ID NO: 16738
  REGION 1..469: note = neuraminidase__InfluenzaA__ACT22013

SEQ ID NO: 17051 - protein, 469 aa, synthetic construct; identical to SEQ ID NO: 16738
  REGION 1..469: note = neuraminidase__InfluenzaA__ACT22014

SEQ ID NO: 17052 - protein, 469 aa, synthetic construct; identical to SEQ ID NO: 16728
  REGION 1..469: note = neuraminidase__InfluenzaA__ACT22015

SEQ ID NO: 17053 - protein, 469 aa, synthetic construct
  REGION 1..469: note = neuraminidase__InfluenzaA__ACT22016
MNPNQKIITIGSVCMTIGMANLILQIGNIISIWISHSIQLGNQNQIETCNQSVITYENNTWVNQTYVNISNTNFAAGQSVVSVKLAGNSSLCPVSGWAIYSKDNSIRIGSKGDVFVIREPFISCSPLECRTFFLTQGALLNDKHSNGTIKDRSPYRTLMSCPIGEVPSPYNSRFESVAWSASACHDGINWLTIGISGPDNGAVAVLKYNGIITDTIKSWRNNILRTQESECACVNGSCFTVMTDGPSNGQASYKIFRIEKGKIVKSVEMNAPNYYYEECSCYPDSSEITCVCRDNWHGSNRPWVSFNQNLEYQIGYICSGIFGDNPRPNDKTGSCGPVSSNGANGVKGFSFKYGNGVWIGRTKSISSRNGFEMIWDPNGWTGTDNNFSIKQDIVGINEWSGYSGSFVQHPELTGLDCIRPCFWVELIRGRPKENTIWTSGSSISFCGVNSDTVGWSWPDGAELPFTIDK

SEQ ID NO: 17054 - protein, 469 aa, synthetic construct; identical to SEQ ID NO: 16738
  REGION 1..469: note = neuraminidase__InfluenzaA__ACT22017

SEQ ID NO: 17055 - protein, 469 aa, synthetic construct; identical to SEQ ID NO: 16738
  REGION 1..469: note = neuraminidase__InfluenzaA__ACT22018

SEQ ID NO: 17056 - protein, 469 aa, synthetic construct; identical to SEQ ID NO: 16728
  REGION 1..469: note = neuraminidase__InfluenzaA__ACT22506

SEQ ID NO: 17057 - protein, 469 aa, synthetic construct; identical to SEQ ID NO: 16738
  REGION 1..469: note = neuraminidase__InfluenzaA__ACT22511

SEQ ID NO: 17058 - protein, 469 aa, synthetic construct; identical to SEQ ID NO: 16738
  REGION 1..469: note = neuraminidase__InfluenzaA__ACT33121

SEQ ID NO: 17059 - protein, 469 aa, synthetic construct; identical to SEQ ID NO: 16738
  REGION 1..469: note = neuraminidase__InfluenzaA__ACT33124

SEQ ID NO: 17060 - protein, 469 aa, synthetic construct; identical to SEQ ID NO: 16738
  REGION 1..469: note = neuraminidase__InfluenzaA__ACT33126

SEQ ID NO: 17061 - protein, 469 aa, synthetic construct; identical to SEQ ID NO: 16728
  REGION 1..469: note = neuraminidase__InfluenzaA__ACT35526

SEQ ID NO: 17062 - protein, 469 aa, synthetic construct; identical to SEQ ID NO: 16738
  REGION 1..469: note = neuraminidase__InfluenzaA__ACT36507

SEQ ID NO: 17063 - protein, 469 aa, synthetic construct; identical to SEQ ID NO: 16738
  REGION 1..469: note = neuraminidase__InfluenzaA__ACT36672

SEQ ID NO: 17064 - protein, 469 aa, synthetic construct; identical to SEQ ID NO: 16738
  REGION 1..469: note = neuraminidase__InfluenzaA__ACT36673

SEQ ID NO: 17065 - protein, 469 aa, synthetic construct; identical to SEQ ID NO: 16738
  REGION 1..469: note = neuraminidase__InfluenzaA__ACT36674

SEQ ID NO: 17066 - protein, 469 aa, synthetic construct; identical to SEQ ID NO: 16738
  REGION 1..469: note = neuraminidase__InfluenzaA__ACT36675

SEQ ID NO: 17067 - protein, 469 aa, synthetic construct; identical to SEQ ID NO: 16738
  REGION 1..469: note = neuraminidase__InfluenzaA__ACT36677

SEQ ID NO: 17068 - protein, 469 aa, synthetic construct
  REGION 1..469: note = neuraminidase__InfluenzaA__ACT36678
MNPNQKIITIGSVCMTIGMANLILQIGNIISIWISHSIQLGNQNQIETCNQSVITYENNTWVNQTYVNISNTNFAARQSVVSVKLAGNSSLCPVSGWAIYSKDNSVRIGSKGDVFVIREPFISCSPLECRTFFLTQGALLNDKHSNGTIKDRSPYRTLMSCPIGEVPSPYNSRFESVAWSASACHDGINWLTIGISGPDNGAVAVLKYNGIITDTIKSWRNNILRTQESECACVNGSCFTVMTDGPSNGQASYKIFRIEKGKIVKSVEMNAPNYHYEECSCYPDSSEITCVCRDNWHGSNRPWVSFNQNLEYQIGYICSGIFGDNPRPNDKTGSCGPVSSNGANGVKGFSFKYGNGVWIGRTKSISSRNGFEMIWDPNGWTGTDNNFSIKQDIVGINEWSGYSGSFVQHPELTGLDCIRPCFWVELIRGRPKENTIWTSGSSISFCGVNSDTVGWSWPDGAELPFTIDK

SEQ ID NO: 17069 - protein, 469 aa, synthetic construct; identical to SEQ ID NO: 16728
  REGION 1..469: note = neuraminidase__InfluenzaA__ACT36679

SEQ ID NO: 17070 - protein, 469 aa, synthetic construct; identical to SEQ ID NO: 16738
  REGION 1..469: note = neuraminidase__InfluenzaA__ACT36680

SEQ ID NO: 17071 - protein, 469 aa, synthetic construct; identical to SEQ ID NO: 16728
  REGION 1..469: note = neuraminidase__InfluenzaA__ACT36682

SEQ ID NO: 17072 - protein, 469 aa, synthetic construct; identical to SEQ ID NO: 16728
  REGION 1..469: note = neuraminidase__InfluenzaA__ACT36683

SEQ ID NO: 17073 - protein, 469 aa, synthetic construct; identical to SEQ ID NO: 16738
  REGION 1..469: note = neuraminidase__InfluenzaA__ACT36684

SEQ ID NO: 17074 - protein, 469 aa, synthetic construct; identical to SEQ ID NO: 16728
  REGION 1..469: note = neuraminidase__InfluenzaA__ACT36685

SEQ ID NO: 17075 - protein, 469 aa, synthetic construct; identical to SEQ ID NO: 16728
  REGION 1..469: note = neuraminidase__InfluenzaA__ACT36686

SEQ ID NO: 17076 - protein, 469 aa, synthetic construct; identical to SEQ ID NO: 16728
  REGION 1..469: note = neuraminidase__InfluenzaA__ACT36687

SEQ ID NO: 17077 - protein, 469 aa, synthetic construct
  REGION 1..469: note = neuraminidase__InfluenzaA__ACT36688
MNPNQKIITIGSVCMTIGMANLILQIGNIISIWISHSIQLGNQNQIETCNQSVITYENNTWVNQTYVNISNTNFAAGQSVVSVKLAGNSSLCPVSGWAIYSKDNSVRIGSKGDVFVIREPFISCSPLECRTFFLTQGALLNDKHSNGTIKDRSPYRTLMSCPIGEVPSPYNSRFESVAWSASACHDGINWLTIGISGPDNGAVAVLKYNGIITDTIKSWRNNILRTQESECACVNGSCFTVMTDGPSNGQASYKIFRIEKGKIVKSVEMNAPNYHYEECSCYPDSSEITCVCRDNWHGSNRPWVSFNQNLEYQIGYICSGIFGDNPRPNDKTGSCGPVSSNGANGVKGFSYKYGNGVWIGRTKSISSRNGFEMIWDPNGWTGTDNNFSIKQDIVGINEWSGYSGSFVQHPELTGLDCIRPCFWVELIRGRPKENTIWTSGSSISFCGVNSDTVGWSWPDGAELPFTIDK

SEQ ID NO: 17078 - protein, 469 aa, synthetic construct; identical to SEQ ID NO: 16728
  REGION 1..469: note = neuraminidase__InfluenzaA__ACT36689

SEQ ID NO: 17079 - protein, 469 aa, synthetic construct; identical to SEQ ID NO: 16768
  REGION 1..469: note = neuraminidase__InfluenzaA__ACT36690

SEQ ID NO: 17080 - protein, 469 aa, synthetic construct; identical to SEQ ID NO: 16728
  REGION 1..469: note = neuraminidase__InfluenzaA__ACT36691

SEQ ID NO: 17081 - protein, 469 aa, synthetic construct; identical to SEQ ID NO: 16768
  REGION 1..469: note = neuraminidase__InfluenzaA__ACT36693

SEQ ID NO: 17082 - protein, 469 aa, synthetic construct; identical to SEQ ID NO: 16738
  REGION 1..469: note = neuraminidase__InfluenzaA__ACT36694

SEQ ID NO: 17083 - protein, 469 aa, synthetic construct; identical to SEQ ID NO: 16738
  REGION 1..469: note = neuraminidase__InfluenzaA__ACT36695

SEQ ID NO: 17084 - protein, 469 aa, synthetic construct; identical to SEQ ID NO: 16738
  REGION 1..469: note = neuraminidase__InfluenzaA__ACT52684

SEQ ID NO: 17085 - protein, 469 aa, synthetic construct; identical to SEQ ID NO: 16728
  REGION 1..469: note = neuraminidase__InfluenzaA__ACT54608

SEQ ID NO: 17086 - protein, 469 aa, synthetic construct
  REGION 1..469: note = neuraminidase__InfluenzaA__ACT66157
MNPNQKIITIGSVCMTIGMANLILQIGNIISIWISHSIQLGNQNQIETCNQSVITYENNTWVNQTYVNISNTNFAAGQSVVSVKLAGNSSLCPVSGWAIYSKDNSIRIGSKGDVFVIREPFISCSPLECRTFFLTQGALLNDKHSNGTIKDRSPYRTLMSCPIGEVPSPYNSRFESVAWSASACHDGINWLTIGISGPDNGAVAVLKYNGIITDTIKSWRNNILRTQESECACVNGSCFTVMTDGPSNGQASYKILRIEKGKIVKSVEMNAPNYHYEECSCYPDSSEITCVCRDNWHGSNRPWVSFNQNLEYQIGYICSGIFGDNPRPNDKTGSCGPVSSNGANGVKGFSFKYGNGVWIGRTKSISSRNGFEMIWDPNGWTGTDNNFSIKQDIVGINEWSGYSGSFVQHPELTGLDCIRPCFWVELIRGRPKENTIWTSGSSISFCGVNSDTVGWSWPDGAELPFTIDK

SEQ ID NO: 17087 - protein, 469 aa, synthetic construct; identical to SEQ ID NO: 16738
  REGION 1..469: note = neuraminidase__InfluenzaA__ACT67117

SEQ ID NO: 17088 - protein, 469 aa, synthetic construct; identical to SEQ ID NO: 16728
  REGION 1..469: note = neuraminidase__InfluenzaA__ACT67121

SEQ ID NO: 17089 - protein, 469 aa, synthetic construct; identical to SEQ ID NO: 16738
  REGION 1..469: note = neuraminidase__InfluenzaA__ACT67240

SEQ ID NO: 17090 - protein, 469 aa, synthetic construct; identical to SEQ ID NO: 16738
  REGION 1..469: note = neuraminidase__InfluenzaA__ACT67241

SEQ ID NO: 17091 - protein, 469 aa, synthetic construct; identical to SEQ ID NO: 16738
  REGION 1..469: note = neuraminidase__InfluenzaA__ACT67243

SEQ ID NO: 17092 - protein, 469 aa, synthetic construct
  REGION 1..469: note = neuraminidase__InfluenzaA__ACT67256
MNPNQKIITIGSVCMTIGMANLILQIGNIISIWISHSIQLGNQNQIETCNQSVITYENNTWVNQTYVNISNTNFAAGQSVVSVKLAGNSSLCPVSGWAIYSKDNSIRIGSKGDVFVIREPFISCSPLECRTFFLTQGALLNDKHSNGTIKDRSPYRTLMSCPIGEVPSPYNSRFESVAWSASACHDGINWLTIGISGPDNGAVAVLKYNGIITDTIKSWRNNILRTQESECACVNGSCFTVMTDGPSDGQASYKIFRIEKGKIVKSVEMNAPNYYYEECSCYPDSSEITCVCRDNWHGSNRPWVSFNQNLEYQIGYICSGIFGDNPRPNDKTGSCGPVSSNGANGVKGFSFKYGNGVWIGRTKSISSRNGFEMIWDPNGWTGTDNNFSIKQDIVGINEWSGYSGSFVQHPELTGLDCIRPCFWVELIRGRPKENTIWTSGSSISFCGVNSDTVGWSWPDGAELPFTIDK

SEQ ID NO: 17093 - protein, 469 aa, synthetic construct
  REGION 1..469: note = neuraminidase__InfluenzaA__ACT68161
MNPNQKIITIGSVCMTIGMANLILQIGNIISIWISHSIQLGNQNQIETCNQSVITYENNTWVNQTYVNISNTNFAAGQSVVSVKLAGNSSLCPVSGWAIYSKDNSIRIGSKGDVFVIREPFISCSPLECRTFFLTQGALLNDKHSNGTIKDRSPYRTLMSCPIGEVPSPYNSRFESVAWSASACHDGINWLTIGISGPDNGAVAVLKYNGIITDTIKSWRNNILRTQESECACVNGSCFTVMTDGPSDGQASYKIFRIEKGKIVKSVEMNAPNYHYEECSCYPDSSEITCVCRDNWHGSNRPWVSFNQNLEYQIGYICSGIFGDNPRPNDKAGSCGPVSSNGANGVKGFSFKYGNGVWIGRTKSISSRNGFEMIWDPNGWTGTDNNFSIKQDIVGINEWSGYSGSFVQHPELTGLDCIRPCFWVELIRGRPKENTIWTSGSSISFCGVNSDTVGWSWPDGAELPFTIDK

SEQ ID NO: 17094 - protein, 469 aa, synthetic construct; identical to SEQ ID NO: 16728
  REGION 1..469: note = neuraminidase__InfluenzaA__ACT68162

SEQ ID NO: 17095 - protein, 469 aa, synthetic construct; identical to SEQ ID NO: 16728
  REGION 1..469: note = neuraminidase__InfluenzaA__ACT68163

SEQ ID NO: 17096 - protein, 469 aa, synthetic construct; identical to SEQ ID NO: 16728
  REGION 1..469: note = neuraminidase__InfluenzaA__ACT68164

SEQ ID NO: 17097 - protein, 469 aa, synthetic construct; identical to SEQ ID NO: 16738
  REGION 1..469: note = neuraminidase__InfluenzaA__ACT68166

SEQ ID NO: 17098 - protein, 469 aa, synthetic construct; identical to SEQ ID NO: 16738
  REGION 1..469: note = neuraminidase__InfluenzaA__ACT68167

SEQ ID NO: 17099 - protein, 469 aa, synthetic construct; identical to SEQ ID NO: 16768
  REGION 1..469: note = neuraminidase__InfluenzaA__ACT68168

SEQ ID NO: 17100 - protein, 469 aa, synthetic construct
  REGION 1..469: note = neuraminidase__InfluenzaA__ACT68169
MNPNQKIITIGSVCMTIGMANLILQIGNIISIWISHSIQLGDQNQIETCNQSVITYENNTWVNQTYVNISNTNFAAGQSVVSVKLAGNSSLCPVSGWAIYSKDNSIRIGSKGDVFVIREPFISCSPLECRTFFLTQGALLNDKHSNETIKDRSPYRTLMSCPIGEVPSPYNSRFESVAWSASACHDGINWLTIGISGPDNGAVAVLKYNGIITDTIKSWRNNILRTQESECACVNGSCFTVMTDGPSDGQASYKIFRIEKGKIVKSVEMNAPNYHYEECSCYPDSSEITCVCRDNWHGSNRPWVSFNQNLEYQIGYICSGIFGDNPRPNDKTGSCGPVSSNGANGVKGFSFKYGNGVWIGRTKSISSRNGFEMIWDPNGWTGTDNNFSIKQDIVGISEWSGYSGSFVQHPELTGLDCIRPCFWVELIRGRPKENTIWTSGSSISFCGVNSDTVGWSWPDGAELPFTIDK

SEQ ID NO: 17101 - protein, 469 aa, synthetic construct; identical to SEQ ID NO: 16728
  REGION 1..469: note = neuraminidase__InfluenzaA__ACT68171

SEQ ID NO: 17102 - protein, 469 aa, synthetic construct; identical to SEQ ID NO: 16728
  REGION 1..469: note = neuraminidase__InfluenzaA__ACT68172

SEQ ID NO: 17103 - protein, 469 aa, synthetic construct; identical to SEQ ID NO: 16738
  REGION 1..469: note = neuraminidase__InfluenzaA__ACT68173

SEQ ID NO: 17104 - protein, 469 aa, synthetic construct; identical to SEQ ID NO: 16738
  REGION 1..469: note = neuraminidase__InfluenzaA__ACT68174

SEQ ID NO: 17105 - protein, 469 aa, synthetic construct
  REGION 1..469: note = neuraminidase__InfluenzaA__ACT68175
MNPNQKIITIGSVCMTIGMANLILQIGNIISIWISHSIQLGNQNQIETCNQSVITYENNTWVNQTYVNISNTNFAAGQSVVSVKLAGNSSLCPVSGWAIYSKDNSVRIGSKGDVFVIREPFISCSPLECRTFFLTQGALLNDKHSNGTIKDRSPYRTLMSCPIGEVPSPYNSRFESVAWSASACHDGINWLTIGISGPDNGAVAVLKYNGIITDTIKSWRNNILRTQESECACVNGSCFTVMTDGPSNGQASYKIFRIEKGKIVKSVEMNAPNYHYEECSCYPDSGEITCVCRDNWHGSNRPWVSFNQNLEYQIGYICSGIFGDNPRPNDKTGSCGPVSSNGANGVKGFSFKYGNGVWIGRTKSISSRNGFEMIWDPNGWTGTDNNFSIKQDIVGINEWSGYSGSFVQHPELTGLDCIRPCFWVELIRGRPKENTIWTSGSSISFCGVNSDTVGWSWPDGAELPFTIDK

SEQ ID NO: 17106 - protein, 469 aa, synthetic construct; identical to SEQ ID NO: 16738
  REGION 1..469: note = neuraminidase__InfluenzaA__ACT68176

SEQ ID NO: 17107 - protein, 469 aa, synthetic construct; identical to SEQ ID NO: 16738
  REGION 1..469: note = neuraminidase__InfluenzaA__ACT68177

SEQ ID NO: 17108 - protein, 469 aa, synthetic construct; identical to SEQ ID NO: 16738
  REGION 1..469: note = neuraminidase__InfluenzaA__ACT68178

SEQ ID NO: 17109 - protein, 469 aa, synthetic construct; identical to SEQ ID NO: 17105
  REGION 1..469: note = neuraminidase__InfluenzaA__ACT68179

SEQ ID NO: 17110 - protein, 469 aa, synthetic construct; identical to SEQ ID NO: 16738
  REGION 1..469: note = neuraminidase__InfluenzaA__ACT68180

SEQ ID NO: 17111 - protein, 469 aa, synthetic construct; identical to SEQ ID NO: 16768
  REGION 1..469: note = neuraminidase__InfluenzaA__ACT79145

SEQ ID NO: 17112 - protein, 469 aa, synthetic construct
  REGION 1..469: note = neuraminidase__InfluenzaA__ACT79155
MNPNQKIITIGSVCMTIGMANLILQIGNIISIWISHSIQLGNQNQIETCNQSVITYENNTWVNQTYVNISNTNFAAGQSVVSVKLAGNSSLCPVGGWAIYSKDNSVRIGSKGDVFVIREPFISCSLLECRTFFLTQGALLNDKHSNGTIKDRSPYRTLMSCPIGEVPSPYNSRFESVAWSASACHDGINWLTIGISGPDNGAVAVLKYNGIITDTIKSWRNNILRTQESECACVNGSCFTVMTDGPSNGQASYKIFRIEKGKIVKSVEMNAPNYHYEECSCYPDSSEITCVCRDNWHGSNRPWVSFNQNLEYQIGYICSGIFGDNPRPNDKTGSCGPVSSNGANGVKGFSFKYGNGVWIGRTKSISSRNGFEMIWDPNGWTGTDNNFSIKQDIVGINEWSGYSGSFVQHPELTGLDCIRPCFWVELIRGRPKENTIWTSGSSISFCGVNSDTVGWSWPDGAELPFTIDK

SEQ ID NO: 17113 - protein, 469 aa, synthetic construct; identical to SEQ ID NO: 16728
  REGION 1..469: note = neuraminidase__InfluenzaA__ACT79165

SEQ ID NO: 17114 - protein, 469 aa, synthetic construct; identical to SEQ ID NO: 16728
  REGION 1..469: note = neuraminidase__InfluenzaA__ACT79175

SEQ ID NO: 17115 - protein, 469 aa, synthetic construct; identical to SEQ ID NO: 16738
  REGION 1..469: note = neuraminidase__InfluenzaA__ACT79185

SEQ ID NO: 17116 - protein, 469 aa, synthetic construct; identical to SEQ ID NO: 16738
  REGION 1..469: note = neuraminidase__InfluenzaA__ACT79622

SEQ ID NO: 17117 - protein, 469 aa, synthetic construct; identical to SEQ ID NO: 17105
  REGION 1..469: note = neuraminidase__InfluenzaA__ACT79630

SEQ ID NO: 17118 - protein, 469 aa, synthetic construct; identical to SEQ ID NO: 16738
  REGION 1..469: note = neuraminidase__InfluenzaA__ACT83798

SEQ ID NO: 17119 - protein, 469 aa, synthetic construct; identical to SEQ ID NO: 16738
  REGION 1..469: note = neuraminidase__InfluenzaA__ACT83808

SEQ ID NO: 17120 - protein, 469 aa, synthetic construct; identical to SEQ ID NO: 16738
  REGION 1..469: note = neuraminidase__InfluenzaA__ACT83818

SEQ ID NO: 17121 - protein, 469 aa, synthetic construct; identical to SEQ ID NO: 16738
  REGION 1..469: note = neuraminidase__InfluenzaA__ACT83828

SEQ ID NO: 17122 - protein, 469 aa, synthetic construct; identical to SEQ ID NO: 16738
  REGION 1..469: note = neuraminidase__InfluenzaA__ACT83838

SEQ ID NO: 17123 - protein, 469 aa, synthetic construct; identical to SEQ ID NO: 16728
  REGION 1..469: note = neuraminidase__InfluenzaA__ACT83848

SEQ ID NO: 17124 - protein, 469 aa, synthetic construct; identical to SEQ ID NO: 16728
  REGION 1..469: note = neuraminidase__InfluenzaA__ACT83858

SEQ ID NO: 17125 - protein, 469 aa, synthetic construct; identical to SEQ ID NO: 16738
  REGION 1..469: note = neuraminidase__InfluenzaA__ACT83868

SEQ ID NO: 17126 - protein, 469 aa, synthetic construct; identical to SEQ ID NO: 16738
  REGION 1..469: note = neuraminidase__InfluenzaA__ACT83878

SEQ ID NO: 17127 - protein, 469 aa, synthetic construct; identical to SEQ ID NO: 16738
  REGION 1..469: note = neuraminidase__InfluenzaA__ACT86002

SEQ ID NO: 17128 - protein, 469 aa, synthetic construct; identical to SEQ ID NO: 16738
  REGION 1..469: note = neuraminidase__InfluenzaA__ACT86012

SEQ ID NO: 17129 - protein, 469 aa, synthetic construct; identical to SEQ ID NO: 16738
  REGION 1..469: note = neuraminidase__InfluenzaA__ACT86022

SEQ ID NO: 17130 - protein, 469 aa, synthetic construct; identical to SEQ ID NO: 16728
  REGION 1..469: note = neuraminidase__InfluenzaA__ACT86032

SEQ ID NO: 17131 - protein, 469 aa, synthetic construct; identical to SEQ ID NO: 16738
  REGION 1..469: note = neuraminidase__InfluenzaA__ACT86042

SEQ ID NO: 17132 - protein, 469 aa, synthetic construct; identical to SEQ ID NO: 16738
  REGION 1..469: note = neuraminidase__InfluenzaA__ACT86052

SEQ ID NO: 17133 - protein, 469 aa, synthetic construct; identical to SEQ ID NO: 16738
  REGION 1..469: note = neuraminidase__InfluenzaA__ACT86062

SEQ ID NO: 17134 - protein, 469 aa, synthetic construct; identical to SEQ ID NO: 16738
  REGION 1..469: note = neuraminidase__InfluenzaA__ACT86072

SEQ ID NO: 17135 - protein, 469 aa, synthetic construct; identical to SEQ ID NO: 16738
  REGION 1..469: note = neuraminidase__InfluenzaA__ACT86082

SEQ ID NO: 17136 - protein, 469 aa, synthetic construct; identical to SEQ ID NO: 16738
  REGION 1..469: note = neuraminidase__InfluenzaA__ACT86092

SEQ ID NO: 17137 - protein, 469 aa, synthetic construct; identical to SEQ ID NO: 16738
  REGION 1..469: note = neuraminidase__InfluenzaA__ACT86102

SEQ ID NO: 17138 - protein, 469 aa, synthetic construct; identical to SEQ ID NO: 16738
  REGION 1..469: note = neuraminidase__InfluenzaA__ACT86112

SEQ ID NO: 17139 - protein, 469 aa, synthetic construct; identical to SEQ ID NO: 16738
  REGION 1..469: note = neuraminidase__InfluenzaA__ACT86122

SEQ ID NO: 17140 - protein, 469 aa, synthetic construct; identical to SEQ ID NO: 16738
  REGION 1..469: note = neuraminidase__InfluenzaA__ACT86132

SEQ ID NO: 17141 - protein, 469 aa, synthetic construct; identical to SEQ ID NO: 16738
  REGION 1..469: note = neuraminidase__InfluenzaA__ACT86142

SEQ ID NO: 17142 - protein, 469 aa, synthetic construct; identical to SEQ ID NO: 16728
  REGION 1..469: note = neuraminidase__InfluenzaA__ACT97323

SEQ ID NO: 17143 - protein, 469 aa, synthetic construct; identical to SEQ ID NO: 16738
  REGION 1..469: note = neuraminidase__InfluenzaA__ACU00934

SEQ ID NO: 17144 - protein, 469 aa, synthetic construct; identical to SEQ ID NO: 16738
  REGION 1..469: note = neuraminidase__InfluenzaA__ACU00944

SEQ ID NO: 17145 - protein, 469 aa, synthetic construct; identical to SEQ ID NO: 17092
  REGION 1..469: note = neuraminidase__InfluenzaA__ACU00954

SEQ ID NO: 17146 - protein, 469 aa, synthetic construct
  REGION 1..469: note = neuraminidase__InfluenzaA__ACU12497
MNPNQKIITIGSVSLTIATICFLMQIAILVTTVTLHFKQYECNSPPNNQVMPCEPTIIERNITEIVYLTNTTIEREICPKLVEYRNWSKPQCRVTGFAPFSKDNSIRLSAGGDIWVTREPYVSCDPGKCYQFALGQGTTLNNRHSNDTVHDRTPYRTLLMNELGVPFHLGTKQVCIAWSSSSCHDGKAWLHVCVTGHDENATASFIYDGRLVDSIVSWSKNILRTQESECVCINGTCTVVMTDGSASERADTKILFIEEGKIVHISPLSGSAQHVEECSCYPRYPGVRCVCRDNWKGSNRPIVDINVKDYSIVSSYVCSGLVGDTPRKNDSSSSSYCRNPNNEKGSHGVKGWAFDDGNDVWMGRTIGEELRSGYETFKVIGGWSTPNSKLQTNRQVIVDRGNRSGYSGIFSVEGKSCINRCFYVELIRGRKQETKVWWTSNSIVVFCGTSGTYGTGSWPDGADINLMPI

SEQ ID NO: 17147 - protein, 470 aa, synthetic construct; identical to SEQ ID NO: 16632
  REGION 1..470: note = neuraminidase__InfluenzaA__ACU12508

SEQ ID NO: 17148 - protein, 469 aa, synthetic construct
  REGION 1..469: note = neuraminidase__InfluenzaA__ACU12519
MNPNQKIITIGSVSLTISTICFFMQIAILITTVTLHFKQYEFNSPPNNQVMLCEPTIIERNITEIVYLTNTTIEKEICPKLAEYRNWSKPQCNITGFAPFSKDNSIRLSAGGDIWVTREPYVSCDPDKCYQFALGQGTTLNNVHSNDTVHDRTPYRTLLMNELGVPFHLGTKQVCIAWSSSSCHDGKAWLHVCITGDDENATASFIYNGRLVDSVVSWSKKILRTQESECVCINGTCTVVMTDGSASGKADTKILFIEEGKIVHTSTLSGSAQHVEECSCYPRYPGVRCVCRDNWKGSNRPIVDINIKDYSIVSSYVCSGLVGDTPRKNDSSSSGHCLDPNNEEGGHGVKGWAFDDGNDVWMGRTISEKLRSGYETFKVIEGWSNPNSKLQINRQVIVDRGNRSGYSGIFSVEGKSCINRCFYVELIRGRNQETEVLWTSNSIVVFCGTSGTYGTGSWPDGADINLMPI

SEQ ID NO: 17149 - protein, 469 aa, synthetic construct
  REGION 1..469: note = neuraminidase__InfluenzaA__ACU12530
MNPNQKIITIGSVSLTISTICFFMQIAILITTVTLHFKQYEFNSPPNNQVMLCEPTIIERNITEIVYLTNTTIEKEICPKLAEYRNWSKPQCNITGFAPFSKDNSIRLSAGGDIWVTREPYVSCDPDKCYQFALGQGTTLNNVHSNDTVHDRTPYRTLLMNELGVPFHLGTKQVCIAWSSSSCHDGKAWLHVCVTGNDKNATASFIYNGRLVDSIVSWSKEILRTQESECVCINGTCTVVMTDGSASGKADTKILFIEEGKIVHTSTLSGSAQHVEECSCYPRYPGVRCVCRDNWKGSNRPIVDINIKDYSIVSSYVCSGLVGDTPRKNDSSSSSHCLDPNNEEGGHGVKGWAFDDGNDVWMGRTISEKLRSGYETFKVIEGWSNPNSKLQINRQVIVDRGNRSGYSGIFSVEGKSCINRCFYVELIRGRKEETEVLWTSNSIVVFCGTSGTYGTGSWPDGADINLMPI

SEQ ID NO: 17150 - protein, 469 aa, synthetic construct
  REGION 1..469: note = neuraminidase__InfluenzaA__ACU12541
MNPNQKIITIGSVSLTISTICFFMQIAILITTVTLHFKQYEFNSPPNNQVMLCEPTIIERNITEIVYLTNTTIEKEICPKLAEYRNWSKPQCNITGFAPFSKDNSIRLSAGGDIWVTREPYVSCDPDKCYQFALGQGTTLNNVHSNDTVHDRTPYRTLLMNELGVPFHLGTKQVCIAWSSSSCHDGKAWLHVCVTGDDKNATASFIYNGRLVDSIVSWSKEILRTQESECVCINGTCTVVMTDGSASGKADTKILFIEEGKIVHTSTLSGSAQHVEECSCYPRYPGVRCVCRDNWKGSNRPIVDINIKDYSIVSSYVCSGLVGDTPRKNDSSSSSHCLDPNNEEGGHGVKGWAFDDGNDVWMGRTISEKLRSGYETFKVIEGWSNPNSKWQINRQVIVDRGNRSGYSGIFSVEGKSCINRCFYVELIRGRKEETEVLWTSNSIVVFCGTSGTYGTGSWPDGADINLMPI

SEQ ID NO: 17151 - protein, 469 aa, synthetic construct
  REGION 1..469: note = neuraminidase__InfluenzaA__ACU12552
MNPNQKIITIGSVSLTISTICFFMQIAILITTVTLHFKQYEFNSPPNNQVMLCEPTIIERNITEIVYLTNTTIEKEICPKLAEYRNWSKPQCNITGFAPFSKDNSIRLSAGGDIWVTREPYVSCDPDKCYQFALGQGTTLNNVHSNDTVHDRTPYRTLLMNELGVPFHLGTKQVCIAWSSSSCHDGKAWLHVCVTGDDKNATASFIYNGRLVDSIVSWSKEILRTQESECVCINGTCTVVMTDGSASGKADTKILFIEEGKIVHTSTLSGSAQHVEECSCYPRYPGVRCVCRDNWKGSNRPIVDINIKDYSIVSGYVCSGLVGDTPRKNDSSSSSHCSDPNNEEGGHGVKGWAFDDGNDVWMGRTISEKLRSGYETFKVIEGWSNPNSKLQINRQVIVDRGNRSGYSGIFSVEGKSCINRCFYVELIRGRKEETEVLWTSNSIVVFCGTSGTYGTGSWPDGADINLMPI

SEQ ID NO: 17152 - protein, 470 aa, synthetic construct
  REGION 1..470: note = neuraminidase__InfluenzaA__ACU12574
MNPNQKIITIGSISIAIGIINLMLQIGNIISIWASHSIQTGSQNNTGICNQRIITYENSTWVNHTYVNINNTNVVAGEDKTSVTLAGNSSLCSISGWAIYTKDNSIRIGSKGDVFVIREPFISCSHLECRTFFLTQGALLNDKHSNGTVKDRSPYRALMSCPLGEAPSPYNSKFESVAWSASACHDGMGWLTIGISGPDNGAVAVLKYNGIITGTIKSWKKQILRTQESECVCMNGSCFTIMTDGPSNKAASYKIFKIEKGKVTKSIELNAPNFYYEECSCYPDTGIVMCVCRDNWHGSNRPWVSFNQNLDYQIGYICSGVFGDNPRPEDGEGSCNPVTVDGANGVKGFSYKYDNGVWIGRTKSNRLRKGFEMIWDPNGWTNTDSDFSVKQDVVAITDWSGYSGSFVQHPELTGLDCIRPCFWVELVRGLPRENTTIWTSGSSISFCGVNSDTANWSWPDGAELPFTIDK

SEQ ID NO: 17153 - protein, 470 aa, synthetic construct; identical to SEQ ID NO: 16632
  REGION 1..470: note = neuraminidase__InfluenzaA__ACU12585

SEQ ID NO: 17154 - protein, 470 aa, synthetic construct
  REGION 1..470: note = neuraminidase__InfluenzaA__ACU12596
MNPNQKIITIGSISIAIGIISLMLQIGSIISIWASHSIRTGSQNNTGICNQRIITYENSTWVNHTYVNINNTNVVAGEDKKSVTLAGNSSLCSISGWAIYTKDNSIRIGSKGDVFVIREPFISCSHLECRTFFLTQGALLNDKHSNGTVKDRSPYRALMSCPLGEAPSPYNSKFESVAWSASACHDGMGWLTIGISGPDNGAVAVLKYNGIITGTIKSWKKQILRTQESECVCMNGSCFTIMTDGPSNKAASYKIFKIEKGKVTKSIELNAPNFYYEECSCYPDTGIVMCVCRDNWHGSNRPWVSFNQNLDYQIGYICSGVFGDNPRPEDGEGSCNPVTVDGANGVKGFSYKYGNGVWIGRTKSNRLRKGFEMIWDPNGWTNTDSDFSVKQDVVAITDWSGYSGSFVQHPELTGLDCIRPCFWVELVRGLPRENTTIWTSGSSISFCGVNSDTANWSWPDGAELPFTIDK

SEQ ID NO: 17155 - protein, 469 aa, synthetic construct; identical to SEQ ID NO: 16738
  REGION 1..469: note = neuraminidase__InfluenzaA__ACU13077

SEQ ID NO: 17156 - protein, 469 aa, synthetic construct; identical to SEQ ID NO: 16738
  REGION 1..469: note = neuraminidase__InfluenzaA__ACU13078

SEQ ID NO: 17157 - protein, 469 aa, synthetic construct; identical to SEQ ID NO: 16738
  REGION 1..469: note = neuraminidase__InfluenzaA__ACU13079

SEQ ID NO: 17158 - protein, 469 aa, synthetic construct; identical to SEQ ID NO: 16738
  REGION 1..469: note = neuraminidase__InfluenzaA__ACU13080

SEQ ID NO: 17159 - protein, 469 aa, synthetic construct; identical to SEQ ID NO: 16728
  REGION 1..469: note = neuraminidase__InfluenzaA__ACU13081

SEQ ID NO: 17160 - protein, 469 aa, synthetic construct; identical to SEQ ID NO: 16738
  REGION 1..469: note = neuraminidase__InfluenzaA__ACU13082

SEQ ID NO: 17161 - protein, 469 aa, synthetic construct; identical to SEQ ID NO: 16738
  REGION 1..469: note = neuraminidase__InfluenzaA__ACU13083

SEQ ID NO: 17162 - protein, 469 aa, synthetic construct
  REGION 1..469: note = neuraminidase__InfluenzaA__ACU13084
MNPNQKIITIGSVCMTIGMANLILQIGNIISIWISHSIQLGNQNQIETCNQSVITYENNTWVNQTYVNISNTNFAAGQSVVSMKLAGNSSLCPVGGWAIYSKDNSVRIGSKGDVFVIREPFISCSPLECRTFFLTQGALLNDKHSNGTIKDRSPYRTLMSCPIGEVPSPYNSRFESVAWSASACHDGINWLTIGISGPDNGAVAVLKYNGIITDTIKSWRNNILRTQESECACVNGSCFTVMTDGPSNGQASYKIFRIEKGKIVKSVEMNAPNYHYEECSCYPDSSEITCVCRDNWHGSNRPWVSFNQNLEYQIGYICSGIFGDNPRPNDKTGSCGPVSSNGANGVKGFSFKYGNGVWIGRTKSISSRNGFEMIWDPNGWTGTDNNFSIKQDIVGINEWSGYSGSFVQHPELTGLDCIRPCFWVELIRGRPKENTIWTSGSSISFCGVNSDTVGWSWPDGAELPFTIDK

SEQ ID NO: 17163 - protein, 469 aa, synthetic construct; identical to SEQ ID NO: 16738
  REGION 1..469: note = neuraminidase__InfluenzaA__ACU16799

SEQ ID NO: 17164 - protein, 469 aa, synthetic construct; identical to SEQ ID NO: 16738
  REGION 1..469: note = neuraminidase__InfluenzaA__ACU16861

SEQ ID NO: 17165 - protein, 469 aa, synthetic construct; identical to SEQ ID NO: 16738
  REGION 1..469: note = neuraminidase__InfluenzaA__ACU16934

SEQ ID NO: 17166 - protein, 469 aa, synthetic construct; identical to SEQ ID NO: 16738
  REGION 1..469: note = neuraminidase__InfluenzaA__ACU16997

SEQ ID NO: 17167 - protein, 469 aa, synthetic construct; identical to SEQ ID NO: 16738
  REGION 1..469: note = neuraminidase__InfluenzaA__ACU17130

SEQ ID NO: 17168 - protein, 469 aa, synthetic construct; identical to SEQ ID NO: 16738
  REGION 1..469: note = neuraminidase__InfluenzaA__ACU17191

SEQ ID NO: 17169 - protein, 469 aa, synthetic construct
  REGION 1..469: note = neuraminidase__InfluenzaA__ACU17262
MNPNQKIITIGSVCMTIGMANLILQIGNIISIWISHSIQLGNQSQIETCNQSVITYENNTWVNQTYVNISNTNFAAGQSVVSVKLAGNSSLCPVSGWAIYSKDNSIRIGSKGDVFVIREPFISCSPLECRTFFLTQGALLNDKHSNGTIKDRSPYRTLMSCPIGEVPSPYNSRFESVAWSASACHDGINWLTIGISGPDNGAVAVLKYNGIITDTIKSWRNNILRTQESECACVNGSCFTVMTDGPSDGQASYKIFRIEKGKIVKSVEMNAPNYHYEECSCYPDSSEITCVCRDNWHGSNRPWVSFNQNLEYQIGYICSGIFGDNPRPNDKTGSCGPVSSNGANGVKGFSFKYGNGVWIGRTKSISSRNGFEMIWDPNGWTGTDNNFSIKQDIVGINEWSGYSGSFVQHPELTGLDCIRPCFWVELIRGRPKENTIWTSGSSISFCGVNSDTVGWSWPDGAELPFTIDK

SEQ ID NO: 17170 - protein, 469 aa, synthetic construct; identical to SEQ ID NO: 16738
  REGION 1..469: note = neuraminidase__InfluenzaA__ACU17325

SEQ ID NO: 17171 - protein, 469 aa, synthetic construct; identical to SEQ ID NO: 16738
  REGION 1..469: note = neuraminidase__InfluenzaA__ACU17393

SEQ ID NO: 17172 - protein, 469 aa, synthetic construct; identical to SEQ ID NO: 16738
  REGION 1..469: note = neuraminidase__InfluenzaA__ACU17454

SEQ ID NO: 17173 - protein, 469 aa, synthetic construct; identical to SEQ ID NO: 16738
  REGION 1..469: note = neuraminidase__InfluenzaA__ACU17524

SEQ ID NO: 17174 - protein, 469 aa, synthetic construct; identical to SEQ ID NO: 17092
  REGION 1..469: note = neuraminidase__InfluenzaA__ACU27043

SEQ ID NO: 17175 - protein, 470 aa, synthetic construct
  REGION 1..470: note = neuraminidase__InfluenzaA__ACU27415
MNPNQKIITIGSISIAIGIISLMLQIGNIISIWASHSIQTGSQNNTGICNQRIITYENSTWVNHTYVNINNTNVVAGEDKTSVTFAGNSSLCSISGWAIYTKDNSIRIGSKGDVFVIREPFISCSHLECRTFFLTQGALLNDKHSNGTVKDRSPYRALMSCPLGEAPSPYNSKFESVAWSASACHDGMGWLTIGISGPDNGAVAVLKYNGIITGTIKSWKKQILRTQESECVCMNGSCFTIMTDGPSNKAASYKIFKIEKGKVTKSIELNAPNFYYEECSCYPDTGIVMCVCRDNWHGSNRPWVSFNQNLDYQIGYICSGVFGDNPRPEDGEGSCNPVTVDGANGVKGFSYKYGNGVWIGRTKSNRLRKGFEMIWDPNGWTNTDSDFSVKQDVVAITDWSGYSGSFVQHPELTGLDCIRPCFWVELVRGLPRENTTIWTSGSSISFCGVNSDTANWSWPDGAELPFTIDK

SEQ ID NO: 17176 - protein, 470 aa, synthetic construct; identical to SEQ ID NO: 17175
  REGION 1..470: note = neuraminidase__InfluenzaA__ACU27416

SEQ ID NO: 17177 - protein, 469 aa, synthetic construct; identical to SEQ ID NO: 16728
  REGION 1..469: note = neuraminidase__InfluenzaA__ACU29961

SEQ ID NO: 17178 - protein, 469 aa, synthetic construct
  REGION 1..469: note = neuraminidase__InfluenzaA__ACU29971
MNPNQKIITIGSVCMTIGMANLILQIGNIISIWISHSIQLGNQNQIETCNQSVITYENNTWVNQTYVNISNTNFAAGQSVVSVKLAGNSSLCPVSGWAIYSKDNSVRIGSKGDVFVIREPFISCSPLECRTFFLTQGALLNDKHSNGTIKDRSPYRTLMSCPIGEVPSPYNSRFESVAWSASACHDGINWLTIGISGPDNGAVAVLKYNGIITDTIKSWRNNILRTQESECACVNGSCFTVMTDGPSNGQASYKIFRIEKGKIVKSVEMNAPNYHYEECSCYPDSSEITCVCRDNWHGSNRPWVSFNQNLEYQIGYICSGIFGDNPRPNDKTGSCGPVSSNGANGVKGFSFKYGNGVWIGRTKSISSRNGFEMIWDPNGWTGTDNNFSIKQDIVGINEWSGYSGSFVQHPELTGLDCIRPCFWVELIRGRPKENTIWTSGSSISFCGVNSDTVGWSWSDGAELPFTIDK

SEQ ID NO: 17179 - protein, 469 aa, synthetic construct; identical to SEQ ID NO: 16738
  REGION 1..469: note = neuraminidase__InfluenzaA__ACU29981

SEQ ID NO: 17180 - protein, 469 aa, synthetic construct; identical to SEQ ID NO: 16738
  REGION 1..469: note = neuraminidase__InfluenzaA__ACU29991

SEQ ID NO: 17181 - protein, 469 aa, synthetic construct; identical to SEQ ID NO: 16738
  REGION 1..469: note = neuraminidase__InfluenzaA__ACU30001

SEQ ID NO: 17182 - protein, 469 aa, synthetic construct; identical to SEQ ID NO: 16738
  REGION 1..469: note = neuraminidase__InfluenzaA__ACU30021

SEQ ID NO: 17183 - protein, 469 aa, synthetic construct
  REGION 1..469: note = neuraminidase__InfluenzaA__ACU30085
MNPNQKIITIGSVCMTIGMANLILQIGNIISIWISHSIQLGNQNQIETCNQSVITYENNTWVNQTYVNISNTNFAAGQSVVSVKLMGNSSLCPVSGWAIYSKDNSVRIGSKGDVFVIREPFISCSPLECRTFFLTQGALLNDKHSNGTIKDRSPYRTLMSCPIGEVPSPYNSRFESVAWSASACHDGINWLTIGISGPDNGAVAVLKYNGIITDTIKSWRNNILRTQESECACVNGSCFTVMTDGPSNGQASYKIFRIEKGKIVKSVEMNAPNYHYEECSCYPDSSEITCVCRDNWHGSNRPWVSFNQNLEYQIGYICSGIFGDNPRPNDKTGSCGPVSSNGANGVKGFSFKYGNGVWIGRTKSISSRNGFEMIWDPNGWTGTDNNFSIKQDIVGINEWSGYSGSFVQHPELTGLDCIRPCFWVELIRGRPKENTIWTSGSSISFCGVNSDTVGWSWPDGAELPFTIDK

SEQ ID NO: 17184 - protein, 469 aa, synthetic construct; identical to SEQ ID NO: 17162
  REGION 1..469: note = neuraminidase__InfluenzaA__ACU30095

SEQ ID NO: 17185 - protein, 469 aa, synthetic construct; identical to SEQ ID NO: 16738
  REGION 1..469: note = neuraminidase__InfluenzaA__ACU30105

SEQ ID NO: 17186 - protein, 469 aa, synthetic construct; identical to SEQ ID NO: 16738
  REGION 1..469: note = neuraminidase__InfluenzaA__ACU30114

SEQ ID NO: 17187 - protein, 469 aa, synthetic construct; identical to SEQ ID NO: 16738
  REGION 1..469: note = neuraminidase__InfluenzaA__ACU30123

SEQ ID NO: 17188 - protein, 469 aa, synthetic construct
  REGION 1..469: note = neuraminidase__InfluenzaA__ACU31177
MNPNQKIITIGSVCMTIGMANLILQIGNIISIWISHLIQLGNQNQIETCNQSVITYENNTWVNQTYVNISNTNFAAGQSVVSVKLAGNSSLCPVSGWAIYSKDNSIRIGSKGDVFVIREPFISCSPLECRTFFLTQGALLNDKHSNGTIKDRSPYRTLMSCPIGEVPSPYNSRFESVAWSASACHDGISWLTIGISGPDNGAVAVLKYNGIITDTIKSWRNNILRTQESECACVNGSCFTVMTDGPSDGQASYKIFRIEKGKIVKSVEMNAPNYHYEECSCYPDSSEITCVCRDNWHGSNRPWVSFNQNLEYQIGYICSGIFGDNPRPNDKTGSCGPVSSNGANGVKGFSFKYGNGVWIGRTKSISSRNGFEMIWDPNGWTGTDNNFSIKQDIVGINEWSGYSGSFVQHPELTGLDCIRPCFWVELIRGRPKENTIWTSGSSISFCGVNSDTVGWSWPDGAELPFTIDK

SEQ ID NO: 17189 - protein, 469 aa, synthetic construct; identical to SEQ ID NO: 16738
  REGION 1..469: note = neuraminidase__InfluenzaA__ACU31178

SEQ ID NO: 17190 - protein, 469 aa, synthetic construct; identical to SEQ ID NO: 16728
  REGION 1..469: note = neuraminidase__InfluenzaA__ACU31179

SEQ ID NO: 17191 - protein, 469 aa, synthetic construct; identical to SEQ ID NO: 16728
  REGION 1..469: note = neuraminidase__InfluenzaA__ACU31180

SEQ ID NO: 17192 - protein, 469 aa, synthetic construct; identical to SEQ ID NO: 16728
  REGION 1..469: note = neuraminidase__InfluenzaA__ACU31181

SEQ ID NO: 17193 - protein, 469 aa, synthetic construct; identical to SEQ ID NO: 16738
  REGION 1..469: note = neuraminidase__InfluenzaA__ACU31182

SEQ ID NO: 17194 - protein, 469 aa, synthetic construct; identical to SEQ ID NO: 16768
  REGION 1..469: note = neuraminidase__InfluenzaA__ACU31183

SEQ ID NO: 17195 - protein, 469 aa, synthetic construct; identical to SEQ ID NO: 16738
  REGION 1..469: note = neuraminidase__InfluenzaA__ACU31184

SEQ ID NO: 17196 - protein, 469 aa, synthetic construct; identical to SEQ ID NO: 16728
  REGION 1..469: note = neuraminidase__InfluenzaA__ACU31185

SEQ ID NO: 17197 - protein, 469 aa, synthetic construct; identical to SEQ ID NO: 16728
  REGION 1..469: note = neuraminidase__InfluenzaA__ACU31186

SEQ ID NO: 17198 - protein, 469 aa, synthetic construct; identical to SEQ ID NO: 16728
  REGION 1..469: note = neuraminidase__InfluenzaA__ACU31187

SEQ ID NO: 17199 - protein, 469 aa, synthetic construct; identical to SEQ ID NO: 16728
  REGION 1..469: note = neuraminidase__InfluenzaA__ACU31188

SEQ ID NO: 17200 - protein, 449 aa, synthetic construct
  REGION 1..449: note = neuraminidase__InfluenzaA__ACU46645
MNPNKKIITIGSICMVTGMVSLMLQIGNLISIWVSHSIHTGNQHKAEPISNTNLLTEKTVASVKLAGNSSLCPINGWAVYSKDNSIRIGSKGDVFVIREPFISCSHLECRTFFLTQGALLNDKHSNGTVKDRSPHRTLMSGPVGEAPSPYNSRFEYVAWSASACHDRTSRLTIGISGPDNGAVAVLKYNGIITDTIKSWRNNILRTQESECACVNGSCFTVMTDGPSNGQASHKIFKMEKGKVVKSVELDAPNYHYEECSCYPDAGEITCVCRDNWHGSNRPWVSFNQNLEYQIGYICSGVFGDNPRPNDGAGSCGPVSSNGAYGVKGFSFKYGNGVWIGRTKSTNSRSGFEMIWDPNGWTETDSSFSVKQDIVAITDWSGYSGSFVQHPELTGLDCIRPCFWVELIRGRPKESTIWTSGSSISFCGVNSDTVGWSWPDGAELPFTIDK

SEQ ID NO: 17201 - protein, 469 aa, synthetic construct
  REGION 1..469: note = neuraminidase__InfluenzaA__ACU56927
MNPNQKIITIGSVCMTIGMANLILQIGNIISIWISHSIQLGNQNQIETCNQSVITYENNTWVNQTYVNISNTNFAAGQSVVSVKLAGNSSLCPVSGWAIYSKDNSIRIGSKGDVFVIREPFISCSPLECRTFFLTQGALLNDKHSNGTIKDRSPYRTLMSCPIGEVPSPYNSRFESVAWSASACHDGINWLTIGISGPDNGAVAVLKYNGIITDTIKSWRNNILRTQESECACVNGSCFTVMTDGPSNGQASYKIFRIDKGKIVKSVEMNAPNYHYEECSCYPDSSEITCVCRDNWHGSNRPWVSFNQNLEYQIGYICSGIFGDNPRPNDKTGSCGPVSSNGANGVKGFSFKYGNGVWIGRTKSISSRNGFEMIWDPNGWTGTDNNFSIKQDIVGINEWSGYSGSFVQHPELTGLDCIRPCFWVELIRGRPKENTIWTSGSSISFCGVNSDTVGWSWPDGAELPFTIDK

SEQ ID NO: 17202 - protein, 469 aa, synthetic construct; identical to SEQ ID NO: 16893
  REGION 1..469: note = neuraminidase__InfluenzaA__ACU56934

SEQ ID NO: 17203 - protein, 469 aa, synthetic construct; identical to SEQ ID NO: 16738
  REGION 1..469: note = neuraminidase__InfluenzaA__ACU64791

SEQ ID NO: 17204 - protein, 469 aa, synthetic construct
  REGION 1..469: note = neuraminidase__InfluenzaA__ACU64811
MNPNQKIITIGSVCMTIGMANLILQIGNIISIWISHSIQLGNQNQIETCNQSVITYENNTWVNQTYVNISNTNFAAGQSMVSVKLAGNSSLCPVSGWAIYSKDNSVRIGSKGDVFIIREPFISCSPLECRTFFLTQGALLNDKHSNGTIKDRSPYRTLMSCPIGEVPSPYNSRFESVAWSASACHDGINWLTIGISGPDNGAVAVLKYNGIITDTIKSWRNNILRTQESECACVNGSCFTVMTDGPSNGQASYKIFRIEKGKIVKSVEMNAPNYHYEECSCYPDSSEITCVCRDNWHGSNRPWVSFNQNLEYQIGYICSGIFGDNPRPNDKTGSCGPVSSNGANGVKGFSFKYGNGVWIGRTKSISSRNGFEMIWDPNGWTGTDNNFSIKQDIVGINEWSGYSGSFVQHPELTGLDCIRPCFWVELIRGRPKENTIWTSGSSISFCGVNSDTVGWSWPDGAELPFTIDK

SEQ ID NO: 17205 - protein, 469 aa, synthetic construct; identical to SEQ ID NO: 16503
  REGION 1..469: note = neuraminidase__InfluenzaA__ACU79885

SEQ ID NO: 17206 - protein, 469 aa, synthetic construct; identical to SEQ ID NO: 14095
  REGION 1..469: note = neuraminidase__InfluenzaA__ACU79896

SEQ ID NO: 17207 - protein, 469 aa, synthetic construct; identical to SEQ ID NO: 14095
  REGION 1..469: note = neuraminidase__InfluenzaA__ACU79918

SEQ ID NO: 17208 - protein, 469 aa, synthetic construct; identical to SEQ ID NO: 14095
  REGION 1..469: note = neuraminidase__InfluenzaA__ACU79929

SEQ ID NO: 17209 - protein, 470 aa, synthetic construct
  REGION 1..470: note = neuraminidase__InfluenzaA__ACU79940
MNPNQKIITIGSISIVIGIISLMLQIGNIISIWASHSIQTGSQNHTGICNQRIITYENSTWVNHTYVNINNTNVVAGKDKTSVTLAGNSSLCSISGWAIYTKDNSIRIGSKGDVFVIREPFISCSHLECRTFFLTQGALLNDKHSNGTVKDRSPYRALMSCPLGEAPSPYNSKFESVAWSASACHDGMGWLTIGISGPDNGAVAVLKYNGIITETIKSWKKRILRTQESECVCVNGSCFTIMTDGPSNGAASYKIFKIEKGKVTKSIELNAPNSHYEECSCYPDTGTVMCVCRDNWHGSNRPWVSFNQNLDYQIGYICSGVFGDNPRPKDGEGSCNPVTVDGADGVKGFSYRYGNGVWIGRTKSNRLRKGFEMIWDPNGWTDTDSDFSVKQDVVAMTDWSGYSGSFVQHPELTGLDCIRPCFWVELVRGRPRENTTIWTSGSSISFCGVNSDTANWSWPDGAELPFTIDK

SEQ ID NO: 17210 - protein, 469 aa, synthetic construct
  REGION 1..469: note = neuraminidase__InfluenzaA__ACU79951
MNPNQKIITIGSVSLTIETVCFLMQIAILATTVTLHFKQHECDSPASNQVMPCEPIIIERNITEIVYLNNTTIEKEICPEVVEYRNWSKPQCQITGFAPFSKDNSIRLSAGGDIWVTREPYVSCDPGKCYQFALGQGTTLDNKHSNGTIHDRIPHRTLLMNELGVPFHLGTKQVCVAWSSSSCHDGKAWLHVCVTGDDRNATASFIYDGRLVDSIGSWSQNILRTQESECVCINGTCTVVMTDGSASGRADTRILFIKEGKIVHISPLSGSAQHIEECSCYPRYPDVRCICRDNWKGSNRPVIDINMEDYSIDSSYVCSGLVGDTPRNDDSSSNSNCRDPNNERGNPGVKGWAFDNGDDVWMGRTISKDSRSGYETFKVIGGWSTPNSKSQVNRQVIVGNNNWSGYSGIFSVEGKSCINRCFYVELIRGRPQETRVWWTSNSIVVFCGTSGTYGTGSWPDGANINFMPI

SEQ ID NO: 17211 - protein, 469 aa, synthetic construct; identical to SEQ ID NO: 16603
  REGION 1..469: note = neuraminidase__InfluenzaA__ACU79973

SEQ ID NO: 17212 - protein, 470 aa, synthetic construct; identical to SEQ ID NO: 16632
  REGION 1..470: note = neuraminidase__InfluenzaA__ACU79984

SEQ ID NO: 17213 - protein, 469 aa, synthetic construct; identical to SEQ ID NO: 16599
  REGION 1..469: note = neuraminidase__InfluenzaA__ACU80006

SEQ ID NO: 17214 - protein, 469 aa, synthetic construct
  REGION 1..469: note = neuraminidase__InfluenzaA__ACU80017
MNTNQRIITIGTICLIVGIISLLLQIGNIILLWMSHSIQTGEKSHPKVCNQSVITYENNTWVNQTYVNISNTNIAAGQGVTPIILAGNSSLCPISGWAIYSKDNSIRIGSKGDIFVMREPFISCSHLECRTFFLTQGALLNDRHSNGTVKDRSPYRTLMSCPIGEAPSPYNSRFESVAWSASACHDGMGWLTIGISGPDNGAVAVLKYNGIITDTIKSWRNKILRTQESECVCINGSCFTIMTDGPSNGQASYKLFKMEKGKIIRSIELDAPNYHYEECSCYPDTGKVVCVCRDNWHASNRPWVSFDQNLDYQIGYICSGVFGDNPRSNDGKGNCGPVLSNGANGVKGFSFRYGNGVWIGRTKSISSRSGFEMIWDPNGWTETDSSFSMKQDIIALTDWSGYSGSFVQHPELTGMNCIRPCFWVELIRGQPKESTIWTSGSSISFCGVNSGTASWSWPDGADLPFTIDK

SEQ ID NO: 17215 - protein, 470 aa, synthetic construct; identical to SEQ ID NO: 16632
  REGION 1..470: note = neuraminidase__InfluenzaA__ACU80028

SEQ ID NO: 17216 - protein, 469 aa, synthetic construct; identical to SEQ ID NO: 16599
  REGION 1..469: note = neuraminidase__InfluenzaA__ACU80039

SEQ ID NO: 17217 - protein, 470 aa, synthetic construct; identical to SEQ ID NO: 16716
  REGION 1..470: note = neuraminidase__InfluenzaA__ACU80050

SEQ ID NO: 17218 - protein, 469 aa, synthetic construct; identical to SEQ ID NO: 17149
  REGION 1..469: note = neuraminidase__InfluenzaA__ACU80061

SEQ ID NO: 17219 - protein, 470 aa, synthetic construct; identical to SEQ ID NO: 16632
  REGION 1..470: note = neuraminidase__InfluenzaA__ACU80072

SEQ ID NO: 17220 - protein, 470 aa, synthetic construct; identical to SEQ ID NO: 16632
  REGION 1..470: note = neuraminidase__InfluenzaA__ACU80094

SEQ ID NO: 17221 - protein, 469 aa, synthetic construct; identical to SEQ ID NO: 16603
  REGION 1..469: note = neuraminidase__InfluenzaA__ACU80105

SEQ ID NO: 17222 - protein, 469 aa, synthetic construct; identical to SEQ ID NO: 16603
  REGION 1..469: note = neuraminidase__InfluenzaA__ACU80127

SEQ ID NO: 17223 - protein, 469 aa, synthetic construct; identical to SEQ ID NO: 16603
  REGION 1..469: note = neuraminidase__InfluenzaA__ACU80138

SEQ ID NO: 17224 - protein, 469 aa, synthetic construct; identical to SEQ ID NO: 16599
  REGION 1..469: note = neuraminidase__InfluenzaA__ACU80160

SEQ ID NO: 17225 - protein, 470 aa, synthetic construct; identical to SEQ ID NO: 16632
  REGION 1..470: note = neuraminidase__InfluenzaA__ACU80171

SEQ ID NO: 17226 - protein, 469 aa, synthetic construct; identical to SEQ ID NO: 16512
  REGION 1..469: note = neuraminidase__InfluenzaA__ACU80182

SEQ ID NO: 17227 - protein, 469 aa, synthetic construct
  REGION 1..469: note = neuraminidase__InfluenzaA__ACU80193
MNPNQKIITIGSVSLTISTICFFMQTAILITTVTLHFKQYEFNSPPNNQVMLCEPTIIERNITEIVYLTNTTIEKEICPKLAEYRNWSKPQCDITGFAPFSKDNSIRLSAGGDIWVTREPYVSCDPDKCYQFALGQGTTLNNVHSNDTVRDRTPYRTLLMNELGVPFHLGTKQVCIAWSSSSCHDGKAWLHVCITGDDKNATASFIYNGRLVDSIVSWSKEILRTQESECVCINGTCTVVMTDGSASGKADTKILFIEEGKIVHTSTLSGSAQHVEECSCYPRYPGVRCVCRDNWKGSNRPIVDINIKDHSIVSSYVCSGLVGDTPRKNDSSSSSHCLDPNNEEGGHGVKGWAFDDGNDVWMGRTISEKSRLGYETFKVIEGWSNPKSKLQINRQVIVDRGDRSGYSGIFSVEGKSCINRCFYVELIRGRKEETEVLWTSNSIVVFCGTSGTYGTGSWPDGADINLMPI

SEQ ID NO: 17228 - protein, 469 aa, synthetic construct; identical to SEQ ID NO: 16512
  REGION 1..469: note = neuraminidase__InfluenzaA__ACU80204

SEQ ID NO: 17229 - protein, 470 aa, synthetic construct
  REGION 1..470: note = neuraminidase__InfluenzaA__ACU80237
MNPNQKIITIGSISIAIGIISLMLQIGNIISIWASHSIQTGNQNNTGICNQRIITYENSTWVNHTYVNINNTNVVAGEDKTSVTLAGNSSLCSISGWAIYTKDNSIRIGSKGDVFVIREPFISCSHLECRTFFLTQGALLNDKHSNGTVKDRSPYRALMSCPLGEAPSPYNSKFESVAWSASACHDGMGWLTIGISGPDNGAVAVLKYNGIITGTIKSWKKQILRTQESECVCMNGSCFTIMTDGPSNKAASYKIFKIEKGKVTKSIELNAPNFHYEECSCYPDTGIVMCVCRDNWHGSNRPWVSFNQNLDYQIGYICSGVFGDNPRPEDGEGSCNPVTVDGANGVKGFSYKYDNGVWIGRTKSNRLRKGFEMIWDPNGWTNTDSDFSVKQDVVAITDWSGYSGSFVQHPELTGLDCIRPCFWVELVRGLPRENTTIWTSGSSISFCGVNSDTANWSWPDGAELPFTIDK

SEQ ID NO: 17230 - protein, 469 aa, synthetic construct; identical to SEQ ID NO: 16603
  REGION 1..469: note = neuraminidase__InfluenzaA__ACU80248

SEQ ID NO: 17231 - protein, 469 aa, synthetic construct; identical to SEQ ID NO: 16603
  REGION 1..469: note = neuraminidase__InfluenzaA__ACU80259

SEQ ID NO: 17232 - protein, 470 aa, synthetic construct
  REGION 1..470: note = neuraminidase__InfluenzaA__ACU80270
MNPNQKIITIGSISIAIGIISLMLQIGNIISIWASHSIQTGSQNNTGICNQRIITYENSTWVNHTYVNINNTNVVAGEDKTSVTLAGNSSLCSISGWAIYTKDNSIRIGSKGDVFVIREPFISCSHLECRTFFLTQGALLNDKHSNGTVKDRSPYRALMSCPLGEAPSPYNSKFESVAWSASACHDGMGWLTIGISGPDNGAVAVLKYNGIITGTIKSWKKQILRTQESECVCMNGSCFTIMTDGPSNKAASYKIFKIEKGKVTKSIELNAPNFHYEECSCYPDTSIVMCVCRDNWHGSNRPWVSFNQNLDYQIGYICSGVFGDNPRPEDGEGSCNPVTVDGANGVKGFSYKYDNGVWIGRTKSNRLRKGFEMIWDPNGWTNTDSDFSVKQDVVAITDWSGYSGSFVQHPELTGLDCIRPCFWVELVRGLPRENTTIWTSGSSISFCGVNSDTANWSWPDGAELPFTIDK

SEQ ID NO: 17233 - protein, 470 aa, synthetic construct
  REGION 1..470: note = neuraminidase__InfluenzaA__ACU80281
MNQNQKIITIGSISIAIGIISLMLQIGNIISIWASHSIQTGSQNNTGICNQRIITYENSTWVNHTYVNINNTNVVAGEDKTSVTLAGNSSLCSISGWAIYTKDNSIRIGSKGDVFVIREPFISCSHLECRTFFLTQGALLNDKHSNGTVKDRSPYRALMSCPLGEAPSPYNSKFESVAWSASACHDGMGWLTIGISGPDNGAVAVLKYNGIITGTIKSWKKQILRTQESECVCMNGSCFTIMTDGPSNKAASYKIFKIEKGKVTKSIELNAPNFHYEECSCYPDTGIVMCVCRDNWHGSNRPWVSFNQNLDYQIGYICSGVFGDNPRPEDGEGSCNPVTVDGANGVKGFSYKYDNGVWIGRTKSNRLRKGFEMIWDPNGWTNTDSDFSVKQDVVAITDWSGYSGSFVQHPELTGLDCIRPCFWVELVRGLPRENTTIWTSGSSISFCGVNSDTANWSWPDGAELPFTIDK

SEQ ID NO: 17234 - protein, 469 aa, synthetic construct
  REGION 1..469: note = neuraminidase__InfluenzaA__ACU80303
MNPNQKIITIGSVSLTISTICFFMQIAILITTVTLHFKQYEFNSSPNNQVMLCEPTIIERNITEIVYLTNTTIEKEICPKLAEYRNWSKPQCDITGFAPFSKDNSIRLSAGGDIWVTREPYVSCDPDKCYQFALGQGTTLNNVHSNNTVRDRTPYRTLLMNELGVPFHLGTKQVCIAWSSSSCHDGKAWLHVCITGDDKNATASFIYNGRLVDSIVSWSKEILRTQESECVCINGTCTVVMTDGSASGKADTKILFIEEGKIVHTSTLSGSAQHVEECSCYPRYPGVRCVCRDNWKGSNRPIVDINIKDHSIVSSYVCSGLVGDTPRKNDSSSSSHCLDPNNEEGGNGVKGWAFDDGNDVWMGRTISEKSRLGYETFKVIEGWSNPKSKLQINRQVIVDRGNRSGYSGIFSVEGKSCINRCFYVELIRGRKEETEVLWTSNSIVVFCGTSGTYGTGSWPDGADINLMPI

SEQ ID NO: 17235 - protein, 469 aa, synthetic construct; identical to SEQ ID NO: 16603
  REGION 1..469: note = neuraminidase__InfluenzaA__ACU80314

SEQ ID NO: 17236 - protein, 469 aa, synthetic construct; identical to SEQ ID NO: 16603
  REGION 1..469: note = neuraminidase__InfluenzaA__ACU80325

SEQ ID NO: 17237 - protein, 469 aa, synthetic construct; identical to SEQ ID NO: 16599
  REGION 1..469: note = neuraminidase__InfluenzaA__ACU80336

SEQ ID NO: 17238 - protein, 469 aa, synthetic construct; identical to SEQ ID NO: 16603
  REGION 1..469: note = neuraminidase__InfluenzaA__ACU80347

SEQ ID NO: 17239 - protein, 469 aa, synthetic construct; identical to SEQ ID NO: 16603
  REGION 1..469: note = neuraminidase__InfluenzaA__ACU80358

SEQ ID NO: 17240 - protein, 469 aa, synthetic construct; identical to SEQ ID NO: 16603
  REGION 1..469: note = neuraminidase__InfluenzaA__ACU80369

SEQ ID NO: 17241 - protein, 469 aa, synthetic construct; identical to SEQ ID NO: 16603
  REGION 1..469: note = neuraminidase__InfluenzaA__ACU80380

SEQ ID NO: 17242 - protein, 469 aa, synthetic construct
  REGION 1..469: note = neuraminidase__InfluenzaA__ACU80391
MNPNQKIITIGSVSLTISTICFFMQIAILITTVTLHFKQYEFNSSPNNQVMLCEPTIIERNITEIVYLTNTIIEKEICPKLAEYRNWSKPQCDITGFAPFSKDNSIRLSAGGDIWVTREPYVSCDPDKCYQFALGQGTTLNNVHSNNTVRDRTPYRTLLMNELGVPFHLGTKQVCIAWSSSSCHDGKAWLHVCITGDDKNATASFIYNGRLVDSIVSWSKEILRTQESECVCINGTCTVVMTDGSASGKADTKILFIEEGKIVHTSTLSGSAQHVEECSCYPRYPGVRCVCRDNWKGSNRPIVDINIKDHSIVSSYVCSGLVGDTPRKNDSSSSSHCLDPNNEEGGHGVKGWAFDDGNDVWMGRTISEKSRLGYETFKVIEGWSNPKSKLQINRQVIVDRGNRSGYSGIFSVEGKSCINRCFYVELIRGRKEETEVLWTSNSIVVFCGTSGTYGTGSWPDGADINLMPI

SEQ ID NO: 17243 - protein, 469 aa, synthetic construct; identical to SEQ ID NO: 16599
  REGION 1..469: note = neuraminidase__InfluenzaA__ACU80402

SEQ ID NO: 17244 - protein, 470 aa, synthetic construct; identical to SEQ ID NO: 16632
  REGION 1..470: note = neuraminidase__InfluenzaA__ACU80413

SEQ ID NO: 17245 - protein, 469 aa, synthetic construct; identical to SEQ ID NO: 16603
  REGION 1..469: note = neuraminidase__InfluenzaA__ACU80427

SEQ ID NO: 17246 - protein, 469 aa, synthetic construct; identical to SEQ ID NO: 16603
  REGION 1..469: note = neuraminidase__InfluenzaA__ACU80438

SEQ ID NO: 17247 - protein, 469 aa, synthetic construct; identical to SEQ ID NO: 16599
  REGION 1..469: note = neuraminidase__InfluenzaA__ACU80461

SEQ ID NO: 17248 - protein, 469 aa, synthetic construct; identical to SEQ ID NO: 16603
  REGION 1..469: note = neuraminidase__InfluenzaA__ACU80603

SEQ ID NO: 17249 - protein, 469 aa, synthetic construct; identical to SEQ ID NO: 16603
  REGION 1..469: note = neuraminidase__InfluenzaA__ACU80614

SEQ ID NO: 17250 - protein, 469 aa, synthetic construct; identical to SEQ ID NO: 16603
  REGION 1..469: note = neuraminidase__InfluenzaA__ACU80625

SEQ ID NO: 17251 - protein, 469 aa, synthetic construct; identical to SEQ ID NO: 16599
  REGION 1..469: note = neuraminidase__InfluenzaA__ACU80636

SEQ ID NO: 17252 - protein, 469 aa, synthetic construct
  REGION 1..469: note = neuraminidase__InfluenzaA__ACU80647
MNPNQKIITIGSVSLTISTICFFMQTAILITTVTLHFKQYEFNSPPNNQVMLCEPTIIERNITEIVYLTNTTIEKEICPKLAEYRNWSKPQCDITGFAPFSKDNSIRLSAGGDIWVTREPYVSCDPDKCYQFALGQGTTLNNVHSNDTVRDRTPYRTLLMNELGVPFHLGTKQVCIAWSSSSCHDGKAWLHVCITGDDKNATASFIYNGRLVDSVVSWSKEILRTQESECVCINGTCTVVMTDGSASGKADTKILFIEEGKIVHTSTLSGSAQHVEECSCYPRYPGVRCVCRDNWKGSNRPIVDINIKDHSIVSSYVCSGLVGDTPRKNDSSSSSHCLDPNNEEGGHGVKGWAFDDGNDVWMGRTISEKSRLGYETFKVIEGWSNPKSKLQINRQVIVDRGDRSGYSGIFSVEGKSCINRCFYVELIRGRKEETEVLWTSNSIVVFCGTSGTYGTGSWPDGADINLMPI

SEQ ID NO: 17253 - protein, 469 aa, synthetic construct
  REGION 1..469: note = neuraminidase__InfluenzaA__ACU80658
MNPNQKIITIGSVSLTISTICFFMQIAILITTVTLHFKQYEFNSPPNNQVMLCEPKIIERNITEIVYLTNTTIEKEICPKLAEYRNWSKPQCDITGFAPFSKDNSIRLSAGGDIWVTREPYVSCDPDKCYQFALGQGTTLNNVHSNDTVRDRTPYRTLLMNELGVPFHLGTKQVCIAWSSSSCHDGKAWLHVCITGDDKNATASFIYNGRLVDSVVSWSKEILRTQESECVCINGTCTVVMTDGSASGKADTKILFIEEGKIVHTSTLSGSAQHVEECSCYPRYPGVRCVCRDNWKGSNRPIVDINIKDHSIVSSYVCSGLVGDTPRKNDSSSSSHCLDPNNEEGGHGVKGWAFDDGNDVWMGRTISEKSRLGYETFKVIEGWSNPKSKLQINRQVIVDRGNRSGYSGIFSVEGKSCINRCFYVELIRGRKEETEVLWTSNSIVVFCGTSGTYGTGSWPDGADINLMPI

SEQ ID NO: 17254 - protein, 469 aa, synthetic construct; identical to SEQ ID NO: 16512
  REGION 1..469: note = neuraminidase__InfluenzaA__ACU80669

SEQ ID NO: 17255 - protein, 469 aa, synthetic construct; identical to SEQ ID NO: 16599
  REGION 1..469: note = neuraminidase__InfluenzaA__ACU80691

SEQ ID NO: 17256 - protein, 469 aa, synthetic construct; identical to SEQ ID NO: 16603
  REGION 1..469: note = neuraminidase__InfluenzaA__ACU80702

SEQ ID NO: 17257 - protein, 469 aa, synthetic construct; identical to SEQ ID NO: 16603
  REGION 1..469: note = neuraminidase__InfluenzaA__ACU80713

SEQ ID NO: 17258 - protein, 469 aa, synthetic construct; identical to SEQ ID NO: 16599
  REGION 1..469: note = neuraminidase__InfluenzaA__ACU80724

SEQ ID NO: 17259 - protein, 469 aa, synthetic construct; identical to SEQ ID NO: 16512
  REGION 1..469: note = neuraminidase__InfluenzaA__ACU80735

SEQ ID NO: 17260 - protein, 469 aa, synthetic construct; identical to SEQ ID NO: 16599
  REGION 1..469: note = neuraminidase__InfluenzaA__ACU80746

SEQ ID NO: 17261 - protein, 469 aa, synthetic construct
  REGION 1..469: note = neuraminidase__InfluenzaA__ACU80757
MNPNQKIITIGSVSLTISTICFFMQIAILITTVTLHFKQYEFNSPPNNQVMLCEPTIIERNITEVVYLTNTTIEKEICPKLAEYRNWSKPQCDITGFAPFSKDNSIRLSAGGDIWVTREPYVSCDPDKCYQFALGQGTTLNNVHSNDTVRDRTPYRTLLMNELGVPFHLGTKQVCIAWSSSSCHDGKAWLHVCITGDDKNATASFIYNGRLVDSVVSWSKEILRTQESECVCINGTCTVVMTDGSASGKADTKILFIEEGKIVHTSTLSGSAQHVEECSCYPRYPGVRCVCRDNWKGSNRPIVDINIKDHSIVSSYVCSGLVGDTPRKNDSSSSSHCLDPNNEEGGHGVKGWAFDDGNDVWMGRTISEKSRLGYETFKVIEGWSNPKSKLQINRQVIVDRGNRSGYSGIFSVEGKSCINRCFYVELIRGRKEETEVLWTSNSIVVFCGTSGTYGTGSWPDGADINLMPI

SEQ ID NO: 17262 - protein, 469 aa, synthetic construct; identical to SEQ ID NO: 17227
  REGION 1..469: note = neuraminidase__InfluenzaA__ACU80768

SEQ ID NO: 17263 - protein, 469 aa, synthetic construct; identical to SEQ ID NO: 16599
  REGION 1..469: note = neuraminidase__InfluenzaA__ACU80779

SEQ ID NO: 17264 - protein, 469 aa, synthetic construct; identical to SEQ ID NO: 16512
  REGION 1..469: note = neuraminidase__InfluenzaA__ACU80790

SEQ ID NO: 17265 - protein, 469 aa, synthetic construct; identical to SEQ ID NO: 16599
  REGION 1..469: note = neuraminidase__InfluenzaA__ACU80801

SEQ ID NO: 17266 - protein, 469 aa, synthetic construct
  REGION 1..469: note = neuraminidase__InfluenzaA__ACU81106
MNPNQKIITIGSVSLTISTICFFMQIAILITTVTLHFKQYEFNSPPNNQVMLCEPTIIERNITEIVYLTNTTIEKEICPKLAEYRNWSKPQCDITGFAPFSKDNSIRLSAGGDIWVTREPYVSCDPDKCYQFALGQGTTLNNVHSNNTVRDRTPYRTLLMNELGVPFHLGTKQVCIAWSSSSCHDGKAWLHVCITGDDKNATASFIYNGRLVDSVVSWSKEILRTQESECVCINGTCTVVMTDGSASGKADTKILFIEEGKIVHTSTLSGSAQHVEECSCYPRYPGVRCVCRDNWKGSNRPIVDINIKDHSIVSSYVCSGLVGDTPRKNDSSSSSHCLDPNNEEGGHGVKGWAFDDGNDVWMGRTISEKSRLGYETFKVIEGWSNPKSKLQINRQVIVDRGNSSGYSGIFSVEGKSCINRCFYVELIRGRKEETEVLWTSNSIVVFCGTSGTYGTGSWPDGADINLMPI

SEQ ID NO: 17267 - protein, 469 aa, synthetic construct; identical to SEQ ID NO: 16893
  REGION 1..469: note = neuraminidase__InfluenzaA__ACU87265

SEQ ID NO: 17268 - protein, 469 aa, synthetic construct; identical to SEQ ID NO: 16738
  REGION 1..469: note = neuraminidase__InfluenzaA__ACU87273

SEQ ID NO: 17269 - protein, 469 aa, synthetic construct; identical to SEQ ID NO: 16738
  REGION 1..469: note = neuraminidase__InfluenzaA__ACV04231

SEQ ID NO: 17270 - protein, 469 aa, synthetic construct; identical to SEQ ID NO: 16738
  REGION 1..469: note = neuraminidase__InfluenzaA__ACV04241

SEQ ID NO: 17271 - protein, 469 aa, synthetic construct; identical to SEQ ID NO: 16738
  REGION 1..469: note = neuraminidase__InfluenzaA__ACV04251

SEQ ID NO: 17272 - protein, 469 aa, synthetic construct; identical to SEQ ID NO: 16738
  REGION 1..469: note = neuraminidase__InfluenzaA__ACV04261

SEQ ID NO: 17273 - protein, 469 aa, synthetic construct; identical to SEQ ID NO: 16738
  REGION 1..469: note = neuraminidase__InfluenzaA__ACV04271

SEQ ID NO: 17274 - protein, 469 aa, synthetic construct
  REGION 1..469: note = neuraminidase__InfluenzaA__ACV04281
MNPNQKIITIGSVCMTIGMANLILQIGNIISIWISHSIQLGNQNQIETCNQSVITYENNTWVNQTYVNIGNTNFAAGQSVVSVKLAGNSSLCPVSGWAIYSKDNSIRIGSKGDVFVIREPFISCSPLECRTFFLTQGALLNDKHSNGTIKDRSPYRTLMSCPIGEVPSPYNSRFESVAWSASACHDGINWLTIGISGPDNGAVAVLKYNGIITDTIKSWRNNILRTQESECACVNGSCFTVMTDGPSDGQASYKIFRIEKGKIVKSVEMNAPNYHYEECSCYPDSSEITCVCRDNWHGSNRPWVSFNQNLEYQIGYICSGIFGDNPRPNDKTGSCGPVSSNGANGVKGFSFKYGNGVWIGRTKSISSRNGFEMIWDPNGWTGTDNNFSIKQDIVGINEWSGYSGSFVQHPELTGLDCIRPCFWVELIRGRPKENTIWTSGSSISFCGVNSDTVGWSWPDGAELPFTIDK

SEQ ID NO: 17275 - protein, 469 aa, synthetic construct; identical to SEQ ID NO: 16738
  REGION 1..469: note = neuraminidase__InfluenzaA__ACV04291

SEQ ID NO: 17276 - protein, 469 aa, synthetic construct; identical to SEQ ID NO: 16738
  REGION 1..469: note = neuraminidase__InfluenzaA__ACV04301

SEQ ID NO: 17277 - protein, 469 aa, synthetic construct; identical to SEQ ID NO: 16738
  REGION 1..469: note = neuraminidase__InfluenzaA__ACV04321

SEQ ID NO: 17278 - protein, 469 aa, synthetic construct; identical to SEQ ID NO: 16738
  REGION 1..469: note = neuraminidase__InfluenzaA__ACV04331

SEQ ID NO: 17279 - protein, 469 aa, synthetic construct; identical to SEQ ID NO: 16738
  REGION 1..469: note = neuraminidase__InfluenzaA__ACV04341

SEQ ID NO: 17280 - protein, 469 aa, synthetic construct; identical to SEQ ID NO: 16738
  REGION 1..469: note = neuraminidase__InfluenzaA__ACV04351

SEQ ID NO: 17281 - protein, 469 aa, synthetic construct; identical to SEQ ID NO: 16738
  REGION 1..469: note = neuraminidase__InfluenzaA__ACV04361

SEQ ID NO: 17282 - protein, 469 aa, synthetic construct; identical to SEQ ID NO: 16738
  REGION 1..469: note = neuraminidase__InfluenzaA__ACV04371

SEQ ID NO: 17283 - protein, 469 aa, synthetic construct; identical to SEQ ID NO: 16738
  REGION 1..469: note = neuraminidase__InfluenzaA__ACV04381

SEQ ID NO: 17284 - protein, 469 aa, synthetic construct; identical to SEQ ID NO: 16738
  REGION 1..469: note = neuraminidase__InfluenzaA__ACV04391

SEQ ID NO: 17285 - protein, 469 aa, synthetic construct; identical to SEQ ID NO: 16738
  REGION 1..469: note = neuraminidase__InfluenzaA__ACV04401

SEQ ID NO: 17286 - protein, 469 aa, synthetic construct; identical to SEQ ID NO: 16728
  REGION 1..469: note = neuraminidase__InfluenzaA__ACV04411

SEQ ID NO: 17287 - protein, 469 aa, synthetic construct; identical to SEQ ID NO: 16738
  REGION 1..469: note = neuraminidase__InfluenzaA__ACV04492

SEQ ID NO: 17288 - protein, 469 aa, synthetic construct; identical to SEQ ID NO: 16738
  REGION 1..469: note = neuraminidase__InfluenzaA__ACV04502

SEQ ID NO: 17289 - protein, 469 aa, synthetic construct; identical to SEQ ID NO: 16728
  REGION 1..469: note = neuraminidase__InfluenzaA__ACV04512

SEQ ID NO: 17290 - protein, 469 aa, synthetic construct
  REGION 1..469: note = neuraminidase__InfluenzaA__ACV04522
MNPNQKIITIGSVCMTIGMANLILQIGNIISIWISHSIQLGNQNQIETCNQSVITYENNTWVNQTYVNISNTNFAAGKSVVSVKLAGNSSLCPVSGWAIYSKDNSIRIGSKGDVFVIREPFISCSPLECRTFFLTQGALLNDKHSNGTIKDRSPYRTLMSCPIGEVPSPYNSRFESVAWSASACHDGINWLTIGISGPDNGAVAVLKYNGIITDTIKSWRNNILRTQESECACVNGSCFTVMTDGPSDGQASYKIFRIEKGKIVKSVEMNAPNYHYEECSCYPDSSEITCVCRDNWHGSNRPWVSFNQNLEYQIGYICSGIFGDNPRPNDKTGSCGPVSSNGANGVKGFSFKYGNGVWIGRTKSISSRNGFEMIWDPNGWTGTDNNFSIKQDIVGINEWSGYSGSFVQHPELTGLDCIRPCFWVELIRGRPKENTIWTSGSSISFCGVNSDTVGWSWPDGAELPFTIDK

SEQ ID NO: 17291 - protein, 469 aa, synthetic construct; identical to SEQ ID NO: 16738
  REGION 1..469: note = neuraminidase__InfluenzaA__ACV04532

SEQ ID NO: 17292 - protein, 469 aa, synthetic construct; identical to SEQ ID NO: 16738
  REGION 1..469: note = neuraminidase__InfluenzaA__ACV04542

SEQ ID NO: 17293 - protein, 469 aa, synthetic construct; identical to SEQ ID NO: 16738
  REGION 1..469: note = neuraminidase__InfluenzaA__ACV04552

SEQ ID NO: 17294 - protein, 469 aa, synthetic construct; identical to SEQ ID NO: 16738
  REGION 1..469: note = neuraminidase__InfluenzaA__ACV04562

SEQ ID NO: 17295 - protein, 469 aa, synthetic construct; identical to SEQ ID NO: 16728
  REGION 1..469: note = neuraminidase__InfluenzaA__ACV04572

SEQ ID NO: 17296 - protein, 469 aa, synthetic construct; identical to SEQ ID NO: 16738
  REGION 1..469: note = neuraminidase__InfluenzaA__ACV04582

SEQ ID NO: 17297 - protein, 469 aa, synthetic construct
  REGION 1..469: note = neuraminidase__InfluenzaA__ACV04758
MNPNQKIITIGSVCMTIGMANLILQIGNIISIWISHSIQLGNQNQIETCNQSVITYENNTWVNQTYVNISNTNFAAGQSVVSVKLAGNSSLCPVSGWAIYSKDNSIRIGSKGDVFVIREPFISCSPSECRTFFLTQGALLNDKHSNGTIKDRSPYRTLMSCPIGEVPSPYNSRFESVAWSASACHDGINWLTIGISGPDNGAVAVLKYNGIITDTIKSWRNNILRTQESECACVNGSCFTVMTDGPSNGQASYKIFRIEKGKIVKSVEMNAPNYHYEECSCYPDSSEITCVCRDNWHGSNRPWVSFNQNLEYQIGYICSGIFGDNPRPNDKTGSCGPVSSNGANGVKGFSFKYGNGVWIGRTKSISSRNGFEMIWDPNGWTGTDNNFSIKQDIVGINEWSGYSGSFVQHPELTGLDCIRPCFWVELIRGRPKENTIWTSGSSISFCGVNSDTVGWSWPDGAELPFTIDK

SEQ ID NO: 17298 - protein, 469 aa, synthetic construct; identical to SEQ ID NO: 16728
  REGION 1..469: note = neuraminidase__InfluenzaA__ACV33087

SEQ ID NO: 17299 - protein, 469 aa, synthetic construct; identical to SEQ ID NO: 16738
  REGION 1..469: note = neuraminidase__InfluenzaA__ACV33107

SEQ ID NO: 17300 - protein, 469 aa, synthetic construct; identical to SEQ ID NO: 16738
  REGION 1..469: note = neuraminidase__InfluenzaA__ACV33117

SEQ ID NO: 17301 - protein, 469 aa, synthetic construct; identical to SEQ ID NO: 16738
  REGION 1..469: note = neuraminidase__InfluenzaA__ACV33127

SEQ ID NO: 17302 - protein, 469 aa, synthetic construct; identical to SEQ ID NO: 16738
  REGION 1..469: note = neuraminidase__InfluenzaA__ACV33137

SEQ ID NO: 17303 - protein, 469 aa, synthetic construct; identical to SEQ ID NO: 16738
  REGION 1..469: note = neuraminidase__InfluenzaA__ACV33147

SEQ ID NO: 17304 - protein, 469 aa, synthetic construct
  REGION 1..469: note = neuraminidase__InfluenzaA__ACV33157
MNPNQKIITIGSVCMTIGMANLILQIGNIISIWISHSIQLGNQNQIETCNQSVITYENNTWVNQTYVNISNTNFAAGQSVVSVKLAGNSSLCPVSGWAIYSKDNSIRIGSKGDVFVIREPFISCSPLECRTFFLTQGALLNDKHSNGTIKDRSPYRTLMSCPVGEVPSPYNSRFESVAWSASACHDGINWLTIGISGPDNGAVAVLKYNGIITDTIKSWRNNILRTQESECACVNGSCFTVMTDGPSDGQASYKIFRIEKGKIVKSVEMNAPNYHYEECSCYPDSSEITCVCRDNWHGSNRPWVSFNQNLEYQIGYICSGIFGDNPRPNDKTGSCGPVSSNGANGVKGFSFKYGNGVWIGRTKSISSRNGFEMIWDPNGWTGTDNNFSIKQDIVGINEWSGYSGSFVQHPELTGLDCIRPCFWVELIRGRPKENTIWTSGSSISFCGVNSDTVGWSWPDGAELPFTIDK

SEQ ID NO: 17305 - protein, 469 aa, synthetic construct
  REGION 1..469: note = neuraminidase__InfluenzaA__ACV33167
MNPNQKIITIGSVCMTIGMANLILQIGNIISIWISHSIQLGNQNQIETCNQSVITYENNTWVNQTYVNISNTNFAAGQSVVSVKLAGNSSLCPVSGWAIYSKDNSIRIGSKGDVFVIREPFISCSPLECRTFFLTQGALLNDKHSNGTIKDRSPYRTLMSCPIGEVPSPYNSRFESVAWSASACHDGINWLTIGISGPDNGAVAVLKYNGIITDTIKSWRNNILRTQESECACVNGSCFTVMTDGPSDGQASYKIFRIEKGKIVKSVEMNAPNYHYEECSCYPDSSEITCVCRDNWHGSNRPWVSFNQNLEYQIGYICSGIFGDNPRPNDKTGSCGPVSSNGANGVKGFSFKYGNGVWIGRTKSISSRNGFEMIWDPNGWTGTDNNFSIKQDIVGINEWSGYSGSFVQHPELTGLDCIRPCFWVELIRGRPKENTIWTSGSSISFCGVNSDTVDWSWPDGAELPFTIDK

SEQ ID NO: 17306 - protein, 469 aa, synthetic construct; identical to SEQ ID NO: 16738
  REGION 1..469: note = neuraminidase__InfluenzaA__ACV33177

SEQ ID NO: 17307 - protein, 469 aa, synthetic construct
  REGION 1..469: note = neuraminidase__InfluenzaA__ACV41993
MNPNQKIITIGSVCMTIGMANLILQIGNIISIWISHSIQLGNQNQIEICNQSVITYENNTWVNQTYVNISNTNFAAGQSVVSVKLAGNSSLCPVGGWAIYSKDNSVRIGSKGDVFVIREPFISCSPLECRTFFLTQGALLNDKHSNGTIKDRSPYRTLMSCPIGEVPSPYNSRFESVAWSASACHDGINWLTIGISGPDNGAVAVLKYNGIITDTIKSWRNNILRTQESECACVNGSCFTVMTDGPSNGQASYKIFRIEKGKIVKSVEMNAPNYHYEECSCYPDSSEITCVCRDNWHGSNRPWVSFNQNLEYQIGYICSGIFGDNPRPNDKTGSCGPVSSNGANGVKGFSFKYGNGVWIGRTKSISSRNGFEMIWDPNGWTGTDNNFSIKQDIVGINEWSGYSGSFVQHPELTGLDCIRPCFWVELIRGRPKENTIWTSGSSISFCGVNSDTVGWSWPDGAELPFTIDK

SEQ ID NO: 17308 - protein, 469 aa, synthetic construct; identical to SEQ ID NO: 16738
  REGION 1..469: note = neuraminidase__InfluenzaA__ACV42010

SEQ ID NO: 17309 - protein, 469 aa, synthetic construct; identical to SEQ ID NO: 16738
  REGION 1..469: note = neuraminidase__InfluenzaA__ACV42020

SEQ ID NO: 17310 - protein, 469 aa, synthetic construct; identical to SEQ ID NO: 16503
  REGION 1..469: note = neuraminidase__InfluenzaA__ACV49504

SEQ ID NO: 17311 - protein, 453 aa, synthetic construct
  REGION 1..453: note = neuraminidase__InfluenzaA__ACV49537
MNPNQKIITIGSICMVVGIISLILQIGNIISIWISHSIQTGNQNHTGICNQGIITYNVVAGQDSTSVILTGNSSLCPIRGWAIHSKDNGIRIGSKGDVFVIREPFISCSHLECRTFFLTQGALLNDKHSNGAVKDRSPYRALMSCPVGEAPSPYNSRFESVAWSASACHDGMGWLTIGISGPDNGAVAVLKYNGIITETIKSWRKKILRTQESECTCVNGSCFTIMTDGPSDGLASYKIFKIEKGKVTKSIELNAPNSHYEECSCYPDTGKVMCVCRDNWHGSNRPWVSFDQNLDYQIGYICSGVFGDNPRPKDGTGSCGPVSADGANGVKGFSYRYGNGVWIGRTKSDSSRHGFEMIWDPNGWTETDSRFSVRQDVVAMTDRSGYSGSFVQHPELTGLDCMRPCFWVELIRGRPEEKTIWTSGSIISFCGVNSDTVDWSWPDGAELPFTIDK

SEQ ID NO: 17312 - protein, 453 aa, synthetic construct
  REGION 1..453: note = neuraminidase__InfluenzaA__ACV49559
MNPNQKIITIGSICMVVGIISLILQIGNIISIWISHSIQAGSSTWVNQTYVNISNTNVVAGQDATSVILTGNSSLCPIRGWAIYSKDNGIRIGSKGDIFVIREPFISCSHLECRAFFLTQGALLNDKHSNGTVKDRSPYRALMSCPVGEAPSPYNSRFESVAWSASACHDGMGWLTIGISGPDNGAVAVLKYNGIITETIKSWRKKILRTQESECACVNGSCFTIMTDGPSDGPASYKIFKIEKGKVTKSIELDAPNSHYEECSCYPDTGKVMCVCRDNWHGSNRPWVSFDQNLDYQIGYICSGVFGDTPRPKDGTGSCGPVSVDGANGVKGFSYRYGDGVWIGRTKSQSSRHGFEMIWDPNGWTETDSRFSVRQDVVAITDWSGYSGSFVQHPELTGLDCMRPCFWVELIRGQPKEKTIWTSGSSISFCGVNSDTVDWSWPDGAELPFTIDK

SEQ ID NO: 17313 - protein, 464 aa, synthetic construct
  REGION 1..464: note = neuraminidase__InfluenzaA__ACV49570
MNPNQKIITIGSICMVVGIISLILQIGNIVSIWISHSIQTGNQNHTGTCDQSIITYKNSTWVNQTYVNVVAGKDTTSVILAGNSSLCPIRGWAIYSKDNGVRIGSKGDVFVIREPFISCSHLECRTFFLTQGALLNDKHSNGTVKDRSPYRALMSCPVGEAPSPYNSRFESVAWSASACHDGMGWLTIGISGPDDGAVAVLKYNGIITETIKSWRKEILRTQESECVCVNGSCFTIMTDGPSGGPASYKIFKIEKGKVTKSIELDAPNSHYEECSCYPDTSKVMCVCRDNWHGSNRPWVSFDQNLDYQMGYICSGVFGDNPRPKDGKGSCGPVYVDGANGVKGFSYKYGNGVWIGRTKSNSSRQGFEMIWDPNGWTETDSNFFTKQDVVAVTDWSGYSGSFVQHPELTGLDCMRPCFWVELIRGRPKENTIWTSGSSISFCGVNSDTVDWSWPDGAELPFTIDK

SEQ ID NO: 17314 - protein, 469 aa, synthetic construct; identical to SEQ ID NO: 16404
  REGION 1..469: note = neuraminidase__InfluenzaA__ACV49581

SEQ ID NO: 17315 - protein, 469 aa, synthetic construct; identical to SEQ ID NO: 16404
  REGION 1..469: note = neuraminidase__InfluenzaA__ACV49592

SEQ ID NO: 17316 - protein, 469 aa, synthetic construct
  REGION 1..469: note = neuraminidase__InfluenzaA__ACV49603
MNPNQKIITIGSVSLTIETVCFLMQIAILATTVTLHFKQHECDSPASNQVMPCEPIIIERNITEIVYLNNTTIEKEICPEVVEYRNWSKPQCQITGFAPFSKDNSIRLSAGGDIWVTREPYVSCDPGKCYQFALGQGTTLDNKHSNGTIHDRIPHRTLLMNELGVPFHLGTKQVCVAWSSSSCHDGKAWLHVCVTGDDRNATASFIYDGRLVDSIGSWSQNILRTQESECVCINGTCTVVMTDGSASGRADTRILFIKEGKIVHISPLSGSAQHIEECSCYPRYPDVRCICRDNWKGSNRPVIDINMEDYSIDSSYVCSGLVGDTPRNDDSSSNSNCRDPNNERGNPGVKGWAFDNGDDVWMGRTISKDSRSGYETFKVIGGWSTPNSKSQVNRQVIVDNNNWSGYSGIFSVEGKSCINRCFYVELIRGRPQETRVWWTSNSIVVFCGTSGTYGTGSWPDGANINFMPI

SEQ ID NO: 17317 - protein, 469 aa, synthetic construct
  REGION 1..469: note = neuraminidase__InfluenzaA__ACV49625
MNPNQKTITIGSVSLTIETVCFLMQIAILATTVTLHFKQHECDSPASNQVMPCEPIIIERNITEIVYLNNTTIEKEICPEVVEYRNWSKPQCQITGFAPFSKDNSIRLSAGGDIWVTRGPYVSCDPGKCYQFALGQGTTLDNKHSNGTIHDRIPHRTLLMNELGVPFHLGTKQVCVAWSSSSCHDGKAWLHVCVTGDDRNATASFIYDGRLVDSIGSWSQNILRTQESECVCINGTCTVVMTDGSASGRADTRILFIKEGKIVHISPLSGSAQHIEECSCYPRYPDVRCICRDNWKGSNRPVIDINMEDYSIDSSYVCSGLVGDTPRNDDSSSNSNCRDPNNERGNPGVKGWAFDNGDDVWMGRTISKDSRSGYETFKVIGGWSTPNSKSQVNRQVIVDNNNWSGYSGIFSVEGKSCINRCFYVELIRGRPQETRVWWTSNSIVVFCGTSGTYGTGSWPDGANINFMPI

SEQ ID NO: 17318 - protein, 469 aa, synthetic construct; identical to SEQ ID NO: 16456
  REGION 1..469: note = neuraminidase__InfluenzaA__ACV49647

SEQ ID NO: 17319 - protein, 470 aa, synthetic construct
  REGION 1..470: note = neuraminidase__InfluenzaA__ACV49669
MNPNQKIITIGSICMAIGIISLILQIGNIVSIWISHSIQTGSQNYTGICNQRIITYENSTWVNQTYVNINNTNVVAGQDTTSVTLAGNSSLCPISGWAIYSKDNSIRIGSKGDVFVIREPFISCSHLECRTFFLTQGALLNDKHSNGTVKDRSPYRALMSCPIGEAPSPYNSRFESVAWSASACHDGMGWLTIGISGPDDGAVAVLKYNGIITETIKSWRKRILRTQESECVCVNGSCFTIMTDGPNNGPASYKIFKIEKGKITKSIELDAPNSHYEECSCYPDAGTVMCVCRDNWHGSNRPWVSFNQNLDYQIGYICSGVFGDNPRPKDGKGSCGPVTVDGADGVKGFSYRYGNGVWIGRTKSNSSRRGFEMIWDPNGWTDTDSKFLVKQDVVAMTDWSGYSGSFVQHPELTGLDCMRPCFWVELIRGRPRENTTIWTSGSSISFCGVNGDTANWSWPDGAELPFTIDK

SEQ ID NO: 17320 - protein, 470 aa, synthetic construct
  REGION 1..470: note = neuraminidase__InfluenzaA__ACV49679
MNPNQKIITIGSISIAIGIISLMLQIGSIISIWASHSIRTGSQNNTGICNQRIITYENSTWVNHTYVNINNTNVVAGEDKTSVTLAGNSSLCSISGWAIYTKDNSIRIGSKGDVFVIREPFISCSHLECRTFFLTQGALLNDKHSNGTVKDRSPYRALMSCPLGEAPSPYNSKFESVAWSASACHDGMGWLTIGISGPDNGAVAVLKYNGIITGTIKSWKKQILRTQESECVCMNGSCFTIMTDGPSNKAASYKIFKIEKGKVTKSIELNAPNFYYEECSCYPDTGIVMCVCRDNWHGSNRPWVSFNQNLDYQIGYICSGVFGDNPRPEDGEGSCNPVTVDGANGVKGFSYKYGNGVWIGRTKSNRLRKGFEMIWDPNGWTNTDSDFSVKQDVVAITDWSGYSGSFVQHPELTGLDCIRPCFWVELVRGLPRENTTIWTSGSSISFCGVNSDTANWSWPDGAELPFTIDK

SEQ ID NO: 17321 - protein, 469 aa, synthetic construct
  REGION 1..469: note = neuraminidase__InfluenzaA__ACV53442
MNPNQKIITIGSVCMTIGMANLILQIGNIISIWISHSIQLGNQNQIETCNQSVITYENNTWVNQTYVNISNTNFAAGQSVVSVKLAGNSSLCPVSGWAIYSKDNSVRIGSKGDVFVIREPFISCSPLECRTFFLTQGALLNDKHSNGTIKDRSPYRTLMSCPIGEVPSPYNSRFESVAWSASACHDGINWLTIGISGPDNGAVAVLKYNGIITDTIKSWRNNILRTQESECACVNGSCFTVMTDGPSDGQASYKIFRIEKGKIVKSVEMNAPNYHYEECSCYPDSSEITCVCRDNWHGSNRPWVSFNQNLEYQIGYICSGIFGDNPRPNDKTGSCGPVSSNGANGVKGFSFKYGNGVWIGRTKSISSRNGFEMIWDPNGWTGTDNNFSIKQDIVGINEWSGYSGSFVQHPELTGLDCIRPCFWVELIRGRPKENTIWTSGSSISFCGVNSDTVGWSWPDGAELPFTIDK

SEQ ID NO: 17322 - protein, 469 aa, synthetic construct; identical to SEQ ID NO: 17105
  REGION 1..469: note = neuraminidase__InfluenzaA__ACV53452

SEQ ID NO: 17323 - protein, 469 aa, synthetic construct; identical to SEQ ID NO: 16728
  REGION 1..469: note = neuraminidase__InfluenzaA__ACV53462

SEQ ID NO: 17324 - protein, 469 aa, synthetic construct; identical to SEQ ID NO: 16738
  REGION 1..469: note = neuraminidase__InfluenzaA__ACV53472

SEQ ID NO: 17325 - protein, 469 aa, synthetic construct
  REGION 1..469: note = neuraminidase__InfluenzaA__ACV53482
MNPNQKIITIGSVCMTIGMANLILQIGNIISIWISHSIQLGNQNQIETCNQSVITYENNTWVNQTYVNISNTNFAAGQSVVSVKLAGNSSLCPVSGWAIYSKDNSVRIGSKGDVFVIREPFISCSPLECRTFFLTQGALLNDKHSNGTIKDRSPYRTLMSCPIGEVPSPYNSRFESVAWSASACHDGINWLTIGISGPDNGAVAVLKYNGIITDTIKSWRNNILRTQESECACVNGSCFTVMTDGPSNGQASYKIFRIEKGKIVKSVEMNAPNYHYEECSCYPDSGEITCVCRDNWHGSNRPWVSFNQNLEYQIGYICSGIFGDNPRPNDKTGSCGPVSSNGANGVKGFSFKYGNGVWIGRTKSISSRNGFEMIWDPNGWTATDNNFSIKQDIVGINEWSGYSGSFVQHPELTGLDCIRPCFWVELIRGRPKENTIWTSGSSISFCGVNSDTVGWSWPDGAELPFTIDK

SEQ ID NO: 17326 - protein, 469 aa, synthetic construct
  REGION 1..469: note = neuraminidase__InfluenzaA__ACV53492
MNPNQKIITIGSVCMTIGMANLILQIGNIISIWISHSIQLGNQNQIETCNQSVITYENNTWVNQTYVNISNTNFAAGQSVVSVKLAGNSSLCPVSGWAIYSKDNSIRIGSKGDVFVIREPFISCSPLECRTFFLTQGALLNDKHSNGTIKDRSPYRTLMSCPIGEVPSPYNSRFESVAWSASACHDGINWLTIGISGPDNGAVAVLKYNGIITDTIKSWRNNILRTQESECACVNGSCFTVMTDGPSDGQASYKIFRIEKGKIVKSVEMNAPNYHYEECSCYPDSSEITCVCRDNWHGSNRPWVSFNQNLEYQIGYICSGIFGDNPRPNDKAGSCGPVSSNGANGVKGFSFKYGNGVWIGRTKSISSRNGFEMIWDPNGWTETDNNFLIKQDIVGINEWSGYSGSFVQHPELTGLDCIRPCFWVELIRGRPKENTIWTSGSSISFCGVNSDTVGWSWPDGAELPFTIDK

SEQ ID NO: 17327 - protein, 469 aa, synthetic construct
  REGION 1..469: note = neuraminidase__InfluenzaA__ACV53502
MNPNQKIITIGSVCMTIGMANLILQIGNIISIWISHSIQLGNQNQIETCNQSVITYENNTWVNQTYVNISNTNFAAGQSVVSVKLAGNSSLCPVSGWAIYSKDNSIRIGSKGDVFVIREPFISCSPLECRTFFLTQGALLNDKHSNGTIKDRSPYRTLMSCPIGEVPSPYNSRFESVAWSASACHDGINWLTIGISGPDNGAVAVLKYNGIITDTIKSWRNNILRTQESECACVNGSCFTVMTDGPSDGQASYKIFRIEKGKIVKSVEMNAPNYHYEECSCYPDSSEITCVCRDNWHGSNRPWVSFNQNLEYQIGYICSGIFGDNPRPNDKAGSCGPVSSNGANGVKGFSFKYGNGVWIGRTKSISSRNGFEMIWDPNGWTGTDNNFLIKQDIVGINEWSGYSGSFVQHPELTGLDCIRPCFWVELIRGRPKENTIWTSGSSISFCGVNSDTVGWSWPDGAELPFTIDK

SEQ ID NO: 17328 - protein, 469 aa, synthetic construct
  REGION 1..469: note = neuraminidase__InfluenzaA__ACV53891
MNPNQKIITIGSVCMTIGMANLILQIGNIISIWISHSIQLGNQNQIETCNQSVITYENNTWVNQTYVNISNTNFAAGQSVVSVKLAGNSSLCPVSGWAIYSKDNSIRIGSKGDVFVIREPFISCSPLECRTFFLTQGALLNDKHSNGTIKDRSPYRTLMSCPIGEVPSPYNSRFESVAWSASACHDGINWLTIGISGPDNGAVAVLKYNGIITDTIKSWRNKILRTQESECACVNGSCFTVMTDGPSDGQASYKIFRIEKGKIVKSVEMNAPNYHYEECSCYPDSSEITCVCRDNWHGSNRPWVSFNQNLEYQIGYICSGIFGDNPRPNDKTGSCGPVSSNGANGVKGFSFKYGNGVWIGRTKSISSRNGFEMICDPNGWTGTDNNFSIKQDIVGINEWSGYSGSFVQHPELTGLDCIRPCFWVELIRGRPKENTIWTSGSSISFCGVNSDTVGWSWPDGAELPFTIDK

SEQ ID NO: 17329 - protein, 469 aa, synthetic construct
  REGION 1..469: note = neuraminidase__InfluenzaA__ACV53901
MNPNQKIITIGSVCMTIGMANLILQIGNIISIWISHSIQLGNQNQIETCNQSVITYENNTWVNQTYVNISNTNFAAGQSVVSVKLAGNSSLCPVSGWAIYSKDNSIRIGSKGDVFVIREPFISCSPLECRTFFLTQGALLNDKHSNGTIKDRSPYRTLMSCPIGEVPSPYNSRFESVAWSASACHDGINWLTIGISGPDNGAVAVLKYNGIITDTIKSWRNNILRTQESECACVNGSCFTVMTDGPSDGQASYKIFRIEKGKIVKSVEMNAPNYHYEECSCYPDSSEITCVCRDNWHGSNRPWVSFNQNLEYQIGYICSGIFGDNPRPNDKTGSCGPVSSNGANGVKGFSFKYGNGVWIGRTKSISSRNGFEMIWDPNGWTGTDNNFSIKQDIVGINEWSGYSRSFVQHPELTGLDCIRPCFWVELIRGRPKENTIWTSGSSISFCGVNSDTVGWSWPDGAELPFTIDK

SEQ ID NO: 17330 - protein, 469 aa, synthetic construct; identical to SEQ ID NO: 16738
  REGION 1..469: note = neuraminidase__InfluenzaA__ACV53911

SEQ ID NO: 17331 - protein, 469 aa, synthetic construct; identical to SEQ ID NO: 16728
  REGION 1..469: note = neuraminidase__InfluenzaA__ACV67088

SEQ ID NO: 17332 - protein, 469 aa, synthetic construct; identical to SEQ ID NO: 16738
  REGION 1..469: note = neuraminidase__InfluenzaA__ACV67168

SEQ ID NO: 17333 - protein, 469 aa, synthetic construct; identical to SEQ ID NO: 16728
  REGION 1..469: note = neuraminidase__InfluenzaA__ACV67169

SEQ ID NO: 17334 - protein, 469 aa, synthetic construct; identical to SEQ ID NO: 16738
  REGION 1..469: note = neuraminidase__InfluenzaA__ACV67171

SEQ ID NO: 17335 - protein, 469 aa, synthetic construct; identical to SEQ ID NO: 16738
  REGION 1..469: note = neuraminidase__InfluenzaA__ACV67172

SEQ ID NO: 17336 - protein, 469 aa, synthetic construct; identical to SEQ ID NO: 16768
  REGION 1..469: note = neuraminidase__InfluenzaA__ACV67173

SEQ ID NO: 17337 - protein, 469 aa, synthetic construct; identical to SEQ ID NO: 16728
  REGION 1..469: note = neuraminidase__InfluenzaA__ACV67174

SEQ ID NO: 17338 - protein, 469 aa, synthetic construct
  REGION 1..469: note = neuraminidase__InfluenzaA__ACV67175
MNPNQKIITIGSVCMTIGMANLILQIGNIISIWISHSIQLGNQNQIETCNQSVITYENNTWVNQTYVNISNTNFAAGQSVVSVKLAGNSSLCPVSGWAIYSKDNSIRIGSKGDVFVIREPFISCSPLECRTFFLTQGALLNDKHSNGTIKDRSPYRTLMSCPIGEVPSPYNSRFESVAWSASACHDGINWLTIGISGPDNGAVAVLKYNGIITDTIKSWRNNILRTQESECACVNGSCFTVMTDGPSDGQASYKIFRIEKGKIVKSVEMNAPNYHYEECSCYPDSSEITCVCRDNWHGSNRPWVSFNQNLEYQIGYICSGIFGDNPRPNDKTGSCGPVSSNGSNGVKGFSFKYGNGVWIGRTKSISSRNGFEMIWDPNGWTGTDNNFSIKQDIVGINEWSGYSGSFVQHPELTGLDCIRPCFWVELIRGRPKENTIWTSGSSISFCGVNSDTVGWSWPDGAELPFTIDK

SEQ ID NO: 17339 - protein, 469 aa, synthetic construct; identical to SEQ ID NO: 16738
  REGION 1..469: note = neuraminidase__InfluenzaA__ACV67176

SEQ ID NO: 17340 - protein, 469 aa, synthetic construct; identical to SEQ ID NO: 16728
  REGION 1..469: note = neuraminidase__InfluenzaA__ACV67177

SEQ ID NO: 17341 - protein, 469 aa, synthetic construct; identical to SEQ ID NO: 16738
  REGION 1..469: note = neuraminidase__InfluenzaA__ACV67178

SEQ ID NO: 17342 - protein, 469 aa, synthetic construct; identical to SEQ ID NO: 16738
  REGION 1..469: note = neuraminidase__InfluenzaA__ACV67179

SEQ ID NO: 17343 - protein, 469 aa, synthetic construct
  REGION 1..469: note = neuraminidase__InfluenzaA__ACV67180
MNPNQKIITIGSVCMTIGMANLILQIGNIISIWISHSIQLGNQNQIETCNQSVITYENNTWVNQTYVNISNTNFAAGQPVVSVKLAGNSSLCPVSGWAIYSKDNSIRIGSKGDVFVIREPFISCSPLECRTFFLTQGALLNDKHSNGTIKDRSPYRTLMSCPIGEVPSPYNSRFESVAWSASACHDGINWLTIGISGPDNGAVAVLKYNGIITDTIKSWRNNILRTQESECACVNGSCFTVMTDGPSDGQASYKIFRIEKGKIVKSVEMNAPNYHYEECSCYPDSSEITCVCRDNWHGSNRPWVSFNQNLEYQIGYICSGIFGDNPRPNDKTGSCGPVSSNGANGVKGFSFKYGNGVWIGRTKSISSRNGFEMIWDPNGWTGTDNNFSIKQDIVGINEWSGYSGSFVQHPELTGLDCIRPCFWVELIRGRPKENTIWTSGSSISFCGVNSDTVGWSWPDGAELPFTIDK

SEQ ID NO: 17344 - protein, 469 aa, synthetic construct
  REGION 1..469: note = neuraminidase__InfluenzaA__ACV67181
MNPNQKIITIGSVCMTIGMANLILQIGNIISIWISHSIQLGNQNQIETCNQSVITYENNTWVNQTYVNISNTNFAAGQSVVSVKLAGNSSLCPVSGWAIYSKDNSIRIGSKGDVFIIREPFISCSPLECRTFFLTQGALLNDKHSNGTIKDRSPYRTLMSCPIGEVPSPYNSRFESVAWSASACHDGINWLTIGISGPDNGAVAVLKYNGIITDTIKSWRNNILRTQESECACVNGSCFTVMTDGPSDGQASYKIFRIEKGKIIKSVEMNAPNYHYEECSCYPDSSEITCVCRDNWHGSNRPWVSFNQNLEYQIGYICSGIFGDNPRPNDKTGSCGPVSSNGANGVKGFSFKYGNGVWIGRTKSISSRNGFEMIWDPNGWTGTDNNFSIKQDIVGINEWSGYSGSFVQHPELTGLDCIRPCFWVELIRGRPKENTIWTSGSSISFCGVNSDTVGWSWPDGAELPFTIDK

SEQ ID NO: 17345 - protein, 469 aa, synthetic construct; identical to SEQ ID NO: 17162
  REGION 1..469: note = neuraminidase__InfluenzaA__ACV67182

SEQ ID NO: 17346 - protein, 469 aa, synthetic construct
  REGION 1..469: note = neuraminidase__InfluenzaA__ACV67183
MNPNQKIITIGSVCMTIGMANLILQIGNIISIWISHSIQLGNQNQIETCNQSVITYENNTWVNQTYVNISNTNFAAGQSVVSVKLAGNSSLCPVSGWAIYSKDNSVRIGSKGDVFVIREPFISCSPLECRTFFLTQGALLNDKHSNGTIKDRSPYRTLMSCPIGEVPSPYNSRFESVAWSASACHDGINWLTIGISGPDNGAVAVLKYNGIITDTIKSWRNNILRTQESECACVNGSCFTVMTDGPSNGQASYKIFRIEKGKIVKSVEMNAPNYHYEECSCYPDSNEITCVCRDNWHGSNRPWVSFNQNLEYQIGYICSGIFGDNPRPNDKTGSCGPVSSNGANGVKGFSFKYGNGVWIGRTKSINSRNGFEMIWDPNGWTGTDNNFSIKQDIVGINEWSGYSGSFVQHPELTGLDCIRPCFWVELIRGRPKENTIWTSGSSISFCGVNSDTVGWSWPDGAELPFTIDK

SEQ ID NO: 17347 - protein, 469 aa, synthetic construct; identical to SEQ ID NO: 16738
  REGION 1..469: note = neuraminidase__InfluenzaA__ACV67184

SEQ ID NO: 17348 - protein, 469 aa, synthetic construct; identical to SEQ ID NO: 16728
  REGION 1..469: note = neuraminidase__InfluenzaA__ACV67186

SEQ ID NO: 17349 - protein, 469 aa, synthetic construct; identical to SEQ ID NO: 16738
  REGION 1..469: note = neuraminidase__InfluenzaA__ACV67187

SEQ ID NO: 17350 - protein, 469 aa, synthetic construct; identical to SEQ ID NO: 16738
  REGION 1..469: note = neuraminidase__InfluenzaA__ACV67188

SEQ ID NO: 17351 - protein, 469 aa, synthetic construct; identical to SEQ ID NO: 16768
  REGION 1..469: note = neuraminidase__InfluenzaA__ACV67189

SEQ ID NO: 17352 - protein, 469 aa, synthetic construct; identical to SEQ ID NO: 16768
  REGION 1..469: note = neuraminidase__InfluenzaA__ACV67190

SEQ ID NO: 17353 - protein, 469 aa, synthetic construct; identical to SEQ ID NO: 16728
  REGION 1..469: note = neuraminidase__InfluenzaA__ACV67191

SEQ ID NO: 17354 - protein, 469 aa, synthetic construct; identical to SEQ ID NO: 16768
  REGION 1..469: note = neuraminidase__InfluenzaA__ACV67192

SEQ ID NO: 17355 - protein, 469 aa, synthetic construct; identical to SEQ ID NO: 16768
  REGION 1..469: note = neuraminidase__InfluenzaA__ACV67193

SEQ ID NO: 17356 - protein, 469 aa, synthetic construct; identical to SEQ ID NO: 16738
  REGION 1..469: note = neuraminidase__InfluenzaA__ACV67194

SEQ ID NO: 17357 - protein, 469 aa, synthetic construct; identical to SEQ ID NO: 16738
  REGION 1..469: note = neuraminidase__InfluenzaA__ACV67195

SEQ ID NO: 17358 - protein, 469 aa, synthetic construct; identical to SEQ ID NO: 16738
  REGION 1..469: note = neuraminidase__InfluenzaA__ACV67196

SEQ ID NO: 17359 - protein, 469 aa, synthetic construct; identical to SEQ ID NO: 16728
  REGION 1..469: note = neuraminidase__InfluenzaA__ACV67197

SEQ ID NO: 17360 - protein, 469 aa, synthetic construct; identical to SEQ ID NO: 16728
  REGION 1..469: note = neuraminidase__InfluenzaA__ACV67199

SEQ ID NO: 17361 - protein, 469 aa, synthetic construct; identical to SEQ ID NO: 16728
  REGION 1..469: note = neuraminidase__InfluenzaA__ACV67200

SEQ ID NO: 17362 - protein, 469 aa, synthetic construct; identical to SEQ ID NO: 16728
  REGION 1..469: note = neuraminidase__InfluenzaA__ACV67201

SEQ ID NO: 17363 - protein, 469 aa, synthetic construct; identical to SEQ ID NO: 16728
  REGION 1..469: note = neuraminidase__InfluenzaA__ACV67202

SEQ ID NO: 17364 - protein, 469 aa, synthetic construct; identical to SEQ ID NO: 16738
  REGION 1..469: note = neuraminidase__InfluenzaA__ACV67203

SEQ ID NO: 17365 - protein, 469 aa, synthetic construct; identical to SEQ ID NO: 16738
  REGION 1..469: note = neuraminidase__InfluenzaA__ACV67204

SEQ ID NO: 17366 - protein, 469 aa, synthetic construct; identical to SEQ ID NO: 16738
  REGION 1..469: note = neuraminidase__InfluenzaA__ACV67205

SEQ ID NO: 17367 - protein, 469 aa, synthetic construct
  REGION 1..469: note = neuraminidase__InfluenzaA__ACV67206
MNPNQKIITIGSVCMTIGMANLILQIGNIISIWISHSIQLGNQNQIETCNQSVITYENNTWVNQTYVNISNTNFAAGQSMVSVKLAGNSSLCPVSGWAIYSKDNSVRIGSKGDVFVIREPFISCSPLECRTFFLTQGALLNDKHSNGTIKDRSPYRTLMSCPIGEVPSPYNSRFESVAWSASACHDGINWLTIGISGPDNGAVAVLKYNGIITDTIKSWRNNILRTQESECACVNGSCFTVMTDGPSNGQASYKIFRIEKGKIVKSVEMNAPNYYYEECSCYPDSSEITCVCRDNWHGSNRPWVSFNQNLEYQIGYICSGIFGDNPRPNDKTGSCGPVSSNGANGVKGFSFKYGNGVWIGRTKSISSRNGFEMIWDPNGWTGTDNNFSIKQDIVGINEWSGYSGSFVQHPELTGLDCIRPCFWVELIRGRPKENTIWTSGSSISFCGVNSDTVGWSWPDGAELPFTIDK

SEQ ID NO: 17368 - protein, 469 aa, synthetic construct; identical to SEQ ID NO: 16728
  REGION 1..469: note = neuraminidase__InfluenzaA__ACV67207

SEQ ID NO: 17369 - protein, 469 aa, synthetic construct; identical to SEQ ID NO: 16738
  REGION 1..469: note = neuraminidase__InfluenzaA__ACV67208

SEQ ID NO: 17370 - protein, 469 aa, synthetic construct; identical to SEQ ID NO: 16728
  REGION 1..469: note = neuraminidase__InfluenzaA__ACV67210

SEQ ID NO: 17371 - protein, 469 aa, synthetic construct; identical to SEQ ID NO: 16738
  REGION 1..469: note = neuraminidase__InfluenzaA__ACV67211

SEQ ID NO: 17372 - protein, 469 aa, synthetic construct; identical to SEQ ID NO: 16738
  REGION 1..469: note = neuraminidase__InfluenzaA__ACV70076

SEQ ID NO: 17373 - protein, 469 aa, synthetic construct
  REGION 1..469: note = neuraminidase__InfluenzaA__ACV70086
MNPNQKIITIGSVCMTIGMANLILQIGNIISIWISHSIQLGNQNQIETCNQSIITYENNTWVNQTYVNISNTNFAAGQSVVSVKLAGNSSLCPVSGWAIYSKDNSVRIGSKGDVFVIREPFISCSPLECRTFFLTQGALLNDKHSNGTIKDRSPYRTLMSCPIGEVPSPYNSRFESVAWSASACHDGINWLTIGISGPDNGAVAVLKYNGIITDTIKSWRNNILRTQESECACVNGSCFTVMTDGPSNGQASYKIFRIEKGKIVKSVEMNAPNYHYEECSCYPDSSEITCVCRDNWHGSNRPWVSFNQNLEYQIGYICSGIFGDNPRPNDKTGSCGPVSSNGANGVKGFSFKYGNGVWIGRTKSISSRNGFEMIWDPNGWTGTDNNFSIKQDIVGINEWSGYSGSFVQHPELTGLDCIRPCFWVELIRGRPKENTIWTSGSSISFCGVNSDTVGWSWPDGAELPFTIDK

SEQ ID NO: 17374 - protein, 469 aa, synthetic construct
  REGION 1..469: note = neuraminidase__InfluenzaA__ACV70096
MNPNQKIITIGSVCMTIGMANLILQIGNIISIWISHSIQLGNQNQIETCNQSVITYENNTWVNQTYVNISNTNFTAGQSVVSVKLAGNSSLCPVSGWAIYSKDNSIRIGSKGDVFVIREPFISCSPLECRTFFLTQGALLNDKHSNGTIKDRSPYRTLMSCPIGEVPSPYNSRFESVAWSASACHDGINWLTIGISGPDNGAVAVLKYNGIITDTIKSWRNNILRTQESECACVNGSCFTVMTDGPSDGQASYKIFRIEKGKIVKSVEMNAPNYHYEECSCYPDSSEITCVCRDNWHGSNRPWVSFNQNLEYQIGYICSGIFGDNPRPNDKTGSCGPVSSNGANGVKGFSFKYGNGVWIGRTKSISSRNGFEMIWDPNGWTGTDNNFSIKQDIVGINEWSGYSGSFVQHPELTGLDCIRPCFWVELIRGRPKENTIWTSGSSISFCGVNSDTVGWSWPDGAELPFTIDK

SEQ ID NO: 17375 - protein, 469 aa, synthetic construct; identical to SEQ ID NO: 16738
  REGION 1..469: note = neuraminidase__InfluenzaA__ACV70106

SEQ ID NO: 17376 - protein, 469 aa, synthetic construct; identical to SEQ ID NO: 16738
  REGION 1..469: note = neuraminidase__InfluenzaA__ACV70116

SEQ ID NO: 17377 - protein, 469 aa, synthetic construct; identical to SEQ ID NO: 16738
  REGION 1..469: note = neuraminidase__InfluenzaA__ACV70126

SEQ ID NO: 17378 - protein, 469 aa, synthetic construct; identical to SEQ ID NO: 16738
  REGION 1..469: note = neuraminidase__InfluenzaA__ACV70157

SEQ ID NO: 17379 - protein, 469 aa, synthetic construct; identical to SEQ ID NO: 16728
  REGION 1..469: note = neuraminidase__InfluenzaA__ACV70167

SEQ ID NO: 17380 - protein, 469 aa, synthetic construct; identical to SEQ ID NO: 16738
  REGION 1..469: note = neuraminidase__InfluenzaA__ACV70177

SEQ ID NO: 17381 - protein, 469 aa, synthetic construct; identical to SEQ ID NO: 16738
  REGION 1..469: note = neuraminidase__InfluenzaA__ACV70187

SEQ ID NO: 17382 - protein, 469 aa, synthetic construct; identical to SEQ ID NO: 16738
  REGION 1..469: note = neuraminidase__InfluenzaA__ACV70197

SEQ ID NO: 17383 - protein, 469 aa, synthetic construct; identical to SEQ ID NO: 16738
  REGION 1..469: note = neuraminidase__InfluenzaA__ACV70207

SEQ ID NO: 17384 - protein, 469 aa, synthetic construct
  REGION 1..469: note = neuraminidase__InfluenzaA__ACV70217
MNPNQKIITIGSVCMTIGMANLILQIGNIISIWISHSIQLGNQNQIETCNQSVITYENNTWVNQTYVNISNTNFAAGQSVVSVKLAGNSSLCPVSGWAIYSKDNSVRIGSKGDVFVIREPFISCSHLECRTFFLTQGALLNDKHSNGTIKDRSPYRTLMSCPIGEVPSPYNSRFESVAWSASACHDGINWLTIGISGPDNGAVAVLKYNGIITDTIKSWRNNILRTQESECACVNGSCFTVMTDGPSNGQASYKIFRIEKGKIVKSVEMNAPNYHYEECSCYPDSSEITCVCRDNWHGSNRPWVSFNQNLEYQIGYICSGIFGDNPRPNDKTGSCGPVSSNGANGVKGFSFKYGNGVWIGRTKSISSRNGFEMIWDPNGWTGTDNNFSIKQDIVGINEWSGYSGSFVQHPELTGLDCIRPCFWVELIRGRPKENTIWTSGSSISFCGVNSDTVGWSWPDGAELPFTIDK

SEQ ID NO: 17385 - protein, 469 aa, synthetic construct; identical to SEQ ID NO: 16738
  REGION 1..469: note = neuraminidase__InfluenzaA__ACV70227

SEQ ID NO: 17386 - protein, 469 aa, synthetic construct; identical to SEQ ID NO: 16738
  REGION 1..469: note = neuraminidase__InfluenzaA__ACV70237

SEQ ID NO: 17387 - protein, 469 aa, synthetic construct; identical to SEQ ID NO: 16738
  REGION 1..469: note = neuraminidase__InfluenzaA__ACV70247

SEQ ID NO: 17388 - protein, 469 aa, synthetic construct; identical to SEQ ID NO: 16738
  REGION 1..469: note = neuraminidase__InfluenzaA__ACV70257

SEQ ID NO: 17389 - protein, 469 aa, synthetic construct; identical to SEQ ID NO: 16738
  REGION 1..469: note = neuraminidase__InfluenzaA__ACV70267

SEQ ID NO: 17390 - protein, 469 aa, synthetic construct; identical to SEQ ID NO: 16738
  REGION 1..469: note = neuraminidase__InfluenzaA__ACV70277

SEQ ID NO: 17391 - protein, 469 aa, synthetic construct; identical to SEQ ID NO: 16738
  REGION 1..469: note = neuraminidase__InfluenzaA__ACV70287

SEQ ID NO: 17392 - protein, 469 aa, synthetic construct; identical to SEQ ID NO: 16738
  REGION 1..469: note = neuraminidase__InfluenzaA__ACV70297

SEQ ID NO: 17393 - protein, 469 aa, synthetic construct; identical to SEQ ID NO: 16738
  REGION 1..469: note = neuraminidase__InfluenzaA__ACV70307

SEQ ID NO: 17394 - protein, 469 aa, synthetic construct; identical to SEQ ID NO: 16728
  REGION 1..469: note = neuraminidase__InfluenzaA__ACV70317

SEQ ID NO: 17395 - protein, 469 aa, synthetic construct; identical to SEQ ID NO: 16738
  REGION 1..469: note = neuraminidase__InfluenzaA__ACV70327

SEQ ID NO: 17396 - protein, 469 aa, synthetic construct; identical to SEQ ID NO: 16738
  REGION 1..469: note = neuraminidase__InfluenzaA__ACV70337

SEQ ID NO: 17397 - protein, 469 aa, synthetic construct; identical to SEQ ID NO: 16738
  REGION 1..469: note = neuraminidase__InfluenzaA__ACV70347

SEQ ID NO: 17398 - protein, 469 aa, synthetic construct; identical to SEQ ID NO: 16738
  REGION 1..469: note = neuraminidase__InfluenzaA__ACV70357

SEQ ID NO: 17399 - protein, 469 aa, synthetic construct; identical to SEQ ID NO: 16738
  REGION 1..469: note = neuraminidase__InfluenzaA__ACV70367

SEQ ID NO: 17400 - protein, 469 aa, synthetic construct; identical to SEQ ID NO: 16738
  REGION 1..469: note = neuraminidase__InfluenzaA__ACV70377

SEQ ID NO: 17401 - protein, 469 aa, synthetic construct; identical to SEQ ID NO: 16738
  REGION 1..469: note = neuraminidase__InfluenzaA__ACV70387

SEQ ID NO: 17402 - protein, 469 aa, synthetic construct; identical to SEQ ID NO: 16738
  REGION 1..469: note = neuraminidase__InfluenzaA__ACV70397

SEQ ID NO: 17403 - protein, 469 aa, synthetic construct; identical to SEQ ID NO: 16738
  REGION 1..469: note = neuraminidase__InfluenzaA__ACV70407

SEQ ID NO: 17404 - protein, 469 aa, synthetic construct; identical to SEQ ID NO: 16728
  REGION 1..469: note = neuraminidase__InfluenzaA__ACV70417

SEQ ID NO: 17405 - protein, 469 aa, synthetic construct; identical to SEQ ID NO: 16738
  REGION 1..469: note = neuraminidase__InfluenzaA__ACV70427

SEQ ID NO: 17406 - protein, 469 aa, synthetic construct; identical to SEQ ID NO: 16738
  REGION 1..469: note = neuraminidase__InfluenzaA__ACV70437

SEQ ID NO: 17407 - protein, 469 aa, synthetic construct; identical to SEQ ID NO: 16738
  REGION 1..469: note = neuraminidase__InfluenzaA__ACV70447

SEQ ID NO: 17408 - protein, 469 aa, synthetic construct; identical to SEQ ID NO: 16738
  REGION 1..469: note = neuraminidase__InfluenzaA__ACV70457

SEQ ID NO: 17409 - protein, 469 aa, synthetic construct; identical to SEQ ID NO: 16738
  REGION 1..469: note = neuraminidase__InfluenzaA__ACV70467

SEQ ID NO: 17410 - protein, 469 aa, synthetic construct; identical to SEQ ID NO: 16738
  REGION 1..469: note = neuraminidase__InfluenzaA__ACV70477

SEQ ID NO: 17411 - protein, 469 aa, synthetic construct; identical to SEQ ID NO: 16738
  REGION 1..469: note = neuraminidase__InfluenzaA__ACV70487

SEQ ID NO: 17412 - protein, 469 aa, synthetic construct; identical to SEQ ID NO: 16738
  REGION 1..469: note = neuraminidase__InfluenzaA__ACV70497

SEQ ID NO: 17413 - protein, 469 aa, synthetic construct; identical to SEQ ID NO: 16738
  REGION 1..469: note = neuraminidase__InfluenzaA__ACV70507

SEQ ID NO: 17414 - protein, 469 aa, synthetic construct; identical to SEQ ID NO: 16738
  REGION 1..469: note = neuraminidase__InfluenzaA__ACV70517

SEQ ID NO: 17415 - protein, 469 aa, synthetic construct; identical to SEQ ID NO: 16738
  REGION 1..469: note = neuraminidase__InfluenzaA__ACV70527

SEQ ID NO: 17416 - protein, 469 aa, synthetic construct; identical to SEQ ID NO: 16738
  REGION 1..469: note = neuraminidase__InfluenzaA__ACV70547

SEQ ID NO: 17417 - protein, 469 aa, synthetic construct; identical to SEQ ID NO: 16738
  REGION 1..469: note = neuraminidase__InfluenzaA__ACV70557

SEQ ID NO: 17418 - protein, 469 aa, synthetic construct; identical to SEQ ID NO: 16738
  REGION 1..469: note = neuraminidase__InfluenzaA__ACV70567

SEQ ID NO: 17419 - protein, 469 aa, synthetic construct; identical to SEQ ID NO: 16738
  REGION 1..469: note = neuraminidase__InfluenzaA__ACV70577

SEQ ID NO: 17420 - protein, 469 aa, synthetic construct; identical to SEQ ID NO: 16738
  REGION 1..469: note = neuraminidase__InfluenzaA__ACV70587

SEQ ID NO: 17421 - protein, 469 aa, synthetic construct; identical to SEQ ID NO: 16728
  REGION 1..469: note = neuraminidase__InfluenzaA__ACV70597

SEQ ID NO: 17422 - protein, 469 aa, synthetic construct; identical to SEQ ID NO: 16738
  REGION 1..469: note = neuraminidase__InfluenzaA__ACV70607

SEQ ID NO: 17423 - protein, 469 aa, synthetic construct; identical to SEQ ID NO: 17321
  REGION 1..469: note = neuraminidase__InfluenzaA__ACV70617

SEQ ID NO: 17424 - protein, 469 aa, synthetic construct; identical to SEQ ID NO: 16738
  REGION 1..469: note = neuraminidase__InfluenzaA__ACV70647

SEQ ID NO: 17425 - protein, 469 aa, synthetic construct; identical to SEQ ID NO: 16738
  REGION 1..469: note = neuraminidase__InfluenzaA__ACV70657

SEQ ID NO: 17426 - protein, 469 aa, synthetic construct; identical to SEQ ID NO: 16738
  REGION 1..469: note = neuraminidase__InfluenzaA__ACV70667

SEQ ID NO: 17427 - protein, 469 aa, synthetic construct; identical to SEQ ID NO: 16738
  REGION 1..469: note = neuraminidase__InfluenzaA__ACV70677

SEQ ID NO: 17428 - protein, 469 aa, synthetic construct; identical to SEQ ID NO: 16738
  REGION 1..469: note = neuraminidase__InfluenzaA__ACV70687

SEQ ID NO: 17429 - protein, 469 aa, synthetic construct; identical to SEQ ID NO: 16738
  REGION 1..469: note = neuraminidase__InfluenzaA__ACV70697

SEQ ID NO: 17430 - protein, 469 aa, synthetic construct; identical to SEQ ID NO: 16738
  REGION 1..469: note = neuraminidase__InfluenzaA__ACV70707

SEQ ID NO: 17431 - protein, 469 aa, synthetic construct; identical to SEQ ID NO: 16738
  REGION 1..469: note = neuraminidase__InfluenzaA__ACV70717

SEQ ID NO: 17432 - protein, 469 aa, synthetic construct; identical to SEQ ID NO: 16738
  REGION 1..469: note = neuraminidase__InfluenzaA__ACV70727

SEQ ID NO: 17433 - protein, 469 aa, synthetic construct; identical to SEQ ID NO: 16738
  REGION 1..469: note = neuraminidase__InfluenzaA__ACV70737

SEQ ID NO: 17434 - protein, 469 aa, synthetic construct; identical to SEQ ID NO: 16738
  REGION 1..469: note = neuraminidase__InfluenzaA__ACV70757

SEQ ID NO: 17435 - protein, 469 aa, synthetic construct; identical to SEQ ID NO: 16738
  REGION 1..469: note = neuraminidase__InfluenzaA__ACV70767

SEQ ID NO: 17436 - protein, 469 aa, synthetic construct; identical to SEQ ID NO: 16738
  REGION 1..469: note = neuraminidase__InfluenzaA__ACV70777

SEQ ID NO: 17437 - protein, 469 aa, synthetic construct; identical to SEQ ID NO: 16738
  REGION 1..469: note = neuraminidase__InfluenzaA__ACV70787

SEQ ID NO: 17438 - protein, 469 aa, synthetic construct; identical to SEQ ID NO: 16738
  REGION 1..469: note = neuraminidase__InfluenzaA__ACV70797

SEQ ID NO: 17439 - protein, 469 aa, synthetic construct; identical to SEQ ID NO: 16738
  REGION 1..469: note = neuraminidase__InfluenzaA__ACV70807

SEQ ID NO: 17440 - protein, 469 aa, synthetic construct; identical to SEQ ID NO: 16738
  REGION 1..469: note = neuraminidase__InfluenzaA__ACV70817

SEQ ID NO: 17441 - protein, 469 aa, synthetic construct; identical to SEQ ID NO: 16728
  REGION 1..469: note = neuraminidase__InfluenzaA__ACV70827

SEQ ID NO: 17442 - protein, 469 aa, synthetic construct; identical to SEQ ID NO: 16738
  REGION 1..469: note = neuraminidase__InfluenzaA__ACV70837

SEQ ID NO: 17443 - protein, 469 aa, synthetic construct
  REGION 1..469: note = neuraminidase__InfluenzaA__ACV70847
MNPNQKIITIGSVCMTIGMANLILQIGNIISIWISHSIQLGNQNQIETCNQSVITYENNTWVNQTYVNISNTNFAAGQSVVSVKLAGNSSLCPVSGWAIYSKDNSIRIGSKGDVFVIREPFMSCSPLECRTFFLTQGALLNDKHSNGTIKDRSPYRTLMSCPIGEVPSPYNSRFESVAWSASACHDGINWLTIGISGPDNGAVAVLKYNGIITDTIKSWRNNILRTQESECACVNGSCFTVMTDGPSDGQASYKIFRIEKGKIVKSVEMNAPNYHYEECSCYPDSSEITCVCRDNWHGSNRPWVSFNQNLEYQIGYICSGIFGDNPRPNDKTGSCGPVSSNGANGVKGFSFKYGNGVWIGRTKSISSRNGFEMIWDPNGWTGTDNNFSIKQDIVGINEWSGYSGSFVQHPELTGLDCIRPCFWVELIRGRPKENTIWTSGSSISFCGVNSDTVGWSWPDGAELPFTIDK

SEQ ID NO: 17444 - protein, 469 aa, synthetic construct; identical to SEQ ID NO: 16738
  REGION 1..469: note = neuraminidase__InfluenzaA__ACV70867

SEQ ID NO: 17445 - protein, 469 aa, synthetic construct; identical to SEQ ID NO: 16738
  REGION 1..469: note = neuraminidase__InfluenzaA__ACV70877

SEQ ID NO: 17446 - protein, 469 aa, synthetic construct
  REGION 1..469: note = neuraminidase__InfluenzaA__ACV70887
MNPNQKIITIGSVCMTIGMANLILQIGNIISIWISHSIQLGNQNQIETCNQSVITYENNTWVNQTYVNISNTNFAAGQSMVSVKLAGNSSLCPVSGWAIYSKDNSVRIGSKGDVFVIREPFISCSPLECRTFFLTQGALLNDKHSNGTIKDRSPYRTLMSCPIGEVPSPYNSRFESVAWSASACHDGINWLTIGISGPDNGAVAVLKYNGIITDTIKSWRNNILRTQESECACVNGSCFTVMTDGPSNGQASYKIFRIEKGKIVKSVEMNAPNYHYEECSCYPDSSEITCVCRDNWHGSNRPWVSFNQNLEYQIGYICSGIFGDNPRPNDKTGSCGPVSSNGANGVKGFSFKYGNGVWIGRTKSISSRNGFEMIWDPNGWTGTDNNFSIKQDIVGINEWSGYSGSFVQHPELTGLDCIRPCFWVELIRGRPKENTIWTSGSSISFCGVNSDTVGWSWPDGAELPFTIDK

SEQ ID NO: 17447 - protein, 469 aa, synthetic construct; identical to SEQ ID NO: 16738
  REGION 1..469: note = neuraminidase__InfluenzaA__ACV70897

SEQ ID NO: 17448 - protein, 469 aa, synthetic construct; identical to SEQ ID NO: 16738
  REGION 1..469: note = neuraminidase__InfluenzaA__ACV70907

SEQ ID NO: 17449 - protein, 469 aa, synthetic construct; identical to SEQ ID NO: 16738
  REGION 1..469: note = neuraminidase__InfluenzaA__ACV70917

SEQ ID NO: 17450 - protein, 469 aa, synthetic construct; identical to SEQ ID NO: 16728
  REGION 1..469: note = neuraminidase__InfluenzaA__ACV70927

SEQ ID NO: 17451 - protein, 469 aa, synthetic construct; identical to SEQ ID NO: 16738
  REGION 1..469: note = neuraminidase__InfluenzaA__ACV70937

SEQ ID NO: 17452 - protein, 469 aa, synthetic construct; identical to SEQ ID NO: 16738
  REGION 1..469: note = neuraminidase__InfluenzaA__ACV70947

SEQ ID NO: 17453 - protein, 469 aa, synthetic construct; identical to SEQ ID NO: 16738
  REGION 1..469: note = neuraminidase__InfluenzaA__ACV70957

SEQ ID NO: 17454 - protein, 469 aa, synthetic construct; identical to SEQ ID NO: 16738
  REGION 1..469: note = neuraminidase__InfluenzaA__ACV70967

SEQ ID NO: 17455 - protein, 469 aa, synthetic construct; identical to SEQ ID NO: 16738
  REGION 1..469: note = neuraminidase__InfluenzaA__ACV70977

SEQ ID NO: 17456 - protein, 469 aa, synthetic construct; identical to SEQ ID NO: 16738
  REGION 1..469: note = neuraminidase__InfluenzaA__ACV70987

SEQ ID NO: 17457 - protein, 469 aa, synthetic construct; identical to SEQ ID NO: 16738
  REGION 1..469: note = neuraminidase__InfluenzaA__ACV71007

SEQ ID NO: 17458 - protein, 469 aa, synthetic construct; identical to SEQ ID NO: 16599
  REGION 1..469: note = neuraminidase__InfluenzaA__ACV82218

SEQ ID NO: 17459 - protein, 469 aa, synthetic construct; identical to SEQ ID NO: 16599
  REGION 1..469: note = neuraminidase__InfluenzaA__ACV82219

SEQ ID NO: 17460 - protein, 469 aa, synthetic construct
  REGION 1..469: note = neuraminidase__InfluenzaA__ACV82220
MNPNQKIITIGSVSLTISTICFFMQLAILITTVTLHFKQYEFNSPPNNQVMLCEPTIIERNITEIVYLTNTTIEKEICPKLAEYRNWSKPQCDITGFAPFSKDNSIRLSAGGDIWVTREPYVSCDPDKCYQFALGQGTTLNNVHSNNTVRDRTPYRTLLMNELGVPFHLGTKQVCIAWSSYSCHDGKAWLHVCITGDDKNATASFIYNGRLVDSVVSWSKEILRTQESECVCINGTCTVVMTDGSASGKADTKILFIEEGKIVHTSTLSGSAQHVEECSCYPRYPGVRCVCRDNWKGSNRPIVDINIKDHSIVSSYVCSGLVGDTPRKNDSSSSSHCLDPNNEEGGHGVKGWAFDDGNDVWMGRTISEKSRLGYETFKVIEGWSNPKSKLQINRQVIVDRGNRSGYSGIFSVEGKSCINRCFYVELIRGRKEKTEVLWTSNSIVVFCGTSGTYGTGSWPDGADINLMPI

SEQ ID NO: 17461 - protein, 470 aa, synthetic construct
  REGION 1..470: note = neuraminidase__InfluenzaA__ACV82221
MNPNQKIITIGSISIAIGIISLMLQIGNIISIWASHSIQTGSQNNTGICNQRIITYENSTWVNHTYVNINNTNVVAGEDKTSVTLAGNSSLCSISGWAIYTKDNSIRIGSKGDVFVIREPFISCSHLECRTFFLTQGALLNDKHSNGTVKDRSPYRALMSCPLGEAPSPYNSKFESVAWSASACHDGMGWLTIGISGPDNGAVAVLKYNGIITGTIKSWKKQILRTQESECVCMNGSCFTIMTDGPSNKAASYKIFKIEKGKVTKSIELNAPNFYYEECSCYPDTGIVMCVCRDNWHGSNRPWVSFNQNLDYQIGYICSGVFGDNPRPEDGEGSCNPVTVDGANGVKGFSYKYGNGVWIGRTKSNRLRKGFEMIWDPNGWTNTDSDFSVKQDVVAITDWSGYSGSFVQHPELTGLDCIRPCFWVELVRGLPRENTTIWTSGSSISFCGVNSDTANWSWPDGAELPFTIDK

SEQ ID NO: 17462 - protein, 469 aa, synthetic construct; identical to SEQ ID NO: 16738
  REGION 1..469: note = neuraminidase__InfluenzaA__ACV88402

SEQ ID NO: 17463 - protein, 469 aa, synthetic construct; identical to SEQ ID NO: 16738
  REGION 1..469: note = neuraminidase__InfluenzaA__ACV88412

SEQ ID NO: 17464 - protein, 469 aa, synthetic construct; identical to SEQ ID NO: 16728
  REGION 1..469: note = neuraminidase__InfluenzaA__ACV88422

SEQ ID NO: 17465 - protein, 454 aa, synthetic construct
  REGION 1..454: note = neuraminidase__InfluenzaA__ACV89505
MNPNQKIITIGSICLVVGLISLILQIGNIISIWISHSIQTGSQNHTGICNQNIITYKNSTWVKDTTSVILTGNSSLCPIRGWAIYSKDNSIRIGSKGDVFVIREPFISCSHLECRTFFLTQGALLNDKHSSGTVKDRSPYRALMSCPVGEAPSPYNSRFESVAWSASACHDGMGWLTIGISGPDNGAVAVLKYNGIITETIKSWRKKILRTQESECACVNGSCFTIMTDGPSDGLASYKIFKIEKGKVTKSIELNAPNSHYEECSCYPDTGKVMCVCRDNWHGSNRPWVSFDQNLDYQIGYICSGVFGDNPRPEDGTGSCGPVYVDGANGVKGFSYRYGNGVWIGRTKSHSSRHGFEMIWDPNGWTETDSKFSVRQDVVAMTDWSGYSGSFVQHPELTGLDCMRPCFWVELIRGRPKEGTIWTSASSISFCGVNSDTVDWSWPDGAELPFSIDK

SEQ ID NO: 17466 - protein, 469 aa, synthetic construct; identical to SEQ ID NO: 16738
  REGION 1..469: note = neuraminidase__InfluenzaA__ACV91673

SEQ ID NO: 17467 - protein, 469 aa, synthetic construct; identical to SEQ ID NO: 16738
  REGION 1..469: note = neuraminidase__InfluenzaA__ACV91681

SEQ ID NO: 17468 - protein, 469 aa, synthetic construct
  REGION 1..469: note = neuraminidase__InfluenzaA__ACX31593
MNPNQKIITIGSVSLTISTICFFMQIAILITTVTLHFKQYEFNSPPNNQVLLCEPAIIERNITEIVYLTNTTIEKEICPKLAEYRNWSKPQCDITGFAPFSKDNSIRLSAGGDIWVTREPYVSCDPDKCYQFALGQGTTLNNVHSNNTVRDRTPYRTLLMNELGVPFHLGTKQVCIAWSSSSCHDGKAWLHVCITGDDKNATASFIYNGRLVDSVVSWSKEILRTQESECVCINGTCTVVMTDGSASGKADTKILFIEEGKIVHTSTLSGSAQHVEECSCYPRYPGVRCVCRDNWKGSNRPIVDINIKDHSIVSSYVCSGLVGDTPRKNDSSSSSHCLDPNNEEGGHGVKGWAFDDGNDVWMGRTISEKSRLGYETFKVIEGWSNPKSKLQINRQVIVDRGNRSGYSGIFSVEGKSCINRCFYVELIRGRKEETEVLWTSNSIVVFCGTSGTYGTGSWPDGADINLMPI

SEQ ID NO: 17469 - protein, 469 aa, synthetic construct; identical to SEQ ID NO: 16738
  REGION 1..469: note = neuraminidase__InfluenzaA__ACX31901

SEQ ID NO: 17470 - protein, 469 aa, synthetic construct; identical to SEQ ID NO: 16738
  REGION 1..469: note = neuraminidase__InfluenzaA__ACX31902

SEQ ID NO: 17471 - protein, 469 aa, synthetic construct; identical to SEQ ID NO: 16738
  REGION 1..469: note = neuraminidase__InfluenzaA__ACX31905

SEQ ID NO: 17472 - protein, 469 aa, synthetic construct; identical to SEQ ID NO: 16738
  REGION 1..469: note = neuraminidase__InfluenzaA__ACX31906

SEQ ID NO: 17473 - protein, 469 aa, synthetic construct; identical to SEQ ID NO: 16738
  REGION 1..469: note = neuraminidase__InfluenzaA__ACX31907

SEQ ID NO: 17474 - protein, 469 aa, synthetic construct; identical to SEQ ID NO: 16738
  REGION 1..469: note = neuraminidase__InfluenzaA__ACX31908

SEQ ID NO: 17475 - protein, 469 aa, synthetic construct; identical to SEQ ID NO: 16893
  REGION 1..469: note = neuraminidase__InfluenzaA__ACX31909

SEQ ID NO: 17476 - protein, 469 aa, synthetic construct; identical to SEQ ID NO: 16738
  REGION 1..469: note = neuraminidase__InfluenzaA__ACX31911

SEQ ID NO: 17477 - protein, 469 aa, synthetic construct; identical to SEQ ID NO: 16738
  REGION 1..469: note = neuraminidase__InfluenzaA__ACX31912

SEQ ID NO: 17478 - protein, 469 aa, synthetic construct; identical to SEQ ID NO: 16738
  REGION 1..469: note = neuraminidase__InfluenzaA__ACX31913

SEQ ID NO: 17479 - protein, 469 aa, synthetic construct; identical to SEQ ID NO: 16738
  REGION 1..469: note = neuraminidase__InfluenzaA__ACX31914

SEQ ID NO: 17480 - protein, 469 aa, synthetic construct; identical to SEQ ID NO: 16738
  REGION 1..469: note = neuraminidase__InfluenzaA__ACX31915

SEQ ID NO: 17481 - protein, 469 aa, synthetic construct; identical to SEQ ID NO: 16738
  REGION 1..469: note = neuraminidase__InfluenzaA__ACX31916

SEQ ID NO: 17482 - protein, 469 aa, synthetic construct
  REGION 1..469: note = neuraminidase__InfluenzaA__ACX31917
MNPNQKIITIGSVCMTIGMANLILQIGNIISIWISHSIQLGNQNQIETCNQSVITYENNTWVNQTYVNISNTNFAAGQSVVSVKLAGNSSLCPVSGWAIYSKDNSIRIGSKGDVFVIREPFISCSPLECRTFFLTQGALLNDKHSNGTITDRSPYRTLMSCPIGEVPSPYNSRFESVAWSASACHDGINWLTIGISGPDNGAVAVLKYNGIITDTIKSWRNNILRTQESECACVNGSCFTVMTDGPSDGQASYKIFRIEKGKIVKSVEMNAPNYHYEECSCYPDSSEITCVCRDNWHGSNRPWVSFNQNLEYQIGYICSGIFGDNPRPNDKTGSCGPVSSNGANGVKGFSFKYGNGVWIGRTKSISSRNGFEMIWDPNGWTGTDNNFSIKQDIVGINEWSGYSGSFVQHPELTGLDCIRPCFWVELIRGRPKENTIWTSGSSISFCGVNSDTVGWSWPDGAELPFTIDK

SEQ ID NO: 17483 - protein, 469 aa, synthetic construct; identical to SEQ ID NO: 16738
  REGION 1..469: note = neuraminidase__InfluenzaA__ACX31918

SEQ ID NO: 17484 - protein, 469 aa, synthetic construct; identical to SEQ ID NO: 16738
  REGION 1..469: note = neuraminidase__InfluenzaA__ACX31919

SEQ ID NO: 17485 - protein, 469 aa, synthetic construct; identical to SEQ ID NO: 16738
  REGION 1..469: note = neuraminidase__InfluenzaA__ACX31920

SEQ ID NO: 17486 - protein, 469 aa, synthetic construct; identical to SEQ ID NO: 17092
  REGION 1..469: note = neuraminidase__InfluenzaA__ACX31922

SEQ ID NO: 17487 - protein, 469 aa, synthetic construct; identical to SEQ ID NO: 16738
  REGION 1..469: note = neuraminidase__InfluenzaA__ACX31923

SEQ ID NO: 17488 - protein, 469 aa, synthetic construct; identical to SEQ ID NO: 16728
  REGION 1..469: note = neuraminidase__InfluenzaA__ACX31924

SEQ ID NO: 17489 - protein, 469 aa, synthetic construct
  REGION 1..469: note = neuraminidase__InfluenzaA__ACX31925
MNPNQKIITIGSVCMTIGMANLILQIGNIISIWISHSIQLGNQNQIETCNQSVITYENNTWVNQTYVNISNTNFAAGQSVVSVKLAGNSSLCPVSGWAIYSKDNSIRIGSKGDVFVIREPFISCSPLECRTFFLTQGALLNDKHSNGTIKDRSPYRTLMSCPIGEVPSPYNSRFESVAWSASACHDGINWLTIGISGPDNGAVAVLKYNGIITDTIKSWRNNILRTQESECACVNGSCFTLMTDGPSDGQASYKIFRIEKGKIVKSVEMNAPNYHYEECSCYPDSSEITCVCRDNWHGSNRPWVSFNQNLEYQIGYICSGIFGDNPRPNDKTGSCGPVSSNGANGVKGFSFKYGNGVWIGRTKSISSRNGFEMIWDPNGWTGTDNNFSIKQDIVGINEWSGYSGSFVQHPELTGLDCIRPCFWVELIRGRPKENTIWTSGSSISFCGVNSDTVGWSWPDGAELPFIIDK

SEQ ID NO: 17490 - protein, 469 aa, synthetic construct; identical to SEQ ID NO: 16738
  REGION 1..469: note = neuraminidase__InfluenzaA__ACX31926

SEQ ID NO: 17491 - protein, 469 aa, synthetic construct; identical to SEQ ID NO: 16738
  REGION 1..469: note = neuraminidase__InfluenzaA__ACX31927

SEQ ID NO: 17492 - protein, 469 aa, synthetic construct
  REGION 1..469: note = neuraminidase__InfluenzaA__ACX31928
MNPNQKIITIGSVCMTIGMANLILQIGNIISIWISHSIQLGNQNQIETCNQSVITYENNTWVNQTYVNISNTNFAAGQSVVSVKLAGNSSLCPVSGWAIYSKDNSIRIGSKGDVFVIREPFISCSPLECRTFFLTQGALLNDKHSNGTIKDRSPYRTLMSCPIGEVPSPYNSRFESVAWSASACHDGINWLTIGISGPDNGAVAVLKYNGIITDTIKSWRNNILRTQESECACVNGSCFTVMTDGPSDGQASYKIFRIEKGKIVKSVEMNAPNYHYEECSCYPDSSEITCVCRDNWHGSNRPWVSFNQNLEYQIGYICSGIFGDNPRPNDKTGSCGPVSSNGENGVKGFSFKYGNGVWIGRTKSISSRNGFEMIWDPNGWTGTDNNFSIKQDIVGINEWSGYSGSFVQHPELTGLDCIRPCFWVELIRGRPKENTIWTSGSSISFCGVNGDTVGWSWPDGAELPFTIDK

SEQ ID NO: 17493 - protein, 469 aa, synthetic construct; identical to SEQ ID NO: 16768
  REGION 1..469: note = neuraminidase__InfluenzaA__ACX31929

SEQ ID NO: 17494 - protein, 469 aa, synthetic construct; identical to SEQ ID NO: 17092
  REGION 1..469: note = neuraminidase__InfluenzaA__ACX31930

SEQ ID NO: 17495 - protein, 469 aa, synthetic construct; identical to SEQ ID NO: 16738
  REGION 1..469: note = neuraminidase__InfluenzaA__ACX31931

SEQ ID NO: 17496 - protein, 469 aa, synthetic construct; identical to SEQ ID NO: 16738
  REGION 1..469: note = neuraminidase__InfluenzaA__ACX31932

SEQ ID NO: 17497 - protein, 469 aa, synthetic construct; identical to SEQ ID NO: 16738
  REGION 1..469: note = neuraminidase__InfluenzaA__ACX35250

SEQ ID NO: 17498 - protein, 469 aa, synthetic construct; identical to SEQ ID NO: 16738
  REGION 1..469: note = neuraminidase__InfluenzaA__ACX35260

SEQ ID NO: 17499 - protein, 469 aa, synthetic construct; identical to SEQ ID NO: 16738
  REGION 1..469: note = neuraminidase__InfluenzaA__ACX35270

SEQ ID NO: 17500 - protein, 469 aa, synthetic construct
  REGION 1..469: note = neuraminidase__InfluenzaA__ACX35280
MNPNQKIITIGSVCMTIGMANLILQIGNIISIWISHSIQLGNQNQIETCNQSVITYENNTWVNQTYVNISNTNFAAGQSVVSVKLAGNSSLCPVSGWAIYSKDNSIRIGSKGDVFVIREPFISCSPLECRTFFLTQGALLNDKHSNGTIKDRSPYRTLMSCPIGEVPSPYNSRFESVAWSASACHDGINWLTIGISGPDNGAVAVLKYNGIITDTIKSWRNNILRTQESECACVNGSCFTVMTDGPSDGQASYKIFRIEKGKIVKSVDMNAPNYHYEECSCYPDSSEITCVCRDNWHGSNRPWVSFNQNLEYQIGYICSGIFGDNPRPNDKTGSCGPVSSNGANGVKGFSFKYGNGVWIGRTKSISSRNGFEMIWDPNGWTGTDNNFSIKQDIVGINEWSGYSGSFVQHPELTGLDCIRPCFWVELIRGRPKENTIWTSGSSISFCGVNSDTVGWSWPDGAELPFTIDK

SEQ ID NO: 17501 - protein, 469 aa, synthetic construct; identical to SEQ ID NO: 16738
  REGION 1..469: note = neuraminidase__InfluenzaA__ACX35290

SEQ ID NO: 17502 - protein, 469 aa, synthetic construct; identical to SEQ ID NO: 16738
  REGION 1..469: note = neuraminidase__InfluenzaA__ACX35300

SEQ ID NO: 17503 - protein, 469 aa, synthetic construct
  REGION 1..469: note = neuraminidase__InfluenzaA__ACX35310
MNPNQKIITIGSVCMTIGMANLILQIGNIISIWISHSIQLGNQNQIGTCNQSVITYENNTWVNQTYVNISNTNFAAGQSVVSVKLAGNSSLCPVSGWAIYSKDNSIRIGSKGDVFVIREPFISCSPLECRTFFLTQGALLNDKHSNGTIKDRSPYRTLMSCPIGEVPSPYNSRFESVAWSASACHDGINWLTIGISGPDNGAVAVLKYNGIITDTIKSWRNNILRTQESECACVNGSCFTVMTDGPSDGQASYKIFRIEKGKIVKSVEMNAPNYHYEECSCYPDSSEITCVCRDNWHGSNRPWVSFNQNLEYQIGYICSGIFGDNPRPNDKTGSCGPVSSNGANGVKGFSFKYGNGVWIGRTKSISSRNGFEMIWDPNGWTGTDNNFSIKQDIVGINEWSGYSGSFVQHPELTGLDCIRPCFWVELIRGRPKENTIWTSGSSISFCGVNSDTVGWSWPDGAELPFTIDK

SEQ ID NO: 17504 - protein, 469 aa, synthetic construct; identical to SEQ ID NO: 16738
  REGION 1..469: note = neuraminidase__InfluenzaA__ACX35320

SEQ ID NO: 17505 - protein, 469 aa, synthetic construct
  REGION 1..469: note = neuraminidase__InfluenzaA__ACX35330
MNPNQKIITIGSVCITIGMANLILQIGNIISIWISHSIQLGNQNQIETCNQSVITYENNTWVNQTYVNISNTNFAAGQSVVSVKLAGNSSLCPVSGWAIYSKDNSIRIGSKGDVFVIREPFISCSPLECRTFFLTQGALLNDKHSNGTIKDRSPYRTLMSCPIGEVPSPYNSRFESVAWSASACHDGINWLTIGISGPDNGAVAVLKYNGIITDTIKSWRNNILRTQESECACVNGSCFTVMTDGPSDGQASYKIFRIEKGKIVKSVEMNAPNYHYEECSCYPDSSEITCVCRDNWHGSNRPWVSFNQNLEYQIGYICSGIFGDNPRPNDKTGSCGPVSSNGANGVKGFSFKYGNGVWIGRTKSISSRNGFEMIWDPNGWTGTDNNFSIKQDIVGINEWSGYSGSFVQHPELTGLDCIRPCFWVELIRGRPKENTIWTSGSSISFCGVNSDTVGWSWPDGAELPFTIDK

SEQ ID NO: 17506 - protein, 469 aa, synthetic construct; identical to SEQ ID NO: 16738
  REGION 1..469: note = neuraminidase__InfluenzaA__ACX48479

SEQ ID NO: 17507 - protein, 469 aa, synthetic construct; identical to SEQ ID NO: 16738
  REGION 1..469: note = neuraminidase__InfluenzaA__ACX48481

SEQ ID NO: 17508 - protein, 469 aa, synthetic construct; identical to SEQ ID NO: 16738
  REGION 1..469: note = neuraminidase__InfluenzaA__ACX55836

SEQ ID NO: 17509 - protein, 469 aa, synthetic construct
  REGION 1..469: note = neuraminidase__InfluenzaA__ACX56269
MNPKQKIITIGSVCMTIGMANLILQIGNIISIWISHSIQLGNQNQIETCNQSVITYENNTWVNQTYVNISNTNFAAGQSVVSVKLAGNSSLCPVSGWAIYSKDNSIRIGSKGDVFVIREPFISCSPLECRTFFLTQGALLNDKHSNGTIKDRSPYRTLMSCPIGEVPSPYNSRFESVAWSASACHDGINWLTIGISGPDNGAVAVLKYNGIITDTIKSWRNNILRTQESECACVNGSCFTVMTDGPSDGQASYKIFRIEKGKIVKSVEMNAPNYHYEECSCYPDSSEITCVCRDNWHGSNRPWVSFNQNLEYQIGYICSGIFGDNPRPNDKTGSCGPVSSNGANGVKGFSFKYGNGVWIGRTKSISSRNGFEMIWDPNGWTGTDNNFSIKQDIVGINEWSGYSGSFVQHPELTGLDCIRPCFWVELIRGRPKENTIWTSGSSISFCGVNSDTVGWSWPDGAELPFTIDK

SEQ ID NO: 17510 - protein, 469 aa, synthetic construct
  REGION 1..469: note = neuraminidase__InfluenzaA__ACX56270
MNPKQKIITIGSVCMTIGMANLILQIGNIISIWISHSIQLGNQNQIETCNQSVITYENNTWVNQTYVNISNTNFAAGQSVVSVKLAGNSSLCPVSGWAIYSKDNSIRIGSKGDVFVIREPFISCSPLECRTFFLTQGALLNDKHSNGTIKDRSPYRTLMSCPIGEVPSPYNSRFESVAWSASACHDGINWLTIGISGPDNGAVAVLKYNGIITDTIKSWRNNILRTQESECACVNGSCFTVMTDGPSDGQASYKIFRIEKGKIVKSVEMNAPNYHYEECSCYPDSSEITCVCRDNWHGSNRPWVSFNQNLEYQIGYICSGIFGDNPRPNDKTGSCGPVSSNGANGVKGFSFKYGNGVWIGRTKSISSRNGFEMIWDPNGWTGTDNNFSIKQDIVGINEWSGYSGSFVQHPELTGLDCIRPCFWVELIRGRPKENTIWTSGSSISFCGVNSDSVSWSWPDGAELPFTIDK

SEQ ID NO: 17511 - protein, 469 aa, synthetic construct
  REGION 1..469: note = neuraminidase__InfluenzaA__ACX56271
MNPKQKIITIGSVCMTIGMANLILQIGNIISIWISHSIQLGNQNQIETCNQSVITYENNTWVNQTYVNISNTNLAAGQSVGSVKLAGNSSLCPVSGWAIYSKDNSIRIGSKGDVFVIREPFISCSPLECRTFFLTQGALLNDKHSNGTIKDRSPYRTLMSCPIGEVPSPYNSRFESVAWSASACHDGINWLTIGISGPDNGAVAVLKYNGIITDTIKSWRNNILRTQESECACVNGSCFTVMTDGPSDGQASYKIFRIEKGKIVKSVEMNAPNYHYEECSCYPDSSEITCVCRDNWHGSNRPWVSFNQNLEYQIGYICSGIFGDNPRPNDKTGSCGPVSSNGANGVKGFSFKYGNGVWIGRTKSISSRNGFEMIWDPNGWTGTDNNFSIKQDIVGINEWSGYSGSFVQHPELTGLDCIRPCFWVELIRGRPKENTIWTSGSSISFCGVNSDTVGWSWPDGAELPFTIDK

SEQ ID NO: 17512 - protein, 469 aa, synthetic construct; identical to SEQ ID NO: 16738
  REGION 1..469: note = neuraminidase__InfluenzaA__ACX83579

SEQ ID NO: 17513 - protein, 469 aa, synthetic construct; identical to SEQ ID NO: 16738
  REGION 1..469: note = neuraminidase__InfluenzaA__ACX85425

SEQ ID NO: 17514 - protein, 469 aa, synthetic construct; identical to SEQ ID NO: 16738
  REGION 1..469: note = neuraminidase__InfluenzaA__ACX85426

SEQ ID NO: 17515 - protein, 469 aa, synthetic construct
  REGION 1..469: note = neuraminidase__InfluenzaA__ACY02998
MNPNQKIITIGSVCMTIGMANLILQIGNIISIWISHSIQLGNQNQIETCNQSVITYENNTWVNQTYVNISNTNFAAGQSVVSVKLAGNSSLCPVSGWAIYSKDNSIRIGSKGDVFVIREPFISCSPLECRTFFLTQGALLNDKHSNGTIKDRSPYRTLMSCPIGEVPSPYNSRFESVAWSASACHDGINWLTIGISGPDNGAVAVLKYNGIITDTIKSWRNNILRTQESECACVNGSCFTVMTDGPSNGQASYKIFRIEKGKIVKSVEMNAPNYHYEECSCYPDSGEITCVCRDNWHGSNRPWVSFNQNLEYQIGYICSGIFGDNPRPNDKTGSCGPVSSNGANGVKGFSFKYGNGVWIGRTKSISSRNGFEMIWDPNGWTGTDNNFSIKQDIVGINEWSGYSGSFVQHPELTGLDCIRPCFWVELIRGRPKENTIWTSGSSISFCGVNSDTVGWSWPDGAELPFTIDK

SEQ ID NO: 17516 - protein, 469 aa, synthetic construct; identical to SEQ ID NO: 16738
  REGION 1..469: note = neuraminidase__InfluenzaA__ACY03005

SEQ ID NO: 17517 - protein, 469 aa, synthetic construct; identical to SEQ ID NO: 16738
  REGION 1..469: note = neuraminidase__InfluenzaA__ACY03008

SEQ ID NO: 17518 - protein, 469 aa, synthetic construct; identical to SEQ ID NO: 16738
  REGION 1..469: note = neuraminidase__InfluenzaA__ACY03011

SEQ ID NO: 17519 - protein, 469 aa, synthetic construct; identical to SEQ ID NO: 16738
  REGION 1..469: note = neuraminidase__InfluenzaA__ACY03012

SEQ ID NO: 17520 - protein, 469 aa, synthetic construct; identical to SEQ ID NO: 16738
  REGION 1..469: note = neuraminidase__InfluenzaA__ACY03016

SEQ ID NO: 17521 - protein, 469 aa, synthetic construct; identical to SEQ ID NO: 16738
  REGION 1..469: note = neuraminidase__InfluenzaA__ACY26194

SEQ ID NO: 17522 - protein, 469 aa, synthetic construct; identical to SEQ ID NO: 16738
  REGION 1..469: note = neuraminidase__InfluenzaA__ACY26204

SEQ ID NO: 17523 - protein, 469 aa, synthetic construct; identical to SEQ ID NO: 16738
  REGION 1..469: note = neuraminidase__InfluenzaA__ACY30123

SEQ ID NO: 17524 - protein, 469 aa, synthetic construct; identical to SEQ ID NO: 16738
  REGION 1..469: note = neuraminidase__InfluenzaA__ACY30124

SEQ ID NO: 17525 - protein, 469 aa, synthetic construct; identical to SEQ ID NO: 16738
  REGION 1..469: note = neuraminidase__InfluenzaA__ACY30125

SEQ ID NO: 17526 - protein, 469 aa, synthetic construct; identical to SEQ ID NO: 16738
  REGION 1..469: note = neuraminidase__InfluenzaA__ACY30127

SEQ ID NO: 17527 - protein, 469 aa, synthetic construct; identical to SEQ ID NO: 16738
  REGION 1..469: note = neuraminidase__InfluenzaA__ACY30128

SEQ ID NO: 17528 - protein, 469 aa, synthetic construct; identical to SEQ ID NO: 16738
  REGION 1..469: note = neuraminidase__InfluenzaA__ACY46105

SEQ ID NO: 17529 - protein, 469 aa, synthetic construct; identical to SEQ ID NO: 16738
  REGION 1..469: note = neuraminidase__InfluenzaA__ACY46165

SEQ ID NO: 17530 - protein, 469 aa, synthetic construct; identical to SEQ ID NO: 16738
  REGION 1..469: note = neuraminidase__InfluenzaA__ACY46175

SEQ ID NO: 17531 - protein, 469 aa, synthetic construct; identical to SEQ ID NO: 16738
  REGION 1..469: note = neuraminidase__InfluenzaA__ACY46345

SEQ ID NO: 17532 - protein, 469 aa, synthetic construct; identical to SEQ ID NO: 16738
  REGION 1..469: note = neuraminidase__InfluenzaA__ACY46385

SEQ ID NO: 17533 - protein, 469 aa, synthetic construct; identical to SEQ ID NO: 16738
  REGION 1..469: note = neuraminidase__InfluenzaA__ACY46485

SEQ ID NO: 17534 - protein, 469 aa, synthetic construct; identical to SEQ ID NO: 16768
  REGION 1..469: note = neuraminidase__InfluenzaA__ACY77536

SEQ ID NO: 17535 - protein, 469 aa, synthetic construct; identical to SEQ ID NO: 16728
  REGION 1..469: note = neuraminidase__InfluenzaA__ACY77546

SEQ ID NO: 17536 - protein, 469 aa, synthetic construct; identical to SEQ ID NO: 16768
  REGION 1..469: note = neuraminidase__InfluenzaA__ACY77565

SEQ ID NO: 17537 - protein, 469 aa, synthetic construct
  REGION 1..469: note = neuraminidase__InfluenzaA__ACY77575
MNPNQKIITIGSVCMTIGMANLILQIGNIISIWISHSIQLGNQNQIETCNQSVITYENNTWVNQTYVNISNTNFAAGQSVVSVKLAGNSSLCPVSGWAIYSKDNSIRIGSKGDVFVIREPFISCSPLECRTFFLTQGALLNDKHSNGTIKDRSPYRTLMSCPIGEVPSPYNSRFESVAWSASACHDGINWLTIGISGPDNGAVAVLKYNGIITDTIKSWRNNILRTQESECACVNGSCFTVMTDGPSDGQASYKIFRIEKGKIVKSVEMNAPNYHYEECSCYPDSSEITCVCRDNWHGSNRPWVSFNQNLEYQIGYICSGIFGDNPRPSDKTGSCGPVSSNGANGVKGFSFKYGNGVWIGRTKSISSRNGFEMIWDPNGWTGTDNNFSIKQDIVGINEWSGYSGSFVQHPELTGLDCIRPCFWVELIRGRPKENTIWTSGSSISFCGVNSDTVGWSWPDGAELPFTIDK

SEQ ID NO: 17538 - protein, 469 aa, synthetic construct; identical to SEQ ID NO: 16738
  REGION 1..469: note = neuraminidase__InfluenzaA__ACY77585

SEQ ID NO: 17539 - protein, 469 aa, synthetic construct; identical to SEQ ID NO: 16768
  REGION 1..469: note = neuraminidase__InfluenzaA__ACY77595

SEQ ID NO: 17540 - protein, 469 aa, synthetic construct; identical to SEQ ID NO: 16768
  REGION 1..469: note = neuraminidase__InfluenzaA__ACY77605

SEQ ID NO: 17541 - protein, 469 aa, synthetic construct; identical to SEQ ID NO: 16738
  REGION 1..469: note = neuraminidase__InfluenzaA__ACY77625

SEQ ID NO: 17542 - protein, 469 aa, synthetic construct
  REGION 1..469: note = neuraminidase__InfluenzaA__ACY77655
MNPNQKIITIGSVCMTIGMANLILQIGNIISIWISHSIQLGNQNQIETCNQSVITYENNTWVNQTYVNISNTNFAAGQSVVSVKLAGNSSLCPVSGWAIYSKDNSVRIGSKGDVFVIREPFISCSPLECRTFFLTQGALLNDKHSNGTIKDRSPYRTLMSCPIGEVPSPYNSRFESVAWSASACHDGINWLTIGISGPDNGAVAVLKYNGIITDTIKSWRNNILRTQESECACVNGSCFTVMTDGPSNGQASYKIFRIEKGKIVKSVEMNAPNYHYEECSCYPDSSEITCVCRDNWHGSNRPWVSFNQNLEYQIGYICSGIFGDNPRPNDKTGSCGPVSFNGANGVKGFSFKYGNGVWIGRTKSISSRNGFEMIWDPNGWTGTDNNFSIKQDIVGINEWSGYSGSFVQHPELTGLDCIRPCFWVELIRGRPKENTIWTSGSSISFCGVNSDTVGWSWPDGAELPFTIDK

SEQ ID NO: 17543 - protein, 469 aa, synthetic construct; identical to SEQ ID NO: 16738
  REGION 1..469: note = neuraminidase__InfluenzaA__ACY77665

SEQ ID NO: 17544 - protein, 469 aa, synthetic construct; identical to SEQ ID NO: 16738
  REGION 1..469: note = neuraminidase__InfluenzaA__ACY77675

SEQ ID NO: 17545 - protein, 469 aa, synthetic construct; identical to SEQ ID NO: 16728
  REGION 1..469: note = neuraminidase__InfluenzaA__ACY77685

SEQ ID NO: 17546 - protein, 469 aa, synthetic construct; identical to SEQ ID NO: 16728
  REGION 1..469: note = neuraminidase__InfluenzaA__ACY77695

SEQ ID NO: 17547 - protein, 469 aa, synthetic construct; identical to SEQ ID NO: 16728
  REGION 1..469: note = neuraminidase__InfluenzaA__ACY77705

SEQ ID NO: 17548 - protein, 469 aa, synthetic construct; identical to SEQ ID NO: 16728
  REGION 1..469: note = neuraminidase__InfluenzaA__ACY77725

SEQ ID NO: 17549 - protein, 469 aa, synthetic construct; identical to SEQ ID NO: 16728
  REGION 1..469: note = neuraminidase__InfluenzaA__ACY77735

SEQ ID NO: 17550 - protein, 469 aa, synthetic construct; identical to SEQ ID NO: 16738
  REGION 1..469: note = neuraminidase__InfluenzaA__ACY77745

SEQ ID NO: 17551 - protein, 469 aa, synthetic construct; identical to SEQ ID NO: 16738
  REGION 1..469: note = neuraminidase__InfluenzaA__ACY77755

SEQ ID NO: 17552 - protein, 469 aa, synthetic construct; identical to SEQ ID NO: 16738
  REGION 1..469: note = neuraminidase__InfluenzaA__ACY77775

SEQ ID NO: 17553 - protein, 469 aa, synthetic construct; identical to SEQ ID NO: 16738
  REGION 1..469: note = neuraminidase__InfluenzaA__ACY77785

SEQ ID NO: 17554 - protein, 469 aa, synthetic construct; identical to SEQ ID NO: 16738
  REGION 1..469: note = neuraminidase__InfluenzaA__ACY77795

SEQ ID NO: 17555 - protein, 469 aa, synthetic construct
  REGION 1..469: note = neuraminidase__InfluenzaA__ACY77825
MNPNQKIITIGSVCMTIGMANLILQIGNIISIWISHSIQLGNQNQIETCNQSVITYENNTWVNQTYVNISNTNFAAGQSVVSAKLAGNSSLCPVSGWAIYSKDNSIRIGSKGDVFVIREPFISCSPLECRTFFLTQGALLNDKHSNGTIKDRSPYRTLMSCPIGEVPSPYNSRFESVAWSASACHDGINWLTIGISGPDNGAVAVLKYNGIITDTIKSWRNNILRTQESECACVNGSCFTVMTDGPSDGQASYKIFRIEKGKIVKSVEMNAPNYHYEECSCYPDSSEITCVCRDNWHGSNRPWVSFNQNLEYQIGYICSGIFGDNPRPNDKTGSCGPVSSNGANGVKGFSFKYGNGVWIGRTKSINSRNGFEMIWDPNGWTGTDNNFSIKQDIVGINEWSGYSGSFVQHPELTGLDCIRPCFWVELIRGRPKENTIWTSGSSISFCGVNSDTVGWSWPDGAELPFTIDK

SEQ ID NO: 17556 - protein, 469 aa, synthetic construct; identical to SEQ ID NO: 17555
  REGION 1..469: note = neuraminidase__InfluenzaA__ACY77835

SEQ ID NO: 17557 - protein, 469 aa, synthetic construct; identical to SEQ ID NO: 16768
  REGION 1..469: note = neuraminidase__InfluenzaA__ACY77845

SEQ ID NO: 17558 - protein, 469 aa, synthetic construct; identical to SEQ ID NO: 16738
  REGION 1..469: note = neuraminidase__InfluenzaA__ACY77865

SEQ ID NO: 17559 - protein, 469 aa, synthetic construct
  REGION 1..469: note = neuraminidase__InfluenzaA__ACY77870
MNPNQKIITIGSVCMTIGMANLILQIGNIISIWISHSIQLGNQNQIETCNQSVITYENNTWVNQTYVNISNTNLAAGQSVVSVKLAGNSSLCPVSGWAIYSKDNSIRIGSKGDVFVIREPFISCSPLECRTFFLTQGALLNDKHSNGTIKDRSPYRTLMSCPIGEVPSPYNSRFESVAWSASACHDGINWLTIGISGPDNGAVAVLKYNGIITDTIKSWRNNILRTQESECACVNGSCFTVMTDGPSDGQASYKIFRIEKGKIVKSVEMNAPNYHYEECSCYPDSSEITCVCRDNWHGSNRPWVSFNQNLEYQIGYICSGIFGDNPRPNDKTGSCGPVSSNGANGVKGFSFKYGNGVWIGRTKSISSRNGFEMIWDPNGWTGTDNNFSIKQDIVGINEWSGYSGSFVQHPELTGLDCIRPCFWVELIRGRPKENTIWTSGSSISFCGVNSDTVGWSWPDGAELPFTIDK

SEQ ID NO: 17560 - protein, 469 aa, synthetic construct; identical to SEQ ID NO: 16738
  REGION 1..469: note = neuraminidase__InfluenzaA__ACY77877

SEQ ID NO: 17561 - protein, 469 aa, synthetic construct; identical to SEQ ID NO: 16738
  REGION 1..469: note = neuraminidase__InfluenzaA__ACY77887

SEQ ID NO: 17562 - protein, 469 aa, synthetic construct; identical to SEQ ID NO: 16738
  REGION 1..469: note = neuraminidase__InfluenzaA__ACY77907

SEQ ID NO: 17563 - protein, 469 aa, synthetic construct; identical to SEQ ID NO: 16768
  REGION 1..469: note = neuraminidase__InfluenzaA__ACY77917

SEQ ID NO: 17564 - protein, 469 aa, synthetic construct
  REGION 1..469: note = neuraminidase__InfluenzaA__ACY77927
MNPNQKIITIGSVCMTIGMANLILQIGNIISIWISHSIQLGNQNQIETCNQSVITYENNTWVNQTYVNISNTNFAAGQSVVSVKLAGNSSLCPVSGWAIYSKDNSIRIGSKGDVFVIREPFISCSPLECRTFFLTQGALLNDKHSNGTIKDRSPYRTLMSCPIGEVPSPYNSRFESVAWSASACHDGINWLTIGISGPNNGAVAVLKYNGIITDTIKSWRNNILRTQESECACVNGSCFTVMTDGPSDGQASYKIFRIEKGKIVKSVEMNAPNYHYEECSCYPDSSEITCVCRDNWHGSNRPWVSFNQNLEYQIGYICSGIFGDNPRPNDKTGSCGPVSSNGANGVKGFSFKYGNGVWIGRTKSISSRNGFEMIWDPNGWTGTDNNFSIKQDIVGINEWSGYSGSFVQHPELTGLDCIRPCFWVELIRGRPKENTIWTSGSSISFCGVNSDTVGWSWPDGAELPFTIDK

SEQ ID NO: 17565 - protein, 469 aa, synthetic construct; identical to SEQ ID NO: 16738
  REGION 1..469: note = neuraminidase__InfluenzaA__ACY77937

SEQ ID NO: 17566 - protein, 469 aa, synthetic construct; identical to SEQ ID NO: 16738
  REGION 1..469: note = neuraminidase__InfluenzaA__ACY77947

SEQ ID NO: 17567 - protein, 469 aa, synthetic construct; identical to SEQ ID NO: 16738
  REGION 1..469: note = neuraminidase__InfluenzaA__ACY77967

SEQ ID NO: 17568 - protein, 469 aa, synthetic construct; identical to SEQ ID NO: 16728
  REGION 1..469: note = neuraminidase__InfluenzaA__ACY77977

SEQ ID NO: 17569 - protein, 469 aa, synthetic construct; identical to SEQ ID NO: 16738
  REGION 1..469: note = neuraminidase__InfluenzaA__ACY77987

SEQ ID NO: 17570 - protein, 469 aa, synthetic construct
  REGION 1..469: note = neuraminidase__InfluenzaA__ACY77997
MNPNQKIITIGSVCMTIGMANLILQIGNIISIWISHSIQLGNQNQIETCNQSVITYENNTWVNQTYVNISNTNFAAGQSVVSVTLAGNSSLCPVSGWAIYSKDNSIRIGSKGDVFVIREPFISCSPLECRTFFLTQGALLNDKHSNGTIKDRSPYRTLMSCPIGEVPSPYNSRFESVAWSASACHDGINWLTIGISGPDNGAVAVLKYNGIITDTIKSWRNNILRTQESECACVNGSCFTVMTDGPSDGQASYKIFRIEKGKIVKSVEMNAPNYHYEECSCYPDSSEITCVCRDNWHGSNRPWVSFNQNLEYQIGYICSGIFGDNPRPNDKTGSCGPVSSNGANGVKGFSFKYGNGVWIGRTKSISSRNGFEMIWDPNGWTGTDNNFSIKQDIVGINEWSGYSGSFVQHPELTGLDCIRPCFWVELIRGRPKENTIWTSGSSISFCGVNSDTVGWSWPDGAELPFTIDK

SEQ ID NO: 17571 - protein, 469 aa, synthetic construct; identical to SEQ ID NO: 16738
  REGION 1..469: note = neuraminidase__InfluenzaA__ACY78017

SEQ ID NO: 17572 - protein, 469 aa, synthetic construct
  REGION 1..469: note = neuraminidase__InfluenzaA__ACZ01955
MNPNQKIITIGSVCMTIGMANLILQIGNIISIWISHSIQLGNQNQIETCNQSVITYENNTWVNQTYVNISNTNFAAGQSVVSVKLAGNSSLCPVSGWAIYSKDNSIRIGSKGDVFVIREPFISCSPLECRTFFLTQGALLNDKHSNGTIKDRSPYRTLMSCPIGEVPSPYNSRFESVAWSASACHDGINWLTIGISGPGNGAVAVLKYNGIITDTIKSWRNNILRTQESECACVNGSCFTVMTDGPSDGQASYKIFRIEKGKIVKSVEMNAPNYHYEECSCYPDSSEITCVCRDNWHGSNRPWVSFNQNLEYQIGYICSGIFGDNPRPNDKTGSCGPVSSNGANGVKGFSFKYGNGVWIGRTKSISSRNGFEMIWDPNGWTGTDNNFSIKQDIVGINEWSGYSGSFVQHPELTGLDCIRPCFWVELIRGRPKENTIWTSGSSISFCGVNSDTVGWSWPDGAELPFTIDK

SEQ ID NO: 17573 - protein, 469 aa, synthetic construct; identical to SEQ ID NO: 16738
  REGION 1..469: note = neuraminidase__InfluenzaA__ACZ05053

SEQ ID NO: 17574 - protein, 469 aa, synthetic construct; identical to SEQ ID NO: 16728
  REGION 1..469: note = neuraminidase__InfluenzaA__ACZ05064

SEQ ID NO: 17575 - protein, 469 aa, synthetic construct; identical to SEQ ID NO: 16738
  REGION 1..469: note = neuraminidase__InfluenzaA__ACZ05074

SEQ ID NO: 17576 - protein, 469 aa, synthetic construct; identical to SEQ ID NO: 16738
  REGION 1..469: note = neuraminidase__InfluenzaA__ACZ05084

SEQ ID NO: 17577 - protein, 469 aa, synthetic construct; identical to SEQ ID NO: 16738
  REGION 1..469: note = neuraminidase__InfluenzaA__ACZ05094

SEQ ID NO: 17578 - protein, 469 aa, synthetic construct; identical to SEQ ID NO: 16738
  REGION 1..469: note = neuraminidase__InfluenzaA__ACZ05104

SEQ ID NO: 17579 - protein, 469 aa, synthetic construct; identical to SEQ ID NO: 16738
  REGION 1..469: note = neuraminidase__InfluenzaA__ACZ05114

SEQ ID NO: 17580 - protein, 469 aa, synthetic construct; identical to SEQ ID NO: 16738
  REGION 1..469: note = neuraminidase__InfluenzaA__ACZ05124

SEQ ID NO: 17581 - protein, 469 aa, synthetic construct; identical to SEQ ID NO: 16738
  REGION 1..469: note = neuraminidase__InfluenzaA__ACZ05144

SEQ ID NO: 17582 - protein, 469 aa, synthetic construct; identical to SEQ ID NO: 16738
  REGION 1..469: note = neuraminidase__InfluenzaA__ACZ05154

SEQ ID NO: 17583 - protein, 469 aa, synthetic construct; identical to SEQ ID NO: 16599
  REGION 1..469: note = neuraminidase__InfluenzaA__ACZ05164

SEQ ID NO: 17584 - protein, 469 aa, synthetic construct; identical to SEQ ID NO: 16599
  REGION 1..469: note = neuraminidase__InfluenzaA__ACZ05175

SEQ ID NO: 17585 - protein, 470 aa, synthetic construct
  REGION 1..470: note = neuraminidase__InfluenzaA__ACZ05197
MNPNQKIMTIGSISIAIGIISLMLQIGNIISIWASHSIQTGSQNNTGICNQRIITYENSTWVNHTYVNINNTNVVAGEDKTSVTLAGNSSLCSISGWAIYTKDNSIRIGSKGDVFVIREPFISCSHLECRTFFLTQGALLNDKHSNGTVKDRSPYRALMSCPLGEAPSPYNSKFESVAWSASACHDGMGWLTIGISGPDNGAVAVLKYNGIITGTIKSWKKQILRTQESECVCMNGSCFTIMTDGPSNKAASYKIFKIEKGKVTKSIELNAPNFYYEECSCYPDTGIVMCVCRDNWHGSNRPWVSFNQNLDYQIGYICSGVFGDNPRPEDGEGSCNPVTVDGANGVKGFSYKYGNGVWIGRTKSNRLRKGFEMIWDPNGWTNTDSDFSVKQDVVAITDWSGYSGSFVQHPELTGLDCIRPCFWVELVRGLPRENTTIWTSGSSISFCGVNSDTANWSWPDGAELPFTIDK

SEQ ID NO: 17586 - protein, 469 aa, synthetic construct
  REGION 1..469: note = neuraminidase__InfluenzaA__ACZ05208
MNPNQKIITIGSVSLTISTICFFMQIAILITTVTLHFKQYEFNSPPNNQVMLCEPTIIERNITEIVYLTNTTIEKEICPKLAEYRNWSKPQCDITGFAPFSKDNSIRLSAGGDIWVTREPYVSCDPDKCYQFALGQGTTLNNVHSNNTVRDRTPYRTLLMNELGVPFHLGTKQVCIAWSSSSCHDGKAWLHVCITGDDKNATASFIYNGRLVDSVVSWSKEILRTQESECVCINGTCTVVMTDGSASGKADTKILFIEEGKIVHTSTLSGSAQHVEECSCYPRYPGVRCVCRDNWKGSNRPIVDINIKDHSIVSSYVCSGLVGDTPRKNDSSSSSHCSDPNNEEGGHGVKGWAFDSGNDVWMGRTISEKSRLGYETFKVIEGWSNPKSKLQINRQVIVDRGNRSGYSGIFSVEGKSCINRCFYVELIRGRKEETEVLWTSNSIVVFCGTSGTYGTGSWPDGADINLMPI

SEQ ID NO: 17587 - protein, 469 aa, synthetic construct
  REGION 1..469: note = neuraminidase__InfluenzaA__ACZ05219
MNPNQKIITIGSVSLTISTICFFMQIAILITTVTLHFKQYEFNSPPNNQVMLCEPTIIERNITEIVYLTNTTIEKEICPKLAEYRNWSKPQCGITGFAPFSKDNSIRLSAGGDIWVTREPYVSCDPDKCYQFALGQGTTLNNVHSNNTVRDRTPYRTLLMNELGVPFHLGTKQVCIAWSSSSCHDGKAWLHVCITGDDKNATASFIYNGRLVDSVVSWSKEILRTQESECVCINGTCTVVMTDGSASGKADTKILFIEEGKIVHTSTLSGSAQHVEECSCYPRYPGVRCVCRDNWKGSNRPIVDINIKDHSIVSSYVCSGLVGDTPRKNDSSSSSHCLDPNNEEGGHGVKGWAFDDGNDVWMGRTISEKSRLGYETFKVIEGWSNPKSKLQINRQVIVDRGNRSGYSGIFSVEGKSCINRCFYVELIRGRKEETEVLWTSNSIVVFCGTSGTYGTGSWPDGADINLMPI

SEQ ID NO: 17588 - protein, 469 aa, synthetic construct; identical to SEQ ID NO: 16599
  REGION 1..469: note = neuraminidase__InfluenzaA__ACZ05230

SEQ ID NO: 17589 - protein, 469 aa, synthetic construct
  REGION 1..469: note = neuraminidase__InfluenzaA__ACZ05241
MNPNQKIITIGSVSLTISTICFFMQIAILITTVTLHFKQYEFNSPPNNQVMLCEPTIIERNITEIVYLTNTTIEKEICPKLAEYRNWSKPQCDITGFAPFSKDNSIRLSAGGDIWVTREPYVSCDPDKCYQFALGQGTTLNNVHSNNTVRDRTPYRTLLMNELGVPFHLGTKQVCIAWSSSSCHDGKAWLHVCITGDDKNATASFIYNGRLVDSVVSWSKEILRTQESECVCINGTCTVVMTDGSASGKADTKILFIEEGKIVHTSKLSGSAQHVEECSCYPRYPGVRCVCRDNWKGSNRPIVDINIKDHSIVSSYVCSGLVGDTPRKNDSSSSSHCLDPNNEEGGHGVKGWAFDDGNDVWMGRTISEKSRLGYETFKVIEGWSNPKSKLQINRQVIVDRGNRSGYSGIFSVEGKSCINRCFYVELIRGRKEETEVLWTSNSIVVFCGTSGTYGTGSWPDGADINLMPI

SEQ ID NO: 17590 - protein, 470 aa, synthetic construct
  REGION 1..470: note = neuraminidase__InfluenzaA__ACZ05296
MNPNQKIITIGSISIAIGIISLMLQIGNIISIWASHSIQTGSQNNTGICNQRIITYENSTWVNHTYVNINNTNVVAGEDKTSVTLAGNSSLCSISGWAIYTKDNSIRIGSKGDVFVIREPFISCSHLECRTFFLTQGALLNDKHSNGTVKDRSPYRALMSCPLGEAPSPYNSKFESVAWSASACHDGMGWLTIGISGPDNGAVAVLKYNGIITGTIKSWKKQILRTQESECVCMNGSCFTIMTDGPSNKAASYKIFKIEKGKVTKSIELNAPNFYYEECSCYPDTGIVMCVCRDNWHGSNRPWVSFNQNLDYQIGYICSGVFGDNPRPEDGEGSCNPVAVDGANGVKGFSYKYGNGVWIGRTKSNRLRKGFEMIWDPNGWTNTDSDFSVKQDVVAITDWSGYSGSFVQHPELTGLDCIRPCFWVELVRGLPRENTTIWTSGSSISFCGVNSDTANWSWPDGAELPFTIDK

SEQ ID NO: 17591 - protein, 469 aa, synthetic construct; identical to SEQ ID NO: 16599
  REGION 1..469: note = neuraminidase__InfluenzaA__ACZ05307

SEQ ID NO: 17592 - protein, 469 aa, synthetic construct
  REGION 1..469: note = neuraminidase__InfluenzaA__ACZ05318
MNPNQKIITIGSVSLTISTICFFMQTAILITTVTLHFKQCEFNSPPNNQVMLCEPTIIERNITEIVYLTNTTIEKEICPKLAEYRNWSKPQCDITGFAPFSKDNSIRLSAGGDIWVTREPYVSCDPDKCYQFALGQGTTLNNVHSNNTVRDRTPYRTLLMNELGVPFHLGTKQVCIAWSSSSCHDGKAWLHVCITGDDKNATASFIYNGRLVDSVVSWSKEILRTQESECVCINGTCTVVMTDGSASGKADTKILFIEEGKIVHTSTLSGSAQHVEECSCYPRYPGVRCVCRDNWKGSNRPIVDINIKDHSIVSSYVCSGLVGDTPRKNDSSSSSHCLDPNNEEGGHGVKGWAFDDGNDVWMGRTISEKSRLGYETFKVIEGWSNPKSKLQINRQVIVDRGNRSGYSGIFSVEGKSCINRCFYVELIRGRKEETEVLWTSNSIVVFCGTSGTYGTGSWPDGADINLMPI

SEQ ID NO: 17593 - protein, 469 aa, synthetic construct; identical to SEQ ID NO: 16599
  REGION 1..469: note = neuraminidase__InfluenzaA__ACZ05329

SEQ ID NO: 17594 - protein, 469 aa, synthetic construct; identical to SEQ ID NO: 16512
  REGION 1..469: note = neuraminidase__InfluenzaA__ACZ05340

SEQ ID NO: 17595 - protein, 469 aa, synthetic construct; identical to SEQ ID NO: 17589
  REGION 1..469: note = neuraminidase__InfluenzaA__ACZ05362

SEQ ID NO: 17596 - protein, 469 aa, synthetic construct; identical to SEQ ID NO: 16599
  REGION 1..469: note = neuraminidase__InfluenzaA__ACZ05373

SEQ ID NO: 17597 - protein, 469 aa, synthetic construct; identical to SEQ ID NO: 16599
  REGION 1..469: note = neuraminidase__InfluenzaA__ACZ05395

SEQ ID NO: 17598 - protein, 469 aa, synthetic construct; identical to SEQ ID NO: 16599
  REGION 1..469: note = neuraminidase__InfluenzaA__ACZ05406

SEQ ID NO: 17599 - protein, 470 aa, synthetic construct
  REGION 1..470: note = neuraminidase__InfluenzaA__ACZ05450
MNPNQKIITIGSISIAIGIISLMLQIGSIISIWASHSIQTGSQNNTGICNQRIITYENSTWVNHTYVNINNTNVVAGEDKTSVTLAGNSSLCSISGWAIYTKDNSVRIGSKGDVFVIREPFISCSHLECRTFFLTQGALLNDKHSNGTVKDRSPYRALMSCPLGEAPSPYNSKFESVAWSASACHDGMGWLTIGISGPDNGAVAVLKYNGIITGTIKSWKKQILRTQESECVCMNGSCFTIMTDGPSNKAASYKIFKIEKGKVTKSIELNAPNFYYEECSCYPDTGIVMCVCRDNWHGSNRPWVSFNQNLDYQIGYICSGVFGDNPRPEDGEGSCNPVTVDGANGVKGFSYKYGNGVWIGRTKSNRLRKGFEMIWDPNGWTNTDSDFSVKQDVVAITDWSGYSGSFVQHPELTGLDCIRPCFWVELVRGLPRENTTIWTSGSSISFCGVNSDTANWSWPDGAELPFTIDK

SEQ ID NO: 17600 - protein, 469 aa, synthetic construct; identical to SEQ ID NO: 16599
  REGION 1..469: note = neuraminidase__InfluenzaA__ACZ05461

SEQ ID NO: 17601 - protein, 469 aa, synthetic construct; identical to SEQ ID NO: 16599
  REGION 1..469: note = neuraminidase__InfluenzaA__ACZ05472

SEQ ID NO: 17602 - protein, 469 aa, synthetic construct
  REGION 1..469: note = neuraminidase__InfluenzaA__ACZ05483
MNPNQKIITIGSVSLTISTICFFMQIAILITTVTLHFKQYEFNSPPNNQVMLCEPTIIERNITEIVYLTNTTVEKEICPKLAEYRNWSKPQCDITGFAPFSKDNSIRLSAGGDIWVTREPYVSCDPDKCYQFALGQGTTLNNVHSNNTVRDRTPYRTLLMNELGVPFHLGTKQVCIAWSSSSCHDGKAWLHVCITGDDKNATASFIYNGRLVDSVVSWSKEILRTQESECVCINGTCTVVMTDGSASGKADTKILFIEEGKIVHTSTLSGSAQHVEECSCYPRYPGVRCVCRDNWKGSNRPIVDINIKDHSIVSSYVCSGLVGDTPRKNDSSSSSHCLDPNNEEGGHGVKGWAFDDGNDVWMGRTISEKSRLGYETFKVIEGWSNPKSKLQINRQVIVDRGNRSGYSGIFSVEGKSCINRCFYVELIRGRKEETEVLWTSNSIVVFCGTSGTYGTGSWPDGADINLMPI

SEQ ID NO: 17603 - protein, 469 aa, synthetic construct; identical to SEQ ID NO: 16599
  REGION 1..469: note = neuraminidase__InfluenzaA__ACZ05494

SEQ ID NO: 17604 - protein, 469 aa, synthetic construct; identical to SEQ ID NO: 17592
  REGION 1..469: note = neuraminidase__InfluenzaA__ACZ05516

SEQ ID NO: 17605 - protein, 469 aa, synthetic construct
  REGION 1..469: note = neuraminidase__InfluenzaA__ACZ05527
MNPNQKIITIGSVSLTISTICFFMQIAILITTVTLHFKQYEFNSPPNNQVMLCEPTIIERNITEIVYLTNTTIEKEICPKLAEYRNWSKPQCDITGFAPFSKDNSIRLSAGGDIWVTREPYVSCDPDKCYQFALGQGTTLNNVHSNNTVRDRTPYRTLLMNELGVPFHLGTKQVCIAWSSSSCHDGKAWLHVCITGDDKNATASFIYNGRLVDSVVSWSKEILRTQESECVCINGTCTVVMTDGSASGKADTKILFIEEGKIVHTSTLSGSAQHVEECSCYPRYPGVRCVCRDNWKGSNRPIVDINIKDHSIVSSYVCSGLVGDTPRKNDSSSSSHCSDPNNEEGGHGVKGWAFDDGNDVWMGRTISEKSRLGYETFKVIEGWSNPKSKLQINRQVIVDRGNRSGYSGIFSVEGKSCINRCFYVELIRGRKEETEVLWTSNSIVVFCGTSGTYGTGSWPDGADINLMPI

SEQ ID NO: 17606 - protein, 469 aa, synthetic construct; identical to SEQ ID NO: 17589
  REGION 1..469: note = neuraminidase__InfluenzaA__ACZ05538

SEQ ID NO: 17607 - protein, 470 aa, synthetic construct; identical to SEQ ID NO: 17461
  REGION 1..470: note = neuraminidase__InfluenzaA__ACZ05593

SEQ ID NO: 17608 - protein, 470 aa, synthetic construct
  REGION 1..470: note = neuraminidase__InfluenzaA__ACZ05604
MNPNQKIITIGSISIAIGIISLMLQIGNIISIWASHSIQTGSQNNTGICNQRIITYENSTWVNHTYVNINNTNVVAGEDKTSVTLAGNSSLCSIRGWAIYTKDNSIRIGSKGDVFVIREPFISCSHLECRTFFLTQGALLNDKHSNGTVKDRSPYRALMSCPLGEAPSPYNSKFESVAWSASACHDGMGWLTIGISGPDNGAVAVLKYNGIITGTIKSWKKQILRTQESECVCMNGSCFTIMTDGPSNKAASYKIFKIEKGKVTKSIELNAPNFYYEECSCYPDTGIVMCVCRDNWHGSNRPWVSFNQNLDYQIGYICSGVFGDNPRPEDGEGSCNPVTVDGANGVKGFSYKYGNGVWIGRTKSNRLRKGFEMIWDPNGWTNTDSDFSVKQDVVAITDWSGYSGSFVQHPELTGLDCIRPCFWVELVRGLPRENTTIWTSGSSISFCGVNSDTANWSWPDGAELPFTIDK

SEQ ID NO: 17609 - protein, 469 aa, synthetic construct; identical to SEQ ID NO: 16599
  REGION 1..469: note = neuraminidase__InfluenzaA__ACZ05953

SEQ ID NO: 17610 - protein, 469 aa, synthetic construct; identical to SEQ ID NO: 17605
  REGION 1..469: note = neuraminidase__InfluenzaA__ACZ05964

SEQ ID NO: 17611 - protein, 469 aa, synthetic construct; identical to SEQ ID NO: 16599
  REGION 1..469: note = neuraminidase__InfluenzaA__ACZ05997

SEQ ID NO: 17612 - protein, 469 aa, synthetic construct; identical to SEQ ID NO: 17605
  REGION 1..469: note = neuraminidase__InfluenzaA__ACZ06008

SEQ ID NO: 17613 - protein, 469 aa, synthetic construct; identical to SEQ ID NO: 17605
  REGION 1..469: note = neuraminidase__InfluenzaA__ACZ06019

SEQ ID NO: 17614 - protein, 470 aa, synthetic construct
  REGION 1..470: note = neuraminidase__InfluenzaA__ACZ16015
MNPNQKIITIGSISIAIGIISLMLQIGNIISIWASHSIQTGSQNNTGICNQRIITYENSTWVNHTYVNINNTNVVAGEDKTSVTLAGNSSLCSISGWAIYTKDNSIRIGSKGDVFVIREPFISCSHLECRTFFLTQGALLNDKHSNGTVKDRSPYRALMSCPLGEAPSPYNSKFESVAWSASACHDGMGWLTIGISGPDNGAVAVLKYNGIITGTIKSWKKQILRTQESECVCMNGSCFTIMTDGPSNKAASYKIFKIEKGKVSKSIELNAPNFYYEECSCYPDTGIVMCVCRDNWHGSNRPWVSFNQNLDYQIGYICSGVFGDNPRPEDGEGSCNPVTVDGANGVKGFSYKYGNGVWIGRTKSNRLRKGFEMIWDPNGWTNTDSDFSVKQDVVAITDWSGYSGSFVQHPELTGLDCIRPCFWVELVRGLPRENTTIWTSGSSISFCGVNSDTANWSWPDGAELPFTIDK

SEQ ID NO: 17615 - protein, 470 aa, synthetic construct
  REGION 1..470: note = neuraminidase__InfluenzaA__ACZ16025
MNPNQKIITIGSISIAIGIISLMLQIGNIISIWASHSIQTGSQNNTGICNQRIITYENSTWVNHTYVNINNTNVVAGEDKTSVTLAGNSSLCSISGWAIYTKDNSIRIGSKGDVFVIREPFISCSHLECRTFFLTQGALLNDKHSNGTIKDRSPYRALMSCPLGEAPSPYNSKFESVAWSASACHDGMGWLTIGISGPDNGAVAVLKYNGIITGTIKSWKKQILRTQESECVCMNGSCFTIMTDGPSNKAASYKIFKIEKGKVTKSIELNAPNFYYEECSCYPDTGIVMCVCRDNWHGSNRPWVSFNQNLDYQIGYICSGVFGDNPRPEDGEGSCNPVTVDGANGVKGFSYKYGNGVWIGRTKSNRLRKGFEMIWDPNGWTNTDSDFSVKQDVVAITDWSGYSGSFVQHPELTGLDCIRPCFWVELVRGLPRENTTIWTSGSSISFCGVNSDTANWSWPDGAELPFTIDK

SEQ ID NO: 17616 - protein, 470 aa, synthetic construct; identical to SEQ ID NO: 17461
  REGION 1..470: note = neuraminidase__InfluenzaA__ACZ16035

SEQ ID NO: 17617 - protein, 469 aa, synthetic construct
  REGION 1..469: note = neuraminidase__InfluenzaA__ACZ16043
MNPNQKIITIGSVCMTIGMANLILQIGNIISIWISHSIQLGNQNQIETCNQSVITYENNTWVNQTYVNISNTNFAAGQSVVSVKLAGNSSLCPVSGWAIYSKDNNIRIGSKGDVFVIREPFISCSPLECRTFFLTQGALLNDKHSNGTIKDRSPYRTLMSCPIGEVPSPYNSRFESVAWSASACHDGINWLTIGISGPDNGAVAVLKYNGIITDTIKSWRNNILRTQESECACVNGSCFTVMTDGPSDGQASYKIFRIEKGKIVKSVEMNAPNYHYEECSCYPDSSEITCVCRDNWHGSNRPWVSFNQNLEYQIGYICSGIFGDNPRPNDKTGSCGPVSSNGANGVKGFSFKYGNGVWIGRTKSISSRNGFEMIWDPNGWTGTDNNFSIKQDIVGINEWSGYSGSFVQHPELTGLDCIRPCFWVELIRGRPKENTIWTSGSSISFCGVNSDTVGWSWPDGAELPFTIDK

SEQ ID NO: 17618 - protein, 469 aa, synthetic construct
  REGION 1..469: note = neuraminidase__InfluenzaA__ACZ16053
MNPNQKIITIGSVCMTIGMANLILQIGNIISIWISHSIQLGNQNQIETCNQSVITYENNTWVNQTYVNISNTNFAAGQSVVSVKLAGNSSLCPVSGWAIYSKDNSVRIGSKGDVFVIREPFISCSPLECRTFFLTQGALLNDKHSNGTIKDRSPYRTLMSCPIGEVPSPYNSRFESVAWSASACHDGINWLTIGISGPDNGAVAVLKYNGIITDTIKSWRNNILRTQESECACVNGSCFTVMTDGPSNGQASYKIFRIEKGKIVKSVEMNAPNYHYEECSCYPDSSEITCVCRDNWHGSNRPWVSFNQNLEYQIGYICSGIFGDNPRPNDKTGSCGPVSSNGANGVKGFSFKYGNGVWIGRTKSISSRNGFEMIWDPNGWTGTDNNFSTKQDIVGINEWSGYSGSFVQHPELTGLDCIRPCFWVELIRGRPKENTIWTSGSSISFCGVNSDTVGWSWPDGAELPFTIDK

SEQ ID NO: 17619 - protein, 469 aa, synthetic construct; identical to SEQ ID NO: 16728
  REGION 1..469: note = neuraminidase__InfluenzaA__ACZ16073

SEQ ID NO: 17620 - protein, 469 aa, synthetic construct
  REGION 1..469: note = neuraminidase__InfluenzaA__ACZ16083
MNPNQKIITIGSVCMTIGMANLILQIGNIISIWISHSIQLGNQNQIETCNQSVITYENNTWVNQTYVNISNTNFAARQSVVSVKLAGNSSLCPVSGWAIYSKDNSVRIGSKGDVFVIREPFISCSPLGCRTFFLTQGALLNDKHSNGTIKDRSPYRTLMSCPIGEVPSPYNSRFESVAWSASACHDGINWLTIGISGPDNGAVAVLKYNGIITDTIKSWRNNILRTQESECACVNGSCFTVMTDGPSNGQASYKIFRIEKGKIVKSVEMNAPNYHYEECSCYPDSSEITCVCRDNWHGSNRPWVSFNQNLEYQIGYICSGIFGDNPRPNDKTGSCGPVSSNGANGVKGFSFKYGNGVWIGRTKSISSRNGFEMIWDPNGWTGTDNNFSIKQDIVGINEWSGYSGSFVQHPELTGLDCIRPCFWIELIRGRPKENTIWTSGSSISFCGVNSDTVGWSWPDGAELPFTIDK

SEQ ID NO: 17621 - protein, 469 aa, synthetic construct; identical to SEQ ID NO: 16728
  REGION 1..469: note = neuraminidase__InfluenzaA__ACZ16093

SEQ ID NO: 17622 - protein, 469 aa, synthetic construct; identical to SEQ ID NO: 16738
  REGION 1..469: note = neuraminidase__InfluenzaA__ACZ16103

SEQ ID NO: 17623 - protein, 469 aa, synthetic construct; identical to SEQ ID NO: 16738
  REGION 1..469: note = neuraminidase__InfluenzaA__ACZ16113

SEQ ID NO: 17624 - protein, 469 aa, synthetic construct; identical to SEQ ID NO: 16738
  REGION 1..469: note = neuraminidase__InfluenzaA__ACZ16123

SEQ ID NO: 17625 - protein, 469 aa, synthetic construct
  REGION 1..469: note = neuraminidase__InfluenzaA__ACZ16133
MNPNQKIITIGSVCMTIGMANLILQIGNIISIWISHSIQLGNQNQIETCNQSVITYENNTWVNQTYVNISNTNFAAGQSVVSVKLAGNSSLCPVSGWAIYSKDNSIRIGSKGDVFVIREPFISCSPLECRTFFLTQGALLNDKHSNGTIKDRSPYRTLMSCPIGEVPSPYNSRFESVAWSASACHDGINWLTIGISGPDNGAVAVLKYNGIITDTIKSWRNNILRTQESECACVNGSCFTIMTDGPSDGQASYKIFRIEKGKIVKSVEMNAPNYHYEECSCYPDSSEITCVCRDNWHGSNRPWVSFNQNLEYQIGYICSGIFGDNPRPNDKTGSCGPVSSNGANGVKGFSFKYGNGVWIGRTKSISSRNGFEMIWDPNGWTGTDNNFSIKQDIVGINEWSGYSGSFVQHPELTGLDCIRPCFWVELIRGRPKENTIWTSGSSISFCGVNSDTVGWSWPDGAELPFTIDK

SEQ ID NO: 17626 - protein, 469 aa, synthetic construct
  REGION 1..469: note = neuraminidase__InfluenzaA__ACZ16143
MNPNQKIITIGSVCMTIGMANLILQIGNIISIWISHSIQLGNQNQIETCNQSVITYENNTWVNQTYVNISNTNFAAGQSVVSVKLAGNSSLCPVSGWAIYSKDNSIRIGSKGDVFVIREPFISCSPLECRTFFLTQGALLNDKHSNGTIKDRSPYRTLMSCPIGEVPSPYNSRFESVAWSASACHDGINWLTIGISGPDNGAVAVLKYNGIITDTIKSWRNNILRTQESECACVNGSCFTVMTDGPSDGQASYKIFRIEKGKIVKSVEMNAPNYHYEECSCYPDSSEITCVCRDNWHGSNRPWVSFNQNLEYQIGYICSGIFGDNPRPNDKTGSCGPLSSNGANGVKGFSFKYGNGVWIGRTKSISSRNGFEMIWDPNGWTGTDNNFSIKQDIVGINEWSGYSGSFVQHPELTGLDCIRPCFWVELIRGRPKENTIWTSGSSISFCGVNSDTVGWSWPDGAELPFTIDK

SEQ ID NO: 17627 - protein, 469 aa, synthetic construct; identical to SEQ ID NO: 16738
  REGION 1..469: note = neuraminidase__InfluenzaA__ACZ16153

SEQ ID NO: 17628 - protein, 469 aa, synthetic construct; identical to SEQ ID NO: 16738
  REGION 1..469: note = neuraminidase__InfluenzaA__ACZ16163

SEQ ID NO: 17629 - protein, 469 aa, synthetic construct; identical to SEQ ID NO: 16728
  REGION 1..469: note = neuraminidase__InfluenzaA__ACZ16173

SEQ ID NO: 17630 - protein, 469 aa, synthetic construct; identical to SEQ ID NO: 16738
  REGION 1..469: note = neuraminidase__InfluenzaA__ACZ16193

SEQ ID NO: 17631 - protein, 469 aa, synthetic construct; identical to SEQ ID NO: 16738
  REGION 1..469: note = neuraminidase__InfluenzaA__ACZ16203

SEQ ID NO: 17632 - protein, 469 aa, synthetic construct; identical to SEQ ID NO: 16738
  REGION 1..469: note = neuraminidase__InfluenzaA__ACZ16213

SEQ ID NO: 17633 - protein, 469 aa, synthetic construct
  REGION 1..469: note = neuraminidase__InfluenzaA__ACZ16223
MNPNQKIITIGSVCMTIGMANLILQIGNIISIWISHSIQLGNQNQIETCNQSVITYENNTWVNQTYVNISNTNFAAGQSVVSVKLAGNSSLCPVSGWAIYSKDNSIRIGSKGDVFVIREPFISCSPLECRTFFLTQGALLNDKHSNETIKDRSPYRTLMSCPIGEVPSPYNSRFESVAWSASACHDGINWLTIGISGPDNGAVAVLKYNGIITDTIKSWRNNILRTQESECACVNGSCFTVMTDGPSDGQASYKIFRIEKGKIVKSVEMNAPNYHYEECSCYPDSSEITCVCRDNWHGSNRPWVSFNQNLEYQIGYICSGIFGDNPRPNDKTGSCGPVSSNGANGVKGFSFKYGNGVWIGRTKSISSRNGFEMIWDPNGWTGTDNNFSIKQDIIGINEWSGYSGSFVQHPELTGLDCIRPCFWVELIRGRPKENTIWTSGSSISFCGVNSDTVGWSWPDGAELPFTIDK

SEQ ID NO: 17634 - protein, 469 aa, synthetic construct; identical to SEQ ID NO: 16738
  REGION 1..469: note = neuraminidase__InfluenzaA__ACZ16233

SEQ ID NO: 17635 - protein, 469 aa, synthetic construct; identical to SEQ ID NO: 17446
  REGION 1..469: note = neuraminidase__InfluenzaA__ACZ16243

SEQ ID NO: 17636 - protein, 469 aa, synthetic construct
  REGION 1..469: note = neuraminidase__InfluenzaA__ACZ16253
MNPNQKIITIGSVCMTIGMANLILQIGNIISIWISHSIQLGNQNQIETCNQSVITYENNTWVNQTYVNISNTNFAAGQSVVSVKLAGNSSLCPVSGWAIYSKDNSIRIGSKGDVFVIREPFISCSPLECRTFFLTQGALLNDKHSNGTIKDRSPYRTLMSCPIGEVPSPYNSRFESVAWSASACHDGINWLTIGISGPDNGAVAVLKYNGIITDTIKSWRNNILRTQESECACVNGSCFTVMTDGPSDGQASYKIFRIEKGKIVKSVEMNAPNYHYEECSCYPDSSEITCVCRDNWHGSNRPWVSFNQNLEYQIGYICSGIFGDNPRPNDKTGSCGPVSSNGANGVKGFSFKYGNGVWIGRTKSISSRNGFEMIWDPNGWTGTDNNFSIKQDIVGINEWSGYSGSFVQHPELTGLDCIRPCFWVELIRGRPKENTIWTSGSSISFCGVNSDTVGWSWPDGAELPFNIDK

SEQ ID NO: 17637 - protein, 469 aa, synthetic construct; identical to SEQ ID NO: 16738
  REGION 1..469: note = neuraminidase__InfluenzaA__ACZ16263

SEQ ID NO: 17638 - protein, 469 aa, synthetic construct; identical to SEQ ID NO: 16728
  REGION 1..469: note = neuraminidase__InfluenzaA__ACZ16283

SEQ ID NO: 17639 - protein, 469 aa, synthetic construct; identical to SEQ ID NO: 16738
  REGION 1..469: note = neuraminidase__InfluenzaA__ACZ16293

SEQ ID NO: 17640 - protein, 469 aa, synthetic construct; identical to SEQ ID NO: 16738
  REGION 1..469: note = neuraminidase__InfluenzaA__ACZ16303

SEQ ID NO: 17641 - protein, 469 aa, synthetic construct; identical to SEQ ID NO: 16738
  REGION 1..469: note = neuraminidase__InfluenzaA__ACZ16313

SEQ ID NO: 17642 - protein, 469 aa, synthetic construct; identical to SEQ ID NO: 16738
  REGION 1..469: note = neuraminidase__InfluenzaA__ACZ16323

SEQ ID NO: 17643 - protein, 469 aa, synthetic construct; identical to SEQ ID NO: 16738
  REGION 1..469: note = neuraminidase__InfluenzaA__ACZ16333

SEQ ID NO: 17644 - protein, 469 aa, synthetic construct; identical to SEQ ID NO: 17446
  REGION 1..469: note = neuraminidase__InfluenzaA__ACZ16343

SEQ ID NO: 17645 - protein, 469 aa, synthetic construct; identical to SEQ ID NO: 16738
  REGION 1..469: note = neuraminidase__InfluenzaA__ACZ16353

SEQ ID NO: 17646 - protein, 469 aa, synthetic construct; identical to SEQ ID NO: 16738
  REGION 1..469: note = neuraminidase__InfluenzaA__ACZ16363

SEQ ID NO: 17647 - protein, 469 aa, synthetic construct; identical to SEQ ID NO: 16728
  REGION 1..469: note = neuraminidase__InfluenzaA__ACZ16373

SEQ ID NO: 17648 - protein, 469 aa, synthetic construct; identical to SEQ ID NO: 16738
  REGION 1..469: note = neuraminidase__InfluenzaA__ACZ16383

SEQ ID NO: 17649 - protein, 469 aa, synthetic construct; identical to SEQ ID NO: 16738
  REGION 1..469: note = neuraminidase__InfluenzaA__ACZ16393

SEQ ID NO: 17650 - protein, 469 aa, synthetic construct; identical to SEQ ID NO: 16738
  REGION 1..469: note = neuraminidase__InfluenzaA__ACZ16403

SEQ ID NO: 17651 - protein, 469 aa, synthetic construct; identical to SEQ ID NO: 16738
  REGION 1..469: note = neuraminidase__InfluenzaA__ACZ16423

SEQ ID NO: 17652 - protein, 469 aa, synthetic construct; identical to SEQ ID NO: 16738
  REGION 1..469: note = neuraminidase__InfluenzaA__ACZ16433

SEQ ID NO: 17653 - protein, 469 aa, synthetic construct; identical to SEQ ID NO: 16738
  REGION 1..469: note = neuraminidase__InfluenzaA__ACZ16443

SEQ ID NO: 17654 - protein, 469 aa, synthetic construct; identical to SEQ ID NO: 16738
  REGION 1..469: note = neuraminidase__InfluenzaA__ACZ16453

SEQ ID NO: 17655 - protein, 469 aa, synthetic construct; identical to SEQ ID NO: 17446
  REGION 1..469: note = neuraminidase__InfluenzaA__ACZ16463

SEQ ID NO: 17656 - protein, 469 aa, synthetic construct; identical to SEQ ID NO: 16738
  REGION 1..469: note = neuraminidase__InfluenzaA__ACZ16483

SEQ ID NO: 17657 - protein, 469 aa, synthetic construct; identical to SEQ ID NO: 16738
  REGION 1..469: note = neuraminidase__InfluenzaA__ACZ16493

SEQ ID NO: 17658 - protein, 469 aa, synthetic construct
  REGION 1..469: note = neuraminidase__InfluenzaA__ACZ16503
MNPNQKIITIGSVCMTIGMANLILQIGNIISIWISHSIQLGNQNQIETCNQSVITYENNTWVNQTYVNISNTNFAAGQSVVSVKLAGNSSLCPVSGWAIYSKDNSIRIGSKGDVFVIREPFISCSPLECRTFFLTQGALLNDKHSNGTIKDRSPYRTLMSCPIGEVPSPYNSRFESVAWSASACHDGINWLTIGISGPDNGAVAVLKYNGIITDTIKSWRNNILRTQESECACVNGSCFTVMTDGPSDGQASYKIFRIEKGKIVKSVEMDAPNYHYEECSCYPDSSEITCVCRDNWHGSNRPWVSFNQNLEYQIGYICSGIFGDNPRPNDKTGSCGPVSSNGANGVKGFSFKYGNGVWIGRTKSISSRNGFEMIWDPNGWTGTDNNFSIKQDIVGINEWSGYSGSFVQHPELTGLDCIRPCFWVELIRGRPKENTIWTSGSSISFCGVNSDTVGWSWPDGAELPFTIDK

SEQ ID NO: 17659 - protein, 469 aa, synthetic construct; identical to SEQ ID NO: 17446
  REGION 1..469: note = neuraminidase__InfluenzaA__ACZ16513

SEQ ID NO: 17660 - protein, 469 aa, synthetic construct; identical to SEQ ID NO: 16738
  REGION 1..469: note = neuraminidase__InfluenzaA__ACZ16523

SEQ ID NO: 17661 - protein, 469 aa, synthetic construct; identical to SEQ ID NO: 16738
  REGION 1..469: note = neuraminidase__InfluenzaA__ACZ16533

SEQ ID NO: 17662 - protein, 469 aa, synthetic construct; identical to SEQ ID NO: 16728
  REGION 1..469: note = neuraminidase__InfluenzaA__ACZ16543

SEQ ID NO: 17663 - protein, 469 aa, synthetic construct; identical to SEQ ID NO: 16738
  REGION 1..469: note = neuraminidase__InfluenzaA__ACZ16553

SEQ ID NO: 17664 - protein, 469 aa, synthetic construct; identical to SEQ ID NO: 16738
  REGION 1..469: note = neuraminidase__InfluenzaA__ACZ16586

SEQ ID NO: 17665 - protein, 469 aa, synthetic construct; identical to SEQ ID NO: 16738
  REGION 1..469: note = neuraminidase__InfluenzaA__ACZ16596

SEQ ID NO: 17666 - protein, 469 aa, synthetic construct; identical to SEQ ID NO: 16738
  REGION 1..469: note = neuraminidase__InfluenzaA__ACZ16606

SEQ ID NO: 17667 - protein, 469 aa, synthetic construct; identical to SEQ ID NO: 16738
  REGION 1..469: note = neuraminidase__InfluenzaA__ACZ16633

SEQ ID NO: 17668 - protein, 469 aa, synthetic construct
  REGION 1..469: note = neuraminidase__InfluenzaA__ACZ16643
MNPNQKIITIGSVCMTIGMANLILQIGNIISIWISHSIQLGNQNQIETCNQSVITYENNTWVNQTYVNISNTNFAAGQSVVSVKLAGNSSLCPVSGWAIYSKDNSIRIGSKGDVFVIREPFISCSPLECRTFFLTQGALLNDKHSNGTIKDRSPYRTLMSCPIGEVPSPYNSRFESVAWSASACHDGINWLTIGISGPDNGAVAVLRYNGIITDTIKSWRNNILRTQESECACVNGSCFTVMTDGPSDGQASYKIFRIEKGKIVKSVEMNAPNYHYEECSCYPDSSEITCVCRDNWHGSNRPWVSFNQNLEYQIGYICSGIFGDNPRPNDKTGSCGPVSSNGANGVKGFSFKYGNGVWIGRTKSISSRNGFEMIWDPNGWTGTDNNFSIKQDIVGINEWSGYSGSFVQHPELTGLDCIRPCFWVELIRGRPKENTIWTSGSSISFCGVNSDTVGWSWPDGAELPFTIDK

SEQ ID NO: 17669 - protein, 469 aa, synthetic construct; identical to SEQ ID NO: 16738
  REGION 1..469: note = neuraminidase__InfluenzaA__ACZ16653

SEQ ID NO: 17670 - protein, 469 aa, synthetic construct; identical to SEQ ID NO: 16738
  REGION 1..469: note = neuraminidase__InfluenzaA__ACZ16663

SEQ ID NO: 17671 - protein, 469 aa, synthetic construct; identical to SEQ ID NO: 16738
  REGION 1..469: note = neuraminidase__InfluenzaA__ACZ16673

SEQ ID NO: 17672 - protein, 469 aa, synthetic construct; identical to SEQ ID NO: 16738
  REGION 1..469: note = neuraminidase__InfluenzaA__ACZ16683

SEQ ID NO: 17673 - protein, 469 aa, synthetic construct; identical to SEQ ID NO: 16738
  REGION 1..469: note = neuraminidase__InfluenzaA__ACZ16693

SEQ ID NO: 17674 - protein, 469 aa, synthetic construct; identical to SEQ ID NO: 16738
  REGION 1..469: note = neuraminidase__InfluenzaA__ACZ16703

SEQ ID NO: 17675 - protein, 469 aa, synthetic construct; identical to SEQ ID NO: 16738
  REGION 1..469: note = neuraminidase__InfluenzaA__ACZ16713

SEQ ID NO: 17676 - protein, 469 aa, synthetic construct; identical to SEQ ID NO: 16738
  REGION 1..469: note = neuraminidase__InfluenzaA__ACZ16723

SEQ ID NO: 17677 - protein, 469 aa, synthetic construct; identical to SEQ ID NO: 16738
  REGION 1..469: note = neuraminidase__InfluenzaA__ACZ16733

SEQ ID NO: 17678 - protein, 469 aa, synthetic construct; identical to SEQ ID NO: 16738
  REGION 1..469: note = neuraminidase__InfluenzaA__ACZ16743

SEQ ID NO: 17679 - protein, 469 aa, synthetic construct; identical to SEQ ID NO: 16738
  REGION 1..469: note = neuraminidase__InfluenzaA__ACZ16753

SEQ ID NO: 17680 - protein, 469 aa, synthetic construct; identical to SEQ ID NO: 16738
  REGION 1..469: note = neuraminidase__InfluenzaA__ACZ16763

SEQ ID NO: 17681 - protein, 469 aa, synthetic construct; identical to SEQ ID NO: 16728
  REGION 1..469: note = neuraminidase__InfluenzaA__ACZ16773

SEQ ID NO: 17682 - protein, 469 aa, synthetic construct; identical to SEQ ID NO: 16738
  REGION 1..469: note = neuraminidase__InfluenzaA__ACZ16783

SEQ ID NO: 17683 - protein, 469 aa, synthetic construct; identical to SEQ ID NO: 16738
  REGION 1..469: note = neuraminidase__InfluenzaA__ACZ16793

SEQ ID NO: 17684 - protein, 469 aa, synthetic construct; identical to SEQ ID NO: 16738
  REGION 1..469: note = neuraminidase__InfluenzaA__ACZ16803

SEQ ID NO: 17685 - protein, 469 aa, synthetic construct; identical to SEQ ID NO: 16738
  REGION 1..469: note = neuraminidase__InfluenzaA__ACZ16813

SEQ ID NO: 17686 - protein, 469 aa, synthetic construct; identical to SEQ ID NO: 16728
  REGION 1..469: note = neuraminidase__InfluenzaA__ACZ16823

SEQ ID NO: 17687 - protein, 469 aa, synthetic construct; identical to SEQ ID NO: 16738
  REGION 1..469: note = neuraminidase__InfluenzaA__ACZ16833

SEQ ID NO: 17688 - protein, 469 aa, synthetic construct; identical to SEQ ID NO: 16738
  REGION 1..469: note = neuraminidase__InfluenzaA__ACZ16843

SEQ ID NO: 17689 - protein, 469 aa, synthetic construct; identical to SEQ ID NO: 17658
  REGION 1..469: note = neuraminidase__InfluenzaA__ACZ16853

SEQ ID NO: 17690 - protein, 469 aa, synthetic construct; identical to SEQ ID NO: 16738
  REGION 1..469: note = neuraminidase__InfluenzaA__ACZ16863

SEQ ID NO: 17691 - protein, 469 aa, synthetic construct; identical to SEQ ID NO: 16738
  REGION 1..469: note = neuraminidase__InfluenzaA__ACZ16873

SEQ ID NO: 17692 - protein, 469 aa, synthetic construct; identical to SEQ ID NO: 16738
  REGION 1..469: note = neuraminidase__InfluenzaA__ACZ16883

SEQ ID NO: 17693 - protein, 469 aa, synthetic construct; identical to SEQ ID NO: 16738
  REGION 1..469: note = neuraminidase__InfluenzaA__ACZ16893

SEQ ID NO: 17694 - protein, 469 aa, synthetic construct; identical to SEQ ID NO: 16738
  REGION 1..469: note = neuraminidase__InfluenzaA__ACZ16903

SEQ ID NO: 17695 - protein, 469 aa, synthetic construct; identical to SEQ ID NO: 16738
  REGION 1..469: note = neuraminidase__InfluenzaA__ACZ16913

SEQ ID NO: 17696 - protein, 469 aa, synthetic construct; identical to SEQ ID NO: 16738
  REGION 1..469: note = neuraminidase__InfluenzaA__ACZ16923

SEQ ID NO: 17697 - protein, 469 aa, synthetic construct; identical to SEQ ID NO: 16738
  REGION 1..469: note = neuraminidase__InfluenzaA__ACZ16933

SEQ ID NO: 17698 - protein, 469 aa, synthetic construct; identical to SEQ ID NO: 16738
  REGION 1..469: note = neuraminidase__InfluenzaA__ACZ16943

SEQ ID NO: 17699 - protein, 469 aa, synthetic construct; identical to SEQ ID NO: 16728
  REGION 1..469: note = neuraminidase__InfluenzaA__ACZ16953

SEQ ID NO: 17700 - protein, 469 aa, synthetic construct; identical to SEQ ID NO: 16738
  REGION 1..469: note = neuraminidase__InfluenzaA__ACZ16963

SEQ ID NO: 17701 - protein, 469 aa, synthetic construct; identical to SEQ ID NO: 16738
  REGION 1..469: note = neuraminidase__InfluenzaA__ACZ16973

SEQ ID NO: 17702 - protein, 469 aa, synthetic construct; identical to SEQ ID NO: 16738
  REGION 1..469: note = neuraminidase__InfluenzaA__ACZ16983

SEQ ID NO: 17703 - protein, 469 aa, synthetic construct; identical to SEQ ID NO: 16738
  REGION 1..469: note = neuraminidase__InfluenzaA__ACZ16993

SEQ ID NO: 17704 - protein, 469 aa, synthetic construct; identical to SEQ ID NO: 16738
  REGION 1..469: note = neuraminidase__InfluenzaA__ACZ17003

SEQ ID NO: 17705 - protein, 469 aa, synthetic construct; identical to SEQ ID NO: 16738
  REGION 1..469: note = neuraminidase__InfluenzaA__ACZ17023

SEQ ID NO: 17706 - protein, 469 aa, synthetic construct; identical to SEQ ID NO: 16738
  REGION 1..469: note = neuraminidase__InfluenzaA__ACZ17043

SEQ ID NO: 17707 - protein, 469 aa, synthetic construct; identical to SEQ ID NO: 16738
  REGION 1..469: note = neuraminidase__InfluenzaA__ACZ17053

SEQ ID NO: 17708 - protein, 469 aa, synthetic construct
  REGION 1..469: note = neuraminidase__InfluenzaA__ACZ17063
MNPNQKIITIGSVCMTIGMANLILQIGNIISIWISHSIQLGDQNQIETCNQSVITYENNTWVNQTYVNISNTNFAAGQSVVSVKLAGNSSLCPVSGWAIYSKDNSIRIGSKGDVFVIREPFISCSPLECRTFFLTQGALLNDKHSNGTIKDRSPYRTLMSCPIGEVPSPYNSRFESVAWSASACHDGINWLTIGISGPDNGAVAVLKYNGIITDTIKSWRNNILRTQESECACVNGSCFTVMTDGPSDGQASYKIFRIEKGKIVKSVEMNAPNYHYEECSCYPDSSEITCVCRDNWHGSNRPWVSFNQNLEYQIGYICSGIFGDNPRPNDKTGSCGPVSSNGANGVKGFSFKYGNGVWIGRTKSISSRNGFEMIWDPNGWTGTDNNFSIKQDIVGINEWSGYSGSFVQHPELTGLDCIRPCFWVELIRGRPKENTIWTSGSSISFCGVNSDTVGWSWPDGAELPFTIDK

SEQ ID NO: 17709 - protein, 469 aa, synthetic construct; identical to SEQ ID NO: 16738
  REGION 1..469: note = neuraminidase__InfluenzaA__ACZ17073

SEQ ID NO: 17710 - protein, 469 aa, synthetic construct; identical to SEQ ID NO: 17446
  REGION 1..469: note = neuraminidase__InfluenzaA__ACZ17083

SEQ ID NO: 17711 - protein, 469 aa, synthetic construct
  REGION 1..469: note = neuraminidase__InfluenzaA__ACZ17093
MNPNQKIITIGSVCMTIGMANLILQIGNIISIWISHSIQLGNQNQIETCNQSVITYENNTWVNQTYVNISNTNFAAGQSVVSVKLAGNSSLCPVSGWAIYSKDNSIRIGSKGDVFVIREPFISCSPFECRTFFLTQGALLNDKHSNGTIKDRSPYRTLMSCPIGEVPSPYNSRFESVAWSASACHDGINWLTIGISGPDNGAVAVLKYNGIITDTIKSWRNNILRTQESECACVNGSCFTVMTDGPSDGQASYKIFRIEKGKIVKSVEMNAPNYHYEECSCYPDSSEITCVCRDNWHGSNRPWVSFNQNLEYQIGYICSGIFGDNPRPNDKTGSCGPVSSNGANGVKGFSFKYGNGVWIGRTKSISSRNGFEMIWDPNGWTGTDNNFSIKQDIVGINEWSGYSGSFVQHPELTGLDCIRPCFWVELIRGRPKENTIWTSGSSISFCGVNSDTVGWSWPDGAELPFTIDK

SEQ ID NO: 17712 - protein, 469 aa, synthetic construct
  REGION 1..469: note = neuraminidase__InfluenzaA__ACZ17113
MNPNQKIITIGSVCMTIGMANLILQIGNIISIWISHSIQLGNQNQIETCNQSVITYENNTWVNQTYVNISNTNFAAGQSVVSVKLAGNSSLCPVNGWAIYSKDNSIRIGSKGDVFVIREPFISCSPLECRTFFLTQGALLNDKHSNGTIKDRSPYRTLMSCPIGEVPSPYNSRFESVAWSASACHDGINWLTIGISGPDNGAVAVLKYNGIITDTIKSWRNNILRTQESECACVNGSCFTVMTDGPSDGQASYKIFRIEKGKIVKSVEMNAPNYHYEECSCYPDSSEITCVCRDNWHGSNRPWVSFNQNLEYQIGYICSGIFGDNPRPNDKTGSCGPVSSNGANGVKGFSFKYGNGVWIGRTKSISSRNGFEMIWDPNGWTGTDNNFSIKQDIVGINEWSGYSGSFVQHPELTGLDCIRPCFWVELIRGRPKENTIWTSGSSISFCGVNSDTVGWSWPDGAELPFTIDK

SEQ ID NO: 17713 - protein, 469 aa, synthetic construct; identical to SEQ ID NO: 16738
  REGION 1..469: note = neuraminidase__InfluenzaA__ACZ17123

SEQ ID NO: 17714 - protein, 469 aa, synthetic construct; identical to SEQ ID NO: 16738
  REGION 1..469: note = neuraminidase__InfluenzaA__ACZ17133

SEQ ID NO: 17715 - protein, 469 aa, synthetic construct
  REGION 1..469: note = neuraminidase__InfluenzaA__ACZ17163
MNPNQKIITIGSVCMTIGMANLILQIGNIISIWISHSIQLGNQNQIETCNQSVITYENNTWVNQTYVNISNTNFAAGQSVVSVKLAGNSSLCPVSGWAIYSKDNSIRIGSKGDVFVIREPFISCSPLECRTFFLTQGALLNDKHSNGTIKDRSPYRTLMSCPIGEVPSPYNSRFESVAWSASACHDGINWLTIGISGPDNGAVAVLKYNGIITDTIKSWRNNILRTQESECACVNGSCFTVMTDGPSDGQASYKIFRIEKGKIVKSVEMNAPNYHYEECSCYPDSSEITCVCRDNWHGSNRPWVSFNRNLEYQIGYICSGIFGDNPRPNDKTGSCGPVSSNGANGVKGFSFKYGNGVWIGRTKSISSRNGFEMIWDPNGWTGTDNNFSIKQDIVGINEWSGYSGSFVQHPELTGLDCIRPCFWVELIRGRPKENTIWTSGSSISFCGVNSDTVGWSWPDGAELPFTIDK

SEQ ID NO: 17716 - protein, 469 aa, synthetic construct; identical to SEQ ID NO: 17715
  REGION 1..469: note = neuraminidase__InfluenzaA__ACZ17173

SEQ ID NO: 17717 - protein, 469 aa, synthetic construct; identical to SEQ ID NO: 17715
  REGION 1..469: note = neuraminidase__InfluenzaA__ACZ17183

SEQ ID NO: 17718 - protein, 469 aa, synthetic construct; identical to SEQ ID NO: 17715
  REGION 1..469: note = neuraminidase__InfluenzaA__ACZ17193

SEQ ID NO: 17719 - protein, 469 aa, synthetic construct; identical to SEQ ID NO: 17715
  REGION 1..469: note = neuraminidase__InfluenzaA__ACZ17203

SEQ ID NO: 17720 - protein, 469 aa, synthetic construct; identical to SEQ ID NO: 16738
  REGION 1..469: note = neuraminidase__InfluenzaA__ACZ17213

SEQ ID NO: 17721 - protein, 469 aa, synthetic construct; identical to SEQ ID NO: 16738
  REGION 1..469: note = neuraminidase__InfluenzaA__ACZ17223

SEQ ID NO: 17722 - protein, 469 aa, synthetic construct; identical to SEQ ID NO: 16738
  REGION 1..469: note = neuraminidase__InfluenzaA__ACZ17233

SEQ ID NO: 17723 - protein, 469 aa, synthetic construct; identical to SEQ ID NO: 16738
  REGION 1..469: note = neuraminidase__InfluenzaA__ACZ17243

SEQ ID NO: 17724 - protein, 469 aa, synthetic construct; identical to SEQ ID NO: 16738
  REGION 1..469: note = neuraminidase__InfluenzaA__ACZ17263

SEQ ID NO: 17725 - protein, 469 aa, synthetic construct
  REGION 1..469: note = neuraminidase__InfluenzaA__ACZ17273
MNPNQKIITIGSVCMTIGMANLILQIGNIISIWISHSIQLGNQNQIETCNQSVITYENNTWVNQTYVNISNTNFAAGQSVVSVKLAGNSSLCPVSGWAIYSKDNSIRIGSKGDVFVIREPFISCSPLECRTFFLTQGALLNDKHSNGTIKDRSPYRTLMSCPIGEVPSPYNSRFESVAWSASACHDGFNWLTIGISGPDNGAVAVLKYNGIITDTIKSWRNNILRTQESECACVNGSCFTVMTDGPSDGQASYKIFRIEKGKIVKSVEMNAPNYHYEECSCYPDSSEITCVCRDNWHGSNRPWVSFNQNLEYQIGYICSGIFGDNPRPNDKTGSCGPVLSNGANGVKGFSFKYGNGVWIGRTKSISSRNGFEMIWDPNGWTGTDNNFSIKQDIVGINEWSGYSGSFVQHPELTGLDCIRPCFWVELIRGRPKENTIWTSGSSISFCGVNSDTVGWSWPDGAELPFTIDK

SEQ ID NO: 17726 - protein, 469 aa, synthetic construct; identical to SEQ ID NO: 16738
  REGION 1..469: note = neuraminidase__InfluenzaA__ACZ17283

SEQ ID NO: 17727 - protein, 469 aa, synthetic construct; identical to SEQ ID NO: 16768
  REGION 1..469: note = neuraminidase__InfluenzaA__ACZ17293

SEQ ID NO: 17728 - protein, 469 aa, synthetic construct; identical to SEQ ID NO: 16768
  REGION 1..469: note = neuraminidase__InfluenzaA__ACZ17303

SEQ ID NO: 17729 - protein, 469 aa, synthetic construct; identical to SEQ ID NO: 16768
  REGION 1..469: note = neuraminidase__InfluenzaA__ACZ17313

SEQ ID NO: 17730 - protein, 469 aa, synthetic construct; identical to SEQ ID NO: 16738
  REGION 1..469: note = neuraminidase__InfluenzaA__ACZ17401

SEQ ID NO: 17731 - protein, 469 aa, synthetic construct; identical to SEQ ID NO: 16738
  REGION 1..469: note = neuraminidase__InfluenzaA__ACZ17411

SEQ ID NO: 17732 - protein, 469 aa, synthetic construct; identical to SEQ ID NO: 16738
  REGION 1..469: note = neuraminidase__InfluenzaA__ACZ17421

SEQ ID NO: 17733 - protein, 469 aa, synthetic construct
  REGION 1..469: note = neuraminidase__InfluenzaA__ACZ17431
MNPNQKIITIGSVCMTIGMANLILQIGNIISIWISHSIQLGNQNQIETCNQSVITYENNTWVNQTYVNISNTNFAAGQSVVSVKLAGNSSLCPVSGWAIYSKDNSVRIGSKGDVFVIREPFISCSPLECRTFFLTQGALLNDKHSNGTIKDRSPYRTLMSCPIGEVPSPYNSRFESVAWSASACHDGINWLTIGISGPDNGAVAVLKYNGIITDTIKSWRNNILRTQESECACVNGSCFTVMTDGPSNGQASYKIFRIEKGKIVKSVEMNAPNYHYEECSCYPDSSEITCVCRDNWHGSNRPWVSFNQNLEYQIGYICSGIFGDNPRPNDKTGSCGPVSSNGANGVKGFSFKYGNGVWIGRTKSINSRNGFEMIWDPNGWTGTDNNFSIKQDIVGINEWSGYSGSFVQHPELTGLDCIRPCFWVELIRGRPKENTIWTSGSSISFCGVNSDTVGWSWPDGAELPFTIDK

SEQ ID NO: 17734 - protein, 469 aa, synthetic construct; identical to SEQ ID NO: 17733
  REGION 1..469: note = neuraminidase__InfluenzaA__ACZ17441

SEQ ID NO: 17735 - protein, 469 aa, synthetic construct; identical to SEQ ID NO: 16728
  REGION 1..469: note = neuraminidase__InfluenzaA__ACZ17451

SEQ ID NO: 17736 - protein, 469 aa, synthetic construct; identical to SEQ ID NO: 16738
  REGION 1..469: note = neuraminidase__InfluenzaA__ACZ17461

SEQ ID NO: 17737 - protein, 469 aa, synthetic construct; identical to SEQ ID NO: 16738
  REGION 1..469: note = neuraminidase__InfluenzaA__ACZ17471

SEQ ID NO: 17738 - protein, 469 aa, synthetic construct; identical to SEQ ID NO: 16768
  REGION 1..469: note = neuraminidase__InfluenzaA__ACZ17481

SEQ ID NO: 17739 - protein, 469 aa, synthetic construct; identical to SEQ ID NO: 16738
  REGION 1..469: note = neuraminidase__InfluenzaA__ACZ17491

SEQ ID NO: 17740 - protein, 469 aa, synthetic construct; identical to SEQ ID NO: 17204
  REGION 1..469: note = neuraminidase__InfluenzaA__ACZ27803

SEQ ID NO: 17741 - protein, 469 aa, synthetic construct; identical to SEQ ID NO: 16728
  REGION 1..469: note = neuraminidase__InfluenzaA__ACZ27813

SEQ ID NO: 17742 - protein, 469 aa, synthetic construct; identical to SEQ ID NO: 16738
  REGION 1..469: note = neuraminidase__InfluenzaA__ACZ27823

SEQ ID NO: 17743 - protein, 469 aa, synthetic construct; identical to SEQ ID NO: 16728
  REGION 1..469: note = neuraminidase__InfluenzaA__ACZ27833

SEQ ID NO: 17744 - protein, 469 aa, synthetic construct; identical to SEQ ID NO: 16738
  REGION 1..469: note = neuraminidase__InfluenzaA__ACZ45022

SEQ ID NO: 17745 - protein, 469 aa, synthetic construct
  REGION 1..469: note = neuraminidase__InfluenzaA__ACZ53958
MNPNQKIITIGSVSLTIATICFLMQIAILVTTVTLHFKQYECNSPPNNQVMLCEPTIIERNITEIVYLTNTTIEKEICPKLAEYRNWSKPQCNITGFAPFSKDNSIRLSAGGDIWVTREPYVSCDPDKCYQFALGQGTTLNNGHSNDTVHDRTPYRTLLMNELGVPFHLGTKQVCIAWSSSSCHDGKAWLHVCVTGDDENATASFIYNGRLVDSIGSWSKKILRTQESECVCINGTCTVVMTDGSASGKADTKILFIEEGKIVHTSSLSGSAQHVEECSCYPRYPGVRCVCRDNWKGSNRPIVDINVKDYSIVSSYVCSGLVGDTPRKNDSSSSSHCLDPNNEEGGHGVKGWAFDDGNDVWMGRTISEKLRSGYETFKVIEGWSKPNSKLQINRQVIVDRGNRSGYSGIFSVEGKSCINRCFYVELIRGRKQETEVLWTSNSIVVFCGTSGTYGTGSCPDGSVLNLMPI

SEQ ID NO: 17746 - protein, 469 aa, synthetic construct
  REGION 1..469: note = neuraminidase__InfluenzaA__ACZ53969
MNPNQKIITIGSVSLTIATICFLMQIAILVTTVTLHFKQYECNSPPNNQVMLCEPTIIERNITEIVYLTNTTIEKEICPKLAEYRNWSKPQCNITGFAPFSKDNSIRLSAGGDIWVTREPYVSCDPDKCYQFALGQGTTLNNGHSNDTVHDRTPYRTLLMNELGVPFHLGTKQVCIAWSSSSCHDGKAWLHVCVTGDDENATASFIYNGRLVDSIGSWSKKILRTQESECVCINGTCTVVMTDGSASGKADTKILFIEEGEIVHTSPLSGSAQHVEECSCYPRYPGVRCVCRDNWKGSNRPIVDINVKDYSIVSSYVCSGLVGDTPRKNDSSSSSHCLDPNNEEGGHGVKGWAFDDGNDVWMGRTISEKSRSGYETFKVIEGWSKPNSKLQINRQVIVDRGNRSGYSGIFSVEGKSCINRCFYVELIRGRKQETEVLWTSNSIVVFCGTSGTYGTGSWPDGSVLNLMPI

SEQ ID NO: 17747 - protein, 469 aa, synthetic construct
  REGION 1..469: note = neuraminidase__InfluenzaA__ACZ53980
MNPNQNKLPIGSVSLTIATICFLMQIAILKTTVTLHFKQYECNSPPNNQVMLCEPTIIERNLTKIVYLTNTTIKKEICPKQPKYRNWSKPKCKITELAPFSKDNSIRLSAGGDIWVTREPYVSCDPDKCYQFALGQGTTLNNGHSNDTVHDRTPYRTLLMNELGVPFHLGTKQVCIAWSSSSCHDGKAWLHVCITGDDKNATASFIYNGRLVDSIVSWSKEILRTQESECVCINGTCTVVMTDGSASGKADTKILFIEEGKIVHISPLSGSAQHVEECSCYPRYPGVRCICRDNWKGSNRPVVDINMEDYSIDSSYVCSGLVGDTPRKNDSSSSSHCLDPNNEEGGHGVKGWAFDDGNDVWMGRTISEKLRSGYETFKVIGGWSKPNSKLQINRQVIVDRGNRSGYSGIFSVEGKSCINRCFYVELIRGRKQETEVLWTSNSIVVFCGTSGTYGTGSWPDGSVLNLMPI

SEQ ID NO: 17748 - protein, 469 aa, synthetic construct; identical to SEQ ID NO: 16738
  REGION 1..469: note = neuraminidase__InfluenzaA__ACZ56082

SEQ ID NO: 17749 - protein, 469 aa, synthetic construct; identical to SEQ ID NO: 17321
  REGION 1..469: note = neuraminidase__InfluenzaA__ACZ57183

SEQ ID NO: 17750 - protein, 470 aa, synthetic construct
  REGION 1..470: note = neuraminidase__InfluenzaA__ACZ81542
MNPNQKVITIGSISIAIGIISLMLQIGNIISIWASHSIQTGSQNNTGICNQRIITYENSTWVNHTYVNINNTNVVAGEDKTSVTLAGNSSLCSISGWAIYTKDNSIRIGSKGDVFVIREPFISCSHLECRTFFLTQGALLNDKHSNGTVKDRSPYRALMSCPLGEAPSPYNSKFESVAWSASACHDGMGWLTIGISGPDNGAVAVLKYNGIITGTIKSWKKQILRTQESECVCMNGSCFTIMTDGPSNKAASYKIFKIEKGKVTKSIELNAPNFYYEECSCYPDTGIVMCVCRDNWHGSNRPWVSFNQNLDYQIGYICSGVFGDNPRPEDGEGSCNPVTVDGANGVKGFSYKYGNGVWIGRTKSNRLRKGFEMIWDPNGWTNTDSDFSVKQDVVAITDWSGYSGSFVQHPELTGLDCIRPCFWVELVRGLPRENTTIWTSGSSISFCGVNSDTANWSWPDGAELPFTIDK

SEQ ID NO: 17751 - protein, 470 aa, synthetic construct
  REGION 1..470: note = neuraminidase__InfluenzaA__ACZ81543
MNPNQKIITIGSISIAIGIISLMLQIGNIISIWASHSIQTGSQNNTGICNQRIITYENNTWVNHTYVNINNTNVVAGEDKTSVTLAGNSSLCSISGWAIYTKDNSIRIGSKGDVFVIREPFISCSHLECRTFFLTQGALLNDKHSNGTVKDRSPYRALMSCPLGEAPSPYNSKFESVAWSASACHDGMGWLTIGISGPDNGAVAVLKYNGIITGTIKSWKEQILRTQESECVCMNGSCFTIMTDGPSNKAASYKIFKIEKGKVTKSIELNAPNFYYEECSCYPDTGIVMCVCRDNWHGSNRPWVSFNQNLDYQTGYICSGVFGDNPRPEDGEGSCNPVTVDGANGVKGFSYKYGNGVWIGRTKSNRLRKGFEMIWDPNGWTNTDSDFSVKQDVVAITDWSGYSGSFVQHPELTGLDCIRPCFWVELVRGLPRENTTIWTSGSSISFCGVNSDTANWSWPDGAELPFTIDK

SEQ ID NO: 17752 - protein, 469 aa, synthetic construct
  REGION 1..469: note = neuraminidase__InfluenzaA__ACZ81546
MNPNQKIITIGSVSLTISTICFFMQIAILITTVTLHFKQYEFNSPPNNQVMLCEPTIIERNITEIVYLTNTTIEKEICPKLAEYRNWSKPQCDITGSAPFSKDNSIRLSAGGDIWVTREPYVSCDPDKCYQFALGQGTTLNNVHSNNTVHDRTPYRTLLMNELGVPFHLGTKQVCIAWSSSSCHDGKAWLHVCITGDDKNATASFIYNGRLVDSVVSWSKEILRTQESECVCINGTCTVVMTDGSASGKADTKILFIEEGKIVHTSTLSGSAQHVEECSCYPRYPGVRCVCRDNWKGSNRPIVDINIKDHSIVSSYVCSGLVGDTPRKNDSSSSSHCLDPNNEEGGHGVKGWAFDDGNDVWMGRTISEKSRLGYETFKVIEGWSNPKSKLQINRQVIVDRGNRSGYSGIFSVEGKSCINRCFYVELIRGRKEETEVLWTSNSIVVFCGTSGTYGTGSWPDGADINLMPI

SEQ ID NO: 17753 - protein, 469 aa, synthetic construct
  REGION 1..469: note = neuraminidase__InfluenzaA__ACZ81547
MNPNQKIITIGSVSLTISTICFFMQIAILITTVTLHFKQYEFNSPPNNQVMLCEPTIIERNITEIVYLTNTTIEKEICPKLAEYRNWSKPQCDITGFAPFSKDNSIRLSAGGDIWVTREPYVSCDPDKCYQFALGQGTTLNNVHSNNTVRDRTPYRTLLMNELGVPFHLGTKQVCIAWSSSSCHDGKAWLHVCITGDDKNATASFIYNGRLVDSVVSWSKEILRTQESECVCINGTCTVVMTDGSASGKADTKILFIEEGKIVHTSTLSGSAQHVEECSCYPRYPGVRCVCRDNWKGSNRPIVDINTKDHSIVSSYVCSGLVGDTPRKNDSSSSSHCLDPNNEEGGHGVKGWAFDDGNDVWMGRTISEKSRLGYETFKVIEGWSNPKSKLQINRQVIVDKGNRSGYSGIFSVEGKSCINRCFYVELIRGRKEETEVLWTSNSIVVFCGTSGTYGTGSWPDGADINLMPI

SEQ ID NO: 17754 - protein, 469 aa, synthetic construct; identical to SEQ ID NO: 16738
  REGION 1..469: note = neuraminidase__InfluenzaA__ACZ81634

SEQ ID NO: 17755 - protein, 469 aa, synthetic construct
  REGION 1..469: note = neuraminidase__InfluenzaA__ACZ81644
MNPNQKIITIGSVCMTIGMANLILQIGNIISIWISHSIQLGNQNQIETCNQSVITYENNTWVNQTYVNISNTNFAAGQSVVSVKLAGNSSLCPVSGWAIYSKDNSIRIGSKGDVFVIREPFISCSPLECRTFFLTQGALLNDKHSNGTIKDRSPYRTLMSCPIGEVPSPYNSRFESVAWSASACHDGINWLTIGISGPDNGAVAVLKYNGIITDTIKSWRNNILRTQESECACVNGSCFTVMTDGPSDGQASYKIFRIEKGKIVKSVEMNAPNYHYEECSCYPDSSEITCVCRDNWHGSNRPWVSFNQNLEYQIGYICSGIFGDNPRPNDKTGSCGPVSSNGANGVKGFSFKYGNGVWIGRTKSISSRNGFEMIWDPNGWTGTDNNFSIKQDIIGINEWSGYSGSFVQHPELTGLDCIRPCFWVELIRGRPKENTIWTSGSSISFCGVNSDTVGWSWPDGAELPFTIDK

SEQ ID NO: 17756 - protein, 469 aa, synthetic construct
  REGION 1..469: note = neuraminidase__InfluenzaA__ACZ81653
MNPNQKIITIGSVCMTIGMANLILQIGNIISIWISHSIQLGNQNQIETCNQSVITYENNTWVNQTYVNISNTNFAAGQSVVSVKLAGNSSLCPVSGWAIYSKDNSIRIGSKGDVFVIREPFISCSPLECRTFFLTQGALLNDKHSNGTIKDRSPYRTLMSCPIGEVPSPYNSRFESVAWSASACHDGINWLTIGISGPDNGAVAVLKYNGIITDTIKSWRNNILRTQESECACVNGSCFTVMTDGPSDGQASYKIFRIEKGKIVKSVEMNAPNYHYEECSCYPDSSEITCVCRDNWHGSNRPWVSFNQNLEYQIGYICSGIFGDNPRPNDKTGSCGPVSSNGANGVKGFSFKYGNGVWIGRTKSISSRNGFEMIWDPNGWTGTDNNFSIKQDIVGINEWSGYSGSFVQHPELTGLNCIRPCFWVELIRGRPKENTIWTSGSSISFCGVNSDTVGWSWPDGAELPFTIDK

SEQ ID NO: 17757 - protein, 469 aa, synthetic construct; identical to SEQ ID NO: 16738
  REGION 1..469: note = neuraminidase__InfluenzaA__ACZ95840

SEQ ID NO: 17758 - protein, 469 aa, synthetic construct; identical to SEQ ID NO: 16738
  REGION 1..469: note = neuraminidase__InfluenzaA__ACZ95850

SEQ ID NO: 17759 - protein, 469 aa, synthetic construct; identical to SEQ ID NO: 16738
  REGION 1..469: note = neuraminidase__InfluenzaA__ACZ95860

SEQ ID NO: 17760 - protein, 469 aa, synthetic construct; identical to SEQ ID NO: 16738
  REGION 1..469: note = neuraminidase__InfluenzaA__ACZ95870

SEQ ID NO: 17761 - protein, 469 aa, synthetic construct; identical to SEQ ID NO: 16738
  REGION 1..469: note = neuraminidase__InfluenzaA__ACZ95880

SEQ ID NO: 17762 - protein, 469 aa, synthetic construct; identical to SEQ ID NO: 16738
  REGION 1..469: note = neuraminidase__InfluenzaA__ACZ95890

SEQ ID NO: 17763 - protein, 469 aa, synthetic construct; identical to SEQ ID NO: 16738
  REGION 1..469: note = neuraminidase__InfluenzaA__ACZ95900

SEQ ID NO: 17764 - protein, 469 aa, synthetic construct; identical to SEQ ID NO: 16738
  REGION 1..469: note = neuraminidase__InfluenzaA__ACZ95910

SEQ ID NO: 17765 - protein, 469 aa, synthetic construct; identical to SEQ ID NO: 16738
  REGION 1..469: note = neuraminidase__InfluenzaA__ACZ95920

SEQ ID NO: 17766 - protein, 469 aa, synthetic construct; identical to SEQ ID NO: 17625
  REGION 1..469: note = neuraminidase__InfluenzaA__ACZ95930

SEQ ID NO: 17767 - protein, 469 aa, synthetic construct; identical to SEQ ID NO: 16738
  REGION 1..469: note = neuraminidase__InfluenzaA__ACZ95940

SEQ ID NO: 17768 - protein, 469 aa, synthetic construct; identical to SEQ ID NO: 17755
  REGION 1..469: note = neuraminidase__InfluenzaA__ACZ95950

SEQ ID NO: 17769 - protein, 469 aa, synthetic construct; identical to SEQ ID NO: 16738
  REGION 1..469: note = neuraminidase__InfluenzaA__ACZ95960

SEQ ID NO: 17770 - protein, 469 aa, synthetic construct; identical to SEQ ID NO: 17755
  REGION 1..469: note = neuraminidase__InfluenzaA__ACZ95970

SEQ ID NO: 17771 - protein, 469 aa, synthetic construct; identical to SEQ ID NO: 16738
  REGION 1..469: note = neuraminidase__InfluenzaA__ACZ95980

SEQ ID NO: 17772 - protein, 469 aa, synthetic construct; identical to SEQ ID NO: 16738
  REGION 1..469: note = neuraminidase__InfluenzaA__ACZ95990

SEQ ID NO: 17773 - protein, 469 aa, synthetic construct; identical to SEQ ID NO: 16738
  REGION 1..469: note = neuraminidase__InfluenzaA__ACZ96000

SEQ ID NO: 17774 - protein, 469 aa, synthetic construct; identical to SEQ ID NO: 16738
  REGION 1..469: note = neuraminidase__InfluenzaA__ACZ96010

SEQ ID NO: 17775 - protein, 469 aa, synthetic construct
  REGION 1..469: note = neuraminidase__InfluenzaA__ACZ96020
MNPNQKIITIGSVCMTIGMANLILQIGNIILIWISHSIQLGNQNQTETCNQSVITYENNTWVNQTYVNISNTNFAAGQSVVSVKLAGNSSLCPVSGWAIYSKDNSVRIGSKGDVFVIREPFISCSPLECRTFFLTQGALLNDKHSNGTIKDRSPYRTLMSCPIGEVPSPYNSRFESVAWSASACHDGINWLTIGISGPDNGAVAVLKYNGIITDTIKSWRNNILRTQESECACVNGSCFTVMTDGPSNGQASYKIFRIEKGKIVKSVEMNAPNYHYEECSCYPDSSEITCVCRDNWHGSNRPWVSFNQNLEYQIGYICSGIFGDNPRPIDKTGSCGPVSSNGANGVKGFSFKYGNGVWIGRTKSISSRNGFEMIWDPNGWTGTDNNFSIKQDIVGINEWSGYSGSFVQHPELTGLDCIRPCFWVELIRGRPKENTIWTSGSSISFCGVNSDTVGWSWPDGAELPFTIDK

SEQ ID NO: 17776 - protein, 469 aa, synthetic construct; identical to SEQ ID NO: 16738
  REGION 1..469: note = neuraminidase__InfluenzaA__ACZ96050

SEQ ID NO: 17777 - protein, 469 aa, synthetic construct; identical to SEQ ID NO: 16738
  REGION 1..469: note = neuraminidase__InfluenzaA__ACZ96060

SEQ ID NO: 17778 - protein, 469 aa, synthetic construct; identical to SEQ ID NO: 16738
  REGION 1..469: note = neuraminidase__InfluenzaA__ACZ96072

SEQ ID NO: 17779 - protein, 469 aa, synthetic construct; identical to SEQ ID NO: 16738
  REGION 1..469: note = neuraminidase__InfluenzaA__ACZ96082

SEQ ID NO: 17780 - protein, 469 aa, synthetic construct; identical to SEQ ID NO: 16738
  REGION 1..469: note = neuraminidase__InfluenzaA__ACZ96092

SEQ ID NO: 17781 - protein, 469 aa, synthetic construct; identical to SEQ ID NO: 16738
  REGION 1..469: note = neuraminidase__InfluenzaA__ACZ96102

SEQ ID NO: 17782 - protein, 469 aa, synthetic construct; identical to SEQ ID NO: 16738
  REGION 1..469: note = neuraminidase__InfluenzaA__ACZ96112

SEQ ID NO: 17783 - protein, 469 aa, synthetic construct
  REGION 1..469: note = neuraminidase__InfluenzaA__ACZ96122
MNPNQKIITIGSVCMTIGMANLILQIGNIISIWISHSIQLGNQNQIEACNQSVITYENNTWVNQTYVNISNTNFAAGQSVVSVKLAGNSSLCPVSGWAIYSKDNSIRIGSKGDVFVIREPFISCSPLECRTFFLTQGALLNDKHSNGTIKDRSPYRTLMSCPIGEVPSPYNSRFESVAWSASACHDGINWLTIGISGPDNGAVAVLKYNGIITDTIKSWRNNILRTQESECACVNGSCFTVMTDGPSDGQASYKIFRIEKGKIVKSVEMNAPNYHYEECSCYPDSSEITCVCRDNWHGSNRPWVSFNQNLEYQIGYICSGIFGDNPRPNDKTGSCGPVSSNGANGVKGFSFKYGNGVWIGRTKSISSRNGFEMIWDPNGWTGKDNNFSIKQDIVGINEWSGYSGSFVQHPELTGLDCIRPCFWVELIRGRPKENTIWTSGSSISFCGINSDTVGWSWPDGAELPFTIDK

SEQ ID NO: 17784 - protein, 469 aa, synthetic construct; identical to SEQ ID NO: 16738
  REGION 1..469: note = neuraminidase__InfluenzaA__ACZ96132

SEQ ID NO: 17785 - protein, 469 aa, synthetic construct; identical to SEQ ID NO: 16738
  REGION 1..469: note = neuraminidase__InfluenzaA__ACZ96142

SEQ ID NO: 17786 - protein, 469 aa, synthetic construct; identical to SEQ ID NO: 16738
  REGION 1..469: note = neuraminidase__InfluenzaA__ACZ96152

SEQ ID NO: 17787 - protein, 469 aa, synthetic construct; identical to SEQ ID NO: 16738
  REGION 1..469: note = neuraminidase__InfluenzaA__ACZ96162

SEQ ID NO: 17788 - protein, 469 aa, synthetic construct; identical to SEQ ID NO: 16738
  REGION 1..469: note = neuraminidase__InfluenzaA__ACZ96172

SEQ ID NO: 17789 - protein, 469 aa, synthetic construct
  REGION 1..469: note = neuraminidase__InfluenzaA__ACZ96182
MNPNQKIITIGSVCMTIGMANLILQIGNIISIWISHSIQLGNQNQIETCNQSVITYENNTWVNQTYVNISNTNFAAGQSVVSVKLAGNSSLCPVSGWAIYSKDNSIRIGSKGDVFVIREPFISCSPLECRTFFLTQGALLNDRHSNGTIKDRSPYRTLMSCPIGEVPSPYNSRFESVAWSASACHDGINWLTIGISGPDNGAVAVLKYNGIITDTIKSWRNNILRTQESECACVNGSCFTVMTDGPSDGQASYKIFRIEKGKIVKSVEMNAPNYHYEECSCYPDSSEITCVCRDNWHGSNRPWVSFNQNLEYQIGYICSGIFGDNPRPNDKTGSCGPVSSNGANGVKGFSFKYGNGVWIGRTKSISSRNGFEMIWDPNGWTGTDNNFSIKQDIVGINEWSGYSGSFVQHPELTGLDCIRPCFWVELIRGRPKENTIWTSGSSISFCGVNSDTVGWSWPDGAELPFTIDK

SEQ ID NO: 17790 - protein, 469 aa, synthetic construct
  REGION 1..469: note = neuraminidase__InfluenzaA__ACZ96192
MNPNQKIITIGSVCMTIGMANLILQIGNIISIWISHSIQLGNQNQIETCNQSVITYENNTWVNQTYVNISNTNFAAGQSVVSVKLAGNSSLCPVSGWAIYSKDNSIRIGSKGDVFVIREPFISCSPLECRTFFLTQGALLNDKHSNGTIKDRSPYRTLMSCPIGEVPSPYNSRFESVAWSASACHDGINWLTIGISGPDNGAVAVLKYNGIITDTIKSWRNNILRTQESECACVNGSCFTVMTDGPSDGQASYKIFRIEKGKIVKSVEMNAPNYHYEECSCYPDSSEITCVCRDNWHGSNRPWVSFNQNLEYQIGYICSGIFGDNPRSNDKTGSCGPVSSNGANGVKGFSFKYGNGVWIGRTKSISSRNGFEMIWDPNGWTGTDNNFSIKQDIVGINEWSGYSGSFVQHPELTGLDCIRPCFWVELIRGRPKENTIWTSGSSISFCGVNSDTVGWSWPDGAELPFTIDK

SEQ ID NO: 17791 - protein, 469 aa, synthetic construct
  REGION 1..469: note = neuraminidase__InfluenzaA__ACZ96232
MNPNQKIITIGSVCMTVGMANLILQIGNIISIWISHSIQLGNQNQIETCNQSVITYENNTWVNQTYVNISNTNFAAGQSVVSVKLAGNSSLCPVSGWAIYSKDNSIRIGSKGDVFVIREPFISCSPLECRTFFLTQGALLNDKHSNGTIKDRSPYRTLMSCPIGEVPSPYNSRFESVAWSASACHDGINWLTIGISGPDNGAVAVLKYNGIITDTIKSWRNNILRTQESECACVNGSCFTVMTDGPSDGQASYKIFRIEKGKIVKSVEMNAPNYHYEECSCYPDSSEITCVCRDNWHGSNRPWVSFNQNLEYQIGYICSGIFGDNPRPNDKTGSCGPVSSNGANGVKGFSFKYGNGVWIGRTKSISSRNGFEMIWDPNGWTGTDNDFSIKQDIVGINEWSGYSGSFVQHPELTGLDCIRPCFWVELIRGRPKENTIWTSGSSISFCGVNSDTVGWSWPDGAELPFTIDK

SEQ ID NO: 17792 - protein, 469 aa, synthetic construct
  REGION 1..469: note = neuraminidase__InfluenzaA__ACZ96242
MNPNQKIITIGSVCMTIGMANLILQIGNIISIWISHSIQLGNQNQIETCNQSVITYENNTWVNQTYVNISNTNFAAGQSVVSVKLAGNSSLCPVSGWAIYSKDNSIRIGSKGDVFVIREPFISCSPLECRTFFLTQGALLNDKHSNGTIKDRSPYRTLMSCPIGEVPSPYNSRFESVAWSASACHDGINWLTIGISGPDNGAVAVLKYNGIITDTIKSWRNNILRTQESECACVNGSCFTVMTDGPSDGQASYKIFRIEKGKIVKSVEMNAPNYHYEECSCYPDSSEITCVCRDNWHGSNRPWVSFNQNLEYQIGYICSGIFGDNPRPNDKTGSCGPVSSNGANGVKGFSFKYGNGVWIGRTKSISSRNGFEMIWDPNGWTGTDNNFSIKQDIVGINEWSGYSGSFVQHPELTGLDCIRPCFWVELIRGRPKESTIWTSGSSISFCGVNSDTVGWSWPDGAELPFTIDK

SEQ ID NO: 17793 - protein, 469 aa, synthetic construct; identical to SEQ ID NO: 16738
  REGION 1..469: note = neuraminidase__InfluenzaA__ACZ96252

SEQ ID NO: 17794 - protein, 469 aa, synthetic construct; identical to SEQ ID NO: 16738
  REGION 1..469: note = neuraminidase__InfluenzaA__ACZ96292

SEQ ID NO: 17795 - protein, 469 aa, synthetic construct; identical to SEQ ID NO: 16738
  REGION 1..469: note = neuraminidase__InfluenzaA__ACZ96302

SEQ ID NO: 17796 - protein, 469 aa, synthetic construct; identical to SEQ ID NO: 16738
  REGION 1..469: note = neuraminidase__InfluenzaA__ACZ96312

SEQ ID NO: 17797 - protein, 469 aa, synthetic construct
  REGION 1..469: note = neuraminidase__InfluenzaA__ACZ96322
MNPNQKIITIGSVCMTIGMANLILQIGNIISIWISHSIQLGNQNQIETCNQSVITYENNTWVNQTYVNISNTNFAAGQSVVSVKLTGNSSLCPVSGWAIYSKDNSIRIGSKGDVFVIREPFISCSPLECRTFFLTQGALLNDKHSNGTIKDRSPYRTLMSCPIGEVPSPYNSRFESVAWSASACHDGINWLTIGISGPDNGAVAVLKYNGIITDTIKSWRNNILRTQESECACVNGSCFTVMTDGPSDGQASYKIFRIEKGKIVKSVEMNAPNYHYEECSCYPDSSEITCVCRDNWHGSNRPWVSFNQNLEYQIGYICSGIFGDNPRPNDKTGSCGPVSSNGANGVKGFSFKYGNGVWIGRTKSISSRNGFEMIWDPNGWTGTDNNFSIKQDIVGINEWSGYSGSFVQHPELTGLDCIRPCFWVELIRGRPKENTIWTSGSSISFCGVNSDTVGWSWPDGAELPFTIDK

SEQ ID NO: 17798 - protein, 469 aa, synthetic construct; identical to SEQ ID NO: 17797
  REGION 1..469: note = neuraminidase__InfluenzaA__ACZ96332

SEQ ID NO: 17799 - protein, 469 aa, synthetic construct; identical to SEQ ID NO: 16738
  REGION 1..469: note = neuraminidase__InfluenzaA__ACZ96352

SEQ ID NO: 17800 - protein, 469 aa, synthetic construct; identical to SEQ ID NO: 17797
  REGION 1..469: note = neuraminidase__InfluenzaA__ACZ96362

SEQ ID NO: 17801 - protein, 469 aa, synthetic construct; identical to SEQ ID NO: 16738
  REGION 1..469: note = neuraminidase__InfluenzaA__ACZ96375

SEQ ID NO: 17802 - protein, 469 aa, synthetic construct; identical to SEQ ID NO: 17797
  REGION 1..469: note = neuraminidase__InfluenzaA__ACZ96385

SEQ ID NO: 17803 - protein, 469 aa, synthetic construct
  REGION 1..469: note = neuraminidase__InfluenzaA__ACZ96395
MNPNQKIITIGSVCMTIGMANLILQIGNIISIWISHSIQLGNQNQTETCNQSVITYENNTWVNQTYVNISNTNFAAGQSVVSVKLAGNSSLCPVSGWAIYSKDNSVRIGSKGDVFVIREPFISCSPLECRTFFLTQGALLNDKHSNGTIKDRSPYRTLMSCPIGEVPSPYNSRFESVAWSASACHDGINWLTIGISGPDNGAVAVLKYNGIITDTIKSWRNNILRTQESECACVNGSCFTVMTDGPSNGQASYKIFRIEKGKIVKSVEMNAPNYHYEECSCYPDSSEITCVCRDNWHGSNRPWVSFNQNLEYQIGYICSGIFGDNPRPIDKTGSCGPVSSNGANGVKGFSFKYGNGVWIGRTKSISSRNGFEMIWDPNGWTGTDNNFSIKQDIVGINEWSGYSGSFVQHPELTGLDCIRPCFWVELIRGRPKENTIWTSGSSISFCGVNSDTVGWSWPDGAELPFTIDK

SEQ ID NO: 17804 - protein, 469 aa, synthetic construct; identical to SEQ ID NO: 16738
  REGION 1..469: note = neuraminidase__InfluenzaA__ACZ96408

SEQ ID NO: 17805 - protein, 469 aa, synthetic construct; identical to SEQ ID NO: 16738
  REGION 1..469: note = neuraminidase__InfluenzaA__ACZ96428

SEQ ID NO: 17806 - protein, 469 aa, synthetic construct; identical to SEQ ID NO: 16738
  REGION 1..469: note = neuraminidase__InfluenzaA__ACZ96438

SEQ ID NO: 17807 - protein, 469 aa, synthetic construct; identical to SEQ ID NO: 16738
  REGION 1..469: note = neuraminidase__InfluenzaA__ACZ96448

SEQ ID NO: 17808 - protein, 469 aa, synthetic construct; identical to SEQ ID NO: 16738
  REGION 1..469: note = neuraminidase__InfluenzaA__ACZ96479

SEQ ID NO: 17809 - protein, 469 aa, synthetic construct; identical to SEQ ID NO: 17755
  REGION 1..469: note = neuraminidase__InfluenzaA__ACZ96489

SEQ ID NO: 17810 - protein, 469 aa, synthetic construct; identical to SEQ ID NO: 16738
  REGION 1..469: note = neuraminidase__InfluenzaA__ACZ96499

SEQ ID NO: 17811 - protein, 469 aa, synthetic construct
  REGION 1..469: note = neuraminidase__InfluenzaA__ACZ96509
MNPNQKIITIGSVCMTIGMANLILQIGNIISIWISHSIQLGNQNQIETCNQSVITYENNTWINQTYVNISNTNFAAGQSVVSVKLAGNSSLCPVSGWAIYSKDNSIRIGSKGDVFVIREPFISCSPLECRTFFLTQGALLNDKHSNGTIKDRSPYRTLMSCPIGEVPSPYNSRFESVAWSASACHDGINWLTIGISGPDNGAVAVLKYNGIITDTIKSWRNNILRTQESECACVNGSCFTVMTDGPSDGQASYKIFRIEKGKIVKSVEMNAPNYHYEECSCYPDSSEITCVCRDNWHGSNRPWVSFNQNLEYQIGYICSGIFGDNPRPNDKTGSCGPVSSNGANGVKGFSFKYGNGVWIGRTKSISSRNGFEMIWDPNGWTGTDNNFSIKQDIVGINEWSGYSGSFVQHPELTGLDCIRPCFWVELIRGRPKENTIWTSGSSISFCGVNSDTVGWSWPDGAELPFTIDK

SEQ ID NO: 17812 - protein, 469 aa, synthetic construct; identical to SEQ ID NO: 16738
  REGION 1..469: note = neuraminidase__InfluenzaA__ACZ96519

SEQ ID NO: 17813 - protein, 469 aa, synthetic construct; identical to SEQ ID NO: 16738
  REGION 1..469: note = neuraminidase__InfluenzaA__ACZ96529

SEQ ID NO: 17814 - protein, 469 aa, synthetic construct
  REGION 1..469: note = neuraminidase__InfluenzaA__ACZ96552
MNPNQKIITIGSVCMTIGMANLILQIGNIISIWISHSSQLGNQNQIETCNQSVITYENNTWVNQTYVNISNTNFAAGQSVVSVKLAGNSSLCPVSGWAIYSKDNSIRIGSKGDVFVIREPFISCSPLECRTFFLTQGALLNDKHSNGTIKDRSPYRTLMSCPIGEVPSPYNSRFESVAWSASACHDGINWLTIGISGPDNGAVAVLKYNGIITDTIKSWRNNILRTQESECACVNGSCFTVMTDGPSDGQASYKIFRIEKGKIVKSVEMNAPNYHYEECSCYPDSSEITCVCRDNWHGSNRPWVSFNQNLEYQIGYICSGIFGDNPRPNDKTGSCGPVSSNGANGVKGFSFKYGNGVWIGRTKSISSRNGFEMIWDPNGWTGTDNNFSIKQDIVGINEWSGYSGSFVQHPELTGLDCIRPCFWVELIRGRPKENTIWTSGSSISFCGVNSDTVGWSWPDGAELPFTIDK

SEQ ID NO: 17815 - protein, 469 aa, synthetic construct; identical to SEQ ID NO: 16738
  REGION 1..469: note = neuraminidase__InfluenzaA__ACZ96562

SEQ ID NO: 17816 - protein, 469 aa, synthetic construct; identical to SEQ ID NO: 16738
  REGION 1..469: note = neuraminidase__InfluenzaA__ACZ96572

SEQ ID NO: 17817 - protein, 469 aa, synthetic construct; identical to SEQ ID NO: 16738
  REGION 1..469: note = neuraminidase__InfluenzaA__ACZ96582

SEQ ID NO: 17818 - protein, 469 aa, synthetic construct
  REGION 1..469: note = neuraminidase__InfluenzaA__ACZ96592
MNPNQKIITIGSVCMTIGMANLILQIGNIISIWISHSIQLGNQNQIETCNQSVITYENNTWVNQTYVNISNTNFAAGQSVVSVKLAGNSSLCPVSGWAIYSKDNSIRIGSKGDVFVIREPFISCSPLECRTFFLTQGALLNDKHSNGTIKDRSPYRTLMSCPIGEVPSPYNSRFESVAWSASACHDGINWLTIGISGPDNGAVAVLKYNGIITDTIKSWRNNILRTQESECACVNGSCFTVMTDGPSDGQSSYKIFKIEKGKIVKSVEMNAPNYHYEECSCYPDSSEITCVCRDNWHGSNRPWVSFNQNLEYQIGYICSGIFGDNPRPNDKTGSCGPVSSNGANGVKGFSFKYGNGVWIGRTKSISSRNGFEMIWDPNGWTGTDNNFSIKQDIVGINEWSGYSGSFVQHPELTGLDCIRPCFWVELIRGRPKENTIWTSGSSISFCGVNSDTVGWSWPDGAELPFTIDK

SEQ ID NO: 17819 - protein, 469 aa, synthetic construct; identical to SEQ ID NO: 16738
  REGION 1..469: note = neuraminidase__InfluenzaA__ACZ96602

SEQ ID NO: 17820 - protein, 469 aa, synthetic construct
  REGION 1..469: note = neuraminidase__InfluenzaA__ACZ96612
MNPNQKIITIGSVCMTIGMANLILQIGNIISIWISHSIQLGNQNQIETCNQSVVTYENNTWVNQTYVNISNTNFAAGQSVVSVKLAGNSSLCPVSGWAIYSKDNSVRIGSKGDVFVIREPFISCSPLECRTFFLTQGALLNDKHSNGTIKDRSPYRTLMSCPIGEVPSPYNSRFESVAWSASACHDGINWLTIGISGPDNGAVAVLKYNGIITDTIKSWRNNILRTQESECACVNGSCFTVMTDGPSNGQASYKIFRIEKGKIVKSVEMNAPNYHYEECSCYPDSSEITCVCRDNWHGSNRPWVSFNQNLEYQIGYICSGIFGDNPRPNDKTGSCGPVSSNGANGVKGFSFKYGNGVWIGRTKSISSRNGFEMIWDPNGWTGTDNNFSIKQDIVGINEWSGYSGSFVQHPELTGLDCIRPCFWVELIRGRPKENTIWTSGSSISFCGVNSDTVGWSWPDGAELPFTIDK

SEQ ID NO: 17821 - protein, 469 aa, synthetic construct; identical to SEQ ID NO: 16768
  REGION 1..469: note = neuraminidase__InfluenzaA__ACZ96622

SEQ ID NO: 17822 - protein, 469 aa, synthetic construct; identical to SEQ ID NO: 16768
  REGION 1..469: note = neuraminidase__InfluenzaA__ACZ96632

SEQ ID NO: 17823 - protein, 469 aa, synthetic construct; identical to SEQ ID NO: 16768
  REGION 1..469: note = neuraminidase__InfluenzaA__ACZ96642

SEQ ID NO: 17824 - protein, 469 aa, synthetic construct; identical to SEQ ID NO: 16768
  REGION 1..469: note = neuraminidase__InfluenzaA__ACZ96652

SEQ ID NO: 17825 - protein, 469 aa, synthetic construct; identical to SEQ ID NO: 16768
  REGION 1..469: note = neuraminidase__InfluenzaA__ACZ96662

SEQ ID NO: 17826 - protein, 469 aa, synthetic construct; identical to SEQ ID NO: 16768
  REGION 1..469: note = neuraminidase__InfluenzaA__ACZ96672

SEQ ID NO: 17827 - protein, 469 aa, synthetic construct; identical to SEQ ID NO: 16768
  REGION 1..469: note = neuraminidase__InfluenzaA__ACZ96682

SEQ ID NO: 17828 - protein, 469 aa, synthetic construct; identical to SEQ ID NO: 16768
  REGION 1..469: note = neuraminidase__InfluenzaA__ACZ96692

SEQ ID NO: 17829 - protein, 469 aa, synthetic construct; identical to SEQ ID NO: 16768
  REGION 1..469: note = neuraminidase__InfluenzaA__ACZ96702

SEQ ID NO: 17830 - protein, 469 aa, synthetic construct; identical to SEQ ID NO: 16768
  REGION 1..469: note = neuraminidase__InfluenzaA__ACZ96712

SEQ ID NO: 17831 - protein, 469 aa, synthetic construct; identical to SEQ ID NO: 16768
  REGION 1..469: note = neuraminidase__InfluenzaA__ACZ96722

SEQ ID NO: 17832 - protein, 469 aa, synthetic construct; identical to SEQ ID NO: 16768
  REGION 1..469: note = neuraminidase__InfluenzaA__ACZ96732

SEQ ID NO: 17833 - protein, 469 aa, synthetic construct; identical to SEQ ID NO: 16768
  REGION 1..469: note = neuraminidase__InfluenzaA__ACZ96742

SEQ ID NO: 17834 - protein, 469 aa, synthetic construct; identical to SEQ ID NO: 16728
  REGION 1..469: note = neuraminidase__InfluenzaA__ACZ96752

SEQ ID NO: 17835 - protein, 469 aa, synthetic construct; identical to SEQ ID NO: 16728
  REGION 1..469: note = neuraminidase__InfluenzaA__ACZ96762

SEQ ID NO: 17836 - protein, 469 aa, synthetic construct; identical to SEQ ID NO: 16728
  REGION 1..469: note = neuraminidase__InfluenzaA__ACZ96772

SEQ ID NO: 17837 - protein, 469 aa, synthetic construct; identical to SEQ ID NO: 16728
  REGION 1..469: note = neuraminidase__InfluenzaA__ACZ96782

SEQ ID NO: 17838 - protein, 469 aa, synthetic construct; identical to SEQ ID NO: 16728
  REGION 1..469: note = neuraminidase__InfluenzaA__ACZ96792

SEQ ID NO: 17839 - protein, 469 aa, synthetic construct; identical to SEQ ID NO: 16738
  REGION 1..469: note = neuraminidase__InfluenzaA__ACZ96802

SEQ ID NO: 17840 - protein, 469 aa, synthetic construct; identical to SEQ ID NO: 16738
  REGION 1..469: note = neuraminidase__InfluenzaA__ACZ96812

SEQ ID NO: 17841 - protein, 469 aa, synthetic construct; identical to SEQ ID NO: 17321
  REGION 1..469: note = neuraminidase__InfluenzaA__ACZ96822

SEQ ID NO: 17842 - protein, 469 aa, synthetic construct
  REGION 1..469: note = neuraminidase__InfluenzaA__ACZ96842
MNPNQKIITIGSVCMTIGMANLILQIGNIISIWISHSIQLGNQNQIETCNQSVITYENNTWVNQTYVNISNTNFAAGQSVVSVKLAGNSSLCPVSGWAIYSKDNSVRIGSKGDVFVIREPFISCSPLECRTFFLTQGALLNDKHSNGTIKDRSPYRTLMSCPIGEVPSPYNSRFESVAWSASACHDGINWLTIGISGPDNGAVAVLKYNGIITDTIKSWRNNILRTQESECACVNGSCFTVMTDGPSNGQASYKIFRIEKGKIVKSVEMIAPNYHYEECSCYPDSSEITCVCRDNWHGSNRPWVSFNQNLEYQIGYICSGIFGDNPRPNDKTGSCGPVSSNGANGVKGFSFKYGNGVWIGRTKSISSRNGFEMIWDPNGWTGTDNNFSIKQDIVGINEWSGYSGSFVQHPELTGLDCIRPCFWVELIRGRPKENTIWTSGSSISFCGVNSDTVGWSWPDGAELPFTIDK

SEQ ID NO: 17843 - protein, 469 aa, synthetic construct; identical to SEQ ID NO: 16738
  REGION 1..469: note = neuraminidase__InfluenzaA__ACZ96852

SEQ ID NO: 17844 - protein, 469 aa, synthetic construct; identical to SEQ ID NO: 16738
  REGION 1..469: note = neuraminidase__InfluenzaA__ACZ96862

SEQ ID NO: 17845 - protein, 469 aa, synthetic construct
  REGION 1..469: note = neuraminidase__InfluenzaA__ACZ96872
MNPNQKIITIGSVCMTIGMANLILQIGNIISIWISHSIQLGNQNQIETCNQSVITYENNTWVNQTYVNISNTNFAAGQSVVSMKLAGNSSLCPVSGWAIYSKDNSIRIGSKGDVFVIREPFISCSPLECRTFFLTQGALLNDKHSNGTIKDRSPYRTLMSCPIGEVPSPYNSRFESVAWSASACHDGINWLTIGISGPDNGAVAVLKYNGIITDTIKSWRNNILRTQESECACVNGSCFTVMTDGPSDGQASYKIFRIEKGKIVKSVEMNAPNYHYEECSCYPDSSEITCVCRDNWHGSNRPWVSFNQNLEYQIGYICSGIFGDNPRPNDKTGSCGPVSSNGANGVKGFSFKYGNGVWIGRTKSISSRNGFEMIWDPNGWTGTDNNFSIKQDIVGINEWSGYSGSFVQHPELTGLDCIRPCFWVELIRGRPKENTIWTSGSSISFCGVNSDTVGWSWPDGAELPFTIDK

SEQ ID NO: 17846 - protein, 469 aa, synthetic construct; identical to SEQ ID NO: 16728
  REGION 1..469: note = neuraminidase__InfluenzaA__ACZ96882

SEQ ID NO: 17847 - protein, 469 aa, synthetic construct; identical to SEQ ID NO: 17845
  REGION 1..469: note = neuraminidase__InfluenzaA__ACZ96892

SEQ ID NO: 17848 - protein, 469 aa, synthetic construct; identical to SEQ ID NO: 17845
  REGION 1..469: note = neuraminidase__InfluenzaA__ACZ96902

SEQ ID NO: 17849 - protein, 469 aa, synthetic construct; identical to SEQ ID NO: 16728
  REGION 1..469: note = neuraminidase__InfluenzaA__ACZ96912

SEQ ID NO: 17850 - protein, 469 aa, synthetic construct; identical to SEQ ID NO: 16728
  REGION 1..469: note = neuraminidase__InfluenzaA__ACZ96922

SEQ ID NO: 17851 - protein, 469 aa, synthetic construct; identical to SEQ ID NO: 17845
  REGION 1..469: note = neuraminidase__InfluenzaA__ACZ96932

SEQ ID NO: 17852 - protein, 469 aa, synthetic construct; identical to SEQ ID NO: 17845
  REGION 1..469: note = neuraminidase__InfluenzaA__ACZ96942

SEQ ID NO: 17853 - protein, 469 aa, synthetic construct; identical to SEQ ID NO: 16728
  REGION 1..469: note = neuraminidase__InfluenzaA__ACZ96952

SEQ ID NO: 17854 - protein, 469 aa, synthetic construct; identical to SEQ ID NO: 16728
  REGION 1..469: note = neuraminidase__InfluenzaA__ACZ97024

SEQ ID NO: 17855 - protein, 469 aa, synthetic construct; identical to SEQ ID NO: 17845
  REGION 1..469: note = neuraminidase__InfluenzaA__ACZ97336

SEQ ID NO: 17856 - protein, 469 aa, synthetic construct; identical to SEQ ID NO: 17845
  REGION 1..469: note = neuraminidase__InfluenzaA__ACZ97346

SEQ ID NO: 17857 - protein, 469 aa, synthetic construct; identical to SEQ ID NO: 16738
  REGION 1..469: note = neuraminidase__InfluenzaA__ACZ97366

SEQ ID NO: 17858 - protein, 469 aa, synthetic construct; identical to SEQ ID NO: 16738
  REGION 1..469: note = neuraminidase__InfluenzaA__ACZ97376

SEQ ID NO: 17859 - protein, 469 aa, synthetic construct; identical to SEQ ID NO: 16738
  REGION 1..469: note = neuraminidase__InfluenzaA__ACZ97386

SEQ ID NO: 17860 - protein, 469 aa, synthetic construct; identical to SEQ ID NO: 17845
  REGION 1..469: note = neuraminidase__InfluenzaA__ACZ97396

SEQ ID NO: 17861 - protein, 469 aa, synthetic construct; identical to SEQ ID NO: 16738
  REGION 1..469: note = neuraminidase__InfluenzaA__ACZ98171

SEQ ID NO: 17862 - protein, 469 aa, synthetic construct; identical to SEQ ID NO: 16738
  REGION 1..469: note = neuraminidase__InfluenzaA__ACZ98181

SEQ ID NO: 17863 - protein, 469 aa, synthetic construct
  REGION 1..469: note = neuraminidase__InfluenzaA__ACZ98191
MNPNQKIITIGSVCMTIGMANLILQIGNIISIWISHSIQLGNQNQIETCNQSVISYENNTWVNQTYVNISNTNFAAGQSVVSVKLAGNSSLCPVSGWAIYSKDNSIRIGSKGDVFVIREPFISCSPLECRTFFLTQGALLNDKHSNGTIKDRSPYRTLMSCPIGEVPSPYNSRFESVAWSASACHDGINWLTIGISGPDNGAVAVLKYNGIITDTIKSWRNNILRTQESECACVNGSCFTVMTDGPSDGQASYKIFRIEKGKIVKSVEMNAPNYHYEECSCYPDSSEITCVCRDNWHGSNRPWVSFNQNLEYQIGYICSGIFGDNPRPNDKTGSCGPVSSNGANGVKGFSFKYGNGVWIGRTKSISSRNGFEMIWDPNGWTGTDNNFSIKQDIVGINEWSGYSGSFVQHPELTGLDCIRPCFWVELIRGRPKENTIWTSGSSISFCGVNSDTVGWSWPDGAELPFTIDK

SEQ ID NO: 17864 - protein, 469 aa, synthetic construct; identical to SEQ ID NO: 16728
  REGION 1..469: note = neuraminidase__InfluenzaA__ACZ98201

SEQ ID NO: 17865 - protein, 469 aa, synthetic construct; identical to SEQ ID NO: 16738
  REGION 1..469: note = neuraminidase__InfluenzaA__ACZ98211

SEQ ID NO: 17866 - protein, 469 aa, synthetic construct; identical to SEQ ID NO: 16738
  REGION 1..469: note = neuraminidase__InfluenzaA__ACZ98221

SEQ ID NO: 17867 - protein, 469 aa, synthetic construct; identical to SEQ ID NO: 16738
  REGION 1..469: note = neuraminidase__InfluenzaA__ACZ98231

SEQ ID NO: 17868 - protein, 469 aa, synthetic construct; identical to SEQ ID NO: 16738
  REGION 1..469: note = neuraminidase__InfluenzaA__ACZ98241

SEQ ID NO: 17869 - protein, 469 aa, synthetic construct; identical to SEQ ID NO: 17715
  REGION 1..469: note = neuraminidase__InfluenzaA__ACZ98251

SEQ ID NO: 17870 - protein, 469 aa, synthetic construct; identical to SEQ ID NO: 16738
  REGION 1..469: note = neuraminidase__InfluenzaA__ACZ98261

SEQ ID NO: 17871 - protein, 469 aa, synthetic construct; identical to SEQ ID NO: 16738
  REGION 1..469: note = neuraminidase__InfluenzaA__ACZ98271

SEQ ID NO: 17872 - protein, 469 aa, synthetic construct; identical to SEQ ID NO: 16738
  REGION 1..469: note = neuraminidase__InfluenzaA__ACZ98281

SEQ ID NO: 17873 - protein, 469 aa, synthetic construct; identical to SEQ ID NO: 16738
  REGION 1..469: note = neuraminidase__InfluenzaA__ACZ98291

SEQ ID NO: 17874 - protein, 469 aa, synthetic construct; identical to SEQ ID NO: 16728
  REGION 1..469: note = neuraminidase__InfluenzaA__ACZ98301

SEQ ID NO: 17875 - protein, 469 aa, synthetic construct
  REGION 1..469: note = neuraminidase__InfluenzaA__ACZ98321
MNPNQKIITIGSVCMTIGMANLILQIGNIISIWISHSIQLGNQNQIETCNQSVITYENNTWVNQTYVNISNTNFAAGQSVVSVKLAGNSSLCPVSGWAIYSKDNSIRIGSKGDVFVIREPFISCSPLECRTFFLTQGALLNDKHSNGTIKDRSPYRTLMSCPIGEVPSPYNSRFESVAWSASACHDGINWLTIGISGPDNGAVAVLKYNGIITDTIKSWRNNILRTQESECACVNGSCFTVMTDGPSDGQASYKIFRIEKGKIVKSVEMNAPNYHYEECSCYPDSSEITCVCRDNWHGSNRPWVSFNQNLEYQIGYICSGIFGDNPRPNDKTGSCGPVSSNGANGVKGFSFKYGNGVWIGRTKSINSRNGFEMIWDPNGWTGTDNNFSIKQDIVGINEWSGYSGSFVQHPELTGLDCIRPCFWVELIRGRPKENTIWTSGSSISFCGVNSDTVGWSWPDGAELPFTIDK

SEQ ID NO: 17876 - protein, 469 aa, synthetic construct; identical to SEQ ID NO: 16738
  REGION 1..469: note = neuraminidase__InfluenzaA__ACZ98331

SEQ ID NO: 17877 - protein, 469 aa, synthetic construct
  REGION 1..469: note = neuraminidase__InfluenzaA__ACZ98341
MNPNQKIITIGSVCITIGMANLILQIGNIISIWISHPIQLGNQNQIETCNQSVITYENNTWVNQTYVNISNTNLAAGQSVVSVKLAGNSSLCPVSGWAIYSKDNSIRIGSKGDVFVIREPFISCSPLECRTFFLTQGALLNDKHSNGTIKDRSPYRTLMSCPIGEVPSPYNSRFESVAWSASACHDGINWLTIGISGPDNGAVAVLKYNGIITDTIKSWRNNILRTQESECACVNGSCFTVMTDGPSDGQASYKIFRIEKGKIVKSVEMNAPNYHYEECSCYPDSSEITCVCRDNWHGSNRPWVSFNQNLEYQIGYICSGIFGDNPRPNDKTGSCGPVSSNGANGVKGFSFKYGNGVWIGRTKSISSRNGFEMIWDPNGWTGTDNNFSIKQDIVGINEWSGYSGSFVQHPELTGLDCIRPCFWVELIRGRPKENTIWTSGSSISFCGVNSDTVGWSWPDGAELPFTIDK

SEQ ID NO: 17878 - protein, 469 aa, synthetic construct; identical to SEQ ID NO: 16738
  REGION 1..469: note = neuraminidase__InfluenzaA__ACZ98351

SEQ ID NO: 17879 - protein, 469 aa, synthetic construct; identical to SEQ ID NO: 16738
  REGION 1..469: note = neuraminidase__InfluenzaA__ACZ98361

SEQ ID NO: 17880 - protein, 469 aa, synthetic construct; identical to SEQ ID NO: 16738
  REGION 1..469: note = neuraminidase__InfluenzaA__ACZ98371

SEQ ID NO: 17881 - protein, 469 aa, synthetic construct; identical to SEQ ID NO: 16738
  REGION 1..469: note = neuraminidase__InfluenzaA__ACZ98381

SEQ ID NO: 17882 - protein, 469 aa, synthetic construct; identical to SEQ ID NO: 16738
  REGION 1..469: note = neuraminidase__InfluenzaA__ACZ98391

SEQ ID NO: 17883 - protein, 469 aa, synthetic construct; identical to SEQ ID NO: 16738
  REGION 1..469: note = neuraminidase__InfluenzaA__ACZ98401

SEQ ID NO: 17884 - protein, 469 aa, synthetic construct; identical to SEQ ID NO: 16738
  REGION 1..469: note = neuraminidase__InfluenzaA__ACZ98411

SEQ ID NO: 17885 - protein, 469 aa, synthetic construct; identical to SEQ ID NO: 16768
  REGION 1..469: note = neuraminidase__InfluenzaA__ACZ98421

SEQ ID NO: 17886 - protein, 469 aa, synthetic construct; identical to SEQ ID NO: 16738
  REGION 1..469: note = neuraminidase__InfluenzaA__ACZ98431

SEQ ID NO: 17887 - protein, 469 aa, synthetic construct; identical to SEQ ID NO: 16738
  REGION 1..469: note = neuraminidase__InfluenzaA__ACZ98441

SEQ ID NO: 17888 - protein, 469 aa, synthetic construct; identical to SEQ ID NO: 16738
  REGION 1..469: note = neuraminidase__InfluenzaA__ACZ98451

SEQ ID NO: 17889 - protein, 469 aa, synthetic construct; identical to SEQ ID NO: 16738
  REGION 1..469: note = neuraminidase__InfluenzaA__ACZ98461

SEQ ID NO: 17890 - protein, 469 aa, synthetic construct; identical to SEQ ID NO: 17321
  REGION 1..469: note = neuraminidase__InfluenzaA__ACZ98674

SEQ ID NO: 17891 - protein, 469 aa, synthetic construct; identical to SEQ ID NO: 17845
  REGION 1..469: note = neuraminidase__InfluenzaA__ACZ98684

SEQ ID NO: 17892 - protein, 469 aa, synthetic construct; identical to SEQ ID NO: 17791
  REGION 1..469: note = neuraminidase__InfluenzaA__ACZ98694

SEQ ID NO: 17893 - protein, 469 aa, synthetic construct; identical to SEQ ID NO: 16738
  REGION 1..469: note = neuraminidase__InfluenzaA__ADA60801

SEQ ID NO: 17894 - protein, 469 aa, synthetic construct; identical to SEQ ID NO: 16738
  REGION 1..469: note = neuraminidase__InfluenzaA__ADA69294

SEQ ID NO: 17895 - protein, 469 aa, synthetic construct; identical to SEQ ID NO: 16738
  REGION 1..469: note = neuraminidase__InfluenzaA__ADA69304

SEQ ID NO: 17896 - protein, 469 aa, synthetic construct; identical to SEQ ID NO: 16738
  REGION 1..469: note = neuraminidase__InfluenzaA__ADA69314

SEQ ID NO: 17897 - protein, 469 aa, synthetic construct; identical to SEQ ID NO: 16738
  REGION 1..469: note = neuraminidase__InfluenzaA__ADA69324

SEQ ID NO: 17898 - protein, 469 aa, synthetic construct; identical to SEQ ID NO: 16738
  REGION 1..469: note = neuraminidase__InfluenzaA__ADA69334

SEQ ID NO: 17899 - protein, 469 aa, synthetic construct; identical to SEQ ID NO: 16738
  REGION 1..469: note = neuraminidase__InfluenzaA__ADA69451

SEQ ID NO: 17900 - protein, 469 aa, synthetic construct; identical to SEQ ID NO: 16738
  REGION 1..469: note = neuraminidase__InfluenzaA__ADA69453

SEQ ID NO: 17901 - protein, 469 aa, synthetic construct
  REGION 1..469: note = neuraminidase__InfluenzaA__ADA71153
MNPNQKIITIGSVSLTISTICFFMQIAILVTTVTLHFKQYEFNSPPNNQVMLCEPTIIERNITEIVYLTNTTIEKEICPKLAEYRNWSKPQCDITGFAPFSKDNSIRLSAGGDIWVTREPYVSCDPDKCYQFALGQGTTLNNVHSNNTVRDRTPYRTLLMNELGVPFHLGTKQVCIAWSSSSCHDGKAWLHVCITGDDKNATASFIYNGRLVDSVVSWSKDILRTQESECVCINGTCTVVMTDGSASGKADTKILFIEEGKIVHTSTLSGSAQHVEECSCYPRYPGVRCVCRDNWKGSNRPIVDINIKDHSIVSRYVCSGLVGDPPRKNDSSSSSHCLDPNNEEGGHGVKGWAFDDGNDVWMGRTISEKSRLGYETFKVIEGWSNPKSKLQINRQVIVDRGNRSGYSGIFSVEGKSCINRCFYVELIRGRKEETEVLWTSNSIVVFCGTSGTYGTGSWPDGANINLMPI

SEQ ID NO: 17902 - protein, 470 aa, synthetic construct
  REGION 1..470: note = neuraminidase__InfluenzaA__ADA71155
MNPNQKIITIGSISIAIGIISLMLQIGNIISIWASHSIQIGSQNNTGICNQRIITYENSTWVNHTYVNINNTKVVAGEDKTSVTLAGNSSLCSISGWAIYTKDNSIRIGSKGDVFVIREPFISCSHLECRTFFLTQGALLNDKHSNGTVKDRSPYRALMSCPLGEAPSPYNSKFESVAWSASACHDGMGWLTIGISGPDNGAVAVLKYNGIITGTIKSWKKQILRTQESECVCMNGSCFTIMTDGPSNKAASYKIFKIEKGKVTKSIELNAPNFYYEECSCYPDTGIVMCVCRDNWHGSNRPWVSFNQNLDYQIGYICSGVFGDNPRPEDGEGSCNPVTVDGANGVKGFSYKYGNGVWIGRTKSNRLRKGFEMIWDPNGWTNTDSDFSVKQDVVAITDWSGYSGSFVQHPELTGLDCIRPCFWVELVRGLPRENTTIWTSGSSISFCGVNSDTANWSWPDGAELPFTIDK

SEQ ID NO: 17903 - protein, 470 aa, synthetic construct; identical to SEQ ID NO: 17461
  REGION 1..470: note = neuraminidase__InfluenzaA__ADA71157

SEQ ID NO: 17904 - protein, 470 aa, synthetic construct
  REGION 1..470: note = neuraminidase__InfluenzaA__ADA71159
MNPNQKIITIGSISIAIGIISLMLQIGNIISIWASHSIQIGSQNNTGICNQRIITYENSTWVNHTYVNINNTKVVAGEGKTSVTLAGNSSLCSISGWAINTKDNSIRIGSKGDVFVIREPFISCSHLECRTFFLTQGALLNDKHSNRTVKDRSPYRALMSCPLGEAPSPYNSKFESVAWSASACHDGMGWLTIGISGPDNGAVAVLKYNGIITGTIKSWKKQILRTQESECVCMNGSCFTIMTDGPSNKAASYKIFKIEKGKVTKSIELNAPNFYYEECSCYPDTGIVMCVCRDNWHGSNRPWVSFNQNLDYQIGYICSGVFGDNPRPEDGEGSCNPVTVDGANGVKGFSYKYGNGVWIGRTKSNRLRKGFEMIWDPNGWTNTDSDFSVKQDVVAITDWSGYSGSFVQHPELTGLDCIRPCFWVELVRGLPRENTTIWTSGSSISFCGVNSDTANWSWPDGAELPFTIDK

SEQ ID NO: 17905 - protein, 469 aa, synthetic construct
  REGION 1..469: note = neuraminidase__InfluenzaA__ADA71161
MNPNQKIITIGSVSLTISTICFFMQIAILITTVTLHFKQYEFNSPPNNQVMLCEPTIIERNITEIVYLTNTTIEKEICPKLAEYRNWSKPQCDITGFAPFSKDNSIRLSAGGDIWVTREPYVSCDPDKCYQFALGQGTTLNNVHSNNTVRDRTPYRTLLMNELGVPFHLGTKQVCIAWSSSSCHDGKAWLHVCITGDDKNATASFIYNGRLVDSVVSWSKEILRTQESECVCINGTCTVVMTDGSASGKADTKILFIEEGKIVHTSTLSGSAQHVEECSCYPRYPGVRCVCRDNWKGSNRPIVDINIKDHSIVSSYVCSGLVGDTPRKNDSSSSSHCLDPNNEEGGHGVKGWAFDDGNDVWMGRTISEKSRLGYETFKVIEGWSNHKSKLQINRQVIVDRGNRSGYSGIFSVEGKSCINRCFYVELIRGRKEETEVLWTSNSIVVFCGTSGTYGTGSWPDGADLNLMPI

SEQ ID NO: 17906 - protein, 470 aa, synthetic construct
  REGION 1..470: note = neuraminidase__InfluenzaA__ADA71165
MNPNQKIITIGSISIAIGIISLMLQIGNIISIWASHSIQTGSQNNTGICNQRIITYENSTWVNHTYVNINNTNVVAGEDKTSVTLAGNSSLCSISGWAIYTKDNSIRIGSKGDVFVIREPFISCSHLECRTFFLTQGALLNDKHSNGTVKDRSPYRALMSCPLGEAPSPYNSKFESVAWSASACHDGMGWLTIGISGPDNGAVAVLKYNGIITGTIKSWKKQILRTQESECVCMNGSCFTIMTDGPSNKAASYKISKIEKGKVTKSIELNAPNFYYEECSCYPDTGIVMCVCRDNWHGSNRPWVSFNQNLDYQIGYICSGVFGDNPRPEDGEGSCNPVTVDGANGVKGFSYKYGNGVWIGRTKSNRLRKGFEMIWDPNGWTNTDSDFSVKQDVVAITDWSGYSGSFVQHPELTGLDCIRPCFWVELVRGLPRENTTIWTSGSSISFCGVNSDTANWSWPDGAELPFTIDK

SEQ ID NO: 17907 - protein, 469 aa, synthetic construct
  REGION 1..469: note = neuraminidase__InfluenzaA__ADA71167
MNPNQKIITIGSVSLTISTICFFMQIAILITTVTLHFKQYEFNSPPNNQVMLCEPTIIERNITEIVYLTNTTIEKEICPKLAEYRNWSKPQCDITGFAPFSKDNSIRLSAGGDIWVTREPYVSCDPDKCYQFALGQGTTLNNVHSNNTVRGRTPYRTLLMNELGVPFHLGTKQVCIAWSSSSCHDGKAWLHVCITGDDKNATASFIYNGRLVDSVVSWSKDILRTQESECVCINGTCTVVMTDGSASGKADTKILFIEEGKIVHTSTLSGSAQHVEECSCYPRYPGVRCVCRDNWKGSNRPIVDINIKDHSIVSSYVCSGLVGDTPRKNDSSSSSHCLNPNNEEGGHGVKGWAFDDGNDVWMGRTISEKSRLGYETFKVIEGWSNPKSKLQINRQVIVDRGNRSGYSGIFSVEGKSCINRCFYVELIRGRKEETEVLWTSNSIVVFCGTSGTYGTGSWPDGANINLMPI

SEQ ID NO: 17908 - protein, 470 aa, synthetic construct
  REGION 1..470: note = neuraminidase__InfluenzaA__ADA71169
MNPNQKIITIGSISIAIGIISLMLQIGNIISIWASHSIQTGSQNHTGICNQRIITYENSTWVNHTYVNINNTNVVAGKDKTPVTLVGNSSLCSISGWAIYTKDNSIRIGSKGDVFVIREPFISCSHLECKTFFLTQGALLNDKHSNGTVKDRSPYRALMSCPLGEAPSPYNSKFESVAWSASACHDGIGWLTIGISGPDNGAVAVLKYKGIITGTIKSWKKQILRTQESECVCINGSCFTIMTDGPSDGAASYKIFKIEKGKVTKSMELNAPNFHYEECSCYPDTGTVMCVCRDNWHGSNRPWVSFNQNLDYQIGYICSGVFGDNPRPKDGEGSCNPVTVDGANGVKGFSYKYGNGVWIGRTKSNRIRKGFEMIWDPNGWTNTDSDFSVKQDIVAITDWSGYSGSFVQHPELTGLDCIRPCFWVELVRGLPRENTTIWTSGSSISFCGVNGDIANWSWPDGAELPFTIDK

SEQ ID NO: 17909 - protein, 470 aa, synthetic construct; identical to SEQ ID NO: 17461
  REGION 1..470: note = neuraminidase__InfluenzaA__ADA71171

SEQ ID NO: 17910 - protein, 469 aa, synthetic construct
  REGION 1..469: note = neuraminidase__InfluenzaA__ADA71173
MNPNQKIITIGSVSLTISTICFFMQIAILITTVTLHFKQYEFNSPPNNQVMLCEPTIIERNITEIVYLTNTTIEKEICPKLAEYRNWSKPQCDITGFAPFSKDNSIRLSAGGDIWVTREPYVSCDPDKCYQFALGQGTTLNNVHSNNTVRARTPYRTLLMNELGVPFHLGTKQVCIAWSSSSCHDGKAWLHVCITGDDKNATASFIYNGRLVDSVVSWSKDILRTQESECVCINGTCTVVMTDGSASGKADTKILFIEEGKIVHTSTLSGSAQHVEECSCYPRYPGVRCVCRDNWKGSNRPIVDINIKDHSIVSSYVCSGLVGDTPRKNDSSSSSHCLNPNNEEGGHGVKGWAFDDGNDVWMGRTISEKSRLGYETFKVIEGWSNPKSKLQINRQVIVDRGNRSGYSGIFSVEGKSCINRCFYVELIRGRKEETEVLWTSNSIVVFCGTSGTYGTGSWPDGANINLMPI

SEQ ID NO: 17911 - protein, 470 aa, synthetic construct
  REGION 1..470: note = neuraminidase__InfluenzaA__ADA71175
MNPNQKIITIGSISIAIGIISLMLQIGNIISIWASHSIQIGSQNNTGICNQRIITYENSTWVNHTYVNINNTKVVAGEDKTSVTLAGNSSLCSISGWAINTKDNSIRIGSKGDVFVIREPFISCSHLECRTFFLTQGALLNDKHSNGTVKDRSPYRALMSCPLGEAPSPYNSKFESVAWSASACHDGMGWLTIGISGPDNGAVAVLKYNGIITGTIKSWKKQILRTQESECVCMNGSCFTIMTDGPSNKAASYKIFKIEKGKVTKSIELNAPNFYYEECSCYPDTGIVMCVCRDNWHGSNRPWVSFNQNLDYQIGYICSGVFGDNPRPEDGEGSCNPVTVDGANGVKGFSYKYGNGVWIGRTKSNRLRKGFEMIWDPNGWTNTDSDFSVKQDVVAITDWSGYSGSFVQHPELTGLDCIRPCFWVELVRGLPRENTTIWTSGSSISFCGVNSDTANWSWPDGAELPFTIDK

SEQ ID NO: 17912 - protein, 470 aa, synthetic construct; identical to SEQ ID NO: 17461
  REGION 1..470: note = neuraminidase__InfluenzaA__ADA71177

SEQ ID NO: 17913 - protein, 469 aa, synthetic construct
  REGION 1..469: note = neuraminidase__InfluenzaA__ADA71193
MNPNQKIITIGSVCMTIGMANLILQIGNIISIWISHSIQLGNQNQIETCNQSVITYENNTWVNQTYVNISNTNFAAGQSVVSVKLAGNSSLCPVSGWAIYSKDNSIRIGSKGDVFVIREPFISCSPLECRTFFLTQGALLNDKHSNGTIKDRSPYRTLMSCPIGEVPSPYNSRFESVAWSASACHDGINWLTIGISGPDNGAVAVLKYNGIITDTIKSWRNNILRTQESECACVNGSCFTVMTDGPSDGQASYKIFRIEKGKVVKSVEMNAPNYHYEECSCYPDSSEITCVCRDNWHGSNRPWVSFNQNLEYQIGYICSGIFGDNPRPNDKTGSCGPVSSNGANGVKGFSFKYGNGVWIGRTKSISSRNGFEMIWDPNGWTGTDNNFSIKQDIVGINEWSGYSGSFVQHPELTGLDCIRPCFWVELIRGRPKENTIWTSGSSISFCGVNSDTVGWSWPDGAELPFTIDK

SEQ ID NO: 17914 - protein, 469 aa, synthetic construct
  REGION 1..469: note = neuraminidase__InfluenzaA__ADA79589
MNPNQKIITIGSVCMTIGMANLILQIGNIISIWISHSIQLGNQNQIETCNQSVITYENNTWVNQTYVNISNTNFAAGQSVVSVKLAGSSSLCPVSGWAIYSKDNSIRIGSKGDVFVIREPFISCSPLECRTFFLTQGALLNDKHSNGTIKDRSPYRTLMSCPIGEVPSPYKSRFESVAWSASACHDGINWLTIGISGPDNGAVAVLKYNGIITDTIKSWRNNILRTQESECACVNGSCFTVMTDGPSDGQASYKIFRIEKGKIVKSVEMNAPNYHYEECSCYPDSSEITCVCRDNWHGSNRPWVSFNQNLEYQIGYICSGIFGDNPRPNDKTGSCGPVSSNGANGVKGFSFKYGNGVWIGRTKSISSRNGFEMIWDPNGWTGTDNNFSIKQDIVGINEWSGYSGSFVQHPELTGLDCIRPCFWVELIRGRPKENTIWTSGSSISFCGVNSDTVGWSWPDGAELPFTIDK

SEQ ID NO: 17915 - protein, 469 aa, synthetic construct
  REGION 1..469: note = neuraminidase__InfluenzaA__ADA79599
MNPNQKIITIGSVCMTIGMANLILQIGNIISIWISHSIQLGNQNQIETCNQSVITYENNTWVNQTYVNISNTNFAAGQSVVSVKLAGNSSLCPVSGWAIYSKDNSIRIGSKGDVFVIREPFISCSPLECRTFFLTQGALLNDKHSNGTIKDRSPYRTLMSCPIGEVPSPYNSRFESVAWSASACHDGINWLTIGISGPDNGAVAVLKYNGIITDTIKSWRNNILRTQESECACVNGSCFTVMTDGPSDGQASYKIFRIEKGKIVKSVEMNAPNYHYEECSCYPDSSEITCVCRDNWHGSNRPWVSFNQNLEYQIGYICSGIFGDNPRPNDKTGSCGPVSSNGANGVKGFSFKYGNGVWIGRTKSISSRNGFEMIWDPNGWTGTDNKFSIKQDIVGINEWSGYSGSFVQHPELTGLDCIRPCFWVELIRGRPKENTIWTSGSSISFCGVNSDTVGWSWPDGAELPFTIDK

SEQ ID NO: 17916 - protein, 469 aa, synthetic construct; identical to SEQ ID NO: 17915
  REGION 1..469: note = neuraminidase__InfluenzaA__ADA79609

SEQ ID NO: 17917 - protein, 469 aa, synthetic construct
  REGION 1..469: note = neuraminidase__InfluenzaA__ADA79619
MNPNQKIITIGSICMTIGMANLILQIGNIISIWISHSIQLGNQNQIETCNQSVITYENNTWVNQTYVNISNTNFAAGQSVASVKLAGNSSLCPVSGWAIYSKDNSIRIGSKGDVFVIREPFISCSPLECRTFFLTQGALLNDKHSNGTIKDRSPYRTLMSCPIGEVPSPYNSRFESVAWSASACHDGINWLTIGISGPDNGAVAVLKYNGIITDTIKSWRNNILRTQESECACVNGSCFTVMTDGPSDGQASYKIFRIEKGKIVKSVEMNAPNYHYEECSCYPDSSEITCVCRDNWHGSNRPWVSFNQNLEYQIGYICSGIFGDNPRPNDKTGSCGPVSSNGANGVKGFSFKYGNGVWIGRTKSISSRNGFEMIWDPNGWTGTDNNFSIKQDIVGINEWSGYSGSFVQHPELTGLDCIRPCFWVELIRGRPKENTIWTSGSSISFCGVNSDTVGWSWPDGAELPFTIDK

SEQ ID NO: 17918 - protein, 469 aa, synthetic construct; identical to SEQ ID NO: 16738
  REGION 1..469: note = neuraminidase__InfluenzaA__ADA81211

SEQ ID NO: 17919 - protein, 469 aa, synthetic construct
  REGION 1..469: note = neuraminidase__InfluenzaA__ADA83035
MNPNQKIITIGSVCMTIGMANLILQIGNIISIWISHSIQLGNQNQIETCNQSVITYENNTWVNQTYVNISNTNFAAGQSVVSVKLAGNSSLCPVSGWAIYSKDNSIRIGSKGDVFVIREPFISCSPLECSTFFLTQGALLNDKHSNGTIKDRSPYRTLMSCPIGEVPSPYNSRFESVAWSASACHDGINWLTIGISGPDNGAVAVLKYNGIITDTIKSWRNNILRTQESECACVNGSCFTVMTDGPSDGQASYKIFRIEKGKIVKSVEMNAPNYHYEECSCYPDSSEITCVCRDNWHGSNRPWVSFNQNLEYQIGYICSGIFGDNPRPNDKTGSCGPVSSNGANGVKGFSFKYGNGVWIGRTKSISSRNGFEMIWDPNGWTGTDNNFSIKQDIVGINEWSGYSGSFVQHPELTGLDCIRPCFWVELIRGRPKENTIWTSGSSISFCGVNSDTVGWSWPDGAELPFTIDK

SEQ ID NO: 17920 - protein, 469 aa, synthetic construct
  REGION 1..469: note = neuraminidase__InfluenzaA__ADA83037
MNPNQKIITIGSVCMTIGMANLILQIGNIISIWISHSIQLGNQDQIETCNQSVITYENNTWVNQTYVNISNTNFAAGQSVVSVKLAGNSSLCPVSGWAIYSKDNSIRIGSKGDVFVIREPFISCSPLECRTFFLTQGALLNDKHSNGTIKDRSPYRTLMSCPIGEVPSPYNSRFESVAWSASACHDGINWLTIGISGPDNGAVAVLKYNGIITDTIKSWRNNILRTQESECACVNGSCFTVMTDGPSDGQASYKIFRIEKGKIVKSVEMNAPNYHYEECSCYPDSSEITCVCRDNWHGSNRPWVSFNQNLEYQIGYICSGIFGDNPRPNDKTGSCGPVSSNGANGVKGFSFKYGNGVWIGRTKSISSRNGFEMIWDPNGWTGTDNKFSIKQDIVGINEWSGYSGSFVQHPELTGLDCIRPCFWVELIRGRPKENTIWTSGSSISFCGVNSDTVGWSWPDGAELPFTIDK

SEQ ID NO: 17921 - protein, 469 aa, synthetic construct; identical to SEQ ID NO: 16738
  REGION 1..469: note = neuraminidase__InfluenzaA__ADA83588

SEQ ID NO: 17922 - protein, 469 aa, synthetic construct; identical to SEQ ID NO: 16738
  REGION 1..469: note = neuraminidase__InfluenzaA__ADA83592

SEQ ID NO: 17923 - protein, 469 aa, synthetic construct; identical to SEQ ID NO: 16738
  REGION 1..469: note = neuraminidase__InfluenzaA__ADA83596

SEQ ID NO: 17924 - protein, 469 aa, synthetic construct; identical to SEQ ID NO: 16738
  REGION 1..469: note = neuraminidase__InfluenzaA__ADA83600

SEQ ID NO: 17925 - protein, 469 aa, synthetic construct; identical to SEQ ID NO: 16738
  REGION 1..469: note = neuraminidase__InfluenzaA__ADA83604

SEQ ID NO: 17926 - protein, 469 aa, synthetic construct; identical to SEQ ID NO: 16738
  REGION 1..469: note = neuraminidase__InfluenzaA__ADA83608

SEQ ID NO: 17927 - protein, 469 aa, synthetic construct; identical to SEQ ID NO: 16738
  REGION 1..469: note = neuraminidase__InfluenzaA__ADA83612

SEQ ID NO: 17928 - protein, 469 aa, synthetic construct; identical to SEQ ID NO: 17092
  REGION 1..469: note = neuraminidase__InfluenzaA__ADA83616

SEQ ID NO: 17929 - protein, 469 aa, synthetic construct; identical to SEQ ID NO: 16738
  REGION 1..469: note = neuraminidase__InfluenzaA__ADA83624

SEQ ID NO: 17930 - protein, 469 aa, synthetic construct; identical to SEQ ID NO: 16738
  REGION 1..469: note = neuraminidase__InfluenzaA__ADA83630

SEQ ID NO: 17931 - protein, 469 aa, synthetic construct; identical to SEQ ID NO: 16738
  REGION 1..469: note = neuraminidase__InfluenzaA__ADA83634

SEQ ID NO: 17932 - protein, 469 aa, synthetic construct; identical to SEQ ID NO: 16738
  REGION 1..469: note = neuraminidase__InfluenzaA__ADA83638

SEQ ID NO: 17933 - protein, 469 aa, synthetic construct; identical to SEQ ID NO: 16738
  REGION 1..469: note = neuraminidase__InfluenzaA__ADA83642

SEQ ID NO: 17934 - protein, 469 aa, synthetic construct; identical to SEQ ID NO: 16738
  REGION 1..469: note = neuraminidase__InfluenzaA__ADA83649

SEQ ID NO: 17935 - protein, 469 aa, synthetic construct; identical to SEQ ID NO: 16738
  REGION 1..469: note = neuraminidase__InfluenzaA__ADA83653

SEQ ID NO: 17936 - protein, 469 aa, synthetic construct; identical to SEQ ID NO: 16738
  REGION 1..469: note = neuraminidase__InfluenzaA__ADA83657

SEQ ID NO: 17937 - protein, 469 aa, synthetic construct; identical to SEQ ID NO: 16738
  REGION 1..469: note = neuraminidase__InfluenzaA__ADA83661

SEQ ID NO: 17938 - protein, 469 aa, synthetic construct; identical to SEQ ID NO: 16738
  REGION 1..469: note = neuraminidase__InfluenzaA__ADA83669

SEQ ID NO: 17939 - protein, 469 aa, synthetic construct; identical to SEQ ID NO: 16738
  REGION 1..469: note = neuraminidase__InfluenzaA__ADA83673

SEQ ID NO: 17940 - protein, 469 aa, synthetic construct; identical to SEQ ID NO: 16738
  REGION 1..469: note = neuraminidase__InfluenzaA__ADA83677

SEQ ID NO: 17941 - protein, 469 aa, synthetic construct; identical to SEQ ID NO: 16738
  REGION 1..469: note = neuraminidase__InfluenzaA__ADA83681

SEQ ID NO: 17942 - protein, 469 aa, synthetic construct; identical to SEQ ID NO: 16738
  REGION 1..469: note = neuraminidase__InfluenzaA__ADA83685

SEQ ID NO: 17943 - protein, 469 aa, synthetic construct; identical to SEQ ID NO: 16738
  REGION 1..469: note = neuraminidase__InfluenzaA__ADA86069

SEQ ID NO: 17944 - protein, 469 aa, synthetic construct; identical to SEQ ID NO: 16738
  REGION 1..469: note = neuraminidase__InfluenzaA__ADB27973

SEQ ID NO: 17945 - protein, 469 aa, synthetic construct; identical to SEQ ID NO: 16738
  REGION 1..469: note = neuraminidase__InfluenzaA__ADB27983

SEQ ID NO: 17946 - protein, 469 aa, synthetic construct
  REGION 1..469: note = neuraminidase__InfluenzaA__ADB66693
MNPNQKIITIGSVCMTIGMANLILQIGNIISIWIIHSIQLGNQNQIETCNQSVITYENNTWVNQTYVNISNTNFAAGQSVVSVKLAGNSSLCPVSGWAIYSKDNSIRIGSKGDVFVIREPFISCSPLECRTFFLTQGALLNDKHSNGTIKDRSPYRTLMSCPIGEVPSPYNSRFESVAWSASACHDGINWLTIGISGPDNGAVAVLKYNGIITDTIKSWRNNILRTQESECACVNGSCFTVMTDGPSDGQASYKIFRIEKGKIVKSVEMNAPNYHYEECSCYPDSSEITCVCRDNWHGSNRPWVSFNQNLEYQIGYICSGIFGDNPRPNDKTGSCGPVSSNGANGVKGFSFKYGNGVWIGRTKSISSRNGFEMIWDPNGWTGTDNNFSIKQDIVGINEWSGYSGSFVQHPELTGLDCIRPCFWVELIRGRPKENTIWTSGSSISFCGVNSDTVGWSWPDGAELPFTIDK

SEQ ID NO: 17947 - protein, 469 aa, synthetic construct; identical to SEQ ID NO: 16738
  REGION 1..469: note = neuraminidase__InfluenzaA__ADB66695

SEQ ID NO: 17948 - protein, 469 aa, synthetic construct; identical to SEQ ID NO: 16738
  REGION 1..469: note = neuraminidase__InfluenzaA__ADB66696

SEQ ID NO: 17949 - protein, 469 aa, synthetic construct
  REGION 1..469: note = neuraminidase__InfluenzaA__ADB66697
MNPNQKIITIGSVCITIGMANLILQIGNIISIWISHSIQLGNQNQIETCNQSVITYENNTWVNQTYVNISNTNFAAGQSVVSVKLAGNSSLCPVSGWAIYSKDNSIRIGSKGDVFVIREPFISCSPLECRTFFLTQGALLNDKHSNGTIKDRSPYRTLMSCPIGEVPSPYNSRFESVAWSASACHDGINWLTIGISGPDNGAVAVLKYNGIITDTIKSWRNNILRTQESECACVNGSCFTVMTDGPSDEQASYKIFRIEKGKIVKSVEMNAPNYHYEECSCYPDSSEITCVCRDNWHGSNRPWVSFNQNLEYRIGYICSGIFGDNPRPNDKTGSCGPVSSNGANGVKGFSFKYGNGVWIGRTKSISSRNGFEMIWDPNGWTGTDNNFSIKQDIVGIHEWSGYSGSFVQHPELTGLDCIRPCFWVELIRGRPKENTIWTSGSSISFCGVNSDTVGWSWPDGAELPFTIDK

SEQ ID NO: 17950 - protein, 469 aa, synthetic construct; identical to SEQ ID NO: 17913
  REGION 1..469: note = neuraminidase__InfluenzaA__ADB81401

SEQ ID NO: 17951 - protein, 469 aa, synthetic construct; identical to SEQ ID NO: 17756
  REGION 1..469: note = neuraminidase__InfluenzaA__ADB81421

SEQ ID NO: 17952 - protein, 469 aa, synthetic construct; identical to SEQ ID NO: 17092
  REGION 1..469: note = neuraminidase__InfluenzaA__ADB81431

SEQ ID NO: 17953 - protein, 469 aa, synthetic construct; identical to SEQ ID NO: 16738
  REGION 1..469: note = neuraminidase__InfluenzaA__ADB81441

SEQ ID NO: 17954 - protein, 469 aa, synthetic construct
  REGION 1..469: note = neuraminidase__InfluenzaA__ADB81451
MNPNQKIITIGSVCMTIGMANLILQIGNIISIWISHSIQLGNQNQIETCNQSVITYENNTWVNQTYVNISNTNFAAGQSVVSVKLAGNSSLCPVSGWAIYSKDNSIRIGSKGDVFVIREPFISCSPLECRTFFLTQGALLNDKHSNGTIKDRSPYRTLMSCPIGEVPSPYNSRFESVAWSASACHDGINWLTIGISGPDNGAVAVLKYNGIITDTIKSWRNNILRTQESECVCVNGSCFTVMTDGPSDGQASYKIFRIEKGKIVKSVEMNAPNYHYEECSCYPDSSEITCVCRDNWHGSNRPWVSFNQNLEYQIGYICSGIFGDNPRPNDKTGSCGPVSSNGANGVKGFSFKYGNGVWIGRTKSISSRNGFEMIWDPNGWTGTDNKFSIKQDIVGINEWSGYSGSFVQHPELTGLDCIRPCFWVELIRGRPKENTIWTSGSSISFCGVNSDTVGWSWPDGAELPFTIDK

SEQ ID NO: 17955 - protein, 469 aa, synthetic construct; identical to SEQ ID NO: 17915
  REGION 1..469: note = neuraminidase__InfluenzaA__ADB81461

SEQ ID NO: 17956 - protein, 469 aa, synthetic construct; identical to SEQ ID NO: 17915
  REGION 1..469: note = neuraminidase__InfluenzaA__ADB82942

SEQ ID NO: 17957 - protein, 469 aa, synthetic construct; identical to SEQ ID NO: 16893
  REGION 1..469: note = neuraminidase__InfluenzaA__ADB82945

SEQ ID NO: 17958 - protein, 469 aa, synthetic construct; identical to SEQ ID NO: 16738
  REGION 1..469: note = neuraminidase__InfluenzaA__ADB89132

SEQ ID NO: 17959 - protein, 469 aa, synthetic construct; identical to SEQ ID NO: 17321
  REGION 1..469: note = neuraminidase__InfluenzaA__ADB89142

SEQ ID NO: 17960 - protein, 469 aa, synthetic construct; identical to SEQ ID NO: 16738
  REGION 1..469: note = neuraminidase__InfluenzaA__ADB89224

SEQ ID NO: 17961 - protein, 469 aa, synthetic construct
  REGION 1..469: note = neuraminidase__InfluenzaA__ADB89234
MNPNQKIITIGSVCMTIGMANLILQIGNIISIWISHSIQLGNQNQIETCNQSVITYENNTWVNQTYVNISNTNFAAGQSVVSVKLVGNSSLCPVSGWAIYSKDNSVRIGSKGDVFVIREPFISCSPLECRTFFLTQGALLNDKHSNGTIKDRSPYRTLMSCPIGEVPSPYNSRFESVAWSASACHDGINWLTIGISGPDNGAVAVLKYNGIITDTIKSWRNNILRTQESECACVNGSCFTVMTDGPSNGQASYKIFRIEKGKIVKSVEMNAPNYHYEECSCYPDSSEITCVCRDNWHGSNRPWVSFNQNLEYQIGYICSGIFGDNPRPNDKTGSCGPVSSNGANGVKGFSFKYGNGVWIGRTKSISSRNGFEMIWDPNGWTGTDNNFSIKQDIVGINEWSGYSGSFVQHPELTGLDCIRPCFWVELIRGRPKENTIWTSGSSISFCGVNSDTVGWSWPDGAELPFTIDK

SEQ ID NO: 17962 - protein, 469 aa, synthetic construct; identical to SEQ ID NO: 16728
  REGION 1..469: note = neuraminidase__InfluenzaA__ADB89244

SEQ ID NO: 17963 - protein, 469 aa, synthetic construct; identical to SEQ ID NO: 16738
  REGION 1..469: note = neuraminidase__InfluenzaA__ADB89264

SEQ ID NO: 17964 - protein, 469 aa, synthetic construct; identical to SEQ ID NO: 17708
  REGION 1..469: note = neuraminidase__InfluenzaA__ADB89274

SEQ ID NO: 17965 - protein, 469 aa, synthetic construct; identical to SEQ ID NO: 16893
  REGION 1..469: note = neuraminidase__InfluenzaA__ADB89284

SEQ ID NO: 17966 - protein, 469 aa, synthetic construct; identical to SEQ ID NO: 16738
  REGION 1..469: note = neuraminidase__InfluenzaA__ADB89294

SEQ ID NO: 17967 - protein, 469 aa, synthetic construct; identical to SEQ ID NO: 16738
  REGION 1..469: note = neuraminidase__InfluenzaA__ADB89304

SEQ ID NO: 17968 - protein, 469 aa, synthetic construct; identical to SEQ ID NO: 16738
  REGION 1..469: note = neuraminidase__InfluenzaA__ADB89314

SEQ ID NO: 17969 - protein, 469 aa, synthetic construct; identical to SEQ ID NO: 16738
  REGION 1..469: note = neuraminidase__InfluenzaA__ADB89324

SEQ ID NO: 17970 - protein, 469 aa, synthetic construct; identical to SEQ ID NO: 16738
  REGION 1..469: note = neuraminidase__InfluenzaA__ADB89334

SEQ ID NO: 17971 - protein, 469 aa, synthetic construct; identical to SEQ ID NO: 16738
  REGION 1..469: note = neuraminidase__InfluenzaA__ADB89344

SEQ ID NO: 17972 - protein, 469 aa, synthetic construct; identical to SEQ ID NO: 16738
  REGION 1..469: note = neuraminidase__InfluenzaA__ADB89364

SEQ ID NO: 17973 - protein, 469 aa, synthetic construct; identical to SEQ ID NO: 16738
  REGION 1..469: note = neuraminidase__InfluenzaA__ADB89374

SEQ ID NO: 17974 - protein, 469 aa, synthetic construct; identical to SEQ ID NO: 16738
  REGION 1..469: note = neuraminidase__InfluenzaA__ADB89384

SEQ ID NO: 17975 - protein, 469 aa, synthetic construct; identical to SEQ ID NO: 16738
  REGION 1..469: note = neuraminidase__InfluenzaA__ADB89394

SEQ ID NO: 17976 - protein, 469 aa, synthetic construct
  REGION 1..469: note = neuraminidase__InfluenzaA__ADB89404
MNPNQKIITIGSVCMTIGMANLILQIGNIISIWISHSIQLGNQNQIETCNQSVITYENNTWVNQTYVNISNTNFAAGQSVVSVKLAGNSSLCPVSGWAIYSKDNSVRIGSKGDVFVIREPFISCSPLECRTFFLTQGALLNDKHSNGTIKDRSPYRTLMSCPIGEVPSPYNSRFESVAWSASACHDGINWLTIGISGPDNGAVAVLKYNGIITDTIKSWRNSILRTQESECACVNGSCFTVMTDGPSNGQASYKIFRIEKGKIVKSVEMNAPNYHYEECSCYPDSSEITCVCRDNWHGSNRPWVSFNQNLEYQIGYICSGIFGDNPRPNDKTGSCGPVSSNGANGVKGFSFKYGNGVWIGRTKSISSRNGFEMIWDPNGWTGTDNNFSIKQDIVGINEWSGYSGSFVQHPELTGLDCIRPCFWVELIRGRPKENTIWTSGSSISFCGVNSDTVGWSWPDGAELPFTIDK

SEQ ID NO: 17977 - protein, 469 aa, synthetic construct; identical to SEQ ID NO: 16738
  REGION 1..469: note = neuraminidase__InfluenzaA__ADB89414

SEQ ID NO: 17978 - protein, 469 aa, synthetic construct; identical to SEQ ID NO: 16738
  REGION 1..469: note = neuraminidase__InfluenzaA__ADB89424

SEQ ID NO: 17979 - protein, 469 aa, synthetic construct; identical to SEQ ID NO: 16738
  REGION 1..469: note = neuraminidase__InfluenzaA__ADB89434

SEQ ID NO: 17980 - protein, 469 aa, synthetic construct; identical to SEQ ID NO: 16738
  REGION 1..469: note = neuraminidase__InfluenzaA__ADB89444

SEQ ID NO: 17981 - protein, 469 aa, synthetic construct
  REGION 1..469: note = neuraminidase__InfluenzaA__ADB89454
MNPNQKIITIGSVCMTIGMANLILQIGNIISIWISHSIQLGNQNQIETCNQSVITYENNTWVNQTYVNISNTNFAAGQSVVSVKLAGNSSLCPVSGWAIYSKDNSIRIGSKGDVFVIREPFISCSPLECRTFFLTQGALLNDKHSNGTIKDRSPYRTLMSCPIGEVPSPYNSRFESVAWSASACHDGINWLTIGISGPDNGAVAVLKYNGIITDTIKSWRNNILRTQESECACVNGSCFTVMTDGPNDGQASYKIFRIEKGKIVKSVEMNAPNYHYEECSCYPDSSEITCVCRDNWHGSNRPWVSFNQNLEYQIGYICSGIFGDNPRPNDKTGSCGPVSSNGANGVKGFSFKYGNGVWIGRTKSISSRNGFEMIWDPNGWTGTDNNFSIKQDIVGINEWSGYSGSFVQHPELTGLDCIRPCFWVELIRGRPKENTIWTSGSSISFCGVNSDTVGWSWPDGAELPFTIDK

SEQ ID NO: 17982 - protein, 469 aa, synthetic construct; identical to SEQ ID NO: 16738
  REGION 1..469: note = neuraminidase__InfluenzaA__ADB89464

SEQ ID NO: 17983 - protein, 469 aa, synthetic construct; identical to SEQ ID NO: 16738
  REGION 1..469: note = neuraminidase__InfluenzaA__ADB89484

SEQ ID NO: 17984 - protein, 469 aa, synthetic construct; identical to SEQ ID NO: 16738
  REGION 1..469: note = neuraminidase__InfluenzaA__ADB89494

SEQ ID NO: 17985 - protein, 469 aa, synthetic construct; identical to SEQ ID NO: 16728
  REGION 1..469: note = neuraminidase__InfluenzaA__ADB89504

SEQ ID NO: 17986 - protein, 469 aa, synthetic construct; identical to SEQ ID NO: 16738
  REGION 1..469: note = neuraminidase__InfluenzaA__ADB89514

SEQ ID NO: 17987 - protein, 469 aa, synthetic construct; identical to SEQ ID NO: 16738
  REGION 1..469: note = neuraminidase__InfluenzaA__ADB89524

SEQ ID NO: 17988 - protein, 469 aa, synthetic construct
  REGION 1..469: note = neuraminidase__InfluenzaA__ADB89544
MNPNQKIITIGSVCMTIGMANLILQIGNIISIWISHSIQLGNQNQIETCNQSVITYENNTWVNQTYVNISNTNFAAGQSVVSVKLAGNSSLCPVSGWAIYSKDNSIRIGSKGDVFVIREPFISCSLLECRTFFLTQGALLNDKHSNGTIKDRSPYRTLMSCPIGEVPSPYNSRFESVAWSASACHDGINWLTIGISGPDNGAVAVLKYNGIITDTIKSWRNNILRTQESECACVNGSCFTVMTDGPSDGQASYKIFRIEKGKIVKSVEMNAPNYHYEECSCYPDSSEITCVCRDNWHGSNRPWVSFNQNLEYQIGYICSGIFGDNPRPNDKTGSCGPVSSNGANGVKGFSFKYGNGVWIGRTKSISSRNGFEMIWDPNGWTGTDNNFSIKQDIVGINEWSGYSGSFVQHPELTGLDCIRPCFWVELIRGRPKENTIWTSGSSISFCGVNSDTVGWSWPDGAELPFTIDK

SEQ ID NO: 17989 - protein, 469 aa, synthetic construct; identical to SEQ ID NO: 16738
  REGION 1..469: note = neuraminidase__InfluenzaA__ADB89564

SEQ ID NO: 17990 - protein, 469 aa, synthetic construct; identical to SEQ ID NO: 16738
  REGION 1..469: note = neuraminidase__InfluenzaA__ADB89574

SEQ ID NO: 17991 - protein, 469 aa, synthetic construct; identical to SEQ ID NO: 16738
  REGION 1..469: note = neuraminidase__InfluenzaA__ADB89594

SEQ ID NO: 17992 - protein, 469 aa, synthetic construct; identical to SEQ ID NO: 16738
  REGION 1..469: note = neuraminidase__InfluenzaA__ADB89604

SEQ ID NO: 17993 - protein, 469 aa, synthetic construct
  REGION 1..469: note = neuraminidase__InfluenzaA__ADB89614
MNPNQKIITIGSVCMTIGMANLILQIGNIISIWISHSIQLGNQNQIETCNQSVITYENNTWVNQTYVNISNTNFAAGQSVVSVKLAGNSSLCPVSGWAIYSKDNSIRIGSKGDVFVIREPFISCSPLECRTFFLTQGALLNDKHSNGTIKDRSPYRTLMSCPIGEVPSPYNSRFESVAWSASACHDGINWLTIGISGPDNGAVAVLKYNGIITDTIKSWRNNILRTQESECACVNGSCFTVMTDGPSDGQASYKIFRIEKGKIVKSVEMNAPNYHYEECSCYPDSSEITCVCRDNWHGSNRPWVSFNQNLEYQIGYICSGIFGDNPRPNDKTGSCGPVSSNGANGVKGFSFKYGNGIWIGRTKSISSRNGFEMIWDPNGWTGTDNNFSIKQDIVGINEWSGYSGSFVQHPELTGLDCIRPCFWVELIRGRPKENTIWTSGSSISFCGVNSDTVGWSWPDGAELPFTIDK

SEQ ID NO: 17994 - protein, 469 aa, synthetic construct; identical to SEQ ID NO: 16738
  REGION 1..469: note = neuraminidase__InfluenzaA__ADB89624

SEQ ID NO: 17995 - protein, 469 aa, synthetic construct; identical to SEQ ID NO: 16738
  REGION 1..469: note = neuraminidase__InfluenzaA__ADB89634

SEQ ID NO: 17996 - protein, 469 aa, synthetic construct; identical to SEQ ID NO: 16738
  REGION 1..469: note = neuraminidase__InfluenzaA__ADB89644

SEQ ID NO: 17997 - protein, 469 aa, synthetic construct; identical to SEQ ID NO: 17756
  REGION 1..469: note = neuraminidase__InfluenzaA__ADB89664

SEQ ID NO: 17998 - protein, 469 aa, synthetic construct; identical to SEQ ID NO: 16738
  REGION 1..469: note = neuraminidase__InfluenzaA__ADB89674

SEQ ID NO: 17999 - protein, 469 aa, synthetic construct; identical to SEQ ID NO: 16738
  REGION 1..469: note = neuraminidase__InfluenzaA__ADB89684

SEQ ID NO: 18000 - protein, 469 aa, synthetic construct
  REGION 1..469: note = neuraminidase__InfluenzaA__ADB89694
MNPNQKIITIGSVCMTIGMANLILQIGNIISIWISHSIQLGNQNQIETCNQSVITYENNTWVNQTYVNISNTNFAAGQSVVSVKLAGNSSLCPVSGWAIYSKDNSIRIGSKGDVFVIREPFISCSPLECRTFFLTQGALLNDKHSNGTIKDRSPYRTLMSCPIGEVPSPYNSRFESVAWSASACHDGINWLTIGISGPDNGAVAVLKYNGIITDTIKSWRNNILRTQESECACVNGSCFTVMTDGPSDGQASYKIFRIEKGKIVKSVEMNAPNYHYEECSCYPDSSEITCVCRDNWHGSNRPWVSFNQNLEYQIGYICSGIFGDNPRPNDKTGSCGPVSSNGANGVKGFSFKYGNGVWIGRTKSISSRNGFEMIWDPNGWTGTDNNFTIKQDIVGINEWSGYSGSFVQHPELTGLDCIRPCFWVELIRGRPKENTIWTSGSSISFCGVNSDTVGWSWPDGAELPFTIDK

SEQ ID NO: 18001 - protein, 469 aa, synthetic construct; identical to SEQ ID NO: 16738
  REGION 1..469: note = neuraminidase__InfluenzaA__ADB89704

SEQ ID NO: 18002 - protein, 469 aa, synthetic construct; identical to SEQ ID NO: 16738
  REGION 1..469: note = neuraminidase__InfluenzaA__ADB89714

SEQ ID NO: 18003 - protein, 469 aa, synthetic construct; identical to SEQ ID NO: 16599
  REGION 1..469: note = neuraminidase__InfluenzaA__ADB89724

SEQ ID NO: 18004 - protein, 469 aa, synthetic construct; identical to SEQ ID NO: 16599
  REGION 1..469: note = neuraminidase__InfluenzaA__ADB89735

SEQ ID NO: 18005 - protein, 469 aa, synthetic construct; identical to SEQ ID NO: 16738
  REGION 1..469: note = neuraminidase__InfluenzaA__ADB90357

SEQ ID NO: 18006 - protein, 469 aa, synthetic construct; identical to SEQ ID NO: 16738
  REGION 1..469: note = neuraminidase__InfluenzaA__ADB90358

SEQ ID NO: 18007 - protein, 469 aa, synthetic construct
  REGION 1..469: note = neuraminidase__InfluenzaA__ADB90359
MNPNQKIITIGSVCMTIGMANLILQIGNIISIWISHSIQLGNQNQIETCNQSIITYENNTWVNQTYVNISNTNFAAGQSVVSVKLAGNSSLCPVSGWAIYSKDNSIRIGSKGDVFVIREPFISCSPLECRTFFLTQGALLNDKHSNGTIKDRSPYRTLMSCPIGEVPSPYNSRFESVAWSASACHDGINWLTIGISGPDNGAVAVLKYNGIITDTIKSWRNNILRTQESECACVNGSCFTVMTDGPSDGQASYKIFRIEKGKIVKSVEMNAPNYHYEECSCYPDSSEITCVCRDNWHGSNRPWVSFNQNLEYRIGYICSGIFGDNPRPNDKTGSCGPVSSNGANGVKGFSFKYGNGVWIGRTKSISSRNGFEMIWDPNGWTGTDNNFSIKQDIVGTNEWSGYSGSFVQHPELTGLDCIRPCFWVELIRGRPKENTIWTSGSSISFCGVNSDTVGWSWPDGAELPFTIDK

SEQ ID NO: 18008 - protein, 469 aa, synthetic construct; identical to SEQ ID NO: 16738
  REGION 1..469: note = neuraminidase__InfluenzaA__ADB90363

SEQ ID NO: 18009 - protein, 469 aa, synthetic construct; identical to SEQ ID NO: 17915
  REGION 1..469: note = neuraminidase__InfluenzaA__ADB90373

SEQ ID NO: 18010 - protein, 469 aa, synthetic construct; identical to SEQ ID NO: 16738
  REGION 1..469: note = neuraminidase__InfluenzaA__ADB98137

SEQ ID NO: 18011 - protein, 469 aa, synthetic construct; identical to SEQ ID NO: 17092
  REGION 1..469: note = neuraminidase__InfluenzaA__ADB98138

SEQ ID NO: 18012 - protein, 469 aa, synthetic construct; identical to SEQ ID NO: 16738
  REGION 1..469: note = neuraminidase__InfluenzaA__ADB98139

SEQ ID NO: 18013 - protein, 469 aa, synthetic construct; identical to SEQ ID NO: 17092
  REGION 1..469: note = neuraminidase__InfluenzaA__ADB98140

SEQ ID NO: 18014 - protein, 469 aa, synthetic construct; identical to SEQ ID NO: 17092
  REGION 1..469: note = neuraminidase__InfluenzaA__ADB98141

SEQ ID NO: 18015 - protein, 469 aa, synthetic construct; identical to SEQ ID NO: 16738
  REGION 1..469: note = neuraminidase__InfluenzaA__ADC32391

SEQ ID NO: 18016 - protein, 469 aa, synthetic construct; identical to SEQ ID NO: 16738
  REGION 1..469: note = neuraminidase__InfluenzaA__ADC32392

SEQ ID NO: 18017 - protein, 469 aa, synthetic construct; identical to SEQ ID NO: 16738
  REGION 1..469: note = neuraminidase__InfluenzaA__ADC32393

SEQ ID NO: 18018 - protein, 469 aa, synthetic construct; identical to SEQ ID NO: 16738
  REGION 1..469: note = neuraminidase__InfluenzaA__ADC32394

SEQ ID NO: 18019 - protein, 469 aa, synthetic construct; identical to SEQ ID NO: 16738
  REGION 1..469: note = neuraminidase__InfluenzaA__ADC32395

SEQ ID NO: 18020 - protein, 469 aa, synthetic construct; identical to SEQ ID NO: 16738
  REGION 1..469: note = neuraminidase__InfluenzaA__ADC32396

SEQ ID NO: 18021 - protein, 469 aa, synthetic construct; identical to SEQ ID NO: 16738
  REGION 1..469: note = neuraminidase__InfluenzaA__ADC32397

SEQ ID NO: 18022 - protein, 469 aa, synthetic construct; identical to SEQ ID NO: 16738
  REGION 1..469: note = neuraminidase__InfluenzaA__ADC32398

SEQ ID NO: 18023 - protein, 469 aa, synthetic construct; identical to SEQ ID NO: 16738
  REGION 1..469: note = neuraminidase__InfluenzaA__ADC32399

SEQ ID NO: 18024 - protein, 469 aa, synthetic construct; identical to SEQ ID NO: 16738
  REGION 1..469: note = neuraminidase__InfluenzaA__ADC32400

SEQ ID NO: 18025 - protein, 469 aa, synthetic construct; identical to SEQ ID NO: 16738
  REGION 1..469: note = neuraminidase__InfluenzaA__ADC32401

SEQ ID NO: 18026 - protein, 469 aa, synthetic construct
  REGION 1..469: note = neuraminidase__InfluenzaA__ADC32404
MNPNQKIITIGSVCMTIGMANLILQIGNIISIWISHSIQLGNQNQIETCNQSVITYENNTWVNQTYVNISNTNFAAGQSVVSVKLAGNSSLCPVSGWAIYSKDNSIRIGSKGDVFVIREPFISCSPLECRTFFLTQGALLNDKHSNGTIKDRSPYRTLMSCPIGEVPSPYNSRFESVAWSASACHDGINWLTIGISGPDNGAVAVLKYNGIITDTIKSWRNNILRTQESECACVNGSCFTVMTDGPSDGQASYKIFRIEKGKIVKSVEMNAPNYHYEECSCYPDSSEITCVCRDNWHGSNRPWVSFNQNLEYQIGYICSGIFGDNPRPNDKKGSCGPVSSNGANGVKGFSFKYGNGVWIGRTKSISSRNGFEMIWDPNGWTGTDNNFSIKQDIVGINEWSGYSGSFVQHPELTGLDCIRPCFWVELIRGRPKENTIWTSGSSISFCGVNSDTVGWSWPDGAELPFTIDK

SEQ ID NO: 18027 - protein, 469 aa, synthetic construct
  REGION 1..469: note = neuraminidase__InfluenzaA__ADC32407
MNPKQKIITIGSVCMTIGMANLILQIGNIISIWISHSIQLGNQNQIETCNQSVITYENNTWVNQTYVNISNTNFAAGQSVVSVKLAGNSSLCPVSGWAIYSKDNSIRIGSKGDVFVIREPFISCSPLECRTFFLTQGALLNDKHSNGTIKDRSPYRTLMSCPIGEVPSPYNSRFESVAWSASACHDGINWLTIGISGPDNGAVAVLKYNGIITDTIKSWRNNILRTQESECACVNGSCFTVMTDGPSDGQASYKIFRIEKGKIVKSVEMNAPNYHYEECSCYPDSSEITCVCRDNWHGSNRPWVSFNQNLEYQIGYICSGIFGDNPRPNDKKGSCGPVSSNGANGVKGFSFKYGNGVWIGRTKSISSRNGFEMIWDPNGWTGTDNNFSIKQDIVGINEWSGYSGSFVQHPELTGLDCIRPCFWVELIRGRPKENTIWTSGSSISFCGVNSDTVGWSWPDGAELPFTIDK

SEQ ID NO: 18028 - protein, 469 aa, synthetic construct
  REGION 1..469: note = neuraminidase__InfluenzaA__ADC34942
MNPNQKIITIGSVSLTISTICFFMQIAILITTVTLHFKQYEFNPPPNNQVMLCEPTIIERNITEIVYLTNTTIEKEICPKLAEYREWSKPQCNITGFAPFSKDNSIRLSAGGDIWVTREPYVSCDPDKCYQFALGQGTTLNNVHSNDIVRDRTPYRTLLMNELGVPFHLGTKQVCIAWSSSSCHDGKAWLHVCVTGDDKNATASFIYNGRLVDSIVSWSKEILRTQESECVCINGTCTVVMTDGSASGKADTKILFIEEGKIVHTSTLSGSAQHVEECSCYPRYPGVRCVCRDNWRGSNRPIVDINMKDYSIVSSYVCSGLVGDTPRKNDSSSSGHCLNPNNEEGGHGVKGWAFDDGNDVWMGRTISEKLRSGYETFKVIEGWSNPNSKLQINRQVIVDRGNRSGYSGIFSVEGKSCINRCFYVELIRGRKEETEVLWTSNSIVVFCGTSGTYGTGSWPDGADINLMPI

SEQ ID NO: 18029 - protein, 469 aa, synthetic construct
  REGION 1..469: note = neuraminidase__InfluenzaA__ADC39000
MNPNQKIITIGSVCMTIGMANLILQIGNIISIWISHSIQLGNQNQIETCNQSVITYENNTWVNQTYVNISNTNFAAGQSVVSVKLAGNSSLCPVSGWAIYSKDNSIRIGSKGDVFVIREPFISCSPLECRTFFLTQGALLNDKHSNGTIKDRSPYRTLMSCPIGEVPSPYNSRFESVAWSASACHDGINWLTIGISGPDNGAVAVLKYNGIITDTIKSWRNNILRTQESECACVNGSCFTVMTDGPSDGQASYKIFRIEKGKIVKSVEMNAPNYHYEECSCYPDSSEITCVCRDNWHGSNRPWVSFNQNLEYQIGYICSGIFGDNPRPNDKTGSCGPVSSNGANGVKGFSFKYGNGVWIGRTKSISSRNGFEMIWDPNGWTGTDNNFSIKQDIVGINEWSGYSGSFVQHPELTGLDCIRPCFWVELIRGRPKENTIWTSGSSISFCGVNSDNVGWSWPDGAELPFTIDK

SEQ ID NO: 18030 - protein, 469 aa, synthetic construct; identical to SEQ ID NO: 16738
  REGION 1..469: note = neuraminidase__InfluenzaA__ADC39010

SEQ ID NO: 18031 - protein, 470 aa, synthetic construct; identical to SEQ ID NO: 16632
  REGION 1..470: note = neuraminidase__InfluenzaA__ADC45606

SEQ ID NO: 18032 - protein, 470 aa, synthetic construct
  REGION 1..470: note = neuraminidase__InfluenzaA__ADC45628
MNPNQKIITIGSISIAIGIISLMLQMGNIISIWASHSIQTGSQNHTGICNQRIITYENSTWVNHTYVNINNTNVVAGKDKTPVTLVGNSSLCSISGWAIYTKDNSIRIGSKGDVFVIREPFISCSHLECKTFFLTQGALLNDKHSNGTVKDRSPYRALMSCPLGEAPSPYNSKFESVAWSASACHDGIGWLTIGISGPDNGAVAVLKYKGIITGTIKSWKKQILRTQESECVCMNGSCFTIMTDGPSNGAASYKIFKIEKGKVTKSMELNAPNFHYEECSCYPDTGTVMCVCRDNWHGSNRPWVSFNQNLDYQIGYICSGVFGDNPRPKDREGSCNPVTVDGANGVKGFSYKYGNGVWIGRTKSNRIRKGFEMIWDPNGWTNTDSDFSVKQDIVAITDWSGYSGSFVQHPELTGLDCIRPCFWVELVRGLPRENTTIWTSGSSISFCGVNGDIANWSWPDGAELPFTIDK

SEQ ID NO: 18033 - protein, 470 aa, synthetic construct
  REGION 1..470: note = neuraminidase__InfluenzaA__ADC45639
MNPNQKIITIGSISIAIGIISLMLQIGNIISIWASHSIQTGSQNHTGICNQRIITYENSTWVNHTYVNINNTNVVAGKDKTPVTLVGNSSLCSISGWAIYTKDNSIRIGSKGDVFVIREPFISCSHLECKTFFLTQGALLNDKHSNGTVKDRSPYRALMSCPLGEAPSPYNSKFESVAWSASACHDGIGWLTIGVSGPDNGAVAVLKYKGIITGTIKSWKKQILRTQESECVCMNGSCFTIMTDGPSNGAASYKIFKIEKGKVTKSMELNAPNFHYEECSCYPDTGTVMCVCRDNWHGSNRPWVSFNQNLDYQIGYICSGVFGDNPRPKDREGSCNPVTVDGANGVKGFSYKYGNGVWIGRTKSNRIRKGFEMIWDPNGWTNTDSDFSVKQDIVAITDWSGYSGSFVQHPELTGLDCIRPCFWVELVRGLPRENTTIWTSGSSISFCGVNGDIANWSWPDGAELPFTIDK

SEQ ID NO: 18034 - protein, 470 aa, synthetic construct; identical to SEQ ID NO: 16632
  REGION 1..470: note = neuraminidase__InfluenzaA__ADC45650

SEQ ID NO: 18035 - protein, 470 aa, synthetic construct; identical to SEQ ID NO: 16632
  REGION 1..470: note = neuraminidase__InfluenzaA__ADC45661

SEQ ID NO: 18036 - protein, 470 aa, synthetic construct
  REGION 1..470: note = neuraminidase__InfluenzaA__ADC45683
MNPNQKIITIGSISIAIGIISLMLQIGNIISIWASHSIQTGSQNHTGICNQRIITYENSTWVNHTYVNINNTNVVAGEDKTPVTLVGNSSLCSISGWAIYTKDNSIRIGSKGDVFVIREPFISCSHLECKTFFLTQGALLNDKHSNGTVKDRSPYRALMSCPLGEAPSPYNSKFESVAWSASACHDGIGWLTIGISGPDNGAVAVLKYKGIITGTIKSWKKQILRTQESECVCMNGSCFTIMTDGPSNGAASYKIFKIEKGKVTKSMELNAPNFHYEECSCYPDTGTVMCVCRDNWHGSNRPWVSFNQNLDYQIGYICSGVFGDNPRPKDREGSCNPVTVDGANGVKGFSYKYGNGVWIGRTKSNRIRKGFEMIWDPNGWTNTDSDFSVKQDIVAITDWSGYSGSFVQHPELTGLDCIRPCFWVELVRGLPRENTTIWTSGSSISFCGVNGDIANWSWPDGAELPFTIDK

SEQ ID NO: 18037 - protein, 470 aa, synthetic construct
  REGION 1..470: note = neuraminidase__InfluenzaA__ADC45705
MNPNQKIITIGSISIAIGIISLMLQIGNIISIWASHSIQTGSQNNTGICNQRIITYENSTWVNHTYVNINNTNVVAGEDKTSVTLAGNSSLCSISGWAIYTKDNSIRIGSKGDVFVIREPFISCSHLECRTFFLTQGALLNDKHSNGTVKNRSPYRALMSCPLGEAPSPYNSKFESVAWSASACHDGMGWLTIGISGPDNGAVAVLKYNGIITGTIKSWKKQILRTQESECVCMNGSCFTIMTDGPSNKAASYKIFKIEKGKVTKSIELNAPNFHYEECSCYPDTGIVMCVCRDNWHGSNRPWVSFNQNLDYQIGYICSGVFGDNPRPEDGEGSCNPVTVDGANGVKGFSYKYDNGVWIGRTKSNRLRKGFEMIWDPNGWTNTDSDFSVKQDVVAITDWSGYSGSFVQHPELTGLDCIRPCFWVELVRGLPRENTTIWTSGSSISFCGVNSDTANWSWPDGAELPFTIDK

SEQ ID NO: 18038 - protein, 470 aa, synthetic construct
  REGION 1..470: note = neuraminidase__InfluenzaA__ADC45716
MNPNQKIITIGSISIAIGIISLMLQIGNIISIWASHSIQTGSQNHTGICNQRIITYENSTWVNHTYVNINNTNVVAGKDKTPVTLVGNSSLCSISGWAIYTKDNSIRIGSKGDVFVIREPFISCSHLECKTFFLTQGALLNDKHSNGTVKDRSPYRALMSCPLGEAPSPYNSKFESVAWSASACHDGIGWLTIGISGPDNGAVAVLKYKGIITGTIKSWKKQILRTQESECVCMNGSCFTIMTDGPSNGAASYKIFKIEKGKVTKSMELNAPNFHYEECSCYPDTGTVMCVCRDNWHGSNRPWVSFNQNLDYQIGYICSGVFGDNPRPKDREGSCNPVTVDGANGVEGFSYKYGNGVWIGRTKSNRIRKGFEMIWDPNGWTNTDSDFSVKQDIVAITNWSGYSGSFVQHPELTGLDCIRPCFWVELVRGLPRENTTIWTSGSSISFCGVNGDIANWSWPDGAELPFTIDK

SEQ ID NO: 18039 - protein, 470 aa, synthetic construct
  REGION 1..470: note = neuraminidase__InfluenzaA__ADC45738
MNPNQKIITIGSISIAIGIISLMLQIGNIISIWASHSIQTGSQNNTGICNQRIITYENSTWVNHTYVNINNTNVVAGEDKTSVTLAGNSSLCSISGWAIYTKDNSIRIGSKGDVFVIREPFISCSHLECRTFFLTQGALLNDKHSNGTVKDRSPYRALMSCPLGEAPSPYNSKFESVAWSASACHDGMGWLTIGISGPDNGAVAVLKYNGIITGTIKSWKKQILRTQESECVCMNGSCFTIMTDGPSNKAASYKIFKIEKGKVTKSIELNAPNFYYEECSCYPDTGIVMCVCRDNWHGSNRPWVSFNQNLDYQIGYICSGVFGDNPRPEDGEGSCNPVTVDGANGVKGFSYKYDNGVWIGRTKSNRLRKGFEMIWDPNGWTNTDSDFSVKQDVVAITDWSGYSGSFVQHPELTGLDCIRPCFWVELVRGLPRENTTIWTSGSSISFCGVNSDTANWSWPDGAELPFTIDK

SEQ ID NO: 18040 - protein, 470 aa, synthetic construct
  REGION 1..470: note = neuraminidase__InfluenzaA__ADC45760
MNPNQKIITIGSISIAIGIISLMLQIGNIISIWASHSIQTGSQNNTGICNQRIITYENSTWVNHTYVNINNTNVVAGEDKTSVTLAGNSSLCSISGWAIYTKDNSIRIGSKGDVFVIREPFISCSHLECRTFFLTQGALLNDKHSNGTAKDRSPYRALMSCPLGEAPSPYNSKFESVAWSASACHDGMGWLTIGISGPDNGAVAVLKYNGIITGTIKSWKKQILRTQESECVCMNGSCFTIMTDGPSNKAASYKIFKIEKGKVTKSIELNAPNFYYEECSCYPDTGIVMCVCRDNWHGSNRPWVSFNQNLDYQIGYICSGVFGDNPRPEDGEGSCNPVTVDGANGVKGFSYKYGNGVWIGRTKSNRLRKGFEMIWDPNGWTNTDSDFSVKQDVVAITDWSGYSGSFVQHPELTGLGCIRPCFWVELVRGLPRENTTIWTSGSSISFCGVNSDTANWSWPDGAELPFTIDK

SEQ ID NO: 18041 - protein, 470 aa, synthetic construct
  REGION 1..470: note = neuraminidase__InfluenzaA__ADC45771
MNPNQKIITIGSISIAIGIISLMLQIGNIISIWASHSIQTGSQNNTGICNQRIITYENSTWVNHTYVNINNTNVVAGEDKTSVTLAGNSSLCSISGWAIYTKDNSIRIGSKGDVFVIREPFISCSHLECRTFFLTQGALLNDKHSNGTVKDRSPYRALMSCPLGEAPSPYNSKFESVAWSASACHDGMGWLTIGISGPDNGAVAVLKYNGIITGTIKSWKKQILRTQESECVCMNGSCFTIMTDGPSNKAASYKIFKIEKGKVTKSIELNAPNFYYEECSCYPDTGIVMCVCRDNWHGSNRPWVSFNQNLDYQIGYICSGVFGDNPRPEDGEGSCNPVTVDGANGVKGFSYKYGNGVWIGRTKSNRLRKGFEMIWDPNGWTNTDSDFSMKQDVVAITDWSGYSGSFVQHPELTGLDCIRPCFWVELVRGLPRENTTIWTSGSSISFCGVNSDTANWSWPDGAELPFTIDK

SEQ ID NO: 18042 - protein, 470 aa, synthetic construct
  REGION 1..470: note = neuraminidase__InfluenzaA__ADC45782
MNPNQKIITIGSISIAIGIISLMLQIGNIISIWASHSIQTGSQNNTGICNQRIITYENSTWVNHTYVNINNTNVVAGEDKTSVTLAGNSSLCSISGWAIYTKDNSIRIGSKGDVFVIREPFISCSHLECRTFFLTQGALLNDKHSNRTVKDRSPYRALMSCPLGEAPSPYNSKFESVAWSASACHDGMGWLTIGISGPDNGAVAVLKYNGIITGTIKSWKKQILRTQESECVCVNGSCFTIMTDGPSNKAASYKIFKIEKGKVTKSIELNAPNFYYEECSCYPDTGIVMCVCRDNWHGSNRPWVSFNQNLDYQIGYICSGVFGDNPRPEDGEGSCNPVTVDGANGVKGFSYKYGNGVWIGRTKSNRLRKGFEMIWDPNGWTNTDSDFSVKQDVVAITDWSGYSGSFVQHPELTGLDCIRPCFWVELVRGLPRENTTIWTSGSSISFCGVNSDTANWSWPDGAELPFTIDK

SEQ ID NO: 18043 - protein, 470 aa, synthetic construct
  REGION 1..470: note = neuraminidase__InfluenzaA__ADC45804
MNPNQKIITIGSISIAIGIISLMLQIGNIISIWASHSIQTGSQNNTGICNQRIITYENSTWVNHTYVNINNTNVVAGEDKTSVTLAGNSSLCSISGWAIYTKDNSIRIGSKGDVFVIREPFISCSHLECRTFFLTQGALLNDKHSNGTVKDRSPYRALMSCPLGEAPSPYNSKFESVAWSASACHDGMGWLTIGISGPDNGAVAVLKYNGIITGTIKSWKKQILRTQESECVCMNGSCFTIMTDGPSNKAASYKIFKIEKGKITKSIELNAPNFYYEECSCYPDTGIVMCVCRDNWHGSNRPWVSFNQNLDYQIGYICSGVFGDNPRPEDGEGSCNPVTVDGANGVKGFSYKYGNGVWIGRTKSNRLRKGFEMIWDPNGWTNTDSDFSVKQDVVAITDWSGYSGSFVQHPELTGLDCIRPCFWVELVRGLPRENTTIWTSGSSISFCGVNSDTANWSWPDGAELPFTIDK

SEQ ID NO: 18044 - protein, 470 aa, synthetic construct
  REGION 1..470: note = neuraminidase__InfluenzaA__ADC45815
MNPNQKIITIGSISIAIGIISLMLQIGNIISIWASHSIQTGSQNNTGICNQRIITYENSTWVNHTYVNINNTNVVAGEDKTSVTLAGNSSLCSISGWAIYTKDNSIRIGSKGDVFVIREPFISCSHLECRTFFLTQGALLNDKHSNGTVKDRSPYRALMSCPLGEAPSPYNSKFESVAWSASACHDGMGWLTIGISGPDNGAVAVLKYNGIITGTVKSWKKQILRTQESECVCMNGSCFTIMTDGPSNKAASYKIFKIEKGKVTKSIELNAPNFYYEECSCYPDTGMVMCVCRDNWHGSNRPWVSFNQNLDYQIGYICSGVFGDNPRPEDGEGSCNPVTVDGANGVKGFSYKYGNGVWIGRTKSNRLRKGFEMIWDPNGWTNTDSDFSVKQDVVAITDWSGYSGSFVQHPELTGLDCIRPCFWVELVRGLPRENTTIWTSGSSISFCGVNSDTANWSWPDGAELPFTIDK

SEQ ID NO: 18045 - protein, 470 aa, synthetic construct; identical to SEQ ID NO: 17461
  REGION 1..470: note = neuraminidase__InfluenzaA__ADC45837

SEQ ID NO: 18046 - protein, 470 aa, synthetic construct; identical to SEQ ID NO: 17461
  REGION 1..470: note = neuraminidase__InfluenzaA__ADC45848

SEQ ID NO: 18047 - protein, 469 aa, synthetic construct; identical to SEQ ID NO: 16738
  REGION 1..469: note = neuraminidase__InfluenzaA__ADC53559

SEQ ID NO: 18048 - protein, 469 aa, synthetic construct; identical to SEQ ID NO: 16738
  REGION 1..469: note = neuraminidase__InfluenzaA__ADD14088

SEQ ID NO: 18049 - protein, 469 aa, synthetic construct; identical to SEQ ID NO: 16738
  REGION 1..469: note = neuraminidase__InfluenzaA__ADD14090

SEQ ID NO: 18050 - protein, 469 aa, synthetic construct; identical to SEQ ID NO: 16738
  REGION 1..469: note = neuraminidase__InfluenzaA__ADD14094

SEQ ID NO: 18051 - protein, 469 aa, synthetic construct; identical to SEQ ID NO: 16738
  REGION 1..469: note = neuraminidase__InfluenzaA__ADD14096

SEQ ID NO: 18052 - protein, 469 aa, synthetic construct; identical to SEQ ID NO: 16738
  REGION 1..469: note = neuraminidase__InfluenzaA__ADD14098

SEQ ID NO: 18053 - protein, 469 aa, synthetic construct; identical to SEQ ID NO: 16738
  REGION 1..469: note = neuraminidase__InfluenzaA__ADD14100

SEQ ID NO: 18054 - protein, 469 aa, synthetic construct; identical to SEQ ID NO: 16738
  REGION 1..469: note = neuraminidase__InfluenzaA__ADD14102

SEQ ID NO: 18055 - protein, 469 aa, synthetic construct; identical to SEQ ID NO: 16738
  REGION 1..469: note = neuraminidase__InfluenzaA__ADD14104

SEQ ID NO: 18056 - protein, 469 aa, synthetic construct; identical to SEQ ID NO: 16738
  REGION 1..469: note = neuraminidase__InfluenzaA__ADD14106

SEQ ID NO: 18057 - protein, 469 aa, synthetic construct; identical to SEQ ID NO: 16738
  REGION 1..469: note = neuraminidase__InfluenzaA__ADD14110

SEQ ID NO: 18058 - protein, 469 aa, synthetic construct; identical to SEQ ID NO: 16738
  REGION 1..469: note = neuraminidase__InfluenzaA__ADD14112

SEQ ID NO: 18059 - protein, 469 aa, synthetic construct; identical to SEQ ID NO: 17708
  REGION 1..469: note = neuraminidase__InfluenzaA__ADD14114

SEQ ID NO: 18060 - protein, 469 aa, synthetic construct; identical to SEQ ID NO: 16738
  REGION 1..469: note = neuraminidase__InfluenzaA__ADD14116

SEQ ID NO: 18061 - protein, 469 aa, synthetic construct; identical to SEQ ID NO: 16738
  REGION 1..469: note = neuraminidase__InfluenzaA__ADD14118

SEQ ID NO: 18062 - protein, 469 aa, synthetic construct; identical to SEQ ID NO: 16738
  REGION 1..469: note = neuraminidase__InfluenzaA__ADD14120

SEQ ID NO: 18063 - protein, 469 aa, synthetic construct; identical to SEQ ID NO: 16738
  REGION 1..469: note = neuraminidase__InfluenzaA__ADD14122

SEQ ID NO: 18064 - protein, 469 aa, synthetic construct; identical to SEQ ID NO: 16738
  REGION 1..469: note = neuraminidase__InfluenzaA__ADD14124

SEQ ID NO: 18065 - protein, 469 aa, synthetic construct; identical to SEQ ID NO: 17797
  REGION 1..469: note = neuraminidase__InfluenzaA__ADD14126

SEQ ID NO: 18066 - protein, 469 aa, synthetic construct; identical to SEQ ID NO: 16738
  REGION 1..469: note = neuraminidase__InfluenzaA__ADD14128

SEQ ID NO: 18067 - protein, 469 aa, synthetic construct; identical to SEQ ID NO: 16738
  REGION 1..469: note = neuraminidase__InfluenzaA__ADD14130

SEQ ID NO: 18068 - protein, 469 aa, synthetic construct; identical to SEQ ID NO: 16738
  REGION 1..469: note = neuraminidase__InfluenzaA__ADD14132

SEQ ID NO: 18069 - protein, 469 aa, synthetic construct; identical to SEQ ID NO: 16738
  REGION 1..469: note = neuraminidase__InfluenzaA__ADD14134

SEQ ID NO: 18070 - protein, 469 aa, synthetic construct; identical to SEQ ID NO: 16738
  REGION 1..469: note = neuraminidase__InfluenzaA__ADD14136

SEQ ID NO: 18071 - protein, 469 aa, synthetic construct; identical to SEQ ID NO: 16738
  REGION 1..469: note = neuraminidase__InfluenzaA__ADD14138

SEQ ID NO: 18072 - protein, 469 aa, synthetic construct; identical to SEQ ID NO: 16738
  REGION 1..469: note = neuraminidase__InfluenzaA__ADD14142

SEQ ID NO: 18073 - protein, 469 aa, synthetic construct; identical to SEQ ID NO: 16738
  REGION 1..469: note = neuraminidase__InfluenzaA__ADD14144

SEQ ID NO: 18074 - protein, 469 aa, synthetic construct; identical to SEQ ID NO: 16738
  REGION 1..469: note = neuraminidase__InfluenzaA__ADD14146

SEQ ID NO: 18075 - protein, 469 aa, synthetic construct; identical to SEQ ID NO: 16738
  REGION 1..469: note = neuraminidase__InfluenzaA__ADD14148

SEQ ID NO: 18076 - protein, 469 aa, synthetic construct
  REGION 1..469: note = neuraminidase__InfluenzaA__ADD14150
MNPNQKIITIGSVCMTIGMANLILQIGNIISIWISHSIQLGNQNQIETCNQSVITYENNTWVNQTYVNISNTNFAAGQSVVSVKLAGNSSLCPVSGWAIYSKDNSIRIGSKGDVFVIREPFISCSPLECRTFFLTQGALLNDKHSNGTIKDRSPYRTLMSCPIGEVPSPYNSRFESVAWSASACHDGINWLTIGISGPDNGAVAVLKYNGIITDTIKSWRNNILRTQESECACVNGSCFTVMTDGPSDGQASYKIFRIEKGKIVKSVEMNAPNYHYEECSCYPDSSEITCVCRDNWHGSNRPWVSFNQNLEYQIGYICSGIFGDNPRPNDKTGSCGPVSSNGANGVKGFSFKYGNGVWIGRTKSISSRNGFEMIWDPNGWTGTDDNFSIKQDIVGINEWSGYSGSFVQHPELTGLDCIRPCFWVELIRGRPKENTIWTSGSSISFCGVNSDTVGWSWPDGAELPFTIDK

SEQ ID NO: 18077 - protein, 469 aa, synthetic construct; identical to SEQ ID NO: 16738
  REGION 1..469: note = neuraminidase__InfluenzaA__ADD14152

SEQ ID NO: 18078 - protein, 469 aa, synthetic construct
  REGION 1..469: note = neuraminidase__InfluenzaA__ADD14154
MNPNQKIITIGSVCMTIGMANLILQIGNIISIWISHSIQLGNQNQIETCNQSVITYENNTWVNQTYVNISITNFAAGQSVVSVKLAGNSSLCPVSGWAIYSKDNSIRIGSKGDVFVIREPFISCSPLECRTFFLTQGALLNDKHSNGTIKDRSPYRTLMSCPIGEVPSPYNSRFESVAWSASACHDGINWLTIGISGPDNGAVAVLKYNGIITDTIKSWRNNILRTQESECACVNGSCFTVMTDGPSDGQASYKIFRIEKGKIVKSVEMNAPNYHYEECSCYPDSSEITCVCRDNWHGSNRPWVSFNQNLEYQIGYICSGIFGDNPRPNDKTGSCGPVSSNGANGVKGFSFKYGNGVWIGRTKSISSRNGFEMIWDPNGWTGTDNNFSIKQDIVGINEWSGYSGSFVQHPELTGLDCIRPCFWVELIRGRPKENTIWTSGSSISFCGVNSDTVGWSWPDGAELPFTIDK

SEQ ID NO: 18079 - protein, 469 aa, synthetic construct; identical to SEQ ID NO: 16738
  REGION 1..469: note = neuraminidase__InfluenzaA__ADD14156

SEQ ID NO: 18080 - protein, 469 aa, synthetic construct; identical to SEQ ID NO: 16738
  REGION 1..469: note = neuraminidase__InfluenzaA__ADD14158

SEQ ID NO: 18081 - protein, 469 aa, synthetic construct; identical to SEQ ID NO: 16738
  REGION 1..469: note = neuraminidase__InfluenzaA__ADD14164

SEQ ID NO: 18082 - protein, 469 aa, synthetic construct; identical to SEQ ID NO: 16738
  REGION 1..469: note = neuraminidase__InfluenzaA__ADD14174

SEQ ID NO: 18083 - protein, 469 aa, synthetic construct; identical to SEQ ID NO: 16738
  REGION 1..469: note = neuraminidase__InfluenzaA__ADD14184

SEQ ID NO: 18084 - protein, 469 aa, synthetic construct; identical to SEQ ID NO: 16738
  REGION 1..469: note = neuraminidase__InfluenzaA__ADD14194

SEQ ID NO: 18085 - protein, 469 aa, synthetic construct; identical to SEQ ID NO: 17092
  REGION 1..469: note = neuraminidase__InfluenzaA__ADD14204

SEQ ID NO: 18086 - protein, 469 aa, synthetic construct
  REGION 1..469: note = neuraminidase__InfluenzaA__ADD21449
MNPNQRIITIGTACLIIGIVSLLLQIGNIVSLWISHSIQTGEKNHSETCNRNTITYENSTWVNQTYVNISNINIAGGQGVASIILAGNSSLCPVNGWAIYSKDNSIRIGSKGDIFVIREPFISCSHLECRTFFLTQGALLNDRHSNGTVKDRSPYRTLMSCPIGEAPSPYNSKFESVAWSASACHDGMGWLTIGISGPDNGAVAVLKYNGIITDTIKSWRNRILRTQESECVCINGSCFTIMTDGPSNGQASYKIFKMERGKIIKSVELDAPNYHYEECSCYPDTGKVVCVCRDNWHASNRPWVSFDQNLDYQIGYISSGVFGDNPRSNDGKGNCGPVLSNGANGVKGLSFRYGNGVWIGRTKSTNSRSGFEMIWDPNGWTETDSNFSMKQDIIALTDWSGYSGSFVQHPELTGMNCIRPCFWVELIRGQPKQSTIWTSGSSISFCGVDSETASWSWPDGADLPFTIDK

SEQ ID NO: 18087 - protein, 470 aa, synthetic construct
  REGION 1..470: note = neuraminidase__InfluenzaA__ADD21469
MNPNQKIITIGSISIAIGIISLMLQIGNIISVWASHSIQTGSQNHTGICNQRIITYENSTWVNHTYVNINNTNVVAGKDKTSVTLAGNSSLCSISGWAIYTKDNSIRIGSKGDVFVIREPFISCSHLECRTFFLTQGALLNDKHSNGTVKDRSPYRALMSCPLGEAPSPYNSKFESVAWSASACHDGMGWLTIGISGPDNGAVAVLKYNGIITETIKSWKKRMLRTQESECICVNGSCFTIMTDGPSNGAASYKIFKIEKGKVTKSIELNAPNFHYEECSCYPDTGTVMCVCRDNWHGSNRPWVSFNQNLDYQIGYICSGVFGDNPRPKDGEGSCNPVTVDGADGVKGFSYKYGNGVWIGRTKSNRLRKGFEMIWDPNGWTDTDSNFSVKQDVVAITDWSGYSGSFVQHPELTGLDCIRPCFWVELVRGLPRENTTIWTSGSSISFCGVNSDTANWSWPDGAELPFTIDK

SEQ ID NO: 18088 - protein, 469 aa, synthetic construct; identical to SEQ ID NO: 16738
  REGION 1..469: note = neuraminidase__InfluenzaA__ADD21747

SEQ ID NO: 18089 - protein, 469 aa, synthetic construct
  REGION 1..469: note = neuraminidase__InfluenzaA__ADD21767
MNPNQKIIIIGSVCMTIGMANLILQIGNIISIWISHSIQLGNQNQIETCNQSVITYENNTWVNQTYVNISNTNFAAGQSVVSVKLAGNSSLCPVSGWAIYSKDNSIRIGSKGDVFVIREPFISCSPLECRTFFLTQGALLNDKHSNGTIKDRSPYRTLMSCPIGEVPSPYNSRFESVAWSASACHDGINWLTIGISGPDNGAVAVLKYNGIITDTIKSWRNNILRTQESECACVNGSCFTVMTDGPSDGQASYKIFRIEKGKIVKSVEMNAPNYHYEECSCYPDSSEITCVCRDNWHGSNRPWVSFNQNLEYQIGYICSGIFGDNPRPNDKTGSCGPVSSNGANGVKGFSFKYGNGVWIGRTKSISSRNGFEMIWDPNGWTGTDNNFSIKQDIVGINEWSGYSGSFVQHPELTGLDCIRPCFWVELIRGRPKENTIWTSGSSISFCGVNSDTVGWSWPDGAELPFTIDK

SEQ ID NO: 18090 - protein, 469 aa, synthetic construct
  REGION 1..469: note = neuraminidase__InfluenzaA__ADD21777
MNPNQKIITIGSVCMTIGMANLILQIGNIISIWISHSIQLGNQNQIETCNQSVITYENNTWVNQTYVNISNTNFAAGQSVVSVKLAGNSSLCPVSGWAIYSKDNSIRIGSKGDVFVIREPFISCSPLECRTFFLTQGALLNDKHSNGTIKDRSPYRTLMSCPIGEVPSPYNSRFESVAWSASACHDGINWLTIGISGPDNGAVAVIKYNGIITDTIKSWRNNILRTQESECACVNGSCFTVMTDGPSDGQASYKIFRIEKGKIVKSVEMNAPNYHYEECSCYPDSSEITCVCRDNWHGSNRPWVSFNQNLEYQIGYICSGIFGDNPRPNDKTGSCGPVSSNGANGVKGFSFKYGNGVWIGRTKSISSRNGFEMIWDPNGWTGTDNNFSIKQDIVGINEWSGYSGSFVQHPELTGLDCIRPCFWVELIRGRPKENTIWTSGSSISFCGVNSDTVGWSWPDGAELPFTIDK

SEQ ID NO: 18091 - protein, 469 aa, synthetic construct; identical to SEQ ID NO: 16738
  REGION 1..469: note = neuraminidase__InfluenzaA__ADD21787

SEQ ID NO: 18092 - protein, 469 aa, synthetic construct; identical to SEQ ID NO: 16738
  REGION 1..469: note = neuraminidase__InfluenzaA__ADD21797

SEQ ID NO: 18093 - protein, 469 aa, synthetic construct; identical to SEQ ID NO: 16738
  REGION 1..469: note = neuraminidase__InfluenzaA__ADD21817

SEQ ID NO: 18094 - protein, 469 aa, synthetic construct; identical to SEQ ID NO: 16738
  REGION 1..469: note = neuraminidase__InfluenzaA__ADD21827

SEQ ID NO: 18095 - protein, 469 aa, synthetic construct; identical to SEQ ID NO: 16738
  REGION 1..469: note = neuraminidase__InfluenzaA__ADD21837

SEQ ID NO: 18096 - protein, 469 aa, synthetic construct; identical to SEQ ID NO: 16738
  REGION 1..469: note = neuraminidase__InfluenzaA__ADD21847

SEQ ID NO: 18097 - protein, 469 aa, synthetic construct; identical to SEQ ID NO: 16738
  REGION 1..469: note = neuraminidase__InfluenzaA__ADD21857

SEQ ID NO: 18098 - protein, 469 aa, synthetic construct; identical to SEQ ID NO: 16738
  REGION 1..469: note = neuraminidase__InfluenzaA__ADD21867

SEQ ID NO: 18099 - protein, 469 aa, synthetic construct; identical to SEQ ID NO: 16738
  REGION 1..469: note = neuraminidase__InfluenzaA__ADD21877

SEQ ID NO: 18100 - protein, 469 aa, synthetic construct; identical to SEQ ID NO: 16738
  REGION 1..469: note = neuraminidase__InfluenzaA__ADD21897

SEQ ID NO: 18101 - protein, 469 aa, synthetic construct; identical to SEQ ID NO: 16738
  REGION 1..469: note = neuraminidase__InfluenzaA__ADD22494

SEQ ID NO: 18102 - protein, 469 aa, synthetic construct; identical to SEQ ID NO: 16738
  REGION 1..469: note = neuraminidase__InfluenzaA__ADD22504

SEQ ID NO: 18103 - protein, 469 aa, synthetic construct; identical to SEQ ID NO: 16738
  REGION 1..469: note = neuraminidase__InfluenzaA__ADD22514

SEQ ID NO: 18104 - protein, 469 aa, synthetic construct; identical to SEQ ID NO: 16738
  REGION 1..469: note = neuraminidase__InfluenzaA__ADD22524

SEQ ID NO: 18105 - protein, 469 aa, synthetic construct
  REGION 1..469: note = neuraminidase__InfluenzaA__ADD22534
MNPNQKIITIGSVCMTIGMANLILQIGNIISIWISHSIQLGNQNQIETCNQSVITYENNTWVNQTYVNISNTNFAAGQSVVSVKLAGNSSLCPVSGWAIYSKDNSIRIGSKGDVFVIREPFISCSPLECRTFFLTQGALLNDKHSNGTIKDRSPYRTLMSCPIGEVPSPYNSRFESVAWSASACHDGINWLTIGISGPDNGAVAVLKYNGIITDTIKSWRNNILRTQESECACVNGSCFTVMTDGPSDGQASYKIFRIEKGKIVKSVEMNAPNYHYEECSCYPDSSEITCVCRDNWHGSNRPWVSFNQNLEYQIGYICSGIFGDSPRPNDKTGSCGPVSSNGANGVKGFSFKYGNGVWIGRTKSISSRNGFEMIWDPNGWTGTDNNFSIKQDIVGINEWSGYSGSFVQHPELTGLDCIRPCFWVELIRGRPKENTIWTSGSSISFCGVNSDTVGWSWPDGAELPFTIDK

SEQ ID NO: 18106 - protein, 469 aa, synthetic construct; identical to SEQ ID NO: 16738
  REGION 1..469: note = neuraminidase__InfluenzaA__ADD22544

SEQ ID NO: 18107 - protein, 469 aa, synthetic construct; identical to SEQ ID NO: 16738
  REGION 1..469: note = neuraminidase__InfluenzaA__ADD22557

SEQ ID NO: 18108 - protein, 469 aa, synthetic construct; identical to SEQ ID NO: 16738
  REGION 1..469: note = neuraminidase__InfluenzaA__ADD22567

SEQ ID NO: 18109 - protein, 469 aa, synthetic construct; identical to SEQ ID NO: 16738
  REGION 1..469: note = neuraminidase__InfluenzaA__ADD22577

SEQ ID NO: 18110 - protein, 469 aa, synthetic construct; identical to SEQ ID NO: 16738
  REGION 1..469: note = neuraminidase__InfluenzaA__ADD22587

SEQ ID NO: 18111 - protein, 469 aa, synthetic construct; identical to SEQ ID NO: 16738
  REGION 1..469: note = neuraminidase__InfluenzaA__ADD22597

SEQ ID NO: 18112 - protein, 469 aa, synthetic construct; identical to SEQ ID NO: 16738
  REGION 1..469: note = neuraminidase__InfluenzaA__ADD22617

SEQ ID NO: 18113 - protein, 469 aa, synthetic construct; identical to SEQ ID NO: 16738
  REGION 1..469: note = neuraminidase__InfluenzaA__ADD22627

SEQ ID NO: 18114 - protein, 469 aa, synthetic construct; identical to SEQ ID NO: 16738
  REGION 1..469: note = neuraminidase__InfluenzaA__ADD22637

SEQ ID NO: 18115 - protein, 469 aa, synthetic construct; identical to SEQ ID NO: 16738
  REGION 1..469: note = neuraminidase__InfluenzaA__ADD22648

SEQ ID NO: 18116 - protein, 469 aa, synthetic construct; identical to SEQ ID NO: 16738
  REGION 1..469: note = neuraminidase__InfluenzaA__ADD22658

SEQ ID NO: 18117 - protein, 469 aa, synthetic construct; identical to SEQ ID NO: 16738
  REGION 1..469: note = neuraminidase__InfluenzaA__ADD22668

SEQ ID NO: 18118 - protein, 469 aa, synthetic construct
  REGION 1..469: note = neuraminidase__InfluenzaA__ADD22688
MNPNQKIITIGSVCMTIGMANLILQIGNIISIWISHSIQLGNQNQIETCNQSVITYENNTWVNQTYVNISNTNFAAGQSVVSVKLAGNSSLCPVSGWAIYSKDNSIRIGSKGDVFVIREPFISCSPLECRTFFLTQGALLNDKHSNGTIKDRSPYRTLMSCPIGEVPSPYNSRFESVAWSASACHDGINWLTIGISGPDNGAVAVLKYNGIITDTIKSWRNNILRTQESECACVNGSCFTVMTDGPSDGQASYKIFRIEKGKIVKSVEMNAPNYHYEECSCYPDSSEITCVCRDNWHGSNRPWVSFNQNLEYQIGYICSGIFGDNPRPNDKTGSCGPVSSNGANGVKGFSFKYGNGVWIGRTKSISSRNGFEMIWDPNGWTGTDNNFSIKQDIVGINEWSGYSGSFVQHPELTGLDCIRPCFWIELIRGRPKENTIWTSGSSISFCGVNSDTVGWSWPDGAELPFTIDK

SEQ ID NO: 18119 - protein, 469 aa, synthetic construct; identical to SEQ ID NO: 16738
  REGION 1..469: note = neuraminidase__InfluenzaA__ADD22698

SEQ ID NO: 18120 - protein, 469 aa, synthetic construct; identical to SEQ ID NO: 16738
  REGION 1..469: note = neuraminidase__InfluenzaA__ADD22725

SEQ ID NO: 18121 - protein, 469 aa, synthetic construct; identical to SEQ ID NO: 16738
  REGION 1..469: note = neuraminidase__InfluenzaA__ADD22735

SEQ ID NO: 18122 - protein, 469 aa, synthetic construct; identical to SEQ ID NO: 16738
  REGION 1..469: note = neuraminidase__InfluenzaA__ADD22745

SEQ ID NO: 18123 - protein, 469 aa, synthetic construct
  REGION 1..469: note = neuraminidase__InfluenzaA__ADD22755
MNPNQKIITIGSVCMTIGMANLILQIGNIISIWISHSIQLGNQNQIETCNQSVITYENNTWVNQTYVNISNTNFAAGQSVVSVKLAGNSSLCTVSGWAIYSKDNSIRIGSKGDVFVIREPFISCSPLECRTFFLTQGALLNDKHSNGTIKDRSPYRTLMSCPIGEVPSPYNSRFESVAWSASACHDGINWLTIGISGPDNGAVAVLKYNGIITDTIKSWRNNILRTQESECACVNGSCFTVMTDGPSDGQASYKIFRIEKGKIVKSVEMNAPNYHYEECSCYPDSSEITCVCRDNWHGSNRPWVSFNQNLEYQIGYICSGIFGDSPRPNDKTGSCGPVSSNGANGVKGFSFKYGNGVWIGRTKSISSRNGFEMIWDPNGWTGTDNNFSIKQDIVGINEWSGYSGSFVQHPELTGLDCIRPCFWVELIRGRPKENTIWTSGSSISFCGVNSDTVGWSWPDGAELPFTIDK

SEQ ID NO: 18124 - protein, 469 aa, synthetic construct
  REGION 1..469: note = neuraminidase__InfluenzaA__ADD22765
MNPNQKIITIGSVCMTIGMANLILQIGNIISIWISHSIQLGNQNQIETCNQSVITYENNTWVNQTYVNISNTNFAAGQSVVSVKLAGNSSLCPVSGWAIYSKDNSIRIGSKGDVFVIREPFISCSPLECRTFFLTQGALLNDKHSNGTIKDRSPYRTLMSCPIGEVPSPYNSRFESVAWSASACHDGINWLTIGISGPDNGAVAVLKYNGIITDTIKSWRNNILRTQESECACVNGSCFTVMTDGPSDGQASYKIFRIEKGKIVKSVEMNAPNYHYEECSCYPDSSEITCVCRDNWHGSNRPWVSFNQNLEYQIGYICSGIFGDNPRPNDKTGSCGPVSSNGANGVKGFSFKYGNGVWIGRTKSISSRNGFEMIWDPNGWTGTDNNFSIKQDIVGINDWSGYSGSFVQHPELTGLDCIRPCFWVELIRGRPKENTIWTSGSSISFCGVNSDTVGWSWPDGAELPFTIDK

SEQ ID NO: 18125 - protein, 469 aa, synthetic construct; identical to SEQ ID NO: 16738
  REGION 1..469: note = neuraminidase__InfluenzaA__ADD22775

SEQ ID NO: 18126 - protein, 469 aa, synthetic construct; identical to SEQ ID NO: 16738
  REGION 1..469: note = neuraminidase__InfluenzaA__ADD22785

SEQ ID NO: 18127 - protein, 469 aa, synthetic construct; identical to SEQ ID NO: 16738
  REGION 1..469: note = neuraminidase__InfluenzaA__ADD22795

SEQ ID NO: 18128 - protein, 469 aa, synthetic construct; identical to SEQ ID NO: 16738
  REGION 1..469: note = neuraminidase__InfluenzaA__ADD22805

SEQ ID NO: 18129 - protein, 469 aa, synthetic construct; identical to SEQ ID NO: 16738
  REGION 1..469: note = neuraminidase__InfluenzaA__ADD22815

SEQ ID NO: 18130 - protein, 469 aa, synthetic construct; identical to SEQ ID NO: 16738
  REGION 1..469: note = neuraminidase__InfluenzaA__ADD22825

SEQ ID NO: 18131 - protein, 469 aa, synthetic construct; identical to SEQ ID NO: 16738
  REGION 1..469: note = neuraminidase__InfluenzaA__ADD22835

SEQ ID NO: 18132 - protein, 469 aa, synthetic construct; identical to SEQ ID NO: 16738
  REGION 1..469: note = neuraminidase__InfluenzaA__ADD22845

SEQ ID NO: 18133 - protein, 469 aa, synthetic construct; identical to SEQ ID NO: 16738
  REGION 1..469: note = neuraminidase__InfluenzaA__ADD22855

SEQ ID NO: 18134 - protein, 469 aa, synthetic construct; identical to SEQ ID NO: 16738
  REGION 1..469: note = neuraminidase__InfluenzaA__ADD22924

SEQ ID NO: 18135 - protein, 469 aa, synthetic construct; identical to SEQ ID NO: 16738
  REGION 1..469: note = neuraminidase__InfluenzaA__ADD22934

SEQ ID NO: 18136 - protein, 469 aa, synthetic construct; identical to SEQ ID NO: 16738
  REGION 1..469: note = neuraminidase__InfluenzaA__ADD22944

SEQ ID NO: 18137 - protein, 469 aa, synthetic construct; identical to SEQ ID NO: 16738
  REGION 1..469: note = neuraminidase__InfluenzaA__ADD22954

SEQ ID NO: 18138 - protein, 469 aa, synthetic construct; identical to SEQ ID NO: 16738
  REGION 1..469: note = neuraminidase__InfluenzaA__ADD22974

SEQ ID NO: 18139 - protein, 469 aa, synthetic construct; identical to SEQ ID NO: 16738
  REGION 1..469: note = neuraminidase__InfluenzaA__ADD23075

SEQ ID NO: 18140 - protein, 469 aa, synthetic construct
  REGION 1..469: note = neuraminidase__InfluenzaA__ADD23085
MNPNQKIITIGSVCMTIGMANLILQIGNIISIWISHSIQLGNQNQIETCNQSVITYENNTWVNQTYVNISNTNFAAGQSVVSVKLAGNSSLCPVSGWAIYSKDNSIRIGSKGDVFVIRELFISCSPLECRTFFLTQGALLNDKHSNGTIKDRSPYRTLMSCPIGEVPSPYNSRFESVAWSASACHDGINWLTIGISGPDNGAVAVLKYNGIITDTIKSWRNNILRTQESECACVNGSCFTVMTDGPSDGQASYKIFRIEKGKIVKSVEMNAPNYHYEECSCYPDSSEITCVCRDNWHGSNRPWVSFNQNLEYQIGYICSGIFGDNPRPNDKTGSCGPVSSNGANGVKGFSFKYGNGVWIGRTKSISSRNGFEMIWDPNGWTGTDNNFSIKQDIVGINEWSGYSGSFVQHPELTGLDCIRPCFWVELIRGRPKENTIWTSGSSISFCGVNSDTVGWSWPDGAELPFTIDK

SEQ ID NO: 18141 - protein, 469 aa, synthetic construct; identical to SEQ ID NO: 16738
  REGION 1..469: note = neuraminidase__InfluenzaA__ADD23095

SEQ ID NO: 18142 - protein, 469 aa, synthetic construct; identical to SEQ ID NO: 16738
  REGION 1..469: note = neuraminidase__InfluenzaA__ADD23105

SEQ ID NO: 18143 - protein, 469 aa, synthetic construct; identical to SEQ ID NO: 16738
  REGION 1..469: note = neuraminidase__InfluenzaA__ADD23115

SEQ ID NO: 18144 - protein, 469 aa, synthetic construct; identical to SEQ ID NO: 16738
  REGION 1..469: note = neuraminidase__InfluenzaA__ADD23125

SEQ ID NO: 18145 - protein, 469 aa, synthetic construct; identical to SEQ ID NO: 16738
  REGION 1..469: note = neuraminidase__InfluenzaA__ADD23135

SEQ ID NO: 18146 - protein, 469 aa, synthetic construct; identical to SEQ ID NO: 16738
  REGION 1..469: note = neuraminidase__InfluenzaA__ADD23145

SEQ ID NO: 18147 - protein, 469 aa, synthetic construct; identical to SEQ ID NO: 16738
  REGION 1..469: note = neuraminidase__InfluenzaA__ADD23155

SEQ ID NO: 18148 - protein, 469 aa, synthetic construct; identical to SEQ ID NO: 16738
  REGION 1..469: note = neuraminidase__InfluenzaA__ADD23165

SEQ ID NO: 18149 - protein, 469 aa, synthetic construct; identical to SEQ ID NO: 16738
  REGION 1..469: note = neuraminidase__InfluenzaA__ADD23175

SEQ ID NO: 18150 - protein, 469 aa, synthetic construct; identical to SEQ ID NO: 16738
  REGION 1..469: note = neuraminidase__InfluenzaA__ADD23185

SEQ ID NO: 18151 - protein, 469 aa, synthetic construct; identical to SEQ ID NO: 16738
  REGION 1..469: note = neuraminidase__InfluenzaA__ADD23195

SEQ ID NO: 18152 - protein, 469 aa, synthetic construct; identical to SEQ ID NO: 16738
  REGION 1..469: note = neuraminidase__InfluenzaA__ADD23223

SEQ ID NO: 18153 - protein, 469 aa, synthetic construct
  REGION 1..469: note = neuraminidase__InfluenzaA__ADD23233
MNPNQKIITIGSVCMTIGMANLILQIGNIISIWIGHSIQLGNQNQIETCNQSVITYENNTWVNQTYVNISNTNFAAGQSVVSVKLAGNSSLCPVSGWAIYSKDNSIRIGSKGDVFVIREPFISCSPLECRTFFLTQGALLNDKHSNGTIKDRSPYRTLMSCPIGEVPSPYNSRFESVAWSASACHDGINWLTIGISGPDNGAVAVLKYNGIITDTIKSWRNNILRTQESECACVNGSCFTVMTDGPSDGQASYKIFRIEKGKIVKSVEMNAPNYHYEECSCYPDSSEITCVCRDNWHGSNRPWVSFNQNLEYQIGYICSGIFGDNPRPNDKTGSCGPVSSNGANGVKGFSFKYGNGVWIGRTKSISSRNGFEMIWDPNGWTGTDNNFSIKQDIVGINEWSGYSGSFVQHPELTGLDCIRPCFWVELIRGRPKENTIWTSGSSISFCGVNSDTVGWSWPDGAELPFTIDK

SEQ ID NO: 18154 - protein, 469 aa, synthetic construct; identical to SEQ ID NO: 16738
  REGION 1..469: note = neuraminidase__InfluenzaA__ADD23243

SEQ ID NO: 18155 - protein, 469 aa, synthetic construct; identical to SEQ ID NO: 18026
  REGION 1..469: note = neuraminidase__InfluenzaA__ADD23253

SEQ ID NO: 18156 - protein, 469 aa, synthetic construct
  REGION 1..469: note = neuraminidase__InfluenzaA__ADD23273
MNPNQKIITIGSVCMTIGMANLILQIGNIISIWISHSIQLGNQNQIETCNQSVITYENNTWVNQTYVNISNTNFAAGQSVVSVKLAGNSSLCPVSGWAIYSKDNSIRIGSEGDVFVIREPFISCSPLECRTFFLTQGALLNDKHSNGTIKDRSPYRTLMSCPIGEVPSPYNSRFESVAWSASACHDGINWLTIGISGPDNGAVAVLKYNGIITDTIKSWRNNILRTQESECACVNGSCFTVMTDGPSDGQASYKIFRIEKGKIVKSVEMNAPNYHYEECSCYPDSSEITCVCRDNWHGSNRPWVSFNQNLEYQIGYICSGIFGDNPRPNDKTGSCGPVSSNGANGVKGFSFKYGNGVWIGRTKSISSRNGFEMIWDPNGWTGTDNNFSIKQDIVGINEWSGYSGSFVQHPELTGLDCIRPCFWVELIRGRPKENTIWTSGSSISFCGVNSDTVGWSWPDGAELPFTIDK

SEQ ID NO: 18157 - protein, 469 aa, synthetic construct; identical to SEQ ID NO: 16738
  REGION 1..469: note = neuraminidase__InfluenzaA__ADD23283

SEQ ID NO: 18158 - protein, 469 aa, synthetic construct; identical to SEQ ID NO: 16738
  REGION 1..469: note = neuraminidase__InfluenzaA__ADD23293

SEQ ID NO: 18159 - protein, 469 aa, synthetic construct; identical to SEQ ID NO: 16738
  REGION 1..469: note = neuraminidase__InfluenzaA__ADD23303

SEQ ID NO: 18160 - protein, 469 aa, synthetic construct; identical to SEQ ID NO: 16738
  REGION 1..469: note = neuraminidase__InfluenzaA__ADD23313

SEQ ID NO: 18161 - protein, 469 aa, synthetic construct
  REGION 1..469: note = neuraminidase__InfluenzaA__ADD23323
MNPNQKIITIGSVCMTIGMANLILQIGNIISIWISHSIQLGNQNQIETCNQSVITYENNTWVNQTYVNISNTNFAAGQSVVSVKLAGNSSLCPVSGWAIYSKDNSIRIGSKGDVFVIREPFISCSPLECRTFFLTQGALLNDKHSNGTIKDRSPYRTLMSCPIGEVPSPYNSRFESVAWSASACHDGINWLTIGISGPDNGAVAVLKYNGIITDTIKSWRNNILRTQESECACVNGSCFTVLTDGPSDGQASYKIFRIEKGKIVKSVEMNAPNYHYEECSCYPDSSEITCVCRDNWHGSNRPWVSFNQNLEYQIGYICSGIFGDNPRPNDKTGSCGPVSSNGANGVKGFSFKYGNGVWIGRTKSISSRNGFEMIWDPNGWTGTDNNFSIKQDIVGINEWSGYSGSFVQHPELTGLDCIRPCFWVELIRGRPKENTIWTSGSSISFCGVNSDTVGWSWPDGAELPFTIDK

SEQ ID NO: 18162 - protein, 469 aa, synthetic construct; identical to SEQ ID NO: 16738
  REGION 1..469: note = neuraminidase__InfluenzaA__ADD23333

SEQ ID NO: 18163 - protein, 469 aa, synthetic construct; identical to SEQ ID NO: 16738
  REGION 1..469: note = neuraminidase__InfluenzaA__ADD23358

SEQ ID NO: 18164 - protein, 469 aa, synthetic construct; identical to SEQ ID NO: 18089
  REGION 1..469: note = neuraminidase__InfluenzaA__ADD23368

SEQ ID NO: 18165 - protein, 469 aa, synthetic construct; identical to SEQ ID NO: 16738
  REGION 1..469: note = neuraminidase__InfluenzaA__ADD23378

SEQ ID NO: 18166 - protein, 469 aa, synthetic construct; identical to SEQ ID NO: 16738
  REGION 1..469: note = neuraminidase__InfluenzaA__ADD23388

SEQ ID NO: 18167 - protein, 469 aa, synthetic construct; identical to SEQ ID NO: 17321
  REGION 1..469: note = neuraminidase__InfluenzaA__ADD23398

SEQ ID NO: 18168 - protein, 469 aa, synthetic construct
  REGION 1..469: note = neuraminidase__InfluenzaA__ADD23408
MNPNQKIITIGSVCMTIGMANLILQIGNIISIWISHSIQLGNQNQIETCNQSVITYENNTWVNQTYVNISNTNFAAGQSVVSVKLAGNSSLCPVSGWAIYSKDNSIRIGSKGDVFVIREPFISCSPLECRTFFLTQGALLNDKHSNGTIKDRSPYRTLMSCPIGEVPSPYNSRFESVAWSASACHDGINWLTIGISGPDNGAVAVLKYNGIITDTIKSWRNNILRTQESECACVNGSCFTVMTDGPSDGQASYKIFRIEKGKIVKSVEMNAPNYHYEECSCYPDSSEITCVCRDNWHGSNRPWVSFNQDLEYQIGYICSGIFGDNPRPNDKTGSCGPVSSNGANGVKGFSFKYGNGVWIGRTKSISSRNGFEMIWDPNGWTGTDNNFSIKQDIVGINEWSGYSGSFVQHPELTGLDCIRPCFWVELIRGRPKENTIWTSGSSISFCGVNSDTVGWSWPDGAELPFTIDK

SEQ ID NO: 18169 - protein, 469 aa, synthetic construct
  REGION 1..469: note = neuraminidase__InfluenzaA__ADD23438
MNPNQKIITIGSVCMTIGMANLILQIGNIISIWISHSIQLGNQNQIETCNQSVITYENNTWVNQTYVNISNTNFAAGQSVVSVKLAGNSSLCPVSGWAIYSKDNSIRIGSKGDVFVIREPFISCSPLECRTFFLTQGALLNDKHSNGTIKDRSPYRTLMSCPIGEVPSPYNSRFESVAWSASACHDGINWLTIGISGPDNGAVAVLKYNGIITDTIKSWRNNILRTQESECACVNGSCFTVMTDGPSDGQASYKIFRIEKGKIVKSVEMNAPNYHYEECSCYPDSSEITCVCRDNWHGSNRPWVSFNQNLEYQIGYICSGIFGDNPRPNDKTGSCGPVSSNGANGVKGFSFKYGNGVWIGRTKSISSRNGFEMIWDPNGWTGTDNSFSIKQDIVGINEWSGYSGSFVQHPELTGLDCIRPCFWVELIRGRPKENTIWTSGSSISFCGVNSDTVGWSWPDGAELPFTIDK

SEQ ID NO: 18170 - protein, 469 aa, synthetic construct; identical to SEQ ID NO: 16738
  REGION 1..469: note = neuraminidase__InfluenzaA__ADD23448

SEQ ID NO: 18171 - protein, 469 aa, synthetic construct; identical to SEQ ID NO: 16738
  REGION 1..469: note = neuraminidase__InfluenzaA__ADD23458

SEQ ID NO: 18172 - protein, 469 aa, synthetic construct
  REGION 1..469: note = neuraminidase__InfluenzaA__ADD23468
MNPNQKIITIGSVCMTIGMANLILQIGNIISIWISHSIQLGNQNQIETCNQSVITYENNTWVNQTYVNISNTNFAAGQSVVSVKLAGNSSLCPVSGWAIYSKDNSIRIGSKGDVFVIREPFISCSPLECRTFFLTQGALLNDKHSNGTIKDRSPYRTLMSCPIGEVPSPYNSRFESVAWSASACHDGINWLTIGISGPDNGAVAVLKYNGIITDTIKSWRNNILRTQESECACVNGSCFTVMTDGPSDGQASYKIFRIEKGKIVKSVEMNAPNYHYEECSCYPDSSEITCVCRDNWHGSNRPWVSFNQNLEYQIGYICSGIFGDNPRPNDKTGSCGPVSSNGANGVKGFSFKYGNGVWIGRTKSISSRNGFEMIWDPNGWTGTDNNFSIKQDIVGVNEWSGYSGSFVQHPELTGLDCIRPCFWVELIRGRPKENTIWTSGSSISFCGVNSDTVGWSWPDGAELPFTIDK

SEQ ID NO: 18173 - protein, 469 aa, synthetic construct; identical to SEQ ID NO: 16738
  REGION 1..469: note = neuraminidase__InfluenzaA__ADD23478

SEQ ID NO: 18174 - protein, 469 aa, synthetic construct; identical to SEQ ID NO: 16738
  REGION 1..469: note = neuraminidase__InfluenzaA__ADD23488

SEQ ID NO: 18175 - protein, 469 aa, synthetic construct
  REGION 1..469: note = neuraminidase__InfluenzaA__ADD23498
MNPNQKIITIGSVCMTIGMANLILQIGNIISIWISHSIQLGNQNHIETCNQSVITYENNTWVNQTYVNISNTNFAAGQSVVSVKLAGNSSLCPVSGWAIYSKDNSIRIGSKGDVFVIREPFISCSPLECRTFFLTQGALLNDKHSNGTIKDRSPYRTLMSCPIGEVPSPYNSRFESVAWSASACHDGINWLTIGISGPDNGAVAVLKYNGIITDTIKSWRNNILRTQESECACVNGSCFTVMTDGPSDGQASYKIFRIEKGKIVKSVEMNAPNYHYEECSCYPDSSEITCVCRDNWHGSNRPWVSFNQNLEYQIGYICSGIFGDNPRPNDKTGSCGPVSSNGANGVKGFSFKYGNGVWIGRTKSISSRNGFEMIWDPNGWTGTDNNFSIKQDIVGINEWSGYSGSFVQHPELTGLDCIRPCFWVELIRGRPKENTIWTSGSSISFCGVNSDTVGWSWPDGAELPFTIDK

SEQ ID NO: 18176 - protein, 469 aa, synthetic construct; identical to SEQ ID NO: 16738
  REGION 1..469: note = neuraminidase__InfluenzaA__ADD23508

SEQ ID NO: 18177 - protein, 469 aa, synthetic construct; identical to SEQ ID NO: 16738
  REGION 1..469: note = neuraminidase__InfluenzaA__ADD23518

SEQ ID NO: 18178 - protein, 469 aa, synthetic construct; identical to SEQ ID NO: 16738
  REGION 1..469: note = neuraminidase__InfluenzaA__ADD23997

SEQ ID NO: 18179 - protein, 469 aa, synthetic construct; identical to SEQ ID NO: 16738
  REGION 1..469: note = neuraminidase__InfluenzaA__ADD24007

SEQ ID NO: 18180 - protein, 469 aa, synthetic construct; identical to SEQ ID NO: 16738
  REGION 1..469: note = neuraminidase__InfluenzaA__ADD24017

SEQ ID NO: 18181 - protein, 469 aa, synthetic construct; identical to SEQ ID NO: 16738
  REGION 1..469: note = neuraminidase__InfluenzaA__ADD24024

SEQ ID NO: 18182 - protein, 469 aa, synthetic construct; identical to SEQ ID NO: 16738
  REGION 1..469: note = neuraminidase__InfluenzaA__ADD24025

SEQ ID NO: 18183 - protein, 469 aa, synthetic construct; identical to SEQ ID NO: 16738
  REGION 1..469: note = neuraminidase__InfluenzaA__ADD24026

SEQ ID NO: 18184 - protein, 469 aa, synthetic construct; identical to SEQ ID NO: 16738
  REGION 1..469: note = neuraminidase__InfluenzaA__ADD24027

SEQ ID NO: 18185 - protein, 469 aa, synthetic construct; identical to SEQ ID NO: 16738
  REGION 1..469: note = neuraminidase__InfluenzaA__ADD24028

SEQ ID NO: 18186 - protein, 469 aa, synthetic construct; identical to SEQ ID NO: 16738
  REGION 1..469: note = neuraminidase__InfluenzaA__ADD24029

SEQ ID NO: 18187 - protein, 469 aa, synthetic construct; identical to SEQ ID NO: 16738
  REGION 1..469: note = neuraminidase__InfluenzaA__ADD24030

SEQ ID NO: 18188 - protein, 469 aa, synthetic construct; identical to SEQ ID NO: 16738
  REGION 1..469: note = neuraminidase__InfluenzaA__ADD24031

SEQ ID NO: 18189 - protein, 469 aa, synthetic construct; identical to SEQ ID NO: 16738
  REGION 1..469: note = neuraminidase__InfluenzaA__ADD24032

SEQ ID NO: 18190 - protein, 469 aa, synthetic construct; identical to SEQ ID NO: 16738
  REGION 1..469: note = neuraminidase__InfluenzaA__ADD25231

SEQ ID NO: 18191 - protein, 469 aa, synthetic construct; identical to SEQ ID NO: 16738
  REGION 1..469: note = neuraminidase__InfluenzaA__ADD25233

SEQ ID NO: 18192 - protein, 469 aa, synthetic construct; identical to SEQ ID NO: 16738
  REGION 1..469: note = neuraminidase__InfluenzaA__ADD25235

SEQ ID NO: 18193 - protein, 469 aa, synthetic construct; identical to SEQ ID NO: 16738
  REGION 1..469: note = neuraminidase__InfluenzaA__ADD25244

SEQ ID NO: 18194 - protein, 469 aa, synthetic construct
  REGION 1..469: note = neuraminidase__InfluenzaA__ADD25246
MNPNQKIITIGSVCMTIGMANLILQIGNIISIWISHSIQLGNQNQIETCNQSVITYENNTWVNQTYVNISNTNFAAGQSVVSVKLAGNSSLCPVSGWAIYSKDNSIRIGSKGDVFVIREPFISCSPLECRTFFLTQGALLNDKHSNGTIKDRSPYRTLMSCPIGEVPSPYNSRFESVAWSASACHDGTNWLTIGISGPDNGAVAVLKYNGIITDTIKSWRNNILRTQESECACVNGSCFTVMTDGPSDGQASYKIFRIEKGKIVKSVEMNAPNYHYEECSCYPDSSEITCVCRDNWHGSNRPWVSFNQNLEYQIGYICSGIFGDNPRPNDKTGSCGPVSSNGANGVKGFSFKYGNGVWIGRTKSISSRNGFEMIWDPNGWTGTDNNFSIKQDIVGINEWSGYSGSFVQHPELTGLDCIRPCFWVELIRGRPKENTIWTSGSSISFCGVNSDTVGWSWPDGAELPFTIDK

SEQ ID NO: 18195 - protein, 469 aa, synthetic construct; identical to SEQ ID NO: 16738
  REGION 1..469: note = neuraminidase__InfluenzaA__ADD25248

SEQ ID NO: 18196 - protein, 469 aa, synthetic construct
  REGION 1..469: note = neuraminidase__InfluenzaA__ADD25250
MNPNQKIITIGSVCMTIGMANLILQIGNIISIWISRSIQLGNQNQIETCNQSIITYENNTWVNQTYVNISNTNFAAGQSVVSVKLAGNSSLCPVSGWAIYSKDNSIRIGSKGDVFVIREPFISCSPLECRTFFLTQGALLNDKHSNGTIKDRSPYRTLMSCPIGEVPSPYNSRFESVAWSASACHDGINWLTIGISGPDNGAVAVLKYNGIITDTIKSWRNNILRTQESECACVNGSCFTVMTDGPSDGQASYKIFRIEKGKIVKSVEMNAPNYHYEECSCYPDSGEITCVCRDNWHGSNRPWVSFNQNLEYQIGYICSGIFGDNPRPNDKTGSCGPVSSNGANGVKGFSFKYGNGVWIGRTKSISSRNGFEMIWDPNGWTGTDNNFSIKQDIVGINEWSGYSGSFVQHPELTGLDCIRPCFWVELIRGRPKENTIWTSGSSISFCGVNSDTMGWSWPDGAELPFTIDK

SEQ ID NO: 18197 - protein, 469 aa, synthetic construct; identical to SEQ ID NO: 16738
  REGION 1..469: note = neuraminidase__InfluenzaA__ADD25255

SEQ ID NO: 18198 - protein, 469 aa, synthetic construct; identical to SEQ ID NO: 16738
  REGION 1..469: note = neuraminidase__InfluenzaA__ADD25259

SEQ ID NO: 18199 - protein, 469 aa, synthetic construct
  REGION 1..469: note = neuraminidase__InfluenzaA__ADD25262
MNPNQKIITIGSVCMTIGMANLILQIGNIISIWISHSIQLGNQNQIETCNQSVITYENNTWVNQTYVNISNTNFAAGQSVVSVKLAGNSSLCPVSGWAIYSKDNSIRIGSKGDVFVIREPFISCSPLECRTFFLTQGALLNDKHSNGTIKDRSPYRTLMSCPIGEVPSPYNSRFESVAWSASACHDGINWLTIGISGPDNGAVAVLKYNGIITDTIKSWRNNILRTQESECACVNGSCFTVMTDGPSDGQASYKIFRIEKGKIVKSVEMNAPNYHYEECSCYPDSSEITCVCRDNWHGSNRPWVSFNQNLEYQIGYICSGIFGDNPRPNDKKGSCGPVSSNGADGVKGFSFKYGNGVWIGRTKSISSRNGFEMIWDPNGWTGTDNNFSIKQDIVGINEWSGYSGSFVQHPELTGLDCIRPCFWVELIRGRPKENTIWTSGSSISFCGVNSDTVGWSWPDGAELPFTIDK

SEQ ID NO: 18200 - protein, 469 aa, synthetic construct
  REGION 1..469: note = neuraminidase__InfluenzaA__ADD25266
MNPNQKIITIGSVCMTIGMANLILQIGNIISIWISHSIQLGNQNQIETCNQSVITYENNTWVNQTYVNISNTNFAAGQSVVPVKLAGNSSLCPVSGWAIYSKDNSIRIGSKGDVFVIREPFISCSPLECRTFFLTQGALLNDKHSNGTIKDRSPYRTLMSCPIGEVPSPYNSRFESVAWSASACHDGINWLTIGISGPDNGAVAVLKYNGIITDTIKSWRNNILRTQESECACVNGSCFTVMTDGPSDGQASYKIFRIEKGKIVKSVEMNAPNYHYEECSCYPDSSEITCVCRDNWHGSNRPWVSFNQNLEYQIGYICSGIFGDNPRPNDKTGSCGPVSSNGANGVKGFSFKYGNGVWIGRTKSISSRNGFEMIWDPNGWTGTDNNFSIKQDIVGINEWSGYSGSFVQHPELTGLDCIRPCFWVELIRGRPKENTIWTSGSSISFCGVNSDTVGWSWPDGAELPFTIDK

SEQ ID NO: 18201 - protein, 469 aa, synthetic construct; identical to SEQ ID NO: 16738
  REGION 1..469: note = neuraminidase__InfluenzaA__ADD25268

SEQ ID NO: 18202 - protein, 469 aa, synthetic construct; identical to SEQ ID NO: 16738
  REGION 1..469: note = neuraminidase__InfluenzaA__ADD25271

SEQ ID NO: 18203 - protein, 469 aa, synthetic construct; identical to SEQ ID NO: 16738
  REGION 1..469: note = neuraminidase__InfluenzaA__ADD25274

SEQ ID NO: 18204 - protein, 469 aa, synthetic construct; identical to SEQ ID NO: 16738
  REGION 1..469: note = neuraminidase__InfluenzaA__ADD25276

SEQ ID NO: 18205 - protein, 469 aa, synthetic construct
  REGION 1..469: note = neuraminidase__InfluenzaA__ADD25278
MNPNQKIITIGSVCMTIGMANLILQIGNIISIWISRSIQLGNQNQIETCNQSIITYENNTWVNQTYVNISNTNFAAGQSVVSVKLAGNSSLCPVSGWAIYSKDNSIRIGSKGDVFVIREPFISCSPLECRTFFLTQGALLNDKHSNGTIKDRSPYRTLMSCPIGEVPSPYNSRFESVAWSASACHDGINWLTIGISGPDNGAVAVLKYNGIITDTIKSWRNNILRTQESECACVNGSCFTVMTDGPSDGQASYKIFRIEKGKIVKSVEMNAPNYHYEECSCYPDSGEITCVCRDNWHGSNRPWVSFNQNLEYQIGYICSGIFGDNPRPNDKTGSCGPVSSNGANGVKGFSFKYGNGVWIGRTKSISSRNGFEMIWDPNGWTGTDNNFSIKQDIVGINEWSGYSGSFVQHPELTGLDCIRPCFWVELIRGRPKENTIWTSGSSISFCGVNSDTVGWSWPDGAELPFTIDK

SEQ ID NO: 18206 - protein, 469 aa, synthetic construct; identical to SEQ ID NO: 16738
  REGION 1..469: note = neuraminidase__InfluenzaA__ADD25280

SEQ ID NO: 18207 - protein, 469 aa, synthetic construct; identical to SEQ ID NO: 16738
  REGION 1..469: note = neuraminidase__InfluenzaA__ADD25282

SEQ ID NO: 18208 - protein, 469 aa, synthetic construct; identical to SEQ ID NO: 18026
  REGION 1..469: note = neuraminidase__InfluenzaA__ADD25284

SEQ ID NO: 18209 - protein, 469 aa, synthetic construct; identical to SEQ ID NO: 16738
  REGION 1..469: note = neuraminidase__InfluenzaA__ADD25287

SEQ ID NO: 18210 - protein, 469 aa, synthetic construct; identical to SEQ ID NO: 16738
  REGION 1..469: note = neuraminidase__InfluenzaA__ADD25291

SEQ ID NO: 18211 - protein, 469 aa, synthetic construct; identical to SEQ ID NO: 18026
  REGION 1..469: note = neuraminidase__InfluenzaA__ADD25293

SEQ ID NO: 18212 - protein, 469 aa, synthetic construct; identical to SEQ ID NO: 16738
  REGION 1..469: note = neuraminidase__InfluenzaA__ADD25300

SEQ ID NO: 18213 - protein, 469 aa, synthetic construct
  REGION 1..469: note = neuraminidase__InfluenzaA__ADD25304
MNPNQKIITIGSVCMTIGMANLILQIGNIVSIWISHSIQLGNQNQIETCNQSVITYENNTWVNQTYVNISNTNFAAGQSVVSVKLAGNSSLCPVSGWAIYSKDNSIRIGSKGDVFVIREPFISCSPLECRTFFLTQGALLNDKHSNGTIKDRSPYRTLMSCPIGEVPSPYNSRFESVAWSASACHDGINWLTIGISGPDNGAVAVLKYNGIITDTIKSWRNNILRTQESECACVNGSCFTVMTDGPSDGQASYKIFRIEKGKIVKSVEMNAPNYHYEECSCYPDSSEITCVCRDNWHGSNRPWVSFNQNLEYQIGYICSGIFGDNPRPNDKTGSCGPVSSNGANGVKGFSFKYGNGVWIGRTKSISSRNGFEMIWDPNGWTGTDNNFSIKQDIVGINEWSGYSGSFVQHPELTGLDCIRPCFWVELIRGRPKENTIWTSGSSISFCGVNSDTVGWSWPDGAELPFTIDK

SEQ ID NO: 18214 - protein, 469 aa, synthetic construct
  REGION 1..469: note = neuraminidase__InfluenzaA__ADD25306
MNPNQKIITIGSVCMTIGMANLILQIGNIISIWISRSIQLGNQNQIETCNQSIITYENNTWVNQTYVNISNTNFAAGQSVVSVKLAGNSSLCPVSGWAIYSKDNSIRIGSKGDVFVIREPFISCSPLECRTFFLTQGALLNDKHSNGTIKDRSPYRTLMSCPIGEVPSPYNSRFESVAWSASACHDGINWLTIGISGPDNGAVAVLKYNGIITDTIKSWRNNILRTQESECACVNGSCFTVMTDEPSDGQASYKIFRIEKGKIVKSVEMNAPNYHYEECSCYPDSGEITCVCRDNWHGSNRPWVSFNQNLEYQIGYICSGIFGDNPRPNDKTGSCGPVSSNGANGVKGFSFKYGNGVWIGRTKSISSRNGFEMIWDPNGWTGTDNNFSIKQDIVGINEWSGYSGSFVQHPELTGLDCIRPCFWVELIRGRPKENTIWTSGSSISFCGVNSDTVGWSWPDGAELPFTIDK

SEQ ID NO: 18215 - protein, 469 aa, synthetic construct; identical to SEQ ID NO: 16738
  REGION 1..469: note = neuraminidase__InfluenzaA__ADD25308

SEQ ID NO: 18216 - protein, 469 aa, synthetic construct; identical to SEQ ID NO: 16738
  REGION 1..469: note = neuraminidase__InfluenzaA__ADD25310

SEQ ID NO: 18217 - protein, 469 aa, synthetic construct; identical to SEQ ID NO: 16738
  REGION 1..469: note = neuraminidase__InfluenzaA__ADD25312

SEQ ID NO: 18218 - protein, 469 aa, synthetic construct; identical to SEQ ID NO: 16738
  REGION 1..469: note = neuraminidase__InfluenzaA__ADD25314

SEQ ID NO: 18219 - protein, 469 aa, synthetic construct; identical to SEQ ID NO: 16738
  REGION 1..469: note = neuraminidase__InfluenzaA__ADD25316

SEQ ID NO: 18220 - protein, 469 aa, synthetic construct; identical to SEQ ID NO: 16738
  REGION 1..469: note = neuraminidase__InfluenzaA__ADD29799

SEQ ID NO: 18221 - protein, 469 aa, synthetic construct; identical to SEQ ID NO: 16738
  REGION 1..469: note = neuraminidase__InfluenzaA__ADD29800

SEQ ID NO: 18222 - protein, 469 aa, synthetic construct; identical to SEQ ID NO: 16738
  REGION 1..469: note = neuraminidase__InfluenzaA__ADD29801

SEQ ID NO: 18223 - protein, 469 aa, synthetic construct; identical to SEQ ID NO: 16738
  REGION 1..469: note = neuraminidase__InfluenzaA__ADD29802

SEQ ID NO: 18224 - protein, 469 aa, synthetic construct; identical to SEQ ID NO: 16738
  REGION 1..469: note = neuraminidase__InfluenzaA__ADD29803

SEQ ID NO: 18225 - protein, 469 aa, synthetic construct; identical to SEQ ID NO: 16738
  REGION 1..469: note = neuraminidase__InfluenzaA__ADD29804

SEQ ID NO: 18226 - protein, 469 aa, synthetic construct; identical to SEQ ID NO: 16738
  REGION 1..469: note = neuraminidase__InfluenzaA__ADD29805

SEQ ID NO: 18227 - protein, 469 aa, synthetic construct; identical to SEQ ID NO: 16738
  REGION 1..469: note = neuraminidase__InfluenzaA__ADD29806

SEQ ID NO: 18228 - protein, 469 aa, synthetic construct; identical to SEQ ID NO: 16738
  REGION 1..469: note = neuraminidase__InfluenzaA__ADD29807

SEQ ID NO: 18229 - protein, 469 aa, synthetic construct; identical to SEQ ID NO: 16738
  REGION 1..469: note = neuraminidase__InfluenzaA__ADD29808

SEQ ID NO: 18230 - protein, 469 aa, synthetic construct; identical to SEQ ID NO: 16738
  REGION 1..469: note = neuraminidase__InfluenzaA__ADD52538

SEQ ID NO: 18231 - protein, 469 aa, synthetic construct; identical to SEQ ID NO: 17961
  REGION 1..469: note = neuraminidase__InfluenzaA__ADD74353

SEQ ID NO: 18232 - protein, 469 aa, synthetic construct; identical to SEQ ID NO: 16738
  REGION 1..469: note = neuraminidase__InfluenzaA__ADD74373

SEQ ID NO: 18233 - protein, 469 aa, synthetic construct; identical to SEQ ID NO: 16738
  REGION 1..469: note = neuraminidase__InfluenzaA__ADD74383

SEQ ID NO: 18234 - protein, 469 aa, synthetic construct; identical to SEQ ID NO: 16738
  REGION 1..469: note = neuraminidase__InfluenzaA__ADD74401

SEQ ID NO: 18235 - protein, 469 aa, synthetic construct
  REGION 1..469: note = neuraminidase__InfluenzaA__ADD74411
MNPNQKIITIGSVCMTIGMANLILQIGNIISIWISHSIQLGNQNQIETCNQSVITYENNTWVNQTYVNISNTNVAAGQSVVSVKLAGNSSLCPVSGWAIYSKDNSIRIGSKGDVFVIREPFISCSPLECRTFFLTQGALLNDKHSNGTIKDRSPYRTLMSCPIGEVPSPYNSRFESVAWSASACHDGINWLTIGISGPDNGAVAVLKYNGIITDTIKSWRNNILRTQESECACVNGSCFTVMTDGPSDGQASYKIFRIEKGKIVKSVEMNAPNYHYEECSCYPDSSEITCVCRDNWHGSNRPWVSFNQNLEYQIGYICSGIFGDNPRPNDKTGSCGPVSSNGANGVKGFSFKYGSGVWIGRTKSISSRSGFEMIWDPNGWTGTDNNFSIKQDIVGINEWSGYSGSFVQHPELTGLDCIRPCFWVELIRGRPKENTIWTSGSSISFCGVNSDTVGWSWPDGAELPFTIDK

SEQ ID NO: 18236 - protein, 469 aa, synthetic construct; identical to SEQ ID NO: 16738
  REGION 1..469: note = neuraminidase__InfluenzaA__ADD74421

SEQ ID NO: 18237 - protein, 469 aa, synthetic construct; identical to SEQ ID NO: 16738
  REGION 1..469: note = neuraminidase__InfluenzaA__ADD74431

SEQ ID NO: 18238 - protein, 469 aa, synthetic construct
  REGION 1..469: note = neuraminidase__InfluenzaA__ADD74441
MNPNQKIITIGSVCMTIGMANLILQIGNIISIWISHSIQLGNQNQIETCNQSVITYENNTWVNQTYVNISNTNFAAGQSVVSVKLAGNSSLCPVSGWAIYSKDNSIRIGSKGDVFVIREPFISCSPLECRTFFLTQGALLNDKHSNGTIKDRSPYRTLMSCPIGEVPSPYNSRFESVAWSASACHDGINWLTIGISGPDNGAVAVLKYNGIITDTIKSWRNNILRTQESECACVNGSCFTVMTDGPSDGQASYKIFRIEKGKIVKSVEMNAPNYHYEECSCYPDSSEITCVCRDNWHGSNRPWVSFNQNLEYQIGYICSGIFGDNPRPNDKTGSCGPVSSNGANGVKGFSFKYGNGVWIGRTKSISSRNGFEMIWDPNGWTGTDNIFSIKQDIVGINEWSGYSGSFVQHPELTGLDCIRPCFWVELIRGRPKENTIWTSGSSISFCGVNSDTVGWSWPDGAELPFTIDK

SEQ ID NO: 18239 - protein, 469 aa, synthetic construct; identical to SEQ ID NO: 16738
  REGION 1..469: note = neuraminidase__InfluenzaA__ADD74451

SEQ ID NO: 18240 - protein, 469 aa, synthetic construct; identical to SEQ ID NO: 16738
  REGION 1..469: note = neuraminidase__InfluenzaA__ADD74461

SEQ ID NO: 18241 - protein, 469 aa, synthetic construct; identical to SEQ ID NO: 16738
  REGION 1..469: note = neuraminidase__InfluenzaA__ADD74471

SEQ ID NO: 18242 - protein, 469 aa, synthetic construct; identical to SEQ ID NO: 16738
  REGION 1..469: note = neuraminidase__InfluenzaA__ADD74481

SEQ ID NO: 18243 - protein, 469 aa, synthetic construct; identical to SEQ ID NO: 17755
  REGION 1..469: note = neuraminidase__InfluenzaA__ADD74491

SEQ ID NO: 18244 - protein, 469 aa, synthetic construct; identical to SEQ ID NO: 16738
  REGION 1..469: note = neuraminidase__InfluenzaA__ADD74501

SEQ ID NO: 18245 - protein, 469 aa, synthetic construct; identical to SEQ ID NO: 16738
  REGION 1..469: note = neuraminidase__InfluenzaA__ADD74511

SEQ ID NO: 18246 - protein, 469 aa, synthetic construct; identical to SEQ ID NO: 17756
  REGION 1..469: note = neuraminidase__InfluenzaA__ADD74521

SEQ ID NO: 18247 - protein, 469 aa, synthetic construct; identical to SEQ ID NO: 16738
  REGION 1..469: note = neuraminidase__InfluenzaA__ADD74531

SEQ ID NO: 18248 - protein, 469 aa, synthetic construct
  REGION 1..469: note = neuraminidase__InfluenzaA__ADD74551
MNPNQKIITIGSVCMTIGMANLILQIGNIISIWISHSIQLGNQNQIETCNQSVITYENNTWVNQTYVNISNTNFAAGQSVVSVKLAGNSSLCPVSGWAIYSKDNSVRIGSKGDVFVIREPFISCSPLECRTFFLTQGALLNDKHSNGTIKDRSPYRTLMSCPIGEVPSPYNSRFESVAWSASACHDGINWLTIGISGPDYGAVAVLKYNGIITDTIKSWRNNILRTQESECACVNGSCFTVMTDGPSDGQASYKIFRIEKGKIVKSVEMNAPNYHYEECSCYPDSSEITCVCRDNWHGSNRPWVSFNQNLEYQIGYICSGIFGDNPRPNDKTGSCGPVSSNGANGVKGFSFKYGNGVWIGRTKSISSRNGFEMIWDPNGWTGTDNNFSIKQDIVGINEWSGYSGSFVQHPELTGLDCIRPCFWVELIRGRPKENTIWTSGSSISFCGVNSDTVGWSWPDGAELPFTIDK

SEQ ID NO: 18249 - protein, 469 aa, synthetic construct; identical to SEQ ID NO: 16738
  REGION 1..469: note = neuraminidase__InfluenzaA__ADD74561

SEQ ID NO: 18250 - protein, 469 aa, synthetic construct; identical to SEQ ID NO: 16738
  REGION 1..469: note = neuraminidase__InfluenzaA__ADD74571

SEQ ID NO: 18251 - protein, 469 aa, synthetic construct
  REGION 1..469: note = neuraminidase__InfluenzaA__ADD74581
MNPNQKIITIGSVCMTIGMANLILQIGNIISIWISHSIQLGNQNQIETCNQSVITYENNTWVNQTYVNISNTNFAAGQSVVSVKLAGNSSLCPVSGWAIYSKDNSIRIGSKGDVFVIREPFISCSPLECRTFFLTQGALLNDKHSNGTIKDRSPYRTLMSCPIGEVPSPYNSRFESVAWSASACHDGINWLTIGISGPDNGAVAVLKYNGIITDTIKSWRNNILRTQESECACVNGSCFTVMTDGPSDGQASYKIFRIEKGKIVKSVEMNAPNYHYEECSCYPDSSEITCVCRDNWHGSNRPWVSFNQNLEYQIGYICSGIFGDNPRPNDKTGSCGPVSSNGANGVKGFSFKYGNGVWIGRTKSISSRNGFEMIWDPNGWTGTDNNFSIKQDIVGINEWSGYSGSFVQHPELTGLDCIRPCFWVELIRGRPKENTIWTSGSSISFCGVNSDAVGWSWPDGAELPFTIDK

SEQ ID NO: 18252 - protein, 469 aa, synthetic construct; identical to SEQ ID NO: 16738
  REGION 1..469: note = neuraminidase__InfluenzaA__ADD74591

SEQ ID NO: 18253 - protein, 469 aa, synthetic construct; identical to SEQ ID NO: 16738
  REGION 1..469: note = neuraminidase__InfluenzaA__ADD74601

SEQ ID NO: 18254 - protein, 469 aa, synthetic construct
  REGION 1..469: note = neuraminidase__InfluenzaA__ADD74611
MNPNQKIITIGSVCMTIGMANLILQIGNIISIWISHSIQLGNQNQIETCNQSVITYENNTWVNQTYVNISNTNFAAGQSVVSVKLAGNSSLCPVSGWAIYSKDNSIRIGSKGDVFVIREPFISCSPLECRTFFLTQGALLNDKHSNGTIKDRSPYRTLMSCPIGEVPSPYNSRFESVAWSASACHDGINWLTIGISGPDNGAVAVLKYNGIITDTIKSWRNNILRTQESECACVNGSCFTVMTDGPSDGQASYKIFRIEKGKIVKSVEMNAPNYHYEECSCYPDSSEITCVCRDNWHGSNRPWVSFNQNLEYQIGYICSGIFGDNPRPNDKTGSCGPVSSNGANGIKGFSFKYGNGVWIGRTKSISSRNGFEMIWDPNGWTGTDNNFSIKQDIVGINEWSGYSGSFVQHPELTGLDCIRPCFWVELIRGRPKENTIWTSGSSISFCGVNSDTVGWSWPDGAELPFTIDK

SEQ ID NO: 18255 - protein, 469 aa, synthetic construct; identical to SEQ ID NO: 16738
  REGION 1..469: note = neuraminidase__InfluenzaA__ADD74621

SEQ ID NO: 18256 - protein, 469 aa, synthetic construct; identical to SEQ ID NO: 16738
  REGION 1..469: note = neuraminidase__InfluenzaA__ADD74631

SEQ ID NO: 18257 - protein, 469 aa, synthetic construct; identical to SEQ ID NO: 16738
  REGION 1..469: note = neuraminidase__InfluenzaA__ADD74641

SEQ ID NO: 18258 - protein, 469 aa, synthetic construct; identical to SEQ ID NO: 16738
  REGION 1..469: note = neuraminidase__InfluenzaA__ADD74651

SEQ ID NO: 18259 - protein, 469 aa, synthetic construct; identical to SEQ ID NO: 18089
  REGION 1..469: note = neuraminidase__InfluenzaA__ADD74661

SEQ ID NO: 18260 - protein, 469 aa, synthetic construct; identical to SEQ ID NO: 16738
  REGION 1..469: note = neuraminidase__InfluenzaA__ADD74671

SEQ ID NO: 18261 - protein, 469 aa, synthetic construct; identical to SEQ ID NO: 16738
  REGION 1..469: note = neuraminidase__InfluenzaA__ADD74681

SEQ ID NO: 18262 - protein, 469 aa, synthetic construct
  REGION 1..469: note = neuraminidase__InfluenzaA__ADD74691
MNPNQKIITIGSVCMTIGMANLILQIGNIISIWICHSIQLGNQNQIETCNQSVITYENNTWVNQTYVNISNTNFAAGQSVVSVKLAGNSSLCPVSGWAIYSKDNSIRIGSKGDVFVIREPFISCSPLECRTFFLTQGALLNDKHSNGTIKDRSPYRTLMSCPIGEVPSPYNSRFESVAWSASACHDGINWLTIGISGPDNGAVAVLKYNGIITDTIKSWRNNILRTQESECACVNGSCFTVMTDGPSDGQASYKIFRIEKGKIVKSVEMNAPNYHYEECSCYPDSSEITCVCRDNWHGSNRPWVSFNQNLEYQIGYICSGIFGDNPRPNDKTGSCGPVSSNGANGVKGFSFKYGNGVWIGRTKSISSRNGFEMIWDPNGWTGTDNNFSIKQDIVGINEWSGYSGSFVQHPELTGLDCIRPCFWVELIRGRPKENTIWTSGSSISFCGVNSDTVGWSWPDGAELPFTIDK

SEQ ID NO: 18263 - protein, 469 aa, synthetic construct; identical to SEQ ID NO: 16738
  REGION 1..469: note = neuraminidase__InfluenzaA__ADD74701

SEQ ID NO: 18264 - protein, 469 aa, synthetic construct; identical to SEQ ID NO: 16738
  REGION 1..469: note = neuraminidase__InfluenzaA__ADD74711

SEQ ID NO: 18265 - protein, 469 aa, synthetic construct; identical to SEQ ID NO: 16738
  REGION 1..469: note = neuraminidase__InfluenzaA__ADD74721

SEQ ID NO: 18266 - protein, 469 aa, synthetic construct; identical to SEQ ID NO: 16738
  REGION 1..469: note = neuraminidase__InfluenzaA__ADD74731

SEQ ID NO: 18267 - protein, 469 aa, synthetic construct
  REGION 1..469: note = neuraminidase__InfluenzaA__ADD74741
MNPNQKIITIGSVCITIGMANLILQIGNIISIWISHSIQLGNQNQIETCNQSVITYENNTWVNQTYVNISNTNFAAGQSVVSVKLAGSSSLCPVSGWAIYSKDNSIRIGSKGDVFVIREPFISCSPLECRTFFLTQGALLNDKHSNGTIKDRSPYRTLMSCPIGEVPSPYNSRFESVAWSASACHDGINWLTIGISGPDNGAVAVLKYNGIITDTIKSWRNNILRTQESECACVNGSCFTVMTDGPSDGQASYKIFRIEKGKIVKSVEMNAPNYHYEECSCYPDSSEITCVCRDNWHGSNRPWVSFNQNLEYQIGYICSGIFGDNPRPNDKKGSCGPVSSNGANGVKGFSFKYGNGVWIGRTKSISSRNGFEMIWDPNGWTGTDNNFSIKQDIVGINEWSGYSGSFVQHPELTGLDCIRPCFWVELIRGRPKENTIWTSGSSISFCGVNSDTVGWSWPDGAELPFTIDK

SEQ ID NO: 18268 - protein, 469 aa, synthetic construct
  REGION 1..469: note = neuraminidase__InfluenzaA__ADD74751
MNPNQKIITIGSVCMTIGMANLILQIGNIISIWISHSIQLGNKNQIETCNQSVITYENNTWVNQTYVNISNTNFAAGQSVVSVKLAGNSSLCPVSGWAIYSKDNSIRIGSKGDVFVIREPFISCSPLECRTFFLTQGALLNDKHSNGTIKDRSPYRTLMSCPIGEVPSPYNSRFESVAWSASACHDGINWLTIGISGPDNGAVAVLKYNGIITDTIKSWRNNILRTQESECACVNGSCFTVMTDGPSDGQASYKIFRIEKGKIVKSVEMNAPNYHYEECSCYPDSSEITCVCRDNWHGSNRPWVSFNQNLKYQIGYICSGIFGDNPRPNDKKGSCGPVSSNGANGVKGFSFKYGNGVWIGRTKSISSRNGFEMIWDPNGWTGTDNNFSIKQDIVGMNEWSGYSGSFVQHPELTGLDCIRPCFWVELIRGRPKENTIWTSGSSISFCGVNSDTVGWSWPDGAELPFTIDK

SEQ ID NO: 18269 - protein, 469 aa, synthetic construct
  REGION 1..469: note = neuraminidase__InfluenzaA__ADD74761
MNPNQKIITIGSVCMTIGMANLILQIGNIISIWISHSIQLGNQNQIETCNQSVITYENNTWVNQTYVNISNTNFAAGQSVVSVKLAGNSSLCPVSGWAIYSKDNSIRIGSKGDVFVIREPFISCSPLECRTFFLTQGALLNDKHSNGTIKDRSPYRTLMSCPIGEVPSPYNSRFESVAWSASACHDGINWLTIGISGPDNGAVAVLKYNGIITDTIKSWRNNILRTQESECACVNGSCFTVMTDGPSDGQASYKIFRIEKGKIVKSVEMNAPNYHYEECSCYPDSSEITCVCRDNWHGSNRPWVSFNQNLEYQIGYICSGIFGDNPRPNDKTGSCGPVSSNGANGVKGFSFKYGNGVWIGRTKSISSRNGFEMIWDPNGWTGTDNNFSIKQDIVGINEWSGYSGSFVQHPELTGLDCIRPCFWVELIRGRPKENTIWTSGSSISFCGINSDTVGWSWPDGAELPFTIDK

SEQ ID NO: 18270 - protein, 469 aa, synthetic construct; identical to SEQ ID NO: 16738
  REGION 1..469: note = neuraminidase__InfluenzaA__ADD74791

SEQ ID NO: 18271 - protein, 469 aa, synthetic construct; identical to SEQ ID NO: 17321
  REGION 1..469: note = neuraminidase__InfluenzaA__ADD74811

SEQ ID NO: 18272 - protein, 469 aa, synthetic construct; identical to SEQ ID NO: 16738
  REGION 1..469: note = neuraminidase__InfluenzaA__ADD74821

SEQ ID NO: 18273 - protein, 469 aa, synthetic construct
  REGION 1..469: note = neuraminidase__InfluenzaA__ADD74831
MNPNQKIITIGSICMTIGMANLILQIGNIISIWISHSIQLGNQNQIETCNQSVITYENNTWVNQTYVNISNTNFAAGQSVVSVKLAGNSSLCPVSGWAIYSKDNSIRIGSKGDVFVIREPFISCSPLECRTFFLTQGALLNDKHSNGTIKDRSPYRTLMSCPIGEVPSPYNSRFESVAWSASACHDGINWLTIGISGPDNGAVAVLKYNGIITDTIKSWRNNILRTQESECACLNGSCFTVMTDGPSDGQASYKIFRIEKGKIVKSVEMNAPNYHYEECSCYPDSSEITCVCRDNWHGSNRPWVSFNQNLEYQIGYICSGIFGDNPRPNDKTGSCGPVSSNGANGVKGFSFKYGNGVWIGRTKSISSRNGFEMIWDPNGWTGTDNNFSIKQDIVGINEWSGYSGSFVQHPELTGLDCIRPCFWVELIRGRPKENTIWTSGSSISFCGVNSDTVGWSWPDGAELPFTIDK

SEQ ID NO: 18274 - protein, 469 aa, synthetic construct; identical to SEQ ID NO: 16738
  REGION 1..469: note = neuraminidase__InfluenzaA__ADD74841

SEQ ID NO: 18275 - protein, 469 aa, synthetic construct; identical to SEQ ID NO: 16738
  REGION 1..469: note = neuraminidase__InfluenzaA__ADD74851

SEQ ID NO: 18276 - protein, 469 aa, synthetic construct; identical to SEQ ID NO: 17845
  REGION 1..469: note = neuraminidase__InfluenzaA__ADD74861

SEQ ID NO: 18277 - protein, 469 aa, synthetic construct; identical to SEQ ID NO: 16738
  REGION 1..469: note = neuraminidase__InfluenzaA__ADD74871

SEQ ID NO: 18278 - protein, 469 aa, synthetic construct; identical to SEQ ID NO: 16738
  REGION 1..469: note = neuraminidase__InfluenzaA__ADD74881

SEQ ID NO: 18279 - protein, 469 aa, synthetic construct; identical to SEQ ID NO: 16738
  REGION 1..469: note = neuraminidase__InfluenzaA__ADD74891

SEQ ID NO: 18280 - protein, 469 aa, synthetic construct; identical to SEQ ID NO: 16738
  REGION 1..469: note = neuraminidase__InfluenzaA__ADD74901

SEQ ID NO: 18281 - protein, 469 aa, synthetic construct; identical to SEQ ID NO: 16738
  REGION 1..469: note = neuraminidase__InfluenzaA__ADD74911

SEQ ID NO: 18282 - protein, 469 aa, synthetic construct; identical to SEQ ID NO: 16738
  REGION 1..469: note = neuraminidase__InfluenzaA__ADD74921

SEQ ID NO: 18283 - protein, 469 aa, synthetic construct; identical to SEQ ID NO: 16738
  REGION 1..469: note = neuraminidase__InfluenzaA__ADD74941

SEQ ID NO: 18284 - protein, 469 aa, synthetic construct
  REGION 1..469: note = neuraminidase__InfluenzaA__ADD74961
MNPNQKIITIGSVCMTIGMANLILQIGNIISIWISHSIQLGNQNQIGTCNQSVITYENNTWVNHTYVNISNTNFAAGQSVVSVKLAGNSSLCPVSGWAIYSKDNSVRIGSKGDVFVIREPFISCSPLECRTFFLTQGALLNDKHSNGTIKDRSPYRTLMSCPIGEVPSPYNSRFESVAWSASACHDGINWLTIGISGPDNGAVAVLKYNGIITDTIKSWRNNILRTQESECACVNGSCFTVMTDGPSDGQASYKIFRIEKGKIVKSVEMNAPNYHYEECSCYPDSSEITCVCRDNWHGSNRPWVSFNQNLEYQIGYICSGIFGDNPRPNDKTGSCGPVSSNGANGVKGFSFKYGNGVWIGRTKSISSRNGFEMIWDPNGWTGTDNNFSIKQDIVGINEWSGYSGSFVQHPELTGLDCIRPCFWVELIRGRPKENTIWTSGSSISFCGVNSDTVGWSWPDGAELPFTIDK

SEQ ID NO: 18285 - protein, 469 aa, synthetic construct; identical to SEQ ID NO: 16738
  REGION 1..469: note = neuraminidase__InfluenzaA__ADD74971

SEQ ID NO: 18286 - protein, 469 aa, synthetic construct
  REGION 1..469: note = neuraminidase__InfluenzaA__ADD74981
MNPNQKIITIGSVCMTIGMANLILQIGNIISIWISHSIQLGNQNQIETCNQSIITYENNTWVNQTYVNISNTNFAAGQSVVSVKLAGNSSLCPVSGWAIYSKDNSIRIGSKGDVFVIREPFISCSPLECRTFFLTQGALLNDKHSNGTIKDRSPYRTLMSCPIGEVPSPYNSRFESVAWSASACHDGINWLTIGISGPDNGAVAVLKYNGIITDTIKSWRNNILRTQESECACVNGSCFTVMTDGPSDGQASYKIFRIEKGKIVKSVEMNAPNYHYEECSCYPDSSEITCVCRDNWHGSNRPWVSFNQNLEYQIGYICSGIFGDNPRPNDKTGSCGPVSSNGANGVKGFSFKYGNGVWIGRTKSISSRSGFEMIWDPNGWTGTDNNFSIKQDIVGINEWSGYSGSFVQHPELTGLDCIRPCFWVELIRGRPEENTIWTSGSSISFCGVNSDTVGWSWPDGAELPFTIDK

SEQ ID NO: 18287 - protein, 469 aa, synthetic construct; identical to SEQ ID NO: 16738
  REGION 1..469: note = neuraminidase__InfluenzaA__ADD74991

SEQ ID NO: 18288 - protein, 469 aa, synthetic construct; identical to SEQ ID NO: 16738
  REGION 1..469: note = neuraminidase__InfluenzaA__ADD75001

SEQ ID NO: 18289 - protein, 469 aa, synthetic construct
  REGION 1..469: note = neuraminidase__InfluenzaA__ADD75011
MNPNQKIITIGSVCMTIGMANLILQIGNIISIWISHSIQLGNQNQIETCNQSVITYENNTWVNQTYVNISNTNFAAGQSVVSVKLAGNSSLCPVSGWAIYSKDNSIRIGSKGDVFVIREPFISCSPLECRTFFLTQGALLNDKHSNGTIKDRSPYRTLMSCPIGEVPSPYNSRFESVAWSASACHDGINWLTIGISGPDNGAVAVLKYNGIITDTIKSWRNNILRTQESECACVNGSCFTVMTDGPSDGQASYKIFRIEKGKIVKSVEMNAPNYHYEECSCYPDSSEITCVCRDNWHGSNRPWVSFNQNLEYQIGYICSGIFGDNPRPNDKTGSCDPVSSNGANGVKGFSFKYGNGVWIGRTKSISSRNGFEMIWDPNGWTGTDNNFSIKQDIVGINEWSGYSGSFVQHPELTGLDCIRPCFWVELIRGRPKENTIWTSGSSISFCGVNSDTVGWSWPDGAELPFTIDK

SEQ ID NO: 18290 - protein, 469 aa, synthetic construct; identical to SEQ ID NO: 18026
  REGION 1..469: note = neuraminidase__InfluenzaA__ADD75031

SEQ ID NO: 18291 - protein, 469 aa, synthetic construct
  REGION 1..469: note = neuraminidase__InfluenzaA__ADD75041
MNPNQKIITIGSVCMTIGMANLILQIGNIISIWISHSIQLGNQNQIETCNQSVITYENKTWVNQTYVNISNTNFAAGQSVVSVKLAGNSSLCPVSGWAIYSKDNSIRIGSKGDVFVIREPFISCSPLECRTFFLTQGALLNDKHSNGTIKDRSPYRTLMSCPIGEVPSPYNSRFESVAWSASACHDGINWLTIGISGPDNGAVAVLKYNGIITDTIKSWRNNILRTQESECACVNGSCFTVMTDGPSDGQASYKIFRIEKGKIVKSVEMNAPNYHYEECSCYPDSSEITCVCRDNWHGSNRPWVSFNQNLEYQIGYICSGIFGDNPRPNDKTGSCGPVSSNGANGVKGFSFKYGNGVWIGRTKSISSRNGFEMIWDPNGWTGTDNNFSIKQDIVGINEWSGYSGSFVQHPELTGLDCIRPCFWVELIRGRPKENTIWTSGSSISFCGVNSDTVGWSWPDGAELPFTIDK

SEQ ID NO: 18292 - protein, 469 aa, synthetic construct; identical to SEQ ID NO: 16738
  REGION 1..469: note = neuraminidase__InfluenzaA__ADD75051

SEQ ID NO: 18293 - protein, 469 aa, synthetic construct; identical to SEQ ID NO: 16738
  REGION 1..469: note = neuraminidase__InfluenzaA__ADD75061

SEQ ID NO: 18294 - protein, 469 aa, synthetic construct; identical to SEQ ID NO: 16738
  REGION 1..469: note = neuraminidase__InfluenzaA__ADD75071

SEQ ID NO: 18295 - protein, 469 aa, synthetic construct; identical to SEQ ID NO: 16738
  REGION 1..469: note = neuraminidase__InfluenzaA__ADD75081

SEQ ID NO: 18296 - protein, 469 aa, synthetic construct
  REGION 1..469: note = neuraminidase__InfluenzaA__ADD75091
MNPNQKIITIGSVCMTIGMANLILQIGNIISIWISHSIQLGNQNQIETCNQSVITYENNTWVNQTYVNISNTNFAAGQSVVSVKLAGNSSLCPVSGWAIYSKDNSIRIGSKGDVFVIREPFISCSPLECRTFFLTQGALLNDKHSNGTIKDRSPYRTLMSCPIGEVPSPYNSRFESVAWSASACHDGINWLTIGISGPDNGAVAVLKYNGIITDTIKSWRNNILRTQESECACVNGSCFTVMTDGPSDGQASYKIFRIEKGKIVKSVEMNAPNYHYEECSCYPDSSEITCVCRDNWHGSNRPWVSFNQNLEYQIGYICSGIFGDNPRPNDKTGSCGPVSSNGANGVKGFSFKYGNGVWIGRTKSISSRSGFEMIWDPNGWTGTDNNFSIKQDIVGINEWSGYSGSFVQHPELTGLDCIRPCFWVELIRGRPKENTIWTSGSSISFCGVNSDTVGWSWPDGAELPFTIDK

SEQ ID NO: 18297 - protein, 469 aa, synthetic construct; identical to SEQ ID NO: 16738
  REGION 1..469: note = neuraminidase__InfluenzaA__ADD75101

SEQ ID NO: 18298 - protein, 469 aa, synthetic construct; identical to SEQ ID NO: 16738
  REGION 1..469: note = neuraminidase__InfluenzaA__ADD75111

SEQ ID NO: 18299 - protein, 469 aa, synthetic construct; identical to SEQ ID NO: 16738
  REGION 1..469: note = neuraminidase__InfluenzaA__ADD75121

SEQ ID NO: 18300 - protein, 469 aa, synthetic construct; identical to SEQ ID NO: 16738
  REGION 1..469: note = neuraminidase__InfluenzaA__ADD75131

SEQ ID NO: 18301 - protein, 469 aa, synthetic construct; identical to SEQ ID NO: 16738
  REGION 1..469: note = neuraminidase__InfluenzaA__ADD75141

SEQ ID NO: 18302 - protein, 469 aa, synthetic construct
  REGION 1..469: note = neuraminidase__InfluenzaA__ADD75161
MNPNQKIITIGSVCMTIGMANLILQIGNIISIWISHSIQLGNQNQIETCNQSVITYENNTWVNQTYVNISNTNFAAGQSVVSVKLAGNSSLCPVSGWAIYSKDNSIRIGSKGDVFVIREPFISCSPLECRTFFLTQGALLNDKHSNGTIKDRSSYRTLMSCPIGEVPSPYNSRFESVAWSASACHDGINWLTIGISGPDNGAVAVLKYNGIITDTIKSWRNNILRTQESECACVNGSCFTVMTDGPSDGQASYKIFRIEKGKIVKSVEMNAPNYHYEECSCYPDSSEITCVCRDNWHGSNRPWVSFNQNLEYKIGYICSGIFGDNPRPNDKTGSCGPVSSNGANGVKGFSFKYGNGVWIGRTKSISSRNGFEMIWDPNGWTGTDNNFSIKQDIVGINEWSGYSGSFVQHPELTGLDCIRPCFWVELIRGRPKENTIWTSGSSISFCGVNSDTVGWSWPDGAELPFTIDR

SEQ ID NO: 18303 - protein, 469 aa, synthetic construct
  REGION 1..469: note = neuraminidase__InfluenzaA__ADD84500
MNPNQNIITIGSVCMTIGMANLILQIGNIISIWISHSIQLGNQNQIETCNQSVITYENNTWVNQTYVNISNTNFAAGQSVVSVKLAGNSSLCPVSGWAIYSKDNSIRIGSKGDVFVIREPFISCSPLECRTFFLTQGALLNDKHSNGTIKDRSPYRTLMSCPIGEVPSPYNSRFESVAWSASACHDGINWLTIGISGPDNGAVAVLKYNGIITDTIKSWRNNILRTQESECACVNGSCFIVMTDGPSDGQASYKIFRIEKGKIVKSVEMNAPNYHYEECSCYPDSSEITCVCRDNWHGSNRPWVSFNQNLEYQIGYICSGIFGDNPRPNDKTGSCGPVSSNGANGVKGFSFKYGNGVWIGRTKSISSRNGFEMIWDPNGWTGTDNNFSIKQDIVGINEWSGYSGSFVQHPELTGLDCIRPCFWVELIRGRPKENTIWTSGSSISFCGVNSDTVGWSWPDGAELPFTIDK

SEQ ID NO: 18304 - protein, 469 aa, synthetic construct
  REGION 1..469: note = neuraminidase__InfluenzaA__ADD84502
MNPNQNIITIGSVCMTIGMANLILQIGNIISIWISHSIQLGNQNQIETCNQSVITYENNTWVNQTYVNISNTNFAAGQSVVSVKLAGNSSLCPVSGWAIYSKDNSIRIGSKGDVFVIREPFISCSPLECRTFFLTQGALLNDKHSNGTIKDRSPYRTLMSCPIGEVPSPYNSRFESVAWSASACHDGINWLTIGISGPDNGAVAVLKYNGIITDTIKSWRNNILRTQESECACVNGSCFTVMTDGPSDGQASYKIFRIEKGKIVKSVEMNAPNYHYEECSCYPDSSEITCVCRDNWHGSNRPWVSFNQNLEYQIGYICSGIFGDNPRPNDKTGSCGPVSSNGANGVKGFSFKYGNGVWIGRTKSISSRNGFEMIWDPNGWTGTDNNFSIKQDIVGINEWSGYSGSFVQHPELTGLDCIRPCFWVELIRGRPKENTIWTSGSSISFCGVNSDTVGWSWPDGAELPFTIDK

SEQ ID NO: 18305 - protein, 469 aa, synthetic construct; identical to SEQ ID NO: 18304
  REGION 1..469: note = neuraminidase__InfluenzaA__ADD84503

SEQ ID NO: 18306 - protein, 469 aa, synthetic construct
  REGION 1..469: note = neuraminidase__InfluenzaA__ADD84504
MNPNQNIITIGSVCMTIGMANLILQIGNIISIWISHSIQLGNQNQIETCNQSVITYENNTWVNQTYVNISNTNFAAGQSVVSVKLAGNFSLCPVSGWAIYSKDNSIRIGSKGDVFVIREPFISCSPLECRTFFLTQGALLNDKHSNGTIKDRSPYRTLMSCPIGEVPSPYNSRFESVAWSASACHDGINWLTIGISGPDNGAVAVLKYNGIITDTIKSWRNNILRTQESECACVNGSCFTVMTDGPSDGQASYKIFRIEKGKIVKSVEMNAPNYHYEECSCYPDSSEITCVCRDNWHGSNRPWVSFNQNLEYQIGYICSGIFGDNPRPNDKTGSCGPVSSNGANGVKGFSFKYGNGVWIGRTKSISSRNGFEMIWDPNGWTGTDNNFSIKQDIVGINEWSGYSGSFVQHPELTGLDCIRPCFWVELIRGRPKENTIWTSGSSISFCGVNSDTVGWSWPDGAELPFTIDK

SEQ ID NO: 18307 - protein, 469 aa, synthetic construct; identical to SEQ ID NO: 18304
  REGION 1..469: note = neuraminidase__InfluenzaA__ADD84505

SEQ ID NO: 18308 - protein, 469 aa, synthetic construct; identical to SEQ ID NO: 18304
  REGION 1..469: note = neuraminidase__InfluenzaA__ADD84506

SEQ ID NO: 18309 - protein, 469 aa, synthetic construct
  REGION 1..469: note = neuraminidase__InfluenzaA__ADD92528
MNPNQKIITIGSVCMTIGMANLILQIGNIISIWISHSIQLGNQNQIETCNQSVITYENNTWVNQTYVNISNTNFAAGQSVVSVKLAGNSSLCPVSGWAIYSKDNSIRIGSKGDVFVIREPFISCSPLECRTFFLTQGALLNDKHSNGTIKDRSPYRTLMSCPIGEVPSPYNSRFESVAWSASACHDGINWLTIGISGPDNGAVAVLKYNGIITDTIKSWRNNILRTQESECACVNGSCFTVMTDGPSDGQASYKIFRIEKGKIVKSVEMNAPNYHYEECSCYPDSSEITCVCRDNWHGSNRPWVSFNQNLEYQIGYICSGIFGDNPRPNDKTGSCGPVSSNGANGVKGFSFKYGNGVWIGRTKSISSRNGFEMIWDPNGWTGTDNNFSIKQDIVGINEWSGHSGSSVQHPELTGLDCIRPCFWVELIRGRPKENTIWTSGSSISFCGVNSDTVGWSWPDGAELPFTIDK

SEQ ID NO: 18310 - protein, 469 aa, synthetic construct; identical to SEQ ID NO: 17961
  REGION 1..469: note = neuraminidase__InfluenzaA__ADD96769

SEQ ID NO: 18311 - protein, 469 aa, synthetic construct; identical to SEQ ID NO: 17961
  REGION 1..469: note = neuraminidase__InfluenzaA__ADD96779

SEQ ID NO: 18312 - protein, 469 aa, synthetic construct; identical to SEQ ID NO: 17961
  REGION 1..469: note = neuraminidase__InfluenzaA__ADD96789

SEQ ID NO: 18313 - protein, 469 aa, synthetic construct; identical to SEQ ID NO: 18089
  REGION 1..469: note = neuraminidase__InfluenzaA__ADD96799

SEQ ID NO: 18314 - protein, 469 aa, synthetic construct; identical to SEQ ID NO: 16738
  REGION 1..469: note = neuraminidase__InfluenzaA__ADD96809

SEQ ID NO: 18315 - protein, 469 aa, synthetic construct
  REGION 1..469: note = neuraminidase__InfluenzaA__ADD96819
MNPNQKIITIGSVCMTIGMANLILQIGNIISIWISHSIQLGNQNQIETCNQSVITYENNTWVNQTYVNISNTNFAAGQSVVSVKLAGSSSLCPVSGWAIYSKDNSIRIGSKGDVFVIREPFISCSPLECRTFFLTQGALLNDKHSNGTIKDRSPYRTLMSCPIGEVPSPYNSRFESVAWSASACHDGINWLTIGISGPDNGAVAVLKYNGIITDTIKSWRNNILRTQESECACVNGSCFTVMTDGPSDGQASYKIFRIEKGKIVKSVEMNAPNYHYEECSCYPDSSEITCVCRDNWHGSNRPWVSFNQNLEYQIGYICSGIFGDNPRPNDKKGSCGPVSSNGANGVKGFSFKYGNGVWIGRTKSISSRNGFEMIWDPNGWTGTDNNFSIKQDIVGINEWSGYSGSFVQHPELTGLDCIRPCFWVELIRGRPKENTIWTSGSSISFCGVNSDTVGWSWPDGAELPFTIDK

SEQ ID NO: 18316 - protein, 469 aa, synthetic construct; identical to SEQ ID NO: 16738
  REGION 1..469: note = neuraminidase__InfluenzaA__ADD96829

SEQ ID NO: 18317 - protein, 469 aa, synthetic construct; identical to SEQ ID NO: 16738
  REGION 1..469: note = neuraminidase__InfluenzaA__ADD96839

SEQ ID NO: 18318 - protein, 469 aa, synthetic construct; identical to SEQ ID NO: 16738
  REGION 1..469: note = neuraminidase__InfluenzaA__ADD96849

SEQ ID NO: 18319 - protein, 469 aa, synthetic construct; identical to SEQ ID NO: 16738
  REGION 1..469: note = neuraminidase__InfluenzaA__ADD96859

SEQ ID NO: 18320 - protein, 469 aa, synthetic construct
  REGION 1..469: note = neuraminidase__InfluenzaA__ADD96869
MNPNQKIITIGSVCMTIGMANLILQIGNIISIWISHPIQLGNQNQIETCNQSVITYENNTWVNQTYVNISNTNFAAGQSVVSVKLAGNSSLCPVSGWAIYSKDNSIRIGSKGDVFVIREPFISCSPLECRTFFLTQGALLNDKHSNGTIKDRSPYRTLMSCPIGEVPSPYNSRFESVAWSASACHDGINWLTIGISGPDNGAVAVLKYNGIITDTIKSWKNNILRTQESECACVNGSCFTVMTDGPSDGQASYKIFRIEKGKIVKSVEMNAPNYHYEECSCYPDSSEITCVCRDNWHGSNRPWVSFNQNLEYQIGYICSGIFGDNPRPNDKTGSCGPVSSNGANGVKGFSFKYGNGVWIGRTKSISSRNGFEMIWDPNGWTGTDNNFSIKQDIVGINEWSGYSGSFVQHPELTGLDCIRPCFWVELIRGRPKENTIWTSGSSISFCGVNSDTVGWSWPDGAELPFTIDK

SEQ ID NO: 18321 - protein, 469 aa, synthetic construct
  REGION 1..469: note = neuraminidase__InfluenzaA__ADD96879
MNPNQKIITIGSVCMTIGMANLILQIGNIISIWISHSIQLGNQNQIETCNQSVITYENNTWVNQTYVNISNTNFAAGQSVVSVKLAGNSSLCPVSGWAIYSKDNSIRIGSKGDVFVIREPFISCSPLGCRTFFLTQGALLNDKHSNGTIKDRSPYRTLMSCPIGEVPSPYNSRFESVAWSASACHDGINWLTIGISGPDNGAVAVLKYNGIITDTIKSWRNNILRTQESECACVNGSCFTVMTDGPSDGQASYKIFRIEKGKIVKSVEMNAPNYHYEECSCYPDSSEITCVCRDNWHGSNRPWVSFNQNLEYQIGYICSGIFGDNPRPNDKTGSCGPVSSNGANGVKGFSFKYGNGVWIGRTKSISSRNGFEMIWDPNGWTGTDNNFSIKQDIVGINEWSGYSGSFVQHPELTGLDCIRPCFWVELIRGRPKENTIWTSGSSISFCGVNSDTVGWSWPDGAELPFTIDK

SEQ ID NO: 18322 - protein, 469 aa, synthetic construct; identical to SEQ ID NO: 16738
  REGION 1..469: note = neuraminidase__InfluenzaA__ADD96889

SEQ ID NO: 18323 - protein, 469 aa, synthetic construct; identical to SEQ ID NO: 17321
  REGION 1..469: note = neuraminidase__InfluenzaA__ADD96899

SEQ ID NO: 18324 - protein, 469 aa, synthetic construct; identical to SEQ ID NO: 16738
  REGION 1..469: note = neuraminidase__InfluenzaA__ADD96909

SEQ ID NO: 18325 - protein, 469 aa, synthetic construct; identical to SEQ ID NO: 16738
  REGION 1..469: note = neuraminidase__InfluenzaA__ADD96919

SEQ ID NO: 18326 - protein, 469 aa, synthetic construct; identical to SEQ ID NO: 16738
  REGION 1..469: note = neuraminidase__InfluenzaA__ADD96929

SEQ ID NO: 18327 - protein, 469 aa, synthetic construct; identical to SEQ ID NO: 16738
  REGION 1..469: note = neuraminidase__InfluenzaA__ADD96939

SEQ ID NO: 18328 - protein, 469 aa, synthetic construct; identical to SEQ ID NO: 16738
  REGION 1..469: note = neuraminidase__InfluenzaA__ADD96959

SEQ ID NO: 18329 - protein, 469 aa, synthetic construct; identical to SEQ ID NO: 16738
  REGION 1..469: note = neuraminidase__InfluenzaA__ADD96969

SEQ ID NO: 18330 - protein, 469 aa, synthetic construct
  REGION 1..469: note = neuraminidase__InfluenzaA__ADD96989
MNPNQKIITIGSVCMTIGMANLILQIGNIISIWISHSIQLGNQNQIETCNQSVITYENNTWVNQTYVNISNTNFAAGQSVVSVKLAGNSSLCPVSGWAIYSKDNSIRIGSKGDVFVIREPFISCSPLECRTFFLTQGALLNDKHSNGTIKDRSSYRTLMSCPIGEVPSPYNSRFESVAWSASACHDGINWLTIGISGPDNGAVAVLKYNGIITDTIKSWRNNILRTQESECACVNGSCFTVMTDGPSDGQASYKIFRIEKGKIVKSVEMNAPNYHYEECSCYPDSSEITCVCRDNWHGSNRPWVSFNQNLEYQIGYICSGIFGDNPRPNDKTGSCGPVSSNGANGVKGFSFKYGNGVWIGRTKSISSRNGFEMIWDPNGWTGTDNNFSIKQDIVGINEWSGYSGSFVQHPELTGLDCIRPCFWVELIRGRPKENTIWTSGSSISFCGVNSDTVGWSWPDGAELPFTIDK

SEQ ID NO: 18331 - protein, 469 aa, synthetic construct
  REGION 1..469: note = neuraminidase__InfluenzaA__ADD97038
MNPNQKIITIGSVCMTIGMANLILQIGNIISIWISHSIQLGNQNQIETCNQSVITYENNTWVNQTYVNISNTNFAAGQSVVSVKLAGNSSLCPVSGWAIYSKDNSIRIGSKGDVFVIREPFISCSPLECRTFFLTQGALLNDKHSNGTIKDRSPYRTLMSCPIGEVPSPYNSRFESVAWSASACHDGINWLTIGISGPDNGAVAVLKYNGIITDTIKSWRNNILRTQESECACVNGSCFTVMTDGPSDGQASYKIFRIEKGKIVKSVEMNAPNYHYEECSCYPDSSEITCVCRDNWHGSNRPWVSFNQNLEYQIGYICSGIFGDNPRPNDKTGSCGPVSSNGANGVKGFSFKYGNGVWIGRTKSISSRNGFEMIWDPNGWIGTDNNFSIKQDIVGINEWSGYSGSFVQHPELTGLDCIRPCFWVELIRGRPKENTIWTSGSSISFCGVNSDTGGWSWPDGAELPFTIDK

SEQ ID NO: 18332 - protein, 469 aa, synthetic construct; identical to SEQ ID NO: 16738
  REGION 1..469: note = neuraminidase__InfluenzaA__ADD97048

SEQ ID NO: 18333 - protein, 469 aa, synthetic construct; identical to SEQ ID NO: 16738
  REGION 1..469: note = neuraminidase__InfluenzaA__ADD97058

SEQ ID NO: 18334 - protein, 469 aa, synthetic construct; identical to SEQ ID NO: 16738
  REGION 1..469: note = neuraminidase__InfluenzaA__ADD97069

SEQ ID NO: 18335 - protein, 469 aa, synthetic construct; identical to SEQ ID NO: 16738
  REGION 1..469: note = neuraminidase__InfluenzaA__ADD97126

SEQ ID NO: 18336 - protein, 469 aa, synthetic construct; identical to SEQ ID NO: 16738
  REGION 1..469: note = neuraminidase__InfluenzaA__ADD97164

SEQ ID NO: 18337 - protein, 469 aa, synthetic construct; identical to SEQ ID NO: 16738
  REGION 1..469: note = neuraminidase__InfluenzaA__ADD97174

SEQ ID NO: 18338 - protein, 469 aa, synthetic construct; identical to SEQ ID NO: 16738
  REGION 1..469: note = neuraminidase__InfluenzaA__ADD97184

SEQ ID NO: 18339 - protein, 469 aa, synthetic construct
  REGION 1..469: note = neuraminidase__InfluenzaA__ADD97194
MNPNQKIITIGSVCMTIGMANLILQIGNIISIWISHSIQLGNQNQIETCNQSVITYENNTWVNQTYVNISNANFAAGQSVVSVKLAGNSSLCPVSGWAIYSKDNSIRIGSKGDVFVIREPFISCSPLECRTFFLTQGALLNDKHSNGTIKDRSPYRTLMSCPIGEVPSPYNSRFESVAWSASACHDGINWLTIGISGPDNGAVAVLKYNGIITDTIKSWRNNILRTQESECACVNGSCFTVMTDGPSDGQASYKIFRIEKGKIVKSVEMNAPNYHYEECSCYPDSSEITCVCRDNWHGSNRPWVSFNQNLEYQIGYICSGIFGDNPRPNDKTGSCGPVSSNGANGVKGFSFKYGNGVWIGRTKSISSRNGFEMIWDPNGWTGTDNNFSIKQDIVGINEWSGYSGSFVQHPELTGLDCIRPCFWVELIRGRPKENTIWTSGSSISFCGVNSDTVGWSWPDGAELPFTIDK

SEQ ID NO: 18340 - protein, 469 aa, synthetic construct; identical to SEQ ID NO: 18330
  REGION 1..469: note = neuraminidase__InfluenzaA__ADD97204

SEQ ID NO: 18341 - protein, 469 aa, synthetic construct; identical to SEQ ID NO: 16738
  REGION 1..469: note = neuraminidase__InfluenzaA__ADD97214

SEQ ID NO: 18342 - protein, 469 aa, synthetic construct; identical to SEQ ID NO: 16738
  REGION 1..469: note = neuraminidase__InfluenzaA__ADD97224

SEQ ID NO: 18343 - protein, 469 aa, synthetic construct; identical to SEQ ID NO: 16738
  REGION 1..469: note = neuraminidase__InfluenzaA__ADD97234

SEQ ID NO: 18344 - protein, 469 aa, synthetic construct; identical to SEQ ID NO: 16738
  REGION 1..469: note = neuraminidase__InfluenzaA__ADD97244

SEQ ID NO: 18345 - protein, 469 aa, synthetic construct; identical to SEQ ID NO: 16738
  REGION 1..469: note = neuraminidase__InfluenzaA__ADD97254

SEQ ID NO: 18346 - protein, 469 aa, synthetic construct; identical to SEQ ID NO: 16738
  REGION 1..469: note = neuraminidase__InfluenzaA__ADD97264

SEQ ID NO: 18347 - protein, 469 aa, synthetic construct; identical to SEQ ID NO: 16738
  REGION 1..469: note = neuraminidase__InfluenzaA__ADD97274

SEQ ID NO: 18348 - protein, 469 aa, synthetic construct
  REGION 1..469: note = neuraminidase__InfluenzaA__ADD97284
MNPNQKIITIGSVCMTIGMANLILQIGNIISIWISHSIQLGNQNQIETCNQSVITYENNTWVNQTYVNICNTNFAAGQSVVSVKLAGNSSLCPVSGWAIYSKDNSIRIGSKGDVFVIREPFISCSPLECRTFFLTQGALLNDKHSNGTIKDRSPYRTLMSCPIGEVPSPYNSRFESVAWSASACHDGINWLTIGISGPDNGAVAVLKYNGIITDTIKSWRNNILRTQESECACVNGSCFTVMTDGPSDGQASYKIFRIEKGKIVKSVEMNAPNYHYEECSCYPDSSEITCVCRDNWHGSNRPWVSFNQNLEYQIGYICSGIFGDNPRPNDKTGSCGPVSSNGANGVKGFSFKYGNGVWIGRTKSISSRNGFEMIWDPNGWTGTDNNFSIKQDIVGINEWSGYSGSFVQHPELTGLDCIRPCFWVELIRGRPKENTIWTSGSSISFCGVNSDTVGWSWPDGAELPFTIDK

SEQ ID NO: 18349 - protein, 469 aa, synthetic construct; identical to SEQ ID NO: 16738
  REGION 1..469: note = neuraminidase__InfluenzaA__ADD97294

SEQ ID NO: 18350 - protein, 469 aa, synthetic construct
  REGION 1..469: note = neuraminidase__InfluenzaA__ADD97314
MNPNQKIITIGSVCMTIGMANLILQIGNIISIWISHSIQLGNQNQIETCNQSVITYENNTWVNQTYVNISNTNFAAGQSVVSVKLAGNSSLCPVSGWAIYSKDNSIRIGSKGDVFVIREPFISCSPLECRTFFLTQGALLNDKHSNGTIKDRSPYRTLMSCPIGEVPSPYNSRFESVAWSASACHDGINWLTIGISGPDNGAVAVLKYNGIITDTIKSWRNNILRTQESECACVNGSCFTVMTDGPSDGQASYKIFRIEKGKIVKSVEMNAPNYHYEECSCYPDSSEITCVCRDNWHGSNRPWVSFNQNLEYQIGYICSGIFGDNPRPNDKTGSCGPVSSNGANGVKGFSFKYGNGVWIGRTKSISSRNGFEMIWDPNGWTGTDNNFSIKQDIVGTNEWSGYSGSFVQHPELTGLDCIRPCFWVELIRGRPKENTIWTSGSSISFCGVNSDTVGWSWPDGAELPFTIDK

SEQ ID NO: 18351 - protein, 469 aa, synthetic construct; identical to SEQ ID NO: 16738
  REGION 1..469: note = neuraminidase__InfluenzaA__ADD97334

SEQ ID NO: 18352 - protein, 469 aa, synthetic construct; identical to SEQ ID NO: 16738
  REGION 1..469: note = neuraminidase__InfluenzaA__ADD97344

SEQ ID NO: 18353 - protein, 469 aa, synthetic construct; identical to SEQ ID NO: 16738
  REGION 1..469: note = neuraminidase__InfluenzaA__ADD97354

SEQ ID NO: 18354 - protein, 469 aa, synthetic construct
  REGION 1..469: note = neuraminidase__InfluenzaA__ADD97384
MNPNQKIITIGSVCMTIGMANLILQIGNIISIWISHTIQLGNQNQIETCNQSVITYENNTWVNQTYVNISNTNFAAGQSVVSVKLAGNSSLCPVSGWAIYSKDNSIRIGSKGDVFVIREPFISCSPLECRTFFLTQGALLNDKHSNGTIKDRSPYRTLMSCPIGEVPSPYNSRFESVAWSASACHDGINWLTIGISGPDNGAVAVLKYNGIITDTIKSWRNNILRTQESECACVNGSCFTVMTDGPSDGQASYKIFRIEKGKIVKSVEMNAPNYHYEECSCYPDSSEITCVCRDNWHGSNRPWVSFNQNLEYQIGYICSGIFGDNPRPNDKTGSCGPVSSNGANGVKGFSFKYGNGVWIGRTKSISSRNGFEMIWDPNGWTGTDNNFSIKQDIVGINEWSGYSGSFVQHPELTGLDCIRPCFWVELIRGRPKENTIWTSGSSISFCGVNSDTVGWSWPDGAELPFTIDK

SEQ ID NO: 18355 - protein, 469 aa, synthetic construct
  REGION 1..469: note = neuraminidase__InfluenzaA__ADD97394
MNPNQKIITIGSVCMTIGMANLILQIGNIISIWISHSIQLGNQNQIETCNQSVITYENNTWVNQTYVNISNTNFAAGQPVVSVKLAGNSSLCPVNGWAIYSKDNSIRIGSKGDVFVIREPFISCSPLECRTFFLTQGALLNDKHSNGTIKDRSPYRTLMSCPIGEVPSPYNSRFESVAWSASACHDGINWLTIGISGPDNGAVAVLKYNGIITDTIKSWRNNILRTQESECACVNGSCFTVMTDGPSDGQASYKIFRIEKGKIVKSVEMNAPNYHYEECSCYPDSSEITCVCRDNWHGSNRPWVSFNQNLEYQIGYICSGIFGDNPRPNDKTGSCGPVSSNGANGVKGFSFKYGNGVWIGRTKSISSRNGFEMIWDPNGWTGTDNNFSIKQDIVGINEWSGYSGSFVQHPELTGLDCIRPCFWVELIRGRPKENTIWTSGSSISFCGVNSDTVGWSWPDGAELPFTIDK

SEQ ID NO: 18356 - protein, 469 aa, synthetic construct; identical to SEQ ID NO: 16738
  REGION 1..469: note = neuraminidase__InfluenzaA__ADD97404

SEQ ID NO: 18357 - protein, 469 aa, synthetic construct; identical to SEQ ID NO: 16738
  REGION 1..469: note = neuraminidase__InfluenzaA__ADD97424

SEQ ID NO: 18358 - protein, 469 aa, synthetic construct; identical to SEQ ID NO: 16738
  REGION 1..469: note = neuraminidase__InfluenzaA__ADD97434

SEQ ID NO: 18359 - protein, 469 aa, synthetic construct; identical to SEQ ID NO: 16738
  REGION 1..469: note = neuraminidase__InfluenzaA__ADD97444

SEQ ID NO: 18360 - protein, 469 aa, synthetic construct
  REGION 1..469: note = neuraminidase__InfluenzaA__ADD97454
MNPNQKIITIGSVCMTIGMANLILQIGNIISIWISHSIQLGNQNQIETCNQSVITYENNTWVNQTYVNISNTNFAAGQSVVSVKLAGNSSLCPISGWAIYSKDNSIRIGSKGDVFVIREPFISCSPLECRTFFLTQGALLSDKHSNGTIKDRSPYRTLMSCPIGEVPSPYNSRFESVAWSASACHDGINWLTIGISGPDNGAVAVLKYNGIITDTIKSWRNNILRTQESECACVNGSCFTVMTDGPSDGQASYKIFRIEKGKIVKSVEMNAPNYHYEECSCYPDSSEITCVCRDNWHGSNRPWVSFNQNLEYQIGYICSGIFGDNPRPNDKTGSCGPVSSNGANGVKGFSFKYGNGVWIGRTKSISSRNGFEMIWDPNGWTGTDNNFSIKQDIVGINEWSGYSGSFVQHPELTGLDCIRPCFWVELIRGRPKENTIWTSGSSISFCGVNSDTVGWSWPDGAELPFTIDK

SEQ ID NO: 18361 - protein, 469 aa, synthetic construct
  REGION 1..469: note = neuraminidase__InfluenzaA__ADD97464
MNPNQKIITIGSVCMTIGMANLILQIGNIISIWISHSIQLGNQNQIETCNQSVITYENNTWVNQTYVNISNTNFAAGQSVVSVKLAGNSSLCPVSGWAIYSKDNSIRIGSKGDVFVIREPFISCSPLECRTFFLTQGALLNDKHSNGTIKDRSPYRTLMSCPIGEVPSPYNSRFESVAWSASACHDGINWLTIGISGPDNGAVAVLKYNGIITDTIKSWRNNILRTQESECACVNGSCFTVMTDGPSDGQASYKIFRIEKGKIVKSVEMNAPNYHYEECSCYPDSSEITCVCRDNWHGSNRPWVSFNQNLEYQIGYICSGIFGDNPRPNDKTGSCGPVSSNGANGVKGFSFKYGNGVWIGRTKSISSRNGFEMIWDPNGWTGTDNNFSTKQDIVGINEWSGYSGSFVQHPELTGLDCIRPCFWVELIRGRPKENTIWTSGSSISFCGVNSDTVGWSWPDGAELPFTIDK

SEQ ID NO: 18362 - protein, 469 aa, synthetic construct; identical to SEQ ID NO: 16738
  REGION 1..469: note = neuraminidase__InfluenzaA__ADD97474

SEQ ID NO: 18363 - protein, 469 aa, synthetic construct; identical to SEQ ID NO: 16738
  REGION 1..469: note = neuraminidase__InfluenzaA__ADD97484

SEQ ID NO: 18364 - protein, 469 aa, synthetic construct
  REGION 1..469: note = neuraminidase__InfluenzaA__ADD97494
MNPNQKIITIGSVCMTIGMANLILQIGNIISIWISHSIQLGNQNQIETCNQSVITYENNTWVNQTYVNISNTNFAAGQSVVSVKLAGNSSLCPVSGWAIYSKDNSIRIGSKGDVFVIREPFISCSPSECRTFFLTQGALLNDKHSNGTIKDRSPYRTLMSCPIGEVPSPYNSRFESVAWSASACHDGINWLTIGISGPDNGAVAVLKYNGIITDTIKSWRNNILRTQESECACVNGSCFTVMTDGPSDGQASYKIFRIEKGKIVKSVEMNAPNYHYEECSCYPDSSEITCVCRDNWHGSNRPWVSFNQNLEYQIGYICSGIFGDNPRPNDKTGSCGPVSSNGANGVKGFSFKYGNGVWIGRTKSISSRNGFEMIWDPNGWTGTDNNFSIKQDIVGINEWSGYSGSFVQHPELTGLDCIRPCFWVELIRGRPKENTIWTSGSSISFCGVNSDTVGWSWPDGAELPFTIDK

SEQ ID NO: 18365 - protein, 469 aa, synthetic construct; identical to SEQ ID NO: 16738
  REGION 1..469: note = neuraminidase__InfluenzaA__ADD97504

SEQ ID NO: 18366 - protein, 469 aa, synthetic construct; identical to SEQ ID NO: 16738
  REGION 1..469: note = neuraminidase__InfluenzaA__ADD97514

SEQ ID NO: 18367 - protein, 469 aa, synthetic construct; identical to SEQ ID NO: 18350
  REGION 1..469: note = neuraminidase__InfluenzaA__ADD97534

SEQ ID NO: 18368 - protein, 469 aa, synthetic construct; identical to SEQ ID NO: 16738
  REGION 1..469: note = neuraminidase__InfluenzaA__ADD97544

SEQ ID NO: 18369 - protein, 469 aa, synthetic construct; identical to SEQ ID NO: 16738
  REGION 1..469: note = neuraminidase__InfluenzaA__ADD97554

SEQ ID NO: 18370 - protein, 469 aa, synthetic construct; identical to SEQ ID NO: 18354
  REGION 1..469: note = neuraminidase__InfluenzaA__ADD97564

SEQ ID NO: 18371 - protein, 469 aa, synthetic construct; identical to SEQ ID NO: 16738
  REGION 1..469: note = neuraminidase__InfluenzaA__ADD97574

SEQ ID NO: 18372 - protein, 469 aa, synthetic construct; identical to SEQ ID NO: 16738
  REGION 1..469: note = neuraminidase__InfluenzaA__ADD97584

SEQ ID NO: 18373 - protein, 469 aa, synthetic construct
  REGION 1..469: note = neuraminidase__InfluenzaA__ADD97681
MNPNQKIITIGSVCMTIGMANLILQIGNIISIWISHSIQLGNQNQIETCNQSVITYENNTWVNQTYVNISNTNFAAGQSVVSVKLAGNSSLCPVSGWAIYSKDNSIRIGSKGDVFVIREPFISCSPLECRTFFLTQGALLNDKHSNGTIKDRSPYRTLMSCPIGEVPSPYNSRFESVAWSASACHDGINWLTIGISGPDNGAVAVLKYNGIITDTIKSWRNNILRTQESECACVNGSCFTVMTDGPSDGQASYKIFRIEKGKIVKSVEINAPNYHYEECSCYPDSSEITCVCRDNWHGSNRPWVSFNQNLEYQIGYICSGIFGDNPRPNDKTGSCGPVSSNGANGVKGFSFKYGNGVWIGRTKSISSRNGFEMIWDPNGWTGTDNNFSIKQDIVGINEWSGYSGSFVQHPELTGLDCIRPCFWVELIRGRPKENTIWTSGSSISFCGINSDTVGWSWPDGAELPFTIDK

SEQ ID NO: 18374 - protein, 469 aa, synthetic construct; identical to SEQ ID NO: 18330
  REGION 1..469: note = neuraminidase__InfluenzaA__ADD97691

SEQ ID NO: 18375 - protein, 469 aa, synthetic construct; identical to SEQ ID NO: 17875
  REGION 1..469: note = neuraminidase__InfluenzaA__ADD97701

SEQ ID NO: 18376 - protein, 469 aa, synthetic construct; identical to SEQ ID NO: 16738
  REGION 1..469: note = neuraminidase__InfluenzaA__ADD97891

SEQ ID NO: 18377 - protein, 469 aa, synthetic construct; identical to SEQ ID NO: 16738
  REGION 1..469: note = neuraminidase__InfluenzaA__ADD97901

SEQ ID NO: 18378 - protein, 469 aa, synthetic construct; identical to SEQ ID NO: 16738
  REGION 1..469: note = neuraminidase__InfluenzaA__ADD97911

SEQ ID NO: 18379 - protein, 469 aa, synthetic construct; identical to SEQ ID NO: 16738
  REGION 1..469: note = neuraminidase__InfluenzaA__ADD97921

SEQ ID NO: 18380 - protein, 469 aa, synthetic construct; identical to SEQ ID NO: 16738
  REGION 1..469: note = neuraminidase__InfluenzaA__ADD97931

SEQ ID NO: 18381 - protein, 469 aa, synthetic construct; identical to SEQ ID NO: 17505
  REGION 1..469: note = neuraminidase__InfluenzaA__ADD97941

SEQ ID NO: 18382 - protein, 469 aa, synthetic construct
  REGION 1..469: note = neuraminidase__InfluenzaA__ADD97951
MNPNQKIITISSVCMTIGMANLILQIGNIISIWISHSIQLGNQNQIETCNQSVITYENNTWVNQTYVNISNTNFAAGQSVVSVKLAGNSSLCPVSGWAIYSKDNSIRIGSKGDVFVIREPFISCSPLECRTFFLTQGALLNDKHSNGTIKDRSPYRTLMSCPIGEVPSPYNSRFESVAWSASACHDGINWLTIGISGPDNGAVAVLKYNGIITDTIKSWRNNILRTQESECACVNGSCFTVMTDGPSDGQASYKIFRIEKGKIVKSVEMNAPNYHYEECSCYPDSSEITCVCRDNWHGSNRPWVSFNQNLEYQIGYICSGIFGDNPRPNDKTGSCGPVSSNGANGVKGFSFKYGNGVWIGRTKSISSRNGFEMIWDPNGWTGTDNNFSIKQDIVGINEWSGYSGSFVQHPELTGLDCIRPCFWVELIRGRPKENTIWTSGSSISFCGVNSDTVGWSWPDGAELPFTIDK

SEQ ID NO: 18383 - protein, 469 aa, synthetic construct
  REGION 1..469: note = neuraminidase__InfluenzaA__ADD97961
MNPNQKIITIGSVCMTIGMVNLILQIGNIISIWISHSIQLGNQNQIETCNQSVITYENNTWVNQTYVNISNTNFAAGQSVVSVKLAGNASLCPVSGWAIYSKDNSIRIGSKGDVFVIREPFISCSPLECRTFFLTQGALLNDKHSNGTIKDRSPYRTLMSCPIGEVPSPYNSRFESVAWSASACHDGINWLTIGISGPDNGAVAVLKYNGIITDTIKSWRNNILRTQESECACVNGSCFTVMTDGPSDGQASYKIFRIEKGKIVKSVEMNAPNYHYEECSCYPDSSEITCVCRDNWHGSNRPWVSFNQNLEYQIGYICSGIFGDNPRPNDKTGSCGPVSSNGANGVKGFSFKYGNGVWIGRTKSISSRNGFEMIWDPNGWTGTDNNFSIKQDIVGINEWSGYSGSFVQHPELTGLDCIRPCFWVELIRGRPKENTIWTSGSSISFCGVNSDTVGWSWPDGAELPFTIDK

SEQ ID NO: 18384 - protein, 469 aa, synthetic construct; identical to SEQ ID NO: 18330
  REGION 1..469: note = neuraminidase__InfluenzaA__ADD97971

SEQ ID NO: 18385 - protein, 469 aa, synthetic construct; identical to SEQ ID NO: 16738
  REGION 1..469: note = neuraminidase__InfluenzaA__ADD97981

SEQ ID NO: 18386 - protein, 469 aa, synthetic construct
  REGION 1..469: note = neuraminidase__InfluenzaA__ADD97991
MNPNQKIITIGSVCMTIGMANLILQIGNIISIWISHSIQLGNQNQIETCNQSVITYENNTWVNQTYVNISNTNFAAGQSVVSVKLAGNSSLCPVSGWAIYSKDNSIRIGSKGDVFVIREPFISCSPLECRTFFLTQGALLNDKHSNGTIKDRSPYRTLMSCPIGEVPSPYNSRFESVAWSASACHDGINWLTIGISGPDNGAVAVLKYNGIITDTIKSWRNNILRTQESECACVNGSCFTVMTDGPSDGQASYKIFRIEKGKIVKSVEMNAPNYHYEECSCYPDSSEITCVCRDNWHGSNRPWVSFNQNLEYQIGYICSGIFGDNPRPNDKTGSCGPVSSNGANGVKGFSFKYGNGVWIGRTKSISSRNGFEMIWDPNGWIGTDNNFSIKQDIVGINEWSGYSGSFVQHPELTGLDCIRPCFWVELIRGRPKENTIWTSGSSISFCGVNSDTVGWSWPDGAELPFTIDK

SEQ ID NO: 18387 - protein, 469 aa, synthetic construct
  REGION 1..469: note = neuraminidase__InfluenzaA__ADD98001
MNPNQKIITIGSVCMTIGMANLILQIGNIISIWISHSIQLGNQNQIETCNQSVITYENNTWVNQTYVNISNTNFAAGQSVVSVKLAGNSSLCPVSGWAIYSKDNSIRIGSKGDVFVIREPFISCSPLECRTFFLTQGALLNDKHSNGTIKDRSPYRTLMSCPIGEVPSPYNSRFESVAWSASACHDGINWLTIGISGPDNGAVAVLKYNGIITDTVKSWRNNILRTQESECACVNGSCFTVMTDGPSDGQASYKIFRIEKGKIVKSVEMNAPNYHYEECSCYPDSSEITCVCRDNWHGSNRPWVSFNQNLEYQIGYICSGIFGDNPRPNDKTGSCGPVSSNGANGVKGFSFKYGNGVWIGRTKSISSRNGFEMIWDPNGWTGTDNNFSIKQDIVGINEWSGYSGSFVQHPELTGLDCIRPCFWVELIRGRPKENTIWTSGSSISFCGVNSDTVGWSWPDGAELPFTIDK

SEQ ID NO: 18388 - protein, 469 aa, synthetic construct; identical to SEQ ID NO: 16738
  REGION 1..469: note = neuraminidase__InfluenzaA__ADD98011

SEQ ID NO: 18389 - protein, 469 aa, synthetic construct; identical to SEQ ID NO: 16738
  REGION 1..469: note = neuraminidase__InfluenzaA__ADD98031

SEQ ID NO: 18390 - protein, 469 aa, synthetic construct; identical to SEQ ID NO: 18387
  REGION 1..469: note = neuraminidase__InfluenzaA__ADD98041

SEQ ID NO: 18391 - protein, 469 aa, synthetic construct; identical to SEQ ID NO: 16738
  REGION 1..469: note = neuraminidase__InfluenzaA__ADD98051

SEQ ID NO: 18392 - protein, 469 aa, synthetic construct; identical to SEQ ID NO: 16738
  REGION 1..469: note = neuraminidase__InfluenzaA__ADD98061

SEQ ID NO: 18393 - protein, 469 aa, synthetic construct; identical to SEQ ID NO: 16738
  REGION 1..469: note = neuraminidase__InfluenzaA__ADD98071

SEQ ID NO: 18394 - protein, 469 aa, synthetic construct; identical to SEQ ID NO: 16738
  REGION 1..469: note = neuraminidase__InfluenzaA__ADD98081

SEQ ID NO: 18395 - protein, 469 aa, synthetic construct; identical to SEQ ID NO: 16738
  REGION 1..469: note = neuraminidase__InfluenzaA__ADD98091

SEQ ID NO: 18396 - protein, 469 aa, synthetic construct; identical to SEQ ID NO: 17564
  REGION 1..469: note = neuraminidase__InfluenzaA__ADD98101

SEQ ID NO: 18397 - protein, 469 aa, synthetic construct
  REGION 1..469: note = neuraminidase__InfluenzaA__ADD98111
MNPNQKIITIGSVCMTIGMANLILQIGNIISIWISHSIQLGNQNQIETCNQSVITYENNTWVNQTYVNISNTNFAAGQSVVSVKLAGNSSLCPVSGWAIYSKDNSIRIGSKGDVFVIREPFISCSPLECRTFFLTQGALLNDKHSNGTIKDRSPYRTLMSCPIGEVPSPYNSRFESVAWSASACHDGINWLTIGISGPDNGAVAVLKYNGIITDTIKSWRNNILRTQESECACVNGSCFTVMTDGPSDGQASYKIFRIEKGKIVKSVEMNAPNYHYEECSCYPDSSEITCVCRDNWHGSNRPWVSFNQNLEYQIGYICSGILGDNPRPNDKTGSCGPVSSNGANGVKGFSFKYGNGVWIGRTKSISSRNGFEMIWDPNGWTGTDNNFSIKQDIVGINEWSGYSGSFVQHPELTGLDCIRPCFWVELIRGRPKENTIWTSGSSISFCGVNSDTVGWSWPDGAELPFTIDK

SEQ ID NO: 18398 - protein, 469 aa, synthetic construct; identical to SEQ ID NO: 16738
  REGION 1..469: note = neuraminidase__InfluenzaA__ADD98121

SEQ ID NO: 18399 - protein, 469 aa, synthetic construct; identical to SEQ ID NO: 16738
  REGION 1..469: note = neuraminidase__InfluenzaA__ADD98131

SEQ ID NO: 18400 - protein, 469 aa, synthetic construct; identical to SEQ ID NO: 16738
  REGION 1..469: note = neuraminidase__InfluenzaA__ADD98141

SEQ ID NO: 18401 - protein, 469 aa, synthetic construct; identical to SEQ ID NO: 16738
  REGION 1..469: note = neuraminidase__InfluenzaA__ADD98151

SEQ ID NO: 18402 - protein, 469 aa, synthetic construct
  REGION 1..469: note = neuraminidase__InfluenzaA__ADD98161
MNPNQKIITIGSVCMTIGMANLILQIGNIISIWISHTIQLGNQNQIETCNQSVITYENNTWVNQTYVNISNTNFAAGQSVVSVKLAGNSSLCPVSGWAIYSKDNSIRIGSKGDVFVIREPFISCSPLECRTFFLTQGALLNDKHSNGTIKDRSPYRTLMSCPIGEVPSPYNSRFESVAWSASACHDGINWLTIGISGPDNGAVAVLKYNGIITDTIKSWRNNILRTQESECACVNGSCFTVMTDGPSDGQASYKIFRIEKGKIVKSVEMNAPNYHYEECSCYPDSSEITCVCRDNWHGSNRPWVSFNQNLEYQIGYICSGIFGDNPRPNDKTGSCGPVSSNGANGVKGFSFKYGNGVWIGRTKSISSRNGFEMIWDPNGWTRTDNNFSIKQDIVGINEWSGYSGSFVQHPELTGLDCIRPCFWVELIRGRPKENTIWTSGSSISFCGVNSDTVGWSWPDGAELPFTIDK

SEQ ID NO: 18403 - protein, 469 aa, synthetic construct
  REGION 1..469: note = neuraminidase__InfluenzaA__ADD98171
MNPNQKIIIIGSVCMTIGMANLILQIGNIISIWISHSIQLGNQNQIETCNQSVITYENNTWVNQTYVNISNTNFAAGQTVVSVKLAGNSSLCPVSGWAIYSKDNSIRIGSKGDVFVIREPFISCSPLECRTFFLTQGALLNDKHSNGTIKDRSPYRTLMSCPIGEVPSPYNSRFESVAWSASACHDGINWLTIGISGPDNGAVAVLKYNGIITDTIKSWRNNILRTQESECACVNGSCFTVMTDGPSDGQASYKIFRIEKGKIVKSVEMNAPNYHYEECSCYPDSSEITCVCRDNWHGSNRPWVSFNQNLEYQIGYICSGIFGDNPRSNDKTGSCGPVSSNGANGVKGFSFKYGNGVWIGRTKSISSRNGFEMIWDPNGWTGTDNNFSIKQDIVGINEWSGYSGSFVQHPELTGLDCIRPCFWVELIRGRPKENTIWTSGSSISFCGVNSDTVGWSWPDGAELPFTIDK

SEQ ID NO: 18404 - protein, 469 aa, synthetic construct
  REGION 1..469: note = neuraminidase__InfluenzaA__ADD98181
MNPNQKIITIGSVCMTIGMANLILQIGNMISIWISHSIQLENQNQIETCNQSVITYENNTWVNQTYVNISNTNFAAGQSVVSVKLAGNSSLCPVSGWAIYSKDNSIRIGSKGDVFVIREPFISCSPLECRTFFLTQGALLNDKHSNGTIKDRSPYRTLMSCPIGEVPSPYNSRFESVAWSASACHDGINWLTIGISGPDNGAVAVLKYNGIITDTIKSWRNNILRTQESECACVNGSCFTVMTDGPSDGQASYKIFRIEKGKIVKSVEMNAPNYHYEECSCYPDSSEITCVCRDNWHGSNRPWVSFNQNLEYQIGYICSGIFGDNPRPNDKTGSCGPVSSNGANGVKGFSFKYGNGVWIGRTKSISSRNGFEMIWDPNGWTGTDNNFSIKQDIVGINEWSGYSGSFVQHPELTGLDCIRPCFWVELIRGRPKENTIWTSGSSISFCGVNSDTVGWSWPDGAELPFTIDK

SEQ ID NO: 18405 - protein, 469 aa, synthetic construct; identical to SEQ ID NO: 16738
  REGION 1..469: note = neuraminidase__InfluenzaA__ADD98201

SEQ ID NO: 18406 - protein, 469 aa, synthetic construct; identical to SEQ ID NO: 16738
  REGION 1..469: note = neuraminidase__InfluenzaA__ADD98211

SEQ ID NO: 18407 - protein, 469 aa, synthetic construct; identical to SEQ ID NO: 17961
  REGION 1..469: note = neuraminidase__InfluenzaA__ADE20324

SEQ ID NO: 18408 - protein, 469 aa, synthetic construct; identical to SEQ ID NO: 17961
  REGION 1..469: note = neuraminidase__InfluenzaA__ADE20334

SEQ ID NO: 18409 - protein, 469 aa, synthetic construct; identical to SEQ ID NO: 17961
  REGION 1..469: note = neuraminidase__InfluenzaA__ADE20344

SEQ ID NO: 18410 - protein, 469 aa, synthetic construct; identical to SEQ ID NO: 17961
  REGION 1..469: note = neuraminidase__InfluenzaA__ADE20354

SEQ ID NO: 18411 - protein, 469 aa, synthetic construct; identical to SEQ ID NO: 17961
  REGION 1..469: note = neuraminidase__InfluenzaA__ADE20378

SEQ ID NO: 18412 - protein, 469 aa, synthetic construct; identical to SEQ ID NO: 17961
  REGION 1..469: note = neuraminidase__InfluenzaA__ADE20391

SEQ ID NO: 18413 - protein, 469 aa, synthetic construct; identical to SEQ ID NO: 17961
  REGION 1..469: note = neuraminidase__InfluenzaA__ADE20631

SEQ ID NO: 18414 - protein, 469 aa, synthetic construct; identical to SEQ ID NO: 17961
  REGION 1..469: note = neuraminidase__InfluenzaA__ADE20641

SEQ ID NO: 18415 - protein, 469 aa, synthetic construct
  REGION 1..469: note = neuraminidase__InfluenzaA__ADE20651
MNPNQKIITIGSVCMTIGMANLILQIGNIISIWISHSIQLGNQNQIETCNQSVITYENNTWVNQTYVNISNTNFAAGQSVVSVKLVGNSSLCPVSGWAIYSKDNSVRIGSKGDVFVIREPFISCSPLECRTFFLTQGALLNDKHSNGTIKDRSPYRTLMSCPIGEVPSPYNSRFESVAWSASACHDGINWLTIGISGPDNGAVAVLKYNGIITDTIKSWRNNILRTQESECACVNGSCFTVMTDGPSDGQASYKIFRIEKGKIVKSVEMNAPNYHYEECSCYPDSSEITCVCRDNWHGSNRPWVSFNQNLEYQIGYICSGIFGDNPRPNDKTGSCGPVSSNGANGVKGFSFKYGNGVWIGRTKSISSRNGFEMIWDPNGWTGTDNNFSIKQDIVGINEWSGYSGSFVQHPELTGLDCIRPCFWVELIRGRPKENTIWTSGSSISFCGVNSDTVGWSWPDGAELPFTIDK

SEQ ID NO: 18416 - protein, 469 aa, synthetic construct; identical to SEQ ID NO: 17961
  REGION 1..469: note = neuraminidase__InfluenzaA__ADE20661

SEQ ID NO: 18417 - protein, 469 aa, synthetic construct; identical to SEQ ID NO: 17961
  REGION 1..469: note = neuraminidase__InfluenzaA__ADE20671

SEQ ID NO: 18418 - protein, 469 aa, synthetic construct; identical to SEQ ID NO: 17961
  REGION 1..469: note = neuraminidase__InfluenzaA__ADE20681

SEQ ID NO: 18419 - protein, 469 aa, synthetic construct
  REGION 1..469: note = neuraminidase__InfluenzaA__ADE20701
MNPNQKIITIGSVCMTIGMANLILQIGNIISIWISHSIQLGNQNQIETCNQSVITYENNTWVNQTYVNISNTNFAAGQSVVSVKLAGNSSLCPVSGWAIYSKDNSVRIGSKGDVFVIREPFISCSPLECRTFFLTQGALLNDKHSNGTIKDRSPYRTLMSCPIGEVPSPYNSRFESVAWSASACHDGINWLTIGISGPDNGAVAVLKYNGVITDTIKSWRNNILRTQESECACVNGSCFTVMTDGPSNGQASYKIFRIEKGKIVKSVEMNAPNYHYEECSCYPDSSEITCVCRDNWHGSNRPWVSFNQNLEYQIGYICSGIFGDNPRPNDKTGSCGPVSSNGANGVKGFSFKYGNGVWIGRTKSISSRNGFEMIWDPNGWTGTDNNFSIKQDIVGINEWSGYSGSFVQHPELTGLDCIRPCFWVELIRGRPKENTIWTSGSSISFCGVNSDTVGWSWPDGAELPFTIDK

SEQ ID NO: 18420 - protein, 469 aa, synthetic construct; identical to SEQ ID NO: 17961
  REGION 1..469: note = neuraminidase__InfluenzaA__ADE20711

SEQ ID NO: 18421 - protein, 469 aa, synthetic construct
  REGION 1..469: note = neuraminidase__InfluenzaA__ADE20721
MNPNQKIITIGSVCMTIGMANLILQIGNIISIWISHSIQLGNQNQIETCNQSVITYENNTWVNQTYVNISNTNFAAGQSVVSVKLVGNSSLCPVSGWAIYSKDNSVRIGSKGDVFVIREPFISCSPLECRTFFLTQGALLNDKHSNGTIKDRSPYRTLMSCPIGEVPSPYNSRFESVAWSASACHDGINWLTIGISGPDNGAVAVLKYNGIITDTIKSWRNNILRTQESECACVNGSCFTVMTDGPSNGQASYKIFRIEKGKIVKSVEMNAPNYHYEECSCYPDSSEITCVCRDNWHGSNRPWVSFNQNLEYQIGYICSGIFGDNPRPNDKTGSCGPVSSNGANGVKGFSFKYGNGVWIGRTKSISSRNGFEMIWDPNGWTGTDNNFSIKQDIVGINEWSGYSGSFVQHPELTGLDCIRPCFWVELIRGRPKENTIWTSGSSISFCGVNSDTVGWSWPDGAELPFTIDR

SEQ ID NO: 18422 - protein, 469 aa, synthetic construct; identical to SEQ ID NO: 18419
  REGION 1..469: note = neuraminidase__InfluenzaA__ADE20731

SEQ ID NO: 18423 - protein, 469 aa, synthetic construct; identical to SEQ ID NO: 17961
  REGION 1..469: note = neuraminidase__InfluenzaA__ADE20741

SEQ ID NO: 18424 - protein, 469 aa, synthetic construct; identical to SEQ ID NO: 17961
  REGION 1..469: note = neuraminidase__InfluenzaA__ADE20751

SEQ ID NO: 18425 - protein, 469 aa, synthetic construct; identical to SEQ ID NO: 18419
  REGION 1..469: note = neuraminidase__InfluenzaA__ADE20761

SEQ ID NO: 18426 - protein, 469 aa, synthetic construct; identical to SEQ ID NO: 18419
  REGION 1..469: note = neuraminidase__InfluenzaA__ADE20781

SEQ ID NO: 18427 - protein, 469 aa, synthetic construct; identical to SEQ ID NO: 16738
  REGION 1..469: note = neuraminidase__InfluenzaA__ADE20791

SEQ ID NO: 18428 - protein, 469 aa, synthetic construct; identical to SEQ ID NO: 16738
  REGION 1..469: note = neuraminidase__InfluenzaA__ADE20801

SEQ ID NO: 18429 - protein, 469 aa, synthetic construct; identical to SEQ ID NO: 16738
  REGION 1..469: note = neuraminidase__InfluenzaA__ADE20811

SEQ ID NO: 18430 - protein, 469 aa, synthetic construct; identical to SEQ ID NO: 16738
  REGION 1..469: note = neuraminidase__InfluenzaA__ADE20821

SEQ ID NO: 18431 - protein, 469 aa, synthetic construct; identical to SEQ ID NO: 16738
  REGION 1..469: note = neuraminidase__InfluenzaA__ADE20831

SEQ ID NO: 18432 - protein, 469 aa, synthetic construct; identical to SEQ ID NO: 16738
  REGION 1..469: note = neuraminidase__InfluenzaA__ADE20841

SEQ ID NO: 18433 - protein, 469 aa, synthetic construct; identical to SEQ ID NO: 16738
  REGION 1..469: note = neuraminidase__InfluenzaA__ADE20851

SEQ ID NO: 18434 - protein, 469 aa, synthetic construct; identical to SEQ ID NO: 18354
  REGION 1..469: note = neuraminidase__InfluenzaA__ADE20861

SEQ ID NO: 18435 - protein, 469 aa, synthetic construct; identical to SEQ ID NO: 16738
  REGION 1..469: note = neuraminidase__InfluenzaA__ADE20871

SEQ ID NO: 18436 - protein, 469 aa, synthetic construct; identical to SEQ ID NO: 18350
  REGION 1..469: note = neuraminidase__InfluenzaA__ADE20881

SEQ ID NO: 18437 - protein, 469 aa, synthetic construct; identical to SEQ ID NO: 16738
  REGION 1..469: note = neuraminidase__InfluenzaA__ADE20891

SEQ ID NO: 18438 - protein, 469 aa, synthetic construct; identical to SEQ ID NO: 16738
  REGION 1..469: note = neuraminidase__InfluenzaA__ADE20901

SEQ ID NO: 18439 - protein, 469 aa, synthetic construct; identical to SEQ ID NO: 16738
  REGION 1..469: note = neuraminidase__InfluenzaA__ADE20911

SEQ ID NO: 18440 - protein, 469 aa, synthetic construct; identical to SEQ ID NO: 16738
  REGION 1..469: note = neuraminidase__InfluenzaA__ADE20921

SEQ ID NO: 18441 - protein, 469 aa, synthetic construct
  REGION 1..469: note = neuraminidase__InfluenzaA__ADE20931
MNPNQKIITIGSVCMTIGMANLILQIGNIISIWISHSIQLGNQNQIETCNQSVITYENNTWVNQTYVNISNTNFAAGQSVVSVKLAGNSSLCPVSGWAIYSKDNSIRIGSKGDVFVIREPFISCSPLECRTFFLTQGALLNDKHSNGTIKDRSPYRTLMSCPIGEVPSPYNSRFESVAWSASACHDGINWLTIGISGPDNGAVAVLKYNGIITDTIKSWRNNILRTQESECACVNGSCFTVMTDGPSDGQASYKIFRIEKGKIVKSVEMNAPNYHYEECSCYPDSSEITCVCRDNWHGSNRPWVSFNQNLEYQIGYICSGIFGDNPRPNDKTGSCGPVLSNGANGVKGFSFKYGNGVWIGRTKSIGSRNGFEMIWDPNGWTGTDNNFSIKQDIVGINEWSGYSGSFVQHPELTGLDCIRPCFWVELIRGRPKENTIWTSGSSISFCGVNSDTVGWSWPDGAELPFTIDK

SEQ ID NO: 18442 - protein, 469 aa, synthetic construct; identical to SEQ ID NO: 16738
  REGION 1..469: note = neuraminidase__InfluenzaA__ADE20941

SEQ ID NO: 18443 - protein, 469 aa, synthetic construct
  REGION 1..469: note = neuraminidase__InfluenzaA__ADE20951
MNPNQKIITIGSVCMTIGMANLILQIGNIISIWISHSIQLGNQNQIETCNQSVITYENNTWVNQTYVNISNTNFAAGQSVVSVKLAGNSSLCPVSGWAIYSKDNSIRIGSKGDVFVIREPFISCSPLECRTFFLTQGALLNDKHSNGTIKDRSPYRTLMSCPIGEVPSPYNSRFESVAWSASACHDGINWLTIGISGPDNGAVAVLKYNGIITDTIKSWRNNILRTQESECACVNGSCFTVMTDGPSDGQASYKIFRIEKGKIVKSVEMNAPNYHYEECSCYPDSSEITCVCRDNWHGSNRPWVSFNQNLEYQIGYICSGIFGDNPRPNDKTGSCGPVSSNGANGVKGFSFKYGNGVWIGRTKSISSRNGFEMIWDPNGWTGTDNNFSIKQDVVGINEWSGYSGSFVQHPELTGLDCIRPCFWVELIRGRPKENTIWTSGSSISFCGVNSDTVGWSWPDGAELPFTIDK

SEQ ID NO: 18444 - protein, 469 aa, synthetic construct
  REGION 1..469: note = neuraminidase__InfluenzaA__ADE20961
MNPNQKIITIGSVCMTIGMANLILQIGNIISIWISHSIQLGNQNQIETCNQSVITYENNTWVNQTYVNISNTNFAAGQSVVSVKLAGNSSLCPVSGWAIYSKDNSIRIGSKGDVFVIREPFISCSPLECRTFFLTQGALLNDKHSNGTIKDRSPYRTLMSCPIGEVPSPYNSRFESVAWSASACHDGINWLTIGISGPDNGAVAVLKYNDIITDTIKSWRNNILRTQESECACVNGSCFTVMTDGPSDGQASYKIFRIEKGKIVKSVEMNAPNYHYEECSCYPDSSEITCVCRDNWHGSNRPWVSFNQNLEYQIGYICSGIFGDNPRPNDKTGSCGPVSSNGANGVKGFSFKYGNGVWIGRTKSISSRNGFEMIWDPNGWTGTDNNFSIKQDIVGINEWSGYSGSFVQHPELTGLDCIRPCFWVELIRGRPKENTIWTSGSSISFCGVNSDTVGWSWPDGAELPFTIDK

SEQ ID NO: 18445 - protein, 469 aa, synthetic construct; identical to SEQ ID NO: 16738
  REGION 1..469: note = neuraminidase__InfluenzaA__ADE20971

SEQ ID NO: 18446 - protein, 469 aa, synthetic construct; identical to SEQ ID NO: 18354
  REGION 1..469: note = neuraminidase__InfluenzaA__ADE20981

SEQ ID NO: 18447 - protein, 469 aa, synthetic construct; identical to SEQ ID NO: 16738
  REGION 1..469: note = neuraminidase__InfluenzaA__ADE20991

SEQ ID NO: 18448 - protein, 469 aa, synthetic construct
  REGION 1..469: note = neuraminidase__InfluenzaA__ADE21001
MNPNQKIITIGSVCMTIGMANLILQIGNIISIWISHTIQLGNQNQIETCNQSVITYENNTWVNQTYVNISNTNFAAGQSVVSVKLAGNSSLCPVSGWAIYSKDNSIRIGSKGDVFIIREPFISCSPLECRTFFLTQGALLNDKHSNGTIKDRSPYRTLMSCPIGEVPSPYNSRFESVAWSASACHDGINWLTIGISGPDNGAVAVLKYNGIITDTIKSWRNNILRTQESECACVNGSCFTVMTDGPSDGQASYKIFRIEKGKIVKSVEMNAPNYHYEECSCYPDSSEITCVCRDNWHGSNRPWVSFNQNLEYQIGYICSGIFGDNPRPNDKTGSCGPVSSNGANGVKGFSFKYGNGVWIGRTKSISSRNGFEMIWDPNGWTGTDNNFSIKQDIVGINEWSGYSGSFVQHPELTGLDCIRPCFWVELIRGRPKENTIWTSGSSISFCGVNSDTVGWSWPDGAELPFTIDK

SEQ ID NO: 18449 - protein, 469 aa, synthetic construct; identical to SEQ ID NO: 16738
  REGION 1..469: note = neuraminidase__InfluenzaA__ADE21011

SEQ ID NO: 18450 - protein, 469 aa, synthetic construct; identical to SEQ ID NO: 16738
  REGION 1..469: note = neuraminidase__InfluenzaA__ADE21021

SEQ ID NO: 18451 - protein, 469 aa, synthetic construct; identical to SEQ ID NO: 18387
  REGION 1..469: note = neuraminidase__InfluenzaA__ADE21031

SEQ ID NO: 18452 - protein, 469 aa, synthetic construct
  REGION 1..469: note = neuraminidase__InfluenzaA__ADE21041
MNPNQKIITIGSVCMTIGMANLILQIGNIISIWISHSIQLGNQNQIETCNQSVITYENNTWVNQTYVNISNTNFAAGQSVVSVKLAGNSSLCPVSGWAIYSKDNSIRIGSKGDVFVIREPFISCSPLECRTFFLTQGALLNDKHSNGTIKDRSPYRTLMSCPIGEVPSPYNSRFESVAWSASACHDGINWLTIGISGPDNGAVAVLKYNGIITDTIKSWRNNILRTQESECACVNGSCFTVMTDGPSDGQASYKIFRIEKGKIVKSIEMNAPNYHYEECSCYPDSSEITCVCRDNWHGSNRPWVSFNQNLEYQIGYICSGIFGDNPRPNDKTGSCGPVSSNGANGVKGFSFKYGNGVWIGRTKSISSRNGFEMIWDPNGWTGTDNNFSIKQDIVGINEWSGYSGSFVQHPELTGLDCIRPCFWVELIRGRPKENTIWTSGSSISFCGVNSDTVGWSWPDGAELPFTIDK

SEQ ID NO: 18453 - protein, 469 aa, synthetic construct; identical to SEQ ID NO: 16738
  REGION 1..469: note = neuraminidase__InfluenzaA__ADE21051

SEQ ID NO: 18454 - protein, 469 aa, synthetic construct
  REGION 1..469: note = neuraminidase__InfluenzaA__ADE21071
MNPNQKIITIGSVCMTIGMANLILQIGNIISIWISHSIQLGNQNQIETCNQSVITYENNTWVNQTYVNISNTNFAAGQSVVSVKLAGNSSLCPVNGWAIYSKDNSIRIGSKGDVFVIREPFISCSPLECRTFFLTQGALLNDKHSNGTIKDRSPYRTLMSCPIGEVPSPYNSRFESVAWSASACHDGINWLTIGISGPDNGAVAVLKYNGIITDTIKSWRNNILRTQESECACVNGSCFTVMTDGPSDGQASYKIFRIEKGKIVKSVEMNAPNYHYEECSCYPDSSEITCVCRDNWHGSNRPWVSFNQNLEYQIGYICSGIFGDNPRPNDKTGSCGPVSSNGANGVKGFSFKYGNGVWIGRTKSISSRNGFEMIWDPNGWTGTDNKFSIKQDIVGINEWSGYSGSFVQHPELTGLDCIRPCFWVELIRGRPKENTIWTSGSSISFCGVNSDTVGWSWPDGAELPFTIDK

SEQ ID NO: 18455 - protein, 470 aa, synthetic construct; identical to SEQ ID NO: 16632
  REGION 1..470: note = neuraminidase__InfluenzaA__ADE28752

SEQ ID NO: 18456 - protein, 470 aa, synthetic construct; identical to SEQ ID NO: 17461
  REGION 1..470: note = neuraminidase__InfluenzaA__ADE28763

SEQ ID NO: 18457 - protein, 469 aa, synthetic construct; identical to SEQ ID NO: 17961
  REGION 1..469: note = neuraminidase__InfluenzaA__ADE28773

SEQ ID NO: 18458 - protein, 469 aa, synthetic construct; identical to SEQ ID NO: 17961
  REGION 1..469: note = neuraminidase__InfluenzaA__ADE28783

SEQ ID NO: 18459 - protein, 469 aa, synthetic construct; identical to SEQ ID NO: 18419
  REGION 1..469: note = neuraminidase__InfluenzaA__ADE28803

SEQ ID NO: 18460 - protein, 469 aa, synthetic construct; identical to SEQ ID NO: 16738
  REGION 1..469: note = neuraminidase__InfluenzaA__ADE28813

SEQ ID NO: 18461 - protein, 469 aa, synthetic construct; identical to SEQ ID NO: 16738
  REGION 1..469: note = neuraminidase__InfluenzaA__ADE28823

SEQ ID NO: 18462 - protein, 469 aa, synthetic construct
  REGION 1..469: note = neuraminidase__InfluenzaA__ADE28843
MNPNQKIITIGSVCMTIGMANLILQIGNIISIWISHSIQLGNQNQIETCNQSVITYENNTWVNQTYVNISNTNFAAGQSVVSVKLAGNSSLCPVSGWAIYSKDNSVRIGSKGDVFVIREPFISCSPLECRTFFLTQGALLNDKHSNGTIKDRSPYRTLMSCPVGEVPSPYNSRFESVAWSASACHDGINWLTIGISGPDNGAVAVLKYNGIITDTIKSWRNNILRTQESECACVNGSCFTVMTDGPSNGQASYKIFRIEKGKIVKSVEMNAPNYHYEECSCYPDSSEITCVCRDNWHGSNRPWVSFNQNLEYQIGYICSGIFGDNPRPNDKTGSCGPVSSNGANGVKGFSFKYGNGVWIGRTKSISSRNGFEMIWDPNGWTGTDNNFSIKQDIVGINEWSGYSGSFVQHPELTGLDCIRPCFWVELIRGRPKENTIWTSGSSISFCGVNSDTVGWSWPDGAELPFTIDK

SEQ ID NO: 18463 - protein, 469 aa, synthetic construct
  REGION 1..469: note = neuraminidase__InfluenzaA__ADE28853
MNPNQKIITIVSVCMTIGMANLILQIGNIISIWISHSIQLGNQNQIETCNQSVITYENNTWVNQTYVNISNTNFAAGQSVVSVKLAGNSSLCPVSGWAIYSKDNSVRIGSKGDVFVIREPFISCSPLECRTFFLTQGALLNDKHSNGTIKDRSPYRTLMSCPIGEVPSPYNSRFESVAWSASACHDGINWLTIGISGPDNGAVAVLKYNGIITDTIKSWRNNILRTQESECACVNGSCFTVMTDGPSNGQASYKIFRIEKGKIVKSVEMNAPNYHYEECSCYPDSSEITCVCRDNWHGSNRPWVSFNQNLEYQIGYICSGIFGDNPRPNDKTGSCGPVSSNGANGVKGFSFKYGNGVWIGRTKSISSRNGFEMIWDPNGWTGTDNNFSIKQDIVGINEWSGYSGSFVQHPELTGLDCIRPCFWVELIRGRPKENTIWTSGSSISFCGVNSDTVGWSWPDGAELPFTIDK

SEQ ID NO: 18464 - protein, 469 aa, synthetic construct; identical to SEQ ID NO: 18462
  REGION 1..469: note = neuraminidase__InfluenzaA__ADE28884

SEQ ID NO: 18465 - protein, 469 aa, synthetic construct
  REGION 1..469: note = neuraminidase__InfluenzaA__ADE28894
MNPNQKIITIGSVCMTIGMANLILQIGNIISIWISHSVQLGNQNQIETCNQSVITYENNTWVNQTYVNISNTNFAAGQSVVSVKLAGNSSLCPVSGWAIYSKDNSVRIGSKGDVFVIREPFISCSPLECRTFFLTQGALLNDKHSNGTIKDRSPYRTLMSCPIGEVPSPYNSRFESVAWSASACHDGINWLTIGISGPDNGAVAVLKYNGIITDTIKSWRNNILRTQESECACVNGSCFTVMTDGPSNGQASYKIFRIEKGKIVKSVEMNAPNYHYEECSCYPDSSEITCVCRDNWHGSNRPWVSFNQNLEYQIGYICSGIFGDNPRPNDKTGSCGPVSSNGANGVKGFSFKYGNGVWIGRTKSISSRNGFEMIWDPNGWTGTDNNFSIKQDIVGINEWSGYSGSFVQHPELTGLDCIRPCFWVELIRGRPKENTIWTSGSSISFCGVNSDTVGWSWPDGAELPFTIDK

SEQ ID NO: 18466 - protein, 469 aa, synthetic construct; identical to SEQ ID NO: 18386
  REGION 1..469: note = neuraminidase__InfluenzaA__ADE28904

SEQ ID NO: 18467 - protein, 469 aa, synthetic construct; identical to SEQ ID NO: 16738
  REGION 1..469: note = neuraminidase__InfluenzaA__ADE28914

SEQ ID NO: 18468 - protein, 469 aa, synthetic construct; identical to SEQ ID NO: 16738
  REGION 1..469: note = neuraminidase__InfluenzaA__ADE28924

SEQ ID NO: 18469 - protein, 469 aa, synthetic construct
  REGION 1..469: note = neuraminidase__InfluenzaA__ADE28934
MNPNQKIITIGSVCMTIGMANLILQIGNIISIWISHSIQLGNQNQIETCNQSVITYENNTWVNQTYVNISNTNFAAGQSVVSVKLAGNSSLCPVSGWAIYSKDNSIRIGSKGDVFVIREPFISCSPLECRTFFLTQGALLNDKHSNGTIKDRSPYRTLMSCPIGEVPSPYNSRFESVAWSASACHDGINWLTIGISGPDNGAVAVLKYNGIITDTIKSWRNNILRTQESECACINGSCFTVMTDGPSDGQASYKIFRIEKGKIVKSVEMNAPNYHYEECSCYPDSSEITCVCRDNWHGSNRPWVSFNQNLEYQIGYICSGIFGDNPRPNDKTGSCGPVSSNGANGVKGFSFKYGNGVWIGRTKSISSRNGFEMIWDPNGWTGTDNNFSIKQDIVGINEWSGYSGSFVQHPELTGLDCIRPCFWVELIRGRPKENTIWTSGSSISFCGVNSDTVGWSWPDGAELPFTIDK

SEQ ID NO: 18470 - protein, 469 aa, synthetic construct; identical to SEQ ID NO: 16738
  REGION 1..469: note = neuraminidase__InfluenzaA__ADE28954

SEQ ID NO: 18471 - protein, 469 aa, synthetic construct
  REGION 1..469: note = neuraminidase__InfluenzaA__ADE28964
MNPNQKIITIGSVCMTIGMANLILQIGNIISIWISHSIQLGNQNQIETCNQSVITYENNTWVNQTYVNISNINFAAGQSVVSVKLAGNSSLCPVSGWAIYSKDNSIRIGSKGDVFVIREPFISCSPLECRTFFLTQGALLNDKHSNGTIKDRSPYRTLMSCPIGEVPSPYNSRFESVAWSASACHDGINWLTIGISGPDNGAVAVLKYNGIITDTIKSWRNNILRTQESECACVNGSCFTVMTDGPSDGQASYKIFRIEKGKIVKSVEMNAPNYHYEECSCYPDSSEITCVCRDNWHGSNRPWVSFNQNLEYQIGYICSGIFGDNPRPNDKTGSCGPVSSNGANGVKGFSFKYGNGVWIGRTKSISSRNGFEMIWDPNGWTGTDNNFSIKQDIVGINEWSGYSGSFVQHPELTGLDCIRPCFWVELIRGRPKENTIWTSGSSISFCGVNSDTVGWSWPDGAELPFTIDK

SEQ ID NO: 18472 - protein, 469 aa, synthetic construct; identical to SEQ ID NO: 16738
  REGION 1..469: note = neuraminidase__InfluenzaA__ADE28974

SEQ ID NO: 18473 - protein, 469 aa, synthetic construct
  REGION 1..469: note = neuraminidase__InfluenzaA__ADE29004
MNPNQKIITIGSVCMTIGLANLILQIGNIISIWISHSIQLGNQNQIETCNQSVITYENNTWVNQTYVNISNTNFAAGQSVVSVKLAGNSSLCPVSGWAIYSKDNSVRIGSKGDVFVIREPFISCSPLECRTFFLTQGALLNDKHSNGTIKDRSPYRTLMSCPIGEVPSPYNSRFESVAWSASACHDGINWLTIGISGPDNGAVAVLKYNGIITDTIKSWRNNILRTQESECACVNGSCFTVMTDGPSDGQASYKIFRIEKGKIVKSVEMNAPNYHYEECSCYPDSSEITCVCRDNWHGSNRPWVSFNQNLEYRIGYICSGIFGDNPRPNDKTGSCGPVSSNGANGVKGFSFKYGNGVWIGRTKSISSRNGFEMIWDPNGWTGTDKNFSIKQDIVGINEWSGYSGSFVQHPELTGLDCIRPCFWVELIRGRPKENTIWTSGSSISFCGVNSDTVGWSWPDGAELPFTIDK

SEQ ID NO: 18474 - protein, 469 aa, synthetic construct; identical to SEQ ID NO: 16738
  REGION 1..469: note = neuraminidase__InfluenzaA__ADE29014

SEQ ID NO: 18475 - protein, 469 aa, synthetic construct
  REGION 1..469: note = neuraminidase__InfluenzaA__ADE29024
MNPNQKIITIGSVCMTIGMANLILQIGNIISIWISHSIQLGNQNQIETCNQSVITYENNTWVNQTYVNISNTNFAAGQSVVSVKLAGNSSLCPVSGWAIYSKDNSIRIGSKGDVFVIREPFISCSPLECRTFFLTQGALLNDKHSNGTIKDRSPYRTLMSCPIGEVPSPYNSRFESVAWSASACHDGINWLTIGISGPDNGAVAVLKYNGIITDTIKSWKNNILRTQESECACVNGSCFTVMTDGPSDGQASYKIFRIEKGKIVKSVEMNAPNYHYEECSCYPDSSEITCVCRDNWHGSNRPWVSFNQNLEYQIGYICSGIFGDNPRPNDKTGSCGPVSSNGANGVKGFSFKYGNGVWIGRTKSISSRNGFEMIWDPNGWNGTDNNFSIKQDIVGINEWSGYSGSFVQHPELTGLDCIRPCFWVELIRGRPKENTIWTSGSSISFCGVNSDTVGWSWPDGAELPFTIDK

SEQ ID NO: 18476 - protein, 469 aa, synthetic construct; identical to SEQ ID NO: 16738
  REGION 1..469: note = neuraminidase__InfluenzaA__ADE29034

SEQ ID NO: 18477 - protein, 469 aa, synthetic construct; identical to SEQ ID NO: 16738
  REGION 1..469: note = neuraminidase__InfluenzaA__ADE29044

SEQ ID NO: 18478 - protein, 469 aa, synthetic construct; identical to SEQ ID NO: 16738
  REGION 1..469: note = neuraminidase__InfluenzaA__ADE29054

SEQ ID NO: 18479 - protein, 469 aa, synthetic construct; identical to SEQ ID NO: 18026
  REGION 1..469: note = neuraminidase__InfluenzaA__ADE29064

SEQ ID NO: 18480 - protein, 469 aa, synthetic construct
  REGION 1..469: note = neuraminidase__InfluenzaA__ADE29087
MNPNQKIITIGSVCMTIGMANLILQIGNIISIWISHSIQLGNQNQIETCNQSVITYENNTWVNQTYVNISNTNFAAGQSVVSVKLAGNSSLCPVSGWAIYSKDNSVRIGSKGDVFVIREPFISCSPLECKTFFLTQGALLNDKHSNGTIKDRSPYRTLMSCPIGEVPSPYNSRFESVAWSASACHDGINWLTIGISGPDNGAVAVLKYNGIITDTIKSWRNNILRTQESECACVNGSCFTVMTDGPSNGQASYKIFRIEKGKIVKSVEMNAPNYHYEECSCYPDSSEITCVCRDNWHGSNRPWVSFNQNLEYQIGYICSGIFGDNPRPNDKTGSCGPVSSNGANGVKGFSFKYGNGVWIGRTKSISSRNGFEMIWDPNGWTGTDNNFSIKQDIVGINEWSGYSGSFVQHPELTGLDCIRPCFWVELIRGRPKENTIWTSGSSISFCGVNSDTVGWSWPDGAELPFTIDK

SEQ ID NO: 18481 - protein, 469 aa, synthetic construct; identical to SEQ ID NO: 16728
  REGION 1..469: note = neuraminidase__InfluenzaA__ADE29097

SEQ ID NO: 18482 - protein, 469 aa, synthetic construct; identical to SEQ ID NO: 17605
  REGION 1..469: note = neuraminidase__InfluenzaA__ADE34194

SEQ ID NO: 18483 - protein, 469 aa, synthetic construct; identical to SEQ ID NO: 16599
  REGION 1..469: note = neuraminidase__InfluenzaA__ADE34205

SEQ ID NO: 18484 - protein, 469 aa, synthetic construct
  REGION 1..469: note = neuraminidase__InfluenzaA__ADE34216
MNPNQKIITIGSVSLTISTICFFMQIAILVTTVTLHFKQYEFNSPPNNQVMLCEPTIIERNITEIVYLTNTTIEKEICPKLAEYRNWSKPQCDITGFAPFSKDNSIRLSAGGDIWVTREPYVSCDPDKCYQFALGQGTTLNNVHSNNTVRDRTPYRTLLMNELGVPFHLGTKQVCIAWSSSSCHDGKAWLHVCITGDDKNATASFIYNGRLVDSVVSWSKDILRTQESECVCINGTCTVVMTDGSASGKADTKILFIEEGKIVHTSTLSGSAQHVEECSCYPRYPGVRCVCRDNWKGSNRPIVDINIKDHSIVSSYVCSGLVGDTPRKNDSSSSSHCLDPNNEEGGHGVKGWAFDDGNDVWMGRTISEKSRLGYETFKVIEGWSNPKSKLQINRQVIVDRGNRSGYSGIFSVEGKSCINRCFYVELIRGRKEETEVLWTSNSIVVFCGTSGTYGTGSWPDGANINLMPI

SEQ ID NO: 18485 - protein, 469 aa, synthetic construct; identical to SEQ ID NO: 17605
  REGION 1..469: note = neuraminidase__InfluenzaA__ADE34227

SEQ ID NO: 18486 - protein, 469 aa, synthetic construct; identical to SEQ ID NO: 17605
  REGION 1..469: note = neuraminidase__InfluenzaA__ADE34238

SEQ ID NO: 18487 - protein, 469 aa, synthetic construct
  REGION 1..469: note = neuraminidase__InfluenzaA__ADE34260
MNPNQKIITIGSVSLTISTICFFMQIAILITTVTLHFKQYEFNSPPNNQVMLCEPTIIERNITEIVYLTNTTIEKEICPKLAEYRNWSKPQCDITGFAPFSKDNSIRLSAGGDIWVTREPYVSCDPDKCYQFALGQGTTLNNVHSNNTVRDRTPYRTLLMNELGVPFHLGTKQVCIAWSSSSCHDGKAWLHVCITGDDKNATASFIYNGRLVDSVVSWSKEILRTQESECVCINGTCTVVMTDGSASGKADTKILFIEEGKIVHTSTLSGSAQHVEECSCYPRYPGVRCVCRDNWKGSNRPIVDINIKDHSIVSSYVCSGLVGDTPRKNDSSSSSHCLDPNNEEGGHGVKGWAFDDGNDVWMGRTISEKSRLGYETFKVIEGWSNPKSKLQINRQVIVDRGNRSGYSGIFSVEGKSCINRCFYVELIRGRKEETEVLWTSNSIVVFCGTSGTYGTGSWPDGADINLMSI

SEQ ID NO: 18488 - protein, 469 aa, synthetic construct; identical to SEQ ID NO: 17605
  REGION 1..469: note = neuraminidase__InfluenzaA__ADE34271

SEQ ID NO: 18489 - protein, 469 aa, synthetic construct; identical to SEQ ID NO: 16738
  REGION 1..469: note = neuraminidase__InfluenzaA__ADE45502

SEQ ID NO: 18490 - protein, 469 aa, synthetic construct; identical to SEQ ID NO: 16738
  REGION 1..469: note = neuraminidase__InfluenzaA__ADE45504

SEQ ID NO: 18491 - protein, 469 aa, synthetic construct; identical to SEQ ID NO: 16738
  REGION 1..469: note = neuraminidase__InfluenzaA__ADE45506

SEQ ID NO: 18492 - protein, 469 aa, synthetic construct; identical to SEQ ID NO: 16738
  REGION 1..469: note = neuraminidase__InfluenzaA__ADE45508

SEQ ID NO: 18493 - protein, 469 aa, synthetic construct; identical to SEQ ID NO: 16738
  REGION 1..469: note = neuraminidase__InfluenzaA__ADE45510

SEQ ID NO: 18494 - protein, 469 aa, synthetic construct; identical to SEQ ID NO: 16738
  REGION 1..469: note = neuraminidase__InfluenzaA__ADE45512

SEQ ID NO: 18495 - protein, 469 aa, synthetic construct
  REGION 1..469: note = neuraminidase__InfluenzaA__ADE45514
MNPNQKIITIGSVCMTIGMANLILQIGNIISIWISHSIQLGNQNQIETCNQSIITYENNTWVNQTYVNISNTNFAAGQSVVSVKLAGNSSLCPVSGWAIYSKDNSIRIGSKGDVFVIREPFISCSPLECRTFFLTQGALLNDKHSNGTIKDRSPYRTLMSCPIGEVPSPYNSRFESVAWSASACHDGINWLTIGISGPDNGAVAVLKYNGIITDTIKSWRNNILRTQESECACVNGSCFTVMTDGPSDGQASYKIFRIEKGKIVKSVEMNAPNYHYEECSCYPDSSEITCVCRDNWHGSNRPWVSFNQNLEYQIGYICSGIFGDNPRPNDKTGSCGPVSSNGANGVKGFSFQYGNGVWIGRTKSISSRNGFEMIWDPNGWTGTDNNFSIKQDIVGINEWSGYSGSFVQHPELTGLDCIRPCFWVELIRGRPKENTIWTSGSSISFCGVNSDTVGWSWPDGAELPFTIDK

SEQ ID NO: 18496 - protein, 469 aa, synthetic construct
  REGION 1..469: note = neuraminidase__InfluenzaA__ADE45516
MNPNQKIITIGSVCMTIGMANLILQIGNIISIWISHSIQLGNQNQIETCNQSVITYENNTWVNQTYVNISNTNFAAGQSVVSVKLAGNSSLCPVSGWAIYSKDNSIRIGSKGDVFVIREPFISCSPLECRTFFLTQGALLNDKHSNGTIKDRSPYRTLMSCPIGEVPSPYNSRFESVAWSASACHDGINWLTIGISGPDNGAVAVLKYNGIITDTIKSWRNNILRTQESECACVNGSCFTVMTDGPSDGQASYKIFRIEKGKIVKSVEMNAPNYHYEECSCYPDSSEITCVCRDNWHGSNRPWVSFNQNLEYQIGYICSGIFGDNPRPNDKTGSCGPVSSNGANGVKGFSFKYGNGVWIGRTKSISLRNGFEMIWDPNGWTGTDNNFSIKQDIVGINEWSGYSGSFVQHPELTGLDCIRPCFWVELIRGRPKENTIWTSGSSISFCGVNSDTVGWSWPDGAELPFTIDK

SEQ ID NO: 18497 - protein, 469 aa, synthetic construct
  REGION 1..469: note = neuraminidase__InfluenzaA__ADF10069
MNPNQKIITIGSVCMTIGMANLILQIGNIISIWISHSIQLGNQNQIETCNQSVITYENNTWVNQTYVNISNTNFAAGQSVVSVKLAGNSSLCPVSGWAIYSKDNSIRIGSKGDVFVIREPFISCSPLECRTFFLTQGTLLNDKHSNGTIKDRSPYRTLMSCPIGEVPSPYNSRFESVAWSASACHDGINWLTIGISGPDNGAVAVLKYNGIITDTIKSWRNNILRTQESECACVNGSCFTVMTDGPSDGQASYKIFRIEKGKIVKSVEMNAPNYHYEECSCYPDSSEITCVCRDNWHGSNRPWVSFNQNLEYQIGYICSGIFGDNPRPNDKTGSCGPVSSNGANGVKGFSFKYGNGVWIGRTKSISSRNGFEMIWDPNGWTGTDNNFSIKQDIVGINEWSGYSGSFVQHPELTGLDCIRPCFWVELIRGRPKENTIWTSGSSISFCGVNSDTVGWSWPDGAELPFTIDK

SEQ ID NO: 18498 - protein, 469 aa, synthetic construct; identical to SEQ ID NO: 16738
  REGION 1..469: note = neuraminidase__InfluenzaA__ADF10079

SEQ ID NO: 18499 - protein, 469 aa, synthetic construct; identical to SEQ ID NO: 16738
  REGION 1..469: note = neuraminidase__InfluenzaA__ADF10089

SEQ ID NO: 18500 - protein, 469 aa, synthetic construct; identical to SEQ ID NO: 16738
  REGION 1..469: note = neuraminidase__InfluenzaA__ADF10099

SEQ ID NO: 18501 - protein, 469 aa, synthetic construct
  REGION 1..469: note = neuraminidase__InfluenzaA__ADF10109
MNPNQKIITIGSVCMTIGMANLILQIGNIISIWISHSIQLGNQNQIETCNQSVITYENNTWVNQTYVNISNTNFAAGQSVVSVKLAGNSSLCPVSGWAIYSKDNSIRIGSKGDVFVIREPFISCSPLECRTFFLTQGALLNDKHSNGTIKDRSPYRTLMSCPIGEVPSPYNSRFESVAWSASACHDGINWLTIGISGPDNGAVAVLKYNGIITDTIKSWRNNILRTQESECACVNGSCFTVMTDGPSDGQASYKIFRIEKGKIVKSVEMNAPNYYYEECSCYPDSSEITCVCRDNWHGSNRPWVSFNQNLEYQIGYICSGIFGDNPRPNDKTGNCGPVSSNGANGVKGFSFKYGNGVWIGRTKSISSRNGFEMIWDPNGWTGTDNNFSIKQDIVGINEWSGYSGSFVQHPELTGLDCIRPCFWVELIRGRPKENTIWTSGSSISFCGVNSDTVGWSWPDGAELPFTIDK

SEQ ID NO: 18502 - protein, 469 aa, synthetic construct; identical to SEQ ID NO: 16738
  REGION 1..469: note = neuraminidase__InfluenzaA__ADF10129

SEQ ID NO: 18503 - protein, 469 aa, synthetic construct; identical to SEQ ID NO: 18168
  REGION 1..469: note = neuraminidase__InfluenzaA__ADF10146

SEQ ID NO: 18504 - protein, 469 aa, synthetic construct
  REGION 1..469: note = neuraminidase__InfluenzaA__ADF10166
MNPNQKIITIGSVCMIIGMANLILQIGNIISIWISHSIQLGNQNQIETCNQSVITYENNTWVNQTYVNISNTNFAAGQSVVSVKLAGNSSLCPVSGWAIYSKDNSIRIGSKGDVFVIREPFISCSPLECRTFFLTQGALLNDKHSNGTIKDRSPYRTLMSCPIGEVPSPYNSRFESVAWSASACHDGINWLTIGISGPDNGAVAVLKYNGIITDTIKSWRNNILRTQESECACVNGSCFTVMTDGPSDGQASYKIFRIEKGKIVKSVEMNAPNYHYEECSCYPDSSEITCVCRDNWHGSNRPWVSFNQNLEYQIGYICSGIFGDNPRPNDKTGSCGPVSSNGANGVKGFSFKYGNGVWIGRTKSISSRKGFEMIWDPNGWTGTDNNFSIKQDIVGINEWSGYSGSFVQHPELTGLDCIRPCFWVELIRGRPKENTIWTSGSSISFCGVNSDTVGWSWPDGAELPFTIDK

SEQ ID NO: 18505 - protein, 469 aa, synthetic construct; identical to SEQ ID NO: 18504
  REGION 1..469: note = neuraminidase__InfluenzaA__ADF10176

SEQ ID NO: 18506 - protein, 469 aa, synthetic construct; identical to SEQ ID NO: 18504
  REGION 1..469: note = neuraminidase__InfluenzaA__ADF10192

SEQ ID NO: 18507 - protein, 469 aa, synthetic construct; identical to SEQ ID NO: 16738
  REGION 1..469: note = neuraminidase__InfluenzaA__ADF10247

SEQ ID NO: 18508 - protein, 469 aa, synthetic construct; identical to SEQ ID NO: 18504
  REGION 1..469: note = neuraminidase__InfluenzaA__ADF10290

SEQ ID NO: 18509 - protein, 469 aa, synthetic construct
  REGION 1..469: note = neuraminidase__InfluenzaA__ADF10304
MNPNQKIITIGSVCMTIGMANLILQIGNIISIWISHSIQLGNQNQIETCNQSVITYENNTWVNQTYVNISNTNFAAGQSVVSVKLAGNSSLCPVSGWAIYSKDNSIRIGSKGDVFVIREPFISCSPLECRTFFLTQGALLNDKHSNGTIKDRSPYRTLMSCPIGEVPSPYNSRFESVAWSASACHDGINWLTIGISGPDNGAVAVLKYNGIITDTIKSWRNNILRTQESECACVNGSCFTVMTDGPSDGQASYKIFRIEKGKIVKSVEMNAPNYHYEECSCYPDSSEITCVCRDNWHGSNRPWVSFNQNLEYQIGYICSGIFGDNPRPNDKTGSCGPVSSNGANGVKGFSFKYGNGVWIGRTKSISSRNGFEMIWDPNGWTGTDNNFSIKQDIVGINEWSGYSGSFVQHPELTGLDCIRPCFWVELIRGRPKENTIWTSGSSISFCGVNSDTVGWSWPDGAGLPFTIDK

SEQ ID NO: 18510 - protein, 469 aa, synthetic construct; identical to SEQ ID NO: 16738
  REGION 1..469: note = neuraminidase__InfluenzaA__ADF10340

SEQ ID NO: 18511 - protein, 469 aa, synthetic construct; identical to SEQ ID NO: 16738
  REGION 1..469: note = neuraminidase__InfluenzaA__ADF10361

SEQ ID NO: 18512 - protein, 469 aa, synthetic construct; identical to SEQ ID NO: 18504
  REGION 1..469: note = neuraminidase__InfluenzaA__ADF10371

SEQ ID NO: 18513 - protein, 469 aa, synthetic construct; identical to SEQ ID NO: 18504
  REGION 1..469: note = neuraminidase__InfluenzaA__ADF10407

SEQ ID NO: 18514 - protein, 469 aa, synthetic construct; identical to SEQ ID NO: 16738
  REGION 1..469: note = neuraminidase__InfluenzaA__ADF10472

SEQ ID NO: 18515 - protein, 469 aa, synthetic construct; identical to SEQ ID NO: 18504
  REGION 1..469: note = neuraminidase__InfluenzaA__ADF10616

SEQ ID NO: 18516 - protein, 469 aa, synthetic construct; identical to SEQ ID NO: 18504
  REGION 1..469: note = neuraminidase__InfluenzaA__ADF10688

SEQ ID NO: 18517 - protein, 469 aa, synthetic construct; identical to SEQ ID NO: 18504
  REGION 1..469: note = neuraminidase__InfluenzaA__ADF10726

SEQ ID NO: 18518 - protein, 469 aa, synthetic construct; identical to SEQ ID NO: 16738
  REGION 1..469: note = neuraminidase__InfluenzaA__ADF10773

SEQ ID NO: 18519 - protein, 469 aa, synthetic construct
  REGION 1..469: note = neuraminidase__InfluenzaA__ADF10837
MNPNQKIITIGSVCMTIGMANLILQIGNIISIWISHSIQLGNQNQIETCNQSVITYENNTWVNQTYVNISNTNFAAGQSVVSVKLAGNSSLCPVSGWAIYSKDNSIRIGSKGDVFVIREPFISCSPLECRTFFLTQGALLNDKHSNGTIKDRSPYRTLMSCPIGEVPSPYNSRFESVAWSASACHDGINWLTIGISGPDNGAVAVLKYNGIITDTIKSWKNNILRTQESECACVNGSCFTVMTDGPSDGQASYKIFRIEKGKIVKSVEMNAPNYHYEECSCYPDSSEITCVCRDNWHGSNRPWVSFNQNLEYQIGYICSGIFGDNPRPNDKTGSCGPVSSNGANGVKGFSFKYGNGVWIGRTKSISSRNGFEMIWDPNGWTGTDNNFSIKQDIVGINEWSGYSGSFVQHPELTGLDCIRPCFWVELIRGRPKENTIWTSGSSISFCGVNSDTVGWSWPDGAELPFTIDK

SEQ ID NO: 18520 - protein, 469 aa, synthetic construct; identical to SEQ ID NO: 16738
  REGION 1..469: note = neuraminidase__InfluenzaA__ADF10889

SEQ ID NO: 18521 - protein, 469 aa, synthetic construct; identical to SEQ ID NO: 16738
  REGION 1..469: note = neuraminidase__InfluenzaA__ADF10947

SEQ ID NO: 18522 - protein, 469 aa, synthetic construct; identical to SEQ ID NO: 16738
  REGION 1..469: note = neuraminidase__InfluenzaA__ADF11010

SEQ ID NO: 18523 - protein, 469 aa, synthetic construct
  REGION 1..469: note = neuraminidase__InfluenzaA__ADF27355
MNPNQKIITIGSVCMTIGMANLILQIGNIISIWISHSIQLGNQNQIETCNQSVITYENNTWVNQTYVNISNTNFAAGQSVVSVKLAGNSSLCPVSGWAIYSKDNSIRIGSKGDVFVIREPFISCSPLECRTFFLTQGALLNDKHSNGTIKDRSPYRTLMSCPIGEVPSPYNSRFESVAWSASACHDGINWLTIGISGPDNGAVAVLKYNGIITDTIKSWRNNILRTQESECACVNGSCFTVMTDGPSDGQASYKIFRIEKGKIVKSVEMNAPNYHYEECSCYPDSSEITCVCRDNWHGSNRPWVSFNQNLEYQIGYICSGIFGDNPRPNDKTGSCGPVSSNGANGVKGFSFKYGNGVWMGRTKSISSRNGFEMIWDPNGWTGTDNNFSIKQDIVGINEWSGYSGSFVQHPELTGLDCIRPCFWVELIRGRPKENTIWTSGSSISFCGVNSDTVGWSWPDGAELPFTIDK

SEQ ID NO: 18524 - protein, 469 aa, synthetic construct
  REGION 1..469: note = neuraminidase__InfluenzaA__ADF27356
MNPNQKIITIGSVCMTIGMANLILQIGNIISIWISHSIQLGNQNQIETCNQNVITYENNTWVNQTYVNISNTNFAAGQSVVSVKLAGNSSLCPVSGWAIYSKDNSIRIGSKGDVFVIREPFISCSPLECRTFFLTQGALLNDKHSNGTIKDRSPYRTLMSCPIGEVPSPYNSRFESVAWSASACHDGINWLTIGISGPDNGAVAVLKYNGIITDTIKSWRNNILRTQESECACVNGSCFTVMTDGPSDGQASYKIFRIEKGKIVKSVEMNAPNYYYEECSCYPDSSEITCVCRDNWHGSNRPWVSFNQNLEYQIGYICSGIFGDNPRPNDKTGSCGPVSSNGANGVKGFSFKYGNGVWIGRTKSISSRNGFEMIWDPNGWTGTDNNFSIKQDIVGINEWSGYSGSFVQHPELTGLDCIRPCFWVELIRGRPKENTIWTSGSSISFCGVNSDTVGWSWPDGAELPFTIDK

SEQ ID NO: 18525 - protein, 469 aa, synthetic construct; identical to SEQ ID NO: 17092
  REGION 1..469: note = neuraminidase__InfluenzaA__ADF27357

SEQ ID NO: 18526 - protein, 469 aa, synthetic construct; identical to SEQ ID NO: 17092
  REGION 1..469: note = neuraminidase__InfluenzaA__ADF27358

SEQ ID NO: 18527 - protein, 469 aa, synthetic construct; identical to SEQ ID NO: 17092
  REGION 1..469: note = neuraminidase__InfluenzaA__ADF27360

SEQ ID NO: 18528 - protein, 469 aa, synthetic construct; identical to SEQ ID NO: 16738
  REGION 1..469: note = neuraminidase__InfluenzaA__ADF27361

SEQ ID NO: 18529 - protein, 469 aa, synthetic construct; identical to SEQ ID NO: 16738
  REGION 1..469: note = neuraminidase__InfluenzaA__ADF27362

SEQ ID NO: 18530 - protein, 469 aa, synthetic construct; identical to SEQ ID NO: 16738
  REGION 1..469: note = neuraminidase__InfluenzaA__ADF27363

SEQ ID NO: 18531 - protein, 469 aa, synthetic construct; identical to SEQ ID NO: 17092
  REGION 1..469: note = neuraminidase__InfluenzaA__ADF27364

SEQ ID NO: 18532 - protein, 469 aa, synthetic construct; identical to SEQ ID NO: 16738
  REGION 1..469: note = neuraminidase__InfluenzaA__ADF27365

SEQ ID NO: 18533 - protein, 469 aa, synthetic construct; identical to SEQ ID NO: 17092
  REGION 1..469: note = neuraminidase__InfluenzaA__ADF27366

SEQ ID NO: 18534 - protein, 469 aa, synthetic construct; identical to SEQ ID NO: 16738
  REGION 1..469: note = neuraminidase__InfluenzaA__ADF27382

SEQ ID NO: 18535 - protein, 469 aa, synthetic construct; identical to SEQ ID NO: 16738
  REGION 1..469: note = neuraminidase__InfluenzaA__ADF27392

SEQ ID NO: 18536 - protein, 469 aa, synthetic construct; identical to SEQ ID NO: 16738
  REGION 1..469: note = neuraminidase__InfluenzaA__ADF27402

SEQ ID NO: 18537 - protein, 469 aa, synthetic construct; identical to SEQ ID NO: 18519
  REGION 1..469: note = neuraminidase__InfluenzaA__ADF27422

SEQ ID NO: 18538 - protein, 469 aa, synthetic construct
  REGION 1..469: note = neuraminidase__InfluenzaA__ADF27432
MNPNQKIITIGSVCVTIGMANLILQIGNIISIWISHSIQLGNQNQIETCNQSVITYENNTWVNQTYVNISNTNFAAGQSVVSVKLAGNSSLCPVSGWAIYSKDNSIRIGSKGDVFVIREPFISCSPLECRTFFLTQGALLNDKHSNGTIKDRSPYRTLMSCPIGEVPSPYNSRFESVAWSASACHDGINWLTIGISGPDNGAVAVLKYNGIITDTIKSWRNNILRTQESECACVNGSCFTVMTDGPSDGQASYKIFRIEKGKIVKSVEMNAPNYHYEECSCYPDSSEITCVCRDNWHGSNRPWVSFNQNLEYQIGYICSGIFGDNPRPNDKTGSCGPVSSNGANGVKGFSFKYGNGVWIGRTKSISSRNGFEMIWDPNGWTGTDNNFSIKQDIVGINEWSGYSGSFVQHPELTGLDCIRPCFWVELIRGRPKENTIWTSGSSISFCGVNSDTVGWSWPDGAELPFTIDK

SEQ ID NO: 18539 - protein, 469 aa, synthetic construct
  REGION 1..469: note = neuraminidase__InfluenzaA__ADF27442
MNPNQKIITIGSVCMTIGMANLILQIGNIISIWISHSIQLENQNQIETCNQSVITYENNTWVNQTYVNISNTNFAAGQSVVSVKLAGNSSLCPVSGWAIYSKDNSIRIGSKGDVFVIREPFISCSPLECRTFFLTQGALLNDKHSNGTIKDRSPYRTLMSCPIGEVPSPYNSRFESVAWSASACHDGINWLTIGISGPDNGAVAVLKYNGIITDTIKSWRNNILRTQESECACVNGSCFTVMTDGPSDGQASYKIFRIEKGKIVKSVEMNAPNYHYEECSCYPDSSEITCVCRDNWHGSNRPWVSFNQNLEYQIGYICSGIFGDNPRPNDKTGSCGPVSSNGANGVKGFSFKYGNGVWIGRTKSISSRNGFEMIWDPNGWTGTDNNFSIKQDIVGINEWSGYSGSFVQHPELTGLDCIRPCFWVELIRGRPKENTIWTSGSSISFCGVNSDTVGWSWPDGAELPFTIDK

SEQ ID NO: 18540 - protein, 469 aa, synthetic construct
  REGION 1..469: note = neuraminidase__InfluenzaA__ADF27462
MNPNQKIITIGSVCMTIGMANLILQIGNIISIWISHSIQLGNQNQIEACNQSVITYENNTWVNQTYVNISNTNFAAGQSVVSVKLAGNSSLCPVSGWAVYSKDNSIRIGSKGDVFVIREPFISCSPLECRTFFLTQGALLNDKHSNGTIKDRSPYRTLMSCPIGEVPSPYNSRFESVAWSASACHDGINWLTIGISGPDNGAVAVLKYNGIITDTIKSWRNNILRTQESECACVNGSCFTVMTDGPSDGQASYKIFRIEKGKIVKSVEMNAPNYHYEECSCYPDSSEITCVCRDNWHGSNRPWVSFNQNLEYQIGYICSGIFGDNPRPNDKTGSCGPVSSNGANGVKGFSFKYGNGVWIGRTKSISSRNGFEMIWDPNGWTGTDNNFSIKQDIVGINEWSGYSGSFVQHPELTGLDCIRPCFWVELIRGRPKENTIWTSGSSISFCGVNSDTVGWSWPDGAELPFTIDK

SEQ ID NO: 18541 - protein, 469 aa, synthetic construct; identical to SEQ ID NO: 16738
  REGION 1..469: note = neuraminidase__InfluenzaA__ADF27472

SEQ ID NO: 18542 - protein, 469 aa, synthetic construct
  REGION 1..469: note = neuraminidase__InfluenzaA__ADF27482
MNPNQKIITIGSVCMTIGMANLILQIGNIISIWISHSIQLGNQNQVETCNQSIITYENNTWVNQTYVNISNTNFAAGQSVVSVKLAGNSSLCPVSGWAIYSKDNSIRIGSKGDVFVIREPFISCSPLECRTFFLTQGALLNDKHSNGTIKDRSPYRTLMSCPIGEVPSPYNSRFESVAWSASACHDGINWLTIGISGPDNGAVAVLKYNGIITDTIKSWRNNILRTQESECACVNGSCFTVMTDGPSDGQASYKIFRIEKGKIVKSVEMNAPNYHYEECSCYPDSSEITCVCRDNWHGSNRPWVSFNQNLEYQIGYICSGIFGDNPRPNDKTGSCGPVSSNGANGVKGFSFKYGNGVWIGRTKSISSRNGFEMIWDPNGWTGTDNNFSIKQDIVGINEWSGYSGSFVQHPELTGLDCIRPCFWVELIRGRPKENTIWTSGSSISFCGVNSDTVGWSWPDGAELPFTIDK

SEQ ID NO: 18543 - protein, 469 aa, synthetic construct
  REGION 1..469: note = neuraminidase__InfluenzaA__ADF27492
MNPNQKIITIGSVCMTIGMANLILQIGNIISIWISHSIQLGNQNQIEPCNQSVITYENNTWVNQTYVNISNTNFAAGQSVVSVKLAGNSSLCPVSGWAIYSKDNSIRIGSKGDVFVIREPFISCSPLECRTFFLTQGALLNDKHSNGTIKDRSPYRTLMSCPIGEVPSPYNSRFESVAWSASACHDGINWLTIGISGPDNGAVAVLKYNGIITDTIKSWRNNILRTQESECACVNGSCFTVMTDGPSDGQASYKIFRIEKGKIVKSIEMNAPNYHYEECSCYPDSSEITCVCRDNWHGSNRPWVSFNQNLEYQIGYICSGIFGDNPRPNDKTGSCGPVSSNGANGVKGFSFKYGNGVWIGRTKSISSRNGFEMIWDPNGWTGTDNNFSIKQDIVGINEWSGYSGSFVQHPELTGLDCIRPCFWVELIRGRPKENTVWTSGSSISFCGVNSDTVGWSWPDGAELPFTIDK

SEQ ID NO: 18544 - protein, 469 aa, synthetic construct; identical to SEQ ID NO: 16738
  REGION 1..469: note = neuraminidase__InfluenzaA__ADF27502

SEQ ID NO: 18545 - protein, 469 aa, synthetic construct; identical to SEQ ID NO: 16738
  REGION 1..469: note = neuraminidase__InfluenzaA__ADF27512

SEQ ID NO: 18546 - protein, 469 aa, synthetic construct
  REGION 1..469: note = neuraminidase__InfluenzaA__ADF27522
MNPNQKIITIGSVCMTIGMANLILQIGNIISIWISHSIQLGNQNQIETCNQSVITYENNTWVNQTYVNISNTNFAAGQSVVSVKLAGNSSLCPVSGWAIYSKDNSIRIGSKGDVFVIREPFISCSPLECRTFFLTQGALLNDKHSNGTIKDRSPYRTLMSCPIGEVPSPYNSRFESVAWSASACHDGINWLTIGISGPDNGAVAVLKYNGIITDTIKSWRNNILRTQESECACVNGSCFTVMTDGPSDGQASYKIFRIEKGKIVKSVEMNAPNYHYEECSCYPDSSEITCVCRDNWHGSNRPWVSFNQNLEYQIGYICSGIFGDNPRPNDKTGSCGPVSSNGANGVKGFSFKYGNGVWIGRIKSISSRNGFEMIWDPNGWTGTDNNFSIKQDIVGINEWSGYSGSFVQHPELTGLDCIRPCFWVELIRGRPKENTIWTSGSSISFCGVNSDTVGWSWPDGAELPFTIDK

SEQ ID NO: 18547 - protein, 469 aa, synthetic construct; identical to SEQ ID NO: 16738
  REGION 1..469: note = neuraminidase__InfluenzaA__ADF27532

SEQ ID NO: 18548 - protein, 469 aa, synthetic construct
  REGION 1..469: note = neuraminidase__InfluenzaA__ADF27542
MNPNQKIITIGSVCMTIGMANLILQIGNIISIWISHSIQLGNQNQIETCNQSVITYENNTWVNQTYVNISNTNFAAGQSVVSVKLAGNSSLCPVSGWAIYSKDNSVRIGSKGDVFVIREPFISCSPLECRTFFLTQGALLNDKHSNGTIKDRSPYRTLMSCPIGEVPSPYNSRFESVAWSASACHDGINWLTIGISGPDNGAVAVLKYNGIITDTIKSWRNNILRTQESECACVNGSCFTVMTDGPSDGQASYKIFRIEKGKIVKSVEMNAPNYHYEECSCYPDSSEITCVCRDNWHGSNRPWVSFNQNLEYRIGYICSGIFGDNPRPNDKTGSCGPVSSNGANGVKGFSFKYGNGVWIGRTKSISSRNGFEMIWDPNGWTGTDNNFSIKQDIVGINEWSGYSGSFVQHPELTGLDCIRPCFWVELIRGRPKENTIWTSGSSISFCGVNSDTVGWSWPDGAELPFTIDK

SEQ ID NO: 18549 - protein, 469 aa, synthetic construct
  REGION 1..469: note = neuraminidase__InfluenzaA__ADF27552
MNPNQKIITIGSVCMTIGLANLILQIGNIISIWVSHSIQLGNQNQIETCNQSVITYENNTWVNQTYVNISNTNFAAGQSVVSVKLAGNSSLCPVSGWAIYSKDNSVRIGSKGDVFVIREPFISCSPLECRTFFLTQGALLNDKHSNGTIKDRSPYRTLMSCPIGEVPSPYNSRFESVAWSASACHDGINWLTIGISGPDNGAVAVLKYNGIITDTIKSWRNNILRTQESECACVNGSCFTVMTDGPSDGQASYKIFRIEKGKIVKSVEMNAPNYHYEECSCYPDSSEITCVCRDNWHGSNRPWVSFNQNLEYRIGYICSGIFGDNPRPNDKTGSCGPVSSNGANGVKGFSFKYGNGVWIGRTKSISSRNGFEMIWDPNGWTGTDKNFSIKQDIVGINEWSGYSGSFVQHPELTGLDCIRPCFWVELIRGRPKENTIWTSGSSISFCGVNSDTVGWSWPDGAELPFTIDK

SEQ ID NO: 18550 - protein, 469 aa, synthetic construct; identical to SEQ ID NO: 17564
  REGION 1..469: note = neuraminidase__InfluenzaA__ADF27562

SEQ ID NO: 18551 - protein, 469 aa, synthetic construct; identical to SEQ ID NO: 16738
  REGION 1..469: note = neuraminidase__InfluenzaA__ADF27572

SEQ ID NO: 18552 - protein, 469 aa, synthetic construct
  REGION 1..469: note = neuraminidase__InfluenzaA__ADF27582
MNPNQKIITIGSVCMTIGMANLILQIGNIISIWISHSIQLGNQNQIETCNQSVITYENNTWVNQTYVNISNTNFAAGQSVVSVKLAGNSSLCPVSGWAIYSKDNSIRIGSKGDVFVIREPFISCSPLECRTFFLTQGALLNDKHSNGTIKDRSPYRTLMSCPIGEVPSPYNSRFESVAWSASACHDGINWLTIGISGPDNGAVAVLKYNGIITDTIKSWRNNILRTQESECACVNGSCFTVMTDGPSDGQASYKIFRIEKGKIVKSVEMNAPNYHYEECSCYPDSSEITCVCRDNWHGSNRPWVSFNQNLEYRIGYICSGIFGDNPRPNDKTGSCGPVSSNGANGVKGFSFKYGNGVWIGRTKSISSRNGFEMIWDPNGWTGTDNNFSIKQDIVGINEWSGYSGSFVQHPELTGLDCIRPCFWVELIRGRPKENTIWTSGSSISFCGVNSDTVGWSWPDGAELPFTIDK

SEQ ID NO: 18553 - protein, 469 aa, synthetic construct; identical to SEQ ID NO: 16738
  REGION 1..469: note = neuraminidase__InfluenzaA__ADF27592

SEQ ID NO: 18554 - protein, 469 aa, synthetic construct
  REGION 1..469: note = neuraminidase__InfluenzaA__ADF27602
MNPNQKIITIGSVCMTIGMANLILQIGNIISIWISHSIQLGNQNQIETCNQSVITYENNTWVNQTYVNISNTNFAAGQSVVSVKLAGNSSLCPVSGWAIYSKDNSIRIGSKGDVFVIREPFISCSPLECRTFFLTQGALLNDKHSNGTIKDRSPYRTLMSCPIGEVPSPYNSRFESVAWSASACHDGINWLTIGISGPDNGAVAVLKYNGIITDTIKSWRNNILRTQESECACVNGSCFTVMTDGPSDGQASYKIFRIERGKIVKSVEMNAPNYHYEECSCYPDSSEITCVCRDNWHGSNRPWVSFNQNLEYQIGYICSGIFGDNPRPNDKTGSCGPVSSNGANGVKGFSFKYGNGVWIGRTKSISSRNGFEMIWDPNGWTGTDNSFSIKQDIVGINEWSGYSGSFVQHPELTGLDCIRPCFWVELIRGRPKENTIWTSGSSISFCGVNSDTVGWSWPDGAELPFTIDK

SEQ ID NO: 18555 - protein, 469 aa, synthetic construct; identical to SEQ ID NO: 16738
  REGION 1..469: note = neuraminidase__InfluenzaA__ADF27612

SEQ ID NO: 18556 - protein, 469 aa, synthetic construct; identical to SEQ ID NO: 18026
  REGION 1..469: note = neuraminidase__InfluenzaA__ADF27622

SEQ ID NO: 18557 - protein, 469 aa, synthetic construct; identical to SEQ ID NO: 18473
  REGION 1..469: note = neuraminidase__InfluenzaA__ADF27632

SEQ ID NO: 18558 - protein, 469 aa, synthetic construct; identical to SEQ ID NO: 16738
  REGION 1..469: note = neuraminidase__InfluenzaA__ADF27642

SEQ ID NO: 18559 - protein, 469 aa, synthetic construct; identical to SEQ ID NO: 16738
  REGION 1..469: note = neuraminidase__InfluenzaA__ADF27652

SEQ ID NO: 18560 - protein, 469 aa, synthetic construct
  REGION 1..469: note = neuraminidase__InfluenzaA__ADF27662
MNPNQKIITIGSVCMTIGMANLILQIGNIISIWISHSIQLGNQNQIETCNQSVITYENNTWVNQTYVNISNTNFAAGQSVVSVKLAGNSSLCPVSGWAIYSKDNSVRIGSKGDVFVIREPFISCSPLECRTFFLTQGALLNDKHSNGTIKDRSPYRTLMSCPIGEVPSPYNSRFESVAWSASACNDGINWLTIGISGPDNGAVAVLKYNGIITDTIKSWRNNILRTQESECACVNGSCFTVMTDGPSDGQASYKIFRIEKGKIVKSVEMNAPNYHYEECSCYPDSSEITCVCRDNWHGSNRPWVSFNQNLEYRIGYICSGIFGDNPRPNDKTGSCGPVSSNGANGVKGFSFKYGNGVWIGRTKSISSRNGFEMIWDPNGWTGTDNNFSIKQDIVGINEWSGYSGSFVQHPELTGLDCIRPCFWVELIRGRPKENTIWTSGSSISFCGVNSDTVGWSWPDGAELPFTIDK

SEQ ID NO: 18561 - protein, 469 aa, synthetic construct; identical to SEQ ID NO: 16738
  REGION 1..469: note = neuraminidase__InfluenzaA__ADF27672

SEQ ID NO: 18562 - protein, 469 aa, synthetic construct; identical to SEQ ID NO: 16738
  REGION 1..469: note = neuraminidase__InfluenzaA__ADF27682

SEQ ID NO: 18563 - protein, 469 aa, synthetic construct; identical to SEQ ID NO: 16738
  REGION 1..469: note = neuraminidase__InfluenzaA__ADF27692

SEQ ID NO: 18564 - protein, 469 aa, synthetic construct; identical to SEQ ID NO: 16738
  REGION 1..469: note = neuraminidase__InfluenzaA__ADF27702

SEQ ID NO: 18565 - protein, 469 aa, synthetic construct; identical to SEQ ID NO: 16738
  REGION 1..469: note = neuraminidase__InfluenzaA__ADF27712

SEQ ID NO: 18566 - protein, 469 aa, synthetic construct; identical to SEQ ID NO: 18026
  REGION 1..469: note = neuraminidase__InfluenzaA__ADF27788

SEQ ID NO: 18567 - protein, 469 aa, synthetic construct; identical to SEQ ID NO: 17981
  REGION 1..469: note = neuraminidase__InfluenzaA__ADF27798

SEQ ID NO: 18568 - protein, 469 aa, synthetic construct; identical to SEQ ID NO: 18473
  REGION 1..469: note = neuraminidase__InfluenzaA__ADF27808

SEQ ID NO: 18569 - protein, 469 aa, synthetic construct
  REGION 1..469: note = neuraminidase__InfluenzaA__ADF27818
MNPNQKIITIGSVCMTIGMANLILQIGNIISIWISHSIQLGNQNQIETCNQSVITYENNTWVNQTYVNISNTNFAAGQSVVSVKLAGNSSLCPVSGWAIYSKDNSIRIGSKGDVFVIREPFISCSPLECRTFFLTQGALLNDKHSNGTIKDRSPYRTLMSCPIGEVPSPYNSRFESVAWSASACHDGINWLTIGISGPDNGAVAVLKYNGIITDTIKSWRNNILRTQESECACVNGSCFTIMTDGPSDGQASYKIFRIEKGKIVKSVEMNAPNYHYEECSCYPDSSEITCVCRDNWHGSNRPWVSFNQNLEYQIGYICSGIFGDNPRPNDKTGSCGPVSSNGANGVKGFSFKYGNGVWIGRTKSINSRNGFEMIWDPNGWTGTDNNFSIKQDIVGINEWSGYSGSFVQHPELTGLDCIRPCFWVELIRGRPKENTIWTSGSSISFCGVNSDTVGWSWPDGAELPFTIDK

SEQ ID NO: 18570 - protein, 469 aa, synthetic construct; identical to SEQ ID NO: 16738
  REGION 1..469: note = neuraminidase__InfluenzaA__ADF27838

SEQ ID NO: 18571 - protein, 469 aa, synthetic construct; identical to SEQ ID NO: 16738
  REGION 1..469: note = neuraminidase__InfluenzaA__ADF27848

SEQ ID NO: 18572 - protein, 469 aa, synthetic construct
  REGION 1..469: note = neuraminidase__InfluenzaA__ADF27858
MNPNQKIITIGSVCMTIGMANLILQIGNIISIWISHSIQLGNQNQIETCNQSVITYENNTWVNQTYVNISNTNFAAGQSVVSVKLAGNSSLCPVSGWAIYSKDNSIRIGSKGDVFVIREPFISCSPLECRTFFLTQGALLNDKHSNGTIKDRSPYRTLMSCPIGEVPSPYNSRFESVAWSSSACHDGINWLTIGISGPDNGAVAVLKYNGIITDTIKSWRNNILRTQESECACVNGSCFTVMTDGPSDGQASYKIFRIEKGKIVKSVEMNAPNYHYEECSCYPDSSEITCVCRDNWHGSNRPWVSFNQNLEYQIGYICSGIFGDNPRPNDKKGSCGPVSSNGANGVKGFSFKYGNGVWIGRTKSISSRNGFEMIWDPNGWTGTDNNFSIKQDIVGINEWSGYSGSFVQHPELTGLDCIRPCFWVELIRGRPKENTIWTSGSSISFCGVNGDTVGWSWPDGAELPFTIDK

SEQ ID NO: 18573 - protein, 469 aa, synthetic construct
  REGION 1..469: note = neuraminidase__InfluenzaA__ADF27878
MNPNQKIITIGSVCMTIGMANLILQIGNIISIWISHSIQLGNQNQIETCNQSVITYENNTWVNQTYVNISNTNFAAGQSVVSVKLAGNSSLCPVSGWAIYSKDNSIRIGSKGDVFVIREPFISCSPLECRTFFLTQGALLNDKHSNGTIKDRSPYRTLMSCPIGEVPSPYNSRFESVAWSASACHDGINWLTIGISGPDNGAVAVLKYNGIITDTIKSWRNNILRTQESECACVNGSCFTVMTDGPSDGQASYKIFRIEKGKIVKSVEMNAPNYHYEECSCYPDSSEITCVCRDNWHGSNRPWVSFNQNLEYQIGYICSGIFGDNPRPNDKKGSCGPVSSNGANGVKGFSFKYGNGVWIGRTKSISSRNGFEMIWDPNGWTGTDNNFSIKQDIVGINEWSGYSGSFVQHPELTGLDCIRPCFWVELIRGRPKENTIWTSGSSISFCGVNGDTVGWSWPDGAELPFTIDK

SEQ ID NO: 18574 - protein, 469 aa, synthetic construct; identical to SEQ ID NO: 18026
  REGION 1..469: note = neuraminidase__InfluenzaA__ADF27888

SEQ ID NO: 18575 - protein, 469 aa, synthetic construct; identical to SEQ ID NO: 16738
  REGION 1..469: note = neuraminidase__InfluenzaA__ADF27898

SEQ ID NO: 18576 - protein, 469 aa, synthetic construct; identical to SEQ ID NO: 18026
  REGION 1..469: note = neuraminidase__InfluenzaA__ADF27908

SEQ ID NO: 18577 - protein, 469 aa, synthetic construct; identical to SEQ ID NO: 18026
  REGION 1..469: note = neuraminidase__InfluenzaA__ADF27918

SEQ ID NO: 18578 - protein, 469 aa, synthetic construct
  REGION 1..469: note = neuraminidase__InfluenzaA__ADF27938
MNPNQRIITIGSVCMTIGMANLILQIGNIISIWISHSIQLGNQNQIETCNQSVITYENNTWVNQTYVNISNTNFAAGQSVVSVKLAGNSSLCPVSGWAIYSKDNSIRIGSKGDVFVIREPFISCSPLECRTFFLTQGALLNDKHSNGTIKDRSPYRTLMSCPIGEVPSPYNSRFESVAWSASACHDGINWLTIGISGPDNGAVAVLKYNGIITDTIKSWRNNILRTQESECACVNGSCFTVMTDGPSDGQASYKIFRIEKGKIVKSVEMNAPNYHYEECSCYPDSSEITCVCRDNWHGSNRPWVSFNQNLEYQIGYICSGIFGDNPRPNDKTGSCGPVSSNGANGVKGFSFKYGNGVWIGRTKSISSRNGFEMIWDPNGWTGTDNNFSIKQDIVGINEWSGYSGSFVQHPELTGLDCIRPCFWVELIRGRPKENTIWTSGSSMSFCGVNSDTVGWSWPDGAELPFTIDK

SEQ ID NO: 18579 - protein, 469 aa, synthetic construct; identical to SEQ ID NO: 16738
  REGION 1..469: note = neuraminidase__InfluenzaA__ADF27948

SEQ ID NO: 18580 - protein, 469 aa, synthetic construct; identical to SEQ ID NO: 18026
  REGION 1..469: note = neuraminidase__InfluenzaA__ADF27958

SEQ ID NO: 18581 - protein, 469 aa, synthetic construct; identical to SEQ ID NO: 16738
  REGION 1..469: note = neuraminidase__InfluenzaA__ADF27968

SEQ ID NO: 18582 - protein, 469 aa, synthetic construct; identical to SEQ ID NO: 18026
  REGION 1..469: note = neuraminidase__InfluenzaA__ADF27978

SEQ ID NO: 18583 - protein, 469 aa, synthetic construct
  REGION 1..469: note = neuraminidase__InfluenzaA__ADF27988
MNPNQKIITIGSVCMTIGLANLILQIGNIISIWISHSIQLGNQNQIETCNQSVISYENNTWVNQTYVNISNTNFAAGQSVVSVKLAGNSSLCPVSGWAIYSKDNSVRIGSKGDVFVIREPFISCSPLECRTFFLTQGALLNDKHSNGTIKDRSPYRTLMSCPIGEVPSPYNSRFESVAWSASACHDGINWLTIGISGPDNGAVAVLKYNGIITDTIKSWRNNILRTQESECACVNGSCFTVMTDGPSDGQASYKIFRIEKGKIVKSVEMNAPNYHYEECSCYPDSSEITCVCRDNWHGSNRPWVSFNQNLEYRIGYICSGIFGDNPRPNDKTGSCGPVSSNGANGVKGFSFKYGNGVWIGRTKSISSRNGFEMIWDPNGWTGTDKNFSIKQDIVGINEWSGYSGSFVQHPELTGLDCIRPCFWVELIRGRPKENTIWTSGSSISFCGVNSDTVGWSWPDGAELPFTIDK

SEQ ID NO: 18584 - protein, 469 aa, synthetic construct; identical to SEQ ID NO: 16738
  REGION 1..469: note = neuraminidase__InfluenzaA__ADF27998

SEQ ID NO: 18585 - protein, 469 aa, synthetic construct; identical to SEQ ID NO: 16738
  REGION 1..469: note = neuraminidase__InfluenzaA__ADF28008

SEQ ID NO: 18586 - protein, 469 aa, synthetic construct; identical to SEQ ID NO: 17625
  REGION 1..469: note = neuraminidase__InfluenzaA__ADF28018

SEQ ID NO: 18587 - protein, 469 aa, synthetic construct; identical to SEQ ID NO: 16738
  REGION 1..469: note = neuraminidase__InfluenzaA__ADF28028

SEQ ID NO: 18588 - protein, 469 aa, synthetic construct
  REGION 1..469: note = neuraminidase__InfluenzaA__ADF28038
MNPNQKIITIGSVCMTIGMANLILQIGNIISIWISHSIQLGNQNQIETCNQSVITYENNTWVNQTYVNISNTNFATGQLVVSVKLAGNSSLCPVSGWAIYSKDNSIRIGSKGDVFVIREPFISCSPLECRTFFLTQGALLNDRHSNGTIKDRSPYRTLMSCPIGEVPSPYNSRFESVAWSASACHDGINWLTIGISGPDNGAVAVLKYNGIITDTIKSWRNNILRTQESECACVNGSCFTVMTDGPSDGQASYKIFRIEKGKIVKSVEMNAPNYHYEECSCYPDSSEITCVCRDNWHGSNRPWVSFNQNLEYQIGYICSGIFGDNPRPNDKTGSCGPVSSNGANGVKGFSFKYGNGVWIGRTKSISSRNGFEMIWDPNGWTGTDNNFSIKQDIVGINEWSGYSGSFVQHPELTGLDCIRPCFWVELIRGRPKENTIWTSGSSISFCGVNSDTVGWSWPDGAELPFTIDK

SEQ ID NO: 18589 - protein, 469 aa, synthetic construct; identical to SEQ ID NO: 16738
  REGION 1..469: note = neuraminidase__InfluenzaA__ADF28048

SEQ ID NO: 18590 - protein, 469 aa, synthetic construct; identical to SEQ ID NO: 16738
  REGION 1..469: note = neuraminidase__InfluenzaA__ADF28058

SEQ ID NO: 18591 - protein, 469 aa, synthetic construct
  REGION 1..469: note = neuraminidase__InfluenzaA__ADF28068
MNPNQKIITIGSVCMTIGMANLILQIGNIISIWISHSIQLGNQNQIETCNQSVITYENNTWVNQTYVNISNTNFAAGQSVVSVKLAGSSSLCPVSGWAIYSKDNSIRIGSKGDVFVIREPFISCSHLECRTFFLTQGALLNDKHSNGTIKDRSPYRTLMSCPIGEVPSPYNSRFESVAWSASACHDGINWLTIGISGPDNGAVAVLKYNGIITDTIKSWRNNILRTQESECACVNGSCFTVMTDGPSDGQASYKIFRIEKGKIVKSVEMNAPNYHYEECSCYPDSSEITCVCRDNWHGSNRPWVSFNQNLEYQIGYICSGIFGDNPRPNDKKGSCGPVSSNGANGVKGFSFKYGNGVWIGRTKSISSRNGFEMIWDPNGWTGTDNNFSIKQDIVGINEWSGYSGSFVQHPELTGLDCIRPCFWVELIRGRPKENTIWTSGSSISFCGVNSDTVGWSWPDGAELPFTIDK

SEQ ID NO: 18592 - protein, 469 aa, synthetic construct; identical to SEQ ID NO: 16738
  REGION 1..469: note = neuraminidase__InfluenzaA__ADF28078

SEQ ID NO: 18593 - protein, 469 aa, synthetic construct; identical to SEQ ID NO: 16738
  REGION 1..469: note = neuraminidase__InfluenzaA__ADF28088

SEQ ID NO: 18594 - protein, 469 aa, synthetic construct; identical to SEQ ID NO: 18200
  REGION 1..469: note = neuraminidase__InfluenzaA__ADF28110

SEQ ID NO: 18595 - protein, 469 aa, synthetic construct; identical to SEQ ID NO: 16738
  REGION 1..469: note = neuraminidase__InfluenzaA__ADF28120

SEQ ID NO: 18596 - protein, 469 aa, synthetic construct; identical to SEQ ID NO: 16738
  REGION 1..469: note = neuraminidase__InfluenzaA__ADF29919

SEQ ID NO: 18597 - protein, 469 aa, synthetic construct; identical to SEQ ID NO: 17875
  REGION 1..469: note = neuraminidase__InfluenzaA__ADF42692

SEQ ID NO: 18598 - protein, 469 aa, synthetic construct; identical to SEQ ID NO: 16738
  REGION 1..469: note = neuraminidase__InfluenzaA__ADF42702

SEQ ID NO: 18599 - protein, 469 aa, synthetic construct; identical to SEQ ID NO: 18573
  REGION 1..469: note = neuraminidase__InfluenzaA__ADF42712

SEQ ID NO: 18600 - protein, 469 aa, synthetic construct; identical to SEQ ID NO: 16738
  REGION 1..469: note = neuraminidase__InfluenzaA__ADF42722

SEQ ID NO: 18601 - protein, 469 aa, synthetic construct; identical to SEQ ID NO: 18026
  REGION 1..469: note = neuraminidase__InfluenzaA__ADF42732

SEQ ID NO: 18602 - protein, 469 aa, synthetic construct; identical to SEQ ID NO: 16738
  REGION 1..469: note = neuraminidase__InfluenzaA__ADF42742

SEQ ID NO: 18603 - protein, 469 aa, synthetic construct; identical to SEQ ID NO: 16728
  REGION 1..469: note = neuraminidase__InfluenzaA__ADF58339

SEQ ID NO: 18604 - protein, 469 aa, synthetic construct; identical to SEQ ID NO: 16738
  REGION 1..469: note = neuraminidase__InfluenzaA__ADF58348

SEQ ID NO: 18605 - protein, 469 aa, synthetic construct; identical to SEQ ID NO: 16738
  REGION 1..469: note = neuraminidase__InfluenzaA__ADF58350

SEQ ID NO: 18606 - protein, 469 aa, synthetic construct; identical to SEQ ID NO: 16738
  REGION 1..469: note = neuraminidase__InfluenzaA__ADF58352

SEQ ID NO: 18607 - protein, 469 aa, synthetic construct
  REGION 1..469: note = neuraminidase__InfluenzaA__ADF80459
MNPNQKIITIGSVCMTIGMANLILQIGNIISIWISHSIQLGNQNQIETCNQSVITYENNTWVNQTYVNISNTNFAAGQSVVSVKLAGNSSLCPVSGWAIYSKDNSIRIGSKGDVFVIREPFISCSPLECRTFFLTQGALLNDKHSNGTIKDRSPYRTLMSCPIGEVPSPYNSRFESVAWSASACHDGINWLTIGISGPDNGAVAVLKYNGIITDTIKSWRNNILRTQESECACVNGSCFTVMTDGPSDGQASYKIFRIEKGKIVKSVEMNAPNYYYEECSCYPDSSEITCVCRDNWHGSNRPWVTFNQNLEYQIGYICSGIFGDNPRPNDKTGSCGPVSSNGANGVKGFSFKYGNGVWIGRTKSISSRNGFEMIWDPNGWTGTDNNFSIKQDIVGINEWSGYSGSFVQHPELTGLDCIRPCFWVELIRGRPKENTVWTSGSSISFCGVNSDTVGWSWPDGAELPFTIDK

SEQ ID NO: 18608 - protein, 469 aa, synthetic construct
  REGION 1..469: note = neuraminidase__InfluenzaA__ADF80503
MNPNQKIITIGSVCMTIGMANLILQIGNITSIWISHSIQLGNQNQIETCNQSVITYENNTWVNQTYVNISNTNFAAGQSVVSVKLAGNSSLCPVSGWAIYSKDNSIRIGSKGDVFVIREPFISCSPLECRTFFLTQGALLNDKHSNGTIKDRSPYRTLMSCPIGEVPSPYNSRFESVAWSASACHDGINWLTIGISGPDNGAVAVLKYNGIITDTIKSWRNNILRTQESECACVNGSCFTVMTDGPSDGQASYKIFRIEKGKIVKSVEMNAPNYYYEECSCYPDSSEITCVCRDNWHGSNRPWVSFNQNLEYQIGYICSGIFGDNPRPNDKTGSCGPVSSNGANGVKGFSFKYGNGVWIGRTKSISSRNGFEMIWDPNGWTGTDNNFSIKQDIVGINEWSGYSGSFVQHPELTGLDCIRPCFWVELIRGRPKENTIWTSGSSISFCGVNSDTVGWSWPDGAELPFTIDK

SEQ ID NO: 18609 - protein, 469 aa, synthetic construct
  REGION 1..469: note = neuraminidase__InfluenzaA__ADF83744
MNPNQKIITIGSVSLTISTICFFMQIAILITTVTLHFKQYEFNSPPNNQVMLCEPTIIEKNITEIVYLTNTTIEKEICPKLAEYRNWSKPQCDITGFAPFSKDNSIRLSAGGDIWVTREPYVSCDPDKCYQFALGQGTTLNNVHSNNTVRDRTPYRTLLMNELGVPFHLGTKQVCIAWSSSSCHDGKAWLHVCITGDDKNATASFIYNGRLVDSVVSWSKEILRTQESECVCINGTCTVVMTDGSASGKADTKILFIEEGKIVHTSTLSGSAQHVEECSCYPRYPGVRCVCRDNWKGSNRPIVDINIKDHSIVSSYVCSGLVGDTPRKNDSSSSSHCLDPNNEEGGHGVKGWAFDDGNDVWMGRTISEKSRLGYETFKVIEGWSNPKSKLQINRQVIVDRGNRSGYSGIFSVEGKSCINRCFYVELIRGRKEETEVLWTSNSIVVFCGTSGTYGTGSWPDGADINLMPI

SEQ ID NO: 18610 - protein, 469 aa, synthetic construct; identical to SEQ ID NO: 17592
  REGION 1..469: note = neuraminidase__InfluenzaA__ADF83755

SEQ ID NO: 18611 - protein, 469 aa, synthetic construct
  REGION 1..469: note = neuraminidase__InfluenzaA__ADF83766
MNPNQKIITIGSVCMTIGMANLILQIGNIISIWISHSIQLGNQNQTETCNQSVITYENNTWVNQTYVNISNTNFAAGQSVVSVKLAGNSSLCPVSGWAIYSKDNSIRIGSKGDVFVIREPFISCSPLECRTFFLTQGALLNDKHSNGTIKDRSPYRTLMSCPIGEVPSPYNSRFESVAWSASACHDGINWLTIGISGPDNGAVAVLKYNGIITDTIKSWRNNILRTQESECACVNGSCFTVMTDGPSDGQASYKIFRIEKGKIVKSVEMNAPNYHYEECSCYPDSSEITCVCRDNWHGSNRPWVSFNQNLEYQIGYICSGIFGDNPRPNDKTGSCGPVSSNGANGVKGFSFKYDNGVWIGRTKSISSRNGFEMIWDPNGWTGTDNNFSIKQDIVGINEWSGYSGSFVQHPELTGLDCIRPCFWVELIRGRPKENTIWTSGSSISFCGVNSDTVGWSWPDGAELPFTIDK

SEQ ID NO: 18612 - protein, 469 aa, synthetic construct; identical to SEQ ID NO: 16738
  REGION 1..469: note = neuraminidase__InfluenzaA__ADF83776

SEQ ID NO: 18613 - protein, 469 aa, synthetic construct
  REGION 1..469: note = neuraminidase__InfluenzaA__ADF83786
MNPNQKIITIGSVCMTIGMANLILQIGNIISIWISHSIQLGNQNQIETCNQSVITYENNTWVNQTYVNISNTNFAAGQSVVSVKLAGNSSLCPVSGWAIYSKDNSIRIGSKGDVFVIREPFISCSPLECRTFFLTQGALLNDKHSNGTIKDRSPYRTLMSCPIGEVPSPYNSRFESVAWSASACHDGINWLTIGISGPDNGAVAVLKYNGIITDTIKSWRNNILRTQESECACVNGSCFTVMTDGPSDGQASYKIFRIEKGKIVKSVEMNAPNYHYEECSCYPDSSEITCVCRDNWHGSNRPWVSFNQNLEYQIGYICSGIFGDNPRPNDKTGSCGPVSSNGANGVKGFSFKYGNGVWIGRTKSISSRNGFEMIWDPNGWTGTDNNFSIKQDIVGINEWSGYSGSFVQHPELTGLDCIRPCFWVELIRGRPKENTIWTSGSSISFCGVNGDTVGWSWPDGAELPFTIDK

SEQ ID NO: 18614 - protein, 469 aa, synthetic construct
  REGION 1..469: note = neuraminidase__InfluenzaA__ADF83796
MNPNQKIITIGSVCMTIGMANLILQIGNIISIWISHSIQLGNQNQIETCNQSVITYENNTWVNQTYVNISNTNFAAGQSVVSVKLAGNSSLCPVSGWAIYSKDNSIRIGSKGDVFVIREPFISCSPLECRTFFLTQGALLNDKHSNGTIKDRSPYRTLMSCPIGEVPSPYNSRFESVAWSASACHDGINWLTIGISGPDNGAVAVLKYNGIITDTIKSWRNNILRTQESECACVNGSCFTVMTDGPSDGQASYKIFRIEKGKIVKSVEMNAPNYHYEECSCYPDSSEITCVCRDNWHGSNRPWVSFNQNLEYQIGYICSGIFGDNPRPNDKTGSCGPVSSNGANGVKGFSFKYGNGVWIGRTKSISSRNGFEMIWDPNGWTGTDNNFSIKQDIVRINEWSGYSGSFVQHPELTGLDCIRPCFWVELIRGRPKENTIWTSGSSISFCGVNSDTVGWSWPDGAELPFTIDK

SEQ ID NO: 18615 - protein, 469 aa, synthetic construct; identical to SEQ ID NO: 16738
  REGION 1..469: note = neuraminidase__InfluenzaA__ADF83806

SEQ ID NO: 18616 - protein, 469 aa, synthetic construct; identical to SEQ ID NO: 18251
  REGION 1..469: note = neuraminidase__InfluenzaA__ADF83816

SEQ ID NO: 18617 - protein, 469 aa, synthetic construct; identical to SEQ ID NO: 16738
  REGION 1..469: note = neuraminidase__InfluenzaA__ADF83826

SEQ ID NO: 18618 - protein, 469 aa, synthetic construct; identical to SEQ ID NO: 16738
  REGION 1..469: note = neuraminidase__InfluenzaA__ADF83836

SEQ ID NO: 18619 - protein, 469 aa, synthetic construct; identical to SEQ ID NO: 16738
  REGION 1..469: note = neuraminidase__InfluenzaA__ADF83846

SEQ ID NO: 18620 - protein, 469 aa, synthetic construct; identical to SEQ ID NO: 16738
  REGION 1..469: note = neuraminidase__InfluenzaA__ADF83856

SEQ ID NO: 18621 - protein, 469 aa, synthetic construct; identical to SEQ ID NO: 18089
  REGION 1..469: note = neuraminidase__InfluenzaA__ADF83866

SEQ ID NO: 18622 - protein, 469 aa, synthetic construct; identical to SEQ ID NO: 18519
  REGION 1..469: note = neuraminidase__InfluenzaA__ADF83876

SEQ ID NO: 18623 - protein, 469 aa, synthetic construct; identical to SEQ ID NO: 18169
  REGION 1..469: note = neuraminidase__InfluenzaA__ADF83888

SEQ ID NO: 18624 - protein, 469 aa, synthetic construct
  REGION 1..469: note = neuraminidase__InfluenzaA__ADF83898
MNPNQKIITIGSVCMTIGMANLILQIGNIISIWISHPIQLGNQNQIETCNQSVITYENNTWVNQTYVNISNTNFAAGQSVVSVKLAGNSSLCPVSGWAIYSKDNSIRIGSKGDVFVIREPFISCSPLECRTFFLTQGALLNDKHSNGTIKDRSPYRTLMSCPIGEVPSPYNSRFESVAWSASACHDGINWLTIGISGPDNGAVAVLKYNGIITDTIKSWRNNILRTQESECACVNGSCFTVMTDGPSDGQASYKIFRIEKGKIVKSVEMNAPNYHYEECSCYPDSSEITCVCRDNWHGSNRPWVSFNQNLEYQIGYICSGIFGDNPRPNDKTGSCGPVSSNGANGVKGFSFKYGNGVWIGRTKSISSRNGFEMIWDPNGWTGTDNNFSIKQDIVGINEWSGYSGSFVQHPELTGLDCIRPCFWVELIRGRPKENTIWTSGSSISFCGVNSDTVGWSWPDGAELPFTIDK

SEQ ID NO: 18625 - protein, 469 aa, synthetic construct; identical to SEQ ID NO: 16738
  REGION 1..469: note = neuraminidase__InfluenzaA__ADF83908

SEQ ID NO: 18626 - protein, 469 aa, synthetic construct; identical to SEQ ID NO: 16738
  REGION 1..469: note = neuraminidase__InfluenzaA__ADF83918

SEQ ID NO: 18627 - protein, 469 aa, synthetic construct; identical to SEQ ID NO: 16738
  REGION 1..469: note = neuraminidase__InfluenzaA__ADF84444

SEQ ID NO: 18628 - protein, 469 aa, synthetic construct; identical to SEQ ID NO: 16738
  REGION 1..469: note = neuraminidase__InfluenzaA__ADF84462

SEQ ID NO: 18629 - protein, 469 aa, synthetic construct
  REGION 1..469: note = neuraminidase__InfluenzaA__ADF84472
MNPNQKIITIGSVCMTIGMANLILQIGNIISIWISHSIQLGNQNQIETCNQSVITYENNTWVNQTYVNISNTNFAAEQSVVSVKLAGNSSLCPVSGWAIYSKDNSIRIGSKGDVFVIREPFISCSPLECRTFFLTQGALLNDKHSNGTIKDRSPYRTLMSCPIGEVPSPYNSRFESVAWSASACHDGINWLTIGISGPDNGAVAVLKYNGIITDTIKSWRNNILRTQESECACVNGSCFTVMTDGPSDGQASYKIFRIEKGKIVKSVEMNAPNYHYEECSCYPDSSEITCVCRDNWHGSNRPWVSFNQNLEYQIGYICSGIFGDNPRPNDKTGSCGPVSSNGANGVKGFSFKYGNGVWIGRTKSISSRNGFEMIWDPNGWTGTDNNFSIKQDIVGINEWSGYSGSFVQHPELTGLDCIRPCFWVELIRGRPKENTIWTSGSSISFCGVNSDTVGWSWPDGAELPFTIDK

SEQ ID NO: 18630 - protein, 469 aa, synthetic construct
  REGION 1..469: note = neuraminidase__InfluenzaA__ADF84482
MNPNQKIIIIGSVCMTIGMANLILQIGNIISIWISHSIQLGNQNQIETCNQSVITYENNTWVNQTYVNISNTNFAAGQSVVSVKLAGNSSLCPVSGWAIYSKDNSIRIGSKGDVFVIREPFISCSPLECRTFFLTQGALLNDKHSNGTIKDRSPYRTLMSCPIGEVPSPYNSRFESVAWSASACHDGINWLTIGISGPDNGAVAVLKYNGIITDTIKSWRNNILRTQESECACVNGSCFTVMTDGPSDGQASYKIFRIEKGKIVKSVEMNAPNYHYEECSCYPDSSEITCVCRDNWHGSNRPWVSFNQNLEYQIGYICSGIFGDNPRPNDKTGSCGPVSSNGANGVKGFSFKYGNGVWIGRTKSISSRNGFEMIWDPNGWTGTDNNFAIKQDIVGINEWSGYSGSFVQHPELTGLDCIRPCFWVELIRGRPKENTIWTSGSSISFCGVNSDTVSWSWPDGAELPFTIDK

SEQ ID NO: 18631 - protein, 469 aa, synthetic construct
  REGION 1..469: note = neuraminidase__InfluenzaA__ADF84492
MNPNQKIITIGSVCMTIGMANLILQIGNIISIWISHSIQLGNQDQIETCNQSVITYENNTWVNQTYVNISNTNFAAGQSVVSVKLAGNSSLCPVSGWAIYSKDNSIRIGSKGDVFVIREPFISCSPLECRTFFLTQGALLNDKHSNGTIKDRSPYRTLMSCPIGEVPSPYNSRFESVAWSASACHDGINWLTIGISGPDNGAVAVLKYNGIITDTIKSWRNNILRTQESECACVNGSCFTVMTDGPSDGQASYKIFRIEKGKIVKSVEMNAPNYHYEECSCYPDSSEITCVCRDNWHGSNRPWVSFNQNLEYQIGYICSGIFGDNPRPNDKTGSCGPVSSNGANGVKGFSFKYGNGVWIGRTKSISSRNGFEMIWDPNGWTGTDNNFSIKQDIVGINEWSGYSGSFVQHPELTGLDCIRPCFWVELIRGRPKENTIWTSGSSISFCGVNSDTVGWSWPDGAELPFTIDK

SEQ ID NO: 18632 - protein, 469 aa, synthetic construct; identical to SEQ ID NO: 17845
  REGION 1..469: note = neuraminidase__InfluenzaA__ADF85020

SEQ ID NO: 18633 - protein, 469 aa, synthetic construct; identical to SEQ ID NO: 16738
  REGION 1..469: note = neuraminidase__InfluenzaA__ADF87155

SEQ ID NO: 18634 - protein, 469 aa, synthetic construct
  REGION 1..469: note = neuraminidase__InfluenzaA__ADF87165
MNPNQKIIIIGSVCMTIGMANLILQIGNIISIWISHSIQLGNQNQIETCNQSVITYENNTWVNQTYVNISNTNFAAGQSVVSVKLAGNSSLCPVSGWAIYSKDNSIRIGSKGDVFVIREPFISCSPLECRTFFLTQGALLNDKHSNGTIKDRSPYRTLMSCPIGEVPSPYNSRFESVAWSASACHDGINWLTIGISGPDNGAVAVLKYNGIITDTIKSWRNNILRTQESECACVNGSCFTVMTDGPSDGQASYKIFRIDKGKIVKSVEMNAPNYHYEECSCYPDSSEITCVCRDNWHGSNRPWVSFNQNLEYQIGYICSGIFGDNPRPNDKTGSCGPVSSNGANGVKGFSFKYGNGVWIGRTKSISSRNGFEMIWDPNGWTGTDNNFAIKQDIVGINEWSGYSGSFVQHPELTGLDCIRPCFWVELIRGRPKENTIWTSGSSISFCGVNSDTVGWSWPDGAELPFTIDK

SEQ ID NO: 18635 - protein, 469 aa, synthetic construct; identical to SEQ ID NO: 18629
  REGION 1..469: note = neuraminidase__InfluenzaA__ADF87175

SEQ ID NO: 18636 - protein, 469 aa, synthetic construct; identical to SEQ ID NO: 16738
  REGION 1..469: note = neuraminidase__InfluenzaA__ADF87185

SEQ ID NO: 18637 - protein, 469 aa, synthetic construct; identical to SEQ ID NO: 18629
  REGION 1..469: note = neuraminidase__InfluenzaA__ADF87195

SEQ ID NO: 18638 - protein, 469 aa, synthetic construct; identical to SEQ ID NO: 16738
  REGION 1..469: note = neuraminidase__InfluenzaA__ADF87205

SEQ ID NO: 18639 - protein, 469 aa, synthetic construct; identical to SEQ ID NO: 16738
  REGION 1..469: note = neuraminidase__InfluenzaA__ADF87215

SEQ ID NO: 18640 - protein, 469 aa, synthetic construct
  REGION 1..469: note = neuraminidase__InfluenzaA__ADF87235
MNPNQKIITIGSVCMTIGMANLILQIGNIISIWISHSIQLGNQNQIETCNQSVITYENNTWVNQTYVNISNTNFAAGQSVVSVKLAGNSSLCPVSGWAIYSKDNSIRIGSKGDVFVIREPFISCSPLECRTFFLTQGALLNDKHSNGTIKDRSPYRTLMSCPIGEVPSPYNSRFESVAWSASACHDGINWLTIGISGPDNGAVAVLKYNGIITDTIKSWRNNILRTQESECACVNGSCFTVMTDGPSDGQASYKIFKIEKGKIVKSVEMNAPNYHYEECSCYPDSSEITCVCRDNWHGSNRPWVSFNQNLEYQIGYICSGIFGDNPRPNDKTGSCGPVSSNGANGVKGFSFKYGNGVWIGRTKSISSRNGFEMIWDPNGWTGTDNNFSIKQDIVGINEWSGYSGSFVQHPELTGLDCIRPCFWVELIRGRPKENTIWTSGSSISFCGVNSDTVGWSWPDGAELPFTIDK

SEQ ID NO: 18641 - protein, 469 aa, synthetic construct; identical to SEQ ID NO: 18629
  REGION 1..469: note = neuraminidase__InfluenzaA__ADF87245

SEQ ID NO: 18642 - protein, 469 aa, synthetic construct; identical to SEQ ID NO: 18629
  REGION 1..469: note = neuraminidase__InfluenzaA__ADF87265

SEQ ID NO: 18643 - protein, 469 aa, synthetic construct
  REGION 1..469: note = neuraminidase__InfluenzaA__ADF87285
MNPNQKIITIGSVCMSIGMANLILQIGNIISIWISHSIQLGNKNQIETCNQSVITYENNTWVNQTYVNISNTNFAAGQSVVSVKLAGNSSLCPVSGWAIYSKDNSIRIGSKGDVFVIREPFISCSPLECRTFFLTQGALLNDKHSNGTIKDRSPYRTLMSCPIGEVPSPYNSRFESVAWSASACHDGINWLTIGISGPDNGAVAVLKYNGIITDTIKSWRNNILRTQESECACVNGSCFTVMTDGPSDGQASYKIFRIEKGKIVKSVEMNAPNYHYEECSCYPDSSEITCVCRDNWHGSNRPWVSFNQNLEYQIGYICSGIFGDNPRPNDKKGSCGPVSSNGANGVKGFSFKYGNGVWIGRTKSISSRNGFEMIWDPNGWTGTDNNFSIKQDIVGMNEWSGYSGSFVQHPELTGLDCIRPCFWVELIRGRPKENTIWTSGSSISFCGVNSDTVGWSWPDGAELPFTIDK

SEQ ID NO: 18644 - protein, 469 aa, synthetic construct; identical to SEQ ID NO: 16738
  REGION 1..469: note = neuraminidase__InfluenzaA__ADF87295

SEQ ID NO: 18645 - protein, 469 aa, synthetic construct; identical to SEQ ID NO: 16738
  REGION 1..469: note = neuraminidase__InfluenzaA__ADF87305

SEQ ID NO: 18646 - protein, 469 aa, synthetic construct; identical to SEQ ID NO: 16738
  REGION 1..469: note = neuraminidase__InfluenzaA__ADF87334

SEQ ID NO: 18647 - protein, 469 aa, synthetic construct; identical to SEQ ID NO: 16738
  REGION 1..469: note = neuraminidase__InfluenzaA__ADF87344

SEQ ID NO: 18648 - protein, 469 aa, synthetic construct
  REGION 1..469: note = neuraminidase__InfluenzaA__ADF87354
MNPNQKIITIGSVCMTIGMANLILQIGNIISIWISHSIQLGNQNQIETCNQSVITYENNTWVNQTYVNISNTNFAAGQSVVSVKLAGNSSLCPVSGWAIYSKDNSIRIGSKGDVFVIREPFISCSPLECRTFFLTQGALLNDKHSNGTIKDRSPYRTLMSCPIGEVPSPYNSRFESVAWSASACHDGINWLTIGISGPDNGAVAVLKYNGIITDTIKSWRNNILRTQESECACVNGSCFTVMTDGPSDGQASYKIFRIEKGKIVKSVEMNAPNYHYEECSCYPDSSEITCVCRDNWHGSNRPWVSFNQNLEYQIGYICSGIFGDNPRPNDKTGSCGPVSSNGANGVKGFSFKYGNGVWIGRTKSISSRNGFEMIWDPNGWTGTDNYFSIKQDIVGINEWSGYSGSFVQHPELTGLDCIRPCFWVELIRGRPKENTIWTSGSSISFCGVNSDTVGWSWPDGAELPFTIDK

SEQ ID NO: 18649 - protein, 469 aa, synthetic construct; identical to SEQ ID NO: 17321
  REGION 1..469: note = neuraminidase__InfluenzaA__ADF87364

SEQ ID NO: 18650 - protein, 469 aa, synthetic construct; identical to SEQ ID NO: 16738
  REGION 1..469: note = neuraminidase__InfluenzaA__ADF87374

SEQ ID NO: 18651 - protein, 469 aa, synthetic construct
  REGION 1..469: note = neuraminidase__InfluenzaA__ADF87384
MNPNQKIITIGSVCMTIGMANLILQIGNIISIWISHSIQLGNQNQIETCNQSIITYENNTWVNQTYVNISNTNFAAGQSVVSVKLAGNSSLCPVSGWAIYSKDNSIRIGSKGDVFVIREPFISCSPLECRTFFLTQGALLNDKHSNGTIKDRSPYRTLMSCPIGEVPSPYNSRFESVAWSASACHDGINWLTIGISGPDNGAVAVLKYNGIITDTIKSWRNNILRTQESECACVNGSCFTVMTDGPSDGQASYKIFRIEKGKIVKSVEMNAPNYHYEECSCYPDSSEITCVCRDNWHGSNRPWVSFNQNLEYQIGYICSGIFGDNPRPNDKTGSCGPVSSNGANGVKGFSFKYGNGVWIGRTKSISSRNGFEMIWDPNGWTGTDNNFSIKQDIVGINEWSGYSGSFVQHPELTGLDCIRPCFWVELIRGRPKENTIWTSGSSISFCGVNSDTVGWSWPDGAELPFTIDK

SEQ ID NO: 18652 - protein, 469 aa, synthetic construct; identical to SEQ ID NO: 16738
  REGION 1..469: note = neuraminidase__InfluenzaA__ADF97251

SEQ ID NO: 18653 - protein, 469 aa, synthetic construct; identical to SEQ ID NO: 17981
  REGION 1..469: note = neuraminidase__InfluenzaA__ADF97252

SEQ ID NO: 18654 - protein, 469 aa, synthetic construct; identical to SEQ ID NO: 16738
  REGION 1..469: note = neuraminidase__InfluenzaA__ADF97253

SEQ ID NO: 18655 - protein, 469 aa, synthetic construct; identical to SEQ ID NO: 16738
  REGION 1..469: note = neuraminidase__InfluenzaA__ADF97254

SEQ ID NO: 18656 - protein, 469 aa, synthetic construct
  REGION 1..469: note = neuraminidase__InfluenzaA__ADF97255
MNPNQKIITIGSVCMTIGMANLILQIGNIISIWISHSIQLGNQNQIETCNQSVITYENNTWVNQTYVNISNTNFAAGQSVVSVKLAGNSSLCPVSGWAIYSKDNSIRIGSKGDVFVIREPFISCSPLECRTFFLTQGALLNDKHSNGTIKDRSPYRTLMSCPIGEVPSPYNSRFESVAWSASACHDGINWLTIGISGPDNGAVAVLKYNGIITDTIKSWRNNILRTQESECACVNGSCFTVMTDGPSDGQASYKIFRIEKGKIVKSVEMNAPNYHYEECSCYPDSSEITCVCRDNWHGSNRPWVSFNQNLEYQIGYICSGIFGDNPRPNDKTGSCGPVSSNGANGVKGFSFKYGNGVWIGRTKSISSRNGFEMIWDPNGWTGTDNHFSIKQDIVGINEWSGYSGSFVQHPELTGLDCIRPCFWVELIRGRPKENTIWTSGSSISFCGVNSDTVGWSWPDGAELPFTIDK

SEQ ID NO: 18657 - protein, 469 aa, synthetic construct; identical to SEQ ID NO: 16738
  REGION 1..469: note = neuraminidase__InfluenzaA__ADF97256

SEQ ID NO: 18658 - protein, 469 aa, synthetic construct; identical to SEQ ID NO: 16738
  REGION 1..469: note = neuraminidase__InfluenzaA__ADF97257

SEQ ID NO: 18659 - protein, 469 aa, synthetic construct; identical to SEQ ID NO: 17092
  REGION 1..469: note = neuraminidase__InfluenzaA__ADF97837

SEQ ID NO: 18660 - protein, 469 aa, synthetic construct; identical to SEQ ID NO: 16738
  REGION 1..469: note = neuraminidase__InfluenzaA__ADG08120

SEQ ID NO: 18661 - protein, 449 aa, synthetic construct
  REGION 1..449: note = neuraminidase__InfluenzaA__ADG21408
MNPNQKIITIGSICMVIGIVSLMLQIGNMISIWVSHSIQTGNQCQDEPISNTKFLTEKAVASVTLAGNLSLCPVSGWAVYSKDNSIRIGSRGDVFVIREPFISCSHLECRTFFLTQGALLNDKHSNGTVKDRSPHRTLMSCPVGEAPSPYNSRFESVAWSASACHDGTSWLTIGISGPDNGAVAVLKYNGIITDTIKSWRNNIMRTQESECACVNGSCFTVMTDGPSSGQASYKIFKMEKGKVVKSVELDAPNYHYEECSCYPDAGEITCVCRDNWHGSNRPWVSFNQNLEYQIGYICSGVFGDNPRPNDGTGSCGPVFPNGAYGVKGFSFKYGNGVWIGRTKSTNSRSGFEMIWDPNGWTGTDSSFSVKQDIVAITDWSGYSGSFVQHPELTGLDCIRPCFWVELIRGRPKESTIWTSGSSISFCGVNGDTVSWSWPDGAELPFTIDK

SEQ ID NO: 18662 - protein, 449 aa, synthetic construct; identical to SEQ ID NO: 17023
  REGION 1..449: note = neuraminidase__InfluenzaA__ADG21409

SEQ ID NO: 18663 - protein, 449 aa, synthetic construct; identical to SEQ ID NO: 17023
  REGION 1..449: note = neuraminidase__InfluenzaA__ADG21415

SEQ ID NO: 18664 - protein, 449 aa, synthetic construct; identical to SEQ ID NO: 17023
  REGION 1..449: note = neuraminidase__InfluenzaA__ADG21417

SEQ ID NO: 18665 - protein, 449 aa, synthetic construct
  REGION 1..449: note = neuraminidase__InfluenzaA__ADG21419
MNPNQKIITIGSICMVIGIVSLMLQIGNMISIWVSHSIQTGNQCQDESISNTKFLTEKAVASVTLAGNSSLCPISGWAVYSKDNSIRIGSRGDVFVIREPFISCSHLECRTFFLTQGALLNDKHSNGTVKDRSPHRTLMSCPVGEAPSPYNSRFESVAWSASACHDGTSWLTIGISGPDNGAVAVLKYNGIITDTIKSWRNNIMRTQESECACVNGSCFTVMTDGPSSGQASYKIFKMEKGKVVKSVELDAPNYHYEECSCYPDAGEITCVCRDNWHGSNRPWVSFNQNLEYQIGYICSGVFGDNPRPNDGTGSCGPVFPNGAYGVKGFSFKYGNGVWIGRTKSTNSRSGFEMIWDPNGWTGTDSSFSVKQDIVAITDWSGYSGSFVQHPELTGLDCIRPCFWVELIRGRPKESTIWTSGSSISFCGVNGDTVSWSWPDGAELPFTIDK

SEQ ID NO: 18666 - protein, 449 aa, synthetic construct
  REGION 1..449: note = neuraminidase__InfluenzaA__ADG21423
MNPNQKIITIGSICMVIGIVSLMLQIGNMISIWVSHSIQTGNQCQDEPISNTKFLTEKAVASVTLAGNSSLCPISGWAVYSKDNSIRIGSRGDVFVIREPFISCSHLECRTFFLTQGALLNDKHSNGTVKDRSPHRTLMSCPVGEAPSPYNSRFESVAWSASACHDGTSWLTIGISGPDNGAVAVLKYNGIITDTIKSWRNNIMRTQESECACVNGSCFTVMTDGPSSGQASYKIFKMEKGKVVKSVELDAPNYHYEECSCYPDAGEITCVCRDSWHGSNRPWVSFNQNLEYQIGYICSGVFGDNPRPNDGTGSCGPVFPNGAYGVKGFSFKYGNGVWIGRTKSTNSRSGFEMIWDPNGWTGTDSSFSVKQDIVAITDWSGYSGSFVQHPELTGLDCIRPCFWVELIRGRPKESTIWTSGSSISFCGVNGDTVSWSWPDGAELPFTIDK

SEQ ID NO: 18667 - protein, 449 aa, synthetic construct
  REGION 1..449: note = neuraminidase__InfluenzaA__ADG21424
MNPNQKIITIGSICMVIGIASLMLQIGNMISIWVSHSIQTGNQCQDESISNTKFLTEKAVASVTLAGNSSLCPISGWAVYSKDNSIRIGSKGDVFVIREPFISCSHLECRTFFLTQGALLNDKHSNGTVKDRSPHRTLMSCPVGEAPSPYNSRFESVAWSASACHDGTSWLTIGISGPDNGAVAVLKYNGIITDTIKSWRNNIMRTQESECACVNGSCFTVMTDGPSSGQASYKIFKMEKGKVVKSVELDAPNYHYEECSCYPDAGEITCVCRDNWHGSNRPWVSFNQNLEYQIGYICSGVFGDNPRPNDGTGSCGPVFPNGAYGVKGFSFKYGNGVWIGRTKSTNSRSGFEMIWDPNGWTGTDSSFSVKQDIVAITDWSGYSGSFVQHPELTGLDCIRPCFWVELIRGRPKESTIWTSGSSISFCGVNGDTVSWSWPDGAELPFTIDK

SEQ ID NO: 18668 - protein, 449 aa, synthetic construct
  REGION 1..449: note = neuraminidase__InfluenzaA__ADG21426
MNPNQKIITIGSICMVIGIVSLMLQIGNMISIWVSHSIQTENQCQDEPISNTKFLTEKAVASVTLAGNSSLCPISGWAVYSKDNSIRIGSRGDVFVIREPFISCSHLECRTFFLTQGALLNDKHSNGTVKDRSPHRTLMSCPVGEAPSPYNSRFESVAWSASACHDGTSWLTIGISGPDNGAVAVLKYNGIITDTIKSWRNNIMRTQESECACVNGSCFTVMTDGPSSGQASYKIFKMEKGKVVKSVELDAPNYHYEECSCYPDAGEITCVCRDNWHGSNRPWVSFNQNLEYQIGYICSGVFGDNPRPNDGTGSCGPVFPNGAYGVKGFSFKYGNGVWIGRTKSTNSRSGFEMIWDPNGWTGTDSSFSVRQDIVAITDWSGYSGSFVQHPELTGLDCIRPCFWVELIRGRPKESTIWTSGSSISFCGVNGDTVSWSWPDGAELPFTIDK

SEQ ID NO: 18669 - protein, 449 aa, synthetic construct
  REGION 1..449: note = neuraminidase__InfluenzaA__ADG21428
MNPNQKIITIGSICMVIGIVSLMLQIGNMISIWVSHPIQTGNQCQDKPISNTKFLTEKAVASVTLAGNSSLCPISGWAVYSKDNSIRIGSRGDVFVIREPFISCSHLECRTFFLTQGALLNDKHSNGTVKDRSPHRTLMSCPVGEAPSPYNSRFESVAWSASACHDGTSWLTIGISGPDNGAVAVLKYNGIITDTIKSWRNSIMRTQESECACVNGSCFTVMTDGPSSGQASYKIFKMEKGKVVKSVELDAPNYHYEECSCYPDAGEITCVCRDNWHGSNRPWVSFNQNLEYQIGYICSGVFGDNPRPNDGTGSCGPVFPNGAYGVKGFSFKYGNGVWIGRTKSTNSRSGFEMIWDPNGWTGTDSSFSVKQDIVAITDWSGYSGSFVQHPELTGLDCIRPCFWVELIRGRPKESTIWTSGSSISFCGVNGDTVSWSWPDGAELPFTIDK

SEQ ID NO: 18670 - protein, 449 aa, synthetic construct; identical to SEQ ID NO: 17023
  REGION 1..449: note = neuraminidase__InfluenzaA__ADG21430

SEQ ID NO: 18671 - protein, 449 aa, synthetic construct
  REGION 1..449: note = neuraminidase__InfluenzaA__ADG21432
MNPNQKIITIGSICMVIGIVSLMLQIGNMISIWVSHSIQTGNQCQDEPISNTKFLTEKAVASVTLAGNSSLCPISGWAVYSKDNSIRIGSRGDVFVIREPFISCSHLECRTFFLTQGALLNDKHSNGTVKDRSPHRTLMSCPVGEAPSPYNSRFESVAWSASACHDGTSWLTIGISGPDNGAVAVLKYNGIITDTIKSWRNNIMRTQESECACVNGSCFTVMTDGPSSGQASYKIFKMEKGKVVKSVELDAPNYHYEECSCYPDAGEITCVCRDNWHGSNRPWVSFNQNLEYQIGYICSGVFGDNPRPNDGTGSCGPVFPNGAYGVKGFSFRYGNGVWIGRTKSTNSRSGFEMIWDPNGWTGTDSSFSVKQDIVAITDWSGYSGSFVQHPELTGLDCIRPCFWVELIRGRPKESTIWTSGSSISFCGVNGDTVSWSWPDGAELPFTIDK

SEQ ID NO: 18672 - protein, 449 aa, synthetic construct
  REGION 1..449: note = neuraminidase__InfluenzaA__ADG21438
MNPNQKIITIGSICMVIGIVSLMLQIGNMISIWISHSIQTGNQCQDEPISNTKFLTEKAVASVTLAGNSSLCPISGWAVYSKDNSIRIGSRGDVFVIREPFISCSHLECRTFFLTQGALLNDKHSNGTVKDRSPHRTLMSCPVGEAPSPYNSRFESVAWSASACHDGTSWLTIGISGPDNGAVAVLKYNGIITDTIKSWRNNIMRTQESECACVNGSCFTVMTDGPSSGQASYKIFKMEKGKVVKSVELDAPNYHYEECSCYPDAGEITCVCRDNWHGSNRPWVSFNQNLEYQIGYICSGVFGDNPRPNDGTGSCGPVFPNGAYGVKGFSFKYGSGVWIGRTKSTNSRSGFEMIWDPNGWTGTDSSFSVKQDIVAITDWSGYSGSFVQHPELTGLDCIRPCFWVELIRGRPKESTIWTSGSSISFCGVNGDTVSWSWPDGAELPFTIDK

SEQ ID NO: 18673 - protein, 449 aa, synthetic construct
  REGION 1..449: note = neuraminidase__InfluenzaA__ADG21440
MNPNQKIITIGSICMVIGIASLMLQIGNMISIWVSHSIQTGNQCQDESISNTKFLTEKAVASVTLAGNSSLCPISGWAVYSKDNSIRIGSRGDVFVIREPFISCSHLECRTFFLTQGALLNDKHSNGTVKDRSPHRTLMSCPVGEAPSPYNSRFESVAWSASACHDGTSWLTIGISGPDNGAVAVLKYNGIITDTIKSWRNNIMRTQESECACVNGSCFTVMTDGPSSGQASYKIFKMEKGKVVKSVELDAPNYHYEECSCYPDAGEITCVCRDNWHGSNRPWVSFNQNLEYQIGYICSGVFGDNPRPNDGTGSCGPVFPNGAYGVKGFSFKYGNGVWIGRTKSTNSRSGFEMIWDPNGWTGTDSSFSVKQDIVAITDWSGYSGSFVQHPELTGLDCIRPCFWVELIRGRPKESTIWTSGSSISFCGVNGDTVSWSWPDGAELPFTIDK

SEQ ID NO: 18674 - protein, 449 aa, synthetic construct; identical to SEQ ID NO: 17023
  REGION 1..449: note = neuraminidase__InfluenzaA__ADG21442

SEQ ID NO: 18675 - protein, 449 aa, synthetic construct
  REGION 1..449: note = neuraminidase__InfluenzaA__ADG21444
MNPNQKIITIGSICMVIGIVSLMLQIGNMISIWVSHSIQTGNQCQDESISNTKFLTEKAVTSVTLAGNSSLCPISGWAVYSKDNSIRIGSRGDVFVIREPFISCSHLECRTFFLTQGALLNDKHSNGTVKDRSPHRTLMSCPVGEAPSPYNSRFESVAWSASACHDGTSWLTIGISGPDNGAVAVLKYNGIITDTIKSWRNNIMRTQESECACVNGSCFTVMTDGPSSGQASYKIFKMEKGKVVKSVELDAPNYHYEECSCYPDAGEITCVCRDNWHGSNRPWISFNQNLEYQIGYICSGVFGDNPRPNDGTGSCGPVFPNGAYGVKGFSFKYGNGVWIGRTKSTNSRSGFEMIWDPNGWTGTDSSFSVKQDIVAITDWSGYSGSFVQHPELTGLDCIRPCFWVELIRGRPKESTIWTSGSSISFCGVNGDTVSWSWPDGAELPFTIDK

SEQ ID NO: 18676 - protein, 449 aa, synthetic construct; identical to SEQ ID NO: 17023
  REGION 1..449: note = neuraminidase__InfluenzaA__ADG21446

SEQ ID NO: 18677 - protein, 449 aa, synthetic construct
  REGION 1..449: note = neuraminidase__InfluenzaA__ADG21448
MNPNQKIITIGSICMVIGIVSLMLQIGNMISIWVSHSIQTGNQCQDEPISNTKFLTEKAVASVTLAGNSSLCPISGWAVYSKDNSIRIGSRGDVFVIREPFISCSHLECRTFFLTQGALLNDKHSNGTVKDRSPHRTLMSCPVGEAPSPYNSRFESVAWSASACHDGTSWLTIGISGPDNGAVAVLKYNGIITDTIKSWRNNIMRTQESECACVNGSCFTVMTDGPSSGQASYKIFKMEKGKVVKSVELDAPNYHYEECSCYPDAGEITCVCRDNWHGSNRPWISFNQNLEYQIGYICSGVFGDNPRPNDGTGSCGPVFPNGAYGVKGFSFKYGNGVWIGRTKSTNSRSGFEMIWDPNGWTGTDSSFSVKQDIVAITDWSGYSGSFVQHPELTGLDCIRPCFWVELIRGRPKESTIWTSGSSISFCGVNGDTVSWSWPDGAELPFTIDK

SEQ ID NO: 18678 - protein, 449 aa, synthetic construct; identical to SEQ ID NO: 18677
  REGION 1..449: note = neuraminidase__InfluenzaA__ADG21450

SEQ ID NO: 18679 - protein, 469 aa, synthetic construct; identical to SEQ ID NO: 16738
  REGION 1..469: note = neuraminidase__InfluenzaA__ADG27797

SEQ ID NO: 18680 - protein, 469 aa, synthetic construct
  REGION 1..469: note = neuraminidase__InfluenzaA__ADG27983
MNPNQKIITIGSVCMTIGMANLILQIGNIISIWISHSIQLGNQNQIETCNQSVITYENNTWVNQTYVNISNTNFAAGQSVVSVKLAGNSSLCPVSGWAIYSKDNSIRIGSKGDVFVIREPFISCSPLECRTFFLTQGALLNDKHSNGTIKDRSPYRTLMSCPIGEVPSPYNSRFESVAWSASACHDGINWLTIGISGPDNGAVAVLKYNGIITDTIKSWRNNILRTQESECACVNGSCFTVMTDGPSDGQASYKIFRIEKGKIVKSVEMNAPNHHYEECSCYPDSSEITCVCRDNWHGSNRPWVSFNQNLEYQIGYICSGIFGDNPRPNDKTGSCGPVSSNGANGVKGFSFKYGNGVWIGRTKSISSRNGFEMIWDPNGWTGTDNNFSIKQDIVGINEWSGYSGSFVQHPELTGLDCIRPCFWVELIRGRPKENTIWTSGSSISFCGVNSDTMGWSWPDGAELPFTIDK

SEQ ID NO: 18681 - protein, 469 aa, synthetic construct; identical to SEQ ID NO: 16738
  REGION 1..469: note = neuraminidase__InfluenzaA__ADG27989

SEQ ID NO: 18682 - protein, 469 aa, synthetic construct; identical to SEQ ID NO: 18680
  REGION 1..469: note = neuraminidase__InfluenzaA__ADG27998

SEQ ID NO: 18683 - protein, 469 aa, synthetic construct; identical to SEQ ID NO: 17092
  REGION 1..469: note = neuraminidase__InfluenzaA__ADG28013

SEQ ID NO: 18684 - protein, 469 aa, synthetic construct; identical to SEQ ID NO: 16738
  REGION 1..469: note = neuraminidase__InfluenzaA__ADG42086

SEQ ID NO: 18685 - protein, 469 aa, synthetic construct; identical to SEQ ID NO: 16738
  REGION 1..469: note = neuraminidase__InfluenzaA__ADG42096

SEQ ID NO: 18686 - protein, 469 aa, synthetic construct; identical to SEQ ID NO: 18315
  REGION 1..469: note = neuraminidase__InfluenzaA__ADG42106

SEQ ID NO: 18687 - protein, 469 aa, synthetic construct; identical to SEQ ID NO: 16738
  REGION 1..469: note = neuraminidase__InfluenzaA__ADG42116

SEQ ID NO: 18688 - protein, 469 aa, synthetic construct; identical to SEQ ID NO: 16738
  REGION 1..469: note = neuraminidase__InfluenzaA__ADG42126

SEQ ID NO: 18689 - protein, 469 aa, synthetic construct; identical to SEQ ID NO: 16738
  REGION 1..469: note = neuraminidase__InfluenzaA__ADG42136

SEQ ID NO: 18690 - protein, 469 aa, synthetic construct; identical to SEQ ID NO: 17321
  REGION 1..469: note = neuraminidase__InfluenzaA__ADG42146

SEQ ID NO: 18691 - protein, 469 aa, synthetic construct; identical to SEQ ID NO: 16738
  REGION 1..469: note = neuraminidase__InfluenzaA__ADG42156

SEQ ID NO: 18692 - protein, 469 aa, synthetic construct; identical to SEQ ID NO: 16738
  REGION 1..469: note = neuraminidase__InfluenzaA__ADG42166

SEQ ID NO: 18693 - protein, 469 aa, synthetic construct; identical to SEQ ID NO: 16738
  REGION 1..469: note = neuraminidase__InfluenzaA__ADG42186

SEQ ID NO: 18694 - protein, 469 aa, synthetic construct; identical to SEQ ID NO: 18629
  REGION 1..469: note = neuraminidase__InfluenzaA__ADG42196

SEQ ID NO: 18695 - protein, 469 aa, synthetic construct
  REGION 1..469: note = neuraminidase__InfluenzaA__ADG42206
MNPNQKIITIGSVCMTIGMANLILQIGNIISIWISHSIQLGNQNQIETCNQSVITYENNTWVNQTYVNISNTNFAAGQSVVSVKLAGNSSLCPVSGWAIYSKDNSIRIGSKGDVFVIREPFISCSPLECRTFFLTQGALLNDKHSNGTIKDRSPYRTLMSCPIGEVPSPYNSRFESVAWSASACHDGINWLTIGISGPDNGAVAVLKYNGIITDTIKSWRNNILRTQESECACVNGSCFTVMTDGPSDGQASYKIFRIEKGKIVKSVEMNAPNYHYEECSCYPDSSKITCVCRDNWHGSNRPWVSFNQNLEYQIGYICSGIFGDNPRPNDKTGSCGPVSSNGANGVKGFSFKYGNGVWIGRTKSISSRNGFEMIWDPNGWTGTDNNFSIKQDIVGINEWSGYSGSFVQHPELTGLDCIRPCFWVELIRGRPKENTIWTSGSSISFCGVNSDTVGWSWPDGAELPFTIDK

SEQ ID NO: 18696 - protein, 469 aa, synthetic construct; identical to SEQ ID NO: 16738
  REGION 1..469: note = neuraminidase__InfluenzaA__ADG42216

SEQ ID NO: 18697 - protein, 469 aa, synthetic construct; identical to SEQ ID NO: 18089
  REGION 1..469: note = neuraminidase__InfluenzaA__ADG42226

SEQ ID NO: 18698 - protein, 469 aa, synthetic construct; identical to SEQ ID NO: 16738
  REGION 1..469: note = neuraminidase__InfluenzaA__ADG42236

SEQ ID NO: 18699 - protein, 469 aa, synthetic construct; identical to SEQ ID NO: 16738
  REGION 1..469: note = neuraminidase__InfluenzaA__ADG42246

SEQ ID NO: 18700 - protein, 469 aa, synthetic construct; identical to SEQ ID NO: 16738
  REGION 1..469: note = neuraminidase__InfluenzaA__ADG42256

SEQ ID NO: 18701 - protein, 469 aa, synthetic construct; identical to SEQ ID NO: 16738
  REGION 1..469: note = neuraminidase__InfluenzaA__ADG42276

SEQ ID NO: 18702 - protein, 469 aa, synthetic construct
  REGION 1..469: note = neuraminidase__InfluenzaA__ADG42296
MNPNQKIITIGSVCMTIGMANLILQIGNIISIWISHSIQLGNQNQIETCNQSVITYENNTWVNQTYVNISNTNFAAGQSVVSVKLAGNSSLCPVSGWAIYSKDNSIRIGSKGDVFVIREPFISCSPLECRTFFLTQGALLNDKHSNGTIKDRSPYRTLMSCPIGEVPSPYNSRFESVAWSASACHDGINWLTIGISGPDNGAVAVLKYNGIITDTIKSWRNNILRAQESECACVNGSCFTVMTDGPSDGQASYKIFRIEKGKIVKSVEMNAPNYHYEECSCYPDSSEITCVCRDNWHGSNRPWVSFNQNLEYQIGYICSGIFGDNPRPNDKTGSCGPVSSNGANGVKGFSFKYGNGVWIGRTKSISSRNGFEMIWDPNGWTGTDNNFSIKQDIVGINEWSGYSGSFVQHPELTGLDCIRPCFWVELIRGRPKENTIWTSGSSISFCGVNSDTVGWSWPDGAELPFTIDK

SEQ ID NO: 18703 - protein, 469 aa, synthetic construct; identical to SEQ ID NO: 16738
  REGION 1..469: note = neuraminidase__InfluenzaA__ADG42306

SEQ ID NO: 18704 - protein, 469 aa, synthetic construct; identical to SEQ ID NO: 16738
  REGION 1..469: note = neuraminidase__InfluenzaA__ADG42316

SEQ ID NO: 18705 - protein, 469 aa, synthetic construct; identical to SEQ ID NO: 16738
  REGION 1..469: note = neuraminidase__InfluenzaA__ADG42326

SEQ ID NO: 18706 - protein, 469 aa, synthetic construct
  REGION 1..469: note = neuraminidase__InfluenzaA__ADG42336
MNPNQKIITIGSVCMTIGMANLILQIGNIISIWISHSIQLGNQNQIETCNQSVITYENNTWVNQTYVNISNTNFAAGQSVVSMKLAGNSSLCPVSGWAIYSKDNSIRIGSKGDVFVIREPFISCSPLECRTFFLTQGALLNDKHSNGTIKDRSPYRTLMSCPIGEVPSPYNSRFESVAWSASACHDGINWLTIGISGPDNGAVAVLKYNGIITDTIKSWRNNILRTQESECACVNGSCFTVMTDGPSDGQASYKIFRIEKGKIVKSVEMNAPNYHYEECSCYPDSSEITCVCRDNWHGSNRPWVSFNQNLEYQIGYICSGIFGDNPRPNDKTGSCGPVSSNGANGVKGFSFKYGNGVWIGRTKSISSRNGFEMIWDPNGWTGTDNKFSIKQDIVGINEWSGYSGSFVQHPELTGLDCIRPCFWVELIRGRPKENTIWTSGSSISFCGVNSDTVGWSWPDGAELPFTIDK

SEQ ID NO: 18707 - protein, 469 aa, synthetic construct; identical to SEQ ID NO: 18200
  REGION 1..469: note = neuraminidase__InfluenzaA__ADG42346

SEQ ID NO: 18708 - protein, 469 aa, synthetic construct; identical to SEQ ID NO: 17915
  REGION 1..469: note = neuraminidase__InfluenzaA__ADG42356

SEQ ID NO: 18709 - protein, 469 aa, synthetic construct
  REGION 1..469: note = neuraminidase__InfluenzaA__ADG42366
MNPNQKIITIGSVCMTIGMANLILQIGNIISIWISHSIQLGNQNQIETCNQSVITYENNTWVNQTYVNISNTNFAAGQSVVSVKLAGNSSLCPVSGWAIYSKDNSIRIGSKGDVFVIREPFISCSPLECRTFFLTQGALLNDKHSNGTIKDRSPYRTLMSCPIGEVPSPYNSRFESVAWSASACHDGINWLTIGISGPDNGAVAVLKYNGIITDTIKSWRNNILRTQESECACVNGSCFTVMTDGPSDGQASYKIFRIEKGKIVKSVEMNAPNYHYEECSCYPDSSEITCVCRDNWHGSNRPWISFNQNLEYQIGYICSGIFGDNPRPNDKTGSCGPVSSNGANGVKGFSFKYGNGVWIGRTKSISSRNGFEMIWDPNGWTGTDNKFSIKQDIVGINEWSGYSGSFVQHPELTGLDCIRPCFWVELIRGRPKENTIWTSGSSISFCGVNSDTVGWSWPDGAELPFTIDK

SEQ ID NO: 18710 - protein, 469 aa, synthetic construct; identical to SEQ ID NO: 16738
  REGION 1..469: note = neuraminidase__InfluenzaA__ADG42376

SEQ ID NO: 18711 - protein, 469 aa, synthetic construct
  REGION 1..469: note = neuraminidase__InfluenzaA__ADG42386
MNPNQKIITIGSVCMTIGMANLILQIGNIISIWISHSIQLGNQNQIETCNQSVITYENNTWVNQTYVNISNTNFAAGQSVVSVKFAGNSSLCPVSGWAIYSKDNSIRIGSKGDVFVIREPFISCSPLECRTFFLTQGALLNDKHSNGTIKDRSPYRTLMSCPIGEVPSPYNSRFESVAWSASACHDGINWLTIGISGPDNGAVAVLKYNGIITDTIKSWRNNILRTQESECACVNGSCFTVMTDGPNDGQASYKIFRIEKGKIVKSVEMNAPNYHYEECSCYPDSSEITCVCRDNWHGSNRPWVSFNQNLEYQIGYICSGIFGDNPRPNDKTGSCGPVSSNGANGVKGFSFKYGNGVWIGRTKSISSRSGFEMIWDPNGWTGTDNKFSIKQDIVGINEWSGYSGSFVQHPELTGLDCIRPCFWVELIRGRPKENTIWTSGSSISFCGVNSDTVGWSWPDGAELPFTIDK

SEQ ID NO: 18712 - protein, 469 aa, synthetic construct; identical to SEQ ID NO: 18695
  REGION 1..469: note = neuraminidase__InfluenzaA__ADG42396

SEQ ID NO: 18713 - protein, 469 aa, synthetic construct
  REGION 1..469: note = neuraminidase__InfluenzaA__ADG42406
MNPNQKIITIGSVCMTIGMANLILQIGNILSTWISHSIQLGNQNQIETCNQSVITYENNTWVNQTYVNISNTNFAAGQSVVSVKLAGNSSLCPVSGWAIYSKDNSIRIGSKGDVFVIREPFISCSPLECRTFFLTQGALLNDKHSNGTIKDRSPYRTLMSCPIGEVPSPYNSRFESVAWSASACHDGINWLTIGISGPDNGAVAVLKYNGIITDTIKSWRNNILRTQESECACVNGSCFTVMTDGPSDGQASYKIFRIEKGKIVKSVEMNAPNYHYEECSCYPDSSEITCVCRDNWHGSNRPWVSFNQNLEYQIGYICSGIFGDNPRPNDKKGSCGPVSSNGANGVKGFSFKYGNGVWIGRTKSISSRNGFEMIWDPNGWTGTDNNFSIKQDIVGINEWSGYSGSFVQHPELTGLDCIRPCFWVELIRGRPKENTIWTSGSSISFCGVNSDTVGWSWPDGAELPFTIDK

SEQ ID NO: 18714 - protein, 469 aa, synthetic construct; identical to SEQ ID NO: 17915
  REGION 1..469: note = neuraminidase__InfluenzaA__ADG42426

SEQ ID NO: 18715 - protein, 469 aa, synthetic construct; identical to SEQ ID NO: 16738
  REGION 1..469: note = neuraminidase__InfluenzaA__ADG42436

SEQ ID NO: 18716 - protein, 469 aa, synthetic construct
  REGION 1..469: note = neuraminidase__InfluenzaA__ADG42446
MNPNQKIITIGSVCMTIGMANLILQIGNIISIWISHSIQLGNQNQIETCNQSVITYENNTWVNQTYVNISNTNFAAGQSVVSAKLAGNSSLCPVSGWAIYSKDNSIRIGSKGDVFVIREPFISCSPLECRTFFLTQGALLNDKHSNGTIKDRSPYRTLMSCPIGEVPSPYNSRFESVAWSASACHDGINWLTIGISGPDNGAVAVLKYNGIITDTIKSWRNNILRTQESECACVNGSCFTVMTDGPSDGQASYKIFRIEKGKIVKSVEMNAPNYHYEECSCYPDSSEITCVCRDNWHGSNRPWVSFNQNLEYQIGYICSGIFGDNPRPNDKTGSCGPVSSNGANGVKGFSFKYGNGVWIGRTKSISSRNGFEMIWDPNGWTGTDNNFSIKQDIVGINEWSGYSGSFVQHPELTGLDCIRPCFWVELIRGRPKENTIWTSGSSISFCGVNSDTVGWSWPDGAELPFTIDK

SEQ ID NO: 18717 - protein, 469 aa, synthetic construct
  REGION 1..469: note = neuraminidase__InfluenzaA__ADG42456
MNPNQKIITIGSVCMTIGMANLILQIGNIISIWISHSIQLGNQNQIETCNQSVITYENNTWVNQTYVNISNTNFAAGQSVVSVKLAGNSSLCPVSGWAIYSKDNSIRIGSKGDVFVIREPFISCSPLECRTFFLTQGALLNDKHSNGTIKDRSPHRTLMSCPIGEVPSPYNSRFESVAWSASACHDGINWLTIGISGPDNGAVAVLKYNGIITDTIKSWRNNILRTQESECACVNGSCFTVMTDGPSDGQASYKIFRIEKGKIVKSVEMNAPNYHYEECSCYPDSSEITCVCRDNWHGSNRPWVSFNQNLEYQIGYICSGIFGDNPRPNDKTGSCGPVSSNGANGVKGFSFKYGNGVWIGRTKSISSRNGFEMIWDPNGWTGTDNNFSIKQDIVGINEWSGYSGSFVQHPELTGLDCIRPCFWVELIRGRPKENTIWTSGSSISFCGVNSDTVGWSWPDGAELPFTIDK

SEQ ID NO: 18718 - protein, 469 aa, synthetic construct; identical to SEQ ID NO: 16738
  REGION 1..469: note = neuraminidase__InfluenzaA__ADG42466

SEQ ID NO: 18719 - protein, 469 aa, synthetic construct
  REGION 1..469: note = neuraminidase__InfluenzaA__ADG42476
MNPNQKIITIGSVCMTIGMANLILQIGNIISIWISHSIQLGNQNQTETCNQSVITYENNTWVNQTYVNISNTNFAAGQSVVSVKLAGNSSLCPVSGWAIYSKDNSIRIGSKGDVFVIREPFISCSPLECRTFFLTQGALLNDKHSNGTIKDRSPYRTLMSCPIGEVPSPYNSRFESVAWSASACHDGINWLTIGISGPDNGAVAVLKYNGIITDTIKSWRNNILRTQESECACVNGSCFTVMTDGPSDGQASYKIFRIEKGKIVKSVEMNAPNYHYEECSCYPDSSEITCVCRDNWHGSNRPWVSFNQNLEYQIGYICSGIFGDNPRPNDKTGSCGPVSSNGANGVKGFSFKYGNGVWIGRTKSISSRNGFEMIWDPNGWTGTDNNFSIKQDIVGINEWSGYSGSFVQHPELTGLDCIRPCFWVELIRGRPKENTIWTSGSSISFCGVNSDTVGWSWPDGAELPFTIDK

SEQ ID NO: 18720 - protein, 469 aa, synthetic construct; identical to SEQ ID NO: 18640
  REGION 1..469: note = neuraminidase__InfluenzaA__ADG42486

SEQ ID NO: 18721 - protein, 469 aa, synthetic construct; identical to SEQ ID NO: 16738
  REGION 1..469: note = neuraminidase__InfluenzaA__ADG42496

SEQ ID NO: 18722 - protein, 469 aa, synthetic construct
  REGION 1..469: note = neuraminidase__InfluenzaA__ADG42506
MNPNQKIIIIGSVCMTIGMANLILQIGNIISIWISHSIQLGNQNQIETCNQSIITYENNTWVNQTYVNISNTNFAAGQSVVSVKLAGNSSLCPVSGWAIYSKDNSIRIGSKGDVFVIREPFISCSPLECRTFFLTQGALLNDKHSNGTIKDRSPYRTLMSCPIGEVPSPYNSRFESVAWSASACHDGINWLTIGISGPDNGAVAVLKYNGIITDTIKSWRNNILRTQESECACVNGSCFTVMTDGPSDGQASYKIFRIEKGKVVKSVEMNAPNYHYEECSCYPDSSEITCVCRDNWHGSNRPWVSFNQNLEYQIGYICSGIFGDNPRPNDKTGSCGPVSSNGANGVKGFSFKYGNGVWIGRTKSISSRNGFEMIWDPNGWTGTDNNFSIKQDIVGINEWSGYSGSFVQHPELTGLDCIRPCFWVELIRGRPKENTIWTSGSSISFCGVNSDTVGWSWPDGAELPFTIDK

SEQ ID NO: 18723 - protein, 469 aa, synthetic construct; identical to SEQ ID NO: 17913
  REGION 1..469: note = neuraminidase__InfluenzaA__ADG42516

SEQ ID NO: 18724 - protein, 469 aa, synthetic construct
  REGION 1..469: note = neuraminidase__InfluenzaA__ADG42526
MNPNQKIITIGSVCMTIGMANLILQIGNIISIWISHSIQLGNQNQIETCNQSVITYENNTWVNQTYVNISNTNFAAGQSVVSVKLAGNSSLCPVSGWAIYSKDNSIRIGSKGDVFVIREPFISCSPLECRTFFLTQGALLNDKHSNGTIKDRSPYRTLMSCPIGEVPSPYNSRFESVAWSASACHDGINWLTIGISGPDNGAVAVLKYNGIITDTIKSWRNNILRTQESECACLNGSCFTVMTDGPSDGQASYKIFRIEKGKIVKSVEMNAPNYHYEECSCYPDSSEITCVCRDNWHGSNRPWVSFNQNLEYQIGYICSGIFGDNPRPNDKTGSCGPVSSNGANGVKGFSFKYGNGVWIGRTKSISSRNGFEMIWDPNGWTGTDNNFSIKQDIVGINEWSGYSGSFVQHPELTGLDCIRPCFWVELIRGRPKENTIWTSGSSISFCGVNSDTVGWSWPDGAELPFTIDK

SEQ ID NO: 18725 - protein, 469 aa, synthetic construct
  REGION 1..469: note = neuraminidase__InfluenzaA__ADG42536
MNPNQKIITIGSVCMTIGMANLILQIGNIISIWISHSIQLGNQNQIETCNQSVITYENNTWVNQTYVNISNTNFAAGQSVVSVKLAGNSSLCPVSGWAIYSKDNSIRIGSKGDVFVIREPFISCSPLECRTFFLTQGALLNDKHSNGTIKDRSPYRTLMSCPIGEVPSPYNSRFESVAWSASACHDGINWLTIGISGPDNGAVAVLKYNGIITDTIKSWRNNILRTQESECACVNGSCFTVMTDGPSDGQASYKIFRIEKGKIVKSVEMNAPNYHYEECSCYPDSSEITCVCRDNWHGSNRPWVSFNQNLEYQIGYICSGIFGDNPRPNDKTGSCGPVSSNGANGVKGFSFKYGNGVWIGRTKSISSRNGFEMIWDPNGWTGTDNNFSIKQDIVGINEWSGYSGSFVQHPELTGLDCIRPCFWVELIRGRPKENTIWTSGSSISFCGVTSDTVGWSWPDGAELPFTIDK

SEQ ID NO: 18726 - protein, 469 aa, synthetic construct; identical to SEQ ID NO: 16738
  REGION 1..469: note = neuraminidase__InfluenzaA__ADG42546

SEQ ID NO: 18727 - protein, 469 aa, synthetic construct; identical to SEQ ID NO: 16738
  REGION 1..469: note = neuraminidase__InfluenzaA__ADG42556

SEQ ID NO: 18728 - protein, 469 aa, synthetic construct
  REGION 1..469: note = neuraminidase__InfluenzaA__ADG42566
MNPNQKIITIGSVCMTIGMANLILQIGNIISIWISHSIQLGNQNQIETCNQSVITYENNTWVNQTYVNISNTNFAAGHSVVSVKLAGNSSLCPVSGWAIYSKDNSIRIGSKGDVFVIREPFISCSPLECRTFFLTQGALLNDKHSNGTIKDRSPYRTLMSCPIGEVPSPYNSRFESVAWSASACHDGINWLTIGISGPDNGAVAVLKYNGIITDTIKSWRNNILRTQESECACVNGSCFTVMTDGPSDGQASYKIFRIEKGKIVKSVEMNAPNYHYEECSCYPDSSEITCVCRDNWHGSNRPWVSFNQNLEYQIGYICSGIFGDNPRPNDKTGSCGPVSSNGANGVKGFSFKYGNGVWIGRTKSISSRNGFEMIWDPNGWTGTDNNFSIKQDIVGINEWSGYSGSFVQHPELTGLDCIRPCFWVELIRGRPKENTIWTSGSSISFCGVNSDTVGWSWPDGAELPFTIDK

SEQ ID NO: 18729 - protein, 469 aa, synthetic construct
  REGION 1..469: note = neuraminidase__InfluenzaA__ADG42576
MNPNQKIITIGSVCMTIGMANLILQIGNIISIWISHSIQLGNQNQIETCNQSVITYENNTWVNQTYVNISNTNFAAGQSVVSVKLAGNSSLCPVSGWAIYSKDNSIRIGSKGDVFVIREPFISCSPLECRTFFLTQGALLNDKHSNGTIKDRSPYRTLMSCPIGEVPSPYNSRFESVAWSASACHDGINWLTIGISGPYNGAVAVLKYNGIITDTIKSWRNNILRTQESECACVNGSCFTVMTDGPSDGQASYKIFKIEKGKIVKSVEMNAPNYHYEECSCYPDSSEITCVCRDNWHGSNRPWVSFNQNLEYQIGYICSGIFGDNPRPNDKTGSCGPVSSNGANGVKGFSFKYGNGVWIGRTKSISSRNGFEMIWDPNGWTGTDNNFSIKQDIVGINEWSGYSGSFVQHPELTGLDCIRPCFWVELIRGRPKENTIWTSGSSISFCGVNSDTVGWSWPDGAELPFTIDK

SEQ ID NO: 18730 - protein, 469 aa, synthetic construct; identical to SEQ ID NO: 16738
  REGION 1..469: note = neuraminidase__InfluenzaA__ADG42586

SEQ ID NO: 18731 - protein, 469 aa, synthetic construct
  REGION 1..469: note = neuraminidase__InfluenzaA__ADG42606
MNPNQKIITIGSVCMTIGMANLILQIGNIISIWISHSIQLGNQNQIETCNQSVITYENNTWVNQTYVNISNTNFAAGQSVVSVKLAGNSSLCPVSGWAIYSKDNSIRIGSKGDVFVIREPFISCSPLECRTFFLTQGALLNDKHSNGTIKDRSPYRTLMSCPIGEVPSPYNSRFESVAWSASACHDGINWLTIGISGPDNGAVAVLKYNGIITDTIKSWRNNILRTQESECACVNGSCFTVMTDGPSDGQASYKIFRIEKGKIVKSVEMNAPNYHYEECSCYPDSSEITCVCRDNWHGSNRPWVSFNQNLEYQIGYICSGIFGDNPRPNDKTGSCGPVSSNGANGVKGFSFKYGNGVWIGRTKSISSRNGFEMIWDPNGWTGTDNNFSIKQDIVGINEWSGYSGSFVQHPELTGLDCIRPCFWVELIRGRPKENTIWTSGSSISFCGVNSDTVGWSWPDGAELPFPIDK

SEQ ID NO: 18732 - protein, 469 aa, synthetic construct
  REGION 1..469: note = neuraminidase__InfluenzaA__ADG42616
MNSNQKIITIGSVCMTIGMANLILQIGNIISIWISHSIQLGNQNQIETCNQSVITYENNTWVNQTYVNISNTNFAAGQSVVSVKLAGNSSLCPVSGWAIYSKDNSIRIGSKGDVFVIREPFISCSPLECRTFFLTQGALLNDKHSNGTIKDRSPYRTLMSCPIGEVPSPYNSRFESVAWSASACHDGINWLTIGISGPDNGAVAVLKYNGIITDTIKSWRNNILRTQESECACVNGSCFTVMTDGPSDGQASYKIFRIEKGKIVKSVEMNAPNYHYEECSCYPDSSEITCVCRDNWHGSNRPWVSFNQNLEYQIGYICSGIFGDNPRPNDKTGSCGPVSSNGANGVKGFSFKYGNGVWIGRTKSISSRNGFEMIWDPNGWTGTDNNFSIKQDIVGINEWSGYSGSFVQHPELTGLDCIRPCFWVELIRGRPKENTIWTSGSSISFCGVNSDTVGWSWPDGAELPFTIDK

SEQ ID NO: 18733 - protein, 469 aa, synthetic construct; identical to SEQ ID NO: 17321
  REGION 1..469: note = neuraminidase__InfluenzaA__ADG42626

SEQ ID NO: 18734 - protein, 469 aa, synthetic construct; identical to SEQ ID NO: 18719
  REGION 1..469: note = neuraminidase__InfluenzaA__ADG42636

SEQ ID NO: 18735 - protein, 469 aa, synthetic construct
  REGION 1..469: note = neuraminidase__InfluenzaA__ADG42646
MNPNQRIITIGSVCMTIGMANLILQIGNIISIWISHSIQLGNQNQIETCNQSVITYENNTWVNQTYVNISNTNFAAGQSVVSVKLAGNSSLCPVSGWAIYSKDNSIRIGSKGDVFVIREPFISCSPLECRTFFLTQGALLNDKHSNGTIKDRSPYRTLMSCPIGEVPSPYNSRFESVAWSASACHDGINWLTIGISGPDNGAVAVLKYNGIITDTIKSWRNNILRTQESECACVNGSCFTVMTDGPSDGQASYKIFRIEKGKIVKSVEMNAPNYHYEECSCYPDSSEITCVCRDNWHGSNRPWVSFNQNLEYQIGYICSGIFGDNPRPNDKTGSCGPVSSNGANGVKGFSFKYGNGVWIGRTKSISSRNGFEMIWDPNGWTGTDNNFSIKQDIVGINEWSGYSGSFVQHPELTGLDCIRPCFWVELIRGRPKENTIWTSGSSISFCGVNSDTVGWSWPDGAELPFTIDK

SEQ ID NO: 18736 - protein, 469 aa, synthetic construct; identical to SEQ ID NO: 16738
  REGION 1..469: note = neuraminidase__InfluenzaA__ADG42656

SEQ ID NO: 18737 - protein, 469 aa, synthetic construct; identical to SEQ ID NO: 18651
  REGION 1..469: note = neuraminidase__InfluenzaA__ADG42666

SEQ ID NO: 18738 - protein, 469 aa, synthetic construct
  REGION 1..469: note = neuraminidase__InfluenzaA__ADG42676
MNPNQKIITIGSVCMTIGMANLILQIGNIISIWISHSIQLGNQNQIEICNQSVITYENNTWVNQTYVNISNTNFAAGQSVVSVKLAGNSSLCPVSGWAIYSKDNSIRIGSKGDVFVIREPFISCSPLECRTFFLTQGALLNDKHSNGTIKDRSPYRTLMSCPIGEVPSPYNSRFESVAWSASACHDGINWLTIGISGPDNGAVAVLKYNGIITDTIKSWRNNILRTQESECACVNGSCFTVMTDGPSDGQASYKIFRIEKGKIVKSVEMNAPNYHYEECSCYPDSSEITCVCRDNWHGSNRPWVSFNQNLEYQIGYICSGIFGDNPRPNDKTGSCGPVSSNGANGVKGFSFKYGNGVWIGRTKSISSRNGFEMIWDPNGWTGTDNNFSIKQDIVGINEWSGYSGSFVQHPELTGLDCIRPCFWVELIRGRPKENTIWTSGSSISFCGVNSDTVGWSWPDGAELPFTIDK

SEQ ID NO: 18739 - protein, 469 aa, synthetic construct; identical to SEQ ID NO: 16738
  REGION 1..469: note = neuraminidase__InfluenzaA__ADG42686

SEQ ID NO: 18740 - protein, 469 aa, synthetic construct; identical to SEQ ID NO: 18315
  REGION 1..469: note = neuraminidase__InfluenzaA__ADG42696

SEQ ID NO: 18741 - protein, 469 aa, synthetic construct; identical to SEQ ID NO: 18519
  REGION 1..469: note = neuraminidase__InfluenzaA__ADG42706

SEQ ID NO: 18742 - protein, 469 aa, synthetic construct; identical to SEQ ID NO: 16738
  REGION 1..469: note = neuraminidase__InfluenzaA__ADG42716

SEQ ID NO: 18743 - protein, 469 aa, synthetic construct; identical to SEQ ID NO: 18026
  REGION 1..469: note = neuraminidase__InfluenzaA__ADG42726

SEQ ID NO: 18744 - protein, 469 aa, synthetic construct; identical to SEQ ID NO: 17321
  REGION 1..469: note = neuraminidase__InfluenzaA__ADG42746

SEQ ID NO: 18745 - protein, 469 aa, synthetic construct; identical to SEQ ID NO: 18251
  REGION 1..469: note = neuraminidase__InfluenzaA__ADG42756

SEQ ID NO: 18746 - protein, 469 aa, synthetic construct; identical to SEQ ID NO: 18026
  REGION 1..469: note = neuraminidase__InfluenzaA__ADG42766

SEQ ID NO: 18747 - protein, 469 aa, synthetic construct; identical to SEQ ID NO: 18026
  REGION 1..469: note = neuraminidase__InfluenzaA__ADG42776

SEQ ID NO: 18748 - protein, 469 aa, synthetic construct; identical to SEQ ID NO: 18026
  REGION 1..469: note = neuraminidase__InfluenzaA__ADG42796

SEQ ID NO: 18749 - protein, 469 aa, synthetic construct
  REGION 1..469: note = neuraminidase__InfluenzaA__ADG42806
MNPNQKIITIGSVCMTIGMANLILQIGNIISIWISHSIQLGNQNQIETCNQSVITYENNTWVNQTYVNISNTNFAAGQSVVSVKLAGNSSLCPVSGWAIYSKDNSIRIGSKGDVFVIREPFISCSPLECRTFFLTQGALLNDKHSNGTIKDRSPYRTLMSCPIGEVPSPYNSRFESVAWSASACHDGINWLTIGISGPDNGAVAVLKYNGIITDTIKSWRNNILRTQESECACVNGSCFTVMTDGPSDGQASYKIFRIEKGKIVKSVEMNAPNYHYEECSCYPDSSEITCVCRDNWHGSNRPWVSFNQNLEYQIGYICSGIFGDNPRPNDKTGSCGPVSSNGANGVKGFSFKYGNGVWIGRTKSISSRNGFEMIWDPNGWTGTDNNFSIKQDIVGINEWSGYSGSFVQHPELTGLDCIRPCFWVELIRGRPKENTIWTSGSSISFCGVNSDTVSWSWPDGAELPFTIDK

SEQ ID NO: 18750 - protein, 469 aa, synthetic construct; identical to SEQ ID NO: 16738
  REGION 1..469: note = neuraminidase__InfluenzaA__ADG42816

SEQ ID NO: 18751 - protein, 469 aa, synthetic construct; identical to SEQ ID NO: 16738
  REGION 1..469: note = neuraminidase__InfluenzaA__ADG42826

SEQ ID NO: 18752 - protein, 469 aa, synthetic construct; identical to SEQ ID NO: 16738
  REGION 1..469: note = neuraminidase__InfluenzaA__ADG42836

SEQ ID NO: 18753 - protein, 469 aa, synthetic construct; identical to SEQ ID NO: 18354
  REGION 1..469: note = neuraminidase__InfluenzaA__ADG42846

SEQ ID NO: 18754 - protein, 469 aa, synthetic construct; identical to SEQ ID NO: 16738
  REGION 1..469: note = neuraminidase__InfluenzaA__ADG42856

SEQ ID NO: 18755 - protein, 469 aa, synthetic construct; identical to SEQ ID NO: 18350
  REGION 1..469: note = neuraminidase__InfluenzaA__ADG42866

SEQ ID NO: 18756 - protein, 469 aa, synthetic construct; identical to SEQ ID NO: 16738
  REGION 1..469: note = neuraminidase__InfluenzaA__ADG42876

SEQ ID NO: 18757 - protein, 469 aa, synthetic construct; identical to SEQ ID NO: 18387
  REGION 1..469: note = neuraminidase__InfluenzaA__ADG42886

SEQ ID NO: 18758 - protein, 469 aa, synthetic construct; identical to SEQ ID NO: 18330
  REGION 1..469: note = neuraminidase__InfluenzaA__ADG42896

SEQ ID NO: 18759 - protein, 469 aa, synthetic construct; identical to SEQ ID NO: 18330
  REGION 1..469: note = neuraminidase__InfluenzaA__ADG42906

SEQ ID NO: 18760 - protein, 469 aa, synthetic construct; identical to SEQ ID NO: 16738
  REGION 1..469: note = neuraminidase__InfluenzaA__ADG42916

SEQ ID NO: 18761 - protein, 469 aa, synthetic construct; identical to SEQ ID NO: 16738
  REGION 1..469: note = neuraminidase__InfluenzaA__ADG42926

SEQ ID NO: 18762 - protein, 469 aa, synthetic construct; identical to SEQ ID NO: 16738
  REGION 1..469: note = neuraminidase__InfluenzaA__ADG58909

SEQ ID NO: 18763 - protein, 469 aa, synthetic construct; identical to SEQ ID NO: 16738
  REGION 1..469: note = neuraminidase__InfluenzaA__ADG58910

SEQ ID NO: 18764 - protein, 469 aa, synthetic construct
  REGION 1..469: note = neuraminidase__InfluenzaA__ADG58913
MNPNQKIITIGSVCMTIGMANLILQIGNIISIWISHSIQLGNQNQIETCNQSVITYENNTWVNQTYVNISNTNFAAGQSVVSVKLAGNSSLCPVSGWAIYSKDNSIRIGSKGDVFVIREPFISCSPLECRTFFLTQGALLNDKHSNGTIKDRSPYRTLMSCPIGEVPSPYNSRFESVAWSASACHDGINWLTIGISGPDNGAVAVLKYNGIITDTIKSWRNNILRTQESECACVNGSCFTVMTDGPSDGQASYKIFRIEKGKIVKSVEMNAPNYHYEECSCYPDSSEITCVCRDNWHGSNRPWVTFNQNLEYQIGYICSGIFGDNPRPNDKTGSCGPVSSNGANGVKGFSFKYGNGVWIGRTKSISSRNGFEMIWDPNGWTGTDNNFSIKQDIVGINEWSGYSGSFVQHPELTGLDCIRPCFWIELIRGRPKENTIWTSGSSISFCGVNSDTVGWSWPDGAELPFTIDK

SEQ ID NO: 18765 - protein, 469 aa, synthetic construct; identical to SEQ ID NO: 16738
  REGION 1..469: note = neuraminidase__InfluenzaA__ADG58914

SEQ ID NO: 18766 - protein, 469 aa, synthetic construct; identical to SEQ ID NO: 16738
  REGION 1..469: note = neuraminidase__InfluenzaA__ADG58916

SEQ ID NO: 18767 - protein, 469 aa, synthetic construct; identical to SEQ ID NO: 16738
  REGION 1..469: note = neuraminidase__InfluenzaA__ADG58917

SEQ ID NO: 18768 - protein, 469 aa, synthetic construct
  REGION 1..469: note = neuraminidase__InfluenzaA__ADG58918
MNPNQKIITIGSVCMTIGMANLILQIGNIISIWISHSIQLGNQNQIETCNQSVITYENNTWVNQTYVNISNTNFAAGQSVVSVKLAGNSSLCPVSGWAIYSKDNSIRIGSKGDVFVIREPFISCSPLECRTFFLTQGALLNDKHSNGTIKDRSPYRTLMSCPIGEVPSPYNSRFESVAWSASACHDGINWLTIGISGPDNGAVAVLKYNGIITDTIKSWRNNILRTQESECACVNGSCFTVMTDGPSDGQASYKIFRIEKGKIVKSVEMNAPNYHYEECSCYPDSSEITCVCRDNWHGSNRPWVTFNQNLEYQIGYICSGIFGDNPRPNDKTGSCGPVSSNGANGVKGFSFKYGNGVWIGRTKSISSRNGFEMIWDPNGWTGTDNNFSIKQDIVGINEWSGYSGSFVQHPELTGLDCIRPCFWVELIRGRPKENTIWTSGSSISFCGVNSDTVGWSWPDGAELPFTIDK

SEQ ID NO: 18769 - protein, 469 aa, synthetic construct; identical to SEQ ID NO: 18764
  REGION 1..469: note = neuraminidase__InfluenzaA__ADG58919

SEQ ID NO: 18770 - protein, 469 aa, synthetic construct; identical to SEQ ID NO: 16893
  REGION 1..469: note = neuraminidase__InfluenzaA__ADG58920

SEQ ID NO: 18771 - protein, 469 aa, synthetic construct; identical to SEQ ID NO: 16893
  REGION 1..469: note = neuraminidase__InfluenzaA__ADG58921

SEQ ID NO: 18772 - protein, 469 aa, synthetic construct; identical to SEQ ID NO: 16893
  REGION 1..469: note = neuraminidase__InfluenzaA__ADG58922

SEQ ID NO: 18773 - protein, 469 aa, synthetic construct; identical to SEQ ID NO: 16893
  REGION 1..469: note = neuraminidase__InfluenzaA__ADG58923

SEQ ID NO: 18774 - protein, 469 aa, synthetic construct; identical to SEQ ID NO: 16893
  REGION 1..469: note = neuraminidase__InfluenzaA__ADG58924

SEQ ID NO: 18775 - protein, 469 aa, synthetic construct; identical to SEQ ID NO: 16893
  REGION 1..469: note = neuraminidase__InfluenzaA__ADG58925

SEQ ID NO: 18776 - protein, 469 aa, synthetic construct; identical to SEQ ID NO: 16893
  REGION 1..469: note = neuraminidase__InfluenzaA__ADG58926

SEQ ID NO: 18777 - protein, 469 aa, synthetic construct; identical to SEQ ID NO: 16893
  REGION 1..469: note = neuraminidase__InfluenzaA__ADG58927

SEQ ID NO: 18778 - protein, 469 aa, synthetic construct; identical to SEQ ID NO: 17756
  REGION 1..469: note = neuraminidase__InfluenzaA__ADG58928

SEQ ID NO: 18779 - protein, 469 aa, synthetic construct; identical to SEQ ID NO: 17756
  REGION 1..469: note = neuraminidase__InfluenzaA__ADG58929

SEQ ID NO: 18780 - protein, 469 aa, synthetic construct
  REGION 1..469: note = neuraminidase__InfluenzaA__ADG58931
MNPNQKIITIGSVCMTIGMANLILQIGNTISIWINHSIQLGNQNQIETCNQSVITYENNTWVNQTYVNISNTNFAAGQSVVSVKLAGNSSLCPVSGWAIYSKDNSIRIGSKGDVFVIREPFISCSPLECRTFFLTQGALLNDKHSNGTIKDRSPYRTLMSCPIGEVPSPYNSRFESVAWSASACHDGINWLTIGISGPDNGAVAVLKYNGIITDTIKSWRNNILRTQESECACVNGSCFTVMTDGPSDGQASYKIFRIEKGKIVKSVEMNAPNYHYEECSCYPDSSEITCVCRDNWHGSNRPWVSFNQNLEYQIGYICSGIFGDNPRPNDKTGSCGPVSSNGANGVKGFSFKYGNGVWIGRTKSISSRNGFEMIWDPNGWTGTDNNFSIKQDIVGINEWSGYSGSFVQHPELTGLDCIRPCFWVELIRGRPKENTIWTSGSSISFCGVNSDTVGWSWPDGAELPFTIDK

SEQ ID NO: 18781 - protein, 469 aa, synthetic construct; identical to SEQ ID NO: 18780
  REGION 1..469: note = neuraminidase__InfluenzaA__ADG58932

SEQ ID NO: 18782 - protein, 469 aa, synthetic construct; identical to SEQ ID NO: 18780
  REGION 1..469: note = neuraminidase__InfluenzaA__ADG58933

SEQ ID NO: 18783 - protein, 469 aa, synthetic construct; identical to SEQ ID NO: 18780
  REGION 1..469: note = neuraminidase__InfluenzaA__ADG58934

SEQ ID NO: 18784 - protein, 469 aa, synthetic construct; identical to SEQ ID NO: 18780
  REGION 1..469: note = neuraminidase__InfluenzaA__ADG58935

SEQ ID NO: 18785 - protein, 469 aa, synthetic construct; identical to SEQ ID NO: 18780
  REGION 1..469: note = neuraminidase__InfluenzaA__ADG58936

SEQ ID NO: 18786 - protein, 469 aa, synthetic construct; identical to SEQ ID NO: 18780
  REGION 1..469: note = neuraminidase__InfluenzaA__ADG58937

SEQ ID NO: 18787 - protein, 469 aa, synthetic construct; identical to SEQ ID NO: 18780
  REGION 1..469: note = neuraminidase__InfluenzaA__ADG58938

SEQ ID NO: 18788 - protein, 469 aa, synthetic construct
  REGION 1..469: note = neuraminidase__InfluenzaA__ADG59589
MNPNQKIITIGSVCMTIGMANLILQIGNIISIWISHSIQLGNQNQIETCNQSVITYENNTWVNQTYVNISNTNFAAGQSVVSVKLAGNSSLCPVSGWAIYSKDNSIRIGSKGDVFVIREPFISCSPLECRTFFLTQGALLNDKHSNGTIKDRSPYRTLMSCPIGEVPSPYNSRFESVAWSASACHDGINWLTIGISGPDNGAMAVLKYNGIITDTIKSWRNNILRTQESECACVNGSCFTVMTDGPSDGQASYKIFRIEKGKVVKSVEMNAPNYHYEECSCYPDSSEITCVCRDNWHGSNRPWVSFNQNLEYQIGYICSGIFGDNPRPNDKTGSCGPVSSNGANGVKGFSFKYGNGVWIGRTKSISSRNGFEMIWDPNGWTGTDNNFSIKQDIVGINEWSGYSGSFVQHPELTGLDCIRPCFWVELIRGRPKENTIWTSGSSISFCGVNSDTVGWSWPDGAELPFTIDK

SEQ ID NO: 18789 - protein, 469 aa, synthetic construct; identical to SEQ ID NO: 16738
  REGION 1..469: note = neuraminidase__InfluenzaA__ADG59590

SEQ ID NO: 18790 - protein, 469 aa, synthetic construct; identical to SEQ ID NO: 16738
  REGION 1..469: note = neuraminidase__InfluenzaA__ADG59591

SEQ ID NO: 18791 - protein, 469 aa, synthetic construct; identical to SEQ ID NO: 16738
  REGION 1..469: note = neuraminidase__InfluenzaA__ADG59592

SEQ ID NO: 18792 - protein, 469 aa, synthetic construct; identical to SEQ ID NO: 18640
  REGION 1..469: note = neuraminidase__InfluenzaA__ADG59593

SEQ ID NO: 18793 - protein, 469 aa, synthetic construct; identical to SEQ ID NO: 17915
  REGION 1..469: note = neuraminidase__InfluenzaA__ADG59594

SEQ ID NO: 18794 - protein, 469 aa, synthetic construct; identical to SEQ ID NO: 17915
  REGION 1..469: note = neuraminidase__InfluenzaA__ADG59595

SEQ ID NO: 18795 - protein, 469 aa, synthetic construct
  REGION 1..469: note = neuraminidase__InfluenzaA__ADG59596
MNPNQKIITIGSVCMTIGMANLILQIGNIISIWISHSIQLGNQNQIETCNQSVITYENNTWVNQTYVNISNTNFAAGQSVVSVKLAGNSSLCPVSGWAIYSKDNSIRIGSKGDVFVIREPFISCSPLECRTFFLTQGALLNDKHSNGTIKDRSPYRTLMSCPIGEVPSPYNSRFESVAWSASACHDGINWLTIGISGPDNGAVAVLKYNGIITDTIKSWRNNILRTQESECACVNGSCFTVMTDGPSDGQASYKIFRIEKGKIVKSVEMNAPNYHYEECSCYPDSSEITCVCRDNWHGSNRPWVSFNQNLEYQIGYICSGIFGDNPRPNDRTGSCGPVSSNGANGVKGFSFKYGNGVWIGRTKSISSRNGFEMIWDPNGWTGTDNNFSIKQDIVGINEWSGYSGSFVQHPELTGLDCIRPCFWVELIRGRPKENTIWTSGSSISFCGVNSDTVGWSWPDGAELPFTIDK

SEQ ID NO: 18796 - protein, 469 aa, synthetic construct; identical to SEQ ID NO: 16738
  REGION 1..469: note = neuraminidase__InfluenzaA__ADG59597

SEQ ID NO: 18797 - protein, 469 aa, synthetic construct; identical to SEQ ID NO: 16738
  REGION 1..469: note = neuraminidase__InfluenzaA__ADG59598

SEQ ID NO: 18798 - protein, 469 aa, synthetic construct; identical to SEQ ID NO: 17913
  REGION 1..469: note = neuraminidase__InfluenzaA__ADG59599

SEQ ID NO: 18799 - protein, 469 aa, synthetic construct; identical to SEQ ID NO: 16738
  REGION 1..469: note = neuraminidase__InfluenzaA__ADG59601

SEQ ID NO: 18800 - protein, 469 aa, synthetic construct; identical to SEQ ID NO: 18640
  REGION 1..469: note = neuraminidase__InfluenzaA__ADG59602

SEQ ID NO: 18801 - protein, 469 aa, synthetic construct; identical to SEQ ID NO: 18640
  REGION 1..469: note = neuraminidase__InfluenzaA__ADG59603

SEQ ID NO: 18802 - protein, 469 aa, synthetic construct; identical to SEQ ID NO: 16738
  REGION 1..469: note = neuraminidase__InfluenzaA__ADG59604

SEQ ID NO: 18803 - protein, 469 aa, synthetic construct; identical to SEQ ID NO: 16738
  REGION 1..469: note = neuraminidase__InfluenzaA__ADG59605

SEQ ID NO: 18804 - protein, 469 aa, synthetic construct; identical to SEQ ID NO: 17756
  REGION 1..469: note = neuraminidase__InfluenzaA__ADG59606

SEQ ID NO: 18805 - protein, 469 aa, synthetic construct; identical to SEQ ID NO: 16738
  REGION 1..469: note = neuraminidase__InfluenzaA__ADG59607

SEQ ID NO: 18806 - protein, 469 aa, synthetic construct; identical to SEQ ID NO: 16738
  REGION 1..469: note = neuraminidase__InfluenzaA__ADG59608

SEQ ID NO: 18807 - protein, 469 aa, synthetic construct; identical to SEQ ID NO: 17559
  REGION 1..469: note = neuraminidase__InfluenzaA__ADG59609

SEQ ID NO: 18808 - protein, 469 aa, synthetic construct; identical to SEQ ID NO: 18640
  REGION 1..469: note = neuraminidase__InfluenzaA__ADG59610

SEQ ID NO: 18809 - protein, 469 aa, synthetic construct; identical to SEQ ID NO: 17756
  REGION 1..469: note = neuraminidase__InfluenzaA__ADG59611

SEQ ID NO: 18810 - protein, 469 aa, synthetic construct; identical to SEQ ID NO: 18640
  REGION 1..469: note = neuraminidase__InfluenzaA__ADG59612

SEQ ID NO: 18811 - protein, 469 aa, synthetic construct
  REGION 1..469: note = neuraminidase__InfluenzaA__ADG59613
MNPNQKIITIGSVCMTIGMTNLILQLGNIISIWISHSIQLGNQNQIETCNQSVITYENNTWVNQTYVNISNTNFAAGQSVVSVKLAGNSSLCPVSGWAIYSKDNSIRIGSKGDVFVIREPFISCSPLECRTFFLTQGALLNDKHSNGTIKDRSPYRTLMSCPIGEVPSPYNSRFESVAWSASACHDGINWLTIGISGPDNGAVAVLKYNGIITDTIKSWRNNILRTQESECACVNGSCFTVMTDGPSDGQASYKIFRIEKGKIVKSVEMNAPNYHYEECSCYPDSSEITCVCRDNWHGSNRPWVSFNQNLEYQIGYICSGIFGDNPRPNDKTGSCGPVSSNGANGVKGFSFKYGNGVWIGRTKSISSRNGFEMIWDPNGWTGTDNSFSIKQDIVGINEWSGYSGSFVQHPELTGLDCIRPCFWVELIRGRPKENTVWTSGSSISFCGVNSDTVGWSWPDGAELPFTIDK

SEQ ID NO: 18812 - protein, 469 aa, synthetic construct; identical to SEQ ID NO: 17913
  REGION 1..469: note = neuraminidase__InfluenzaA__ADG59614

SEQ ID NO: 18813 - protein, 469 aa, synthetic construct; identical to SEQ ID NO: 16738
  REGION 1..469: note = neuraminidase__InfluenzaA__ADH01811

SEQ ID NO: 18814 - protein, 469 aa, synthetic construct; identical to SEQ ID NO: 16738
  REGION 1..469: note = neuraminidase__InfluenzaA__ADH01821

SEQ ID NO: 18815 - protein, 469 aa, synthetic construct; identical to SEQ ID NO: 16738
  REGION 1..469: note = neuraminidase__InfluenzaA__ADH01831

SEQ ID NO: 18816 - protein, 469 aa, synthetic construct; identical to SEQ ID NO: 16738
  REGION 1..469: note = neuraminidase__InfluenzaA__ADH01841

SEQ ID NO: 18817 - protein, 469 aa, synthetic construct; identical to SEQ ID NO: 16738
  REGION 1..469: note = neuraminidase__InfluenzaA__ADH01851

SEQ ID NO: 18818 - protein, 469 aa, synthetic construct; identical to SEQ ID NO: 16738
  REGION 1..469: note = neuraminidase__InfluenzaA__ADH01861

SEQ ID NO: 18819 - protein, 469 aa, synthetic construct; identical to SEQ ID NO: 16738
  REGION 1..469: note = neuraminidase__InfluenzaA__ADH01871

SEQ ID NO: 18820 - protein, 469 aa, synthetic construct; identical to SEQ ID NO: 16738
  REGION 1..469: note = neuraminidase__InfluenzaA__ADH01881

SEQ ID NO: 18821 - protein, 469 aa, synthetic construct; identical to SEQ ID NO: 16738
  REGION 1..469: note = neuraminidase__InfluenzaA__ADH01891

SEQ ID NO: 18822 - protein, 469 aa, synthetic construct; identical to SEQ ID NO: 16738
  REGION 1..469: note = neuraminidase__InfluenzaA__ADH01901

SEQ ID NO: 18823 - protein, 469 aa, synthetic construct; identical to SEQ ID NO: 16738
  REGION 1..469: note = neuraminidase__InfluenzaA__ADH01911

SEQ ID NO: 18824 - protein, 469 aa, synthetic construct; identical to SEQ ID NO: 16738
  REGION 1..469: note = neuraminidase__InfluenzaA__ADH01921

SEQ ID NO: 18825 - protein, 469 aa, synthetic construct; identical to SEQ ID NO: 16738
  REGION 1..469: note = neuraminidase__InfluenzaA__ADH01931

SEQ ID NO: 18826 - protein, 469 aa, synthetic construct; identical to SEQ ID NO: 18629
  REGION 1..469: note = neuraminidase__InfluenzaA__ADH01941

SEQ ID NO: 18827 - protein, 469 aa, synthetic construct; identical to SEQ ID NO: 16738
  REGION 1..469: note = neuraminidase__InfluenzaA__ADH01951

SEQ ID NO: 18828 - protein, 469 aa, synthetic construct; identical to SEQ ID NO: 16738
  REGION 1..469: note = neuraminidase__InfluenzaA__ADH01961

SEQ ID NO: 18829 - protein, 469 aa, synthetic construct
  REGION 1..469: note = neuraminidase__InfluenzaA__ADH01981
MNPNQKIITIGSACMTIGMANLILQIGNIISIWISHSIQLGNQNQTETCNQSVITYENNTWVNQTYVNISNTNFAAGQSVVSVKLAGNSSLCPVSGWAIYSKDNSIRIGSKGDVFVIREPFISCSPLECRTFFLTQGALLNDKHSNGTIKDRSPYRTLMSCPIGEVPSPYNSRFESVAWSASACHDGINWLTIGISGPDNGAVAVLKYNGIITDTIKSWRNNILRTQESECACVNGSCFTVMTDGPSDGQASYKIFRIEKGKIVKSVEMNAPNYHYEECSCYPDSSEITCVCRDNWHGSNRPWVSFNQNLEYQIGYICSGIFGDNPRPNDKTGSCGPVSSNGANGVKGFSFKYGNGVWIGRTKSISSRNGFEMIWDPNGWTGTDNNFSIKQDIVGINEWSGYSGSFVQHPELTGLDCIRPCFWVELIRGRPKENTIWTSGSSISFCGVNSDTVGWSWPDGAELPFTIDK

SEQ ID NO: 18830 - protein, 469 aa, synthetic construct; identical to SEQ ID NO: 18026
  REGION 1..469: note = neuraminidase__InfluenzaA__ADH01991

SEQ ID NO: 18831 - protein, 469 aa, synthetic construct; identical to SEQ ID NO: 18695
  REGION 1..469: note = neuraminidase__InfluenzaA__ADH02011

SEQ ID NO: 18832 - protein, 469 aa, synthetic construct; identical to SEQ ID NO: 17915
  REGION 1..469: note = neuraminidase__InfluenzaA__ADH02021

SEQ ID NO: 18833 - protein, 469 aa, synthetic construct; identical to SEQ ID NO: 16738
  REGION 1..469: note = neuraminidase__InfluenzaA__ADI24510

SEQ ID NO: 18834 - protein, 469 aa, synthetic construct; identical to SEQ ID NO: 16738
  REGION 1..469: note = neuraminidase__InfluenzaA__ADI24516

SEQ ID NO: 18835 - protein, 469 aa, synthetic construct; identical to SEQ ID NO: 16738
  REGION 1..469: note = neuraminidase__InfluenzaA__ADI24518

SEQ ID NO: 18836 - protein, 469 aa, synthetic construct; identical to SEQ ID NO: 16738
  REGION 1..469: note = neuraminidase__InfluenzaA__ADI24522

SEQ ID NO: 18837 - protein, 469 aa, synthetic construct; identical to SEQ ID NO: 16738
  REGION 1..469: note = neuraminidase__InfluenzaA__ADI24524

SEQ ID NO: 18838 - protein, 469 aa, synthetic construct; identical to SEQ ID NO: 16738
  REGION 1..469: note = neuraminidase__InfluenzaA__ADI24526

SEQ ID NO: 18839 - protein, 469 aa, synthetic construct; identical to SEQ ID NO: 16738
  REGION 1..469: note = neuraminidase__InfluenzaA__ADI24528

SEQ ID NO: 18840 - protein, 469 aa, synthetic construct; identical to SEQ ID NO: 16738
  REGION 1..469: note = neuraminidase__InfluenzaA__ADI24530

SEQ ID NO: 18841 - protein, 469 aa, synthetic construct
  REGION 1..469: note = neuraminidase__InfluenzaA__ADI24532
MNPNQKIITIGSVCMTIGMANLILQIGNIISIWISHSIQLGNQNQIETCNQSVITYENNTWVNQTYVNISNTNFAAGQSVVSVKLAGNSSLCPVSGWAIYSKDNSIRIGSKGDVFVIREPFISCSPLECRTFFLTQGALLNDKHSNGTIKDRSPYRTLMSCPIGEVPSPYNSRFESVAWSASACHDGINWLTIGISGPDNGAVAVLKYNGIITDTIKSWRNNILRTQESECACVNGSCFTVMTDGPSDGQASYKIFRIEKGKIVKSVEMNAPNYHYEECSCYPDSSEITCVCRDNWHGSNRPWVSFNQNLEYQIGYICSGIFGDNPRPNDKTGSCGPVSSSGANGVKGFSFKYGNGVWIGRTKSISSRNGFEMIWDPNGWTGTDNNFSIKQDIVGINEWSGYSGSFVQHPELTGLDCIRPCFWVELIRGRPKENTIWTSGSSISFCGVNSDTVGWSWPDGAELPFTIDK

SEQ ID NO: 18842 - protein, 469 aa, synthetic construct; identical to SEQ ID NO: 16738
  REGION 1..469: note = neuraminidase__InfluenzaA__ADI24538

SEQ ID NO: 18843 - protein, 469 aa, synthetic construct; identical to SEQ ID NO: 16738
  REGION 1..469: note = neuraminidase__InfluenzaA__ADI24548

SEQ ID NO: 18844 - protein, 469 aa, synthetic construct; identical to SEQ ID NO: 16738
  REGION 1..469: note = neuraminidase__InfluenzaA__ADI24556

SEQ ID NO: 18845 - protein, 469 aa, synthetic construct; identical to SEQ ID NO: 16738
  REGION 1..469: note = neuraminidase__InfluenzaA__ADI24558

SEQ ID NO: 18846 - protein, 469 aa, synthetic construct; identical to SEQ ID NO: 16738
  REGION 1..469: note = neuraminidase__InfluenzaA__ADI24560

SEQ ID NO: 18847 - protein, 469 aa, synthetic construct; identical to SEQ ID NO: 16738
  REGION 1..469: note = neuraminidase__InfluenzaA__ADI24562

SEQ ID NO: 18848 - protein, 469 aa, synthetic construct; identical to SEQ ID NO: 16738
  REGION 1..469: note = neuraminidase__InfluenzaA__ADI24564

SEQ ID NO: 18849 - protein, 469 aa, synthetic construct; identical to SEQ ID NO: 16738
  REGION 1..469: note = neuraminidase__InfluenzaA__ADI24566

SEQ ID NO: 18850 - protein, 469 aa, synthetic construct; identical to SEQ ID NO: 16738
  REGION 1..469: note = neuraminidase__InfluenzaA__ADI24568

SEQ ID NO: 18851 - protein, 469 aa, synthetic construct; identical to SEQ ID NO: 16738
  REGION 1..469: note = neuraminidase__InfluenzaA__ADI24570

SEQ ID NO: 18852 - protein, 469 aa, synthetic construct; identical to SEQ ID NO: 16738
  REGION 1..469: note = neuraminidase__InfluenzaA__ADI24572

SEQ ID NO: 18853 - protein, 469 aa, synthetic construct; identical to SEQ ID NO: 16738
  REGION 1..469: note = neuraminidase__InfluenzaA__ADI24574

SEQ ID NO: 18854 - protein, 469 aa, synthetic construct; identical to SEQ ID NO: 16738
  REGION 1..469: note = neuraminidase__InfluenzaA__ADI24576

SEQ ID NO: 18855 - protein, 469 aa, synthetic construct; identical to SEQ ID NO: 16738
  REGION 1..469: note = neuraminidase__InfluenzaA__ADI24580

SEQ ID NO: 18856 - protein, 469 aa, synthetic construct; identical to SEQ ID NO: 17913
  REGION 1..469: note = neuraminidase__InfluenzaA__ADI24582

SEQ ID NO: 18857 - protein, 469 aa, synthetic construct
  REGION 1..469: note = neuraminidase__InfluenzaA__ADI24584
MNPNQKIITIGSVCMTIGMANLILQIGNIISIWISHSIQLGNQNQIETCNQSVITYENNTWVNQTYVNISNTNFAAGQSVVPVKLAGNSSLCPVNGWAIYSKDNSIRIGSKGDVFVIREPFISCSPLECRTFFLTQGALLNDKHSNGTIKDRSPYRTLMSCPIGEVPSPYNSRFESVAWSASACHDGINWLTIGISGPDNGAVAVLKYNGIITDTIKSWRNNILRTQESECACVNGSCFTVMTDGPSDGQASYKIFRIEKGKIVKSVEMNAPNYHYEECSCYPDSSEITCVCRDNWHGSNRPWVSFNQNLEYQIGYICSGIFGDNPRPNDKTGSCGPVSSNGANGVKGFSFKYGNGVWIGRTKSISSRNGFEMIWDPNGWTGTDNNFSIKQDIVGINEWSGYSGSFVQHPELTGLDCIRPCFWVELIRGRPKENTIWTSGSSISFCGVNSDTVGWSWPDGAELPFTIDK

SEQ ID NO: 18858 - protein, 469 aa, synthetic construct; identical to SEQ ID NO: 17092
  REGION 1..469: note = neuraminidase__InfluenzaA__ADI24592

SEQ ID NO: 18859 - protein, 469 aa, synthetic construct; identical to SEQ ID NO: 16738
  REGION 1..469: note = neuraminidase__InfluenzaA__ADI24598

SEQ ID NO: 18860 - protein, 469 aa, synthetic construct; identical to SEQ ID NO: 16738
  REGION 1..469: note = neuraminidase__InfluenzaA__ADI24604

SEQ ID NO: 18861 - protein, 469 aa, synthetic construct; identical to SEQ ID NO: 16738
  REGION 1..469: note = neuraminidase__InfluenzaA__ADI24620

SEQ ID NO: 18862 - protein, 469 aa, synthetic construct; identical to SEQ ID NO: 16738
  REGION 1..469: note = neuraminidase__InfluenzaA__ADI24622

SEQ ID NO: 18863 - protein, 469 aa, synthetic construct; identical to SEQ ID NO: 17092
  REGION 1..469: note = neuraminidase__InfluenzaA__ADI46780

SEQ ID NO: 18864 - protein, 469 aa, synthetic construct
  REGION 1..469: note = neuraminidase__InfluenzaA__ADI46789
MNPNQKIITIGSVCMTIGMANLMLQIGNIISIWISHSIQLGNQNQIETCNQSVITYENNTWVNQTYVNISNTNFAAGQSVVSVKLAGNSSLCPVSGWAIYSKDNSVRIGSKGDVFVIREPFISCSPLECRTFFLTQGALLNDKHSNGTIKDRSPYRTLMSCPIGEVPSPYNSRFESVAWSASACHDGINWLTIGISGPDNGAVAVLKYNGIITDTIKSWRNNILRTQESECACVNGSCFTVMTDGPSNEQASYKIFRIEKGKIVKSVEMNAPNYHYEECSCYPDSSEITCVCRDNWHGSNRPWVSFNQNLEYQIGYICSGIFGDNPRPNDKTGSCGPVSSNGANGVKGFSFKYGNGVWIGRTKSISSRNGFEMIWDPNGWTGTDNNFSIKQDIVGINEWSGYSGSFVQHPELTGLDCIRPCFWVELIRGRPKENTIWTSGSSISFCGVNSDTVGWSWPDGAELPFTIDK

SEQ ID NO: 18865 - protein, 469 aa, synthetic construct; identical to SEQ ID NO: 16738
  REGION 1..469: note = neuraminidase__InfluenzaA__ADI48185

SEQ ID NO: 18866 - protein, 469 aa, synthetic construct; identical to SEQ ID NO: 16738
  REGION 1..469: note = neuraminidase__InfluenzaA__ADI48187

SEQ ID NO: 18867 - protein, 469 aa, synthetic construct; identical to SEQ ID NO: 16738
  REGION 1..469: note = neuraminidase__InfluenzaA__ADI48189

SEQ ID NO: 18868 - protein, 469 aa, synthetic construct; identical to SEQ ID NO: 16738
  REGION 1..469: note = neuraminidase__InfluenzaA__ADI48191

SEQ ID NO: 18869 - protein, 469 aa, synthetic construct; identical to SEQ ID NO: 16738
  REGION 1..469: note = neuraminidase__InfluenzaA__ADI48193

SEQ ID NO: 18870 - protein, 469 aa, synthetic construct; identical to SEQ ID NO: 16738
  REGION 1..469: note = neuraminidase__InfluenzaA__ADI48195

SEQ ID NO: 18871 - protein, 469 aa, synthetic construct
  REGION 1..469: note = neuraminidase__InfluenzaA__ADI48197
MNPNQKIITIGSVCMTIGMANLILQIGNIISIWISHSIQFGNQNQIETCNQSVITYENNTWVNQTYVNISNTNFAAGQSVVSVKLAGNSSLCPVSGWAIYSKDNSIRIGSKGDVFVIREPFISCSPLECRTFFLTQGALLNDKHSNGTIKDRSPYRTLMSCPIGEVPSPYNSRFESVAWSASACHDGINWLTIGISGPDNGAVAVLKYNGIITDTIKSWRNNILRTQESECACVNGSCFTVMTDGPSDGQASYKIFRIEKGKIVKSVEMNAPNYHYEECSCYPDSSEITCVCRDNWHGSNRPWVSFNQNLEYQIGYICSGIFGDNPRPNDKTGSCGPVSSNGANGVKGFSFKYGNGVWIGRTKSISSRNGFEMIWDPNGWTGTDNNFSIKQDIVGINEWSGYSGSFVQHPELTGLDCIRPCFWVELIRGRPKENTIWTSGSSISFCGVNSDTVGWSWPDGAELPFTIDK

SEQ ID NO: 18872 - protein, 469 aa, synthetic construct; identical to SEQ ID NO: 16738
  REGION 1..469: note = neuraminidase__InfluenzaA__ADI48199

SEQ ID NO: 18873 - protein, 469 aa, synthetic construct; identical to SEQ ID NO: 16738
  REGION 1..469: note = neuraminidase__InfluenzaA__ADI48201

SEQ ID NO: 18874 - protein, 469 aa, synthetic construct; identical to SEQ ID NO: 16738
  REGION 1..469: note = neuraminidase__InfluenzaA__ADI48203

SEQ ID NO: 18875 - protein, 469 aa, synthetic construct
  REGION 1..469: note = neuraminidase__InfluenzaA__ADI48205
MNPNQKIITIGSVCMTIGMANLILQIGNIISIWISHSIQLGNQNQIETCNQSVITYENNTWVNQTYVNISNTNFAAGQSVVSVKLAGNSSLCPVSGWAIYSKDNSIRIGSKGDVFVIREPFISCSHLECRTFFLTQGALLNDKHSNGTIKDRSPYRTLMSCPIGEVPSPYNSRFESVAWSASACHDGINWLTIGISGPDNGAVAVLKYNGIITDTIKSWRNNILRTQESECACVNGSCFTVMTDGPSDGQASYKIFRIEKGKIVKSVEMNAPNYHYEECSCYPDSSEITCVCRDNWHGSNRPWVSFNQNLEYQIGYICSGIFGDNPRPNDKTGSCGPVSSNGANGVKGFSFKYGNGVWIGRTKSISSRNGFEMIWDPNGWTGTDNNFSIKQDIVGINEWSGYSGSFVQHPELTGLDCIRPCFWVELIRGRPKENTIWTSGSSISFCGVNSDTVGWSWPDGAELPFTIDK

SEQ ID NO: 18876 - protein, 469 aa, synthetic construct; identical to SEQ ID NO: 16738
  REGION 1..469: note = neuraminidase__InfluenzaA__ADI48207

SEQ ID NO: 18877 - protein, 469 aa, synthetic construct; identical to SEQ ID NO: 16738
  REGION 1..469: note = neuraminidase__InfluenzaA__ADI48209

SEQ ID NO: 18878 - protein, 469 aa, synthetic construct; identical to SEQ ID NO: 16738
  REGION 1..469: note = neuraminidase__InfluenzaA__ADI48211

SEQ ID NO: 18879 - protein, 469 aa, synthetic construct; identical to SEQ ID NO: 16738
  REGION 1..469: note = neuraminidase__InfluenzaA__ADI48213

SEQ ID NO: 18880 - protein, 469 aa, synthetic construct; identical to SEQ ID NO: 16738
  REGION 1..469: note = neuraminidase__InfluenzaA__ADI48215

SEQ ID NO: 18881 - protein, 469 aa, synthetic construct; identical to SEQ ID NO: 16738
  REGION 1..469: note = neuraminidase__InfluenzaA__ADI48217

SEQ ID NO: 18882 - protein, 469 aa, synthetic construct; identical to SEQ ID NO: 16738
  REGION 1..469: note = neuraminidase__InfluenzaA__ADI48219

SEQ ID NO: 18883 - protein, 469 aa, synthetic construct; identical to SEQ ID NO: 16738
  REGION 1..469: note = neuraminidase__InfluenzaA__ADI48221

SEQ ID NO: 18884 - protein, 469 aa, synthetic construct; identical to SEQ ID NO: 16738
  REGION 1..469: note = neuraminidase__InfluenzaA__ADI48625

SEQ ID NO: 18885 - protein, 469 aa, synthetic construct; identical to SEQ ID NO: 16738
  REGION 1..469: note = neuraminidase__InfluenzaA__ADI48635

SEQ ID NO: 18886 - protein, 469 aa, synthetic construct; identical to SEQ ID NO: 16738
  REGION 1..469: note = neuraminidase__InfluenzaA__ADI48655

SEQ ID NO: 18887 - protein, 469 aa, synthetic construct; identical to SEQ ID NO: 16738
  REGION 1..469: note = neuraminidase__InfluenzaA__ADI48665

SEQ ID NO: 18888 - protein, 469 aa, synthetic construct
  REGION 1..469: note = neuraminidase__InfluenzaA__ADI48675
MNPNQKIITIGSVCMTIGMANLILQIGNIISIWISHSIQLGNQNQIETCNQSVITYENNTWVNQTYVNISNTNFAAGQSVVSVKLAGNSSLCPVSGWAIYSKDNSIRIGSKGDVFVIREPFISCSPLECRTFFLTQGALLNDKHSNGTIKDRSPYRTLMSCPIGEVPSPYNSRFESVAWSASACHDGINWLTIGISGPDNGAVAVLKYNGIITDTIKSWRNNILRTQESECACVNGSCFTVMTDGPSDGQASYKIFRIEKGKIVKSVEMNAPNYHYEECSCYPDSSEITCVCRDNWHGSNRPWVSFNQNLEYQIGYICSGIFGDNPRPNDKTGSCGPVSSNGANGVKGFSFKYGNGVWIGRTKSISSRNGFEMIWDPNGWTGTDNNFSIKQDIVGINEWSGYSGSFVQHPELTGLDCIRPCFWVELIRGRLKENTIWTSGSSISFCGVNSDTVGWSWPDGAELPFTIDK

SEQ ID NO: 18889 - protein, 469 aa, synthetic construct
  REGION 1..469: note = neuraminidase__InfluenzaA__ADI48685
MNPNQKIITIGSVCMTIGMANLILQIGNIISIWISHSIQLGNQNQIETCNQSVITYENNTWVNQTYVNISNTNFAAGQSVVSVKLAGNSSLCPVSGWAIYSKDNSIRIGSKGDVFVIREPFISCSPLECRTFFLTQGALLNDKHSNGTIKDRSPYRTLMSCPIGEVPSPYNSRFESVAWSASACHDGINWLTIGISGPDNGAVAVLKYNGIITDTIKSWRNNILRTQESECACVNGACFTVMTDGPSDGQASYKIFRIEKGKIVKSVEMNAPNYHYEECSCYPDSSEITCVCRDNWHGSNRPWVSFNQNLEYQIGYICSGIFGDNPRPNDKTGSCGPVSSNGANGVKGFSFKYGNGVWIGRTKSISSRNGFEMIWDPNGWTGTDNNFSIKQDIVGINEWSGYSGSFVQHPELTGLDCIRPCFWVELIRGRPKENTIWTSGSSISFCGVNSDTVGWSWPDGAELPFTIDK

SEQ ID NO: 18890 - protein, 469 aa, synthetic construct; identical to SEQ ID NO: 16738
  REGION 1..469: note = neuraminidase__InfluenzaA__ADI48695

SEQ ID NO: 18891 - protein, 469 aa, synthetic construct; identical to SEQ ID NO: 16728
  REGION 1..469: note = neuraminidase__InfluenzaA__ADI48705

SEQ ID NO: 18892 - protein, 469 aa, synthetic construct; identical to SEQ ID NO: 16738
  REGION 1..469: note = neuraminidase__InfluenzaA__ADI48715

SEQ ID NO: 18893 - protein, 469 aa, synthetic construct; identical to SEQ ID NO: 16738
  REGION 1..469: note = neuraminidase__InfluenzaA__ADI48725

SEQ ID NO: 18894 - protein, 469 aa, synthetic construct; identical to SEQ ID NO: 16738
  REGION 1..469: note = neuraminidase__InfluenzaA__ADI48735

SEQ ID NO: 18895 - protein, 469 aa, synthetic construct; identical to SEQ ID NO: 16738
  REGION 1..469: note = neuraminidase__InfluenzaA__ADI48745

SEQ ID NO: 18896 - protein, 469 aa, synthetic construct
  REGION 1..469: note = neuraminidase__InfluenzaA__ADI48755
MNPNQKIITIGSVCMTIGMANLILQIGNIISIWISHSIQLGNQNQIETCNQSVITYENNTWVNQTYVNISNTNFAAGQSVVSVKLAGNSSLCPVSGWAIYSKDNSIRIGSKGDVFVIREPFISCSPLECRTFFLTQGALLNDKHSNGTIKDRSPYRTLMSCPIGEVPSPYNSRFESVAWSASACHDGINWLTIGISGPDNGAVAVLKYNGIISDTIKSWRNNILRTQESECACVNGSCFTVMTDGPSDGQASYKIFRIEKGKIVKSVEMNAPNYHYEECSCYPDSSEITCVCRDNWHGSNRPWVSFNQNLEYQIGYICSGIFGDNPRPNDKTGSCGPVSSNGANGVKGFSFKYGNGVWIGRTKSISSRNGFEMIWDPNGWTGTDNNFSIKQDIVGINEWSGYSGSFVQHPELTGLDCIRPCFWVELIRGRPKENTIWTSGSSISFCGVNSDTVGWSWPDGAELPFTIDK

SEQ ID NO: 18897 - protein, 469 aa, synthetic construct; identical to SEQ ID NO: 16738
  REGION 1..469: note = neuraminidase__InfluenzaA__ADI48765

SEQ ID NO: 18898 - protein, 469 aa, synthetic construct; identical to SEQ ID NO: 16738
  REGION 1..469: note = neuraminidase__InfluenzaA__ADI48775

SEQ ID NO: 18899 - protein, 469 aa, synthetic construct; identical to SEQ ID NO: 16738
  REGION 1..469: note = neuraminidase__InfluenzaA__ADI48785

SEQ ID NO: 18900 - protein, 469 aa, synthetic construct; identical to SEQ ID NO: 16738
  REGION 1..469: note = neuraminidase__InfluenzaA__ADI48795

SEQ ID NO: 18901 - protein, 469 aa, synthetic construct; identical to SEQ ID NO: 16738
  REGION 1..469: note = neuraminidase__InfluenzaA__ADI49032

SEQ ID NO: 18902 - protein, 469 aa, synthetic construct; identical to SEQ ID NO: 16738
  REGION 1..469: note = neuraminidase__InfluenzaA__ADI49243

SEQ ID NO: 18903 - protein, 469 aa, synthetic construct; identical to SEQ ID NO: 16738
  REGION 1..469: note = neuraminidase__InfluenzaA__ADI49263

SEQ ID NO: 18904 - protein, 469 aa, synthetic construct; identical to SEQ ID NO: 16738
  REGION 1..469: note = neuraminidase__InfluenzaA__ADI49273

SEQ ID NO: 18905 - protein, 469 aa, synthetic construct; identical to SEQ ID NO: 16738
  REGION 1..469: note = neuraminidase__InfluenzaA__ADI49283

SEQ ID NO: 18906 - protein, 469 aa, synthetic construct; identical to SEQ ID NO: 16738
  REGION 1..469: note = neuraminidase__InfluenzaA__ADI49315

SEQ ID NO: 18907 - protein, 469 aa, synthetic construct; identical to SEQ ID NO: 16738
  REGION 1..469: note = neuraminidase__InfluenzaA__ADI49325

SEQ ID NO: 18908 - protein, 469 aa, synthetic construct; identical to SEQ ID NO: 16738
  REGION 1..469: note = neuraminidase__InfluenzaA__ADI49335

SEQ ID NO: 18909 - protein, 469 aa, synthetic construct
  REGION 1..469: note = neuraminidase__InfluenzaA__ADI49345
MNPNQKIITIGSVCMTIGMANLILQIGNIISIWISHSIQLGNQNQIETCNQSVITYENNTWVNQTYVNISNTNLAAGQSVVSVKLAGNSSLCPVSGWAIYSKDNSIRIGSKGDVFVIREPFISCSPLECRTFFLTQGALLNDKHSNGTIKDRSPYRTLMSCPIGDVPSPYNSRFESVAWSASACHDGINWLTIGISGPDNGAVAVLKYNGIITDTIKSWRNNILRTQESECACVNGSCFTVMTDGPSDGQASYKIFRIEKGKIVKSVEMNAPNYHYEECSCYPDSSEITCVCRDNWHGSNRPWVSFNQNLEYQIGYICSGIFGDNPRPNDKTGSCGPVSSNGANGVKGFSFKYGNGVWIGRTKSISSRNGFEMIWDPNGWTGTDNNFSIKQDIVGINEWSGYSGSFVQHPELTGLDCIRPCFWVELIRGRPKENTIWTSGSSISFCGVNSDTVGWSWPDGAELPFTIDK

SEQ ID NO: 18910 - protein, 469 aa, synthetic construct; identical to SEQ ID NO: 16738
  REGION 1..469: note = neuraminidase__InfluenzaA__ADI49355

SEQ ID NO: 18911 - protein, 469 aa, synthetic construct; identical to SEQ ID NO: 16738
  REGION 1..469: note = neuraminidase__InfluenzaA__ADI49365

SEQ ID NO: 18912 - protein, 469 aa, synthetic construct; identical to SEQ ID NO: 16738
  REGION 1..469: note = neuraminidase__InfluenzaA__ADI49375

SEQ ID NO: 18913 - protein, 469 aa, synthetic construct; identical to SEQ ID NO: 16738
  REGION 1..469: note = neuraminidase__InfluenzaA__ADI49385

SEQ ID NO: 18914 - protein, 469 aa, synthetic construct
  REGION 1..469: note = neuraminidase__InfluenzaA__ADI49395
MNPNQKIITIGSVCMTIGMANLILQIGNMISIWISHSIQLGNQNQIETCNQSVITYENNTWVNQTYVNISNTNFAAGQSVVSVKLAGNSSLCPVSGWAIYSKDNSIRIGSKGDVFVIREPFISCSPLECRTFFLTQGALLNDKHSNGTIKDRSPYRTLMSCPIGEVPSPYNSRFESVAWSASACHDGINWLTIGISGPDNGAVAVLKYNGIITDTIKSWRNNILRTQESECACVNGSCFTVMTDGPSDGQASYKIFRIEKGKIVKSVELNAPNYHYEECSCYPDSSEITCVCRDNWHGSNRPWVSFNQNLEYQIGYICSGIFGDNPRPNDKTGSCGPVSSNGANGVKGFSFKYGNGVWIGRTKSISSRNGFEMIWDPNGWTGTDNNFSIKQDIVGINEWSGYSGSFVQHPELTGLDCIRPCFWVELIRGRPKENTIWTSGSSISFCGVNSDTVGWSWPDGAELPFTIDK

SEQ ID NO: 18915 - protein, 469 aa, synthetic construct; identical to SEQ ID NO: 16738
  REGION 1..469: note = neuraminidase__InfluenzaA__ADI49720

SEQ ID NO: 18916 - protein, 469 aa, synthetic construct; identical to SEQ ID NO: 16738
  REGION 1..469: note = neuraminidase__InfluenzaA__ADI49730

SEQ ID NO: 18917 - protein, 469 aa, synthetic construct; identical to SEQ ID NO: 16738
  REGION 1..469: note = neuraminidase__InfluenzaA__ADI49740

SEQ ID NO: 18918 - protein, 469 aa, synthetic construct; identical to SEQ ID NO: 16738
  REGION 1..469: note = neuraminidase__InfluenzaA__ADI49750

SEQ ID NO: 18919 - protein, 469 aa, synthetic construct; identical to SEQ ID NO: 16738
  REGION 1..469: note = neuraminidase__InfluenzaA__ADI49760

SEQ ID NO: 18920 - protein, 469 aa, synthetic construct; identical to SEQ ID NO: 16768
  REGION 1..469: note = neuraminidase__InfluenzaA__ADI49780

SEQ ID NO: 18921 - protein, 469 aa, synthetic construct; identical to SEQ ID NO: 16728
  REGION 1..469: note = neuraminidase__InfluenzaA__ADI49790

SEQ ID NO: 18922 - protein, 469 aa, synthetic construct; identical to SEQ ID NO: 16738
  REGION 1..469: note = neuraminidase__InfluenzaA__ADI49821

SEQ ID NO: 18923 - protein, 469 aa, synthetic construct; identical to SEQ ID NO: 16728
  REGION 1..469: note = neuraminidase__InfluenzaA__ADI50029

SEQ ID NO: 18924 - protein, 469 aa, synthetic construct
  REGION 1..469: note = neuraminidase__InfluenzaA__ADI52830
MNPNQKIITIGSVCMTIGMANLILQIGNIISIWISHSIQLGNQNQIETCNQSVITYENNTWVNQTYVNISNTNFAAGQSVVSVKLAGNSSLCPVSGWAIYSKDNSVRIGSKGDVFVIREPFISCSPLECRTFFLTQGALLNDKHSNGTIKDRSPYRTLMSCPIGEVPSPYNSRFESVAWSASACHDGINWLTIGISGPDNGAVAVLKYNGIITDTIKSWRNNILRTQESECACVNGSCFTVMTDGPSDGQASYKIFRIEKGKIVKSVEMNAPNYHYEECSCYPDSSEITCVCRDNWHGSNRPWVSFNQNLEYQIGYICSGIFGDNPRPNDKTGSCGPVSSNGANGVKGFSFKYGNGVWIGRTKSISSRNGFEMIWDPNGWTGTDNNFSIKQDIVGINEWSGYSGSFVQHPELTGLDCIRPCFWVELIRGRPKENTIWTSGSSISFCGVNSDTVGWSWPDGDELPFTIDK

SEQ ID NO: 18925 - protein, 469 aa, synthetic construct
  REGION 1..469: note = neuraminidase__InfluenzaA__ADI52831
MNPNQKIITIGSVCMTIGMANLILQIGNIISIWISHSIQLGNQNQIETCNQSVITYENNTWVNQTYVNISNTNFAAGQSVVSVKLAGNSSLCPVSGWAIYSKDNSIRIGSKGDVFVIREPFISCSPLECRTFFLTQGALLNDKHSNGTIKDRSPYRTLMSCPIGEVPSPYNSRFESVAWSASACHDGINWLTIGISGPDNGAVAVLKYNGIITDTIKSWRNNILRTQESECACVNGSCFTVMTDGPSDGQASYKIFRIEKGKIVKSVEMNAPNYHYEECSCYPDSSEITCVCRDNWHGSNRPWVSFNQNLEYQIGYICSGIFGDNPRPNDKTGSCGPVSSNGANGVKGFSFKYGNGVWIGRTKSVSSRNGFEMIWDPNGWTGTDNNFSIKQDIVGINEWSGYSGSFVQHPELTGLDCIRPCFWVELIRGRPKENTIWTSGSSISFCGVNSDTVGWSWPDGAELPFTIDK

SEQ ID NO: 18926 - protein, 469 aa, synthetic construct; identical to SEQ ID NO: 16738
  REGION 1..469: note = neuraminidase__InfluenzaA__ADI52832

SEQ ID NO: 18927 - protein, 469 aa, synthetic construct
  REGION 1..469: note = neuraminidase__InfluenzaA__ADI52833
MNPNQKIITIGSVCMTIGMANLILQIGNIISIWISHSIQLGNQNQIETCNQSVITYENNTWVNQTYVNISNTNFAAGQSVVSVKLAGNSSLCPVSGWAIYSKDNSIRIGSKGDVFVIREPFISCSPLECRTFFLTQGALLNDKHSNGTIKDRSPYRTLMSCPIGEAPSPYNSRFESVAWSASACHDGINWLTIGISGPDNGAVAVLKYNGIITDTIKSWRNNILRTQESECACVNGSCFTVMTDGPSDGQASYKIFRIEKGKIVKSVEMNAPNYHYEECSCYPDSSEITCVCRDNWHGSNRPWVSFNQNLEYQIGYICSGIFGDNPRPNDKTGSCGPVSSNGANGVKGFSFKYGNGVWIGRTKSISSRNGFEMIWDPNGWTGTDNNFSIKQDIVGINEWSGYSGSFVQHPELTGLDCIRPCFWVELIRGRPKENTIWTSGSSISFCGVNSDTVGWSWPDGAELPFTIDK

SEQ ID NO: 18928 - protein, 470 aa, synthetic construct; identical to SEQ ID NO: 17461
  REGION 1..470: note = neuraminidase__InfluenzaA__ADI75821

SEQ ID NO: 18929 - protein, 469 aa, synthetic construct; identical to SEQ ID NO: 17905
  REGION 1..469: note = neuraminidase__InfluenzaA__ADI75832

SEQ ID NO: 18930 - protein, 470 aa, synthetic construct
  REGION 1..470: note = neuraminidase__InfluenzaA__ADI75854
MNPNQKIITIGSISIAIGIISLMLQIGSIISIWASHSIQTGSQNNTGICNQRIITYENSTWVNHTYVNINNTNVVAGEDKTSVTLAGNSSLCSISGWAIYTKDNSIRIGSKGDVFVIREPFISCSHLECRTFFLTQGALLNDKHSNGTVKDRSPYRALMSCPLGEAPSPYNSKFESVAWSASACHDGMGWLTIGISGPDNGAVAVLKYNGIITGTIKSWKKQILRTQESECVCMNGSCFTIMTDGPSNKAASYKIFKIEKGKVTKSIELNAPNFYYEECSCYPDTGIVMCVCRDNWHGSNRPWVSFNQNLDYQIGYICSGVFGDNPRPEDGEGSCNPVTVDGANGVKGFSYKYGNGVWIGRTKSNRLRKGFEMIWDPNGWTNTDSDFSVKQDVVAITDWSGYSGSFVQHPELTGLDCIRPCFWVELVRGLPRENTTIWTSGSSISFCGVNSDTANWSWPDGAELPFTIDK

SEQ ID NO: 18931 - protein, 469 aa, synthetic construct
  REGION 1..469: note = neuraminidase__InfluenzaA__ADI75876
MNPNQKIITIGSVSLTISTICFFMQIAILITTVTLHFKQYEFNSPPNNQVMLCEPTIIERNITEIVYLTNTTIEKEVCPKLAEYRNWSKPQCDITGFAPFSKDNSIRLSAGGDIWVTREPYVSCDPDKCYQFALGQGTTLNNVHSNNTVRDRTPYRTLLMNELGVPFHLGTKQVCIAWSSSSCHDGKAWLHVCITGDDKNATASFIYNGRLVDSVVSWSKEILRTQESECVCINGTCTVVMTDGSASGKADTKILFIEEGKIVHTSTLSGSAQHVEECSCYPRYPGVRCVCRDNWKGSNRPIVDINIKDHSVVSSYVCSGLVGDTPRKNDSSSSSHCLDPNNEEGGHGVKGWAFDDGNDVWMGRTISEKSRLGYETFKVIEGWSNHKSKLQINRQVIVDRGNRSGYSGIFSVEGKSCINRCFYVELIRGRKEETEVLWTSNSIVVFCGTSGTYGTGSWPDGADLNLMPI

SEQ ID NO: 18932 - protein, 469 aa, synthetic construct; identical to SEQ ID NO: 17905
  REGION 1..469: note = neuraminidase__InfluenzaA__ADI75887

SEQ ID NO: 18933 - protein, 470 aa, synthetic construct; identical to SEQ ID NO: 17461
  REGION 1..470: note = neuraminidase__InfluenzaA__ADI75909

SEQ ID NO: 18934 - protein, 469 aa, synthetic construct; identical to SEQ ID NO: 18484
  REGION 1..469: note = neuraminidase__InfluenzaA__ADI75920

SEQ ID NO: 18935 - protein, 470 aa, synthetic construct; identical to SEQ ID NO: 17461
  REGION 1..470: note = neuraminidase__InfluenzaA__ADI77352

SEQ ID NO: 18936 - protein, 469 aa, synthetic construct; identical to SEQ ID NO: 16738
  REGION 1..469: note = neuraminidase__InfluenzaA__ADI77363

SEQ ID NO: 18937 - protein, 469 aa, synthetic construct; identical to SEQ ID NO: 17915
  REGION 1..469: note = neuraminidase__InfluenzaA__ADI99500

SEQ ID NO: 18938 - protein, 469 aa, synthetic construct
  REGION 1..469: note = neuraminidase__InfluenzaA__ADI99553
MNPNQKIITIGSVCMTIGMANLILQIGNIISIWISHSIQLGNQNQIETCNQSVITYENNTWVNQTYVNISNTNFAAGQSVDSVKLAGNSSLCPVSGWAIYSKDNSIRIGSKGDVFVIREPFISCSPLECRTFFLTQGALLNDKHSNGTIKDRSPYRTLMSCPIGEVPSPYNSRFESVAWSASACHDGINWLTIGISGPDNGAVAVLKYNGIITDTIKSWRNNILRTQESECACVNGSCFTVMTDGPSDGQASYKIFRIEKGKIVKSVEMNAPNYHYEECSCYPDSSEITCVCRDNWHGSNRPWVSFNQNLEYQIGYICSGIFGDNPRPNDKTGSCGPVSSNGANGVKGFSFKYGNGVWIGRTKSISSRNGFEMIWDPNGWTGTDNNFSIKQDIVGINEWSGYSGSFVQHPELTGLDCIRPCFWVELIRGRPKENTIWTSGSSISFCGVNSDTVGWSWPDGAELPFTIDK

SEQ ID NO: 18939 - protein, 469 aa, synthetic construct
  REGION 1..469: note = neuraminidase__InfluenzaA__ADI99563
MNPNQKIITIGSVCMTIGMANLILQIGNIISIWISHSIQLGNQNQIETCNQSVITYENNTWVNQTYVNISNTNFAAGQSVVSVKLAGNSSLCPVSGWAIYSKDNSIRIGSKGDVFVIREPFISCSPLECRTFFLTQGALLNDKHSNGTIKDRSPYRTLMSCPIGEVPSPYNSRFESVAWSASACHDGINWLTIGISGPDNGAVAVLKYNGIITDTIKSWRNNILRTQESECACVNGSCFTVMTDGPSDGQASYKIFRIEKGKIVKSVEVNAPNYHYEECSCYPDSSEITCVCRDNWHGSNRPWVSFNQNLEYQIGYICSGIFGDNPRPNDKTGSCGPVSSNGANGVKGFSFKYGNGVWIGRTKSISSRNGFEMIWDPNGWTGTDNNFSIKQDIVGINEWSGYSGSFVQHPELTGLDCIRPCFWVELIRGRPKENTIWTSGSSISFCGVNSDTVGWSWPDGAELPFTIDK

SEQ ID NO: 18940 - protein, 469 aa, synthetic construct; identical to SEQ ID NO: 18939
  REGION 1..469: note = neuraminidase__InfluenzaA__ADI99573

SEQ ID NO: 18941 - protein, 469 aa, synthetic construct; identical to SEQ ID NO: 18939
  REGION 1..469: note = neuraminidase__InfluenzaA__ADI99583

SEQ ID NO: 18942 - protein, 469 aa, synthetic construct; identical to SEQ ID NO: 18089
  REGION 1..469: note = neuraminidase__InfluenzaA__ADI99593

SEQ ID NO: 18943 - protein, 469 aa, synthetic construct
  REGION 1..469: note = neuraminidase__InfluenzaA__ADI99613
MNPNQKIITIGSVCMTIGMANLILQIGNIISIWISHSIQLGNQNQIETCNQSVITYENNTWVNQTYVNISNTNFAAGQSVVSVKLAGNSSLCPVSGWAIYSKDNSIRIGSKGDVFVIREPFISCSPLECRTFFLTQGALLNDKHSNGTIKDRSPYRTLMSCPIGEVPSPYNSRFESVAWSASACHDGINWLTIGISGPDNGAVAVLKYNGIITDTIKSWRNNILRTQESECACVNGSCFTVMTDGPSDGQASYKIFRIEKGKIVKSVEMNAPNYHYEECSCYPDSSEITCVCRDNWHGSNRPWVSFNQNLEYQIGYICSGIFGDNPRPNDKTGSCGPVSSNGANGVKGFSFKYGNGVWIGRTKSISSRNGFEMIWDPNGWTGTDNNFSIKQDIVGINEWSGYSGSFVQHPELTGLDCIRPCFWVELIRGRPKENTIWTSGSIISFCGVNSDTVGWSWPDGAELPFTIDK

SEQ ID NO: 18944 - protein, 469 aa, synthetic construct
  REGION 1..469: note = neuraminidase__InfluenzaA__ADI99623
MNPNQKIITIGSVCMTIGMANLILQIGNIISIWISHSIQLGNQNQIETCNQSVITYENNTWVNQTYVNISNTNFAAGQSVVSMKLAGNSSLCPVSGWAIYSKDNSIRIGSKGDVFVIREPFISCSPLECRTFFLTQGALLNDKHSNGTIKDRSPYRTLMSCPIGEVPSPYNSRFESVAWSASACHDGINWLTIGISGPDNGAVAVLKYNGIITDTIKSWRNNILRTQESECACVNGSCFTVMTDGPSDGQASYKIFRIEKGKIVKSVEMNAPNYHYEECSCYPDSNEITCVCRDNWHGSNRPWVSFNQNLEYQIGYICSGIFGDNPRPNDKTGSCGPVSSNGANGVKGFSFKYGNGVWIGRTKSISSRNGFEMIWDPNGWTGTDNNFSIKQDIVGINEWSGYSGSFVQHPELTGLDCIRPCFWVELIRGRPKENTIWTSGSSISFCGVNSDTVGWSWPDGAELPFTIDK

SEQ ID NO: 18945 - protein, 469 aa, synthetic construct; identical to SEQ ID NO: 18026
  REGION 1..469: note = neuraminidase__InfluenzaA__ADI99633

SEQ ID NO: 18946 - protein, 469 aa, synthetic construct; identical to SEQ ID NO: 18089
  REGION 1..469: note = neuraminidase__InfluenzaA__ADI99643

SEQ ID NO: 18947 - protein, 469 aa, synthetic construct; identical to SEQ ID NO: 16738
  REGION 1..469: note = neuraminidase__InfluenzaA__ADI99653

SEQ ID NO: 18948 - protein, 469 aa, synthetic construct; identical to SEQ ID NO: 16738
  REGION 1..469: note = neuraminidase__InfluenzaA__ADI99663

SEQ ID NO: 18949 - protein, 469 aa, synthetic construct; identical to SEQ ID NO: 16738
  REGION 1..469: note = neuraminidase__InfluenzaA__ADI99673

SEQ ID NO: 18950 - protein, 469 aa, synthetic construct; identical to SEQ ID NO: 16738
  REGION 1..469: note = neuraminidase__InfluenzaA__ADI99683

SEQ ID NO: 18951 - protein, 469 aa, synthetic construct; identical to SEQ ID NO: 18200
  REGION 1..469: note = neuraminidase__InfluenzaA__ADI99703

SEQ ID NO: 18952 - protein, 469 aa, synthetic construct; identical to SEQ ID NO: 16738
  REGION 1..469: note = neuraminidase__InfluenzaA__ADI99713

SEQ ID NO: 18953 - protein, 469 aa, synthetic construct; identical to SEQ ID NO: 16738
  REGION 1..469: note = neuraminidase__InfluenzaA__ADI99723

SEQ ID NO: 18954 - protein, 469 aa, synthetic construct; identical to SEQ ID NO: 16738
  REGION 1..469: note = neuraminidase__InfluenzaA__ADI99733

SEQ ID NO: 18955 - protein, 469 aa, synthetic construct; identical to SEQ ID NO: 16893
  REGION 1..469: note = neuraminidase__InfluenzaA__ADJ00487

SEQ ID NO: 18956 - protein, 469 aa, synthetic construct; identical to SEQ ID NO: 16893
  REGION 1..469: note = neuraminidase__InfluenzaA__ADJ00488

SEQ ID NO: 18957 - protein, 469 aa, synthetic construct; identical to SEQ ID NO: 16893
  REGION 1..469: note = neuraminidase__InfluenzaA__ADJ00489

SEQ ID NO: 18958 - protein, 469 aa, synthetic construct; identical to SEQ ID NO: 16893
  REGION 1..469: note = neuraminidase__InfluenzaA__ADJ00490

SEQ ID NO: 18959 - protein, 469 aa, synthetic construct; identical to SEQ ID NO: 16893
  REGION 1..469: note = neuraminidase__InfluenzaA__ADJ00491

SEQ ID NO: 18960 - protein, 469 aa, synthetic construct; identical to SEQ ID NO: 16738
  REGION 1..469: note = neuraminidase__InfluenzaA__ADJ18160

SEQ ID NO: 18961 - protein, 469 aa, synthetic construct; identical to SEQ ID NO: 16738
  REGION 1..469: note = neuraminidase__InfluenzaA__ADJ18161

SEQ ID NO: 18962 - protein, 469 aa, synthetic construct
  REGION 1..469: note = neuraminidase__InfluenzaA__ADJ18162
MIPNQKIITIGSVCMTIGMANLILQIGNIISIWISHSIQLGNQNQIETCNQSVITYENNTWVNQTYVNISNTNFAAGQSVVSVKLAGNSSLCPVSGWAIYSKDNSIRIGSKGDVFVIRKPFISCSPLECRTFFLTQGALLNDKHSNGTIKDRSPYRTLMSCPIGEVPSPYNSRFESVAWSASACHDGINWLTIGISGPDNGAVAVLKYNGIITDTIKSWRNNILRTQESECACVNGSCFTVMTDGPSDGQASYKIFRIEKGKIVKSVEMNAPNYHYEECSCYPDSSEITCVCRDNWHGSNRPWVSFNQNLEYQIGYICSGIFGDNPRPNDKTGSCGPVSSNGANGVKGFSFKYGNGVWIGRTKSISSRNGFEMIWDPNGWTGTDNNFSIKQDIVGINEWSGYSGSFVQHPELTGLDCIRPCFWVELIRGRPKENTIWTSGSSISFCGVNSDTVGWSWPDGAELPFTIDK

SEQ ID NO: 18963 - protein, 469 aa, synthetic construct
  REGION 1..469: note = neuraminidase__InfluenzaA__ADJ18164
MNPKQKIITIGSVCMTIGMANLILQIGNIISIWISHSIQLGNQNQIETCNQSVITYENNTWVNQTYVNISNTNFAAGQSVVSVKLAGNSSLCSVSGWAIYSKDNSIRIGSKGDVFVIREPFISCSPLECRTFFLTQGALLNDKHSNGTIKDRSPYRTLMSCPIGEVPSPYNSRFESVAWSASACHDGINWLTIGISGPDNGAVAVLKYNGIITDTIKSWRNNILRTQESECACVNGSCFTVMTDGPSDGQASYKIFRIEKGKIVKSVEMNAPNYHYEECSCYPDSSEITCVCRDNWHGSNRPWVSFNQNLEYQIGYICSGIFGDNPRPNDKTGSCGPVSSNGANGVKGFSFKYGNGVWIGRTKSISSRNGFEMIWDPNGWTGTDNNFSIKQDIVGINEWSGYSGSFVQHPELTGLDCIRPCFWVELIRGRPKENTIWTSGSSISFCGVNSDTVGWSWPDGAELPFTIDK

SEQ ID NO: 18964 - protein, 469 aa, synthetic construct; identical to SEQ ID NO: 16738
  REGION 1..469: note = neuraminidase__InfluenzaA__ADJ18166

SEQ ID NO: 18965 - protein, 469 aa, synthetic construct; identical to SEQ ID NO: 16738
  REGION 1..469: note = neuraminidase__InfluenzaA__ADJ18168

SEQ ID NO: 18966 - protein, 469 aa, synthetic construct; identical to SEQ ID NO: 16738
  REGION 1..469: note = neuraminidase__InfluenzaA__ADJ18170

SEQ ID NO: 18967 - protein, 469 aa, synthetic construct
  REGION 1..469: note = neuraminidase__InfluenzaA__ADJ18172
MNPNQKIITIGSVCMTIGMANLILRIGNIISIWISHSIQLGNQNQIETCNQSVITYENNTWVNQTYVNISNTNFAAGQSVVSVKLAGNSSLCPVSGWAIYRKDNSIRIGSKGDVFVIREPFISCSPLECRTFFLTQGALLNDKHSNGTIKDRSPYRTLMSCPIGEVPSPYNSRFESVAWSASACHDGINWLTIGISGPDNGAVAVLKYNGIITDTIKSWRNNILRTQESECACVNGSCFTVMTDGPSDGQASYKIFRIEKGKIVKSVEMNAPNYHYEECSCYPDSSEITCVCRDNWHGSNRPWVSFNQNLEYQIGYICSGIFGDNPRPNDKTGSCGPVSSNGANGVKGFSFKYGNGVWIGRTKSISSRNGFEMIWDPNGWTGTDNNFSIKQDIVGINEWSGYSGSFVQHPELTGLDCIRPCFWVELIRGRPKENTIWTSGSSISFCGVNSDTVGWSWPDGAELPFTIDK

SEQ ID NO: 18968 - protein, 469 aa, synthetic construct; identical to SEQ ID NO: 16738
  REGION 1..469: note = neuraminidase__InfluenzaA__ADJ18174

SEQ ID NO: 18969 - protein, 469 aa, synthetic construct
  REGION 1..469: note = neuraminidase__InfluenzaA__ADJ18176
MNPNQKIITIGSVCMTIGMANLILQIGNIISIWISLSIQLGNQNQIETCNQSVITYENNTWVNQTYVNISNTNFAAGQSVVSVKLAGNSSLCPVSGWAIYSKDNSIRIGSKGDVFVIREPFISCSPLECRTFFLTQGALLNDKHSNGTIKDRSPYRTLMSCPIGEVPSPYNSRFESVAWSASACHDGINWLTIGISGPDNGAVAVLKYNGIITDTIKSWRNNILRTQESECACVNGSCFTVMTDGPSDGQASYKIFRIEKGKIVKSVEMNAPNYHYEECSCYPDSSEITCVCRDNWHGSNRPWVSFNQNLEYQIGYICSGIFGDNPRPNDKTGSCGPVSSNGANGVKGFSFKYGNGVWIGRTKSISSRNGFEMIWDPNGWTGTDNNFSIKQDIVGINEWSGYSGSFVQHPELTGLDCIRPCFWVELIRGRPKENTIWTSGSSISFCGVNSDTVGWSWPDGAELPFTIDK

SEQ ID NO: 18970 - protein, 469 aa, synthetic construct; identical to SEQ ID NO: 16511
  REGION 1..469: note = neuraminidase__InfluenzaA__ADJ37250

SEQ ID NO: 18971 - protein, 469 aa, synthetic construct
  REGION 1..469: note = neuraminidase__InfluenzaA__ADJ37252
MNPNQKIITIGSVSLTISTICFFMQIAILVTTVTLHFKQYEFNSPPNNQVMLCEPTIIERNITEIVYLTNTTIEKEICPKLAEYRNWSKPQCDITGFAPFSKDNSIRLSAGGDIWVTREPYVSCDPDKCYQFALGQGTTLNNVHSNNIVRDRTPYRTLLMNELGVPFHLGTKQVCIAWSSSSCHDGKAWLHVCITGDDKNATASFIYNGRLVDSVVSWSKDILRTQESECVCINGTCTVVMTDGSASGKADTKILFIEEGKIVHTSTLSGSAQHVEECSCYPRYPGVRCVCRDNWKGSNRPIVDINIKDHSIVSSYVCSGLVGDTPRKNDSSSSSHCLDPNNEEGGHGVKGWAFDDGNDVWMGRTISEKSRLGYETFKVIEGWSNPKSKLQINRQVIVDRGNRSGYSGIFSVEGKSCINRCFYVELIRGRKEETEVLWTSNSIVVFCGTSGTYGTGSWPDGANINLMPI

SEQ ID NO: 18972 - protein, 469 aa, synthetic construct; identical to SEQ ID NO: 16738
  REGION 1..469: note = neuraminidase__InfluenzaA__ADJ37263

SEQ ID NO: 18973 - protein, 469 aa, synthetic construct; identical to SEQ ID NO: 16728
  REGION 1..469: note = neuraminidase__InfluenzaA__ADJ37273

SEQ ID NO: 18974 - protein, 469 aa, synthetic construct; identical to SEQ ID NO: 16738
  REGION 1..469: note = neuraminidase__InfluenzaA__ADJ40447

SEQ ID NO: 18975 - protein, 469 aa, synthetic construct; identical to SEQ ID NO: 16738
  REGION 1..469: note = neuraminidase__InfluenzaA__ADJ40457

SEQ ID NO: 18976 - protein, 469 aa, synthetic construct; identical to SEQ ID NO: 18089
  REGION 1..469: note = neuraminidase__InfluenzaA__ADJ40467

SEQ ID NO: 18977 - protein, 469 aa, synthetic construct
  REGION 1..469: note = neuraminidase__InfluenzaA__ADJ40477
MNPNQKIITIGSVCMTIGMANLILQIGNIISIWISHSIQLGNQNQIETCNQSVITYENNTWVNQTYVNISNTNFAAGQSVVSVKLAGNSSLCPVSGWAIYSKDNSIRIGSKGDVFVIREPFISCSPLECRTFFLTQGALLNDKHSNGTIKDRSPYRTLMSCPIGEVPSPYNSRFESVAWSASACHDGINWLTIGISGPDNGAVAVLKYNGIITDTIKSWRNNILRTQESECACVNGSCFTVMTDGPSDGQASYKIFRIEKGKIVKSVEMNAPNYYYEECSCYPDSSEITCVCRDNWHGSNRPWVSFNQNLEYQIGYICSGIFGDNPRPNDKTGSCGPVSSNGANGVKGFSFKYGNGVWIGRTKSISSRNGFEMIWDPNGWTGTDNNFSIKQDIVGINEWSGYSGSFVQHPELTGLDCIRPCFWVELIRGRPKENTIWTSGSSISFCGVNSDTMGWSWPDGAELPFTIDK

SEQ ID NO: 18978 - protein, 469 aa, synthetic construct; identical to SEQ ID NO: 16738
  REGION 1..469: note = neuraminidase__InfluenzaA__ADJ40487

SEQ ID NO: 18979 - protein, 469 aa, synthetic construct; identical to SEQ ID NO: 16738
  REGION 1..469: note = neuraminidase__InfluenzaA__ADJ40507

SEQ ID NO: 18980 - protein, 469 aa, synthetic construct; identical to SEQ ID NO: 16738
  REGION 1..469: note = neuraminidase__InfluenzaA__ADJ40517

SEQ ID NO: 18981 - protein, 469 aa, synthetic construct; identical to SEQ ID NO: 16738
  REGION 1..469: note = neuraminidase__InfluenzaA__ADJ40527

SEQ ID NO: 18982 - protein, 469 aa, synthetic construct
  REGION 1..469: note = neuraminidase__InfluenzaA__ADJ40537
MNPNQKIITIGSVCMTIGMANLILQIGNIISIWISHSIQLGNQNQIETCNQSVITYENNTWVNQTYVNISNTNFAAGQSGVSVKLAGNSSLCPVSGWAIYSKDNSIRIGSKGDVFVIREPFISCSPLECRTFFLTQGALLNDKHSNGTIKDRSPYRTLMSCPIGEVPSPYNSRFESVAWSASACHDGINWLTIGISGPDNGAVAVLKYNGIITDTIKSWRNNILRTQESECACVNGSCFTVMTDGPSDGQASYKIFRIEKGKIVKSVEMNAPNYHYEECSCYPDSSEITCVCRDNWHGSNRPWVSFNQNLEYQIGYICSGIFGDNPRPNDKTGSCGPVSSNGANGVKGFSFKYGNGVWIGRTKSISSRNGFEMIWDPNGWTGTDNNFSIKQDIVGINEWSGYSGSFVQHPELTGLDCIRPCFWVELIRGRPKENTIWTSGSSISFCGVNSDTVGWSWPDGAELPFTIDK

SEQ ID NO: 18983 - protein, 469 aa, synthetic construct
  REGION 1..469: note = neuraminidase__InfluenzaA__ADJ40547
MNPNQKIITIGSVCMTIGMANLILQIGNIISIWISHSIQLGNQNQIETCNQSVITYENNTWVNQTYVNISNTNFAAGQSVVSVKLAGNSSLCPVSGWAIYSKDNSIRIGSKGDVFVIREPFISCSPLECRTFFLTQGALLNDKHSNGTIKDRSPYRTLMSCPIGEVPSPYNSRFESVAWSASACHDGINWLTIGISGPDNGAVAVLKYNGIITDTIKSWRNNILRTQESECACVNGSCFTVMTDGPSDGQASYKIFRIEKGKIIKSVEMNAPNYHYEECSCYPDSSEITCVCRDNWHGSNRPWVSFNQNLEYQIGYICSGIFGDNPRPNDKTGSCGPVSSNGANGVKGFSFKYGNGVWIGRTKSISSRNGFEMIWDPNGWTGTDNNFSIKQDIIGINEWSGYSGSFVQHPELTGLDCIRPCFWVELIRGRPKENTIWTSGSSISFCGVNSDTVGWSWPDGAELPFTIDK

SEQ ID NO: 18984 - protein, 469 aa, synthetic construct; identical to SEQ ID NO: 16738
  REGION 1..469: note = neuraminidase__InfluenzaA__ADJ40557

SEQ ID NO: 18985 - protein, 469 aa, synthetic construct; identical to SEQ ID NO: 16738
  REGION 1..469: note = neuraminidase__InfluenzaA__ADJ40577

SEQ ID NO: 18986 - protein, 469 aa, synthetic construct; identical to SEQ ID NO: 16738
  REGION 1..469: note = neuraminidase__InfluenzaA__ADJ40587

SEQ ID NO: 18987 - protein, 469 aa, synthetic construct
  REGION 1..469: note = neuraminidase__InfluenzaA__ADJ40597
MNPNQKIITIGSVCMTIGMANLILQIGNIISIWISHSIQLGNQNQIETCNQSVITYENNTWVNQTYVNISNTNFAAGQSVVSVKLAGNSSLCPVSGWAIYSKDNSIRIGSKGDVFVIREPFISCSPLECRTFFLTQGALLNDKHSNGTIKDRSPYRTLMSCPIGEVPSPYNSRFESVAWSASACHDGINWLTIGISGPDNGAVAVLKYNGIITDTIKSWRNNILRTQESECACVNGSCFTVMTDGPSDGQASYKIFRIEKGKIVKSVEMNAPNYHYEECSCYPDSSEITCVCRDNWHGSNRPWVSFNQNLEYQIGYICSGIFGDNPRPNDKTGSCGPVSSNGANGVKGFSFKYGNGVWIGRTKSISSRNGFEMIWDPNGWTGTDNNFLIKQDIVGINEWSGYSGSFVQHPELTGLDCIRPCFWVELIRGRPKENTIWTSGSSISFCGVNSDTVGWSWPDGAELPFTIDK

SEQ ID NO: 18988 - protein, 469 aa, synthetic construct; identical to SEQ ID NO: 16738
  REGION 1..469: note = neuraminidase__InfluenzaA__ADJ40607

SEQ ID NO: 18989 - protein, 469 aa, synthetic construct; identical to SEQ ID NO: 16738
  REGION 1..469: note = neuraminidase__InfluenzaA__ADJ40617

SEQ ID NO: 18990 - protein, 469 aa, synthetic construct; identical to SEQ ID NO: 17092
  REGION 1..469: note = neuraminidase__InfluenzaA__ADJ40627

SEQ ID NO: 18991 - protein, 469 aa, synthetic construct; identical to SEQ ID NO: 16738
  REGION 1..469: note = neuraminidase__InfluenzaA__ADJ40637

SEQ ID NO: 18992 - protein, 469 aa, synthetic construct; identical to SEQ ID NO: 16738
  REGION 1..469: note = neuraminidase__InfluenzaA__ADJ40657

SEQ ID NO: 18993 - protein, 469 aa, synthetic construct; identical to SEQ ID NO: 16738
  REGION 1..469: note = neuraminidase__InfluenzaA__ADJ40667

SEQ ID NO: 18994 - protein, 469 aa, synthetic construct; identical to SEQ ID NO: 16738
  REGION 1..469: note = neuraminidase__InfluenzaA__ADJ40677

SEQ ID NO: 18995 - protein, 469 aa, synthetic construct
  REGION 1..469: note = neuraminidase__InfluenzaA__ADJ41819
MNPNQKIITIGSVSLTIATICFLMQIAILVTTVTLHFKQYECSSPPNNQVVPCEPIIIERNITEIVYLTNTTIEKEICPKLVEYRNWSKPQCKITGFAPFSKDNSIRLSAGGDIWVTREPYVSCDPGKCYQFALGQGTTLDNKHSNDTIHDRTPYRTLLMNELGVPFHLGTRQVCIAWSSSSCHDGKAWLHVCITGYDKNATASFIYDGRLVDSIGSWSKNILRTQESECVCINGTCTVVMTDGSASERADTKILFIEEGKIVHISPLSGSAQHVEECSCYPRYPGVRCVCRDNWKGSNRPVVDINVKDYSIVSSYVCSGLVGDTPRKNDRSSSSYCRNPNNEKGNHGVKGWAFDDGNDVWMGRTISEESRSGYETFKVIGGWSTPNSKLQINRQVIVDSGNRSGYSGIFSVEGKSCINRCFYVELIRGREQETRVWWTSNSIVVFCGTSGTYGTGSWPDGADINLMPI

SEQ ID NO: 18996 - protein, 469 aa, synthetic construct; identical to SEQ ID NO: 16738
  REGION 1..469: note = neuraminidase__InfluenzaA__ADJ56642

SEQ ID NO: 18997 - protein, 469 aa, synthetic construct; identical to SEQ ID NO: 16738
  REGION 1..469: note = neuraminidase__InfluenzaA__ADJ56652

SEQ ID NO: 18998 - protein, 469 aa, synthetic construct; identical to SEQ ID NO: 16738
  REGION 1..469: note = neuraminidase__InfluenzaA__ADJ80637

SEQ ID NO: 18999 - protein, 469 aa, synthetic construct; identical to SEQ ID NO: 17756
  REGION 1..469: note = neuraminidase__InfluenzaA__ADJ80647

SEQ ID NO: 19000 - protein, 469 aa, synthetic construct; identical to SEQ ID NO: 17756
  REGION 1..469: note = neuraminidase__InfluenzaA__ADJ80657

SEQ ID NO: 19001 - protein, 469 aa, synthetic construct; identical to SEQ ID NO: 16738
  REGION 1..469: note = neuraminidase__InfluenzaA__ADJ80667

SEQ ID NO: 19002 - protein, 469 aa, synthetic construct; identical to SEQ ID NO: 18651
  REGION 1..469: note = neuraminidase__InfluenzaA__ADJ80677

SEQ ID NO: 19003 - protein, 469 aa, synthetic construct; identical to SEQ ID NO: 18026
  REGION 1..469: note = neuraminidase__InfluenzaA__ADJ80687

SEQ ID NO: 19004 - protein, 469 aa, synthetic construct
  REGION 1..469: note = neuraminidase__InfluenzaA__ADJ80697
MNPNQKIITIGSVCMTIGMANLILQIGNIISIWISHSIQLGNQNQIETCNQSVITYENNTWVNQTYVNISNTNFAAGQSVISVKLAGNSSLCPVSGWAIYSKDNSVRIGSKGDVFVIREPFISCSPLECRTFFLTQGALLNDKHSNGTIKDRSPYRTLMSCPIGEVPSPYNSRFESVAWSASACHDGINWLTIGISGPDNGAVAVLKYNGIITDTIKSWRNNILRTQESECACVNGSCFTVMTDGPSDGQASYKIFRIEKGKIVKSVEMNAPNYHYEECSCYPDSSEITCVCRDNWHGSNRPWVSFNQNLEYQIGYICSGIFGDNPRPNDKTGSCGPVSSNGANGVKGFSFKYGNGVWIGRTKSISSRNGFEMIWDPNGWTGTDNNFSIKQDIVGINEWSGYSGSFVQHPELTGLDCIRPCFWVELIRGRPKENTIWTSGSSISFCGVNSDTVGWSWPDGAELPFTIDK

SEQ ID NO: 19005 - protein, 469 aa, synthetic construct
  REGION 1..469: note = neuraminidase__InfluenzaA__ADJ80717
MNPNQKIITIGSVCMTIGMANLILQIGNIISIWISHSIQLGNQNQIETCNQSVITYENNTWVNQTYVNISNTNFAAGQSVVSVKLAGNSSLCPVSGWAVYSKDNSIRIGSKGDVFVIREPFISCSPLECRTFFLTQGALLNDKHSNGTIKDRSPYRTLMSCPIGEVPSPYNSRFESVAWSASACHDGINWLTIGISGPDNGAVAVLKYNGIITDTIKSWRNNILRTQESECACVNGSCFTVMTDGPSDGQASYKIFRIEKGKIVKSVEMNAPNYHYEECSCYPDSSEITCVCRDNWHGSNRPWVSFNQNLEYQIGYICSGIFGDNPRPNDKTGSCGPVSSNGANGVKGFSFKYGNGVWIGRTKSISSRNGFEMIWDPNGWTGTDNNFSIKQDIVGINEWSGYSGSFVQHPELTGLDCIRPCFWVELIRGRPKENTIWTSGSSISFCGVNSDTVGWSWPDGAELPFTIDK

SEQ ID NO: 19006 - protein, 469 aa, synthetic construct
  REGION 1..469: note = neuraminidase__InfluenzaA__ADJ80727
MNPNQKIITIGSVCMTIGMANLILQIGNIISIWISHSIQLGNQNQIETCNQSVITYENNTWVNQTYVNISNTNFAAGQSVVSVKLAGNSSLCPVSGWVIYSKDNSIRIGSKGDVFVIREPFISCSPLECRTFFLTQGALLNDKHSNGTIKDRSPYRTLMSCPIGEVPSPYNSRFESVAWSASACHDGINWLTIGISGPDNGAVAVLKYNGIITDTIKSWRNNILRTQESECACVNGSCFTVMTDGPSDGQASYKIFRIEKGKIVKSVEMNAPNYHYEECSCYPDSSEITCVCRDNWHGSNRPWVSFNQNLEYQIGYICSGIFGDNPRPNDKTGSCGPVSSNGANGVKGFSFKYGNGVWIGRTKSISSRNGFEMIWDPNGWTGTDNNFSIKQDIVGINEWSGYSGSFVQHPELTGLDCIRPCFWVELIRGRPKENTIWTSGSSISFCGVNSDTVGWSWPDGAELPFTIDK

SEQ ID NO: 19007 - protein, 469 aa, synthetic construct; identical to SEQ ID NO: 17505
  REGION 1..469: note = neuraminidase__InfluenzaA__ADJ80737

SEQ ID NO: 19008 - protein, 469 aa, synthetic construct
  REGION 1..469: note = neuraminidase__InfluenzaA__ADJ80747
MNPNQKIITIGSVCMTIGMANLILQIGNIISIWISHSIQLGNQNQIETCNQSVITYENNTWVNQTYVNISNTNFAAGQSVVSVKLAGSSSLCPVSGWAIYSKDNSIRIGSKGDVFVIREPFISCSPLECRTFFLTQGALLNDKHSNGTIKDRSPYRTLMSCPIGEVPSPYNSRFESVAWSASACHDGINWLTIGISGPDNGAVAVLKYNGIITDTIKSWRNNILRTQESECACVNGSCFTVMTDGPSDGQASYKIFRIERGKIVKSVEMNAPNYHYEECSCYPDSSEITCVCRDNWHGSNRPWVSFNQNLEYQIGYICSGIFGDNPRPNDKKGSCGPVSSNGANGVKGFSFKYGNGVWIGRTKSISSRNGFEMIWDPNGWTGTDNNFSIKQDIVEINEWSGYSGSFVQHPELTGLDCIRPCFWVELIRGRPKENTIWTSGSSISFCGVNSDTVGWSWPDGAELPFTIDK

SEQ ID NO: 19009 - protein, 469 aa, synthetic construct; identical to SEQ ID NO: 16738
  REGION 1..469: note = neuraminidase__InfluenzaA__ADJ80757

SEQ ID NO: 19010 - protein, 469 aa, synthetic construct; identical to SEQ ID NO: 16738
  REGION 1..469: note = neuraminidase__InfluenzaA__ADJ80767

SEQ ID NO: 19011 - protein, 469 aa, synthetic construct; identical to SEQ ID NO: 17321
  REGION 1..469: note = neuraminidase__InfluenzaA__ADJ80777

SEQ ID NO: 19012 - protein, 469 aa, synthetic construct; identical to SEQ ID NO: 16738
  REGION 1..469: note = neuraminidase__InfluenzaA__ADJ80787

SEQ ID NO: 19013 - protein, 469 aa, synthetic construct
  REGION 1..469: note = neuraminidase__InfluenzaA__ADJ80797
MNPNQKIITIGSVCMTIGMANLILQIGNIISIWISHSIQLGNKNQIETCNQSVITYENNTWVNQTYVNISNTNFAAGQSVVSVKLAGNSSLCPVSGWAIYSKDNSIRIGSKGDVFVIREPFISCSPLECRTFFLTQGALLNDKHSNGTIKDRSPYRTLMSCPIGEVPSPYNSRFESVAWSASACHDGINWLTIGISGPDNGAVAVLKYNGIITDTIKSWRNNILRTQESECACVNGSCFTVMTDGPSDGQASYKIFRIEKGKIVKSVEMNAPNYHYEECSCYPDSSEITCVCRDNWHGSNRPWVSFNQNLEYQIGYICSGIFGDNPRPNDKKGSCGPVSSNGANGVKGFSFKYGNGVWIGRTKSISSRNGFEMIWDPNGWTGTDNNFSIKQDIVGINEWSGYSGSFVQHPELTGLDCIRPCFWVELIRGRPKENTIWTSGSSISFCGVNSDTVGWSWPDGAELPFTIDK

SEQ ID NO: 19014 - protein, 469 aa, synthetic construct; identical to SEQ ID NO: 17756
  REGION 1..469: note = neuraminidase__InfluenzaA__ADJ80807

SEQ ID NO: 19015 - protein, 469 aa, synthetic construct; identical to SEQ ID NO: 16738
  REGION 1..469: note = neuraminidase__InfluenzaA__ADJ80817

SEQ ID NO: 19016 - protein, 469 aa, synthetic construct; identical to SEQ ID NO: 16738
  REGION 1..469: note = neuraminidase__InfluenzaA__ADJ80827

SEQ ID NO: 19017 - protein, 469 aa, synthetic construct; identical to SEQ ID NO: 18251
  REGION 1..469: note = neuraminidase__InfluenzaA__ADJ80837

SEQ ID NO: 19018 - protein, 469 aa, synthetic construct; identical to SEQ ID NO: 18749
  REGION 1..469: note = neuraminidase__InfluenzaA__ADJ80851

SEQ ID NO: 19019 - protein, 469 aa, synthetic construct
  REGION 1..469: note = neuraminidase__InfluenzaA__ADJ80861
MNPNQKIITIGSVCMTIGMANLILQIGNIISIWISHSIQLGNQNQIETCNQSVITYENNTWVNQTYVNISNTNFAAGQSVVSVKLAGNSSLCPVSGWAIYSKDNSIRIGSKGDVFVIREPFISCSPLECRTFFLTQGALLNDKHSNGTIKDRSPYRTLMSCPIGEVPSPYNSRFESVAWSASACHDGINWLTIGISGPDNGAVAVLKYNGIITDTIKSWRNNILRTQESECACVNGSCFTVMTDGPSDGQASYKIFRIEKGKIVKSVEMNAPNYHYEECSCYPDSSEITCVCRDNWHGSNRPWVSFNQNLEYQIGYICSGIFGDNPRPNDKTGSCGPVSPNGANGVKGFSFKYGNGVWIGRTKSISSRNGFEMIWDPNGWTGTDNNFSIKQDIVGINEWSGYSGSFVQHPELTGLDCIRPCFWVELIRGRPKENTIWTSGSSISFCGVNSDTVGWSWPDGAELPFTIDK

SEQ ID NO: 19020 - protein, 469 aa, synthetic construct; identical to SEQ ID NO: 19013
  REGION 1..469: note = neuraminidase__InfluenzaA__ADJ80871

SEQ ID NO: 19021 - protein, 469 aa, synthetic construct; identical to SEQ ID NO: 16738
  REGION 1..469: note = neuraminidase__InfluenzaA__ADJ80886

SEQ ID NO: 19022 - protein, 469 aa, synthetic construct
  REGION 1..469: note = neuraminidase__InfluenzaA__ADJ80896
MNPNQKIITIGSVCMTIGMANLILQIGNIISIWISHSIQLGNQNQIETCNQSIITYENNTWVNQTYVNISNTNFAAGQSVVSVKLTGNSSLCPVSGWAIYSKDNSIRIGSKGDVFVIREPFISCSPLECRTFFLTQGALLNDKHSNGTIKDRSPYRTLMSCPIGEVPSPYNSRFESVAWSASACHDGINWLTIGISGPDNGAVAVLKYNGIITDTIKSWRNNILRTQESECACVNGSCFTVMTDGPSDGQASYKIFRIEKGKIVKSVEMNAPNYHYEECSCYPDSSEITCVCRDNWHGSNRPWVSFNQNLEYQIGYICSGIFGDNPRPNDKTGSCGPVSSNGANGVKGFSFKYGNGVWIGRTKSISSRNGFEMIWDPNGWTGTDNNFSIKQDIVGINEWSGYSGSFVQHPELTGLDCIRPCFWVELIRGRPKENTIWTSGSSISFCGVNSDTVGWSWPDGAELPFTIDK

SEQ ID NO: 19023 - protein, 469 aa, synthetic construct
  REGION 1..469: note = neuraminidase__InfluenzaA__ADJ80913
MNPNQKIITIGSVCMTIGMANLILQIGNIISIWISHSIQLGNQNQIETCNQSVITYENNTWVNQTYVNISNTNFAAGQSVVSVKLAGSSSLCPVSGWAIYSKDNSIRIGSKGDVFVIREPFISCSPLECRTFFLTQGALLNDKHSNGTIKDRSPYRTLMSCPIGEVPSPYNSRFESVAWSASACHDGINWLTIGISGPDNGAVAVLKYNGIITDTIKSWRNNILRTQESECACVNGSCFTVMTDGPSDGQASYKIFRIEKGKIVKSVEMNAPNYHYEECSCYPDSSEITCVCRDNWHGSNRPWVSFNQNLEYQIGYICSGIFGDNPRPNDKKGSCGPVSSNGANGVKGFSFKYGNGVWIGRTKSISSRSGFEMIWDPNGWTGTDNNFSIKQDIVGINEWSGYSGSFVQHPELTGLDCIRPCFWVELIRGRPKENTIWTSGSSISFCGVNSDTVGWSWPDGAELPFTIDK

SEQ ID NO: 19024 - protein, 469 aa, synthetic construct; identical to SEQ ID NO: 16738
  REGION 1..469: note = neuraminidase__InfluenzaA__ADJ80930

SEQ ID NO: 19025 - protein, 469 aa, synthetic construct; identical to SEQ ID NO: 16738
  REGION 1..469: note = neuraminidase__InfluenzaA__ADJ80950

SEQ ID NO: 19026 - protein, 469 aa, synthetic construct; identical to SEQ ID NO: 18026
  REGION 1..469: note = neuraminidase__InfluenzaA__ADJ80960

SEQ ID NO: 19027 - protein, 469 aa, synthetic construct; identical to SEQ ID NO: 19013
  REGION 1..469: note = neuraminidase__InfluenzaA__ADJ80970

SEQ ID NO: 19028 - protein, 469 aa, synthetic construct; identical to SEQ ID NO: 16738
  REGION 1..469: note = neuraminidase__InfluenzaA__ADJ80980

SEQ ID NO: 19029 - protein, 469 aa, synthetic construct; identical to SEQ ID NO: 19013
  REGION 1..469: note = neuraminidase__InfluenzaA__ADJ80996

SEQ ID NO: 19030 - protein, 469 aa, synthetic construct
  REGION 1..469: note = neuraminidase__InfluenzaA__ADJ81006
MNPNQKIITIGSVCMTIGMANLILQVGNIISIWISHSIQLGNQNQIETCNQSIITYENNTWVNQTYVNISNTNFAAGQSVVSVKLAGNSSLCPVSGWAIYSKDNSIRIGSKGDVFVIREPFISCSPLECRTFFLTQGALLNDKHSNGTIKDRSPYRTLMSCPIGEVPSPYNSRFESVAWSASACHDGINWLTIGISGPDNGAVAVLKYNGIITDTIKSWRNNILRTQESECACVNGSCFTVMTDGPSDGQASYKIFRIEKGKIVKSVEMNAPNYHYEECSCYPDSSEITCVCRDNWHGSNRPWVSFNQNLEYQIGYICSGIFGDNPRPNDKTGSCGPVSSNGANGVKGFSFKYGNGVWIGRTKSTSSRNGFEMIWDPNGWTGTDNNFSIKQDIVGINEWSGYSGSFVQHPELTGLDCIRPCFWVELIRGRPKENTIWTSGSSISFCGVNSDTVGWSWPDGAELPFTIDK

SEQ ID NO: 19031 - protein, 469 aa, synthetic construct; identical to SEQ ID NO: 18749
  REGION 1..469: note = neuraminidase__InfluenzaA__ADJ81016

SEQ ID NO: 19032 - protein, 469 aa, synthetic construct; identical to SEQ ID NO: 18938
  REGION 1..469: note = neuraminidase__InfluenzaA__ADJ81026

SEQ ID NO: 19033 - protein, 469 aa, synthetic construct; identical to SEQ ID NO: 16738
  REGION 1..469: note = neuraminidase__InfluenzaA__ADJ81036

SEQ ID NO: 19034 - protein, 469 aa, synthetic construct
  REGION 1..469: note = neuraminidase__InfluenzaA__ADJ81046
MNPNQKIITIGSVCMTVGMANLILQIGNIISIWISHSIQLGNQNQIETCNQSVITYENNTWVNQTYVNISNTNFAAGQSVVSVKLAGNSSLCPVSGWAIYSKDNSIRIGSKGDVFVIREPFISCSPLECRTFFLTQGALLNDKHSNGTIKDRSPYRTLMSCPIGEVPSPYNSRFESVAWSASACHDGINWLTIGISGPDNGAVAVLKYNGIITDTIKSWRNNILRTQESECACVNGSCFTVMTDGPSDGQASYKIFRIEKGKIVKSVEMNAPNYHYEECSCYPDSSEITCVCRDNWHGSNRPWVSFNQNLEYQIGYICSGIFGDNPRPNDKTGSCGPVSSNGANGVKGFSFKYGNGVWIGRTKSINSRNGFEMIWDPNGWTGTDNNFSIKQDIVGTNEWSGYSGSFVQHPELTGLDCIRPCFWVELIRGRPKENTIWTSGSSISFCGVNSDTVGWSWPDGAELPFTIDK

SEQ ID NO: 19035 - protein, 469 aa, synthetic construct
  REGION 1..469: note = neuraminidase__InfluenzaA__ADJ81056
MNPNQKIITIGSVCMTIGMANLILQIGNIISIWISHSIQLGNQNQIETCNQSVITYENNTWVNQTYVNISNTNFAAGQSVVPVKLAGSSSLCPVSGWAIYSKDNSIRIGSKGDVFVIREPFISCSPLECRTFFLTQGALLNDKHSNGTIKDRSPYRTLMSCPIGEVPSPYNSRFESVAWSASACHDGINWLTIGISGPDNGAVAVLKYNGIITDTIKSWRNNILRTQESECACVNGSCFTVMTDGPSDGQASYKIFRIEKGKIVKSVEMNAPNYHYEECSCYPDSSEITCVCRDNWHGSNRPWVSFNQNLEYQIGYICSGIFGDNPRPNDKKGSCGPVSSNGANGVKGFSFKYGNGVWIGRTKSINSRNGFEMIWDPNGWTGTDNNFSIKQDIVGINEWSGYSGSFVQHPELTGLDCIRPCFWVELIRGRPKENTIWTSGSSISFCGVNSDTVGWSWPDGAELPFTIDK

SEQ ID NO: 19036 - protein, 469 aa, synthetic construct; identical to SEQ ID NO: 18026
  REGION 1..469: note = neuraminidase__InfluenzaA__ADJ81066

SEQ ID NO: 19037 - protein, 469 aa, synthetic construct; identical to SEQ ID NO: 16599
  REGION 1..469: note = neuraminidase__InfluenzaA__ADJ84775

SEQ ID NO: 19038 - protein, 469 aa, synthetic construct
  REGION 1..469: note = neuraminidase__InfluenzaA__ADJ88785
MNPNQKIITIGSVSLTISTICFFMQIAILITTVTLHFKQYEFNSPPNNQVMLCEPTIIERNITEIVYLTNTTIEKEICPKLAEYRNWSKPQCDITGFAPFSKDNSIRLSAGGDIWVTREPYVSCDPDKCYQFALGQGTTLNNVHSNNTVRDRTPYRTLLMNELGVPFHLGTKQVCIAWSSSSCHDGKAWLHVCITGDDKNATASFIYNGRLVDSVVSWSKEILRTQESECVCINGTCTVVMTDGSASGKADTKILFIEEGKIVHTSTLSGSAQHVEECSCYPRYPGVRCVCRDNWKGSNRPIVDINIKDHSVVSSYVCSGLVGDTPRKNDSSSSSHCLDPNNEEGGHGVKGWAFDDGNDVWMGRTISEKSRLGYETFKVIEGWSNHKSKLQINRQVIVDRGNRSGYSGIFSVEGKSCINRCFYVELIRGRKEETEVLWTSNSIVVFCGTSGTYGTGSWPDGADLNLMPI

SEQ ID NO: 19039 - protein, 469 aa, synthetic construct; identical to SEQ ID NO: 16738
  REGION 1..469: note = neuraminidase__InfluenzaA__ADK21716

SEQ ID NO: 19040 - protein, 469 aa, synthetic construct; identical to SEQ ID NO: 16738
  REGION 1..469: note = neuraminidase__InfluenzaA__ADK21726

SEQ ID NO: 19041 - protein, 469 aa, synthetic construct; identical to SEQ ID NO: 16738
  REGION 1..469: note = neuraminidase__InfluenzaA__ADK21736

SEQ ID NO: 19042 - protein, 469 aa, synthetic construct
  REGION 1..469: note = neuraminidase__InfluenzaA__ADK21746
MNPNQKIITIGSVCMTIGMANLILQIGNIISIWISHSIQLGNQNQIETCNQSIITYEHNTWVNQTYVNISNTNFAAGQSVVSVKLAGNSSLCPVSGWAIYSKDNSIRIGSKGDVFVIREPFISCSPLECRTFFLTQGALLNDKHSNGTIKDRSPYRTLMSCPIGEVPSPYNSRFESVAWSASACHDGINWLTIGISGPDNGAVAVLKYNGIITDTIKSWRNNILRTQESECACVNGSCFTVMTDGPSDGQASYKIFRIEKGKIVKSVEMNAPNYHYEECSCYPDSSEITCVCRDNWHGSNRPWVSFNQNLEYQIGYICSGIFGDNPRPNDKTGSCGPVSSNGANGVKGFSFKYGNGVWIGRTKSISSRSGFEMIWDPNGWTGTDNNFSIKQDIVGINEWSGYSGSFVQHPELTGLDCIRPCFWVELIRGRPEENTIWTSGSSISFCGVNSDTVGWSWPDGAELPFTIDK

SEQ ID NO: 19043 - protein, 469 aa, synthetic construct; identical to SEQ ID NO: 16738
  REGION 1..469: note = neuraminidase__InfluenzaA__ADK21756

SEQ ID NO: 19044 - protein, 469 aa, synthetic construct; identical to SEQ ID NO: 16738
  REGION 1..469: note = neuraminidase__InfluenzaA__ADK21766

SEQ ID NO: 19045 - protein, 469 aa, synthetic construct; identical to SEQ ID NO: 18169
  REGION 1..469: note = neuraminidase__InfluenzaA__ADK21776

SEQ ID NO: 19046 - protein, 469 aa, synthetic construct; identical to SEQ ID NO: 16738
  REGION 1..469: note = neuraminidase__InfluenzaA__ADK21786

SEQ ID NO: 19047 - protein, 469 aa, synthetic construct; identical to SEQ ID NO: 16738
  REGION 1..469: note = neuraminidase__InfluenzaA__ADK21796

SEQ ID NO: 19048 - protein, 469 aa, synthetic construct; identical to SEQ ID NO: 16738
  REGION 1..469: note = neuraminidase__InfluenzaA__ADK21806

SEQ ID NO: 19049 - protein, 469 aa, synthetic construct; identical to SEQ ID NO: 16738
  REGION 1..469: note = neuraminidase__InfluenzaA__ADK21816

SEQ ID NO: 19050 - protein, 469 aa, synthetic construct; identical to SEQ ID NO: 18716
  REGION 1..469: note = neuraminidase__InfluenzaA__ADK21826

SEQ ID NO: 19051 - protein, 469 aa, synthetic construct; identical to SEQ ID NO: 18629
  REGION 1..469: note = neuraminidase__InfluenzaA__ADK21836

SEQ ID NO: 19052 - protein, 469 aa, synthetic construct
  REGION 1..469: note = neuraminidase__InfluenzaA__ADK21846
MNPNQKIITIGSVCMTIGMANLILQIGNIISIWISHSIQLGNQNQIETCNQSVITYENNTWVNQTYVNISNTNFAAGQSVVSVKLAGNSSLCPVSGWAIYSKDNSIRIGSKGDVFVIREPFISCSPLECRTFFLTQGALLNDKHSNGTIKDRSPYRTLMSCPIGEVPSPYNSRFESVAWSASACHDGINWLTIGISGPDNGAVAVLKYNGIITDTIKSWRNNILRTQESECACVNGSCFTVMTDGPSDGQASYKIFRIEKGKIVKSVEMNAPNYHYEECSCYPDSSEITCVCRDNWHGSNRPWVSFNQNLEYQIGYICSGIFGDNPRPNDKTGSCGPVSSNGANGVKGFSFKYGNGVWIGRTKSISSRNGFEMIWDPNGWTGTDNNFSMKQDIVGINEWSGYSGSFVQHPELTGLDCIRPCFWVELIRGRPKENTIWASGSSISFCGVNSDTVGWSWPDGAELPFTIDK

SEQ ID NO: 19053 - protein, 469 aa, synthetic construct; identical to SEQ ID NO: 16738
  REGION 1..469: note = neuraminidase__InfluenzaA__ADK21856

SEQ ID NO: 19054 - protein, 469 aa, synthetic construct; identical to SEQ ID NO: 16738
  REGION 1..469: note = neuraminidase__InfluenzaA__ADK21866

SEQ ID NO: 19055 - protein, 469 aa, synthetic construct; identical to SEQ ID NO: 16738
  REGION 1..469: note = neuraminidase__InfluenzaA__ADK21876

SEQ ID NO: 19056 - protein, 469 aa, synthetic construct; identical to SEQ ID NO: 16738
  REGION 1..469: note = neuraminidase__InfluenzaA__ADK21886

SEQ ID NO: 19057 - protein, 469 aa, synthetic construct
  REGION 1..469: note = neuraminidase__InfluenzaA__ADK21896
MNPNQKIITIGSVCMTIGMANLILQIGNIISIWISHSIQLGNQNQIETCNQSVITYENNTWVNQTYVNISNTNFAAGQSVVSVKLAGNSSLCPVSGWAIYSKDNSIRIGSKGDVFVIREPFISCSPLECRTFFLTQGALLNDKHSNGTIKDRSPYRTLMSCPIGEVPSPYNSRFESVAWSASACHDGINWLTIGISGPDNGAVAVLKYNGIITDTIKSWRNNILRTQESECACVNGSCFTVMTDGPSDGQASYKIFRIEKGKIVKSVEMNAPNYHYEECSCYPDSSEITCVCRDNWHGSNRPWVSFNQNLEYQIGYICSGIFGDNPRPNDKTGSCGPVSSNGANGVKGFSFKYGNGVWIGRTKSISSRNGFEMIWDPNGWTGTDNNFSIKQDIVGTNEWSGYSGSFVQHPELTGLDCIRPCFWVELIRGRPKENTIWTSGSSISFCGVSSDTVGWSWPDGAELPFTIDK

SEQ ID NO: 19058 - protein, 469 aa, synthetic construct
  REGION 1..469: note = neuraminidase__InfluenzaA__ADK21906
MNPNQKIITIGSVCMTIGMANLILQIGNIISIWISHSIQLGNQNQIETCNQSVITYENNTWVNQTYVNISNTNFAAGQSVVSVKLAGNSSLCPVSGWAIYSKDNSIRIGSKGDVFVIREPFISCSPLECRTFFLTQGALLNDKHSNGTIKDRSPYRTLMSCPIGEVPSPYNSRFESVAWSASACHDGINWLTIGISGPDNGAVAVLKYNGIITDTIKSWRNNILRTQESECACVNGSCFTVMTDGPSDGQASYKIFRIEKGKIVKSVEMNAPNYHYEECSCYPDSSEITCVCRDNWHGSNRPWISFNQNLEYQIGYICSGIFGDNPRPNDKTGSCGPVSSNGANGVKGFSFKYGNGVWIGRTKSIGSRNGFEMIWDPNGWTGTDNNFSIKQDIVGINEWSGYSGSFVQHPELTGLDCIRPCFWVELIRGRPKENTIWTSGSSISFCGVNSDTVGWSWPDGAELPFTIDK

SEQ ID NO: 19059 - protein, 469 aa, synthetic construct; identical to SEQ ID NO: 16738
  REGION 1..469: note = neuraminidase__InfluenzaA__ADK21916

SEQ ID NO: 19060 - protein, 469 aa, synthetic construct; identical to SEQ ID NO: 16738
  REGION 1..469: note = neuraminidase__InfluenzaA__ADK21926

SEQ ID NO: 19061 - protein, 469 aa, synthetic construct; identical to SEQ ID NO: 16738
  REGION 1..469: note = neuraminidase__InfluenzaA__ADK21936

SEQ ID NO: 19062 - protein, 469 aa, synthetic construct
  REGION 1..469: note = neuraminidase__InfluenzaA__ADK21946
MNPNQKIITIGSVCMTIGMANLILQIGNIISIWISHSIQLGNQNQIETCNQSVITYENNTWVNQTYVNISNTNFAAGQSVVSVKLAGNSSLCPVSGWAIYSKDNSIRIGSKGDVFVIREPFISCSPLECRTFFLTQGALLNDKHSNGTIKDRSPYRTLMSCPIGEVPSPYNSRFESVAWSASACHDGINWLTIGISGPDNGAVAVLKYNGIITDTIKSWRNNILRTQESECACVNGSCFTVMTDGPSDGQASYKIFRIEKGKIVKSVEMNAPNYHYEECSCYPDSSEITCVCRDNWHGSNRPWVSFNQNLEYQIGYICSGIFGDNPRPNDKTGSCGPVSSNGANGVKGFSFKYGNGVWIGRTKSISSRNGFEMIWDPNGWTGTDNNFSIKQDIVGINEWSGYSGSFVQHPELTGMDCIRPCFWVELIRGRPKENTIWTSGSSISFCGVNSDTVGWSWPDGAELPFTIDK

SEQ ID NO: 19063 - protein, 469 aa, synthetic construct
  REGION 1..469: note = neuraminidase__InfluenzaA__ADK21956
MNPNQKIITIGSVCMTIGMANLILQIGNIISIWISHSIQLGNQNQIETCNQSVITYENNTWVNQTYVNISNTNFAAGQSVVSVKLAGNSSLCPVSGWAIYSKDNSIRIGSKGDVFVIREPFISCSPLECRTFFLTQGALLNDKHSNGTIKDRSPYRTLMSCPIGEVPSPYNSRFESVAWSASACHDGINWLTIGISGPDNGAVAVLKYNGIITDTIKSWRNNILRTQESECACVNGSCFTVMTDGPSDGQASYKIFKIEKGKIVKSVEMNAPNYHYEECSCYPDSSEITCVCRDNWHGSNRPWVSFNQNLEYQIGYICSGIFGDNPRPNDKTGSCGPVSSNGANGVKGFSFKYGNGVWIGRTKSISSRNGFEMIWDPNGWTGTDNNFSIKQDIVGINEWSGYSGSFVQHPELTGLDCIRPCFWVELIRGRPKENTIWTSGSSISFCGVNSNTVGWSWPDGAELPFTIDK

SEQ ID NO: 19064 - protein, 469 aa, synthetic construct; identical to SEQ ID NO: 16738
  REGION 1..469: note = neuraminidase__InfluenzaA__ADK32393

SEQ ID NO: 19065 - protein, 469 aa, synthetic construct; identical to SEQ ID NO: 16738
  REGION 1..469: note = neuraminidase__InfluenzaA__ADK32403

SEQ ID NO: 19066 - protein, 469 aa, synthetic construct; identical to SEQ ID NO: 16738
  REGION 1..469: note = neuraminidase__InfluenzaA__ADK32413

SEQ ID NO: 19067 - protein, 469 aa, synthetic construct
  REGION 1..469: note = neuraminidase__InfluenzaA__ADK32423
MNPNQKIITIGSVCMTIGMTNLILQIGNIISIWISHSIQLGNQNQIETCNQSVITYENNTWVNQTYVNISNTNFAAGQSVVSVKLAGNSSLCPVSGWAIYSKDNSIRIGSKGDVFVIREPFISCSPLECRTFFLTQGALLNDKHSNGTIKDRSPYRTLMSCPIGEVPSPYNSRFESVAWSASACHDGINWLTIGISGPDNGAVAVLKYNGIITDTIKSWRNNILRTQESECACVNGSCFTVMTDGPSDGQASYKIFRIEKGKIVKSVEMNAPNYHYEECSCYPDSSEITCVCRDNWHGSNRPWVSFNQNLEYQIGYICSGIFGDNPRPNDKTGSCGPVSSNGANGVKGFSFKYGNGVWIGRTKSISSRNGFEMIWDPNGWTGTDNNFSIKQDIVGINEWSGYSGSFVQHPELTGLDCIRPCFWVELIRGRPKENTIWTSGSSISFCGVNSDTVGWSWPDGAELPFTIDK

SEQ ID NO: 19068 - protein, 469 aa, synthetic construct; identical to SEQ ID NO: 16738
  REGION 1..469: note = neuraminidase__InfluenzaA__ADK32433

SEQ ID NO: 19069 - protein, 469 aa, synthetic construct; identical to SEQ ID NO: 16738
  REGION 1..469: note = neuraminidase__InfluenzaA__ADK32443

SEQ ID NO: 19070 - protein, 469 aa, synthetic construct
  REGION 1..469: note = neuraminidase__InfluenzaA__ADK32453
MNPNQKIITIGSVCMTIGMANLILQIGNIISIWISHSIQLGNQNQIETCNQSVITYENNTWVNQTYVNISNTNFAAGQSVVSVKLSGNSSLCPVSGWAIYSKDNSVRIGSKGDVFVIREPFISCSPLECRTFFLTQGALLNDKHSNGTIKDRSPYRTLMSCPIGEVPSPYNSRFESVAWSASACHDGINWLTIGISGPDNGAVAVLKYNGIITDTIKSWRNNILRTQESECACVNGSCFTVMTDGPSDGQASYKIFRIEKGKIVKSVEMNAPNYHYEECSCYPDSSEITCVCRDNWHGSNRPWVSFNQNLEYQIGYICSGIFGDNPRPNDKTGSCGPVSSNGANGVKGFSFKYGNGVWIGRTKSISSRNGFEMIWDPNGWTGTDNNFSIKQDIVGINEWSGYSGSFVQHPELTGLDCIRPCFWVELIRGRPKENTIWTSGSSISFCGVNSDTVGWSWPDGAELPFTIDK

SEQ ID NO: 19071 - protein, 469 aa, synthetic construct
  REGION 1..469: note = neuraminidase__InfluenzaA__ADK32463
MNPNQKIITIGSVCMTIGMANLILQIGNIISIWISHSIQLGNQNQIETCNQSVITYENNTWVNQTYVNISNTNFAAGQSVVSVKLAGNSSLCPVSGWAIYSKDNSIRIGSKGDVFVIREPFISCSPLECRTFFLTQGALINDKHSNGTIKDRSPYRTLMSCPIGEVPSPYNSRFESVAWSASACHDGINWLTIGISGPDNGAVAVLKYNGIITDTIKSWRNNILRTQESECACVNGSCFTVMTDGPSDGQASYKIFRIEKGKIVKSVEMNAPNYHYEECSCYPDSSEITCVCRDNWHGSNRPWVSFNQNLEYQIGYICSGIFGDNPRPNDKTGSCGPVSSNGANGVKGFSFKYGNGVWIGRTKSISSRNGFEMIWDPNGWTGTDNNFSIKQDIVGINEWSGYSGSFVQHPELTGLDCIRPCFWVELIRGRPKENTIWTSGSSISFCGVNSDTVGWSWPDGAELPFTIDK

SEQ ID NO: 19072 - protein, 469 aa, synthetic construct; identical to SEQ ID NO: 16738
  REGION 1..469: note = neuraminidase__InfluenzaA__ADK32473

SEQ ID NO: 19073 - protein, 469 aa, synthetic construct; identical to SEQ ID NO: 16738
  REGION 1..469: note = neuraminidase__InfluenzaA__ADK32483

SEQ ID NO: 19074 - protein, 469 aa, synthetic construct; identical to SEQ ID NO: 16738
  REGION 1..469: note = neuraminidase__InfluenzaA__ADK32493

SEQ ID NO: 19075 - protein, 469 aa, synthetic construct; identical to SEQ ID NO: 18651
  REGION 1..469: note = neuraminidase__InfluenzaA__ADK32505

SEQ ID NO: 19076 - protein, 469 aa, synthetic construct
  REGION 1..469: note = neuraminidase__InfluenzaA__ADK32640
MNPNQKIITIGSVCMTIGMANLILQIGNIISIWISHSIQLGNQNQIETCNQSVITYENNTWVNQTYVNISNTNFAAGQSVASVKLAGNSSLCPVSGWAIYSKDNSIRIGSKGDVFVIREPFISCSPLECRTFFLTQGALLNDKHSNGTIKDRSPYRTLMSCPIGEVPSPYNSRFESVAWSASACHDGINWLTIGISGPDNGAVAVLKYNGIITDTIKSWRNNILRTQESECACVNGSCFTVMTDGPSDGQASYKIFRIEKGKIVKSVEMNAPNYHYEECSCYPDSSEITCVCRDNWHGSNRPWVSFNQNLEYQIGYICSGIFGDNPRPNDKTGSCGPVSSNGANGVKGFSFKYGNGVWIGRTKSISSRNGFEMIWDPNGWTGTDNNFSIKQDIVGINEWSGYSGSFVQHPELTGLDCIRPCFWVELIRGRPKENTIWTSGSSISFCGVNSDTVGWSWPDGAELPFTIDK

SEQ ID NO: 19077 - protein, 469 aa, synthetic construct; identical to SEQ ID NO: 16738
  REGION 1..469: note = neuraminidase__InfluenzaA__ADK32650

SEQ ID NO: 19078 - protein, 469 aa, synthetic construct; identical to SEQ ID NO: 16738
  REGION 1..469: note = neuraminidase__InfluenzaA__ADK32660

SEQ ID NO: 19079 - protein, 469 aa, synthetic construct; identical to SEQ ID NO: 16738
  REGION 1..469: note = neuraminidase__InfluenzaA__ADK32670

SEQ ID NO: 19080 - protein, 469 aa, synthetic construct
  REGION 1..469: note = neuraminidase__InfluenzaA__ADK32680
MNPNQKIITIGSVCMTIGMANLILQIGNIISIWISHSIQLGNQNQIETCNQSVITYKNNTWVNQTYVNISNTNFAAGQSVVSVKLAGNSSLCPVSGWAIYSKDNSIRIGSKGDVFVIREPFISCSPLECRTFFLTQGALLNDKHSNGTIKDRSPYRTLMSCPIGEVPSPYNSRFESVAWSASACHDGINWLTIGISGPDNGAVAVLKYNGIITDTIKSWRNNILRTQESECACVNGSCFTVMTDGPSDGQASYKIFRIEKGKIVKSVEMNAPNYHYEECSCYPDSSEITCVCRDNWHGSNRPWVSFNQNLEYQIGYICSGIFGDNPRPNDKTGSCGPVSSNGANGVKGFSFKYGNGVWIGRTKSISSRNGFEMIWDPNGWTGTDNNFSIKQDIVGINEWSGYSGSFVQHPELTGLDCIRPCFWVELIRGRPKENTIWTSGSSISFCGVNSDTVGWSWPDGAELPFTIDK

SEQ ID NO: 19081 - protein, 469 aa, synthetic construct; identical to SEQ ID NO: 16738
  REGION 1..469: note = neuraminidase__InfluenzaA__ADK32690

SEQ ID NO: 19082 - protein, 469 aa, synthetic construct; identical to SEQ ID NO: 16738
  REGION 1..469: note = neuraminidase__InfluenzaA__ADK32700

SEQ ID NO: 19083 - protein, 469 aa, synthetic construct; identical to SEQ ID NO: 16738
  REGION 1..469: note = neuraminidase__InfluenzaA__ADK32779

SEQ ID NO: 19084 - protein, 469 aa, synthetic construct; identical to SEQ ID NO: 16738
  REGION 1..469: note = neuraminidase__InfluenzaA__ADK33614

SEQ ID NO: 19085 - protein, 469 aa, synthetic construct; identical to SEQ ID NO: 16738
  REGION 1..469: note = neuraminidase__InfluenzaA__ADK33624

SEQ ID NO: 19086 - protein, 469 aa, synthetic construct; identical to SEQ ID NO: 16738
  REGION 1..469: note = neuraminidase__InfluenzaA__ADK33634

SEQ ID NO: 19087 - protein, 469 aa, synthetic construct
  REGION 1..469: note = neuraminidase__InfluenzaA__ADK33644
MNPNQKIITIGSVCMTIGMANLILQIGNIISIWISHSIQLGNQNQIETCNQSVITYENNTWVNQTYVNISNTNFAAGQSVVSVKLAGNSSLCPVSGWAIYSKDNSIRIGSKGDVFVIREPFISCSPLECRTFFLTQGALLNDKHSNGTIKDRSPYRTLMSCPIGEVPSPYNSRFESVAWSASACHDGINWLTIGISGSDNGAVAVLKYNGIITDTIKSWRNNILRTQESECACVNGSCFTVMTDGPSDGQASYKIFRIEKGKIVKSVEMNAPNYHYEECSCYPDSSEITCVCRDNWHGSNRPWVSFNQNLEYQIGYICSGIFGDNPRPNDKTGSCGPVSSNGANGVKGFSFKYGNGVWIGRTKSISSRNGFEMIWDPNGWTGTDNNFSIKQDIVGINEWSGYSGSFVQHPELTGLDCIRPCFWVELIRGRPKENTIWTSGSSISFCGVNSDTVGWSWPDGAELPFTIDK

SEQ ID NO: 19088 - protein, 469 aa, synthetic construct; identical to SEQ ID NO: 18469
  REGION 1..469: note = neuraminidase__InfluenzaA__ADK33654

SEQ ID NO: 19089 - protein, 469 aa, synthetic construct; identical to SEQ ID NO: 18469
  REGION 1..469: note = neuraminidase__InfluenzaA__ADK33664

SEQ ID NO: 19090 - protein, 469 aa, synthetic construct; identical to SEQ ID NO: 16738
  REGION 1..469: note = neuraminidase__InfluenzaA__ADK33674

SEQ ID NO: 19091 - protein, 469 aa, synthetic construct; identical to SEQ ID NO: 16738
  REGION 1..469: note = neuraminidase__InfluenzaA__ADK33684

SEQ ID NO: 19092 - protein, 469 aa, synthetic construct; identical to SEQ ID NO: 18089
  REGION 1..469: note = neuraminidase__InfluenzaA__ADK33694

SEQ ID NO: 19093 - protein, 469 aa, synthetic construct; identical to SEQ ID NO: 16738
  REGION 1..469: note = neuraminidase__InfluenzaA__ADK33704

SEQ ID NO: 19094 - protein, 469 aa, synthetic construct; identical to SEQ ID NO: 16738
  REGION 1..469: note = neuraminidase__InfluenzaA__ADK33714

SEQ ID NO: 19095 - protein, 469 aa, synthetic construct; identical to SEQ ID NO: 16738
  REGION 1..469: note = neuraminidase__InfluenzaA__ADK33744

SEQ ID NO: 19096 - protein, 469 aa, synthetic construct
  REGION 1..469: note = neuraminidase__InfluenzaA__ADK33754
MNPNQKIITIGSVCMTIGMANFILQIGNIISIWISHSIQLGNQNQIETCNQSVITYENNTWVNQTYVNISNTNFAAGQSVVSVKLAGNSSLCPVSGWAIYSKDNSIRIGSKGDVFVIREPFISCSPLECRTFFLTQGALLNDKHSNGTIKDRSPYRTLMSCPIGEVPSPYNSRFESVAWSASACHDGINWLTIGISGPDNGAVAVLKYNGIITDTIKSWRNNILRTQESECACVNGSCFTVMTDGPSDGQASYKIFRIEKGKIVKSVEMNAPNYHYEECSCYPDSSEITCVCRDNWHGSNRPWVSFNQNLEYQIGYICSGIFGDNPRPNDKTGSCGPVSSNGANGVKGFSFKYGNGVWIGRTKSISSRNGFEMIWDPNGWTGTDNNFSIKQDIVGINEWSGYSGSFVQHPELTGLDCIRPCFWVELIRGRPKENTIWTSGSSISFCGVNSDTVGWSWPDGAELPFTIDK

SEQ ID NO: 19097 - protein, 469 aa, synthetic construct
  REGION 1..469: note = neuraminidase__InfluenzaA__ADK33764
MNPNQKIITIGSVCMTIGMANFILQIGNIISIWISHSIQLGNQNQIETCNQSVITYENNTWVNQTYVNISNTNFAAGQSVVSVKLAGNSSLCPVSGWAIYSKDNSIRIGSKGDVFVIREPFISCSPLECRTFFLTQGALLNDKHSNGTIKDRSPYRTLMSCPIGEVPSPYNSRFESVAWSASACHDGINWLTIGISGPDNGAVAVLKYNGIITDTIKSWRNNILRTQESECACVNGSCFTVMTDGPSDGQASYKIFRIEKGKIVKSVEMNAPNYHYEECSCYPDSSEITCVCRDNWHGSNRPWVSFNQNLEYQMGYICSGIFGDNPRPNDKTGSCGPVSSNGANGVKGFSFKYGNGVWIGRTKSISSRNGFEMIWDPNGWTGTDNNFSIKQDIVGINEWSGYSGSFVQHPELTGLDCIRPCFWVELIRGRPKENTIWTSGSSISFCGVNSDTVGWSWPDGAELPFTIDK

SEQ ID NO: 19098 - protein, 469 aa, synthetic construct
  REGION 1..469: note = neuraminidase__InfluenzaA__ADK33774
MNPNQKIITIGSVCMTIGMANLILQIGNIISIWISHSIQLGNQNQIETCNQSVITYENNTWVNQTYVNISNTNFAAGQSVVSVKLVGNSSLCPVSGWAIYSKDNSIRIGSKGDVFVIREPFISCSPLECRTFFLTQGALLNDKHSNGTIKDRSPYRTLMSCPIGEVPSPYNSRFESVAWSASACHDGINWLTIGISGPDNGAVAVLKYNGIITDTIKSWRNNILRTQESECACVNGSCFTVMTDGPSDGQASYKIFRIEKGKIVKSVEMNAPNYHYEECSCYPDSSEITCVCRDNWHGSNRPWVSFNQNLEYQMGYICSGIFGDNPRPNDKTGSCGPVSSNGANGVKGFSFKYGNGVWIGRTKSISSRNGFEMIWDPNGWTGTDNNFSIKQDIVGINEWSGYSGSFVQHPELTGLDCIRPCFWVELIRGRPKENTIWTSGSSISFCGVNSDTVGWSWPDGAELPFTIDK

SEQ ID NO: 19099 - protein, 469 aa, synthetic construct; identical to SEQ ID NO: 17712
  REGION 1..469: note = neuraminidase__InfluenzaA__ADK33784

SEQ ID NO: 19100 - protein, 469 aa, synthetic construct; identical to SEQ ID NO: 16738
  REGION 1..469: note = neuraminidase__InfluenzaA__ADK33794

SEQ ID NO: 19101 - protein, 469 aa, synthetic construct; identical to SEQ ID NO: 16738
  REGION 1..469: note = neuraminidase__InfluenzaA__ADK33804

SEQ ID NO: 19102 - protein, 469 aa, synthetic construct
  REGION 1..469: note = neuraminidase__InfluenzaA__ADK33814
MNPNQKIITIGSVCMTIGMANLILQIGNIISIWISHSIQLGNQNQIETCNQSVITYENNTWVNKTYVNISNTNFAAGQSVVSVKLAGNSSLCPVSGWAIYSKDNSIRIGSKGDVFVIREPFISCSPLECRTFFLTQGALLNDKHSNGTIKDRSPYRTLMSCPIGEVPSPYNSRFESVAWSASACHDGINWLTIGISGPDNGAVAVLKYNGIITDTIKSWRNNILRTQESECACVNGSCFTVMTDGPSDGQASYKIFRIEKGKIVKSVEMNAPNYHYEECSCYPDSSEITCVCRDNWHGSNRPWVSFNQNLEYQMGYICSGIFGDNPRPNDKTGSCGPVSSNGANGVKGFSFKYGNGVWIGRTKSISSRNGFEMIWDPNGWTGTDNNFSIKQDIVGINEWSGYSGSFVQHPELTGLDCIRPCFWVELIRGRPKENTIWTSGSSISFCGVNSDTVGWSWPDGAELPFTIDK

SEQ ID NO: 19103 - protein, 469 aa, synthetic construct
  REGION 1..469: note = neuraminidase__InfluenzaA__ADK33824
MNPNQKIITIGSVCMTIGMANLILQIGNIISIWISHSIQLGNQNQIETCNQSVITYENNTWVNQTYINISNTNFAAGQSVVSVKLAGNSSLCPVSGWAIYSKDNSIRIGSKGDVFVIREPFISCSPLECRTFFLTQGALLNDKHSNGTIKDRSPYRTLMSCPIGEVPSPYNSRFESVAWSASACHDGINWLTIGISGPDNGAVAVLKYNGIITDTIKSWRNNILRTQESECACVNGSCFTVMTDGPSDGQASYKIFRIEKGKIVKSVEMNAPNYHYEECSCYPDSSEITCVCRDNWHGSNRPWVSFNQNLEYQIGYICSGIFGDNPRPNDKTGSCGPVSSNGANGVKGFSFKYGNGVWIGRTKSISSRNGFEMIWDPNGWTGTDNNFSIKQDIVGINEWSGYSGSFVQHPELTGLDCIRPCFWVELIRGRPKENTIWTSGSSISFCGVNSDTVGWSWPDGAELPFTIDK

SEQ ID NO: 19104 - protein, 469 aa, synthetic construct; identical to SEQ ID NO: 17915
  REGION 1..469: note = neuraminidase__InfluenzaA__ADK33834

SEQ ID NO: 19105 - protein, 469 aa, synthetic construct
  REGION 1..469: note = neuraminidase__InfluenzaA__ADK33844
MNPNQKIITIGSVCMTIGMANLILQIGNIISIWISHSIQLGNQNQIETCNQSVITYENNTWVNQTYVNISNTNFAAGQSVVSAKLAGNSPLCPVSGWAIYSKDNSIRIGSKGDVFVIREPFISCSPLECRTFFLTQGALLNDKHSNGTIKDRSPYRTLMSCPIGEVPSPYNSRFESVAWSASACHDGINWLTIGISGPDNGAVAVLKYNGIITDTIKSWRNNILRTQESECACVNGSCFTVMTDGPSDGQASYKIFRIEKGKIVKSVEMNAPNYHYEECSCYPDSSEITCVCRDNWHGSNRPWVSFNQNLEYQIGYICSGIFGDNPRPNDKTGSCGPVSSNGANGVKGFSFKYGNGVWIGRTKSISSRNGFEMIWDPNGWTGTDNNFSIKQDIVGINEWSGYSGSFVQHPELTGLDCIRPCFWVELIRGRPKENTIWTSGSSISFCGVNSDTVGWSWPDGAELPFTIDK

SEQ ID NO: 19106 - protein, 469 aa, synthetic construct; identical to SEQ ID NO: 17915
  REGION 1..469: note = neuraminidase__InfluenzaA__ADK33854

SEQ ID NO: 19107 - protein, 469 aa, synthetic construct; identical to SEQ ID NO: 18629
  REGION 1..469: note = neuraminidase__InfluenzaA__ADK33864

SEQ ID NO: 19108 - protein, 469 aa, synthetic construct
  REGION 1..469: note = neuraminidase__InfluenzaA__ADK33874
MNPNQKIITIGSVCMTIGMANLILQIGNIISIWISHSIQLGNQNQIETCNQSVITYENNTWVNQTYVNISNTNFAAGQSVVSVKLAGNSSLCPVSGWAIYSKDNSIRIGSKGDVFVIREPFISCSPLECRTFFLTQGALLNDKHSNGTIKDRSPYRTLMSCPIGEVPSPYNSRFESVAWSASACHDGINWLTIGISGPDNGAVAVLKYNGIITDTIKSWRNNILRTQESECACVNGSCFTVMTDGPSDGQASYKIFRIEKGKIVKSVEMNAPNYHYEECSCYPDSSEITCVCRDNWHGSNRPWVSFNQNLEYQIGYLCSGIFGDNPRPNDKTGSCGPVSSNGANGVKGFSFKYGNGVWIGRTKSISSRNGFEMIWDPNGWTGTDNNFSIKQDIVGINEWSGYSGSFVQHPELTGLDCIRPCFWVELIRGRPKENTIWTSGSSISFCGVNSDTVGWSWPDGAELPFTIDK

SEQ ID NO: 19109 - protein, 469 aa, synthetic construct; identical to SEQ ID NO: 16738
  REGION 1..469: note = neuraminidase__InfluenzaA__ADK33884

SEQ ID NO: 19110 - protein, 469 aa, synthetic construct; identical to SEQ ID NO: 17915
  REGION 1..469: note = neuraminidase__InfluenzaA__ADK33894

SEQ ID NO: 19111 - protein, 469 aa, synthetic construct; identical to SEQ ID NO: 17915
  REGION 1..469: note = neuraminidase__InfluenzaA__ADK33904

SEQ ID NO: 19112 - protein, 469 aa, synthetic construct; identical to SEQ ID NO: 18695
  REGION 1..469: note = neuraminidase__InfluenzaA__ADK33914

SEQ ID NO: 19113 - protein, 469 aa, synthetic construct
  REGION 1..469: note = neuraminidase__InfluenzaA__ADK33924
MNPNQKIITIGSVCMTIGMANLILQIGNIISIWISHSIQLGNQNQIETCNQSVITYENNTWVNQTYVNISNTNFAAGQSVVSVKLAGNSSLCPVSGWAIYSKDNSIRIGSKGDVFVIREPFISCSPLECRTFFLTQGALLNDKHSNGTIKDRSPYRTLMSCPIGEVPSPYNSRFESVAWSASACHDGINWLTIGISGPDNGAVAVLKYNGIITDTIKSWRNNILRTQESECACVNGSCFTVMTDGPSDGQASYKIFRIEKGKIVKSVEMNAPNYHYEECSCYPDSSEITCVCRDNWHGSNRPWVSFNQNLEYQIGYICSGIFGDNPRPNDKTGSCGPVSSNGANGVKGFSFKYGNGVWIGRTKSISSRNGFEMIWDPNGWTGTDNNFSIKQDIVGINEWSGYSGSFVQHPELTGLDCIRPCFWVELIRGRPKENTIWTSGSSISFCGVNSNTVGWSWPDGAELPFTIDK

SEQ ID NO: 19114 - protein, 469 aa, synthetic construct; identical to SEQ ID NO: 16738
  REGION 1..469: note = neuraminidase__InfluenzaA__ADK33934

SEQ ID NO: 19115 - protein, 469 aa, synthetic construct; identical to SEQ ID NO: 16738
  REGION 1..469: note = neuraminidase__InfluenzaA__ADK33944

SEQ ID NO: 19116 - protein, 469 aa, synthetic construct; identical to SEQ ID NO: 18695
  REGION 1..469: note = neuraminidase__InfluenzaA__ADK33954

SEQ ID NO: 19117 - protein, 469 aa, synthetic construct; identical to SEQ ID NO: 16738
  REGION 1..469: note = neuraminidase__InfluenzaA__ADK33964

SEQ ID NO: 19118 - protein, 469 aa, synthetic construct; identical to SEQ ID NO: 17845
  REGION 1..469: note = neuraminidase__InfluenzaA__ADK33974

SEQ ID NO: 19119 - protein, 469 aa, synthetic construct; identical to SEQ ID NO: 16738
  REGION 1..469: note = neuraminidase__InfluenzaA__ADK33984

SEQ ID NO: 19120 - protein, 469 aa, synthetic construct
  REGION 1..469: note = neuraminidase__InfluenzaA__ADK39016
MNPNQKIITIGSVCITIGMANLILQIGNIISIWISHSIQLGNQNQIETCNQSVITYENNTWVNQTYVNISNTNFAAGQSVVSVKLAGNSSLCPVSGWAIYSKDNSIRIGSKGDVFVIREPFISCSPLECRTFFLTQGALLNDKHSNGTIKDRSPYRTLMSCPIGEVPSPYNSRFESVAWSASACHDGISWLTIGISGPDNGAVAVLKYNGIITDTIKSWRNNILRTQESECACVNGSCFTVMTDGPSDGQASYKIFRIEKGKIVKSVEMNAPNYHYEECSCYPDSSEITCVCRDNWHGSNRPWVSFNQNLEYQIGYICSGIFGDNPRPNDKTGSCGPVSSNGANGVKGFSFKYGNGVWIGRTKSISSRNGFEMIWDPDGWTGTDNNFSIKQDIVGINEWSGYSGSFVQHPELTGLDCIRPCFWVELIRGRPKENTIWTSGSSISFCGVNSDTVGWSWPDGAELPFTIDK

SEQ ID NO: 19121 - protein, 469 aa, synthetic construct; identical to SEQ ID NO: 16599
  REGION 1..469: note = neuraminidase__InfluenzaA__ADK45315

SEQ ID NO: 19122 - protein, 469 aa, synthetic construct
  REGION 1..469: note = neuraminidase__InfluenzaA__ADK45413
MNPNQKIITIGSVSLTISTICFFMQIAILITTVTLHFKQYEFNSPPNNQVMLYEPTIIERNITEIVYLTNTTIEKEICPKLAEYRNWSKPQCDITGFAPFSKDNSIRLSAGGDIWVTREPYVSCDPDKCYQFALGQGTTLNNVHSNNTVRDRTPYRTLLMNELGVPFHLGTKQVCIAWSSSSCHDGKAWLHVCITGDDKNATASFIYNGRLVDSVVSWSKDILRTQESECVCINGTCTVVMTDGSASGKADTKILFIEEGKIVHTSTLSGSAQHVEECSCYPRYPGVRCVCRDNWKGSNRPIVDINIKDHSIASSYVCSGLVGDTPRKNDSSSSSHCLDPNNEEGGHGVKGWAFDDGNDVWMGRTISEKSRLGYETFKVIEGWSNPKSKLQINRQVIVDRGNRSGYSGIFSVEGKSCINRCFYVELIRGRKEETEVLWTSNSIVVFCGTSGTYGTGSWPDGANINLMPI

SEQ ID NO: 19123 - protein, 469 aa, synthetic construct
  REGION 1..469: note = neuraminidase__InfluenzaA__ADK45424
MNPNQKIITIGSVSLTISTICFFMQIAILITTVTLHFKQYEFNSPPNNQVMLCEPTIIERNITEIVYLTNTTIEKEICPKLAEYRNWSKPQCDITGFAPFSKDNSIRLSAGGDIWVTREPYVSCDPDKCYQFALGQGTTLNNVHSNNTVRDRTPYRTLLMNELGVPFHLGTKQVCIAWSSSSCHDGKAWLHVCITGDDKNATASFIYNGRLVDSVVSWSKEILRTQESECVCINGTCTVVMTDGSASGKADTKILFIEEGKIVHTSTLSGSAQHVEECSCYPRYPGVRCVCRDNWKGSNRPIVDINIKDHSIVSSYLCSGLVGDTPRKNDSSSSSHCLDPNNEEGGHGVKGWAFDDGNDVWMGRTISEKSRLGYETFKVIEGWSNPKSKLQINRQVIVDRGNRSGYSGIFSVEGKSCINRCFYVELIRGRKEETEVLWTSNSIVVFCGTSGTYGTGSWPDGADINLMPI

SEQ ID NO: 19124 - protein, 469 aa, synthetic construct; identical to SEQ ID NO: 17905
  REGION 1..469: note = neuraminidase__InfluenzaA__ADK45446

SEQ ID NO: 19125 - protein, 469 aa, synthetic construct
  REGION 1..469: note = neuraminidase__InfluenzaA__ADK45457
MNPNQKIITIGSVSLTISTICFFMQIAILITTVTLHFKQYEFNSPPNNQVMLCEPTIIERNITEIVYLTNTTIEKEICPKLAEYRNWSKPQCDITGFAPFSKDNSIRLSAGGDIWVTREPYVSCDPDKCYQFALGQGTTLNNVHSNNTVRDRTPYRTLLMNELGVPFHLGTKQVCIAWSSSSCHDGKAWLHVCITGDDKNATASFIYNGRLVDSVVSWSKEILRTQESECVCINGTCTVVMTDGSASGKADTKILFIEEGKIVHTSTLSGSAQHVEECSCYPRYPGVRCVCRDNWKGSNRPIVDINIKDHSIVSSYVCSGLVGDTPRKNDSSGSSHCLDPNNEEGGHGVKGWAFDDGNDVWMGRTISEKSRLGYETFKVIEGWSNPKSKLQINRQVIVDRGNRSGYSGIFSVEGKSCINRCFYVELIRGRKEETEVLWTSNSIVVFCGTSGTYGTGSWPDGADINLMPI

SEQ ID NO: 19126 - protein, 469 aa, synthetic construct
  REGION 1..469: note = neuraminidase__InfluenzaA__ADK45479
MNPNQKIITIGSVSLTISTICFFMQIAILITTVTLHFKQYEFNSPPNNQVMLCEPTIIERNITEIVYLTNTTIEKEICPKLAEYRNWSKPQCDITGFAPFSKDNSIRLSAGGDIWVTREPYVSCDPDKCYQFALGQGTTLNNVHSNNTVRDRTPYRTLLMNELGVPFHLGTKQVCIAWSSSSCHDGKAWLHVCITGDDKNATASFIYNGRLVDSVVSWSKDILRTQESECVCINGTCTVVMTDGSASGKADTKILFIEEGKVVHTSTLSGSAQHVEECSCYPRYPGVRCVCRDNWKGSNRPIVDINIKDHSIVSSYVCSGLVGDTPRKNDSSSSSHCLDPNNEEGGHGVKGWAFDDGNDVWMGRTISEKSRLGYETFKVIEGWSNHKSKLQINRQVIVDRGNRSGYSGIFSVEGKSCINRCFYVELIRGRKEEAEVLWTSNSIVVFCGTSGTYGTGSWPDGADLNLMPI

SEQ ID NO: 19127 - protein, 469 aa, synthetic construct; identical to SEQ ID NO: 16738
  REGION 1..469: note = neuraminidase__InfluenzaA__ADK48799

SEQ ID NO: 19128 - protein, 469 aa, synthetic construct; identical to SEQ ID NO: 18651
  REGION 1..469: note = neuraminidase__InfluenzaA__ADK62686

SEQ ID NO: 19129 - protein, 469 aa, synthetic construct; identical to SEQ ID NO: 18089
  REGION 1..469: note = neuraminidase__InfluenzaA__ADK62696

SEQ ID NO: 19130 - protein, 469 aa, synthetic construct; identical to SEQ ID NO: 17321
  REGION 1..469: note = neuraminidase__InfluenzaA__ADK64994

SEQ ID NO: 19131 - protein, 469 aa, synthetic construct
  REGION 1..469: note = neuraminidase__InfluenzaA__ADK65002
MNPNQKIITIGSVCMTIGMANLILQIGNIISIWISHSIQLGNQNQIETCNQSVITYENNTWVNQTYVNISNTNFAAGQSVVSVKLAGNSSLCPVSGWAIYSKDNSIRTGSKGDVFVIREPFISCSPLECRTFFLTQGALLNDKHSNGTIKDRSPYRTLMSCPIGEVPSPYNSRFESVAWSASACHDGINWLTIGISGPDNGAVAGLKYNGIITDTIKSWRNNILRTQESECACVNGSCFTVMTDGPSDGQASYKIFRIEKGKIVKSVEMNAPNYHYEECSCYPDSSEITCVCRDNWHGSNRPWVSFNQNLEYQIGYICSGIFGDNPRPNDKTGSCGPVSSNGANGVKGFSFKYGNGVWIGRTKSISSRNGFEMIWDPNGWTGTDNNFSIKQDIVGINEWSGYSGSFVQHPELTGLDCIRPCFWVELIRGRPKENTIWTSGSSISFCGVNSDTVGWSWPDGAELPFTIDK

SEQ ID NO: 19132 - protein, 469 aa, synthetic construct; identical to SEQ ID NO: 16738
  REGION 1..469: note = neuraminidase__InfluenzaA__ADK65010

SEQ ID NO: 19133 - protein, 469 aa, synthetic construct
  REGION 1..469: note = neuraminidase__InfluenzaA__ADK65018
MNPNQKIITIGSVCMTIGMANLILQIGNIISIWISHSIQLGNQNQIETCNQSVITYENNTWVNQTYVNISNTNFAAGQSVVSVKLAGNSSLCPVSGWAIYSKDNSIRIGSKGDVFVIREPFISCSPLECRTFFLTQGALLNDKHSNGTIKDRSPYRTLMSCPIGEVPSPYNSRFESVAWPASACHDGINWLTIGISGPDNGAVAVLKYNGIITDTIKSWRNNILRTQESECACVNGSCFTIMTDGPSDGQASYKIFRIEKGKIVKSIEMNAPNYHYEECSCYPDSSEITCVCRDNWHGSNRPWVSFNQNLEYQIGYICSGIFGDNPRPNDKTGSCGPVSSNGANGVKGFSFKYGNGVWIGRTKSISSRNGFEMIWDPNGWTGTDNNFSIKQDIVGINEWSGYSGSFVQHPELTGLDCIRPCFWVELIRGRPKENTIWTSGSSISFCGVNSDTVGWSWPDGAELPFTIDK

SEQ ID NO: 19134 - protein, 469 aa, synthetic construct
  REGION 1..469: note = neuraminidase__InfluenzaA__ADK87290
MNPNQKIITIGSVSLTISTICFFMQIAILITTVTLHFKQYEFNSPPNNQVMLCEPTIIERNITEIVYLTNTTIEKEICPKLAEYRNWSKPQCDITGFAPFSKDNSIRLSAGGDIWVTREPYVSCDPDKCYQFALGQGTTLNNVHSNNTVRDRTPYRTLLMNELGVPFHLGTKQVCIAWSSSSCHDGKAWLHVCITGDDKNATASFIYNGRLVDSVVSWSKEILRTQESECVCINGTCTVVMTDGSASGKAYTKILFIEEGKIVHTSTLSGSAQHVEECSCYPRYPGVRCVCRDNWKGSNRPIVDINIKDHSIVSSYVCSGLVGDTPRKNDSSSSSHCLDPNNEEGGHGVKGWAFDDGNDVWMGRTISEKSRLGYETFKVIEGWSNPKSKLQINRQVIVDRGNRSGYSGIFSVEGKSCINRCFYVELIRGRKEETEVLWTSNSIVVFCGTSGTYGTGSWPDGADINLMPV

SEQ ID NO: 19135 - protein, 469 aa, synthetic construct
  REGION 1..469: note = neuraminidase__InfluenzaA__ADK87292
MNPNQKIITIGSVSLTISTICFFMQIAILITTVTLHFKQYEFNSPPNNQVMLCEPTIIERNITEIVYLTNTTIEKEICPKLAEYRNWSKPQCDITGFAPFSKDNSIRLSAGGDIWVTREPYVSCDPDKCYQFALGQGTTLNNVHSNNTVRDRTPYRTLLMNELGVPFHLGTKQVCIAWSSSSCHDGKAWLHVCITGDDKNATASFIYNGRLVDSVVSWSKEILRTQESECVCINGTCTVVMTDGSASGKADTKILFIEEGKIVHTSTLSGSAQHVEECSCYPRYPGVRCVCRDNWKGSNRPIVDINIKDHSIVSSYACSGLVGDTPRKNDSSSSSHCLDPNNEEGGHGVKGWAFDDGNDVWMGRTISEKSRLGYETFKVIEGWSNPKSKLQINRQVIVDRGNRSGYSGIFSVEGKSCINRCFYVELIRGRKEETEVLWTSNSIVVFCGTSGTYGTGSWPDGADINLMPV

SEQ ID NO: 19136 - protein, 469 aa, synthetic construct
  REGION 1..469: note = neuraminidase__InfluenzaA__ADK87294
MNPNQKIIAIGSVSLTISTICFFLQIAILITTVTLHFKQYEFNSPPNNQVMLCEPTIIERNITEIVYLTNTTIEKEICPKLAEYRNWSKPQCDITGFAPFSKDNSIRLSAGGDIWVTREPYVSCDPDKCYQFALGQGTTLNNVHSNNTVRDRTPYRTLLMNELGVPFHLGTKQVCIAWSSSSCRDGKAWLHVCITGDDKNATASFIYNGRLVDSVVSWSKEILRTQESECVCINGTCTVVMTDGSASGKADTKILFIEEGKIVHTSTLSGSAQHVEECSCYPRYPGVRCVCRDTGKGSNRPIVDINIKDHSIVSSYVCSGLVGDTPRKNDSSSSSHCLDPNNEEGGHGVKGWAFDDGNDVWMGRTISEKSRLGYETFKVIEGWSNPKSKLQINRQVIVDRGNRSGYSGIFSVEGKSCINRCFYVELIRGRKEETEVLWTSNNIVVFCGTSGTYGTGSWPDGADINLMPV

SEQ ID NO: 19137 - protein, 469 aa, synthetic construct
  REGION 1..469: note = neuraminidase__InfluenzaA__ADK87297
MNPNQKIITIGSVCMTIGMANLILQIGNIISIWISHSIQLGNQNQIETCNQSVITYENNTWVNQTYVNISNTNFAAGQSVVSVKLAGNSSLCPVSGWAIYSKDNSIRIGSKGDVFVIREPFISCSPLECRTFFLTQGALLNDKHSNGTIKNRSPYRTLMSCPIGEVPSPYNSRFESVAWSASACHDGINWLTIGISGPDNGAVAVLKYNGIITDTIKSWRNNILRTQESECACVNGSCFTVMTDGPSDGQASYKIFRIEKGKIVKSVEMNAPNYHYEECSCYPDSSEITCVCRDNWHGSNRPWVSFNQNLEYQIGYICSGIFGDNPRPNDKTGSCGPVSSNGANGVKGFSFKYGNGVWIGRTKSISSRNGFEMIWDPNGWTGTDNNFSIKQDIVGINEWSGYSGSFVQHPELTGLDCIRPCFWVELIRGRPKENTIWTSGSSISFCGVNSDTVGWSWPDGAELPFTIDK

SEQ ID NO: 19138 - protein, 469 aa, synthetic construct
  REGION 1..469: note = neuraminidase__InfluenzaA__ADK87299
MNPNQKIITIGSVCMTIGMANLILQIGNIISIWISHSIQLGNQNQIETCNQSVITYENNTWVNQTYVNISNTNFAAGQSVVSVKLAGNSSLCPVSGWAIYSKDNSIRIGSKGDVFVIREPFISCSPLECRTFFLTQGALLNDKHSNGTIKDRSPYRTLMSCPIGEVPSPYNSRFESVAWSASACHDGINWLTIGISGPDNGAVAVLKYNGIITDTIKSWRNNILRTQESECACVNGSCFTVMTDGPSDGQASFKIFRIEKGKIVKSVEMNAPNYHYEECSCYPDSSEITCVCRDNWHGSNRPWVSFNQNLEYQIGYICSGIFGDNPRPNDKTGSCGPVSSNGANGVKGFSFKYGNGVWIGRTKSISSRNGFEMIWDPNGWTGTDNNFSIKQDIVGINEWSGYSGSFVQHPELTGLDCIRPCFWVELIRGRPKENTIWTSGSSISFCGVNSDTVGWSWPDGAELPFTIDK

SEQ ID NO: 19139 - protein, 469 aa, synthetic construct
  REGION 1..469: note = neuraminidase__InfluenzaA__ADK87301
MNPNQKIITIGSVSLTISTICFFMQIAILITTVTLHFKQYEFNSPPNNQVMLCEPTIIERNITEIVYLTNTTIEKEICPKLAEYRNWSKPQCDITGFAPFSKDNSIRLSAGGDIWVTREPYVSCDPDKCYQFALGQGTTLNNVHSNNTVRDRTPYRTLLMNELGVPFHLGTKQVCIAWSSSSCHDGKAWLHVCITGDDKNATASFIYNGRLVDSVVSWSKEILRTQESECVCINGTCTVAMTDGSASGKADTKILFIEEGKIVHTSTLSGSAQHVEECSCYPRYPGVRCVCRDNWKGSNRPIVDINIKDHSIVSSYVCSGLVGDTPRKNDSSSSSHCLDPNNEEGGHGVKGWAFDDGNDVWMGRTISEKSRLGYETFKVIEGWSNPKSKLQINRQVIVDRGNRSGYSGIFSVEGKSCINRCFYVELIRGRKEETEVLWTSNSIVVFCGTSGTYGTGSWPDGADINLMPI

SEQ ID NO: 19140 - protein, 469 aa, synthetic construct; identical to SEQ ID NO: 16599
  REGION 1..469: note = neuraminidase__InfluenzaA__ADK87303

SEQ ID NO: 19141 - protein, 469 aa, synthetic construct
  REGION 1..469: note = neuraminidase__InfluenzaA__ADK87305
MNPNQKIITIGSVSLTISTICFFMQIAILITTVTLHFKQYEFNSPPNNQVMLCEPTIIERNITEIVYLTNTTIEKEICPKLAEYRNWSKPQCDITGFAPFSKDNSIRLSAGGDIWVTREPYVSCDPDKCYQFALGQGTTLNNVHSNNTVRDRTPYRTLLMNELGVPFHLGTKQVCIAWSSSSCHDGKAWLHVCITGDDKNATASFIYNGRLVDSVVSWSKEILRTQESECVCINGTCTVVMTDGSASGKADTKILFIEEGKIVHTSTLSGSAQHVEECSCYPRYPGVRCVCRDNWKGSNRPIVDINIKDHSIVSSYVCSGLVGDTPRKNDSSSSSHCLDPNNEEGGHGVKGWAFDDGNDVWMGRTISEKSRLGYETFKVIEGWSNPKSKLQINRQVIVGRGNRSGYSGIFSVEGKSCINRCFYVELIRGRKEETEVLWTSNSIVVFCGTSGTYGTGSWPDGADINLMPV

SEQ ID NO: 19142 - protein, 469 aa, synthetic construct
  REGION 1..469: note = neuraminidase__InfluenzaA__ADK87307
MNPNQKVITIGSVSLTISTICFFMQIAILITTVTLHFKQYEFNSPPNNQVMLCEPTIIERNITEIVYLTNTTIEKEICPKLAEYRNWSKPQCDITGFAPFSKDNSIRLSAGGDIWVTREPYVSCDPDKCYQFALGQGTTLNNVHSNNTVRDRTPYRTLLMNELGVPFHLGTKQVCIAWSSSSCHDGKAWLHVCITGDDKNATASFIYNGRLVDSVVSWSKEILRTQESECVCINGTCTVVMTDGSASGKADTKILFIEEGKIVHTSTLSGSAQHVEECSCYPRYPGVRCVCRDNWKGSNRPIVDINIKDHSIVSSYVCSGLVGDTPRKNDSSSSSHCLDPNNEEGGHGVKGWAFDDGNDVWMGRTISEKSRLGYETFKVIEGWSNPKSKLQINRQVIVGRGNRSGYSGIFSVEGKSCINRCFYVELIGGRKEETEVLWTSNSIVVFCGTSGTYGTGSWPDGADINLMPV

SEQ ID NO: 19143 - protein, 469 aa, synthetic construct
  REGION 1..469: note = neuraminidase__InfluenzaA__ADK87312
MNPNQTIITIGSVCMTIGMANLILQIGNIISIWISHSIQLGNQNQIETCNQSVITYENNTWVNQTYVNISNTNFAAGQSVISVKLAGNSSLCPVSGWAIYSKDNNIRIGSKGDVFVIREPFISCSPLECRTFFLTQGALLNDKHSNGTIKDRSPYRTLMSCPIGEVPSPYNSRFESVAWSASACHDGINWLTIGISGPDNGAVAVLKYNGIITDTIKSWRNNILRTQESECACVNGSCFTVMTDGPSDGQASYKIFRIEKGKIVKSVEMNAPNYHYEECSCYPDSSEITCVCRDNWHGSNRPWVSFNQNLEYQIGYICSGIFGDNPRPNDKTGSCGPVSSNGANGVKGFSFKYGNGVWIGRTKSISSRNGFEMIWDPNGWTGTDNNFSIKQDIVGINEWSGYSGSFVQHPELTGLDCIRPCFWVELIRGRPKENTIWTSGSSISFCGVNSDTVGWSWPDGAELPFTIDK

SEQ ID NO: 19144 - protein, 469 aa, synthetic construct
  REGION 1..469: note = neuraminidase__InfluenzaA__ADK87314
MNPNQKIITIGSVSLTISTICFFMQIAILITTVTLHFKQYEFNSPPNNQVMLCEPTIIEGNITEIVYLTNTTIEKEMCPKLAEYRNWSKPQCDITGFAPFSKDNSIRLSAGGDIWVTREPYVSCDPDKCYQFALGQGTTLNNVHSNNTVRDRTPYRTLLMNELGVPFHLGTKQVCIAWSSSSCHDGKAWLHVCITGDDKNATASFIYNGRLVDSVVSWSKEILRTQESECVCINGTCTVVMTDGSASGKADTKILFIEEGKIVHTSTSSGSAQHVEECSCYPRYPGVRCVCRDNWKGSNRPIVDINIKDHSIVSSYVCSGLVGDTPRKNDSSSSSHCLDPNNEEGGHGVKGWAFDDGNDVWMGRTISEKSRLGYETFKVIEGWSNPKSKLQINRQVIVDRGNRSGYSGIFSVEGKSCINRCFYVELIRGRKEETEVLWTSNSIVVFCGTSGTYGTGSWPDGADINLMPV

SEQ ID NO: 19145 - protein, 469 aa, synthetic construct
  REGION 1..469: note = neuraminidase__InfluenzaA__ADK87316
MNPNQKIITIGSVCMTIGMANLILQIGNIISIWISHSIQLGNQNQIETCNQSVITYENNTWVNQTYVNISNTNFAAGQSVVSVKLAGNSSLCPVSGWAIYSKDNSIRIGSKGDVFVIREPFISCSPLECRTFFLTQGALLNDKHSNGTIKDRSPYRTLMSCPIGEVPSPYNSRFESVAWSASACHDGINWLTIGISGPDNGAVAVLKYNGIITDTIKSWRNNILRTQESECACVNGSCFTVMTDGPSDGQASYKIFRIEKGKIVKSVEMNAPNYHYEECSCYPDSSEITCVCRDNWHGSNRPWVSFNQNLEYQIGYICSGIFGDNPRPNDKTGSCGPVSSNGANGVKGFSFKYGNGVWIGRTKSISSRNGFEMIWDPNGWTGTDNNFSIKQDIVGINEWSGYSGSFVQHPEITGLDCIRPCFWVELIRGRPKENTIWTSGSSISFCGVNSDTVGWSWPDGAELPFTIDK

SEQ ID NO: 19146 - protein, 469 aa, synthetic construct
  REGION 1..469: note = neuraminidase__InfluenzaA__ADK87318
MNPNQKIITIGSVCMTIGMANLILQIGNIISIWISHSIQLGNQNQIETCNQSVITYENNTWVNQTYVNISNTNFAAGQSVVSVKLAGNSSLCPVSGWAIYSKDNSIRIGSKGDVFVIREPFISCSPLECRTFFLTQGALLNDKHSNGTIKDRSPYRTLMSCPIGEVPSPYNSRFESVAWSASACHDGINWLTIGISGPDNGAVAVLKYNGIITDTIKSWRNNILRTQESECACVNGSCFTVMTDGPSDGQASYKIFRIEKGKIVKSVEMNAPNYHYEECSCYPDSSEITCVCRDNWHGSNRPWVSFNQNLEYQIGYICSGIFGDNPRPNDKTGSCGPVSSNGANGVKGFSFKYGNGVWIGRTKSISSRNGFEMIWDPNGWTGTDNNFSIKQDIVGINEWSGYSGSFVQHPELTGLDCIRPCSWVELIRGRPKENTIWTSGSSTSFCGVNSDTVGWSWPDGAELPFTIDK

SEQ ID NO: 19147 - protein, 469 aa, synthetic construct
  REGION 1..469: note = neuraminidase__InfluenzaA__ADK87320
MNPNQKIITIGSVCMTIGMANLILQIGNIISIWISHSIQLGNQNQIETCNQSVITYENNTWVHQTYVNISNTNFAAGQSVVSVKLAGNSSLCPVSGWAIYSKDNSIRIGSKGDVFVIREPFISCSPLECRTFFLTQGALLNDKHSNGTIKDRSPYRTLMSCPIGEVPSPYNSRFESVAWSASACHDGINWLTIGISGPDNGAVAVLKYNGIITDTIKSWRNNILRTQESECACVNGSCFTVMTDGPSDGQASYKIFRIEKGKIVKSVEMNAPNYHYEECSCYPDSSEITCVCRDNWHGSNRPWVSFNQNLEYQIGYICSGIFGDNPRPNDKTGSCGPVSSNGANGVKGFSFKYGNGVWIGRTKSISSRNGFEMIWDPNGWTGTDNNFSIKQDIVGINEWSGYSGSFVQHPELTGLNCIRPCFWVELIRGRPKENTIWTSGSSISFCGVNSDTVGWSWPDGAELPFTIDK

SEQ ID NO: 19148 - protein, 469 aa, synthetic construct
  REGION 1..469: note = neuraminidase__InfluenzaA__ADK87324
MNPNQKIITIGSVSLTISTICFLMQIAILITTVTLHFKQYEFNSPPNNQVMLCEPTIIERNITEIVYLTNTTIEKEICPKLAEYRNWSKPQCDITGFAPFSKDNSIRLSAGGDIWVTREPYVSCDPGKCYQFALGQGTTLNNVHSNNTVRDRTPYRTLLMNELGVPFHLGTKQVCIAWSSSSCHDGKAWLHVCITGDDENATASFIYNGRLVDSVVSWSKEILRTQESECVCINGTCTVVMTDGSASGKADTKILFIEEGKIVHTSTLSGSAQHVEECSCYPRYPGVRCVCRDNWKGSNRPIVDINIKDHSIVSSYVCSGLVGDTPRKNDSSSSSHCLDPNNEEGGHGVKGWAFDDGNDVWMGRTISEKSRLGYETFKVIEGWSNPKSKLQINRQVIVDRGNRSGYSGIFSVEGKSCINRCFYVELIRGRKEETEVLWTSNSIVVFCGTSGTYGTGSWPDGADINLMPV

SEQ ID NO: 19149 - protein, 469 aa, synthetic construct
  REGION 1..469: note = neuraminidase__InfluenzaA__ADK87327
MNPNQKIMTIGSVSLTISTICFFMQIAILITTVTLHFKQYEFNSPPNNQVMLCEPTIIERNITEIVYLTNTTIEKEICPKLAEYRNWSKPQCDITGFAPFSKDNSIRLSAGGDIWVTREPYVSCDPDKCYQFALGQGTTLNNVHSNNTVRDRTPYRTLLMNELGVPFHLGTKQVCIAWSSSSCHDGKAWLHVCITGDDKNATASFIYNGRLVDSVVSWSKEILRTQESECVCINGTCTVVMTDGSASGKADTKILFIEEGKIVHTSTLSGSAQHVEECSCYPRYPGVRCVCRDNWKGSNRPIVDINIKDHSIVSSYVCSGLVGDTPRKNDSSSSSHCLDPNNEEGGHGVKGWAFDDGNDVWMGRTISERSRLGYETFKVIEGWSNPKSKLQINRQVIVDRGNRSGYSGIFSVEGKSCINRCFYVELIRGRKEETEVLWTSNSIVVFCGTSGTYGTGSWPDGADINLMPV

SEQ ID NO: 19150 - protein, 469 aa, synthetic construct; identical to SEQ ID NO: 16738
  REGION 1..469: note = neuraminidase__InfluenzaA__ADK87329

SEQ ID NO: 19151 - protein, 469 aa, synthetic construct
  REGION 1..469: note = neuraminidase__InfluenzaA__ADK87330
MNPNQKIITIGSVCMTIGMANLILQIGNIISIWISHSIQLGNQNQIETCNQSVITYENNTWVNQTYVNISNTNFAAGQSVVSVKLAGNSSLCPVSGWAIYSKDNSIRIGSKGDVFVIREPFISCSPLECRTFFLTQGALLNDKHSNGTIKDRSPYRTLMSCPIGEVPSPYNSRFESVAWSASACHDGINWLTIGISGPDNGAVAVLKYNGIITDTIKSWRNNILRTQESECACVNGSCFTVMTDGPSDGQASYKIFRIEKGKIVKSVEMNAPNYHYEECSCYPDSSEITCVCRDNWHGSNRPWVSFNQNLEYQIGYICSGIFGDNPRPNDKTGSCGPVSSNGANGVKGFSFKYGNGVWIGRTKSISSRNGFEMIWDPNGWTGTDNNFSIKQDIVGINEWSGYSGSFVQHPELTGLDCIRPCFWVELIRGRPKENTIWASGSSISFCGVNSDTVGWSWPDGAELPFTIDK

SEQ ID NO: 19152 - protein, 469 aa, synthetic construct; identical to SEQ ID NO: 16738
  REGION 1..469: note = neuraminidase__InfluenzaA__ADK87331

SEQ ID NO: 19153 - protein, 469 aa, synthetic construct
  REGION 1..469: note = neuraminidase__InfluenzaA__ADK87332
MNPNQKIITIGSVCMTIGMANLILQIGNIISIWISHSIQLGNQNQIETCNQSVITYENNTWVNQTYVNISNTNFAAGQSVVSVKLAGNSSLCPVSGWAIYSKDNSIRIGSKGDVFVIREPFISCSPLECRTFFLTQGALLNDKHSNGTIKDRSPYRTLMSCPIGEVPSPYNSRFESVAWSASACHDGINWLTIGISGPDNGAVAVLKHNGIITDTIKSWRNNILRTQESECACVNGSCFTVMTDGPSDGQASYKIFRIEKGKIVKSVEMNAPNYHYEECSCYPDSSEITCVCRDNWHGSNRPWVSFNQNLEYQIGYICSGIFGDNPRPNDKTGSCGPVSSNGANGVKGFSFKYGNGVWIGRTKSISSRNGFEMIWDPNGWTGTDNNFSIKQDIVGINEWSGYSGSFVQHPELTGLDCIRPCFWVELIRGRPKENTIWTSGSSISFCGVNSDTVGWSWPDGAELPFTIDK

SEQ ID NO: 19154 - protein, 469 aa, synthetic construct
  REGION 1..469: note = neuraminidase__InfluenzaA__ADK87333
MNPNQKIITIGSVCMTIGMANLILQIGNIISIWISHSIQLGNQNQIETCNQSVITYENNTWVNQTYVNISNTNFAAGQSVVSVKLAGNSSLCPVSGWAIYSKDNSIRIGSKGDVFVIREPFISCSPLECRTFFLTQGALLNDKHSNGTIKDRSPYRTLMSCPIGEVPSPYNSRFESVAWSASACHDGINWLTIGISGPDNGAVAVLKYNGIITDTIKSWRNNILRTQESECACVNGSCFTVMTDGPSDGQASYKIFRIEKGKIVKSVEMNAPNYHYEECSCYPYSSEITCVCRDNWHGSNRPWVSFNQNLEYQIGYICSGIFGDNPRPNDKTGSCGPVSSNGANGVKGFSFKYGNGVWIGRTKSISSRNGFEMIWDPNGWTGTDNNFSIKQDIVGINEWSGYSGSFVQHPELTGLDCIRPCFWVELIRGRPKENTIWTSGSSISFCGVNSDTVGWSWPDGAELPFTIDK

SEQ ID NO: 19155 - protein, 469 aa, synthetic construct
  REGION 1..469: note = neuraminidase__InfluenzaA__ADK87335
MNPNQKIITIGSVSLTISTICFFMQIAILITTVTLHFKQYEFNSPPNNQVMLCEPTIIERNITEIVYLTNTTIEKEICPKLAEYRNWSKPQCDITGFAPFSKDNSIRLSAGGDIWVTREPYVSCDPDRRYQFALGQGTTLNNVHSDNTVRDRTPYRTLLMNELGVPFHLGTKQVCIAWSSSSCHDGKAWLHVCITGDDKNATASFIYNGRLVDSVVSWSKEILRTQESECVCINGTCTVVMTDGSASGKADTKILFIEEGKIVHTSTLSGNAQHVEECSCYPRYPGVRCVCRDNWKGSNRPIVDINIKDHSIVSSYVCSGLVGDTPRKNDSSSSSHCLDPNNEEGGHGVKGWAFDDGNDVWMGRTISEKSRLGYETFKVIEGWSNPKSKLQINRQVIVDRGNRSGYSGIFSVEGKSCINRCFYVELIRGRKEETEVLWTSNSIVVFCGTSGTYGTGSWPDGADINLMPI

SEQ ID NO: 19156 - protein, 469 aa, synthetic construct
  REGION 1..469: note = neuraminidase__InfluenzaA__ADK87337
MNPNQKIITIGSVSLTISTICFFMQIAILITTVTLHFKQYEFNSPPNNQVMLCEPTIIERNITEIVYLTNTTIEKEICPKLAEYRNWSKPQCDITGFAPFSKDNSIRLSAGGDIWVTREPYVSCDPDKCYQFALGQGTTLNNVHSNNAVRDRTPYRTLLMNELGVPFHLGTKQVCIAWSSSSCHDGKAWLHVCITGDDKNATASFIYNGRLVDSVVSWSKEILRTQESECVCINGTCTVVMTDGSASGKADTKILFIEEGKIVHTSTLSGNAQHVEECSCYPRYPGVRCVCRDNWKGSNRPIVDINIKDHSIVSSYVCSGLVGDTPRKNDSSSSSHCLDPNNEEGGHGVKGWAFDDGNDVWMGRTISEKSRLGYETFKVIEGWSNPKSKLQINRQVIVDRGNRSGYSGIFSVEGKSCINRCFYVELIRGRKEETEVLWTSNSIVVFCGTSGTYGTGSWPDGADINLMPI

SEQ ID NO: 19157 - protein, 469 aa, synthetic construct
  REGION 1..469: note = neuraminidase__InfluenzaA__ADK87339
MNPNQKIITIGSICMTIGMANLILQIGNIISIWISHSIQLGNQNQIETCNQSVITYENNTWVNQTYVNISNTNFAAGQSVVSVKLAGNSSLCPVSGWAIYSKDNSIRIGSKGDVFVIREPFISCSPLECRTFFLTQGALLNDKHSNGTIKDRSPYRTLMSCPIGEVPSPYNSRFESVAWSASACHDGINWLTIGISGPDNGAVAVLKYNGIITDTIKSWRNNILRTQESECACVNGSCFTVMTDGPSDGQASYKIFRIEKGKIVKSVEMNAPNYHYEECSCYPDSSEITCVCRDNWHGSNRPWVSFNQNLEYQIGYICSGIFGDNPRPNDKTGSCGPVSSNGANGVKGFSFKYGNGVWIGRTKSISSRNGFEMIWDPNGWTGTDNNFSIKQDIVGINEWSGYSGSFVQHPELTGLDCIRPCFWVELIRGRPKENTIWTSGSSISFCGVNSDTVGWSWPDGAELPFTIDK

SEQ ID NO: 19158 - protein, 469 aa, synthetic construct; identical to SEQ ID NO: 16738
  REGION 1..469: note = neuraminidase__InfluenzaA__ADK90209

SEQ ID NO: 19159 - protein, 469 aa, synthetic construct; identical to SEQ ID NO: 16738
  REGION 1..469: note = neuraminidase__InfluenzaA__ADK90213

SEQ ID NO: 19160 - protein, 469 aa, synthetic construct; identical to SEQ ID NO: 16738
  REGION 1..469: note = neuraminidase__InfluenzaA__ADK90217

SEQ ID NO: 19161 - protein, 469 aa, synthetic construct; identical to SEQ ID NO: 18717
  REGION 1..469: note = neuraminidase__InfluenzaA__ADK90221

SEQ ID NO: 19162 - protein, 469 aa, synthetic construct; identical to SEQ ID NO: 18717
  REGION 1..469: note = neuraminidase__InfluenzaA__ADK90225

SEQ ID NO: 19163 - protein, 469 aa, synthetic construct; identical to SEQ ID NO: 16738
  REGION 1..469: note = neuraminidase__InfluenzaA__ADK90229

SEQ ID NO: 19164 - protein, 469 aa, synthetic construct; identical to SEQ ID NO: 16738
  REGION 1..469: note = neuraminidase__InfluenzaA__ADK90233

SEQ ID NO: 19165 - protein, 469 aa, synthetic construct
  REGION 1..469: note = neuraminidase__InfluenzaA__ADK90241
MNPNQKIITIGSVCMTIGMANLILQIGNIISIWISHSIQLGNQNQIETCNQSVITYENNTWVNQTYVNISNANFAAGQSVVSVKLAGNSSLCPVSGWAIYSKDNSIRIGSKGDVFVIREPFISCSPLECRTFFLTQGALLNDKHSNGTIKDRSPHRTLMSCPIGEVPSPYNSRFESVAWSASACHDGINWLTIGISGPDNGAVAVLKYNGIITDTIKSWRNNILRTQESECACVNGSCFTVMTDGPSDGQASYKIFRIEKGKIVKSVEMNAPNYHYEECSCYPDSSEITCVCRDNWHGSNRPWVSFNQNLEYQIGYICSGIFGDNPRPNDKTGSCGPVSSNGANGVKGFSFKYGNGVWIGRTKSISSRNGFEMIWDPNGWTGTDNNFSIKQDIVGINEWSGYSGSFVQHPELTGLDCIRPCFWVELIRGRPKENTIWTSGSSISFCGVNSDTVGWSWPDGAELPFTIDK

SEQ ID NO: 19166 - protein, 469 aa, synthetic construct; identical to SEQ ID NO: 18717
  REGION 1..469: note = neuraminidase__InfluenzaA__ADK90245

SEQ ID NO: 19167 - protein, 469 aa, synthetic construct
  REGION 1..469: note = neuraminidase__InfluenzaA__ADK90249
MNPNQKIITIGSVCMTIGMANLILQIGNIISIWISHSIQLGNQNQIETCNQSVITYENNTWVNQTYVNISNTNFAAGQSVVSVKLAGNSSLCPVSGWAIYSKDNSIRIGSKGDVFVIREPFISCSPLECRTFFLTQGALLNDKHSNGTIKDRSPYRTLMSCPIGEVPSPYNSRFESVAWSASACHDGINWLTIGISGPDNGAVAVLKYNGIITDTIKSWRNNILRTQESECACVNGSCFTVMTDGPSDGQASYKIFRIEKGKIVKSVEMNAPNYHYEECSCYPDSSEITCVCRDNWHGSNRPWVSFNQNLEYQIGYICSGIFGDNPRPNDKTGSCGPVSSNGANGVKGFSFKYGNGVWIGRTKSISSRNGFEMIWDPNGWTGTDNNFSMKQDIVGINEWSGYSGSFVQHPELTGLDCIRPCFWVELIRGRPKENTIWTSGSSISFCGVNSDTVGWSWPDGAELPFTIDK

SEQ ID NO: 19168 - protein, 469 aa, synthetic construct; identical to SEQ ID NO: 19167
  REGION 1..469: note = neuraminidase__InfluenzaA__ADK90253

SEQ ID NO: 19169 - protein, 469 aa, synthetic construct
  REGION 1..469: note = neuraminidase__InfluenzaA__ADK90257
MNPNQKIIIIGSVCMTIGMANLILQIGNIISIWISHSIQLGNQNQIETCNQSVITYENNTWVNQTYVNISNTNFAAGQSVVSVKLAGNSSLCPVSGWAIYSKDNSIRIGSKGDVFVIREPFISCSPLECRTFFLTQGALLNDKHSNGTIKDRSPHRTLMSCPIGEVPSPYNSRFESVAWSASACHDGINWLTIGISGPDNGAVAVLKYNGIITDTIKSWRNNILRTQESECACVNGSCFTVMTDGPSDGQASYKIFRIEKGKIVKSVEMNAPNYHYEECSCYPDSSEITCVCRDNWHGSNRPWVSFNQNLEYQIGYICSGIFGDNPRPNDKTGSCGPVSSNGANGVKGFSFKYGNGVWIGRTKSISSRNGFEMIWDPNGWTGTDNNFSIKQDIVGINEWSGYSGSFVQHPELTGLDCIRPCFWVELIRGRPKENTIWTSGSSISFCGVNSDTVGWSWPDGAELPFTIDK

SEQ ID NO: 19170 - protein, 469 aa, synthetic construct; identical to SEQ ID NO: 17092
  REGION 1..469: note = neuraminidase__InfluenzaA__ADK90261

SEQ ID NO: 19171 - protein, 469 aa, synthetic construct
  REGION 1..469: note = neuraminidase__InfluenzaA__ADK90265
MNPNQKIITIGSVCMTIGMANLILQIGNIISIWISHSIQLGNQNQIETCNQSVITYENNTWVNQTYVNISNTNFAAGQSVVSVKLAGNSSLCPVSGWAIYSKDNSIRIGSKGDVFVIREPFISCSPLECRTFFLTQGALLNDKHSNGTIKDRSPYRTLMSCPIGEVPSPYNSRFESVAWSASACHDGINWLTIGISGPDNGAVAVLKYNGIITDTIKSWRNNILRTQESECACVNGSCFTVMTDGPSDGQASYKIFRIEKGKIVKSVEMNAPNYHYEECSCYPDSSEITCVCRDNWHGSNRPWVSFNQNLEYQMGYICSGIFGDNPRPNDKTGSCGPVSSNGANGVKGFSFKYGNGVWIGRTKSISSRNGFEMIWDPNGWTGTDNNFSIKQDIVGINEWSGYSGSFVQHPELTGLDCIRPCFWVELIRGRPKENTIWTSGSSISFCGVNSDTVGWSWPDGAELPFTIDK

SEQ ID NO: 19172 - protein, 469 aa, synthetic construct
  REGION 1..469: note = neuraminidase__InfluenzaA__ADK90269
MNPNQKIITIGSVCMTIGMANLILQIGNIISIWISHSIQLGNQNQIEKCNQSVITYENNTWVNQTYVNISNTNFAAGQSVVSVKLAGNSSLCPVSGWAIYSKDNSIRIGSKGDVFVIREPFISCSPLECRTFFLTQGALLNDKHSNGTIKDRSPYRTLMSCPIGEVPSPYNSRFESVAWSASACHDGINWLTIGISGPDNGAVAVLKYNGIITDTIKSWRNNILRTQESECACVNGSCFTVMTDGPSDGQASYKIFRIEKGKIVKSIEMNAPNYHYEECSCYPDSSEITCVCRDNWHGSNRPWVSFNQNLEYQIGYICSGIFGDNPRPNDKTGSCGPVSSNGANGVKGFSFKYGNGVWIGRTKSISSRNGFEMIWDPNGWTGTDNNFSIKQDIVGINEWSGYSGSFVQHPELTGLDCIRPCFWVELIRGRPKENTIWTSGSIISFCGVNSDTVGWSWPDGAELPFTIDK

SEQ ID NO: 19173 - protein, 469 aa, synthetic construct; identical to SEQ ID NO: 16738
  REGION 1..469: note = neuraminidase__InfluenzaA__ADK90273

SEQ ID NO: 19174 - protein, 469 aa, synthetic construct; identical to SEQ ID NO: 16738
  REGION 1..469: note = neuraminidase__InfluenzaA__ADK90277

SEQ ID NO: 19175 - protein, 469 aa, synthetic construct; identical to SEQ ID NO: 16738
  REGION 1..469: note = neuraminidase__InfluenzaA__ADK90281

SEQ ID NO: 19176 - protein, 469 aa, synthetic construct
  REGION 1..469: note = neuraminidase__InfluenzaA__ADK90289
MNPNQKIITIGSVCMTIGMANLILQIGNIISIWISHSIQLGNQNLIETCNQSVITYENNTWVNQTYVNISNTNFAAGQSVVSVKLAGNSSLCPVSGWAIYSKDNSIRIGSKGDVFVIREPFISCSPLECRTFFLTQGALLNDKHSNGTIKDRSPYRTLMSCPIGEVPSPYNSRFESVAWSASACHDGINWLTIGISGPDNGAVAVLKYNGIITDTIKSWRNNILRTQESECACVNGSCFTVMTDGPSDGQASYKIFRIEKGKIVKSVEMNAPNYHYEECSCYPDSSEITCVCRDNWHGSNRPWVSFNQNLEYQIGYICSGIFGDNPRPNDKTGSCGPVSSNGANGVKGFSFKYGNGVWIGRTKSISSRNGFEMIWDPNGWTGTDNNFSIKQDIVGINEWSGYSGSFVQHPELTGLDCIRPCFWVELIRGRPKENTIWTSGSSISFCGVNSDTVGWSWPDGAELPFTIDK

SEQ ID NO: 19177 - protein, 469 aa, synthetic construct; identical to SEQ ID NO: 18717
  REGION 1..469: note = neuraminidase__InfluenzaA__ADK90293

SEQ ID NO: 19178 - protein, 469 aa, synthetic construct; identical to SEQ ID NO: 18629
  REGION 1..469: note = neuraminidase__InfluenzaA__ADK90297

SEQ ID NO: 19179 - protein, 469 aa, synthetic construct; identical to SEQ ID NO: 16738
  REGION 1..469: note = neuraminidase__InfluenzaA__ADK90301

SEQ ID NO: 19180 - protein, 469 aa, synthetic construct; identical to SEQ ID NO: 18629
  REGION 1..469: note = neuraminidase__InfluenzaA__ADK90305

SEQ ID NO: 19181 - protein, 469 aa, synthetic construct; identical to SEQ ID NO: 16738
  REGION 1..469: note = neuraminidase__InfluenzaA__ADK90309

SEQ ID NO: 19182 - protein, 469 aa, synthetic construct
  REGION 1..469: note = neuraminidase__InfluenzaA__ADK90313
MNPNHKIITIGSVCMTIGMANLILQIGNIISIWISHSIQLGNQNQIETCNQSVITYENNTWVNQTYVNISNTNFAAGQSVVSVKLAGNSSLCPVSGWAIYSKDNSIRIGSKGDVFVIREPFISCSPLECRTFFLTQGALLNDKHSNGTIKDRSPHRTLMSCPIGEVPSPYNSRFESVAWSASACHDGINWLTIGISGPDNGAVAVLKYNGIITDTIKSWRNNILRTQESECACVNGSCFTVMTDGPSDGQASYKIFRIEKGKIVKSVEMNAPNYHYEECSCYPDSSEITCVCRDNWHGSNRPWVSFNQNLEYQIGYICSGIFGDNPRPNDKTGSCGPVSSNGANGVKGFSFKYGNGVWIGRTKSISSRNGFEMIWDPNGWTGTDNNFSIKQDIVGINEWSGYSGSFVQHPELTGLDCIRPCFWVELIRGRPKENTIWTSGSSISFCGVNSDTVGWSWPDGAELPFTIDK

SEQ ID NO: 19183 - protein, 469 aa, synthetic construct; identical to SEQ ID NO: 16738
  REGION 1..469: note = neuraminidase__InfluenzaA__ADK90317

SEQ ID NO: 19184 - protein, 469 aa, synthetic construct; identical to SEQ ID NO: 18717
  REGION 1..469: note = neuraminidase__InfluenzaA__ADK90321

SEQ ID NO: 19185 - protein, 469 aa, synthetic construct; identical to SEQ ID NO: 16738
  REGION 1..469: note = neuraminidase__InfluenzaA__ADK90325

SEQ ID NO: 19186 - protein, 469 aa, synthetic construct
  REGION 1..469: note = neuraminidase__InfluenzaA__ADK90329
MNPNQKIITIGSVCMTIGMANLILQIGNIISIWISHSIQLGNQNQIETCNRSVITYENNTWVNQTYVNISNTNFAAGQSVVSVKLAGNSSLCPVSGWAIYSKDNSIRIGSKGDVFVIREPFISCSPLECRTFFLTQGALLNDKHSNGTIKDRSPYRTLMSCPIGEVPSPYNSRFESVAWSASACHDGINWLTIGISGPDNEAVAVLKYNGIITDTIKSWRNNILRTQESECACVNGSCFTVMTDGPSDGQASYKIFRIEKGKIVKSVEMNAPNYHYEECSCYPDSSEITCVCRDNWHGSNRPWVSFNQNLEYQIGYICSGIFGDNPRPNDKTGSCGPVSSNGANGVKGFSFKYGNGVWIGRTKSISSRNGFEMIWDPNGWTGTDNNFSIKQDIVGINEWSGYSGSFVQHPELTGLDCIRPCFWVELIRGRPKENTIWTSGSSISFCGVNSDTVGWSWPDGAELPFTIDK

SEQ ID NO: 19187 - protein, 469 aa, synthetic construct
  REGION 1..469: note = neuraminidase__InfluenzaA__ADK90333
MNPNQKIITIGSVCMTIGMANLILQIGNIISIWISHSIQLGNKNQIETCNQSVITYENNTWVNQTYVNISNTNFAAGQSVVSVKLAGNSSLCPVSGWAIYSKDNSIRIGSKGDVFVIREPFISCSPLECRTFFLTQGALLNDKHSNGTIKDRSPYRTLMSCPIGEVPSPYNSRFESVAWSASACHDGINWLTIGISGPDNGAVAVLKYNGIITDTIKSWRNNILRTQESECACVNGSCFTVMTDGPSDGQASYKIFRIEKGKIVKSVEMNAPNYHYEECSCYPDSSEITCVCRDNWHGSNRPWVSFNQNLEYQIGYICSGIFGDNPRPNDKTGSCGPVSSNGANGVKGFSFKYGNGVWIGRTKSISSRNGFEMIWDPNGWTGTDNNFSIKQDIVGINEWSGYSGSFVQHPELTGLDCIRPCFWVELIRGRPKENTIWTSGSSISFCGVNSDTVGWSWPDGAELPFTIDK

SEQ ID NO: 19188 - protein, 469 aa, synthetic construct; identical to SEQ ID NO: 18717
  REGION 1..469: note = neuraminidase__InfluenzaA__ADK90337

SEQ ID NO: 19189 - protein, 469 aa, synthetic construct; identical to SEQ ID NO: 17797
  REGION 1..469: note = neuraminidase__InfluenzaA__ADK90341

SEQ ID NO: 19190 - protein, 469 aa, synthetic construct; identical to SEQ ID NO: 17797
  REGION 1..469: note = neuraminidase__InfluenzaA__ADK90345

SEQ ID NO: 19191 - protein, 469 aa, synthetic construct; identical to SEQ ID NO: 17797
  REGION 1..469: note = neuraminidase__InfluenzaA__ADK90349

SEQ ID NO: 19192 - protein, 469 aa, synthetic construct; identical to SEQ ID NO: 18717
  REGION 1..469: note = neuraminidase__InfluenzaA__ADK90353

SEQ ID NO: 19193 - protein, 469 aa, synthetic construct; identical to SEQ ID NO: 16738
  REGION 1..469: note = neuraminidase__InfluenzaA__ADK90357

SEQ ID NO: 19194 - protein, 469 aa, synthetic construct; identical to SEQ ID NO: 18717
  REGION 1..469: note = neuraminidase__InfluenzaA__ADK90361

SEQ ID NO: 19195 - protein, 469 aa, synthetic construct; identical to SEQ ID NO: 17712
  REGION 1..469: note = neuraminidase__InfluenzaA__ADK90365

SEQ ID NO: 19196 - protein, 469 aa, synthetic construct; identical to SEQ ID NO: 16738
  REGION 1..469: note = neuraminidase__InfluenzaA__ADK90369

SEQ ID NO: 19197 - protein, 469 aa, synthetic construct; identical to SEQ ID NO: 16738
  REGION 1..469: note = neuraminidase__InfluenzaA__ADK90373

SEQ ID NO: 19198 - protein, 469 aa, synthetic construct
  REGION 1..469: note = neuraminidase__InfluenzaA__ADK90377
MNPNQKIITIGSVCMTIGMTNLILQIGNIISIWISHSIQLGNQNQIETCNQSVITYENNTWVNQTYVNISNTNFAAGQSVVSVKLAGNSSLCPVSGWAIYSKDNSIRIGSKGDVFVIREPFISCSPLECRTFFLTQGALLNDKHSNGTIKDRSPHRTLMSCPIGEVPSPYNSRFESVAWSASACHDGINWLTIGISGPDNGAVAVLKYNGIITDTIKSWRNNILRTQESECACVNGSCFTVMTDGPSDGQASYKIFRIEKGKIVKSVEMDAPNYHYEECSCYPDSSEIICVCRDNWHGSNRPWVSFNQNLEYQIGYICSGIFGDNPRPNDKTGSCGPVSSNGANGVKGFSFKYGNGVWIGRTKSISSRNGFEMIWDPNGWTGTDNNFSIKQDIVGINEWSGYSGSFVQHPELTGLDCIRPCFWVELIRGRPKENTIWTSGSSISFCGVNSDTVGWSWPDGAELPFTIDK

SEQ ID NO: 19199 - protein, 469 aa, synthetic construct; identical to SEQ ID NO: 18717
  REGION 1..469: note = neuraminidase__InfluenzaA__ADK90381

SEQ ID NO: 19200 - protein, 469 aa, synthetic construct
  REGION 1..469: note = neuraminidase__InfluenzaA__ADK90385
MNPNQKIITIGSVCMTIGMANLILQIGNIISIWISHSIQLGNQNQIETCNQSVITYENNTWVNQTYVNISNTNFAAGQSVVSVKLSGNSSLCPVSGWAIYSKDNSIRIGSKGDVFVIREPFISCSPLECRTFFLTQGALLNDKHSNGTIKDRSPHRTLMSCPIGEVPSPYNSRFESVAWSASACHDGINWLTIGISGPDNGAVAVLKYNGIITDTIKSWRNNILRTQESECTCVNGSCFTVMTDGPSDGQASYKIFRIEKGKIVKSVEMNAPNYHYEECSCYPDSSEITCVCRDNWHGSNRPWVSFNQNLEYQIGYICSGIFGDNPRPNDKTGSCGPVSSNGANGVKGFSFKYGNGVWIGRTKSISSRNGFEMIWDPNGWTGTDNNFSIKQDIVGINEWSGYSGSFVQHPELTGLDCIRPCFWVELIRGRPKENTIWTSGSSISFCGVNSDTVGWSWPDGAELPFTIDK

SEQ ID NO: 19201 - protein, 469 aa, synthetic construct; identical to SEQ ID NO: 16738
  REGION 1..469: note = neuraminidase__InfluenzaA__ADK90389

SEQ ID NO: 19202 - protein, 469 aa, synthetic construct; identical to SEQ ID NO: 18717
  REGION 1..469: note = neuraminidase__InfluenzaA__ADK90393

SEQ ID NO: 19203 - protein, 469 aa, synthetic construct; identical to SEQ ID NO: 18629
  REGION 1..469: note = neuraminidase__InfluenzaA__ADK90397

SEQ ID NO: 19204 - protein, 469 aa, synthetic construct; identical to SEQ ID NO: 16738
  REGION 1..469: note = neuraminidase__InfluenzaA__ADK90401

SEQ ID NO: 19205 - protein, 469 aa, synthetic construct
  REGION 1..469: note = neuraminidase__InfluenzaA__ADK90405
MNPNQKIITIGSVCMTIGMANLILQIGNIISIWISHSIQLGNQNQIETCNQSVITYENNTWVNQTYVNISNTNFAAGQSVVSVKLAGNSSLCPVSGWAIYSKDNSIRIGSKGDVFVIREPFISCSPLECRTFFLTQGALLNDKHSNGTIKDRSPHRTLMSCPIGEVPSPYNSRFESVAWSASACHDGINWLTIGISGPDNGAVAVLKYNGIITDTIKSWRNNILRTQESECTCVNGSCFTVMTDGPSDGQASYKIFRIEKGKIVKSVEMNAPNYHYEECSCYPDSSEITCVCRDNWHGSNRPWVSFNQNLEYQIGYICSGIFGDNPRPNDKTGSCGPVSSNGANGVKGFSFKYGNGVWIGRTKSISSRNGFEMIWDPNGWTGTDNNFSIKQDIVGINEWSGYSGSFVQHPELTGLDCIRPCFWVELIRGRPKENTIWTSGSSISFCGVNSDTVGWSWPDGAELPFTIDK

SEQ ID NO: 19206 - protein, 469 aa, synthetic construct; identical to SEQ ID NO: 16738
  REGION 1..469: note = neuraminidase__InfluenzaA__ADK90409

SEQ ID NO: 19207 - protein, 469 aa, synthetic construct
  REGION 1..469: note = neuraminidase__InfluenzaA__ADK90413
MNPNQKIITIGSVCMTIGMANLILQIGNIISIWISHSIQLGNQNQIETCNQSVITYENNTWVNQTYVNISNTNFAAGQSVVSVKLAGNSSLCPVSGWAIYSKDNSIRIGSKGDVFVIREPFISCSPLECRTFFLTQGALLNDKHSNGTIKDRSPHRTLMSCPIGEVPSPYNSRFESVAWSASACHDGINWLTIGISGPDNGAMAVLKYNGIITDTIKSWRNNILRTQESECACVNGSCFTVMTDGPSDGQASYKIFRIEKGKIVKSVEMNAPNYHYEECSCYPDSSEITCVCRDNWHGSNRPWVSFNQNLEYQIGYICSGIFGDNPRPNDKTGSCGPVSSNGANGVKGFSFKYGNGVWIGRTKSISSRNGFEMIWDPNGWTGTDNNFSIKQDIVGINEWSGYSGSFVQHPELTGLDCIRPCFWVELIRGRPKENTIWTSGSSISFCGVNSDTVGWSWPDGAELPFTIDK

SEQ ID NO: 19208 - protein, 469 aa, synthetic construct; identical to SEQ ID NO: 16738
  REGION 1..469: note = neuraminidase__InfluenzaA__ADK90417

SEQ ID NO: 19209 - protein, 469 aa, synthetic construct; identical to SEQ ID NO: 16738
  REGION 1..469: note = neuraminidase__InfluenzaA__ADK90421

SEQ ID NO: 19210 - protein, 469 aa, synthetic construct; identical to SEQ ID NO: 16738
  REGION 1..469: note = neuraminidase__InfluenzaA__ADK90425

SEQ ID NO: 19211 - protein, 469 aa, synthetic construct; identical to SEQ ID NO: 16738
  REGION 1..469: note = neuraminidase__InfluenzaA__ADK90429

SEQ ID NO: 19212 - protein, 469 aa, synthetic construct; identical to SEQ ID NO: 16599
  REGION 1..469: note = neuraminidase__InfluenzaA__ADK94194

SEQ ID NO: 19213 - protein, 469 aa, synthetic construct; identical to SEQ ID NO: 16599
  REGION 1..469: note = neuraminidase__InfluenzaA__ADK94205

SEQ ID NO: 19214 - protein, 469 aa, synthetic construct; identical to SEQ ID NO: 17905
  REGION 1..469: note = neuraminidase__InfluenzaA__ADK94216

SEQ ID NO: 19215 - protein, 469 aa, synthetic construct; identical to SEQ ID NO: 16599
  REGION 1..469: note = neuraminidase__InfluenzaA__ADK94227

SEQ ID NO: 19216 - protein, 469 aa, synthetic construct; identical to SEQ ID NO: 16599
  REGION 1..469: note = neuraminidase__InfluenzaA__ADK94238

SEQ ID NO: 19217 - protein, 469 aa, synthetic construct; identical to SEQ ID NO: 19123
  REGION 1..469: note = neuraminidase__InfluenzaA__ADK94260

SEQ ID NO: 19218 - protein, 469 aa, synthetic construct; identical to SEQ ID NO: 19123
  REGION 1..469: note = neuraminidase__InfluenzaA__ADK94271

SEQ ID NO: 19219 - protein, 469 aa, synthetic construct; identical to SEQ ID NO: 16599
  REGION 1..469: note = neuraminidase__InfluenzaA__ADK94293

SEQ ID NO: 19220 - protein, 469 aa, synthetic construct; identical to SEQ ID NO: 16599
  REGION 1..469: note = neuraminidase__InfluenzaA__ADK94304

SEQ ID NO: 19221 - protein, 469 aa, synthetic construct
  REGION 1..469: note = neuraminidase__InfluenzaA__ADK94326
MNPNQKIITIGSVSLTISTICFFMQIAILITTVTLHFKQYEFNSPPNNQVMLCEPTIIERNITEIVYLTNTTIEKEICPKLAEYRNWSKPQCDITGFAPFSKDNSIRLSAGGDIWVTREPYVSCDPDKCYQFALGQGTTLNNIHSNNTVRDRTPYRTLLMNELGVPFHLGTKQVCIAWSSSSCHDGKAWLHVCITGDDKNATASFIYNGRLVDSVVSWSKEILRTQESECVCINGTCTVVMTDGSASGKADTKILFIEEGKIVHTSTLSGSAQHVEECSCYPRYPGVRCVCRDNWKGSNRPIVDINIKDHSIVSSYVCSGLVGDTPRKNDSSSSSHCLDPNNEEGGHGVKGWAFDDGNDVWMGRTISEKSRLGYETFKVIEGWSNPKSKLQINRQVIVDRGNRSGYSGIFSVEGKSCINRCFYVELIRGRKEETEVLWTSNSIVVFCGTSGTYGTGSWPDGADINLMPI

SEQ ID NO: 19222 - protein, 469 aa, synthetic construct; identical to SEQ ID NO: 17905
  REGION 1..469: note = neuraminidase__InfluenzaA__ADK94337

SEQ ID NO: 19223 - protein, 469 aa, synthetic construct; identical to SEQ ID NO: 16599
  REGION 1..469: note = neuraminidase__InfluenzaA__ADK94444

SEQ ID NO: 19224 - protein, 469 aa, synthetic construct
  REGION 1..469: note = neuraminidase__InfluenzaA__ADK94479
MNPNQKIITIGSVSLTISTICFLMQIAILTTTVTLHFKQYEFNSPPNNQVMLCEPTTIERNITEIVYLTNTTIEKEICPKLAEYRNWSKPQCDITGFAPFSKDNSIRLSAGGDIWVTREPYVSCDPDKCYQFALGQGTTLNNVHSNNTVRDRTPYRTLLMNELGVPFHLGTKQVCIAWSSSSCHDGKAWLHVCITGDDKNATASFIYNGKLVDSVVSWSKEILRTQESECVCINGTCTVVMTDGSASGKADTKILFIEEGKIVHTSTLSGSAQHVEECSCYPRYPGVRCVCRDNWKGSNRPIVDINIKDHSIVSSYLCSGLVGDTPRKNDSSSSSHCLDPNNEEGGHGVKGWAFDDGNDVWMGRTISEKSRLGYETFKVIEGWSNPKSKLQINRQVIVDRGNRSGYSGIFSVEGKSCINRCFYVELIRGRKEETGVLWTSNSIVVFCGTSGTYGTGSWPDGADINLMPI

SEQ ID NO: 19225 - protein, 469 aa, synthetic construct; identical to SEQ ID NO: 16599
  REGION 1..469: note = neuraminidase__InfluenzaA__ADK94490

SEQ ID NO: 19226 - protein, 469 aa, synthetic construct; identical to SEQ ID NO: 16599
  REGION 1..469: note = neuraminidase__InfluenzaA__ADK94501

SEQ ID NO: 19227 - protein, 469 aa, synthetic construct
  REGION 1..469: note = neuraminidase__InfluenzaA__ADK94512
MNPNQKIITIGSVSLTISTICFFMQIAILITTVTLHFKQYEFNSPPNNQVMLCEPTIIERNITEIVYLTNTTIEKEICPKLAEYRNWSKPQCDITGFAPFSKDNSIRLSAGGDIWVTREPYVSCDPDKCYQFALGQGTTLNNVHSNNTVRDRTPYRTLLMNELGVPFHLGTKQVCIAWSSSSCHDGKAWLHVCITGDDKNATASFIYNGRLVDSVVSWSKEILRTQESECVCINGTCTVVMTDGSASGKADTKILFIEEGRIVHTSTLSGSAQHVEECSCYPRYPGVRCVCRDNWKGSNRPIVDINIKDHSIVSSYVCSGLVGDTPRKNDSSSSSHCLDPNNEEGGHGVKGWAFDDGNDVWMGRTISEKSRLGYETFKVIEGWSNPKSKLQINRQVIVDRGNRSGYSGIFSVEGKSCINRCFYVELIRGRKEETEVLWTSNSIVVFCGTSGTYGTGSWPDGADINLMPI

SEQ ID NO: 19228 - protein, 469 aa, synthetic construct; identical to SEQ ID NO: 16599
  REGION 1..469: note = neuraminidase__InfluenzaA__ADK94534

SEQ ID NO: 19229 - protein, 469 aa, synthetic construct; identical to SEQ ID NO: 19123
  REGION 1..469: note = neuraminidase__InfluenzaA__ADK94556

SEQ ID NO: 19230 - protein, 469 aa, synthetic construct; identical to SEQ ID NO: 16599
  REGION 1..469: note = neuraminidase__InfluenzaA__ADK94567

SEQ ID NO: 19231 - protein, 469 aa, synthetic construct; identical to SEQ ID NO: 16599
  REGION 1..469: note = neuraminidase__InfluenzaA__ADK94578

SEQ ID NO: 19232 - protein, 469 aa, synthetic construct; identical to SEQ ID NO: 16599
  REGION 1..469: note = neuraminidase__InfluenzaA__ADK94589

SEQ ID NO: 19233 - protein, 469 aa, synthetic construct; identical to SEQ ID NO: 18289
  REGION 1..469: note = neuraminidase__InfluenzaA__ADK98504

SEQ ID NO: 19234 - protein, 469 aa, synthetic construct
  REGION 1..469: note = neuraminidase__InfluenzaA__ADK98506
MNPNQKIITIGSVCMTIGMANLILQIGNIISIWISHSIQLGNQNQIETCNQNVITYENNTWVNQTYVNISNTNFAAGQSVVSVKLAGNSSLCPVSGWAIYSKDNSIRIGSKGDVFVIREPFISCSPLECRTFFLTQGALLNDKHSNGTIKDRSPYRTLMSCPIGEVPSPYNSRFESVAWSASACHDGINWLTIGISGPDNGAVAVLKYNGIITDTIKSWRNNILRTQESECACVNGSCFTVMTDGPSDGQASYKIFRIEKGKIVKSVEMNAPNYHYEECSCYPDSSEITCVCRDNWHGSNRPWVSFNQNLEYQIGYICSGIFGDNPRPNDKTGSCGPVSSNGANGVKGFSFKYGNGVWIGRTKSISSRNGFEMIWDPNGWTGTDNNFSIKQDIVGINEWSGYSGSFVQHPELTGLDCIRPCFWVELIRGRPKENTIWTSGSSISFCGVNSDTVGWSWPDGAELPFTIDK

SEQ ID NO: 19235 - protein, 469 aa, synthetic construct
  REGION 1..469: note = neuraminidase__InfluenzaA__ADK98626
MNPNQKIITIGSVSLTISTICFFMQIAILITTVTLHFKQYEFNSPPNNQVMLCEPTMIERNITEIVYLTNTTIEKEICPKLAEYRNWSKPQCDITGFAPFSKDNSIRLSAGGDIWVTREPYVSCDPDKCYQFALGQGTTLNNVHSNNTVRDRTPYRTLLMNELGVPFHLGTKQVCIAWSSSSCHDGKAWLHVCITGDDKNATASFIYNGRLVDSVVSWSKEILRTQESECVCINGTCTVVMTDGSASGKADTKILFIEEGKIVHTSTLSGSAQHVEECSCYPRYPGVRCVCRDNWKGSNRPIVDINIKDHSIVSSYLCSGLVGDTPRKNDSSSSSHCLDPNNEEGGHGVKGWAFDDGNDVWMGRTISEKSRLGYETFKVIEGWSNPKSKLQINRQVIVDRGNRSGYSGIFSVEGKSCINRCFYVELIRGRKEETEVLWTSNSIVVFCGTSGTYGTGSWPDGADINLMPI

SEQ ID NO: 19236 - protein, 469 aa, synthetic construct; identical to SEQ ID NO: 17905
  REGION 1..469: note = neuraminidase__InfluenzaA__ADK98637

SEQ ID NO: 19237 - protein, 469 aa, synthetic construct
  REGION 1..469: note = neuraminidase__InfluenzaA__ADK98648
MNPNQKIITIGSVSLTISTICFFMQIAILVTTVTLHFKQYEFNSPPNNQVMLCEPTIIERNITEIVYLTNTTIEKEICPKLAEYRNWSKPQCDITGFAPFSKDNSIRLSAGGDIWVTREPYVSCDPDKCYQFALGQGTTLNNVHSNNTVRDRTPYRTLLMNELGVPFHLGTKQVCIAWSSSSCHDGKAWLHVCITGDDKNATASFIYNGRLVDSVVSWSKDILRTQESECVCINGTCTVVMTDGSASGKADTKILFIEEGKIVHTSTLSGSAQHVEECSCYPRYPGVRCVCRDNWKGSNRPIVDINIKDHSIVSSYVCSGLVGDTPRKNDSSSSSHCLDPNNEEGGRGVKGWAFDDGNDVWMGRTISEKSRLGYETFKVIEGWSNPKSKLQINRQVIVDRGNRSGYSGIFSVEGKSCINRCFYVELIRGRKEETEVLWTSNSIVVFCGTSGTYGTGSWPDGANINLMPI

SEQ ID NO: 19238 - protein, 469 aa, synthetic construct
  REGION 1..469: note = neuraminidase__InfluenzaA__ADK98659
MNPNQKIITIGSVSLTISTICFFMQIAILITTVTLHFKQYEFNSPPNNQVMLCEPTIIERNITEIVYLTNTTIEKEICPKLAEYRNWSKPQCDITGFAPFSKDNSIRLSAGGDIWVTREPYVSCDPDKCYQFALGQGTTLNNVHSNNTVRDRTPYRTLLMNELGVPFHLGTKQVCIAWSSSSCHDGKAWLHVCITGDDKNATASFIYNGRLVDSVVSWSKEILRTQESECVCINGTCTVVMTDGSASGKADTKILFIEEGKIVHTSTLSGSAQHVEECSCYPRYPGVRCVCRDNWKGSNRPIVDINIKDHSIVSSYVCSGLVGDTPRKNDSSSSGHCLDPNNEEGGHGVKGWAFDDGNDVWMGRTISEKSRLGYETFKVIEGWSNHKSKLQINRQVIVDRGNRSGYSGIFSVEGKSCINRCFYVELIRGRKEETEVLWTSNSIVVFCGTSGTYGTGSWPDGADLNLMPI

SEQ ID NO: 19239 - protein, 469 aa, synthetic construct; identical to SEQ ID NO: 19123
  REGION 1..469: note = neuraminidase__InfluenzaA__ADK98670

SEQ ID NO: 19240 - protein, 469 aa, synthetic construct
  REGION 1..469: note = neuraminidase__InfluenzaA__ADK98681
MNPNQKIITIGSVSLTISTICFFMQIAILITTVTLHFKQYEFNSPPNNQVMLCEPTIIERNITEIVYLTNTTIEKEICPKLAEYRNWSKPQCDITGFAPFSKDNSIRLSAGGDIWVTREPYVSCDPDKCYQFALGQGTTLNNVHSNNTVRDRTPYRTLLMNELGVPFHLGTKQVCIAWSSSSCHDGKAWLHVCITGDDKNATASFIYNGRLVDSVVSWSKEILRTQESECVCINGTCTVVMTDGSASGEADTKILFIEEGKIVHTSTLSGSAQHVEECSCYPRYPGVRCVCRDNWKGSNRPIVDINIKDHSIVSSYVCSGLVGDTPRKNDSSSSSHCLDPNNEEGGHGVKGWAFDDGNDVWMGRTISEKSRLGYETFKVIEGWSNPKSKLQTNRQVIVDRGNRSGYSGIFSVEGKNCINRCFYVELIRGRKEETEVLWTSNSIVVFCGTSGTYGTGSWPDGADINLMPI

SEQ ID NO: 19241 - protein, 469 aa, synthetic construct
  REGION 1..469: note = neuraminidase__InfluenzaA__ADK98703
MNPNQKIITIGSVSLTISTICFFMQTAILITTVTLHFKQYEFNSPPNNQVMLCEPTIIERNITEIVYLTNTTIEKEICPKLAEYRNWSKPQCDITGFAPFSKDNSIRLSAGGDIWVTREPYVSCDPDKCYQFALGQGTTLNNVHSNNTVRDRTPYRTLLMNELGVPFHLGTKQVCIAWSSSSCHDGKAWLHVCITGDDKNATASFIYNGRLVDSVVSWSKEILRTQESECVCINGTCTVVMTDGSASGEADTKILFIEEGKIVHTSTLSGSAQHVEECSCYPRYPGVRCVCRDNWKGSNRPIVDINIKDHSIVSSYVCSGLVGDTPRKNDSSSSSHCLDPNNEEGGHGVKGWAFDDGNDVWMGRTISEKSRLGYETFKVIEGWSNPKSKLQTNRQVIVDRGNRSGYSGIFSVEGKNCINRCFYVELIRGRKEETEVLWTSNSIVVFCGTSGTYGTGSWPDGADINLMPI

SEQ ID NO: 19242 - protein, 469 aa, synthetic construct; identical to SEQ ID NO: 18484
  REGION 1..469: note = neuraminidase__InfluenzaA__ADK98725

SEQ ID NO: 19243 - protein, 469 aa, synthetic construct; identical to SEQ ID NO: 19123
  REGION 1..469: note = neuraminidase__InfluenzaA__ADK98736

SEQ ID NO: 19244 - protein, 469 aa, synthetic construct
  REGION 1..469: note = neuraminidase__InfluenzaA__ADK98747
MNPNQKIITIGSVSLTISTICFFMQIAILVTTVTLHFKQYEFNSPPNNQVMLCEPTIIERNITEIVYLTNTTIEKEICPKLAEYRNWSKPQCDITGFAPFSKDNSIRLSAGGDIWVTREPYVSCDPDKCYQFALGQGTTLNNVHSNNTVRDRTPYRTLLMNELGVPFHLGTKQVCIAWSSSSCHDGKAWLHVCITGDDKNATASFIYNGRLVDSVVSWSKDILRTQESECVCINGTCTVVMTDGSASGKADTKILFIEEGKIVHTSTLSGSAQHVEECSCYPRYPGVRCVCRDNWKGSNRPIVDINMKDHSIVSSYVCSGLVGDTPRKNDSSSSSHCLDPNNEEGGHGVKGWAFDDGNDVWMGRTISEKSRLGYETFKVIEGWSNPKSKLQINRQVIVDRGNRSGYSGIFSVEGKSCINRCFYVELIRGRKEETEVLWTSNSIVVFCGTSGTYGTGSWPDGANINLMPI

SEQ ID NO: 19245 - protein, 469 aa, synthetic construct
  REGION 1..469: note = neuraminidase__InfluenzaA__ADK98758
MNPNQKIITIGSVSLTISTICFFMQIAILVTTVTLHFKQYEFNSPPNNQVMLCEPTIIERNITEIVYLTNTTIEKEICPKLAEYRNWSKPQCDITGFAPFSKDNSIRLSAGGDIWVTREPYVSCDPDKCYQFALGQGTTLNNVHSNNTVRDRTPYRTLLMNELGVPFHLGTKQVCIAWSSSSCHDGKAWLHVCITGDDKNATASFIYNGRLVDSVVSWSKDILRTQESECVCINGTCTVVMTDGSASGKANTKILFIEEGKIVHTSTLSGSAQHVEECSCYPRYPGVRCVCRDNWKGSNRPIVDINIKDHSIVSSYVCSGLVGDTPRKNDSSSSSHCLDPNNEEGGHGVKGWAFDDGNDVWMGRTISEKSRLGYETFKVIEGWSNPKSKLQINRQVIVDRGNRSGYSGIFSVEGKSCINRCFYVELIRGRKEETEVLWTSNSIVVFCGTSGTYGTGSWPDGANINLMPI

SEQ ID NO: 19246 - protein, 469 aa, synthetic construct; identical to SEQ ID NO: 18484
  REGION 1..469: note = neuraminidase__InfluenzaA__ADK98769

SEQ ID NO: 19247 - protein, 469 aa, synthetic construct; identical to SEQ ID NO: 19038
  REGION 1..469: note = neuraminidase__InfluenzaA__ADK98780

SEQ ID NO: 19248 - protein, 469 aa, synthetic construct; identical to SEQ ID NO: 18484
  REGION 1..469: note = neuraminidase__InfluenzaA__ADK98791

SEQ ID NO: 19249 - protein, 469 aa, synthetic construct; identical to SEQ ID NO: 16599
  REGION 1..469: note = neuraminidase__InfluenzaA__ADK98802

SEQ ID NO: 19250 - protein, 469 aa, synthetic construct
  REGION 1..469: note = neuraminidase__InfluenzaA__ADK98813
MNPNQKIITIGSVSLTISTICFFMQIAILITTVTLHFKQYEFNSPPNNQVMLCEPAIIERNITEIVYLTNTTIEKEICPKLAEYRNWSKPQCDITGFAPFSKDNSIRLSAGGDIWVTREPYVSCDPDKCYQFALGQGTTLNNVHSNNTVRDRTPYRTLLMNELGVPFHLGTKQVCIAWSSSSCHDGKAWLHVCITGDDKNATASFIYNGRLVDSVVSWSKEILRTQESECVCINGTCTVVMTDGSASGKADTKILFIEEGKIVHTSTLSGSAQHVEECSCYPRYPGVRCVCRDNWKGSNRPIVDINIKDHSIVSSYVCSGLVGDTPRKNDSSSSSHCLDPNNEEGGHGVKGWAFDDGNDVWMGRTISEKSRLGYETFKVIEGWSNHKSKLQINRQVIVDRGNRSGYSGIFSVEGKSCINRCFYVELIRGRKEETEVLWTSNSIVVFCGTSGTYGTGSWPDGADLNLMPI

SEQ ID NO: 19251 - protein, 469 aa, synthetic construct; identical to SEQ ID NO: 16599
  REGION 1..469: note = neuraminidase__InfluenzaA__ADK98824

SEQ ID NO: 19252 - protein, 469 aa, synthetic construct; identical to SEQ ID NO: 18484
  REGION 1..469: note = neuraminidase__InfluenzaA__ADK98835

SEQ ID NO: 19253 - protein, 469 aa, synthetic construct; identical to SEQ ID NO: 19123
  REGION 1..469: note = neuraminidase__InfluenzaA__ADK98846

SEQ ID NO: 19254 - protein, 469 aa, synthetic construct
  REGION 1..469: note = neuraminidase__InfluenzaA__ADK98857
MNPNQKIITIGSVSLTISTICFFMQIAILVTTVTLHFKQYEFNSPPNNQVMLCEPTIIERNITEIVYLTNTTIEKEICPKLAEYRNWSKPQCDITGFAPFSKDNSIRLSAGGDIWVTREPYVSCDPDKCYQFALGQGTTLNNVHSNNTVRDRTPYRTLLMNELGVPFHLGTKQVCIAWSSSSCHDGKAWLHVCITGDDKNATASFIYNGRLVDSVVSWSKDILRTQESECVCINGTCTVVMTDGSASGKADTKILFIEEGKIVHTSTLSGSAQHVEECSCYPRYPGVRCVCRDNWKGSNRPIVDINIKDHSIVSSYVCSGLVGDTPRKNDSSSSSHCLDPNNEEGGHGVKGWAFDDGNDVWMGRTISEKSRLGYETFKVIEGWSNHKSKLQINRQVIVDRGNRSGYSGIFSVEGKSCINRCFYVELIRGRKEETEVLWTSNSIVVFCGTSGTYGTGSWPDGANINLMPI

SEQ ID NO: 19255 - protein, 469 aa, synthetic construct
  REGION 1..469: note = neuraminidase__InfluenzaA__ADK98868
MNPNQKIITIGSVSLTISTICFFMQIAILITTVTLHFKQYEFNSPPNNQVMLCEPTIIERNITEIVYLTNTTIEKEICPKLAEYRNWSKPQCDITGFAPFSKDNSIRLSAGGDIWVTREPYVSCDPDKCYQFALGQGTTLNNVHSNNTVRDRTPYRTLLMNELGVPFHLGTKQVCIAWSSSSCHDGKAWLHVCITGDDKNATASFIYNGRLVDSVVSWSKEILRTQESECVCINGTCTVVMTDGSASGKADTKILFIEEGKIVHTSTLSGSAQHVEECSCYPRYPGVRCVCRDNWKGSNRPIVDINIKDHSIVSSYVCSGLVGDTPRKNDSSSSSHCLDPNNEEGGHGVKGWAFDDGNDVWMGRTISEKSRLGYETFKVIEGWSNPKSKLQINRQVIVDRGNRSGYSGIFSVEGKSCINRCFYVELIRGRKEENEVLWTSNSIVVFCGTSGTYGTGSWPDGADINLMPI

SEQ ID NO: 19256 - protein, 469 aa, synthetic construct
  REGION 1..469: note = neuraminidase__InfluenzaA__ADK98879
MNPNQKIITIGSVSLTISTICFFMQIAILITTVTLHFKQYEFNSPPNNQAMLCEPTIIERNITEIVYLTNTTIEKEICPKLAEYRNWSKPQCDITGFAPFSKDNSIRLSAGGDIWVTREPYVSCDPDKCYQFALGQGTTLNNVHSNNTVRDRTPYRTLLMNELGVPFHLGTKQVCIAWSSSSCHDGKAWLHVCITGDDKNATASFIYNGRLVDSVVSWSKEILRTQESECVCINGTCTVVMTDGSASGKADTKILFIEEGKIVHTSTLSGSAQHVEECSCYPRYPGVRCVCRDNWKGSNRPIVDINIKDHSIVSSYVCSGLVGDTPRKNDSSSSSHCLDPNNEEGGHGVKGWAFDDGNDVWMGRTISEKSRLGYETFKVIEGWSNPKSKLQINRQVIVDRGNRSGYSGIFSVEGKSCINRCFYVELIRGRKEETEVLWTSNSIVVFCGTSGTYGTGSWPDGADINLMPI

SEQ ID NO: 19257 - protein, 469 aa, synthetic construct; identical to SEQ ID NO: 19123
  REGION 1..469: note = neuraminidase__InfluenzaA__ADK98890

SEQ ID NO: 19258 - protein, 469 aa, synthetic construct; identical to SEQ ID NO: 18484
  REGION 1..469: note = neuraminidase__InfluenzaA__ADK98901

SEQ ID NO: 19259 - protein, 469 aa, synthetic construct; identical to SEQ ID NO: 19038
  REGION 1..469: note = neuraminidase__InfluenzaA__ADK98912

SEQ ID NO: 19260 - protein, 469 aa, synthetic construct; identical to SEQ ID NO: 19123
  REGION 1..469: note = neuraminidase__InfluenzaA__ADK98923

SEQ ID NO: 19261 - protein, 469 aa, synthetic construct; identical to SEQ ID NO: 17905
  REGION 1..469: note = neuraminidase__InfluenzaA__ADK98945

SEQ ID NO: 19262 - protein, 469 aa, synthetic construct
  REGION 1..469: note = neuraminidase__InfluenzaA__ADK98956
MNPNQKIITIGSVSLTISTICFFMQIAILITTVTLHFKQYEFNSPPNNQVMLCEPTIIERNITEIVYLTNTTIEKEICPKLAEYRNWSKPQCDITGFAPFSKDNSIRLSAGGDIWVTREPYVSCDPDKCYQFALGQGTTLNNVHSNNTVRDRTPYRTLLMNELGVPFHLGTKQVCIAWSSSSCHDGKAWLHVCITGDDKNATASFIYNGRLVDSVVSWSKEILRTQESECVCINGTCTVVMTDGSASGKADTKILFIEEGKIVHTSTLSGSAQHVEECSCYPRYPGVRCVCRDNWKGSNRPIVDINIKDHSVVSSYVCSGLVGDTPRKSDSSSSSHCLDPNNEEGGHGVKGWAFDDGNDVWMGRTISEKSRLGYETFKVIEGWSNHKSKLQINRQVIVDRGNRSGYSGIFSVEGKSCINRCFYVELIRGRKEETEVLWTSNSIVVFCGTSGTYGTGSWPDGADLNLMPI

SEQ ID NO: 19263 - protein, 469 aa, synthetic construct; identical to SEQ ID NO: 18484
  REGION 1..469: note = neuraminidase__InfluenzaA__ADK98967

SEQ ID NO: 19264 - protein, 469 aa, synthetic construct; identical to SEQ ID NO: 19123
  REGION 1..469: note = neuraminidase__InfluenzaA__ADK98978

SEQ ID NO: 19265 - protein, 469 aa, synthetic construct; identical to SEQ ID NO: 19262
  REGION 1..469: note = neuraminidase__InfluenzaA__ADK98989

SEQ ID NO: 19266 - protein, 469 aa, synthetic construct; identical to SEQ ID NO: 16599
  REGION 1..469: note = neuraminidase__InfluenzaA__ADK99000

SEQ ID NO: 19267 - protein, 469 aa, synthetic construct; identical to SEQ ID NO: 19262
  REGION 1..469: note = neuraminidase__InfluenzaA__ADK99011

SEQ ID NO: 19268 - protein, 469 aa, synthetic construct
  REGION 1..469: note = neuraminidase__InfluenzaA__ADK99022
MNPNQKIITIGSVSLTISTICFFMQIAILVTTVTLHFKQYEFNSPPNNQVMLCDPTIIERNITEIVYLTNTTIEKEICPKLAEYRNWSKPQCDITGFAPFSKDNSIRLSAGGDIWVTREPYVSCDPDKCYQFALGQGTTLNNVHSNNTVRDRTPYRTLLMNELGVPFHLGTKQVCIAWSSSSCHDGKAWLHVCITGDDKNATASFIYNGRLVDSVVSWSKDILRTQESECVCINGTCTVVMTDGSASGKADTKILFIEEGKIVHTSTLSGSAQHVEECSCYPRYPGVRCVCRDNWKGSNRPIVDINIKDHSIVSSYVCSGLVGDTPRKNDSSSSSHCLDPNNEEGGHGVKGWAFDDGNDVWMGRTISEKSRLGYETFKVIEGWSNPKSKLQINRQVIVDRGNRSGYSGIFSVEGKSCINRCFYVELIRGRKEETEVLWTSNSIVVFCGTSGTYGTGSWPDGANINLMPI

SEQ ID NO: 19269 - protein, 469 aa, synthetic construct; identical to SEQ ID NO: 16599
  REGION 1..469: note = neuraminidase__InfluenzaA__ADK99033

SEQ ID NO: 19270 - protein, 469 aa, synthetic construct
  REGION 1..469: note = neuraminidase__InfluenzaA__ADK99044
MNPNQKIITIGSVSLTISTICFFMQIAILITTVTLHFKQYEFNSPPNNQVMLCEPTIIERNKTEIVYLTNTTIEKEICPKLAEYRNWSKPQCDITGFAPFSKDNSIRLSAGGDIWVTREPYVSCDPDKCYQFALGQGTTLNNGHSNNTVRDRTPYRTLLMNELGVPFHLGTKQVCIAWSSSSCHDGKAWLHVCITGDDKNATASFIYNGKLVDSVVSWSKEILRTQESECVCINGTCTVVMTDGSASGKADTKILFIEEGKIVHTSTLSGSAQHVEECSCYPRYPGVRCVCRDNWKGSNRPIVDINIKDHSIVSSYVCSGLVGDTPRKNDSSSSSHCLDPNNEEGGHGVKGWAFDDGNDVWMGRTISEKSRLGYETFKVIEGWSNHKSKLQINRQVIVDRGNRSGYSGIFSVEGKSCINRCFYVELIRGRKEETEVLWTSNSIVVFCGTSGTYGTGSWPDGADLNLMPI

SEQ ID NO: 19271 - protein, 469 aa, synthetic construct
  REGION 1..469: note = neuraminidase__InfluenzaA__ADK99055
MNPNQKIITIGSVSLTISTICFFMQIAILITTVTLHFKQYEFNSPPNNQVMLCEPTIIERNITEIVYLTNTTIEKEICPKLAEYRNWSKPQCDITGFAPFSKDNSIRLSAGGDIWVTREPYVSCDPDKCYQFALGQGTTLNNVHSNNTVRDRTPYRTLLMNELGVPFHLGTKQVCIAWSSSSCHDGKAWLHVCITGDDKNATASFIYNGRLVDSVVSWSKEILRTQESECVCINGTCTVVMTDGSASGKADTKILFIEEGKIVHTSTLSGSAQHVEECSCYPRYPGVRCVCRDNWKGSNRPIVDINMKDHSIVSSYVCSGLVGDTPRKNDSSSSSHCLDPNNEEGGHGVKGWAFDDGNDVWMGRTISEKSRLGYETFKVIEGWSNPKSKLQINRQVIVDRGNRSGYSGIFSVEGKSCINRCFYVELIRGRKEETEVLWTSNSIVVFCGTSGTYGTGSWPDGADINLMPI

SEQ ID NO: 19272 - protein, 469 aa, synthetic construct
  REGION 1..469: note = neuraminidase__InfluenzaA__ADK99066
MNPNQKIITIGSVSLTISTICFFMQIAILITTVTLHFKQCEFNSPPNNQVMLCEPTIIERNITEIVYLTNTTIEKKICPKLAEYRNWSKPQCDITGFAPFSKDNSIRLSAGGDIWVTREPYVSCDPDKCYQFALGQGTTLNNVHSNNTVRDRTPYRTLLMNELGVPFHLGTKQVCIAWSSSSCHDGKAWLHVCITGDDKNATASFIYNGRLVDSVVSWSKEILRTQESECVCINGTCTVVMTDGSASGKADTKILFIEEGKIVHTSTLSGSAQHVEECSCYPRYPGVRCVCRDNWKGSNRPIVDINIKDHSIVSSYLCSGLVGDTPRKNDSSSSSHCLDPNNEEGGHGVKGWAFDDGNDVWMGRTISEKSRLGYETFKVIEGWSNPKSKLQINRQVIVDRGNRSGYSGIFSVEGKSCINRCFYVELIRGRKEETEVLWTSNSIVVFCGTSGTYGTGSWPDGANINLMPI

SEQ ID NO: 19273 - protein, 469 aa, synthetic construct
  REGION 1..469: note = neuraminidase__InfluenzaA__ADK99077
MNPNQKIITIGSVSLTISTICFFMQIAILITTVTLHFKQYEFNSPPNNQVMLCEPTIIERNITEIVYLTNTTIEKEICPKLAEYRNWSKPQCDITGFAPFSKDNSIRLSAGGDIWVTREPYVSCDPDKCYQFALGQGTTLNNVHSNNTVRDRTPYRTLLMNELGVPFHLGTKQVCIAWSSSSCHDGKAWLHVCITGDDKNATASFIYNGRLVDSVVSWSKDILRTQESECVCINGTCTVVMTDGSASGKADTKILFIEEGKVVHTSTLSGSAQHVEECSCYPRYPGVRCVCRDNWKGSNRPIVDINIKDHSIVSSYVCSGLVGDTPRKNDSSSSSHCLDPNNEEGGHGVKGWAFDDGNDVWMGRTISEKSRLGYETFKVIEGWSNHKSKLQINRQVIVDRGNRSGYSGIFSVEGKSCINRCFYVELIRGRKEETEVLWTSNSIVVFCGTSGTYGTGSWPDGADLNLMPI

SEQ ID NO: 19274 - protein, 469 aa, synthetic construct; identical to SEQ ID NO: 19038
  REGION 1..469: note = neuraminidase__InfluenzaA__ADK99088

SEQ ID NO: 19275 - protein, 469 aa, synthetic construct; identical to SEQ ID NO: 18484
  REGION 1..469: note = neuraminidase__InfluenzaA__ADK99099

SEQ ID NO: 19276 - protein, 469 aa, synthetic construct
  REGION 1..469: note = neuraminidase__InfluenzaA__ADK99110
MNPNQKIITIGSVSLTISTICFFMQIAILVTTVTLHFKQYEFNPPPNNQVMLCEPTIIERNITEIVYLTNTTIEKEICPKLAEYRNWSKPQCDITGFAPFSKDNSIRLSAGGDIWVTREPYVSCDPDKCYQFALGQGTTLNNVHSNNTVRDRTPYRTLLMNELGVPFHLGTKQVCIAWSSSSCHDGKAWLHVCITGDDKNATASFIYNGRLVDSVVSWSKDILRTQESECVCINGTCTVVMTDGSASGKADTKILFIEEGKIVHTSTLSGSAQHVEECSCYPRYPGVRCVCRDNWKGSNRPIVDINIKDHSIVSSYVCSGLVGDTPRKNDSSSSSHCLDPNNEEGGHGVKGWAFDDGNDVWMGRTISEKSRLGYETFKVIEGWSNPKSKLQINRQVIVDRGNRSGYSGIFSVEGKSCINRCFYVELIRGRKEETEVLWTSNSIVVFCGTSGTYGTGSWPDGANINLMPI

SEQ ID NO: 19277 - protein, 469 aa, synthetic construct; identical to SEQ ID NO: 19123
  REGION 1..469: note = neuraminidase__InfluenzaA__ADK99121

SEQ ID NO: 19278 - protein, 469 aa, synthetic construct
  REGION 1..469: note = neuraminidase__InfluenzaA__ADK99132
MNPNQKIITIGSVSLTISTICFFMQIAILITTVTLHFKQYEFNSPPNNQVMLCEPTIIERNITEIVYLTNTTVEKEICPKLAEYRNWSKPQCDITGFAPFSKDNSIRLSAGGDIWVTREPYVSCDPDKCYQFALGQGTTLNNVHSNNTVRDRTPYRTLLMNELGVPFHLGTKQVCIAWSSSSCHDGKAWLHVCITGDDKNATASFIYNGRLVDSVVSWSKEILRTQESECVCINGTCTVVMTDGSASGKADTKILFIEEGKIVHTSTLSGSAQHVEECSCYPRYPGVRCVCRDNWKGSNRPIVDINIKDHSIVSSYLCSGLVGDTPRKNDSSSSSHCLDPNNEEGGHGVKGWAFDDGNDVWMGRTISEKSRLGYETFKVIEGWSNPKSKLQINRQVIVDRGNRSGYSGIFSVEGKSCINRCFYVELIRGRKEETEVLWTSNSIVVFCGTSGTYGTGSWPDGADINLMPI

SEQ ID NO: 19279 - protein, 469 aa, synthetic construct; identical to SEQ ID NO: 19123
  REGION 1..469: note = neuraminidase__InfluenzaA__ADK99143

SEQ ID NO: 19280 - protein, 469 aa, synthetic construct; identical to SEQ ID NO: 16599
  REGION 1..469: note = neuraminidase__InfluenzaA__ADK99154

SEQ ID NO: 19281 - protein, 469 aa, synthetic construct
  REGION 1..469: note = neuraminidase__InfluenzaA__ADK99176
MNPNQKIITIGSVSLTISTICFFMQIAILVTTVTLHFKQYEFNSPPNNQVMLCEPTIIERNITEIVYLTNTTIEKEICLKLAEYRNWSKPQCDITGFAPFSKDNSIRLSAGGDIWVTREPYVSCDPDKCYQFALGQGTTLNNVHSNNTVRDRTPYRTLLMNELGVPFHLGTKQVCIAWSSSSCHDGKAWLHVCITGDDKNATASFIYNGRLVDSVVSWSKDILRTQESECVCINGTCTVVMTDGSASGKADTKILFIEEGKIVHTSTLSGSAQHVEECSCYPRYPGVRCVCRDNWKGSNRPIVDINIKDHSIVSSYVCSGLVGDTPRKNDSSSSSHCLDPNNEEGGHGVKGWAFDDGNDVWMGRTISEKSRLGYETFKVIEGWSNPKSKLQINRQVIVDRGNRSGYSGIFSVEGKSCINRCFYVELIRGRKEETEVLWTSNSIVVFCGTSGTYGTGSWPDGANINLMPI

SEQ ID NO: 19282 - protein, 469 aa, synthetic construct; identical to SEQ ID NO: 19273
  REGION 1..469: note = neuraminidase__InfluenzaA__ADK99187

SEQ ID NO: 19283 - protein, 469 aa, synthetic construct; identical to SEQ ID NO: 18484
  REGION 1..469: note = neuraminidase__InfluenzaA__ADK99198

SEQ ID NO: 19284 - protein, 469 aa, synthetic construct; identical to SEQ ID NO: 19123
  REGION 1..469: note = neuraminidase__InfluenzaA__ADK99220

SEQ ID NO: 19285 - protein, 469 aa, synthetic construct
  REGION 1..469: note = neuraminidase__InfluenzaA__ADK99231
MNPNQKIITIGSVSLTISTICFFMQIAILITTVTLHFKQYEFNSPPNNQVMLCEPTIIERNITEIVYLTNTTIEKEICPKLAEYRNWSKPQCDITGFAPFSKDNSIRLSAGGDIWVTREPYVSCDPDNCYQFALGQGTTLNNVHSNNTVRDRTPYRTLLMNELGVPFHLGTKQVCIAWSSSSCHDGKAWLHVCITGDDKNATASFIYNGRLVDSVVSWSKEILRTQESECVCINGTCTVVMTDGSASGKADTKILFIEEGKIVHTSTLSGSAQHVEECSCYPRYPGVRCVCRDNWKGSNRPIVDINIKDHSIVSSYLCSGLVGDTPRKNDSSSSSHCLDPNNEEGGHGVKGWAFDDGNDVWMGRTISEKSRLGYETFKVIEGWSNPKSKLQINRQVIVDRGNRSGYSGIFSVEGKSCINRCFYVELIRGRKEETEVLWTSNSIVVFCGTSGTYGTGSWPDGADINLMPI

SEQ ID NO: 19286 - protein, 469 aa, synthetic construct
  REGION 1..469: note = neuraminidase__InfluenzaA__ADK99242
MNPNQKIITIGSVSLTISTICFFMQIAILITTVTLHFKQYEFNSPPNNQVMLCEPTIIERNITEIVYLTNTTIEKEICPKLAEYRNWSKPQCDITGFAPFSKDNSIRLSAGGDIWVTREPYVSCDPDKCYQFALGQGTTLNNVHSNNTVRDRTPYRTLLMNELGVPFHLGTKQVCIAWSSSSCHDGKAWLHVCITGDDKNATASFIYNGRLVDSVVSWSKDILRTQESECVCINGTCTVVMTDGSASGKADTKILFIEEGKIVHTSTLSGSAQHVEECSCYPRYPGVRCVCRDNWKGSNRPIVDINIKDHSIVSSYVCSGLVGDTPRKNDSSSSSHCLDPNNEEGGHGVKGWAFDDGNDVWMGRTISEKSRLGYETFKVIEGWSNPKSKLQINRQVIVDRGNRSGYSGIFSVEGKSCINRCFYVELIRGRKEETEVLWTSNSIIVFCGTSGTYGTGSWPDGADINLMPI

SEQ ID NO: 19287 - protein, 469 aa, synthetic construct
  REGION 1..469: note = neuraminidase__InfluenzaA__ADK99253
MNPNQKIITIGSVSLTISTICFFMQIAILITTVTLHFKQYEFNSPPNNQVMLCEPTIIERNITEIVYLTNTTIEKEICPKLAEYRNWSKPQCDITGFAPFSKDNSIRLSAGGDIWVTREPYVSCDPDKCYQFALGQGTTLNNVHSNNTVRDRTPYRTLLMNELGVPFHLGTKQVCIAWSSSSCHDGKAWLHVCITGDDKNATASFIYNGRLVDSVVSWSKEILRTQESECVCINGTCTVVMTDGSASGKADTKILFIEEGKIVHTSTLSGSAQHVEECSCYPRYPGVRCVCRDNWKGSNRPIVDINIKDHSIVSSYVCSGLVGDTPRKNDSSSSSHCLDPNNEEGGHGVKGWAFDDGNDVWMGRTISEKSRLGYETFKVIEGWSNHKSKLQINRQVIVDRGHRSGYSGIFSVEGKSCINRCFYVELIRGRKEETEVLWTSNSIVVFCGTSGTYGTGSWPDGADLTLMPI

SEQ ID NO: 19288 - protein, 469 aa, synthetic construct
  REGION 1..469: note = neuraminidase__InfluenzaA__ADK99264
MNPNQKIITIGSVSLTISTICFFMQIAILITTVTLHFKQYEFNSPPNNQVMLCEPTIIERNITEIVYLTNTTIEKEICPKLAEYRNWSKPQCDITGFAPFSKDNSIRLSAGGDIWVTREPYVSCDPDKCYQFALGQGTTLNNVHSNNTVRDRTPYRTLLMNELGVPFHLGTKQVCIAWSSSSCHDGKAWLHVCITGDDKNATASFIYNGRLVDSVVSWSKEILRTQESECVCINGTCTVVMTDGSASGKADTKILFIEEGKIVHTSTLSGSAQHVEECSCYPRYPGVRCVCRDNWKGSNRPIVDINIKDHSIVSSYLCSGLVGDTPRKNDSSSSSHCLDPNNEEGGHGVKGWAFDDGNDVWMGRTISEKSRLGYETFKVIEGWSNPKSKLHINRQVIVDRGNRSGYSGIFSVEGKSCINRCFYVELIRGRKEETEVLWTSNSIVVFCGTSGTYGTGSWPDGADINLMPI

SEQ ID NO: 19289 - protein, 469 aa, synthetic construct
  REGION 1..469: note = neuraminidase__InfluenzaA__ADK99275
MNPNQKIITIGSVSLTISTICFFMQIAVLITTVTLHFKQYEFNSPPNNQVMLCEPTIIERNITEIVYLTNTTIEKEICPKLAGYRNWSKPQCDITGFAPFSKDNSIRLSAGGDIWVTREPYVSCDPDKCYQFALGQGTTLNNVHSNDTVRDRTPYRTLLMNELGVPFHLGTKQVCIAWSSSSCHDGKAWLHVCITGDDKNATASFIYNGRLVDSVVSWSKEILRTQESECVCINGTCTVVMTDGSASGKADTKILFIEEGKIVHTSTLSGSAQHVEECSCYPRYPGVRCVCRDNWKGSNRPIVDINIKDHSIVSSYVCSGLVGDTPRKNDSSSSSHCLDPNNEEGGHGVKGWAFDDGNDVWMGRTINETSRLGYETFKVIEGWSNPKSKLQINRQVIVDRGNRSGYSGIFSVEGKSCINRCFYVELIRGRKEETEVLWTSNSIVVFCGTSGTYGTGSWPDGADLNLMPI

SEQ ID NO: 19290 - protein, 469 aa, synthetic construct
  REGION 1..469: note = neuraminidase__InfluenzaA__ADK99286
MNPNQKIITIGSVSLTISTICFFMQIAILITTVTLHFKQYEFNPPPNNQVTPREPTIIERNITEIVYLTNTTIEKEICPKLAEYRNWSKPQCDITGFAPFSKDNSIRLSAGGDIWVTREPYVSCDPDKCYQFALGQGTTLNNIHSNNTVRDRTPYRTLLMNELGVPFHLGTKQVCIAWSSSSCHDGKAWLHVCITGDDKNATASFIYNGRLVDSVVSWSKEILRTQESECVCINGTCTVVMTDGSASGKADTKILFIEEGKIVHTSTLSGSAQHVEECSCYPRYPGVRCVCRDNWKGSNRPIVDINIKDHSIVSSYVCSGLVGDTPRKNDSSSSSHCLDPNNEEGGHGVKGWAFDDGNDVWMGRTISEKSRLGYETFKVIEGWSNPKSKLQINRQVIVDRGNRSGYSGIFSVEGKSCINRCFYVELIRGRKEETEVLWTSNSIVVFCGTSGTYGTGSWPDGADINLMPI

SEQ ID NO: 19291 - protein, 469 aa, synthetic construct; identical to SEQ ID NO: 17592
  REGION 1..469: note = neuraminidase__InfluenzaA__ADK99297

SEQ ID NO: 19292 - protein, 469 aa, synthetic construct
  REGION 1..469: note = neuraminidase__InfluenzaA__ADK99308
MNPNQKIITIGSVSLTISTICFFMQIAILVTTVTLHFKQYEFNSPPNNQVMLCEPTIIERNITEIVYLTNTTIEKEICPKLAEYRNWSKPQCDITGFAPFSKDNSIRLSAGGDIWVTREPYVSCDPDKCYQFALGQGTTLNNVHSNNTVRDRTPYRTLLMNELGIPFHLGTKQVCIAWSSSSCHDGKAWLHVCITGDDKNATASFIYNGRLVDSVVSWSKDILRTQESECVCINGTCTVVMTDGSASGKADTKILFIEEGKIVHTSTLSGSAQHVEECSCYPRYPGVRCVCRDNWKGSNRPIVDINIKDHSIVSSYVCSGLVGDTPRKNDSSSSSHCLDPNNEEGGHGVKGWAFDDGNDVWMGRTISEKSRLGYETFKVIEGWSNPKSKLQINRQVIVDRGNRSGYSGIFSVEGKSCINRCFYVELIRGRKEETEVLWTSNSIVVFCGTSGTYGTGSWPDGANINLMPI

SEQ ID NO: 19293 - protein, 470 aa, synthetic construct; identical to SEQ ID NO: 17461
  REGION 1..470: note = neuraminidase__InfluenzaA__ADL14590

SEQ ID NO: 19294 - protein, 469 aa, synthetic construct; identical to SEQ ID NO: 18484
  REGION 1..469: note = neuraminidase__InfluenzaA__ADL27992

SEQ ID NO: 19295 - protein, 469 aa, synthetic construct; identical to SEQ ID NO: 19123
  REGION 1..469: note = neuraminidase__InfluenzaA__ADL28003

SEQ ID NO: 19296 - protein, 469 aa, synthetic construct; identical to SEQ ID NO: 19268
  REGION 1..469: note = neuraminidase__InfluenzaA__ADL28014

SEQ ID NO: 19297 - protein, 469 aa, synthetic construct
  REGION 1..469: note = neuraminidase__InfluenzaA__ADL28025
MNPNQKIITIGSVSLTISTICFFMQIAILITTVTLHFKQYEFNSPPNNQVMLCEPTIIERNITEIVYLTNTTIEKKICPKLAEYRNWSKPQCDITGFAPFSKDNSIRLSAGGDIWVTREPYVSCDPDKCYQFALGQGTTLNNVHSNNTVRDRTPYRTLLMNELGVPFHLGTKQVCIAWSSSSCHDGKAWLHVCITGDDKNATASFIYNGRLVDSVVSWSKEILRTQESECVCINGTCTVVMTDGSASGKADTKILFIEEGKIVHTSTLSGSAQHVEECSCYPRYPGVRCVCRDNWKGSNRPIVDINIKDHSIVSSYLCSGLVGDTPRKNDSSSSSHCLDPNNEEGGHGVKGWAFDDGNDVWMGRTISEKSRLGYETFKVIEGWSNPKSKLQINRQVIVDRGNRSGYSGIFSVEGKSCINRCFYVELIRGRKEETEVLWTSNSIVVFCGTSGTYGTGSWPDGADINLMPI

SEQ ID NO: 19298 - protein, 469 aa, synthetic construct; identical to SEQ ID NO: 18484
  REGION 1..469: note = neuraminidase__InfluenzaA__ADL28036

SEQ ID NO: 19299 - protein, 469 aa, synthetic construct; identical to SEQ ID NO: 16599
  REGION 1..469: note = neuraminidase__InfluenzaA__ADL28047

SEQ ID NO: 19300 - protein, 469 aa, synthetic construct; identical to SEQ ID NO: 17905
  REGION 1..469: note = neuraminidase__InfluenzaA__ADL28058

SEQ ID NO: 19301 - protein, 469 aa, synthetic construct; identical to SEQ ID NO: 19276
  REGION 1..469: note = neuraminidase__InfluenzaA__ADL28069

SEQ ID NO: 19302 - protein, 469 aa, synthetic construct; identical to SEQ ID NO: 19123
  REGION 1..469: note = neuraminidase__InfluenzaA__ADL28080

SEQ ID NO: 19303 - protein, 469 aa, synthetic construct; identical to SEQ ID NO: 18484
  REGION 1..469: note = neuraminidase__InfluenzaA__ADL28091

SEQ ID NO: 19304 - protein, 469 aa, synthetic construct
  REGION 1..469: note = neuraminidase__InfluenzaA__ADL28102
MNPNQKIITIGSVSLTISTICFFMQIAILITTVTLHFKQYEFNSPPNNQVMLCEPTIIERNITEIVYLTNTTIEKEICPKLAEYRNWSKPQCDITGFAPFSKDNSIRLSAGGDIWVTREPYVSCDPDKCYQFALGQGTTLNNVHSNNTVRDRTPYRTLLMNELGVPFHLGTKQVCIAWSSSSCHDGKAWLHVCITGDDKNATASFIYNGRLVDSVVSWSKDILRTQESECVCINGTCTVVMTDGSASGKADTKILFIEEGKIVHTSTLSGSAQHVEECSCYPRYPGVRCVCRDNWKGSNRPIVDINIKDHSIVSSYVCSGLVGDTPRKNDSSSSSHCLDPNNEEGGHGVKGWAFDDGNDVWMGRTISEKSRLGYETFKVIEGWSNPKSKLQINRQVIVDRGNRSGYSGIFSVEGKSCINRCFYVELIRGRKEETEVLWTSNSIVVFCGTSGTYGTGSWPDGADINLMPI

SEQ ID NO: 19305 - protein, 469 aa, synthetic construct; identical to SEQ ID NO: 16599
  REGION 1..469: note = neuraminidase__InfluenzaA__ADL28113

SEQ ID NO: 19306 - protein, 469 aa, synthetic construct
  REGION 1..469: note = neuraminidase__InfluenzaA__ADL28129
MNPNQKIITIGSVSLTISTICFFMQIAILVTTVTLHFKQYEFNSPPNNQVMLCEPTIIERNITEIVYLTNTTIEKEICPKLAEYRNWSKPQCDITGFAPFSKDNSIRLSAGGDIWVTREPYVSCDPDKCYQFALGQGTTLNNVHSNNTVRDRTPYRTLLMNELGVPFHLGTKQVCIAWSSSSCHDGKAWLHVCITGDDKNATASFIYNGRLVDSVVSWSKDILRTQESECVCINGTCTVVMTDGSASGKADTKILFIEEGKIVHTSTLSGSAQHVEECSCYPRYPGVRCVCRDNWKGSNRPIVDINIKDHSIVSSYVCSGLVGDTPRKNDSSSSSHCLDPNNEEGGHGVKGWAFDDGNDVWMGRTISEKSRLGYETFKVIEGWSNPKSKLQINRQVIVDRGNRSGYSGIFSVEGKSCINRCFYVELIRGRKEETEILWTSNSIVVFCGTSGTYGTGSWPDGANINLMPI

SEQ ID NO: 19307 - protein, 469 aa, synthetic construct
  REGION 1..469: note = neuraminidase__InfluenzaA__ADL28140
MNPNQKIITIGSVSLTISTICFFMQIAILITTVTLHFKQYEFNSPPNNQVMLCEPTIIERNITEIVYLTNTTIEKEICPKLAEYRNWSKPQCDITGFAPFSKDNSIRLSAGGDIWVTREPYVSCDPDKCYQFALGQGTTLNNVHSNNTVRDRTPYRTLLMNELGVPFHLGTKQVCIAWSSSSCHDGKAWLHVCITGDDKNATASFIYNGKLVDSVVSWSKEILRTQESECVCINGTCTVVMTDGSASGKADTKILFIEEGKIVHTSTLSGSAQHVEECSCYPRYPGVRCVCRDNWKGSNRPIVDINIKDHSIVSSYVCSGLVGDTPRKNDSSSSSHCLDPNNEEGGHGVKGWAFDDGNDVWMGRTISEKSRLGYETFKVIEGWSNPKSKLQINRQVIVDRGNRSGYSGIFSVEGKSCINRCFYVELIRGRKEETEVLWTSNSIVVFCGTSGTYGTGSWPDGANINLMPI

SEQ ID NO: 19308 - protein, 469 aa, synthetic construct; identical to SEQ ID NO: 18484
  REGION 1..469: note = neuraminidase__InfluenzaA__ADL28151

SEQ ID NO: 19309 - protein, 469 aa, synthetic construct; identical to SEQ ID NO: 17905
  REGION 1..469: note = neuraminidase__InfluenzaA__ADL28162

SEQ ID NO: 19310 - protein, 469 aa, synthetic construct; identical to SEQ ID NO: 19123
  REGION 1..469: note = neuraminidase__InfluenzaA__ADL28173

SEQ ID NO: 19311 - protein, 469 aa, synthetic construct; identical to SEQ ID NO: 18484
  REGION 1..469: note = neuraminidase__InfluenzaA__ADL28184

SEQ ID NO: 19312 - protein, 469 aa, synthetic construct
  REGION 1..469: note = neuraminidase__InfluenzaA__ADL28195
MNPNQKIITIGSVSLTISTICFFMQIAILITTVTLHFKQYEFNSPPNNQVMLCEPTIIERNITEIVYLTNTTIEKEICPKLAEYRNWSKPQCDITGFAPFSKDNSIRLSAGGDIWVTREPYVSCDPDKCYQFALGQGTTLNNVHSNNTVRDRTPYRTLLMNELGVPFHLGTKQVCIAWSSSSCHDGKAWLHVCITGDDKNATASFIYNGRLVDSVVSWSKEILRTQESECVCVNGTCTVVMTDGSASGKADTKILFIEEGKIVHTSTLSGSAQHVEECSCYPRYPGVRCVCRDNWKGSNRPIVDINIKDHSIVSSYVCSGLVGDTPRKNDSSSSSHCLDPNNEEGGHGVKGWAFDDGNDVWMGRTISEKSRLGYETFKVIEGWSNPKSKLQINRQVIVDRGNRSGYSGIFSVEGKSCINRCFYVELIRGRKEETEVLWTSNSIVVFCGTSGTYGTGSWPDGADINLMPI

SEQ ID NO: 19313 - protein, 469 aa, synthetic construct; identical to SEQ ID NO: 19273
  REGION 1..469: note = neuraminidase__InfluenzaA__ADL28206

SEQ ID NO: 19314 - protein, 469 aa, synthetic construct; identical to SEQ ID NO: 17592
  REGION 1..469: note = neuraminidase__InfluenzaA__ADL28217

SEQ ID NO: 19315 - protein, 469 aa, synthetic construct; identical to SEQ ID NO: 18484
  REGION 1..469: note = neuraminidase__InfluenzaA__ADL28228

SEQ ID NO: 19316 - protein, 469 aa, synthetic construct; identical to SEQ ID NO: 19123
  REGION 1..469: note = neuraminidase__InfluenzaA__ADL28239

SEQ ID NO: 19317 - protein, 469 aa, synthetic construct; identical to SEQ ID NO: 17905
  REGION 1..469: note = neuraminidase__InfluenzaA__ADL28250

SEQ ID NO: 19318 - protein, 469 aa, synthetic construct; identical to SEQ ID NO: 19123
  REGION 1..469: note = neuraminidase__InfluenzaA__ADL28261

SEQ ID NO: 19319 - protein, 469 aa, synthetic construct; identical to SEQ ID NO: 18484
  REGION 1..469: note = neuraminidase__InfluenzaA__ADL28373

SEQ ID NO: 19320 - protein, 469 aa, synthetic construct; identical to SEQ ID NO: 16603
  REGION 1..469: note = neuraminidase__InfluenzaA__ADL28387

SEQ ID NO: 19321 - protein, 469 aa, synthetic construct
  REGION 1..469: note = neuraminidase__InfluenzaA__ADL28391
MNPNQKIITIGSVSLTISTICFFMQIAILITTVTLHFKQYEFNSSPNNQVMLCEPTIIERNITEIVYLTNTTIEKEICPKLAEYRNWSKPQCDITGFAPFSKDNSIRLSAGGDIWVTRVPYVSCDPDKCYQFALGQGTTLNNVHSNNTVRDRTPYRTLLMNELGVPFHLGTKQVCIAWSSSSCHDGKAWLHVCITGDDKNATASFIYNGRLVDSIVSWSKEILRTQESECVCINGTCTVVMTDGSASGKADTKILFIEEGKIVHTSTLSGSAQHVEECSCYPRYPGVRCVCRDNWKGSNRPIVDINIKDHSIVSSYVCSGLVGDTPRKNDSSSSSHCLDPNNEEGGHGVKGWAFDDGNDVWMGRTISEKSRLGYETFKVIEGWSNPKSKLQINRQVIVDRGNRSGYSGIFSVEGKSCINRCFYVELIRGRKEETEVLWTSNSIVVFCGTSGTYGTGSWPDGADINLMPI

SEQ ID NO: 19322 - protein, 469 aa, synthetic construct
  REGION 1..469: note = neuraminidase__InfluenzaA__ADL28395
MNPNQKIITIGSVSLTIATICFLMQIAILVTTVTLHFKQYECNSPPNNQVMLCEPAIIERNITEIVYLTNTTIEKEICPKLAEYRNWSKPQCNITGFAPFSKDNSIRLSAGGDIWVTRVPYVSCDPDKCYQFALGQGTTLNNGHSNDTVHDRTPYRTLLMNELGVPFHLGTRQVCIAWSSSSCHDGKAWLHVCVTGDDENATASFIYNGRLVDSIGSWSKKILRTQESECVCINGTCTVVMTDGSASGKADTKILFIEEGKIVNISTLSGSAQHVEECSCYPRYPGVRCVCRDNWKGSNRPIVDINVKDYSIVSSYVCSGLVGDTPRKNDSFSSSHCLDPNNEEGGHGVKGWAFDDGNDVWMGRTISEKFRSGYETFKVIEGWSKPNSKLQINRQVIVERGNRSGYSGIFSVEGKSCINRCFYVELIRGRKEETEVWWTSNSIVVFCGTSGTYGTGSWPDGADINLMPI

SEQ ID NO: 19323 - protein, 469 aa, synthetic construct; identical to SEQ ID NO: 16738
  REGION 1..469: note = neuraminidase__InfluenzaA__ADL29675

SEQ ID NO: 19324 - protein, 469 aa, synthetic construct; identical to SEQ ID NO: 16738
  REGION 1..469: note = neuraminidase__InfluenzaA__ADL29685

SEQ ID NO: 19325 - protein, 469 aa, synthetic construct
  REGION 1..469: note = neuraminidase__InfluenzaA__ADL29695
MNPNQKIITIGSVCMTIGMANLILQIGNIISIWISHSIQLGNQNQIETCNQSVITYENNTWVNQTYVNISNTNFAAGQSVVSVKLAGNSSLCPVSGWAIYSKDNSIRIGSKGDVFVIREPFISCSPLECRTFFLTQGALLNDKHSNGTIKDRSPYRTLMSCPIGEVPSPYNSRFESVAWSASACHDGINWLTIGISGPDNGAVAVLKYNGIITDTIKSWRNNILRTQESECACVNGSCFTVMTDGPSDGQASYKIFRIEKGKIVKSVEMNAPNYHYEECSCYPDSSEITCVCRDNWHGSNRPWVSFNQNLEYQIGYICSGIFGDNPRPNDKTGSCGPVSSNGANGVKGFSFKYGNGVWIGRTKSISSRNGFEMIWDPNGWTGTDNNFSIKQDIVGINEWSGYSGSFVQHPELTGLDCIRPCFWVELIRGRPKENTIWTSGSSISFCGVNSDIVGWSWPDGAELPFTIDK

SEQ ID NO: 19326 - protein, 469 aa, synthetic construct; identical to SEQ ID NO: 16738
  REGION 1..469: note = neuraminidase__InfluenzaA__ADL29705

SEQ ID NO: 19327 - protein, 469 aa, synthetic construct; identical to SEQ ID NO: 19325
  REGION 1..469: note = neuraminidase__InfluenzaA__ADL29733

SEQ ID NO: 19328 - protein, 469 aa, synthetic construct; identical to SEQ ID NO: 16738
  REGION 1..469: note = neuraminidase__InfluenzaA__ADL29743

SEQ ID NO: 19329 - protein, 469 aa, synthetic construct
  REGION 1..469: note = neuraminidase__InfluenzaA__ADL29753
MNPNQKIITIGSVCMAIGMANLILQIGNIISIWISHSIQLGNQNQIETCNQSVITYENNTWVNQTYVNISNTNFAAGQSVVSVKLAGNSSLCPVSGWAIYSKDNSIRIGSKGDVFVIREPFISCSPLECRTFFLTQGALLNDKHSNGTIKDRSPYRTLMSCPIGEVPSPYNSRFESVAWSASACHDGINWLTIGISGPDNGAVAVLKYNGIITDTIKSWRNNILRTQESECACVNGSCFTVMTDGPSDGQASYKIFRIEKGKIVKSVEMNAPNYHYEECSCYPDSSEITCVCRDNWHGSNRPWVSFNQNLEYQIGYICSGIFGDNPRPNDKTGSCGPVSSNGANGVKGFSFKYGNGVWIGRTKSISSRNGFEMIWDPNGWTGTDNNFSIKQDIVGINEWSGYSGSFVQHPELTGLDCIRPCFWVELIRGRPKENTIWTSGSSISFCGVNSDIVGWSWPDGAELPFTIDK

SEQ ID NO: 19330 - protein, 469 aa, synthetic construct; identical to SEQ ID NO: 16738
  REGION 1..469: note = neuraminidase__InfluenzaA__ADL29763

SEQ ID NO: 19331 - protein, 469 aa, synthetic construct; identical to SEQ ID NO: 19325
  REGION 1..469: note = neuraminidase__InfluenzaA__ADL29773

SEQ ID NO: 19332 - protein, 469 aa, synthetic construct; identical to SEQ ID NO: 16738
  REGION 1..469: note = neuraminidase__InfluenzaA__ADL29783

SEQ ID NO: 19333 - protein, 469 aa, synthetic construct; identical to SEQ ID NO: 19325
  REGION 1..469: note = neuraminidase__InfluenzaA__ADL29882

SEQ ID NO: 19334 - protein, 469 aa, synthetic construct
  REGION 1..469: note = neuraminidase__InfluenzaA__ADL32020
MNPNQKIITIGSVCMTIGMANLILQIGNIISTWISHSIQLGNQNQIETCNQSVITYENNTWVNQTYVNISNTNFAAGQSVVSVKLAGNSSLCPVSGWAIYSKDNSIRIGSKGDVFVIREPFISCSPLECRTFFLTQGALLNDKHSNGTIKDRSPYRTLMSCPIGEVPSPYNSRFESVAWSASACHDGINWLTIGISGPDNGAVAVLKYNGIITDTIKSWRNNILRTQESECACVNGSCFTVMTDGPSDGQASYKIFRIEKGKIVKSVEMNAPNYHYEECSCYPDSSEITCVCRDNWHGSNRPWVSFNQNLEYQIGYICSGIFGDNPRPNDKTGSCGPVSSNGANGVKGFSFKYGNGVWIGRTKSISSRNGFEMIWDPNGWTGTDNNFSIKQDIVGINEWSGYSGSFVQHPELTGLDCIRPCFWVELIRGRPKENTIWTSGSSISFCGVNSDTVGWSWPDGAELPFTIDK

SEQ ID NO: 19335 - protein, 469 aa, synthetic construct; identical to SEQ ID NO: 19325
  REGION 1..469: note = neuraminidase__InfluenzaA__ADL32030

SEQ ID NO: 19336 - protein, 469 aa, synthetic construct; identical to SEQ ID NO: 16738
  REGION 1..469: note = neuraminidase__InfluenzaA__ADL32040

SEQ ID NO: 19337 - protein, 469 aa, synthetic construct; identical to SEQ ID NO: 16738
  REGION 1..469: note = neuraminidase__InfluenzaA__ADL32050

SEQ ID NO: 19338 - protein, 469 aa, synthetic construct; identical to SEQ ID NO: 16738
  REGION 1..469: note = neuraminidase__InfluenzaA__ADL32060

SEQ ID NO: 19339 - protein, 469 aa, synthetic construct; identical to SEQ ID NO: 16738
  REGION 1..469: note = neuraminidase__InfluenzaA__ADL32093

SEQ ID NO: 19340 - protein, 469 aa, synthetic construct; identical to SEQ ID NO: 16738
  REGION 1..469: note = neuraminidase__InfluenzaA__ADL32117

SEQ ID NO: 19341 - protein, 469 aa, synthetic construct; identical to SEQ ID NO: 16738
  REGION 1..469: note = neuraminidase__InfluenzaA__ADL32347

SEQ ID NO: 19342 - protein, 469 aa, synthetic construct
  REGION 1..469: note = neuraminidase__InfluenzaA__ADL32357
MNPNQKIITIGSVCMTIGMANLILQIGNIISIWISHSIQLGNQNQIETCNQSVITYENNTWVNQTYVNISNTNFAAGQSVVSVKLAGNSSLCPVSGWAIYSKDNSIRIGSKGDVFVIREPFISCSPLECRTFFLTQGALLNDKHSNGTIKDRSPYRTLMSCPIGEVPSPYNSRFESVAWSASACHDGINWLTIGISGPDNGAVAVLKYNGIITDTIKSWRNNILRTQESECACVNGSCFTVMTDGPSDGQASYKIFRIEKGKIVKSVEMNAPNYHYEECSCYPDSSEITCVCRDNWHGSNRPWVSFNQNLEYQIGYICSGIFGDNPRPNDKTGSCGPVSSNGANGVKGFSFKYGNGVWIGRTKSISSRNGFEMIWDPNGWTGTDNNFSIKQDIVGINEWSGYSGSFVQHPELTGLDCIRPCFWVELIRGRPKENTIWTSGSSISFCGVNSDTVGWSWPDGAELPFTVDK

SEQ ID NO: 19343 - protein, 469 aa, synthetic construct; identical to SEQ ID NO: 16738
  REGION 1..469: note = neuraminidase__InfluenzaA__ADL32367

SEQ ID NO: 19344 - protein, 469 aa, synthetic construct; identical to SEQ ID NO: 16738
  REGION 1..469: note = neuraminidase__InfluenzaA__ADL32377

SEQ ID NO: 19345 - protein, 469 aa, synthetic construct; identical to SEQ ID NO: 16738
  REGION 1..469: note = neuraminidase__InfluenzaA__ADL32387

SEQ ID NO: 19346 - protein, 469 aa, synthetic construct; identical to SEQ ID NO: 16738
  REGION 1..469: note = neuraminidase__InfluenzaA__ADL32397

SEQ ID NO: 19347 - protein, 469 aa, synthetic construct; identical to SEQ ID NO: 16738
  REGION 1..469: note = neuraminidase__InfluenzaA__ADL32407

SEQ ID NO: 19348 - protein, 469 aa, synthetic construct; identical to SEQ ID NO: 16738
  REGION 1..469: note = neuraminidase__InfluenzaA__ADL32417

SEQ ID NO: 19349 - protein, 469 aa, synthetic construct
  REGION 1..469: note = neuraminidase__InfluenzaA__ADL32427
MNPNQKIITIGSVCMTIGMANLILQIGNIISIWISHSIQLGNQNQIETCNQSVITYENNTWVNQTYVNISNTNFAAGQSVVSVKLAGNSSLCPVSGWAIYSKDNSIRIGSKGDVFVIREPFISCSPLECRTFFLTQGALLNDKHSNGTIKDRSPYRTLMSCPIGEVPSPYNSRFESVAWSASACHDGINWLTIGISGPDNGAVAVLKYNGIITDTIKSWRNNILRTQESECACVNGSCFTVMTDGPSDGQASYKIFRIEKGKIVKSVEMNAPNYHYEECSCYPDSSEITCVCRDNWHGSNRPWVSFNQNLEYQIGYICSGIFGDNPRPNDKTGSCGPVSSNGANGVKGFSFKYGNGVWIGRTKSISSRNGFEMIWDPNGWTGTDNNFSIKQDIVGINEWSGYSGSFVQHPELTGLDCIRPCFWVELIRGRPKEKTIWTSGSIISFCGVNSDTVGWSWPDGAELPFTIDK

SEQ ID NO: 19350 - protein, 469 aa, synthetic construct; identical to SEQ ID NO: 16738
  REGION 1..469: note = neuraminidase__InfluenzaA__ADL32447

SEQ ID NO: 19351 - protein, 469 aa, synthetic construct
  REGION 1..469: note = neuraminidase__InfluenzaA__ADL32457
MNPNQKIITIGSVCMTIGMANLILQIGNIISIWISHSIQLGNQNQIETCNQSVITYENNTWVNQTYVNISNTNFAAGQSVVSVKLAGNSSLCPVSGWAIYSKDKSIRIGSKGDVFVIREPFISCSPLECRTFFLTQGALLNDKHSNGTIKDRSPYRTLMSCPIGEVPSPYNSRFESVAWSASACHDGISWLTIGISGPDNGAVAVLKYNGIITDTIKSWRNNILRTQESECACVNGSCFTVMTDGPSDGQASYKIFRIEKGKIVKSVEMNAPNYHYEECSCYPDSSEITCVCRDNWHGSNRPWVSFNQNLEYQIGYICSGIFGDNPRPNDKTGSCGPVSSNGANGVKGFSFKYGNGVWIGRTKSISSRNGFEMIWDPNGWTGTDNNFSIKQDIVGINEWSGYSGSFVQHPELTGLDCIRPCFWVELIRGRPKENTIWTSGSSISFCGVSSDTVGWSWPDGAELPFTIDK

SEQ ID NO: 19352 - protein, 469 aa, synthetic construct; identical to SEQ ID NO: 17915
  REGION 1..469: note = neuraminidase__InfluenzaA__ADL32487

SEQ ID NO: 19353 - protein, 469 aa, synthetic construct; identical to SEQ ID NO: 16738
  REGION 1..469: note = neuraminidase__InfluenzaA__ADL32497

SEQ ID NO: 19354 - protein, 469 aa, synthetic construct; identical to SEQ ID NO: 16738
  REGION 1..469: note = neuraminidase__InfluenzaA__ADL32507

SEQ ID NO: 19355 - protein, 469 aa, synthetic construct; identical to SEQ ID NO: 18200
  REGION 1..469: note = neuraminidase__InfluenzaA__ADL32517

SEQ ID NO: 19356 - protein, 469 aa, synthetic construct; identical to SEQ ID NO: 17915
  REGION 1..469: note = neuraminidase__InfluenzaA__ADL32527

SEQ ID NO: 19357 - protein, 469 aa, synthetic construct; identical to SEQ ID NO: 16738
  REGION 1..469: note = neuraminidase__InfluenzaA__ADL32537

SEQ ID NO: 19358 - protein, 469 aa, synthetic construct; identical to SEQ ID NO: 17625
  REGION 1..469: note = neuraminidase__InfluenzaA__ADL32547

SEQ ID NO: 19359 - protein, 469 aa, synthetic construct; identical to SEQ ID NO: 18089
  REGION 1..469: note = neuraminidase__InfluenzaA__ADL32673

SEQ ID NO: 19360 - protein, 469 aa, synthetic construct; identical to SEQ ID NO: 16738
  REGION 1..469: note = neuraminidase__InfluenzaA__ADL32683

SEQ ID NO: 19361 - protein, 469 aa, synthetic construct; identical to SEQ ID NO: 16728
  REGION 1..469: note = neuraminidase__InfluenzaA__ADL32693

SEQ ID NO: 19362 - protein, 469 aa, synthetic construct; identical to SEQ ID NO: 17961
  REGION 1..469: note = neuraminidase__InfluenzaA__ADL32703

SEQ ID NO: 19363 - protein, 469 aa, synthetic construct; identical to SEQ ID NO: 16728
  REGION 1..469: note = neuraminidase__InfluenzaA__ADL32713

SEQ ID NO: 19364 - protein, 469 aa, synthetic construct; identical to SEQ ID NO: 16738
  REGION 1..469: note = neuraminidase__InfluenzaA__ADL32723

SEQ ID NO: 19365 - protein, 469 aa, synthetic construct; identical to SEQ ID NO: 18419
  REGION 1..469: note = neuraminidase__InfluenzaA__ADL32733

SEQ ID NO: 19366 - protein, 469 aa, synthetic construct; identical to SEQ ID NO: 18419
  REGION 1..469: note = neuraminidase__InfluenzaA__ADL32743

SEQ ID NO: 19367 - protein, 469 aa, synthetic construct
  REGION 1..469: note = neuraminidase__InfluenzaA__ADL39139
MNPNQKIITIGSVSLTISTICFFMQIAILITTVTLHFKQYEFNSPPNNQVMLSEPTIIERNITEIVYLTNTTIEKEICPKLAEYRNWSKPQCDITGFAPFSKDNSIRLSAGGDIWVTREPYVSCDPDKCYQFALGQGTTLNNVHSNNTVRERTPYRTLLMNELGVPFHLGTKQVCIAWSSSSCHDGKAWLHVCITGDDKNATASFIYNGRLVDSVVSWSKEILRTQESECVCINGTCTVVMTDGSASGKADTKILFIEEGKIVHTSTLSGSAQHVEECSCYPRYPGVRCVCRDNWKGSNRPIVDINIKDHSIVSSYVCSGLVGDTPRKNDSSSSSHCLDPNNEEGGHGVKGWAFDDGNDVWMGRTISEKSRLGYETFKVIEGWSNPKSKLQINRQVIVDRGNRSGYSGIFSVEGKSCINRCFYVELIRGRKEETEVLWTSNSIVVFCGTSGTYGTGSWPDGADINLMPI

SEQ ID NO: 19368 - protein, 470 aa, synthetic construct
  REGION 1..470: note = neuraminidase__InfluenzaA__ADL39150
MNPNQKIITIGSISIAIGIISLMLQIGNIISIWASHSIQTGSQNNTGICNQRIITYENSTWVNHTYVNINNTNVVAGEDKTSVTLAGNSSLCSISGWAIYTKDNSIRIGSKGDVFVIREPFISCSHLECRTFFLTQGALLNDKHSNGTVKDRSPYRALMSCPLGEAPSPYNSKFESVAWSASACHDGMGWLTIGISGPDNGAVAVLKYNGIITETIKSWKKQILRTQESECVCMNGSCFTIMTDGPSNKAASYKIFKIEKGKVTKSIELNAPNFYYEECSCYPDTGIVMCVCRDNWHGSNRPWVSFNQNLDYQIGYICSGVFGDNPRPEDGEGSCNPVTVDGANGVKGFSYKYGNGVWIGRTKSNRLRKGFEMIWDPNGWTNTDSDFSVKQDVVAITDWSGYSGSFVQHPELTGLDCIRPCFWVELVRGLPRENTTIWTSGSSISFCGVNSDTANWSWPDGAELPFTIDK

SEQ ID NO: 19369 - protein, 469 aa, synthetic construct
  REGION 1..469: note = neuraminidase__InfluenzaA__ADL39172
MNPNQKIITIGSVSLTISTICFFMQIAILITTVTLHFKQYEFNSPPNNQVMLCEPTIIERNITEIVYLTNTTIEKEICPKLAEYRNWSKPQCDITGFAPFSKDNSIRLSAGGDIWVTREPYVSCDPDKCYQFALGQGTTLNNVHSNNTVRDRTPYRTLLMNELGVPFHLGTKQVCIAWSSSSCHDGKAWLHVCITGDDKNATASFIYNGRLVDSVVSWSKEILRTQESECVCINGTCTVVMTDGSASGEADTKILFIEEGKIVHTSTLSGSAQHVEECSCYPRYPGVRCVCRDNWKGSNRPIVDINIKDHSIVSSYVCSGLVGDTPRKNDSSSSSHCLDPNNEEGGHGVKGWAFDDGNDVWMGRTISEKSRLGYETFKVIEGWSNPKSKLQINRQVIVDRGNRSGYSGIFSVEGKSCINRCFYVELIRGRKEETEVLWTSNSIVVFCGTSGTYGTGSWPDGADINLMPI

SEQ ID NO: 19370 - protein, 469 aa, synthetic construct; identical to SEQ ID NO: 16599
  REGION 1..469: note = neuraminidase__InfluenzaA__ADL39183

SEQ ID NO: 19371 - protein, 470 aa, synthetic construct; identical to SEQ ID NO: 18930
  REGION 1..470: note = neuraminidase__InfluenzaA__ADL39194

SEQ ID NO: 19372 - protein, 469 aa, synthetic construct; identical to SEQ ID NO: 16599
  REGION 1..469: note = neuraminidase__InfluenzaA__ADL39205

SEQ ID NO: 19373 - protein, 470 aa, synthetic construct; identical to SEQ ID NO: 17461
  REGION 1..470: note = neuraminidase__InfluenzaA__ADL39227

SEQ ID NO: 19374 - protein, 470 aa, synthetic construct; identical to SEQ ID NO: 18930
  REGION 1..470: note = neuraminidase__InfluenzaA__ADL39238

SEQ ID NO: 19375 - protein, 470 aa, synthetic construct; identical to SEQ ID NO: 18930
  REGION 1..470: note = neuraminidase__InfluenzaA__ADL39249

SEQ ID NO: 19376 - protein, 470 aa, synthetic construct; identical to SEQ ID NO: 17461
  REGION 1..470: note = neuraminidase__InfluenzaA__ADL39260

SEQ ID NO: 19377 - protein, 469 aa, synthetic construct
  REGION 1..469: note = neuraminidase__InfluenzaA__ADL39282
MNPNQKIITIGSVSLTISTICFFMQIAILITTVTLHFKQYEFNSPPNNQVMLCEPTIIEKNITEIVYLTNTTIEKEICPRLAEYRNWSKPQCDITGFAPFSKDNSIRLSAGGDIWVTREPYVSCDPDKCYQFALGQGTTLNNVHSNNKVRDRTPYRTLLMNELGVPFHLGTKQVCIAWSSSSCHDGKAWLHVCITGDDKNATASFIYNGRLVDSVVSWSKEILRTQESECVCINGTCTVVMTDGSASGKADTKILFIEEGKIVHTSTLSGSAQHVEECSCYPRYPGVRCVCRDNWKGSNRPIVDINIKDHSIVSSYVCSGLVGDTPRKNDSSSSSHCLDPNNEEGGHGVKGWAFDDGNDVWMGRTISEKSRLGYETFKVIEGWSNPKSKLQINRQVIVDRGNRSGYSGIFSVEGKSCINRCFYVELIRGRKEETEVLWTSNSIVVFCGTSGTYGTGSWPDGADINLMPI

SEQ ID NO: 19378 - protein, 470 aa, synthetic construct; identical to SEQ ID NO: 17461
  REGION 1..470: note = neuraminidase__InfluenzaA__ADL39293

SEQ ID NO: 19379 - protein, 469 aa, synthetic construct
  REGION 1..469: note = neuraminidase__InfluenzaA__ADL39304
MNPNQKIITIGSVSLTISTICFFMQIAILITTVTLHFKQYEFNFPPNNQVMLCEPTIIERNITEIVYLTNTTIEKEICPKLAEYRNWSKPQCDITGFAPFSKDNSIRLSAGGDIWVTREPYVSCDPDKCYQFALGQGTTLNNVHSNNTVRDRTPYRTLLMNELGVPFHLGTKQVCIAWSSSSCHDGKAWLHVCITGDDKNATASFIYNGRLVDSVVSWSKEILRTQESECVCINGTCTVVMTDGSASGKADTKILFIEEGKIVHTSTLSGSAQHVEECSCYPRYPGVRCVCRDNWKGSNRPIVDINIKDHSIVSSYVCSGLVGDTPRKNDSSSSSHCLDPNNEEGGHGVKGWAFDDGNDVWMGRTISEKSRLGYETFKVIEGWSNPKSKLQINRQVIVDRGNRSGYSGIFSVEGKSCINRCFYVELIRGRKEETEVLWTSNSIVVFCGTSGTYGTGSWPDGADINLMPI

SEQ ID NO: 19380 - protein, 469 aa, synthetic construct; identical to SEQ ID NO: 16599
  REGION 1..469: note = neuraminidase__InfluenzaA__ADL39326

SEQ ID NO: 19381 - protein, 470 aa, synthetic construct; identical to SEQ ID NO: 18930
  REGION 1..470: note = neuraminidase__InfluenzaA__ADL39392

SEQ ID NO: 19382 - protein, 469 aa, synthetic construct
  REGION 1..469: note = neuraminidase__InfluenzaA__ADL39403
MNPNQKIITIGSVSLTISTICFFMQIAILITTVTLHFKQYEFNPPPNNQVMLCEPTIIERNITEIVYLTNTTIEKEICPKLAEYRNWSKPQCDITGFAPFSKDNSIRLSAGGDIWVTREPYVSCDPDKCYQFALGQGTTLNNVHSNNTVRDRTPYRTLLMNELGVPFHLGTKQVCIAWSSSSCHDGKAWLHVCITGDDKNATASFIYNGRLVDSVVSWSKEILRTQESECVCINGTCTVVMTDGSASGKADTKILFIEEGKIVHTSTLSGSAQHVEECSCYPRYPGVRCVCRDNWKGSNRPIVDINIKDHSIVSSYVCSGLVGDTPRKNDSSSSSHCLDPNNEEGGHGVKGWAFDDGNDVWMGRTISEKSRLGYETFKVIEGWSNHKSKLQINRQVIVDRGNRSGYSGIFSVEGKSCINRCFYVELIRGRKEETEVLWTSNSIVVFCGTSGTYGTGSWPDGADLNLMPI

SEQ ID NO: 19383 - protein, 470 aa, synthetic construct; identical to SEQ ID NO: 17461
  REGION 1..470: note = neuraminidase__InfluenzaA__ADL39425

SEQ ID NO: 19384 - protein, 470 aa, synthetic construct
  REGION 1..470: note = neuraminidase__InfluenzaA__ADL39447
MNPNQKIITIGSISIAIGIISLMLQIGSIISIWASHSIQTGSQNNTGICNQRIITYENSTWVNHTYVNINNTNVVAGEDKTSVTLTGNSSLCSISGWAIYTKDNSIRIGSKGDVFVIREPFISCSHLECRTFFLTQGALLNDKHSNGTVKDRSPYRALMSCPLGEAPSPYNSKFESVAWSASACHDGMGWLTIGISGPDNGAVAVLKYNGIITGTIKSWKKQILRTQESECVCMNGSCFTIMTDGPSNKAASYKIFKIEKGKVTKSIELNAPNFYYEECSCYPDTGIVMCVCRDNWHGSNRPWVSFNQNLDYQIGYICSGVFGDNPRPEDGEGSCNPVTVDGANGVKGFSYKYGNGVWIGRTKSNRLRKGFEMIWDPNGWTNTDSDFSVKQDVVAITDWSGYSGSFVQHPELTGLDCIRPCFWVELVRGLPRENTTIWTSGSSISFCGVNSDTANWSWPDGAELPFTIDK

SEQ ID NO: 19385 - protein, 470 aa, synthetic construct; identical to SEQ ID NO: 17461
  REGION 1..470: note = neuraminidase__InfluenzaA__ADL39458

SEQ ID NO: 19386 - protein, 470 aa, synthetic construct
  REGION 1..470: note = neuraminidase__InfluenzaA__ADL39469
MNPNQKIITIGSISIAIGIISLMLQIGSIISIWASHSIQTGSQNNTGICNQRIITYENSTWVNHTYVNINNTNVVAGEDKTSVTLAGNSSLCSISGWAIYTKDNSIRIGSKGDVFVIREPFISCSHLECRTFFLTQGALLNDKHSNGTVKDRSPYRALMSCPLGEAPSPYNSKFESVAWSASACHDGMGWLTIGISGPDNGAVAVLKYNGIITGTIKSWKKQILRTQESECVCMNGSCFTIMTDGPSNKAASYKIFKIEKGKVTKSIELDAPNFYYEECSCYPDTGIVMCVCRDNWHGSNRPWVSFNQNLDYQIGYICSGVFGDNPRPEDGEGSCNPVTVDGANGVKGFSYKYGNGVWIGRTKSNRLRKGFEMIWDPNGWTNTDSDFSVKQDVVAITDWSGYSGSFVQHPELTGLDCIRPCFWVELVRGLPRENTTIWTSGSSISFCGVNSDTANWSWPDGAELPFTIDK

SEQ ID NO: 19387 - protein, 470 aa, synthetic construct
  REGION 1..470: note = neuraminidase__InfluenzaA__ADL39480
MNPNQKIITIGSISIAIGIISLMLQIGSIISIWASHSIQTGSQNNTGICNQRIITYENSTWVNHTYVNINNTNVVAGEDKTSVTLAGNSSLCSISGWAIYTKDNSIRIGSKGDVFVIREPFISCSHLECRTFFLTQGALLNDKHSNGTVKDRSPYRALMSCPLGEAPSPYNSKFESVAWSASACHDGMGWLTIGISGPDNGAVAVLKYNGIITGTIKSWKKQILRTQESECVCMNGSCFTIMTDGPSNKAASYKIFKIEKGKVTKSIELNAPNFYYEECSCYPDTGIVMCVCRDNWHGSNRPWVSFNQNLDYQIGYICSGVFGDNPRPEDGEGSCNPVTVDGANGVKGFSYKYGNGVWIGRTKSNRLRKGFEMVWDPNGWTNTDSDFSVKQDVVAITDWSGYSGSFVQHPELTGLDCIRPCFWVELVRGLPRENTTIWTSGSSISFCGVNSDTANWSWPDGAELPFTIDK

SEQ ID NO: 19388 - protein, 469 aa, synthetic construct
  REGION 1..469: note = neuraminidase__InfluenzaA__ADL39491
MNPNQKIITIGSVSLTISTICFFMQIAILITTVTLHFKQYEFNSSPNNQVMLCEPTIIERNITEIVYLTNTTIEKEICPKLAEYRNWSKPQCDITGFAPFSKDNSIRLSAGGDIWVTREPYVSCDPDKCYQFALGQGTTLNNVHSNNIVRDRTPYRTLLMNELGVPFHLGTKQVCIAWSSSSCHDGKAWLHVCITGDDKNATASFIYNGRLVDSIVSWSKEILRTQESECVCINGTCTVVMTDGSASGKADTKILFIEEGKIVHTSTLSGSAQHVEECSCYPRYPGVRCVCRDNWKGSNRPIVDINIKDHSIVSSYVCSGLVGDTPRKNDSSSSSHCLDPNNEEGGHGVKGWAFDDGNDVWMGRTISEKSRLGYETFKVIEGWSNPKSKLQINRQVIVDRGNRSGYSGIFSVEGKSCINRCFYVELIRGRKEETEVLWTSSSIVVFCGTSGTYGTGSWPDGADINLMPI

SEQ ID NO: 19389 - protein, 469 aa, synthetic construct; identical to SEQ ID NO: 16738
  REGION 1..469: note = neuraminidase__InfluenzaA__ADL41165

SEQ ID NO: 19390 - protein, 469 aa, synthetic construct
  REGION 1..469: note = neuraminidase__InfluenzaA__ADL41175
MNPNQKIITIGSVCMTIGMANLILQIGNIISTWISHSIQLGNQNQIETCNQSVITYENNTWVNQTYVNISNTNFAAGQSVVSVKLAGNSSLCPVSGWAIYSKDNSVRIGSKGDVFVIREPFISCSPLECRTFFLTQGALLNDKHSNGTIKDRSPYRTLMSCPIGEVPSPYNSRFESVAWSASACHDGINWLTIGISGPDNGAVAVLKYNGIITDTIKSWRNNILRTQESECACVNGSCFTVMTDGPSNGQASYKIFRIEKGKIVKSVEMNAPNYHYEECSCYPDSSEITCVCRDNWHGSNRPWVSFNQNLEYQIGYICSGIFGDNPRPNDKTGSCGPVSSNGANGVKGFSFKYGNGVWIGRTKSISSRNGFEMIWDPNGWTGTDNNFSIKQDIVGINEWSGYSGSFVQHPELTGLDCIRPCFWVELIRGRPKENTIWTSGSSISFCGVNSDTVGWSWPDGAELPFTIDK

SEQ ID NO: 19391 - protein, 470 aa, synthetic construct
  REGION 1..470: note = neuraminidase__InfluenzaA__ADL60255
MNPNQKIITIGSISIAIGIISLMLQIGNIISIWASHSIQTGSQNNTGICNQRIITYENSTWVNYTYVNINNTNVVAGEDKTSVTLAGNSSLCSISGWAIYTKDNSIRIGSKGDVFVIREPFISCSHLECRTFFLTQGALLNDKHSNGTVKDRSPYRALMSCPLGEAPSPYNSKFESVAWSASACHDGMGWLTIGISGPDNGAVAVLKYNGIITGTIKSWKKQILRTQESECVCMNGSCFTIMTDGPSNKAASYKIFKIEKGKVTKSIELNAPNFHYEECSCYPDTGIVMCVCRDNWHGSNRPWVSFNQNLDYQIGYICSGVFGDNPRPKDGRGSCNPVTVDGANGVKGFSYKYDNGVWIGRTKSNRLRKGFEMIWDPNGWTNTDSDFSVKQDVVAITDWSGYSGSFVQHPELTGLDCIRPCFWVELVRGLPRENTTIWTSGSSISFCGVNSDTANWSWPDGAELPFTIDK

SEQ ID NO: 19392 - protein, 470 aa, synthetic construct
  REGION 1..470: note = neuraminidase__InfluenzaA__ADL60277
MNPNQRIITIGSISIAIGIISLMLQIGNIISIWASHSIQIGSQNNTGICNQRIITYENSTWVNHTYVNINNTNVVAGEDKTPVTLAGNSSLCSISGWAIYTKDNSIRIGSKGDVFVIREPFISCSHLECRTFFLTQGALLNDKHSNGTAKDRSPYRALMSCPLGEAPSPYNSKFESVAWSASACHDGMGWLTIGISGPDNGAVAVLKYNGIITGTIKSWKKQILRTQESECVCMNGSCFTIMTDGPSNKAASYKIFKIEKGKVTKSIELNAPNFYYEECSCYPDTGIVMCVCRDNWHGSNRPWVSFNQNLDYQIGYICSGVFGDNPRPEDGEGSCNPVTVDGANGVKGFSYKYGNGVWIGRTKSNRLRKGFEMIWDPNGWTNTDSDFSVKQDVVAITDWSGYSGSFVQHPELTGLDCIRPCFWVELVRGLPRENTTIWTSGSSISFCGVNSDTANWSWPDGAELPFTIDK

SEQ ID NO: 19393 - protein, 470 aa, synthetic construct
  REGION 1..470: note = neuraminidase__InfluenzaA__ADL60288
MNPNQKIITIGSISIAIGIISLMLQIGNIISIWASHSIQTGSQNNTGICNQRIITYENSTWVNHTYVNINNTNVVAGEDKTSVTLAGNSSLCSISGWAIYTKDNSIRIGSKGDVFVIREPFISCSHLECRTFFLTQGALLNDKHSNGTVKDRSPYRALMSCPLGEAPSPYNSKFESVAWSASACHDGMGWLTIGISGPDNGAVAVLKYNGIITGTIKSWKKQILRTQESECVCMNGSCFTIMTDGPSNKAASYKIFKIEKGKVTKSIELNAPNFYYEECSCYPDTGIVMCVCRDNWHGSNRPWVSFNQNLDYQIGYICSGVFGDNPRPKDGKGSCNPVTVDGANGVKGFSYKYGNGVWIGRTKSNRLRKGFEMIWDPNGWTNTDSDFSVKQDVVAITDWSGYSGSFVQHPELTGLDCIRPCFWVELVRGLPRENTTIWTSGSSISFCGVNSDTANWSWPDGAELPFTIDK

SEQ ID NO: 19394 - protein, 470 aa, synthetic construct
  REGION 1..470: note = neuraminidase__InfluenzaA__ADL60299
MNPNQKIITIGSISIAIGIISLMLQIGNIISIWASHSIQTGSQNNTGICNQRIITYENSTWVNHTYVSINNTNVVAGKDKTSVTLAGNSSLCSISGWAIYTKDNSIRIGSKGDVFVIREPFISCSHLECRTFFLTQGALLNDKHSNGTVKDRSPYRALMSCPLGEAPSPYNSKFESVAWSASACHDGMGWLTIGISGPDNGAVAVLKYNGIITGTIKSWKKQILRTQESECVCMNGSCFTIMTDGPSNKAASYKIFKIEKGKVTKSIELNAPNFYYEECSCYPDTGIVMCVCRDNWHGSNRPWVSFNQDLDYQIGYICSGVFGDNPRPKDGKGSCNPVTVDGANGVKGFSYKYGNGVWIGRTKSNRLRKGFEMIWDPNGWTNTDSDFSVKQDVVAITDWSGYSGSFVQHPELTGLDCIRPCFWVELVRGLPRENTTIWTSGSSISFCGVNSDTANWSWPDGAELPFTIDK

SEQ ID NO: 19395 - protein, 470 aa, synthetic construct; identical to SEQ ID NO: 16632
  REGION 1..470: note = neuraminidase__InfluenzaA__ADL60310

SEQ ID NO: 19396 - protein, 470 aa, synthetic construct
  REGION 1..470: note = neuraminidase__InfluenzaA__ADL60321
MNPNQKIITIGSISIAIGIISLMLQIGNIISIWASHSIQTGSQNNTGICNQRIITYENSTWVNHTYVNINNTNVVAGEDKTSVTLAGNSSLCSISGWAIYTKDNSIRIGSKGDVFVIREPFISCSHLECRTFFLTQGALLNDKHSNGTVKDRSPYRALMSCPLGEAPSPYNSKFESVAWSASACHDGMGWLTIGISGPDNGAVAVLKYNGIITGTIKSWKKQILRTQESECVCMNGSCFTIMTDGPSNKAASYKIFKIEKGKVTKSIELNAPNFHYEECSCYPDTGMVMCVCRDNWHGSNRPWVSFNQNLDYQIGYICSGVFGDNPRPEDGEGSCNPVTVDGANGVKGFSYKYDNGVWIGRTKSNRLRKGFEMIWDPNGWTNTDSDFSVKQDVVAITDWSGYSGSFVQHPELTGLDCIRPCFWVELVRGLPRENTTIWTSGSSISFCGVNSDTANWSWPDGAELPFTIDK

SEQ ID NO: 19397 - protein, 470 aa, synthetic construct
  REGION 1..470: note = neuraminidase__InfluenzaA__ADL60332
MNPNQKIITIGSISIAIGIISLMLQIGNIISIWASHSIQTGSQNNTGICNQRIITYENSTWVNHTYVNINNTNVVAGEDKTSVTLAGNSSLCSISGWAIYTKDNSIRIGSKGDVFVIREPFISCSHLECRTFFLTQGALLNDKHSNGTVKDRSPYRALMSCPLGEAPSPYNSKFESVAWSASACHDGMGWLTIGISGPDNGAVAVLKYNGIITGTIKSWKKQILRTQESECVCMNGSCFTIMTDGPSNKAASYKIFKIEKGKVTKSIELNAPNFHYEECSCYPDTGIVMCVCRDNWHGSNRPWVSFNQNLDYQIGYICSGVFGDNPRPKDGRGSCNPVTVDGANGVKGFSYKYDNGVWIGRTKSNRLRKGFEMIWDPNGWTNTDSDFSVKQDVVAITDWSGYSGSFVQHPELTGLDCIRPCFWVELVRGLPRENTTIWTSGSSISFCGVNSDTANWSWPDGAELPFTIDK

SEQ ID NO: 19398 - protein, 470 aa, synthetic construct; identical to SEQ ID NO: 16632
  REGION 1..470: note = neuraminidase__InfluenzaA__ADL60343

SEQ ID NO: 19399 - protein, 470 aa, synthetic construct
  REGION 1..470: note = neuraminidase__InfluenzaA__ADL60354
MNPNQRIITIGSISIAIGIISLMLQIGNIISIWASHSIQIGSQNNTGICNQRIITYENSTWVNHTYVNINNTNVVAGEDKTSVTLAGNSSLCSISGWAIYTKDNSIRIGSKGDVFVIREPFISCSHLECRTFFLTQGALLNDKHSNGTAKDRSPYRALMSCPLGEAPSPYNSKFESVAWSASACHDGMGWLTIGISGPDNGAVAVLKYNGIITGTIKSWKKQILRTQESECVCMNGSCFTIMTDGPSNKAASYKIFKIEKGKVTKSIELNAPNFYYEECSCYPDTGIVMCVCRDNWHGSNRPWVSFNQNLDYQIGYICSGVFGDNPRPKDGKGSCNPVTVDGANGVKGFSYKYGNGVWIGRTKSNRLRKGFEMIWDPNGWTNTDSDFSVKQDVVAITDWSGYSGSFVQHPELTGLDCIRPCFWVELVRGLPRENTTIWTSGSSISFCGVNSDTANWSWPDGAELPFTIDK

SEQ ID NO: 19400 - protein, 469 aa, synthetic construct
  REGION 1..469: note = neuraminidase__InfluenzaA__ADL60365
MNPNQKIITIGSVSLTISTICFFMQIAILITTVTLHFKQYEFNSSPNNQVMLCEPTIIERNITEIVYLTNTTIEKEISPKLAEYRNWSKPQCDITGFAPFSKDNSIRLSAGGDIWVTREPYVSCDPDKCYQFALGQGTTLNNVHSNNIVRDRTPYRTLLMNELGVPFHLGTKQVCIAWSSSSCHDGKAWLHVCITGDDKNATASFIYNGRLVDSIVSWSKEILRTQESECVCINGTCTVVMTDGSASGKADTKILFIEEGKIVHTSTLSGSAQHVEECSCYPRYPGVRCVCRDNWKGSNRPIVDINIKDHSTVSSYVCSGLVGDTPRKNDSSSSSHCLDPNNEEGGHGVKGWAFDDGNDVWMGRTISEKSRLGYETFKVIEGWSNPKSKLQINRQVIVDRGNRSGYSGIFSVEGKSCINRCFYVELIRGRKEETEVLWTSNSIVVFCGTSGTYGTGSWPDGADINLMPI

SEQ ID NO: 19401 - protein, 470 aa, synthetic construct
  REGION 1..470: note = neuraminidase__InfluenzaA__ADL60376
MNPNQKIITIGSISIAIGIISLMLQIGNIISIWASHSIQTGSQNNTGICNQRIITYENSTWVNHTYVNINNTNVVAGEDKTSVTLAGNSSLCSISGWAIYTKDNSIRIGSKGDVFVIREPFISCSHLECRTFFLTQGALLNDKHSNGTGKDRSPYRALMSCPLGEAPSPYNSKFESVAWSASACHDGMGWLTIGISGPDNGAVAVLKYNGIITGTIKSWKKQILRTQESECVCMNGSCFTIMTDGPSNKAASYKIFKIEKGKVTKSIELNAPNFHYEECSCYPDTGIVMCVCRDNWHGSNRPWVSFNQNLDYQIGYICSGVFGDNPRPKDGKGSCNPVTVDGANGVKGFSYKYDNGVWIGRTKSNRLRKGFEMIWDPNGWTNTDSDFSVKQDVVAITDWSGYSGSFVQHPELTGLDCIRPCFWVELVRGLPRENTTIWTSGSSISFCGVNSDTANWSWPDGAELPFTIDK

SEQ ID NO: 19402 - protein, 469 aa, synthetic construct; identical to SEQ ID NO: 16738
  REGION 1..469: note = neuraminidase__InfluenzaA__ADM07137

SEQ ID NO: 19403 - protein, 469 aa, synthetic construct; identical to SEQ ID NO: 16738
  REGION 1..469: note = neuraminidase__InfluenzaA__ADM07146

SEQ ID NO: 19404 - protein, 469 aa, synthetic construct; identical to SEQ ID NO: 16738
  REGION 1..469: note = neuraminidase__InfluenzaA__ADM07156

SEQ ID NO: 19405 - protein, 469 aa, synthetic construct; identical to SEQ ID NO: 16738
  REGION 1..469: note = neuraminidase__InfluenzaA__ADM07165

SEQ ID NO: 19406 - protein, 470 aa, synthetic construct; identical to SEQ ID NO: 17461
  REGION 1..470: note = neuraminidase__InfluenzaA__ADM07474

SEQ ID NO: 19407 - protein, 470 aa, synthetic construct; identical to SEQ ID NO: 17461
  REGION 1..470: note = neuraminidase__InfluenzaA__ADM07485

SEQ ID NO: 19408 - protein, 469 aa, synthetic construct
  REGION 1..469: note = neuraminidase__InfluenzaA__ADM07496
MNPNQKIITIGSVSLTISTICFFMQIAILITTVTLHFKQYEFNSPPNNQVMLCEPTIIERNITEIVYLTNTTIEKEICPKLAEYRNWSKPQCDITGFAPFSKDNSIRLSAGGDIWVTREPYVSCDPDKCYQFALGQGTTLNNVHSNNTVRDRTPYRTLLMNELGVPFHLGTKQVCIAWSSSSCHDGKAWLHVCITGDDKNATASFIYNGRLVDSVVSWSKEILRTQESECVCINGTCTVVMTDGSASGKADTKILFIEEGKIVHTSTLSGSAQHVEECSCYPRYPGVRCVCRDNWKGSNRPIVDINIKDHSIVSSYVCSGLVGDTPRKNDSSSSSHCLDPNNEEGGHGVKGWAFDDGNDVWMGRTISEKSRLGYETFKVIEGWSNPKSKLQINRQVIVDRGNRSGYSGIFSVEGKSCINRCFYVELIRGRKEETEVLWTSNSIVVFCGTSGTYGTGSWPDGADINIMPI

SEQ ID NO: 19409 - protein, 469 aa, synthetic construct
  REGION 1..469: note = neuraminidase__InfluenzaA__ADM07507
MNPNQKIITIGSVSLTISTICFFMQTAILITTVTLHFKQFEFNSPPNNQVMLCEPAIIERNITEIVYLTNTTIEKEICPKLAEYRNWSKPQCDITGFAPFSKDNSIRLSAGGDIWVTREPYVSCDPDKCYQFALGQGTTLNNVHSNNTVRDRTPYRTLLMNELGVPFHLGTKQVCIAWSSSSCHDGKAWLHVCITGDDKNATASFIYNGRLVDSVVSWSKEILRTQESECVCINGTCTVVMTDGSASGKADTKILFIEEGKIVHTSTLSGSAQHVEECSCYPRYPGVRCVCRDNWKGSNRPIVDINIKDHSIVSSYVCSGLVGDTPRKNDSSSSSHCLDPNNEEGGHGVKGWAFDDGNDVWMGRTISEKSRLGYETFKVIEGWSNPKSKLQINRQVIVDRGNRSGYSGIFSVEGKSCINRCFYVELIRGRKEETEVLWTSNSIVVFCGTSGTYGTGSWPDGADINLMPI

SEQ ID NO: 19410 - protein, 469 aa, synthetic construct
  REGION 1..469: note = neuraminidase__InfluenzaA__ADM12820
MNPNQKIITIGSVSLTISTICFFMQIAILITTVTLHFKQYKFNSPPNNQVMLCEPTIIERNITEIVYLTNTTIEKEICPKLAEYRNWSKPQCDITGFAPFSKDNSIRLSAGGDIWVTREPYVSCDPDKCYQFALGQGTTLNNVHSNNTVRDRTPYRTLLMNELGVPFHLGTKQVCIAWSSSSCHDGKAWLHVCITGDDKNATASFIYNGRLVDSVVSWSKEILRTQESECVCINGTCTVVMTDGSASGKADTKILFIEEGKIVHTSTLSGSAQHVEECSCYPRYPGVRCVCRDNWKGSNRPIVDINIKDHSIVSSYVCSGLVGDTPRKNDSSSSSHCLDPNNEEGGHGVKGWAFDDGNDVWMGRTINETSRLGYETFKVIEGWSNPKSKLQINRQVIVDRGNRSGYSGIFSVEGKSCINRCFYVELIRGRKEETEVLWTSNSIVVFCGTSGTYGTGSWPDGADLNLMPI

SEQ ID NO: 19411 - protein, 469 aa, synthetic construct; identical to SEQ ID NO: 19410
  REGION 1..469: note = neuraminidase__InfluenzaA__ADM12831

SEQ ID NO: 19412 - protein, 469 aa, synthetic construct; identical to SEQ ID NO: 19410
  REGION 1..469: note = neuraminidase__InfluenzaA__ADM12842

SEQ ID NO: 19413 - protein, 469 aa, synthetic construct; identical to SEQ ID NO: 19410
  REGION 1..469: note = neuraminidase__InfluenzaA__ADM12853

SEQ ID NO: 19414 - protein, 469 aa, synthetic construct; identical to SEQ ID NO: 16738
  REGION 1..469: note = neuraminidase__InfluenzaA__ADM12864

SEQ ID NO: 19415 - protein, 469 aa, synthetic construct; identical to SEQ ID NO: 16738
  REGION 1..469: note = neuraminidase__InfluenzaA__ADM12874

SEQ ID NO: 19416 - protein, 469 aa, synthetic construct; identical to SEQ ID NO: 16738
  REGION 1..469: note = neuraminidase__InfluenzaA__ADM12884

SEQ ID NO: 19417 - protein, 469 aa, synthetic construct
  REGION 1..469: note = neuraminidase__InfluenzaA__ADM12894
MNPNQKIITIGSVCMTIGMANLILQIGNIISIWISHSIQLGNQNQIETCNQSVITYENNTWVNQTYVNISNTNFAAGQSVVSVKLAGNSSLCPVSGWAIYSKDNSIRIGSKGDVFVIREPFISCSPLECRTFFLTQGALLNDKHSNGTIKDRSPYRTLMSCPIGEVPSPYNSRFESVAWSASACHDGINWLTIGISGPDNGAVAVLKYNGIITDTIKSWRNNILRTQESECACVNGSCFTVMTDGPSDGQSSYKIFRIEKGKIVKSVEMNAPNYHYEECSCYPDSSEITCVCRDNWHGSNRPWVSFNQNLEYQIGYICSGIFGDNPRPNDKTGSCGPVSSNGANGVKGFSFKYGNGVWIGRTKSISSRNGFEMIWDPNGWTGTDNNFSIKQDIVGINEWSGYSGSFVQHPELTGLDCIRPCFWVELIRGRPKENTIWTSGSSISFCGVNSDTVGWSWPDGAELPFTIDK

SEQ ID NO: 19418 - protein, 469 aa, synthetic construct; identical to SEQ ID NO: 16738
  REGION 1..469: note = neuraminidase__InfluenzaA__ADM12904

SEQ ID NO: 19419 - protein, 469 aa, synthetic construct
  REGION 1..469: note = neuraminidase__InfluenzaA__ADM12914
MNPNQKIITIGSVCMTIGMANLILQIGNIISIWISHSIQLGNQNQIETCNQSVITYENNTWVNQTYVNISNTNFAAGQSVVSVKLAGNSSLCPVSGWAIYSKDNSIRIGSKGDVFVIREPFISCSPLECRTFFLTQGALLNDKHSNGTIKDRSPYRTLMSCPIGEVPSPYNSRFESVAWSASACHDGINWLTIGISGPDNGAVAVLKYNGIITDTIKSWRNNILRTQESECACVNGSCFTVMTDGPSDGQASYKIFRIEKGKIVKSVEMNAPNYHYEECSCYPDSSEITCVCRDNWHGSNRPWVSFNQNLEYQIGYICSGIFGDNPRPNDKTGSCGPVSSYGANGVKGFSFKYGNGVWIGRTKSISSRNGFEMIWDPNGWTGTDNNFSIKQDIVGINEWSGYSGSFVQHPELTGLDCIRPCFWVELIRGRPKENTIWTSGSSISFCGVNSDTVGWSWPDGAELPFTIDK

SEQ ID NO: 19420 - protein, 469 aa, synthetic construct; identical to SEQ ID NO: 16738
  REGION 1..469: note = neuraminidase__InfluenzaA__ADM12924

SEQ ID NO: 19421 - protein, 469 aa, synthetic construct; identical to SEQ ID NO: 16738
  REGION 1..469: note = neuraminidase__InfluenzaA__ADM12934

SEQ ID NO: 19422 - protein, 469 aa, synthetic construct; identical to SEQ ID NO: 16738
  REGION 1..469: note = neuraminidase__InfluenzaA__ADM12944

SEQ ID NO: 19423 - protein, 469 aa, synthetic construct; identical to SEQ ID NO: 16738
  REGION 1..469: note = neuraminidase__InfluenzaA__ADM12954

SEQ ID NO: 19424 - protein, 469 aa, synthetic construct; identical to SEQ ID NO: 16738
  REGION 1..469: note = neuraminidase__InfluenzaA__ADM12964

SEQ ID NO: 19425 - protein, 469 aa, synthetic construct; identical to SEQ ID NO: 18026
  REGION 1..469: note = neuraminidase__InfluenzaA__ADM12974

SEQ ID NO: 19426 - protein, 469 aa, synthetic construct
  REGION 1..469: note = neuraminidase__InfluenzaA__ADM12984
MNPNQKIITIGSVCMTIGMANLILQIGNIISIWISHSIQLGNQNQIETCNQSVITYENNTWVNQTYVNISNTNFAAGQSVVSVKLAGNSSLCPVSGWAIYSKDNSIRIGSKGDVFVIREPFISCSPLECRTFFLTQGALLNDKHSNGTIKDRSPYRTLMSCPIGEVPSPYNSRFESVAWSASACHDGINWLTIGISGPDNGAVAVLKYNGIITDTIRSWRNNILRTQESECACVNGSCFTVMTDGPSDGQASYKIFRIEKGKIVKSVEMNAPNYHYEECSCYPDSSEITCVCRDNWHGSNRPWVSFNQNLEYQIGYICSGIFGDNPRPNDKTGSCGPVSSNGANGVKGFSFKYGNGVWIGRTKSISSRNGFEMIWDPNGWTGTDNNFSIKQDIVGINEWSGYSGSFVQHPELTGLDCIRPCFWVELIRGRPKENTIWTSGSSISFCGVNSDTVGWSWPDGAELPFTIDK

SEQ ID NO: 19427 - protein, 469 aa, synthetic construct; identical to SEQ ID NO: 16738
  REGION 1..469: note = neuraminidase__InfluenzaA__ADM12994

SEQ ID NO: 19428 - protein, 469 aa, synthetic construct; identical to SEQ ID NO: 16738
  REGION 1..469: note = neuraminidase__InfluenzaA__ADM13004

SEQ ID NO: 19429 - protein, 469 aa, synthetic construct; identical to SEQ ID NO: 16738
  REGION 1..469: note = neuraminidase__InfluenzaA__ADM13014

SEQ ID NO: 19430 - protein, 469 aa, synthetic construct
  REGION 1..469: note = neuraminidase__InfluenzaA__ADM13034
MNPNQKIITIGSVCMTIGMANLILQIGNIISIWISHSIQLGNQNQIETCNQSVITYENNTWVNQTYVNISNTNFAAGQSVVSVKLAGNSSLCPVSGWAIYSKDNSIRIGSKGDVFVIREPFISCSPLECRTFFLTQGALLNDKHSNGTIKDRSPYRTLMSCPIGEVPSPYNSRFESVAWSASACHDGINWLTIGISGPDNGAVAVLKYNGIITDTIKSWRNNILRTQESECACVNGSCFTVMTDGPSDGQASYKIFRIEKGKIVKSVEMNAPNYHYEECSCYPDSSEITCVCRDNWHGSNRPWVSFNQNLEYQIGYICSGIFGDNPRPNDKTGNCGPVSSNGANGVKGFSFKYGNGVWIGRTKSISSRNGFEMIWDPNGWTGTDNNFSIKQDIVGINEWSGYSGSFVQHPELTGLDCIRPCFWVELIRGRPKENTIWTSGSSISFCGVNSDTVGWSWPDGAELPFTIDK

SEQ ID NO: 19431 - protein, 469 aa, synthetic construct; identical to SEQ ID NO: 18651
  REGION 1..469: note = neuraminidase__InfluenzaA__ADM13044

SEQ ID NO: 19432 - protein, 469 aa, synthetic construct; identical to SEQ ID NO: 17564
  REGION 1..469: note = neuraminidase__InfluenzaA__ADM13054

SEQ ID NO: 19433 - protein, 469 aa, synthetic construct; identical to SEQ ID NO: 17915
  REGION 1..469: note = neuraminidase__InfluenzaA__ADM13064

SEQ ID NO: 19434 - protein, 469 aa, synthetic construct
  REGION 1..469: note = neuraminidase__InfluenzaA__ADM13074
MNPNQKIITIGSVCMTIGMANLILQIGNIISIWISHSIQLGNQNQIETCNQSVITYENNTWVNQTYVNISNTNLAAGQSVVSVKLAGNSSLCPVSGWAIYSKDNSIRIGSKGDVFVIREPFISCSPLECRTFFLTQGALLNDKHSNGTIKDRSPYRTLMSCPIGEVPSPYNSRFESVAWSASACHDGINWLTIGISGPDNGAVAVLKYNGIITDTIKSWRNNILRTQESECACVNGSCFTVMTDGPSDGQASYKIFRIEKGKIVKSVEMNAPNYHYEECSCYPDSSEITCVCRDNWHGSNRPWVSFNQNLEYQIGYICSGIFGDNPRPNDKTGSCGPVSSNGANGVKGFSFKYGNGVWIGRTKSISSRNGFEMIWDPNGWTGTDNKFSIKQDIVGINEWSGYSGSFVQHPELTGLDCIRPCFWVELIRGRPKENTIWTSGSSISFCGVNSDTVGWSWPDGAELPFTIDK

SEQ ID NO: 19435 - protein, 469 aa, synthetic construct; identical to SEQ ID NO: 17915
  REGION 1..469: note = neuraminidase__InfluenzaA__ADM13084

SEQ ID NO: 19436 - protein, 469 aa, synthetic construct
  REGION 1..469: note = neuraminidase__InfluenzaA__ADM13094
MNPNQKIITIGSVCMTIGMANLILQIGNTISIWISHSIQLGNQNQIETCNQSVITYENNTWVNQTYVNISNTNFAAGQSVVSAKLAGNSSLCPVSGWAIYSKDNSIRIGSKGDVFVIREPFISCSPLECRTFFLTQGALLNDKHSNGTIKDRSPYRTLMSCPIGEVPSPYNSRFESVAWSASACHDGINWLTIGISGPDNGAVAVLKYNGIITDTIKSWRNNILRTQESECACVNGSCFTVMTDGPSDGQASYKIFRIEKGKIVKSVEMNAPNYHYEECSCYPDSSEITCVCRDNWHGSNRPWVSFNQNLEYQIGYICSGIFGDNPRPNDKTGSCGPVSSNGANGVKGFSFKYGNGVWIGRTKSISSRNGFEMIWDPNGWTGTDNNFSIKQDIVGINEWSGYSGSFVQHPELTGLDCIRPCFWVELIRGRPKENTIWTSGSSISFCGVNSDTVGWSWPDGAELPFTIDK

SEQ ID NO: 19437 - protein, 469 aa, synthetic construct; identical to SEQ ID NO: 17915
  REGION 1..469: note = neuraminidase__InfluenzaA__ADM13104

SEQ ID NO: 19438 - protein, 469 aa, synthetic construct; identical to SEQ ID NO: 18640
  REGION 1..469: note = neuraminidase__InfluenzaA__ADM13124

SEQ ID NO: 19439 - protein, 469 aa, synthetic construct
  REGION 1..469: note = neuraminidase__InfluenzaA__ADM13134
MNPNQKIITIGSVCMTIGMANLILQIGNIISIWISHSIQLGNQNQIETCNQSVITYENNTWVNQTYVNISNTNFAAGQSVVSVKLAGNSSLCPVSGWAIYSKDNSIRIGSKGDVFVIREPFISCSPLECRTFFLTQGALLNDKHSNGTIKDRSPYRTLMSCPIGEVPSPYNSRFESVAWSASACHDGINWLTIGISGPDNGAVAVLKYNGIITDTIKSWRNNTLRTQESECACVNGSCFTVMTDGPSDGQASYKIFRIEKGKIVKSVEMNAPNYHYEECSCYPDSSEITCVCRDNWHGSNRPWVSFNQNLEYQIGYICSGIFGDNPRPNDKKGSCGPVSSNGANGVKGFSFKYGNGVWIGRTKSISSRNGFEMIWDPNGWTGTDNNFSIKQDIVGINEWSGYSGSFVQHPELTGLDCIRPCFWVELIRGRPKENTIWTSGSSISFCGVNSDTVGWSWPDGAELPFTIDK

SEQ ID NO: 19440 - protein, 469 aa, synthetic construct
  REGION 1..469: note = neuraminidase__InfluenzaA__ADM13154
MNPNQKIITIGSVCMTIGMANLILQIGNIISIWISHSIQLGNQKQIETCNQSVFTYENNTWVNQTYVNISNTNFAAGQSVVSVKLAGNSSLCPVSGWAIYSKDNSIRIGSKGDVFVIREPFISCSPLECRTFFLTQGALLNDKHSNGTIKDRSPYRTLMSCPIGEVPSPYNSRFESVAWSASACHDGINWLTIGISGPDNGAVAVLKYNGIITDTIKSWRNNILRTQESECACVNGSCFTVMTDGPSDGQASYKIFKIEKGKIVKSVEMNAPNYHYEECSCYPDSSEITCVCRDNWHGSNRPWVSFNQNLEYQIGYICSGIFGDNPRPNDKTGSCGPVSSNGANGVKGFSFKYGNGVWIGRTKSISSRNGFEMIWDPNGWTGTDNNFSIKQDIVGINEWSGYSGSFVQHPELTGLDCIRPCFWVELIRGRPKENTIWTSGSSISFCGVNSDTVGWSWPDGAELPFTIDK

SEQ ID NO: 19441 - protein, 469 aa, synthetic construct; identical to SEQ ID NO: 18168
  REGION 1..469: note = neuraminidase__InfluenzaA__ADM13164

SEQ ID NO: 19442 - protein, 469 aa, synthetic construct; identical to SEQ ID NO: 16738
  REGION 1..469: note = neuraminidase__InfluenzaA__ADM13174

SEQ ID NO: 19443 - protein, 469 aa, synthetic construct; identical to SEQ ID NO: 16738
  REGION 1..469: note = neuraminidase__InfluenzaA__ADM13184

SEQ ID NO: 19444 - protein, 469 aa, synthetic construct; identical to SEQ ID NO: 16738
  REGION 1..469: note = neuraminidase__InfluenzaA__ADM13194

SEQ ID NO: 19445 - protein, 469 aa, synthetic construct; identical to SEQ ID NO: 16738
  REGION 1..469: note = neuraminidase__InfluenzaA__ADM13204

SEQ ID NO: 19446 - protein, 469 aa, synthetic construct; identical to SEQ ID NO: 17915
  REGION 1..469: note = neuraminidase__InfluenzaA__ADM13214

SEQ ID NO: 19447 - protein, 469 aa, synthetic construct
  REGION 1..469: note = neuraminidase__InfluenzaA__ADM13224
MNPNQKIITIGSVCMTIGMANLILQIGNIISIWISHSIQLGNQNQIETCNQSVITYENNTWVNQTYVNISNTNFAAGQSVVSVKLAGNSSLCPVSGWAIYSKDNSIRIGSKGDVFVIREPFISCSPLECRTFFLTQGALLNDKHSNGTIKDRSPYRTLMSCPIGEVPSPYNSRFESVAWSASACHDGINWLTIGISGPDNGAVAVLKYNGIITDTIRSWRNNILRTQESECACVNGSCFTVMTDGPSDGQASYKIFRIEKGKIVKSVEMNAPNYHYEECSCYPDSSKITCVCRDNWHGSNRPWVSFNQNLEYQIGYICSGIFGDNPRPNDKTGSCGPVSSNGANGVKGFSFKYGNGVWIGRTKSISSRNGFEMIWDPNGWTGTDNNFSIKQDIVGINEWSGYSGSFVQHPELTGLDCIRPCFWVELIRGRPKENTIWTSGSSISFCGVNSDTVGWSWPDGAELPFTIDK

SEQ ID NO: 19448 - protein, 469 aa, synthetic construct; identical to SEQ ID NO: 16738
  REGION 1..469: note = neuraminidase__InfluenzaA__ADM13234

SEQ ID NO: 19449 - protein, 469 aa, synthetic construct; identical to SEQ ID NO: 18026
  REGION 1..469: note = neuraminidase__InfluenzaA__ADM13244

SEQ ID NO: 19450 - protein, 469 aa, synthetic construct; identical to SEQ ID NO: 17092
  REGION 1..469: note = neuraminidase__InfluenzaA__ADM13254

SEQ ID NO: 19451 - protein, 469 aa, synthetic construct; identical to SEQ ID NO: 17915
  REGION 1..469: note = neuraminidase__InfluenzaA__ADM13264

SEQ ID NO: 19452 - protein, 469 aa, synthetic construct; identical to SEQ ID NO: 16738
  REGION 1..469: note = neuraminidase__InfluenzaA__ADM13274

SEQ ID NO: 19453 - protein, 469 aa, synthetic construct; identical to SEQ ID NO: 16738
  REGION 1..469: note = neuraminidase__InfluenzaA__ADM13284

SEQ ID NO: 19454 - protein, 469 aa, synthetic construct
  REGION 1..469: note = neuraminidase__InfluenzaA__ADM13294
MNPNQKIITIGSVCMTIGMANLILQIGNIISIWISHSIQLGNQNQIETCNQSVITYENNTWVNQTYVNISNTNFAAGQSVVSVKLAGNSSLCPVSGWAIYSKDNSIRIGSKGDVFVIREPFISCSPLECRTFFLTQGALLNDKHSNGTIKDRSPYRALMSCPIGEVPSPYNSRFESVAWSASACHDGINWLTIGISGPDNGAVAVLKYNGIITDTIKSWRNNILRTQESECACVNGSCFTVMTDGPSDGQASYKIFRIEKGKIVKSVEMNAPNYHYEECSCYPDSSEITCVCRDNWHGSNRPWVSFNQNLEYQIGYICSGIFGDNPRPNDKTGSCGPVSSNGANGVKGFSFKYGNGVWIGRTKSISSRNGFEMIWDPNGWTGTDNSFSIKQDIVGINEWSGYSGSFVQHPELTGLDCIRPCFWVELIRGRPKENTIWTSGSSISFCGVNSDTVGWSWPDGAELPFTIDK

SEQ ID NO: 19455 - protein, 469 aa, synthetic construct; identical to SEQ ID NO: 16738
  REGION 1..469: note = neuraminidase__InfluenzaA__ADM13304

SEQ ID NO: 19456 - protein, 469 aa, synthetic construct; identical to SEQ ID NO: 18200
  REGION 1..469: note = neuraminidase__InfluenzaA__ADM13314

SEQ ID NO: 19457 - protein, 469 aa, synthetic construct; identical to SEQ ID NO: 16738
  REGION 1..469: note = neuraminidase__InfluenzaA__ADM13324

SEQ ID NO: 19458 - protein, 469 aa, synthetic construct
  REGION 1..469: note = neuraminidase__InfluenzaA__ADM13344
MNPNQKIIIIGSVCMTIGMANLILQIGNIISIWILHSIQLGNQNQIETCNQSVITYENNTWVNQTYVNISNTNFAAGQSVVSVKLAGNSSLCPVSGWAIYSKDNSIRIGSKGDVFVIREPFISCSPLECRTFFLTQGALLNDKHSNGTIKDRSPYRTLMSCPIGEVPSPYNSRFESVAWSASACHDGINWLTIGISGPDNGAVAVLKYNGIITDTIKSWRNNILRTQESECACVNGSCFTVMTDGPSDGQASYKIFRIEKGKIVKSVEMNAPNYHYEECSCYPDSSEITCVCRDNWHGSNRPWVSFNQNLEYQIGYICSGIFGDNPRPNDKTGSCGPVSSNGANGVKGFSFKYGNGVWIGRTKSISSRNGFEMIWDPNGWTGTDNNFAIKQDIVGINEWSGYSGSFVQHPELTGLDCIRPCFWVELIRGRPKENTIWTSGSSISFCGVNSDTVGWSWPDGAELPFTIDK

SEQ ID NO: 19459 - protein, 469 aa, synthetic construct; identical to SEQ ID NO: 18640
  REGION 1..469: note = neuraminidase__InfluenzaA__ADM13354

SEQ ID NO: 19460 - protein, 469 aa, synthetic construct; identical to SEQ ID NO: 17915
  REGION 1..469: note = neuraminidase__InfluenzaA__ADM13363

SEQ ID NO: 19461 - protein, 469 aa, synthetic construct
  REGION 1..469: note = neuraminidase__InfluenzaA__ADM13464
MNPNQKIITIGSVSLTIATVCFLMQIAILVTTVTLHFKQYECDSPASNQVMPCEPIIIERNITEIVYLNNTTIEKEICPKVVEYRNWSKPQCQITGFAPFSKDNSIRLSAGGDIWVTREPYVSCDHGKCYQFALGQGTTLDNKHSNDTIHDRIPHRTLLMNELGVPFHLGTRQVCIAWSSSSCHDGKAWLHVCITGNDKNATASFIYDGRLVDSIGSWSQNILRTQESECVCINGTCTVVMTDGSASGRADTRILFIEEGKIVHISPLSGSAQHVEECSCYPRYPGVRCICRDNWKGSNRPVVDINMEDYSIDSSYVCSGLVGDTPRNDDRSSNSNCRNPNNERGNQGVKGWAFDNGDDVWMGRTISKDLRSGYETFKVIGGWSTPNSKSQINRQVIVDSDNRSGYSGIFSVEGKSCINRCFYVELIRGREQETRVWWTSNSIVVFCGTSGTYGTGSWPDGANINFMPI

SEQ ID NO: 19462 - protein, 469 aa, synthetic construct
  REGION 1..469: note = neuraminidase__InfluenzaA__ADM13465
MNPNQKIITIGSVSLTIATVCFLMQIAILVTTVTLHFKQYECDSPASNQVMPCEPIIIERNITEIVYLNNTTIEKEICPKVVEYRNWSKPQCQITGFAPFSKDNSIRLSAGGDIWVTREPYVSCDHGKCYQFALGQGTTLDNKHSNDTIHDRIPHRTLLMNELGVPFHLGTRQVCIAWSSSSCHDGKAWLHVCITGDDKNATASFIYDGRLVDSIGSWSQNILRTQESECVCINGTCTVVMTDGSASGRADTRILFIEEGKIVHISPLSGSAQHVEECSCYPRYPGVRCICRDNWKGSNRPVVDINMEDYSIDSSYVCSGLVGDTPRNDDRSSNSNCRNPNNERGNQGVKGWAFDNGDDVWMGRTISKDLRSGYETFKVIGGWSTPNSKSQINRQVIVDSDNRSGYSGIFSVEGKSCINRCFYVELMRGRKQETRVWWTSNSIVVFCGTSGTYGTGSWPDGANINFMPI

SEQ ID NO: 19463 - protein, 469 aa, synthetic construct; identical to SEQ ID NO: 14095
  REGION 1..469: note = neuraminidase__InfluenzaA__ADM13466

SEQ ID NO: 19464 - protein, 469 aa, synthetic construct
  REGION 1..469: note = neuraminidase__InfluenzaA__ADM13467
MNPNQKIITIGSVSLTIATVCFLMQIAILVTTVTLHFKQYECDSPASNQVMPCEPIIIERNITEIVYLNNTTIEKEICPKVVEYRNWSKPQCQITGFAPFSKDNSIRLSSGGDIWVTREPYVSCDHGKCYQFALGQGTTLDNKHSNDTIHDRIPHRTLLMNELGVPFHLGTRQVCIAWSSSSCHDGKAWLHVCITGDDKNATASFIYDGRLVDSIGSWSQNILRTQESECVCINGTCTVVMTDGSASGRADTRILFIEEGKIVHISPLSGSAQHVEECSCYPRYPGVRCICRDNWKGSNRPVVDINMEDYSIDSSYVCSGLVGDTPRNDDRSSNSNCRNPNNERGNQGVKGWAFDNGDDVWMGRTISKDLRSGYETFKVIGGWSTPNSKSQINRQVIVDSDNRSGYSGIFSVEGKSCINRCFYVELIRGRKQETRVWWTSNSIVVFCGTSGTYGTGSWPDGANINFMPI

SEQ ID NO: 19465 - protein, 469 aa, synthetic construct; identical to SEQ ID NO: 14095
  REGION 1..469: note = neuraminidase__InfluenzaA__ADM13468

SEQ ID NO: 19466 - protein, 469 aa, synthetic construct
  REGION 1..469: note = neuraminidase__InfluenzaA__ADM13469
MNPNQKIITIGSVSLTIATACFLMQIAILVTTVTLHFKQYECDSPASNQVMPCEPIIIERNITEIVYLNNTTIEKEICPKVVEYRNWSKPQCQITGFAPFSKDNSIRLSAGGDIWVTREPYVSCDHGKCYQFALGQGTTLDNKHSNDTIHDRIPHRTLLMNELGVPFHLGTRQVCIAWSSSSCHDGKAWLHVCITGDDKNATASFIYDGRLVDSIGSWSQNILRTQESECVCINGTCTVVMTDGSASGRADTRILFIEEGKIVHISPLSGSAQHVEECSCYPRYPGVRCICRDNWKGSNRPVVDINMEDYSIDSSYVCSGLVGDTPRNDDRSSNSNCRNPNNERGNQGVKGWAFDNGDDVWMGRTISKDLRSGYETFKVIGGWSTPNSKSQINRQVIVDSDNRSGYSGIFSVEGKSCINRCFYVELIRGRKQETRVWWTSNSIVVFCGTSGTYGTGSWPDGANINFMPI

SEQ ID NO: 19467 - protein, 469 aa, synthetic construct
  REGION 1..469: note = neuraminidase__InfluenzaA__ADM13470
MNPNQKIITIGSVSLTIATVCFLMQIAILVTTVTLHFKQYECDSPASNQVMPCEPIIIERNITEIVYLNNTTIEKEICPKVVEYRNWSKPQCQITGFAPFSKDNSIRLSAGGDIWVTREPYVSCDHGKCYQFALGQGTTLDNKHSNDTIHDRIPHRTLLMNELGVPFHLGTRQVCIAWSSSSCHDGKAWLHVCITGDDKNATASFIYDGRLVDSIGSWSQNILRTQESECVCINGTCTVVMTDGSASGRADTRILFIEEGKIVHISPLSGSAQHVEECSCYPRYPGVRCICRDNWKGSNRPVVDINMEDYSIDSSYVCSGLVGDTPRNDDRSSNSNCRNPNNERGNQGVKGWAFDNGDDVWMGRTISKDLRSGYETFKVIGGWSTPNSKSQINRQVIIDSDNRSGYSGIFSVEGKSCINRCFYVELIRGRKQETRVWWTSNSIVVFCGTSGTYGTGSWPDGANINFMPI

SEQ ID NO: 19468 - protein, 469 aa, synthetic construct
  REGION 1..469: note = neuraminidase__InfluenzaA__ADM13471
MNPNQKIITIGSVSLTIATVCFLMQIAILVTTVTLHFKQYECDSPASNQVMPCEPIIIERNITEIVYLNNTTIEKEICPKVVEYRNWSKPQCQITGFAPFSKDNSIRISAGGDIWVTREPYVSCDHGKCYQFALGQGTTLDNKHSNDTIHDRIPHRTLLMNELGVPFHLGTRQVCIAWSSSSCHDGKAWLHVCITGDDKNATASFIYDGRLVDSIGSWSQNILRTQESECVCINGTCTVVMTDGSASGRADTRILFIEEGKIVHISPLSGSAQHVEECSCYPRYPGVRCICRDNWKGSNRPVVDINMEDYSIDSSYVCSGLVGDTPRNDDRSSNSNCRNPNNERGNQGVKGWAFDNGDDVWMGRTISKDLRSGYETFKVIGGWSTPNSKSQINRQVIVDSDNRSGYSGIFSVEGKSCINRCFYVELIRGRKQETRVWWTSNSIVVFCGTSGTYGTGSWPDGANINFMPI

SEQ ID NO: 19469 - protein, 469 aa, synthetic construct; identical to SEQ ID NO: 16508
  REGION 1..469: note = neuraminidase__InfluenzaA__ADM13472

SEQ ID NO: 19470 - protein, 469 aa, synthetic construct; identical to SEQ ID NO: 14095
  REGION 1..469: note = neuraminidase__InfluenzaA__ADM13473

SEQ ID NO: 19471 - protein, 469 aa, synthetic construct; identical to SEQ ID NO: 16503
  REGION 1..469: note = neuraminidase__InfluenzaA__ADM13474

SEQ ID NO: 19472 - protein, 469 aa, synthetic construct
  REGION 1..469: note = neuraminidase__InfluenzaA__ADM14469
MNPNQKIITIGSVCMTIGMANLILQIGNIISIWISHSIQLGNQNQIETCNQSVITYENNTWVNQTYVNISNTNFAAGQSVVSVKLAGNSSLCPVSGWAIYSKDNSMRIGSKGDVFVIREPFISCSPLECRTFFLTQGALLNDKHSNGTIKDRSPYRTLMSCPIGEVPSPYNSRFESVAWSASACHDGINWLTIGISGPDNGAVAVLKYNGIITDTIKSWRNNILRTQESECACVNGSCFTVMTDGPSDGQASYKIFRIEKGKIVKSVEMNAPNYHYEECSCYPDSSEITCVCRDNWHGSNRPWVSFNQNLEYQIGYICSGIFGDNPRPNDKTGSCGPVSSNGANGVKGFSFKYGNGVWIGRTKSISSRTGFEMIWDPNGWTGTDNNFSIKQDIVGINEWSGYSGSFVQHPELTGLDCIRPCFWVELIRGRPKENTIWTSGSSISFCGVNSDTVGWSWPDGAELPFTIDK

SEQ ID NO: 19473 - protein, 469 aa, synthetic construct; identical to SEQ ID NO: 16738
  REGION 1..469: note = neuraminidase__InfluenzaA__ADM14479

SEQ ID NO: 19474 - protein, 469 aa, synthetic construct; identical to SEQ ID NO: 16738
  REGION 1..469: note = neuraminidase__InfluenzaA__ADM14499

SEQ ID NO: 19475 - protein, 469 aa, synthetic construct; identical to SEQ ID NO: 18251
  REGION 1..469: note = neuraminidase__InfluenzaA__ADM14518

SEQ ID NO: 19476 - protein, 469 aa, synthetic construct; identical to SEQ ID NO: 19076
  REGION 1..469: note = neuraminidase__InfluenzaA__ADM14527

SEQ ID NO: 19477 - protein, 469 aa, synthetic construct; identical to SEQ ID NO: 18169
  REGION 1..469: note = neuraminidase__InfluenzaA__ADM14537

SEQ ID NO: 19478 - protein, 469 aa, synthetic construct; identical to SEQ ID NO: 16738
  REGION 1..469: note = neuraminidase__InfluenzaA__ADM14546

SEQ ID NO: 19479 - protein, 469 aa, synthetic construct
  REGION 1..469: note = neuraminidase__InfluenzaA__ADM14555
MNPNQKIITIGSVCMTIGMANLILQIGNIISIWISHSIQLGNQNQIETCNQSVITYENNTWVNQTYVNISNTNFAAGQSVVSVKLAGNSSLCPVSGWAIYSKDNSIRIGSKGDVFVIREPFISCSPLECRTFFLTQGALLNDKHSNGTIKDRSPYRTLMSCPIGEVPSPYNSRFESVAWSASACHDGINWLTIGISGPDNGAVAVLKYNGIITDTIKSWRNNILRTQESECACVNGSCFTVMTDGPSDGQASYKIFRIEKGKIVKSVEMNAPNYHYEECSCYPDSSEITCVCRDNWHGSNRPWVSFNQNLEYQIGYICSGIFGDNPRPNDKTGSCGPVSSNGANGVKGFSFRYGNGVWIGRTKSISSRNGFEMIWDPNGWTGTDNNFSIKQDIVGINEWSGYSGSFVQHPELTGLDCIRPCFWVELIRGRPKENTIWTSGSSISFCGVNSDTVGWSWPDGAELPFTIDK

SEQ ID NO: 19480 - protein, 469 aa, synthetic construct; identical to SEQ ID NO: 16738
  REGION 1..469: note = neuraminidase__InfluenzaA__ADM14573

SEQ ID NO: 19481 - protein, 469 aa, synthetic construct; identical to SEQ ID NO: 16738
  REGION 1..469: note = neuraminidase__InfluenzaA__ADM14582

SEQ ID NO: 19482 - protein, 469 aa, synthetic construct; identical to SEQ ID NO: 16738
  REGION 1..469: note = neuraminidase__InfluenzaA__ADM14591

SEQ ID NO: 19483 - protein, 469 aa, synthetic construct
  REGION 1..469: note = neuraminidase__InfluenzaA__ADM14601
MNPNQKIITIGSVCMTIGMANLILQIGNIISIWISHSIQLGNQNQIETCNQSVITYENNTWVNQTYVNISNTNFAAGQSVVSVKLAGNSSLCPVNGWAIYSKDNSVRIGSKGDVFVIREPFISCSPLECRTFFLTQGALLNDKHSNGTIKDRSPYRTLMSCPIGEVPSPYNSRFESVAWSASACHDGINWLTIGISGPDNGAVAVLKYNGIITDTIKSWRNNILRTQESECACVNGSCFTVMTDGPSDGQASYKIFRIEKGKIVKSVEMNAPNYHYEECSCYPDSSEITCVCRDNWHGSNRPWVSFNQNLEYQIGYICSGIFGDNPRPNDKTGSCGPVSSNGANGVKGFSFKYGNGVWIGRTKSISSRNGFEMIWDPNGWTGTDNNFSIKQDIVGINEWSGYSGSFVQHPELTGLDCIRPCFWVELIRGRPKENTIWTSGSSISFCGVNSDTVGWSWPDGAELPFTIDK

SEQ ID NO: 19484 - protein, 469 aa, synthetic construct
  REGION 1..469: note = neuraminidase__InfluenzaA__ADM14611
MNPNQKIITIGSVCMTIGMANLILQIGNIISIWISHSIQLGNQNQIETCNQSVITYENNTWVNQTYVNISNTNFAAGQSVVSVKLSGNSSLCPVSGWAIYSKDNSIRIGSKGDVFVIREPFISCSPLECRTFFLTQGALLNDKHSNGTIKDRSPYRTLMSCPIGEVPSPYNSRFESVAWSASACHDGINWLTIGISGPDNGAVAVLKYNGIITDTIKSWRNNILRTQESECACVNGSCFTVMTDGPSDGQASYKIFRIEKGKIVKSVEMNAPNYHYEECSCYPDSSEITCVCRDNWHGSNRPWVSFNQNLEYQIGYICSGIFGDNPRPNDKTGSCGPVSSNGANGVKGFSFKYGNGVWIGRTKSISSRNGFEMIWDPNGWTGTDNNFSIKQDIVGINEWSGYSGSFVQHPELTGLDCIRPCFWVELIRGRPKENTIWTSGSSISFCGVNSDTVGWSWPDGAELPFTIDK

SEQ ID NO: 19485 - protein, 469 aa, synthetic construct; identical to SEQ ID NO: 16738
  REGION 1..469: note = neuraminidase__InfluenzaA__ADM14620

SEQ ID NO: 19486 - protein, 469 aa, synthetic construct; identical to SEQ ID NO: 16738
  REGION 1..469: note = neuraminidase__InfluenzaA__ADM14629

SEQ ID NO: 19487 - protein, 469 aa, synthetic construct; identical to SEQ ID NO: 16738
  REGION 1..469: note = neuraminidase__InfluenzaA__ADM14639

SEQ ID NO: 19488 - protein, 469 aa, synthetic construct; identical to SEQ ID NO: 16738
  REGION 1..469: note = neuraminidase__InfluenzaA__ADM14657

SEQ ID NO: 19489 - protein, 469 aa, synthetic construct; identical to SEQ ID NO: 16738
  REGION 1..469: note = neuraminidase__InfluenzaA__ADM14666

SEQ ID NO: 19490 - protein, 469 aa, synthetic construct; identical to SEQ ID NO: 16738
  REGION 1..469: note = neuraminidase__InfluenzaA__ADM14684

SEQ ID NO: 19491 - protein, 469 aa, synthetic construct
  REGION 1..469: note = neuraminidase__InfluenzaA__ADM14693
MNPNQKMITIGSVCMTIGMANLILQIGNIISIWISHSIQLGNQNQIETCNQSVITYENNTWVNQTYVNISNTNFAAGQSVVSVKLAGNSSLCPVSGWAIYSKDNSIRIGSKGDVFVIREPFISCSPLECRTFFLTQGALLNDKHSNGTIKDRSPYRTLMSCPIGEVPSPYNSRFESVAWSASACHDGINWLTIGISGPDNGAVAVLKYNGIITDTIKSWRNNILRTQESECACVNGSCFTVMTDGPSDGQASYKIFRIEKGKIVKSVEMNAPNYHYEECSCYPDSSEITCVCRDNWHGSNRPWVSFNQNLEYQIGYICSGIFGDNPRPNDKTGSCGPVSSNGANGVKGFSFKYGNGVWIGRTKSISSRNGFEMIWDPNGWTGTDNNFSIKQDIVGINEWSGYSGSFVQHPELTGLDCIRPCFWVELIRGRPKENTIWTSGSSISFCGVNSDTVGWSWPDGAELPFTIDK

SEQ ID NO: 19492 - protein, 469 aa, synthetic construct
  REGION 1..469: note = neuraminidase__InfluenzaA__ADM14702
MNPNQKIITIGSVCMTIGMANLILQIGNIISIWISHSIQLGNQNQIETCNQSVITYENNTWVNQTYVNISNTNFAAGQSVVSVKLAGNSSLCPVSGWAIYSKDNSIRIGSKGDVFVIREPFISCSHLECRTFFLTQGALLNDKHSNGTIKDRSPYRTLMSCPIGEVPSPYNSRFESVAWSASACHDGINWLTIGISGPDNGAVAVLKYNGIITDTIKSWRNNILRTQESECACVNGSCFTVMTDGPSDGQASYKIFRIEKGKIVKSVEMNAPNYHYEECSCYPDSSEITCVCRDNWHGSNRPWVSFNQNLEYQIGYICSGIFGDNPRPNDKTGSCGPVSSNGANGVKGFSFKYGNGAWIGRTKSTSSRNGFEMIWDPNGWTGTDNNFSIKQDIVGINEWSGYSGSFVQHPELTGLDCIRPCFWVELIRGRPKENTIWTSGSSISFCGVNSDTVGWSWPDGAELPFTIDK

SEQ ID NO: 19493 - protein, 469 aa, synthetic construct; identical to SEQ ID NO: 18640
  REGION 1..469: note = neuraminidase__InfluenzaA__ADM14711

SEQ ID NO: 19494 - protein, 469 aa, synthetic construct
  REGION 1..469: note = neuraminidase__InfluenzaA__ADM14720
MNPNQKIITIGSVCMTIGMANLILQIGNIISIWISHSIQLGNQNQIETCNQSVITYENNTWVNQTYVNISNTNFAAGQSVVSVKLAGNSSLCPVSGWAIYSKDNSIRIGSKGDVFVIREPFISCSPLECRTFFLTQGALLNDKHSNGTIKDRSPYRTLMSCPIGEVPSPYNSRFESVAWSASACHDGINWLTIGISGPDNGAVAVLKYNGIITDTIKSWRNNILRTQESECACVNGSCFTVMTDGPSDGQASYKIFRIEKGKIVKSVEMNAPNYHYEECSCYPDSSEITCVCRDNWHGSNRPWVSFNQNLEYQIGYICSGVFGDNPRPNDKTGSCGPVSSNGANGVKGFSFKYGNGVWIGRTKSISSRNGFEMIWDPNGWTGTDNNFSIKQDIVGINEWSGYSGSFVQHPELTGLDCIRPCFWVELIRGRPKENTIWTSGSSISFCGVNSDTVGWSWPDGAELPFTIDK

SEQ ID NO: 19495 - protein, 469 aa, synthetic construct
  REGION 1..469: note = neuraminidase__InfluenzaA__ADM14730
MNPNQKIITIGSVCMTIGMANLILQIGNIISIWISHSIQLGNQNQIETCNQSIITYENNTWVNQTYVNISNTNFAAGQSVVSVKLAGNSSLCPVSGWAVYSKDNSIRIGSKGDVLVIREPFISCSPLECRTFFLTQGALLNDKHSNGTIKDRSPYRTLMSCPIGEVPSPYNSRFESVAWSASACHDGINWLTIGISGPDNGAVAVLKYNGIITDTIKSWRNNILRTQESECACVNGSCFTVMTDGPSDGQASYKIFRIEKGKIVKSVEMNAPNYHYEECSCYPDSSEITCVCRDNWHGSNRPWVSFNQNLEYQIGYICSGIFGDNPRPNDKTGSCGPVSSNGANGVKGFSFKYGNGVWIGRTKSISSRSGFEMIWDPNGWTGTDNNFSIKQDIVGINEWSGYSGSFVQHPELTGLDCIRPCFWVELIRGRPKENTIWTSGSSISFCGVNSDTVGWSWPDGAELPFTIDK

SEQ ID NO: 19496 - protein, 449 aa, synthetic construct
  REGION 1..449: note = neuraminidase__InfluenzaA__ADM14748
MNPNQKIITIGSVCMTIGMANLILQIGNIISIWISHSIQLGNQNQIETCNQSVITYENNTWVNQTYVNISNTNFAAGQSVVSVKLAGNSSLCPVSGWAIYSKDNSIRICRTFFLTQGALLNDKHSNGTIKDRSPYRTLMSCPIGEVPSPYNSRFESVAWSASACHDGINWLTIGISGPDNGAVAVLKYNGIITDTIKSWRNNILRTQESECACVNGSCFTVMTDGPSDGQASYKIFRIEKGKIVKSVEMNAPNYHYEECSCYPDSSEITCVCRDNWHGSNRPWVSFNQNLEYQIGYICSGIFGDNPRPNDKTGSCGPVSSNGANGVKGFSFKYGNGVWIGRTKSISSRNGFEMIWDPNGWTGTDNNFSIKQDIVGINEWSGYSGSFVQHPELTGLDCIRPCFWVELIRGRPKENTIWTSGSSISFCGVNSDTVGWSWPDGAELPFTIDK

SEQ ID NO: 19497 - protein, 469 aa, synthetic construct
  REGION 1..469: note = neuraminidase__InfluenzaA__ADM14758
MNPNQKIITIGSVCMTIGMANLILQIGNIISIWISHSIQLGNQNQIETCNQSVITYENNTWVNQTYVNISNTNFAAGQSVVSVKLAGNSSLCPVSGWAIYSKDNSIRIGSKGDVFVIREPFISCSPLECRTFFLTQGALLNDKHSNGTIKDRSPYRTLMSCPIGEVPSPYNSRFESVAWSASACHDGINWLTIGISGPDNGAVAVLKYNGIITDTIKSWRNNILRTQESECACVNGSCFTVMTDGPSDGQASYKIFRIEKGKIVKSVEINAPNYHYEECSCYPDSSEITCVCRDNWHGSNRPWVSFNQNLEYQIGYICSGIFGDNPRPNDKTGSCGPVSSNGANGVKGFSFKYGNGVWIGRTKSISSRNGFEMIWDPNGWTGTDNNFSIKQDIVGINEWSGYSGSFVQHPELTGLDCIRPCFWVELIRGRPKENTIWTSGSSISFCGVNSDTVGWSWPDGAELPFTIDK

SEQ ID NO: 19498 - protein, 469 aa, synthetic construct; identical to SEQ ID NO: 19497
  REGION 1..469: note = neuraminidase__InfluenzaA__ADM14767

SEQ ID NO: 19499 - protein, 469 aa, synthetic construct; identical to SEQ ID NO: 16738
  REGION 1..469: note = neuraminidase__InfluenzaA__ADM14777

SEQ ID NO: 19500 - protein, 469 aa, synthetic construct; identical to SEQ ID NO: 16738
  REGION 1..469: note = neuraminidase__InfluenzaA__ADM14814

SEQ ID NO: 19501 - protein, 469 aa, synthetic construct; identical to SEQ ID NO: 16738
  REGION 1..469: note = neuraminidase__InfluenzaA__ADM14823

SEQ ID NO: 19502 - protein, 469 aa, synthetic construct; identical to SEQ ID NO: 18361
  REGION 1..469: note = neuraminidase__InfluenzaA__ADM14841

SEQ ID NO: 19503 - protein, 469 aa, synthetic construct; identical to SEQ ID NO: 18361
  REGION 1..469: note = neuraminidase__InfluenzaA__ADM14859

SEQ ID NO: 19504 - protein, 469 aa, synthetic construct; identical to SEQ ID NO: 17875
  REGION 1..469: note = neuraminidase__InfluenzaA__ADM14868

SEQ ID NO: 19505 - protein, 469 aa, synthetic construct; identical to SEQ ID NO: 18361
  REGION 1..469: note = neuraminidase__InfluenzaA__ADM14878

SEQ ID NO: 19506 - protein, 469 aa, synthetic construct; identical to SEQ ID NO: 16738
  REGION 1..469: note = neuraminidase__InfluenzaA__ADM14887

SEQ ID NO: 19507 - protein, 469 aa, synthetic construct
  REGION 1..469: note = neuraminidase__InfluenzaA__ADM14896
MNPNQKIITIGSVCMTIGMANLILQIGNIISIWISHSIQLGNQNQIETCNQSVITYENNTWVNQTYVNISNTNFAAGQSVVSVKLAGNSSLCPVSGWAIYSKDNSIRIGSKGDVLVIREPFISCSPLECRTFFLTQGALLNDKHSNGTIKDRSPYRTLMSCPIGEVPSPYNSRFESVAWSASACHDGINWLTIGISGPDNGAVAVLKYNGIITDTIKSWRNNILRTQESECACVNGSCFTVMTDGPSDGQASYKIFRIEKGKIVKSVEMNAPNYHYEECSCYPDSSEITCVCRDNWHGSNRPWVSFNQNLEYQIGYICSGIFGDNPRPNDKTGSCGPVSSNGANGVKGFSFKYGNGVWIGRTKSISSRNGFEMIWDPNGWTGTDNNFSIKQDIVGINEWSGYSGSFVQHPELTGLDCIRPCFWVELIRGRPKENTIWTSGSSISFCGVNSDTVGWSWPDGAELPFTIDK

SEQ ID NO: 19508 - protein, 469 aa, synthetic construct; identical to SEQ ID NO: 16738
  REGION 1..469: note = neuraminidase__InfluenzaA__ADM14905

SEQ ID NO: 19509 - protein, 469 aa, synthetic construct; identical to SEQ ID NO: 16738
  REGION 1..469: note = neuraminidase__InfluenzaA__ADM14923

SEQ ID NO: 19510 - protein, 469 aa, synthetic construct; identical to SEQ ID NO: 18026
  REGION 1..469: note = neuraminidase__InfluenzaA__ADM14932

SEQ ID NO: 19511 - protein, 469 aa, synthetic construct; identical to SEQ ID NO: 16738
  REGION 1..469: note = neuraminidase__InfluenzaA__ADM14950

SEQ ID NO: 19512 - protein, 469 aa, synthetic construct; identical to SEQ ID NO: 17756
  REGION 1..469: note = neuraminidase__InfluenzaA__ADM14959

SEQ ID NO: 19513 - protein, 469 aa, synthetic construct
  REGION 1..469: note = neuraminidase__InfluenzaA__ADM14977
MNPNQKIITIGSVCMTIGMANLILQIGNIISIWISHSIQLGNQNQIETCNQSVITYENNTWVNQTYVNISNTNFAAGQSVVSVKLAGNSSLCPVNGWAIYSKDNSVRIGSKGDVFVIREPFISCSPLECRTFFLTQGALLNDKHSNGTIKDRSPYRTLMSCPIGEVPSPYNSRFESVAWSASACHDGINWLTIGISGPDNGAVAVLKYNGIITDTIKSWRNNILRTQESECACVNGSCFTVMTDGPSNGQASYKIFRIEKGKIVKSVEMNAPNYHYEECSCYPDSSEITCVCRDNWHGSNRPWVSFNQNLEYQIGYICSGIFGDNPRPNDKTGSCGPVSSNGANGVKGFSFKYGNGVWIGRTKSISSRNGFEMIWDPNGWTGTDNNFSIKQDIVGINEWSGYSGSFVQHPELTGLDCIRPCFWVELIRGRPKENTIWTSGSSISFCGVNSDTVGWSWPDGAELPFTIDK

SEQ ID NO: 19514 - protein, 469 aa, synthetic construct; identical to SEQ ID NO: 18361
  REGION 1..469: note = neuraminidase__InfluenzaA__ADM14987

SEQ ID NO: 19515 - protein, 469 aa, synthetic construct; identical to SEQ ID NO: 17905
  REGION 1..469: note = neuraminidase__InfluenzaA__ADM26787

SEQ ID NO: 19516 - protein, 469 aa, synthetic construct; identical to SEQ ID NO: 18484
  REGION 1..469: note = neuraminidase__InfluenzaA__ADM26798

SEQ ID NO: 19517 - protein, 469 aa, synthetic construct
  REGION 1..469: note = neuraminidase__InfluenzaA__ADM26809
MNPNQKIITIGSVSLTISTICFFMQIAILITTVTLHFKQYEFNSPPNNQVMLCEPTIIERNITEIVYLTNTTIEKEICPKLAEYRNWSKPQCDITGFAPFSKDNSIRLSAGGDIWVTREPYVSCDPDKCYQFALGQGTTVNNVHSNNTVRDRTPYRTLLMNELGVPFHLGTKQVCIAWSSSSCHDGKAWLHVCITGDDKNATASFIYNGRLVDSVVSWSKEILRTQESECVCINGTCTVVMTDGSASGKADTKILFIEEGKIVHTSTLSGSAQHVEECSCYPRYPGVRCVCRDNWKGSNRPIVDINIKDHSIVSSYVCSGLVGDTPRKNDSSSSSHCLDPNNEEGGHGVKGWAFDDGNDVWMGRTISEKSRLGYETFKVIEGWSNHKSKLQINRQVIVDRGNRSGYSGIFSVEGKSCINRCFYVELIRGRKEETEVLWTSNSIVVFCGTSGTYGTGSWPDGADLNLMPI

SEQ ID NO: 19518 - protein, 469 aa, synthetic construct
  REGION 1..469: note = neuraminidase__InfluenzaA__ADM26820
MNPNQKIITIGSVSLTISTICFFMQIAILITTVTLHFKQYEFNSPPNNQVMLCEPTIIERNITEIVYLTNTTIEKEICPKLAEYRNWSKPQCDITGFAPFSKDNSIRLSAGGDIWVTREPYVSCDPDKCYQFALGQGTTLNNVHSNNTVRDRTPYRTLLMNELGVPFHLGTKQVCIAWSSSSCHDGKAWLHVCITGDDKNATASFIYNGRLVDSVVSWSKEILRTQESECVCINGTCTVVMTDGSASGKADTKILFIEEGKIVHTSTLSGSAQHVEECSCYPRYPGVRCVCRDNWKGSNRPIVDINIKDHSIVSSYVCSGLVGDTPRKNDSSSSSHCLDPNNEEGGHGVKGWAFDDGNDVWMGRTINETSRLGYETFKVIEGWSNPKSKLQINRQVIVDRGNRSGYSGIFSVEGKSCINRCFYVELIRGRKEETEVLWTSNSIVVFCGTSGTYGTGSWPDGADLNLMPI

SEQ ID NO: 19519 - protein, 449 aa, synthetic construct
  REGION 1..449: note = neuraminidase__InfluenzaA__ADM31427
MNPNQKIITIGSVCMIIGIVSLMLQIGNMISIWVSHSIQTGNQHQAEPIRNTNFLTENAVASVTLAGNSSLCPIRGWAVHSKDNSIRIGSKGDVFVIREPFISCSHMECRTFFLTQGALLNDKHSNGTVKDRSPHRTLMSCPVGEAPSPYNSRFESVAWSASACHDGISWLTIGISGPDNGAVAVLKYNGIITDTIKSWGNNILRTQESECACVNGSCFTVMTDGPSNGQASYKIFKIEKGKVVKSVELNAPNYHYEECSCYPDSGEIICVCRDNWHGSNRPWVSFNQNLEYQIGYICSGVFGDNPRPNDGTGSCGPMSPNGAYGIKGFSFKYGNGVWIGRTKSTNSRSGFEMIWDPNGWTGTDSEFSVKQDIVAITDWSGYSGSFVQHPELTGLDCIRPCFWVELIRGRPKESTIWTSGSSISFCGVNSDTVSWSWPDGAELPFTIDK

SEQ ID NO: 19520 - protein, 469 aa, synthetic construct
  REGION 1..469: note = neuraminidase__InfluenzaA__ADM31481
MNPNQKIITIGSVCMTIGMANLILQIGNIISIWISHSIQLGNQNQIETCNQSVITYENNTWVNQTYVNISNTNFAAGQSVVSVKLAGNSSLCPVSGWAIYSKDNSIRIGSKGDVFVIREPFISCSPLECRTFFLTQGALLNDKHSNGTIKDRSPYRTLMSCPIGEVPSPYNSRFESVAWSASACHDGINWLTIGISGPDKGAVAVLKYNGIITDTIKSWRNNILRTQESECACVNGSCFTVMTDGPSDGQASYKIFRIEKGKIVKSVEMNAPNYHYEECSCYPDSSEITCVCRDNWHGSNRPWVSFNQNLEYQIGYICSGIFGDNPRPNDKTGSCGPVSSNGANGVKGFSFKYGNGVWIGRTKSISSRNGFEMIWDPNGWTGTDNNFSIKQDIVGINEWSGYSGSFVQHPELTGLDCIRPCFWVELIRGRPKENTIWTSGSSISFCGVNSDTVGWSWPDGAELPFTIDK

SEQ ID NO: 19521 - protein, 469 aa, synthetic construct; identical to SEQ ID NO: 17321
  REGION 1..469: note = neuraminidase__InfluenzaA__ADM31491

SEQ ID NO: 19522 - protein, 469 aa, synthetic construct; identical to SEQ ID NO: 18943
  REGION 1..469: note = neuraminidase__InfluenzaA__ADM31501

SEQ ID NO: 19523 - protein, 469 aa, synthetic construct; identical to SEQ ID NO: 16738
  REGION 1..469: note = neuraminidase__InfluenzaA__ADM31511

SEQ ID NO: 19524 - protein, 469 aa, synthetic construct; identical to SEQ ID NO: 18939
  REGION 1..469: note = neuraminidase__InfluenzaA__ADM31521

SEQ ID NO: 19525 - protein, 469 aa, synthetic construct; identical to SEQ ID NO: 16738
  REGION 1..469: note = neuraminidase__InfluenzaA__ADM31531

SEQ ID NO: 19526 - protein, 469 aa, synthetic construct; identical to SEQ ID NO: 18026
  REGION 1..469: note = neuraminidase__InfluenzaA__ADM31541

SEQ ID NO: 19527 - protein, 469 aa, synthetic construct; identical to SEQ ID NO: 16738
  REGION 1..469: note = neuraminidase__InfluenzaA__ADM31551

SEQ ID NO: 19528 - protein, 469 aa, synthetic construct; identical to SEQ ID NO: 16738
  REGION 1..469: note = neuraminidase__InfluenzaA__ADM31561

SEQ ID NO: 19529 - protein, 469 aa, synthetic construct; identical to SEQ ID NO: 16738
  REGION 1..469: note = neuraminidase__InfluenzaA__ADM31571

SEQ ID NO: 19530 - protein, 469 aa, synthetic construct; identical to SEQ ID NO: 17915
  REGION 1..469: note = neuraminidase__InfluenzaA__ADM31581

SEQ ID NO: 19531 - protein, 469 aa, synthetic construct; identical to SEQ ID NO: 16738
  REGION 1..469: note = neuraminidase__InfluenzaA__ADM31601

SEQ ID NO: 19532 - protein, 469 aa, synthetic construct; identical to SEQ ID NO: 18026
  REGION 1..469: note = neuraminidase__InfluenzaA__ADM31611

SEQ ID NO: 19533 - protein, 469 aa, synthetic construct
  REGION 1..469: note = neuraminidase__InfluenzaA__ADM31621
MNPNQKIITIGSVCMTIGMANLILQIGNIISIWISHSIQLGNQNQIETCNQSVITYENNTWVNQTYVNISNTNFAAGQSVVSVKLAGNSSLCPVSGWAIYSKDNSIRIGSKGDVFVIREPFISCSSLECRTFFLTQGALLNDKHSNGTIKDRSPYRTLMSCPIGEVPSPYNSRFESVAWSASACHDGINWLTIGISGPDNGAVAVLKYNGIITDTIKSWRNNILRTQESECACVNGSCFTVMTDGPSDGQASYKIFRIEKGKIVKSVEMNAPNYHYEECSCYPDSSEITCVCRDNWHGSNRPWVSFNQNLEYQIGYICSGIFGDNPRPNDKTGSCGPVSSNGANGVKGFSFKYGNGVWIGRTKSISSRNGFEMIWDPNGWTGTDNNFSIKQDIVGINEWSGYSGSFVQHPELTGLDCIRPCFWVELIRGRPKENTIWTSGSSISFCGVNSDTVGWSWPDGAELPFTIDK

SEQ ID NO: 19534 - protein, 469 aa, synthetic construct; identical to SEQ ID NO: 18026
  REGION 1..469: note = neuraminidase__InfluenzaA__ADM31631

SEQ ID NO: 19535 - protein, 469 aa, synthetic construct; identical to SEQ ID NO: 17915
  REGION 1..469: note = neuraminidase__InfluenzaA__ADM31641

SEQ ID NO: 19536 - protein, 469 aa, synthetic construct; identical to SEQ ID NO: 18200
  REGION 1..469: note = neuraminidase__InfluenzaA__ADM31651

SEQ ID NO: 19537 - protein, 469 aa, synthetic construct; identical to SEQ ID NO: 17915
  REGION 1..469: note = neuraminidase__InfluenzaA__ADM31661

SEQ ID NO: 19538 - protein, 469 aa, synthetic construct
  REGION 1..469: note = neuraminidase__InfluenzaA__ADM31671
MNPNQKIITIGSVCMTIGMANLILQIGNIISIWISHSTQLGNQNQIETCNQSVITYENNTWVNQTYVNISNTNFAAGQSVVSAKLAGNSSLCPVSGWAIYSKDNSIRIGSKGDVFVIREPFISCSPLECRTFFLTQGALLNDKHSNGTIKDRSPYRTLMSCPIGEVPSPYNSRFESVAWSASACHDGINWLTIGISGPDNGAVAVLKYNGIITDTIKSWRNNILRTQESECACVNGSCFTVMTDGPSDGQASYKIFRIEKGKIVKSVEMNAPNYHYEECSCYPDSSEITCVCRDNWHGSNRPWVSFNQNLEYQIGYICSGIFGDNPRPNDKTGSCGPVSSNGANGVKGFSFKYGNGVWIGRTKSISSRNGFEMIWDPNGWTGTDNNFSIKQDIVGINEWSGYSGSFVQHPELTGLDCIRPCFWVELIRGRPKENTIWTSGSSISFCGVNSDTVGWSWPDGAELPFTIDK

SEQ ID NO: 19539 - protein, 469 aa, synthetic construct; identical to SEQ ID NO: 18026
  REGION 1..469: note = neuraminidase__InfluenzaA__ADM31681

SEQ ID NO: 19540 - protein, 469 aa, synthetic construct
  REGION 1..469: note = neuraminidase__InfluenzaA__ADM31691
MNPNQKILTIGSVCMTIGMANLILQIGNIISIWISHSIQLGNQNQTETCNQSVITYENNTWVNQTYVNISNTNFAAGQSVVSVKLAGNSSLCPVSGWAIYSKDNSIRIGSKGDVFVIREPFISCSPLECRTFFLTQGALLNDKHSNGTIKDRSPYRTLMSCPIGEVPSPYNSRFESVAWSASACHDGINWLTIGISGPDNGAVAVLKYNGIITDTIKSWRNNILRTQESECACVNGSCFTVMTDGPSDGQASYKIFRIEKGKIVKSVEMNAPNYHYEECSCYPDSSEITCVCRDNWHGSNRPWVSFNQNLEYQIGYICSGIFGDNPRPNDKTGSCGPVSSNGANGVKGFSFKYGNGVWIGRTKSISSRNGFEMIWDPNGWTGTDNNFSIKQDIVGINEWSGYSGSFVQHPELTGLDCIRPCFWVELIRGRPKENTIWTSGSSISFCGVNSDTVGWSWPDGAELPFTIDK

SEQ ID NO: 19541 - protein, 469 aa, synthetic construct; identical to SEQ ID NO: 16738
  REGION 1..469: note = neuraminidase__InfluenzaA__ADM31701

SEQ ID NO: 19542 - protein, 469 aa, synthetic construct; identical to SEQ ID NO: 16738
  REGION 1..469: note = neuraminidase__InfluenzaA__ADM31711

SEQ ID NO: 19543 - protein, 469 aa, synthetic construct; identical to SEQ ID NO: 18026
  REGION 1..469: note = neuraminidase__InfluenzaA__ADM31721

SEQ ID NO: 19544 - protein, 469 aa, synthetic construct
  REGION 1..469: note = neuraminidase__InfluenzaA__ADM31731
MNPNQKIIIIGSVCMTIGMANLILQIGNIISIWISHSIQLGNQNQIETCNQSVITYENNTWVNQTYVNISNTNFAAGQSVVSVKLAGNSSLCPVSGWAIYSKDNSIRIGSKGDVFVIREPFISCSPLECRTFFLTQGALLNDKHSNGTIKDRSPYRTLMSCPIGEVPSPYNSRFESVAWSASACHDGINWLTIGISGPDNGAVAVLKYNGIITDTIKSWRNNILRTQESECACVNGSCFTVMTDGPSDGQASYKIFRIEKGRIVKSVEMNAPNYHYEECSCYPDSSEITCVCRDNWHGSNRPWVSFNQNLEYQIGYICSGIFGDNPRPNDKTGSCGPVSSNGANGVKGFSFKYGNGVWIGRTKSISSRNGFEMIWDPNGWTGTDNNFSIKQDIVGINEWSGYSGSFVQHPELTGLDCIRPCFWVELIRGRPKENTIWTSGSSISFCGVNSDTVGWSWPDGAELPFTIDK

SEQ ID NO: 19545 - protein, 469 aa, synthetic construct; identical to SEQ ID NO: 19113
  REGION 1..469: note = neuraminidase__InfluenzaA__ADM31741

SEQ ID NO: 19546 - protein, 469 aa, synthetic construct; identical to SEQ ID NO: 16738
  REGION 1..469: note = neuraminidase__InfluenzaA__ADM31751

SEQ ID NO: 19547 - protein, 469 aa, synthetic construct
  REGION 1..469: note = neuraminidase__InfluenzaA__ADM31761
MNPNQKIITIGSVCMTIGMANLILQIGNIISIWISHSIQLGNQNQIETCNQSVITYENNTWVNQTYVNISNTNFAAGQSVVSVKLAGNSSLCPVSGWAIYSKDNSIRIGSKGDVFVIREPFISCSPLECRTFFLTQGALLNDKHSNGTIKDRSPYRTLMSCPIGEVPSPYNSRFESVAWSASACHDGINWLTIGISGPDNGAVAVLKYNGIITDTIKSWRNNILRTQESECACVNGSCFTVMTDGPSDGQASYKIFRIEKGKIVKSVEMNAPNYHYEECSCYPDSSEITCVCRDNWHGSNRPWVSFNHNLEYQIGYICSGIFGDNPRPNDKTGSCGPVSSNGANGVKGFSFKYGNGVWIGRTKSISSRNGFEMIWDPNGWTGTDNKFSIKQDIVGISEWSGYSGSFVQHPELTGLDCIRPCFWVELIRGRPKENTIWTSGSSISFCGVNSDTVGWSWPDGAELPFTIDK

SEQ ID NO: 19548 - protein, 469 aa, synthetic construct
  REGION 1..469: note = neuraminidase__InfluenzaA__ADM31771
MNPNQKILTIGSVCMTIGMANLILQIGNIISIWISHSIQLGNQNQTETCNQSVIIYENNTWVNQTYVNISNTNFAAGQSVVSVKLAGNSSLCPVSGWAIYSKDNSIRIGSKGDVFVIREPFISCSPLECRTFFLTQGALLNDKHSNGTIKDRSPYRTLMSCPIGEVPSPYNSRFESVAWSASACHDGINWLTIGISGPDNGAVAVLKYNGIITDTIKSWRNNILRTQESECACVNGSCFTVMTDGPSDGQASYKIFRIEKGKIVKSVEMNAPNYHYEECSCYPDSSEITCVCRDNWHGSNRPWVSFNQNLEYQIGYICSGIFGDNPRPNDKTGSCGPVSSNGANGVKGFSFKYGNGVWIGRTKSISSRNGFEMIWDPNGWTGTDNNFSIKQDIVGINEWSGYSGSFVQHPELTGLDCIRPCFWVELIRGRPKENTIWTSGSSISFCGVNSDTVGWSWPDGAELPFTIDK

SEQ ID NO: 19549 - protein, 469 aa, synthetic construct
  REGION 1..469: note = neuraminidase__InfluenzaA__ADM31801
MNPNQKIITIGSVCMTIGMANLILQIGNIISIWISHSIQLGNQNQIETCNQSVITYENNTWVNQTYVNINNTNFAAGQSVVSVKLAGNSSLCPVSGWAIYSKDNSIRIGSKGDVFVIREPFISCSPLECRTFFLTQGALLNDKHSNGTIKDRSPYRTLMSCPIGEVPSPYNSRFESVAWSASACHDGINWLTIGISGPDNGAVAVLKYNGIITDTIKSWRNNILRTQESECACVNGSCFTVMTDGPSDGQASYKIFRIEKGKIVKSVEMNAPNYHYEECSCYPDSSEITCVCRDNWHGSNRPWVSFNQNLEYQIGYICSGIFGDNPRPNDKTGSCGPVSSNGANGVKGFSFKYGNGVWIGRTKSISSRNGFEMIWDPNGWTGTDNKFSIKQDIVGINEWSGYSGSFVQHPELTGLDCIRPCFWVELIRGRPKENTIWTSGSSISFCGVNSDTVGWSWPDGAELPFTIDK

SEQ ID NO: 19550 - protein, 469 aa, synthetic construct
  REGION 1..469: note = neuraminidase__InfluenzaA__ADM31811
MNPNQKIITIGSVCMTIGMANLILQIGNIISIWISHSIQLGNQNQIETCNQSVITYENNTWVNQTYVNISNTNFAAGQSVVSVKFAGNSSLCPVSGWAIYSKDNSIRIGSKGDVFVIREPFISCSPLECRTFFLTQGALLNDKHSNGTIKDRSPYRTLMSCPIGEVPSPYNSRFESVAWSASACHDGINWLTIGISGPDNGAVAVLKYNGIITDTIKSWRNNILRTQESECACVNGSCFTVMTDGPSDGQASYKIFRIEKGKIVKSVEMNAPNYHYEECSCYPDSSEITCVCRDNWHGSNRPWVSFNQNLEYQIGYICSGIFGDNPRPNDKTGSCGPVSSNGANGVKGFSFKYGNGVWIGRTKSISSRNGFEMIWDPNGWTGTDNKFSIKQDIVGINEWSGYSGSFVQHPELTGLDCIRPCFWVELIRGRPKENTIWTSGSSISFCGVNSDTVGWSWPDGAELPFTIDK

SEQ ID NO: 19551 - protein, 469 aa, synthetic construct; identical to SEQ ID NO: 17915
  REGION 1..469: note = neuraminidase__InfluenzaA__ADM31821

SEQ ID NO: 19552 - protein, 469 aa, synthetic construct; identical to SEQ ID NO: 16738
  REGION 1..469: note = neuraminidase__InfluenzaA__ADM31831

SEQ ID NO: 19553 - protein, 469 aa, synthetic construct; identical to SEQ ID NO: 16738
  REGION 1..469: note = neuraminidase__InfluenzaA__ADM31841

SEQ ID NO: 19554 - protein, 469 aa, synthetic construct
  REGION 1..469: note = neuraminidase__InfluenzaA__ADM31851
MNPNQKILTIGSVCMTIGMANLILQIGNIISIWISHSIQLGNQNQTETCNQSVITYENNTWVNQTYVNISNTNFAAGQSVVSVKLAGNSSLCPVSGWAIYSKDNSIRIGSKGDVFVIREPFISCSPLECRTFFLTQGALLNDKHSNGTIKDRSPYRTLMSCPIGEVPSPYNSRFESVAWSASACHDGINWLTIGISGPDNGAVAVLKYNGIITDTIKSWRNNILRTQESECACVNGSCFTVMTDGPSDGQASYKIFRIERGKIVKSVEMNAPNYHYEECSCYPDSSEITCVCRDNWHGSNRPWVSFNQNLEYQIGYICSGIFGDNPRPNDKTGSCGPVSSNGANGVKGFSFKYGNGVWIGRTKSISSRNGFEMIWDPNGWTGTDNNFSIKQDIVGINEWSGYSGSFVQHPELTGLDCIRPCFWVELIRGRPKENTIWTSGSSISFCGVNSDTVGWSWPDGAELPFTIDK

SEQ ID NO: 19555 - protein, 469 aa, synthetic construct; identical to SEQ ID NO: 16738
  REGION 1..469: note = neuraminidase__InfluenzaA__ADM31861

SEQ ID NO: 19556 - protein, 469 aa, synthetic construct; identical to SEQ ID NO: 16738
  REGION 1..469: note = neuraminidase__InfluenzaA__ADM31871

SEQ ID NO: 19557 - protein, 469 aa, synthetic construct
  REGION 1..469: note = neuraminidase__InfluenzaA__ADM31881
MNPNQKIITIGSVCMTIGMANLILQIGNTISIWISHSIQLGNQNQIETCNQSVITYENNTWVNQTYVNISNTNFAAGQSVVSVKLAGNSSLCPVSGWAIYSKDNSIRIGSKGDVFVIREPFISCSPLECRTFFLTQGALLNDKHSNGTIKDRSPYRTLMSCPIGEVPSPYNSRFESVAWSASACHDGINWLTIGISGPDNGAVAVLKYNGIITDTIKSWRNNILRTQESECACVNGSCFTVMTDGPSDGQASYKIFRIEKGKIVKSVEMNAPNYHYEECSCYPDSSEITCVCRDNWHGSNRPWVSFNQNLEYQIGYICSGIFGDNPRPNDKTGSCGPVSSNGANGVKGFSFKYGNGVWIGRTKSISSRNGFEMIWDPNGWTGTDNNFSIKQDIVGINEWSGYSGSFVQHPELTGLDCIRPCFWVELIRGRPKENTIWTSGSSISFCGVNSDTVGWSWPDGAELPFTIDK

SEQ ID NO: 19558 - protein, 469 aa, synthetic construct; identical to SEQ ID NO: 16738
  REGION 1..469: note = neuraminidase__InfluenzaA__ADM31891

SEQ ID NO: 19559 - protein, 469 aa, synthetic construct; identical to SEQ ID NO: 16728
  REGION 1..469: note = neuraminidase__InfluenzaA__ADM31901

SEQ ID NO: 19560 - protein, 469 aa, synthetic construct; identical to SEQ ID NO: 17961
  REGION 1..469: note = neuraminidase__InfluenzaA__ADM31911

SEQ ID NO: 19561 - protein, 469 aa, synthetic construct; identical to SEQ ID NO: 17961
  REGION 1..469: note = neuraminidase__InfluenzaA__ADM31921

SEQ ID NO: 19562 - protein, 469 aa, synthetic construct; identical to SEQ ID NO: 18419
  REGION 1..469: note = neuraminidase__InfluenzaA__ADM31931

SEQ ID NO: 19563 - protein, 469 aa, synthetic construct; identical to SEQ ID NO: 16728
  REGION 1..469: note = neuraminidase__InfluenzaA__ADM31941

SEQ ID NO: 19564 - protein, 469 aa, synthetic construct; identical to SEQ ID NO: 18419
  REGION 1..469: note = neuraminidase__InfluenzaA__ADM31951

SEQ ID NO: 19565 - protein, 469 aa, synthetic construct
  REGION 1..469: note = neuraminidase__InfluenzaA__ADM31961
MNPNQKIITIGSVCMAIGMANLILQIGNIISIWISHSIQLGNQNQIETCNQSVITYENNTWVNQTYVNISNTNFAAGQSVVSVKLAGNSSLCPVSGWAIYSKDNSIRIGSKGDVFVIREPFISCSPLECRTFFLTQGALLNDKHSNGTIKDRSPYRTLMSCPIGEVPSPYNSRFESVAWSASACHDGINWLTIGISGPDNGAVAVLKYNGIITDTIKSWRNNILRTQESECACVNGSCFTVMTDGPSDGQASYKIFRIEKGKIVKSVEMNAPNYHYEECSCYPDSSEITCVCRDNWHGSNRPWVSFNQNLEYQIGYICSGIFGDNPRPNDKTGSCGPVSSNGANGVKGFSFKYGNGVWIGRTKSISSRNGFEMIWDPNGWTGTDNNFSIKQDIVGINEWSGYSGSFVQHPELTGLDCIRPCFWVELIRGRPKENTIWTSGSSISFCGVNSDTVGWSWPDGAELPFTIDK

SEQ ID NO: 19566 - protein, 469 aa, synthetic construct
  REGION 1..469: note = neuraminidase__InfluenzaA__ADM31971
MNPNQKIITIGSVCMTIGMANLILQIGNIISIWISHSIQLGNQNQIETCNQSVITYENNTWVNQTYVNISNTNFAAGQSVVSMKLAGNSSLCPVSGWAIYSKDNSVRIGSKGDVFVIREPFISCSPLECRTFFLTQGALLNDKHSNGTIKDRSPYRTLMSCPIGEVPSPYNSRFESVAWSASACHDGINWLTIGISGPDNGAVAVLKYNGVITDTIKSWRNNILRTQESECACVNGSCFTVMTDGPSNGQASYKIFRIEKGKIVKSVEMNAPNYHYEECSCYPDSSEITCVCRDNWHGSNRPWVSFNQNLEYQIGYICSGIFGDNPRPNDKTGSCGPVSSNGANGVKGFSFKYGNGVWIGRTKSISSRNGFEMIWDPNGWTGTDNNFSIKQDIVGINEWSGYSGSFVQHPELTGLDCIRPCFWVELIRGRPKENTIWTSGSSISFCGVNSDTVGWSWPDGAELPFTIDK

SEQ ID NO: 19567 - protein, 469 aa, synthetic construct; identical to SEQ ID NO: 17961
  REGION 1..469: note = neuraminidase__InfluenzaA__ADM31981

SEQ ID NO: 19568 - protein, 469 aa, synthetic construct; identical to SEQ ID NO: 16728
  REGION 1..469: note = neuraminidase__InfluenzaA__ADM31991

SEQ ID NO: 19569 - protein, 469 aa, synthetic construct; identical to SEQ ID NO: 16728
  REGION 1..469: note = neuraminidase__InfluenzaA__ADM32001

SEQ ID NO: 19570 - protein, 469 aa, synthetic construct; identical to SEQ ID NO: 16728
  REGION 1..469: note = neuraminidase__InfluenzaA__ADM32011

SEQ ID NO: 19571 - protein, 469 aa, synthetic construct; identical to SEQ ID NO: 16738
  REGION 1..469: note = neuraminidase__InfluenzaA__ADM32021

SEQ ID NO: 19572 - protein, 469 aa, synthetic construct; identical to SEQ ID NO: 17708
  REGION 1..469: note = neuraminidase__InfluenzaA__ADM32031

SEQ ID NO: 19573 - protein, 469 aa, synthetic construct; identical to SEQ ID NO: 18462
  REGION 1..469: note = neuraminidase__InfluenzaA__ADM32051

SEQ ID NO: 19574 - protein, 469 aa, synthetic construct; identical to SEQ ID NO: 16738
  REGION 1..469: note = neuraminidase__InfluenzaA__ADM32061

SEQ ID NO: 19575 - protein, 469 aa, synthetic construct; identical to SEQ ID NO: 16738
  REGION 1..469: note = neuraminidase__InfluenzaA__ADM32071

SEQ ID NO: 19576 - protein, 469 aa, synthetic construct; identical to SEQ ID NO: 16738
  REGION 1..469: note = neuraminidase__InfluenzaA__ADM32081

SEQ ID NO: 19577 - protein, 469 aa, synthetic construct; identical to SEQ ID NO: 17961
  REGION 1..469: note = neuraminidase__InfluenzaA__ADM32091

SEQ ID NO: 19578 - protein, 469 aa, synthetic construct; identical to SEQ ID NO: 16738
  REGION 1..469: note = neuraminidase__InfluenzaA__ADM32101

SEQ ID NO: 19579 - protein, 469 aa, synthetic construct; identical to SEQ ID NO: 16738
  REGION 1..469: note = neuraminidase__InfluenzaA__ADM32111

SEQ ID NO: 19580 - protein, 469 aa, synthetic construct; identical to SEQ ID NO: 18419
  REGION 1..469: note = neuraminidase__InfluenzaA__ADM32554

SEQ ID NO: 19581 - protein, 469 aa, synthetic construct; identical to SEQ ID NO: 16728
  REGION 1..469: note = neuraminidase__InfluenzaA__ADM32564

SEQ ID NO: 19582 - protein, 469 aa, synthetic construct; identical to SEQ ID NO: 17961
  REGION 1..469: note = neuraminidase__InfluenzaA__ADM32574

SEQ ID NO: 19583 - protein, 469 aa, synthetic construct; identical to SEQ ID NO: 16738
  REGION 1..469: note = neuraminidase__InfluenzaA__ADM32584

SEQ ID NO: 19584 - protein, 469 aa, synthetic construct; identical to SEQ ID NO: 18419
  REGION 1..469: note = neuraminidase__InfluenzaA__ADM32594

SEQ ID NO: 19585 - protein, 469 aa, synthetic construct; identical to SEQ ID NO: 16738
  REGION 1..469: note = neuraminidase__InfluenzaA__ADM32604

SEQ ID NO: 19586 - protein, 469 aa, synthetic construct; identical to SEQ ID NO: 16738
  REGION 1..469: note = neuraminidase__InfluenzaA__ADM32614

SEQ ID NO: 19587 - protein, 469 aa, synthetic construct; identical to SEQ ID NO: 16738
  REGION 1..469: note = neuraminidase__InfluenzaA__ADM32624

SEQ ID NO: 19588 - protein, 469 aa, synthetic construct; identical to SEQ ID NO: 18419
  REGION 1..469: note = neuraminidase__InfluenzaA__ADM32634

SEQ ID NO: 19589 - protein, 469 aa, synthetic construct; identical to SEQ ID NO: 16738
  REGION 1..469: note = neuraminidase__InfluenzaA__ADM32644

SEQ ID NO: 19590 - protein, 469 aa, synthetic construct; identical to SEQ ID NO: 16738
  REGION 1..469: note = neuraminidase__InfluenzaA__ADM32664

SEQ ID NO: 19591 - protein, 469 aa, synthetic construct; identical to SEQ ID NO: 17961
  REGION 1..469: note = neuraminidase__InfluenzaA__ADM32674

SEQ ID NO: 19592 - protein, 469 aa, synthetic construct; identical to SEQ ID NO: 16738
  REGION 1..469: note = neuraminidase__InfluenzaA__ADM32684

SEQ ID NO: 19593 - protein, 469 aa, synthetic construct; identical to SEQ ID NO: 16728
  REGION 1..469: note = neuraminidase__InfluenzaA__ADM32694

SEQ ID NO: 19594 - protein, 469 aa, synthetic construct; identical to SEQ ID NO: 16738
  REGION 1..469: note = neuraminidase__InfluenzaA__ADM32704

SEQ ID NO: 19595 - protein, 469 aa, synthetic construct; identical to SEQ ID NO: 18462
  REGION 1..469: note = neuraminidase__InfluenzaA__ADM32714

SEQ ID NO: 19596 - protein, 469 aa, synthetic construct; identical to SEQ ID NO: 18462
  REGION 1..469: note = neuraminidase__InfluenzaA__ADM32724

SEQ ID NO: 19597 - protein, 469 aa, synthetic construct; identical to SEQ ID NO: 16738
  REGION 1..469: note = neuraminidase__InfluenzaA__ADM32734

SEQ ID NO: 19598 - protein, 469 aa, synthetic construct; identical to SEQ ID NO: 17961
  REGION 1..469: note = neuraminidase__InfluenzaA__ADM32744

SEQ ID NO: 19599 - protein, 469 aa, synthetic construct; identical to SEQ ID NO: 18462
  REGION 1..469: note = neuraminidase__InfluenzaA__ADM32754

SEQ ID NO: 19600 - protein, 469 aa, synthetic construct; identical to SEQ ID NO: 17961
  REGION 1..469: note = neuraminidase__InfluenzaA__ADM32764

SEQ ID NO: 19601 - protein, 469 aa, synthetic construct
  REGION 1..469: note = neuraminidase__InfluenzaA__ADM32774
MNPNQKIIIIGSVCMTIGMANLILQIGNIISIWISHSIQLGNQNQIETCNQSVTTYENNTWVNQTYVNISNTNFAAGQSVVSVKLAGNSSLCPVSGWAIYSKDNSIRIGSKGDVFVIREPFISCSPLECRTFFLTQGALLNDKHSNGTIKDRSPYRTLMSCPIGEVPSPYNSRFESVAWSASACHDGINWLTIGISGPDNGAVAVLKYNGIITDTIKSWRNNILRTQESECACVNGSCFTVMTDGPSDGQASYKIFRIEKGKIVKSVEMNAPNYHYEECSCYPDSSEITCVCRDNWHGSNRPWVSFNQNLEYQIGYICSGIFGDNPRPNDKTGSCGPVSSNGANGVKGFSFKYGNGVWIGRTKSISSRNGFEMIWDPNGWTGTDNNFSIKQDIVGINEWSGYSGSFVQHPELTGLDCIRPCFWVELIRGRPKENTIWTSGSSISFCGVNSDTVGWSWPDGAELPFTIDK

SEQ ID NO: 19602 - protein, 469 aa, synthetic construct; identical to SEQ ID NO: 17708
  REGION 1..469: note = neuraminidase__InfluenzaA__ADM32784

SEQ ID NO: 19603 - protein, 469 aa, synthetic construct; identical to SEQ ID NO: 17961
  REGION 1..469: note = neuraminidase__InfluenzaA__ADM32794

SEQ ID NO: 19604 - protein, 469 aa, synthetic construct
  REGION 1..469: note = neuraminidase__InfluenzaA__ADM32804
MNPNQKIITIGSVCMTIGMANLILQIGNIISIWISHSIQLGNQNQIETCNQSVITYENNTWVNQTYVNISNTNFAAGQSVVSVKLVGNSSLCPVSGWAIYSKDNSVRIGSKGDVFVIREPFISCSPLECRTFFLTQGALLNDKHSNGTIKDRSPYRTLMSCPIGEVPSPYNSRFESVAWSASACHDGINWLTIGISGPDNGAVAVLKYNGIITDTIKSWRNNILRTQESECACVNGSCFTVMTDGPSNGQASYKIFRIEKGKIVKSVEMNAPNYHYEECSCYPDSSEITCVCRDNWHGSNRPWVSFNQNLEYQIGYICSGIFGDNPRPNDKTGSCGPVSSNGANGVKGFSFKYGNGVWIGRTKSISSRNGFEMIWDPNGWTGTDNNFSIKQDIVEINEWSGYSGSFVQHPELTGLDCIRPCFWVELIRGRPKENTIWTSGSSISFCGVNSDTVGWSWPDGAELPFTIDK

SEQ ID NO: 19605 - protein, 469 aa, synthetic construct
  REGION 1..469: note = neuraminidase__InfluenzaA__ADM32814
MNPNQKIITIGSVCMTIGMANLILQIGNIISIWISHSIQLGNQNQVETCNQSVITYENNTWVNQTYVNISNTNFAAGQSVVSVKLAGNSSLCPVSGWAIYSKDNSIRIGSKGDVFVIREPFISCSPLECRTFFLTQGALLNDKHSNGTIKDRSPYRTLMSCPIGEVPSPYNSRFESVAWSASACHDGINWLTIGISGPDNGAVAVLKYNGIITDTIKSWRNNILRTQESECACVNGSCFTVMTDGPSDGQASYKIFRIEKGKIVKSVEMNAPNYHYEECSCYPDSSEITCVCRDNWHGSNRPWVSFNQNLEYQIGYICSGIFGDNPRPNDKTGSCGPVSSNGANGVKGFSFKYGNGVWIGRTKSISSRNGFEMIWDPNGWTGTDNNFSIKQDIVGINEWSGYSGSFVQHPELTGLDCIRPCFWVELIRGRPKENTIWTSGSSISFCGVNSDTVGWSWPDGAELPFTIDK

SEQ ID NO: 19606 - protein, 469 aa, synthetic construct; identical to SEQ ID NO: 16738
  REGION 1..469: note = neuraminidase__InfluenzaA__ADM32824

SEQ ID NO: 19607 - protein, 469 aa, synthetic construct; identical to SEQ ID NO: 17961
  REGION 1..469: note = neuraminidase__InfluenzaA__ADM32834

SEQ ID NO: 19608 - protein, 469 aa, synthetic construct; identical to SEQ ID NO: 16728
  REGION 1..469: note = neuraminidase__InfluenzaA__ADM32844

SEQ ID NO: 19609 - protein, 469 aa, synthetic construct
  REGION 1..469: note = neuraminidase__InfluenzaA__ADM32854
MNPNQKIITIGSVCTTIGMANLILQIGNIISIWISHSIQFGNQNQIETCNQSVITYENNTWVNQTYVNISNTNFAAGQSVVSVKLVGNSSLCPVSGWAIYSKDNSVRIGSKGDVFVIREPFISCSPLECRTFFLTQGALLNDKHSNGTIKDRSPYRTLMSCPIGEVPSPYNSRFESVAWSASACHDGINWLTIGISGPDNGAVAVLKYNGIITDTIKSWRNNILRTQESECACVNGSCFTVMTDGPSNGQASYKIFRIEKGKIVKSVEMNAPNYHYEECSCYPDSSEITCVCRDNWHGSNRPWVSFNQNLEYQIGYICSGIFGDNPRPNDKTGSCGPVSSNGANGVKGFSFKYGNGVWIGRTKSISSRNGFEMIWDPNGWTGTDNNFSIKQDIVGINEWSGYSGSFVQHPELTGLDCIRPCFWVELIRGRPKENTIWTSGSSISFCGVNSDTVGWSWPDGAELPFTIDK

SEQ ID NO: 19610 - protein, 469 aa, synthetic construct; identical to SEQ ID NO: 16728
  REGION 1..469: note = neuraminidase__InfluenzaA__ADM32864

SEQ ID NO: 19611 - protein, 469 aa, synthetic construct; identical to SEQ ID NO: 16738
  REGION 1..469: note = neuraminidase__InfluenzaA__ADM32874

SEQ ID NO: 19612 - protein, 469 aa, synthetic construct
  REGION 1..469: note = neuraminidase__InfluenzaA__ADM32884
MNPNQKIITIGSVCMTIGMANLILQIGNIISIWISHSIQLGNQNQIETCNQSVITYENNTWVNQTYVNISNTNFAVGQSVVSVKLAGNSSLCPVSGWAIYSKDNSIRIGSKGDVFVIREPFISCSPLECRTFFLTQGALLNDKHSNGTIKDRSPYRTLMSCPIGEVPSPYNSRFESVAWSASACHDGINWLTIGISGPDNGAVAVLKYNGIITDTIKSWRNNILRTQESECACVNGSCFTVMTDGPSDGQASYKIFRIEKGKIVKSVEMNAPNYHYEECSCYPDSSEITCVCRDNWHGSNRPWVSFNQNLEYQIGYICSGIFGDNPRPNDKTGSCGPVSSNGANGVKGFSFKYGNGVWIGRTKSISSRNGFEMIWDPNGWTGTDNKFSIKQDIVGINEWSGYSGSFVQHPELTGLDCIRPCFWVELIRGRPKENTIWTSGSSISFCGVNSDTVGWSWPDGAELPFTIDK

SEQ ID NO: 19613 - protein, 469 aa, synthetic construct; identical to SEQ ID NO: 16738
  REGION 1..469: note = neuraminidase__InfluenzaA__ADM32921

SEQ ID NO: 19614 - protein, 469 aa, synthetic construct; identical to SEQ ID NO: 16738
  REGION 1..469: note = neuraminidase__InfluenzaA__ADM32931

SEQ ID NO: 19615 - protein, 469 aa, synthetic construct
  REGION 1..469: note = neuraminidase__InfluenzaA__ADM32941
MNPNQKIIIIGSVCMTIGMANLILQIGNIISIWISHSIQLGNQNQIETCNQSVITYENNTWVNQTYVNISNTNFAAGQSVVSVKLAGNSSLCPVSGWAIYSKDNSIRIGSKGDVFVIREPFISCSPLECRTFFLTQGALLNDKHSNGTIKDRSPYRTLMSCPIGEVPSPYNSRFESVAWSASACHDGINWLTIGISGPDNGAVAVLKYNGIITDTIKSWRNNILRTQESECACVNGSCFTVMTDGPSDGQASYKIFRIEKGKIVKSVEMNAPNYHYEECSCYPDSSEITCVCRDNWHGSNRPWVSFNQNLEYQIGYICSGIFGDNPRPNDKTGSCGPVSSNGANGVKGFSFKYGNGVWIGRTKSINSRNGFEMIWDPNGWTGTDNNFSIKQDIVGINEWSGYSGSFVQHPELTGLDCIRPCFWVELIRGRPKENTIWTSGSSISFCGVNSDTVGWSWPDGAELPFTIDK

SEQ ID NO: 19616 - protein, 469 aa, synthetic construct; identical to SEQ ID NO: 16738
  REGION 1..469: note = neuraminidase__InfluenzaA__ADM32951

SEQ ID NO: 19617 - protein, 469 aa, synthetic construct; identical to SEQ ID NO: 17321
  REGION 1..469: note = neuraminidase__InfluenzaA__ADM32960

SEQ ID NO: 19618 - protein, 469 aa, synthetic construct; identical to SEQ ID NO: 16738
  REGION 1..469: note = neuraminidase__InfluenzaA__ADM32969

SEQ ID NO: 19619 - protein, 469 aa, synthetic construct; identical to SEQ ID NO: 16738
  REGION 1..469: note = neuraminidase__InfluenzaA__ADM32979

SEQ ID NO: 19620 - protein, 469 aa, synthetic construct; identical to SEQ ID NO: 18640
  REGION 1..469: note = neuraminidase__InfluenzaA__ADM32988

SEQ ID NO: 19621 - protein, 469 aa, synthetic construct; identical to SEQ ID NO: 18640
  REGION 1..469: note = neuraminidase__InfluenzaA__ADM32997

SEQ ID NO: 19622 - protein, 469 aa, synthetic construct; identical to SEQ ID NO: 16738
  REGION 1..469: note = neuraminidase__InfluenzaA__ADM33006

SEQ ID NO: 19623 - protein, 469 aa, synthetic construct; identical to SEQ ID NO: 18640
  REGION 1..469: note = neuraminidase__InfluenzaA__ADM33015

SEQ ID NO: 19624 - protein, 469 aa, synthetic construct
  REGION 1..469: note = neuraminidase__InfluenzaA__ADM33025
MNPNQKIITIGSVCMTIGMANLILQIGNIISIWISHSIQLGNQNQIETCNQSVITYENNTWVNQTYVNISNTNFAAGQSVVSVKLAGNSSLCPVSGWAIYSKDNSIRIGSKGDVFVIREPFISCSPLECRTFFLTQGALLNDKHSNGTIKDRSPYRTLMSCPIGEVPSPYNSRFESVAWSASACHDGINWLTIGISGPDNGAVAVLKYNGIITDTIKSWRSNILRTQESECACVNGSCFTVMTDGPSDGQASYKIFRIEKGKIVKSVEMNAPNYHYEECSCYPDSSEITCVCRDNWHGSNRPWVSFNQNLEYQIGYICSGIFGDNPRPNDKTGSCGPVSSNGANGVKGFSFKYGNGVWIGRTKSISSRNGFEMIWDPNGWTGTDNNFSIKQDIVGINEWSGYSGSFVQHPELTGLDCIRPCFWVELIRGRPKENTIWTSGSSISFCGVNSDTVGWSWPDGAELPFTIDK

SEQ ID NO: 19625 - protein, 469 aa, synthetic construct; identical to SEQ ID NO: 16738
  REGION 1..469: note = neuraminidase__InfluenzaA__ADM33042

SEQ ID NO: 19626 - protein, 469 aa, synthetic construct; identical to SEQ ID NO: 16738
  REGION 1..469: note = neuraminidase__InfluenzaA__ADM33062

SEQ ID NO: 19627 - protein, 469 aa, synthetic construct
  REGION 1..469: note = neuraminidase__InfluenzaA__ADM33071
MNPNQKIITIGSVCMTIGMANLILQIGNIISIWISHSIQLGNQNQIETCNQSVITYENNTWVNQTYVNISNTNFAAGQSVVSVKLAGNSSLCPVSGWAIYSKDNSIRIGSKGDVFVIREPFISCSPLECRTFFLTQGALLNDKHSNGTIKDRSPYRTLMSCPIGEVPSPYNSRFESVAWSASACHDGINWLTIGISGPDNGAVAVLKYNGIITDTIKSWRNNILRTQESECACVNGSCFTVMTDGPSDGQASYKIFRIEKGKIVKSVEMNAPNYHYEECSCYPDSSKITCVCRDNWHGSNRPWVSFNQNLEYQIGYICSGIFGDNPRPNDKTGSCGPVSSNGANGVKGFSFKYGNGVWIGRTKSISSRNGFEMIWDPNGWTGTDNNFSIKQDIVGINEWSGYSGSFVQHPELTGLDCIRPCFWVELIRGRPKENTIWTSGSSISFCGVNGDTVGWSWPDGAELPFTIDK

SEQ ID NO: 19628 - protein, 469 aa, synthetic construct; identical to SEQ ID NO: 16738
  REGION 1..469: note = neuraminidase__InfluenzaA__ADM33081

SEQ ID NO: 19629 - protein, 469 aa, synthetic construct; identical to SEQ ID NO: 17811
  REGION 1..469: note = neuraminidase__InfluenzaA__ADM33091

SEQ ID NO: 19630 - protein, 469 aa, synthetic construct; identical to SEQ ID NO: 17811
  REGION 1..469: note = neuraminidase__InfluenzaA__ADM33101

SEQ ID NO: 19631 - protein, 469 aa, synthetic construct; identical to SEQ ID NO: 17811
  REGION 1..469: note = neuraminidase__InfluenzaA__ADM33111

SEQ ID NO: 19632 - protein, 469 aa, synthetic construct; identical to SEQ ID NO: 16738
  REGION 1..469: note = neuraminidase__InfluenzaA__ADM33121

SEQ ID NO: 19633 - protein, 469 aa, synthetic construct; identical to SEQ ID NO: 16738
  REGION 1..469: note = neuraminidase__InfluenzaA__ADM33130

SEQ ID NO: 19634 - protein, 469 aa, synthetic construct; identical to SEQ ID NO: 16738
  REGION 1..469: note = neuraminidase__InfluenzaA__ADM33139

SEQ ID NO: 19635 - protein, 469 aa, synthetic construct; identical to SEQ ID NO: 16738
  REGION 1..469: note = neuraminidase__InfluenzaA__ADM33149

SEQ ID NO: 19636 - protein, 469 aa, synthetic construct; identical to SEQ ID NO: 16738
  REGION 1..469: note = neuraminidase__InfluenzaA__ADM33159

SEQ ID NO: 19637 - protein, 469 aa, synthetic construct; identical to SEQ ID NO: 16738
  REGION 1..469: note = neuraminidase__InfluenzaA__ADM33169

SEQ ID NO: 19638 - protein, 469 aa, synthetic construct; identical to SEQ ID NO: 16738
  REGION 1..469: note = neuraminidase__InfluenzaA__ADM33179

SEQ ID NO: 19639 - protein, 469 aa, synthetic construct; identical to SEQ ID NO: 16738
  REGION 1..469: note = neuraminidase__InfluenzaA__ADM33188

SEQ ID NO: 19640 - protein, 469 aa, synthetic construct; identical to SEQ ID NO: 16738
  REGION 1..469: note = neuraminidase__InfluenzaA__ADM33197

SEQ ID NO: 19641 - protein, 469 aa, synthetic construct; identical to SEQ ID NO: 16738
  REGION 1..469: note = neuraminidase__InfluenzaA__ADM33206

SEQ ID NO: 19642 - protein, 469 aa, synthetic construct; identical to SEQ ID NO: 16738
  REGION 1..469: note = neuraminidase__InfluenzaA__ADM33215

SEQ ID NO: 19643 - protein, 469 aa, synthetic construct; identical to SEQ ID NO: 16738
  REGION 1..469: note = neuraminidase__InfluenzaA__ADM33224

SEQ ID NO: 19644 - protein, 469 aa, synthetic construct; identical to SEQ ID NO: 16738
  REGION 1..469: note = neuraminidase__InfluenzaA__ADM33234

SEQ ID NO: 19645 - protein, 469 aa, synthetic construct; identical to SEQ ID NO: 17162
  REGION 1..469: note = neuraminidase__InfluenzaA__ADM33243

SEQ ID NO: 19646 - protein, 469 aa, synthetic construct; identical to SEQ ID NO: 16738
  REGION 1..469: note = neuraminidase__InfluenzaA__ADM33253

SEQ ID NO: 19647 - protein, 469 aa, synthetic construct; identical to SEQ ID NO: 17162
  REGION 1..469: note = neuraminidase__InfluenzaA__ADM33262

SEQ ID NO: 19648 - protein, 469 aa, synthetic construct; identical to SEQ ID NO: 16768
  REGION 1..469: note = neuraminidase__InfluenzaA__ADM33272

SEQ ID NO: 19649 - protein, 469 aa, synthetic construct; identical to SEQ ID NO: 16768
  REGION 1..469: note = neuraminidase__InfluenzaA__ADM33282

SEQ ID NO: 19650 - protein, 469 aa, synthetic construct; identical to SEQ ID NO: 16738
  REGION 1..469: note = neuraminidase__InfluenzaA__ADM33292

SEQ ID NO: 19651 - protein, 469 aa, synthetic construct; identical to SEQ ID NO: 16738
  REGION 1..469: note = neuraminidase__InfluenzaA__ADM33302

SEQ ID NO: 19652 - protein, 469 aa, synthetic construct; identical to SEQ ID NO: 16728
  REGION 1..469: note = neuraminidase__InfluenzaA__ADM33312

SEQ ID NO: 19653 - protein, 469 aa, synthetic construct; identical to SEQ ID NO: 16768
  REGION 1..469: note = neuraminidase__InfluenzaA__ADM33322

SEQ ID NO: 19654 - protein, 469 aa, synthetic construct; identical to SEQ ID NO: 16768
  REGION 1..469: note = neuraminidase__InfluenzaA__ADM33332

SEQ ID NO: 19655 - protein, 469 aa, synthetic construct; identical to SEQ ID NO: 16768
  REGION 1..469: note = neuraminidase__InfluenzaA__ADM33342

SEQ ID NO: 19656 - protein, 469 aa, synthetic construct
  REGION 1..469: note = neuraminidase__InfluenzaA__ADM33367
MNPNQKIITIGSVCMTIGMANLILQIGNIISIWISHSIQLGNQNQIETCNQSVVTYENNTWVNQTYVNISNTNFAAGQSVVSVKLAGNSSLCPVGGWAIYSKDNSVRIGSKGDVFVIREPFISCSPLECRTFFLTQGALLNDKHSNGTIKDRSPYRTLMSCPIGEVPSPYNSRFESVAWSASACHDGINWLTIGISGPDNGAVAVLKYNGIITDTIKSWRNNILRTQESECACVNGSCFTVMTDGPSNGQASYKIFRIEKGKIVKSVEMNAPNYHYEECSCYPDSSEITCVCRDNWHGSNRPWVSFNQNLEYQIGYICSGIFGDNPRPNDKTGSCGPVSSNGANGVKGFSFKYGNGVWIGRTKSISSRNGFEMIWDPNGWTGTDNNFSIKQDIVGINEWSGYSGSFVQHPELTGLDCIRPCFWVELIRGRPKENTIWTSGSSISFCGVNSDTVGWSWPDGAELPFTIDK

SEQ ID NO: 19657 - protein, 469 aa, synthetic construct; identical to SEQ ID NO: 16768
  REGION 1..469: note = neuraminidase__InfluenzaA__ADM33377

SEQ ID NO: 19658 - protein, 469 aa, synthetic construct; identical to SEQ ID NO: 16768
  REGION 1..469: note = neuraminidase__InfluenzaA__ADM33387

SEQ ID NO: 19659 - protein, 469 aa, synthetic construct; identical to SEQ ID NO: 16738
  REGION 1..469: note = neuraminidase__InfluenzaA__ADM33397

SEQ ID NO: 19660 - protein, 469 aa, synthetic construct; identical to SEQ ID NO: 16738
  REGION 1..469: note = neuraminidase__InfluenzaA__ADM33407

SEQ ID NO: 19661 - protein, 469 aa, synthetic construct; identical to SEQ ID NO: 16768
  REGION 1..469: note = neuraminidase__InfluenzaA__ADM33417

SEQ ID NO: 19662 - protein, 469 aa, synthetic construct; identical to SEQ ID NO: 16738
  REGION 1..469: note = neuraminidase__InfluenzaA__ADM33427

SEQ ID NO: 19663 - protein, 469 aa, synthetic construct
  REGION 1..469: note = neuraminidase__InfluenzaA__ADM33437
MNPNQKIITIGSVCMTIGMANLILQIGNIISIWISHSIQLGNQNQIETCNQSVITYENNTWVNQTYVNISNTNFAAGQSVVSVKLAGNSSLCPVSGWAIYSKDNSIRIGSKGDVFVIREPFISCSPLECRTFFLTQGALLNDKHSNGTIKDRSPYRTLMSCPIGEVPSAYNSRFESVAWSASACHDGINWLTIGISGPDNGAVAVLKYNGIITDTIKSWRNNILRTQESECACVNGSCFTVMTDGPSDGQASYKIFRIEKGKIVKSVEMNAPNYHYEECSCYPDSSEITCVCRDNWHGSNRPWVSFNQNLEYQIGYICSGIFGDNPRPNDKTGSCGPVSSNGANGVKGFSFKYGNGVWIGRTKSISSRNGFEMIWDPNGWTGTDNNFSIKQDIVGINEWSGYSGSFVQHPELTGLDCIRPCFWVELIRGRPKENTIWTSGSSISFCGVNSDTVGWSWPDGAELPFTIDK

SEQ ID NO: 19664 - protein, 469 aa, synthetic construct; identical to SEQ ID NO: 17092
  REGION 1..469: note = neuraminidase__InfluenzaA__ADM33443

SEQ ID NO: 19665 - protein, 469 aa, synthetic construct; identical to SEQ ID NO: 16738
  REGION 1..469: note = neuraminidase__InfluenzaA__ADM52446

SEQ ID NO: 19666 - protein, 469 aa, synthetic construct; identical to SEQ ID NO: 16738
  REGION 1..469: note = neuraminidase__InfluenzaA__ADM52456

SEQ ID NO: 19667 - protein, 469 aa, synthetic construct; identical to SEQ ID NO: 18943
  REGION 1..469: note = neuraminidase__InfluenzaA__ADM52466

SEQ ID NO: 19668 - protein, 469 aa, synthetic construct; identical to SEQ ID NO: 16738
  REGION 1..469: note = neuraminidase__InfluenzaA__ADM52486

SEQ ID NO: 19669 - protein, 469 aa, synthetic construct; identical to SEQ ID NO: 16728
  REGION 1..469: note = neuraminidase__InfluenzaA__ADM52496

SEQ ID NO: 19670 - protein, 469 aa, synthetic construct; identical to SEQ ID NO: 16738
  REGION 1..469: note = neuraminidase__InfluenzaA__ADM52506

SEQ ID NO: 19671 - protein, 469 aa, synthetic construct; identical to SEQ ID NO: 16728
  REGION 1..469: note = neuraminidase__InfluenzaA__ADM52516

SEQ ID NO: 19672 - protein, 469 aa, synthetic construct; identical to SEQ ID NO: 16728
  REGION 1..469: note = neuraminidase__InfluenzaA__ADM52527

SEQ ID NO: 19673 - protein, 469 aa, synthetic construct; identical to SEQ ID NO: 17961
  REGION 1..469: note = neuraminidase__InfluenzaA__ADM52537

SEQ ID NO: 19674 - protein, 469 aa, synthetic construct; identical to SEQ ID NO: 18462
  REGION 1..469: note = neuraminidase__InfluenzaA__ADM52547

SEQ ID NO: 19675 - protein, 469 aa, synthetic construct; identical to SEQ ID NO: 16728
  REGION 1..469: note = neuraminidase__InfluenzaA__ADM52557

SEQ ID NO: 19676 - protein, 469 aa, synthetic construct; identical to SEQ ID NO: 16728
  REGION 1..469: note = neuraminidase__InfluenzaA__ADM52567

SEQ ID NO: 19677 - protein, 469 aa, synthetic construct; identical to SEQ ID NO: 16728
  REGION 1..469: note = neuraminidase__InfluenzaA__ADM52577

SEQ ID NO: 19678 - protein, 469 aa, synthetic construct; identical to SEQ ID NO: 16738
  REGION 1..469: note = neuraminidase__InfluenzaA__ADM52587

SEQ ID NO: 19679 - protein, 469 aa, synthetic construct; identical to SEQ ID NO: 16738
  REGION 1..469: note = neuraminidase__InfluenzaA__ADM52597

SEQ ID NO: 19680 - protein, 469 aa, synthetic construct; identical to SEQ ID NO: 16728
  REGION 1..469: note = neuraminidase__InfluenzaA__ADM52607

SEQ ID NO: 19681 - protein, 469 aa, synthetic construct; identical to SEQ ID NO: 16728
  REGION 1..469: note = neuraminidase__InfluenzaA__ADM52617

SEQ ID NO: 19682 - protein, 469 aa, synthetic construct; identical to SEQ ID NO: 18419
  REGION 1..469: note = neuraminidase__InfluenzaA__ADM52627

SEQ ID NO: 19683 - protein, 469 aa, synthetic construct; identical to SEQ ID NO: 17961
  REGION 1..469: note = neuraminidase__InfluenzaA__ADM52637

SEQ ID NO: 19684 - protein, 469 aa, synthetic construct; identical to SEQ ID NO: 17961
  REGION 1..469: note = neuraminidase__InfluenzaA__ADM52647

SEQ ID NO: 19685 - protein, 469 aa, synthetic construct; identical to SEQ ID NO: 16728
  REGION 1..469: note = neuraminidase__InfluenzaA__ADM52657

SEQ ID NO: 19686 - protein, 469 aa, synthetic construct; identical to SEQ ID NO: 17961
  REGION 1..469: note = neuraminidase__InfluenzaA__ADM52667

SEQ ID NO: 19687 - protein, 469 aa, synthetic construct; identical to SEQ ID NO: 16728
  REGION 1..469: note = neuraminidase__InfluenzaA__ADM52687

SEQ ID NO: 19688 - protein, 469 aa, synthetic construct; identical to SEQ ID NO: 16728
  REGION 1..469: note = neuraminidase__InfluenzaA__ADM52697

SEQ ID NO: 19689 - protein, 469 aa, synthetic construct; identical to SEQ ID NO: 18419
  REGION 1..469: note = neuraminidase__InfluenzaA__ADM52707

SEQ ID NO: 19690 - protein, 469 aa, synthetic construct
  REGION 1..469: note = neuraminidase__InfluenzaA__ADM52717
MNPNQKIITIGSVCMTIGMANLILQIGNIISIWISHSIQLGNQNQIETCNQSVITYENNTWVNQTYVNISNTNFAAGQSAVSVKLVGNSSLCPVSGWAIYSKDNSVRIGSKGDVFVIREPFISCSPLECRTFFLTQGALLNDKHSNGTIKDRSPYRTLMSCPIGEVPSPYNSRFESVAWSASACHDGINWLTIGISGPDNGAVAVLKYNGIITDTIKSWRNNILRTQESECACVNGSCFTVMTDGPSNGQASYKIFRIEKGKIVKSVEMNAPNYHYEECSCYPDSSEITCVCRDNWHGSNRPWVSFNQNLEYQIGYICSGIFGDNPRPNDKTGSCGPVSSNGANGVKGFSFKYGNGVWIGRTKSISSRNGFEMIWDPNGWTGTDNNFSIKQDIVGINEWSGYSGSFVQHPELTGLDCIRPCFWVELIRGRPKENTIWTSGSSISFCGVNSDTVGWSWPDGAELPFTIDK

SEQ ID NO: 19691 - protein, 469 aa, synthetic construct
  REGION 1..469: note = neuraminidase__InfluenzaA__ADM86402
MNPNQKIITIGSVCMTIGMANLILQIGNIISIWISHSIQLGNQNQIETCNQSVITYENNTWVNQTYVNISNTNFAAGQSVASVKLAGNSSLCPVSGWAIYSKDNSVRIGSKGDVFVIREPFISCSPLECRTFFLTQGALLNDKHSNGTVKDRSPYRTLMSCPIGEVPSPYNSRFESVAWSASACHDGINWLTIGISGPDNGAVAVLKYNGIITDTIKSWRNNILRTQESECACVNGSCFTVMTDGPSDGQASYKIFRIEKGKIVKSVEMNAPNYHYEECSCYPDSSEITCVCRDNWHGSNRPWVSFNQNLEYQIGYICSGIFGDNPRPNDKTGSCGPVSSNGANGVKGFSFKYGNGVWIGRTKSISSRNGFEMIWDPNGWTGTDNNFSIKQDIVGINEWSGYSGSFVQHPELTGLDCIRPCFWVELIRGRPKENTIWTSGSSISFCGVNSDTVGWSWPDGAELPFTIDK

SEQ ID NO: 19692 - protein, 469 aa, synthetic construct; identical to SEQ ID NO: 16738
  REGION 1..469: note = neuraminidase__InfluenzaA__ADM86412

SEQ ID NO: 19693 - protein, 469 aa, synthetic construct
  REGION 1..469: note = neuraminidase__InfluenzaA__ADM86422
MNPNQKIITIGSVCMTIGMANLILQIGNIISIWISHSIQLGNQNQIETCNQSVITYENNTWVNQTYVNISNTNFVAGQSVVSVKLAGNSSLCPVSGWAIYSKDNSIRIGSKGDVFVIREPFISCSPLECRTFFLTQGALLNDKHSNGTIKDRSPYRTLMSCPIGEVPSPYNSRFESVAWSASACHDGINWLTIGISGPDNGAVAVLKYNGIITDTIKSWRNNILRTQESECACVNGSCFTVMTDGPSDGQASYKIFRIEKGKVVKSVEMNAPNYHYEECSCYPDSSEITCVCRDNWHGSNRPWVSFNQNLEYQIGYICSGIFGDNPRPNDKTGSCGPVSSNGANGVKGFSFKYGNGVWIGRTKSISSRNGFEMIWDPNGWTGTDNNFSIKQDIVGINEWSGYSGSFVQHPELTGLDCIRPCFWVELIRGRPKENTIWTSGSSISFCGVNSDTVGWSWPDGAELPFTIDK

SEQ ID NO: 19694 - protein, 469 aa, synthetic construct; identical to SEQ ID NO: 17592
  REGION 1..469: note = neuraminidase__InfluenzaA__ADM86432

SEQ ID NO: 19695 - protein, 469 aa, synthetic construct
  REGION 1..469: note = neuraminidase__InfluenzaA__ADM86443
MNPNQKIITIGSVCMTIGMANLILQIGNIISIWISHSIQLGNQNQIETCNQSVITYENNTWVNQTYVNISNTNFAAGQSVVSVKLAGNSSLCPVSGWAIYSKDNSIRIGSKGDVFVIREPFISCSPLECRTFFLTQGALLNDKHSNGTIKDRSPYRTLMSCPIGEVPSPYNSRFESVAWSASACHDGINWLTIGISGPDNGAVAVLKYNGIITDTIKSWRNNILRTQESECVCVNGSCFTVMTDGPSDGQASYKIFRIEKGKIVKSVEMNAPNYHYEECSCYPDSSEITCVCRDNWHGSNRPWVSFNQNLEYQIGYICSGIFGDNPRPNDKTGSCGPVSSNGANGVKGFSFKYGNGVWIGRTKSISSRNGFEMIWDPNGWTGTDNNFSIKQDIVGMNEWSGYSGSFVQHPELTGLDCIRPCFWVELIRGRPKENTIWTSGSSISFCGVNSDTVGWSWPDGAELPFTIDK

SEQ ID NO: 19696 - protein, 469 aa, synthetic construct; identical to SEQ ID NO: 17321
  REGION 1..469: note = neuraminidase__InfluenzaA__ADM86453

SEQ ID NO: 19697 - protein, 449 aa, synthetic construct
  REGION 1..449: note = neuraminidase__InfluenzaA__ADM95377
MNPNQKIITIGSICMVTGIVSLMLQVGSMISIWVSHSIHTGNQHQAEPISNTNFLTEKAVASVKLAGNSSLCPINGWAVYSKDNSIRIGSKGDVFVIREPFISCSHLECRTFFLTQGALLNDKHSNGTVKDRSPHRTLMSCPMGEAPSPYNSRFESVAWSASACHDGTSWLTIGISGPDNGAVAVLKYNGIITDTIKSWRNNILRTQESECACVNGSCFTVMTDGPSNGQASHKIFKMEKGKVIKSVELDAPNYHYEECSCYPDAGEITCVCRDNWHGSNRPWVSFNQNLEYQIGYICSGVFGDNPRPNDGTGSCGPVSSNGAYGVKGFSFKYGNGVWIGRTKSTNSRSGFEMIWDPNGWTETDSRFSVKQDIVAITDWSGYSGSFVQHPELTGLDCIRPCFWVELIRGRPKESTIWTSGSSISFCGVNSDTVGWSWPDGAELPFTIDK

SEQ ID NO: 19698 - protein, 469 aa, synthetic construct; identical to SEQ ID NO: 16738
  REGION 1..469: note = neuraminidase__InfluenzaA__ADM95650

SEQ ID NO: 19699 - protein, 469 aa, synthetic construct; identical to SEQ ID NO: 16738
  REGION 1..469: note = neuraminidase__InfluenzaA__ADM95651

SEQ ID NO: 19700 - protein, 469 aa, synthetic construct
  REGION 1..469: note = neuraminidase__InfluenzaA__ADM95652
MNPNQKIITIGSVCMTIGMANLILQIGNIISIWISHSIQLGNQNQIETCNQSVITYENNTWVNQTYVNISNTNFAAGQSVVSVKFAGNSSLCPVSGWAIYSKDNSIRIGSKGDVFVIREPFISCSPLECRTFFLTQGALLNDKHSNGTIKDRSPYRTLMSCPIGEVPSPYNSRFESVAWSASACHDGINWLTIGISGPDNGAVAVLKYNGIITDTIKSWRNNILRTQESECACVNGSCFTVMTDGPSDGQASYKIFRIEKGKIVKSVEMNAPNYHYEECSCYPDSSEITCVCRDNWHGSNRPWVSFNQNLEYQIGYICSGIFGDNPRPNDKTGNCGPVSSNGANGVKGFSFKYGNGVWIGRTKSISSRNGFEMIWDPNGWTGTDNNFSIKQDIVGINEWSGYSGSFVQHPELTGLDCIRPCFWVELIRGRPKENTIWTSGSSISFCGVNSDTVGWSWPDGAELPFTIDK

SEQ ID NO: 19701 - protein, 469 aa, synthetic construct
  REGION 1..469: note = neuraminidase__InfluenzaA__ADM95654
MNPNQKIITIGSVCMTIGMANLILQIGNIISIWISHSIQLGNQNQIETCNQSVITYENNTWVNQTYVNISNTNFAAGQSVVSVKLAGNSSLCPVSGWAIYSKDNSIRIGSKGDVFVIREPFISCSPLECRTFFLTQGALLNDKHSNGTIKDRSPYRTLMSCPIGEVPSPYNSRFESVAWSASACHDGINWLTIGISGPDNGAVAVLKYNGIITDTIKSWRNNILRTQESECACVNGSCFTVMTDGPSDGQASYKIFRIEKGKIVKSVEMNAPNYHYEECSCYPDSSEITCVCRDNWHGSNRPWVSFNQNLEYQIGYICSGIFGDNPRPNDKTGSCGPVSSNGANGVKGFSFKYGNGVWIGRTKSISSRHGFEMIWDPNGWTGTDNNFSIKQDIVGTNEWSGYSGSFVQHPELTGLDCIRPCFWVELIRGRPKENTIWTSGSSISFCGVNSDTVGWSWPDGAELPFTIDK

SEQ ID NO: 19702 - protein, 469 aa, synthetic construct
  REGION 1..469: note = neuraminidase__InfluenzaA__ADM95655
MNPNQKIITIGSVCMTIGMANLILQIGNIISIWISHSIQLGNQNQIETCNQSVITYENNTWVNQTYVNISNTNFAAGQSVVSVKLAGNSSLCPVSGWAIYSKDNSIRIGSKGDVFVIREPFISCSPLECRTFFLTQGALLNDKHSNGTIKDRSPYRTLMSCPIGEVPSPYNSRFESVAWSASACHDGINWLTIGISGPDNGAVAVLKYNGIITDTIKSWRNNILRTQESECACVNGSCFTVMTDGPSDGQASYKIFRIEKGKIVKSVEMNAPNYHYEECSCYPDSSEITCVCRDNWHGSNRPWVSFNQNLEYQIGYICSGIFGDNPRPSDKTGSCGPVSSNGANGVKGFSFKYGNGVWIGRTKSISSRNGFEMIWDPNGWTGTDNDFSIKQDIVGINEWSGYSGSFVQHPELTGLDCIRPCFWVELIRGRPKENTIWTSGSSISFCGVNSDTVGWSWPDGAELPFTIDK

SEQ ID NO: 19703 - protein, 469 aa, synthetic construct; identical to SEQ ID NO: 18350
  REGION 1..469: note = neuraminidase__InfluenzaA__ADM95656

SEQ ID NO: 19704 - protein, 469 aa, synthetic construct; identical to SEQ ID NO: 17915
  REGION 1..469: note = neuraminidase__InfluenzaA__ADM95658

SEQ ID NO: 19705 - protein, 469 aa, synthetic construct
  REGION 1..469: note = neuraminidase__InfluenzaA__ADM95659
MNPNQKIITIGSVCMTIGMANLILQIGNIISIWISHSIQLGNQNQIETCNQSVITYENNTWVNQTYVNISNTNFAAGQSVVSVKLAGNSSLCPVSGWAIYSKDNSIRIGSKGDVFVIREPFISCSPLECRTFFLTQGALLNDKHSNGTIKDRSPYRTLMSCPIGEVPSPYNSRFESVAWSASACHDGINWLTIGISGPDNGAVAVLKYNGIITDTIKSWRNNILRTQESECACVNGSCFTVMTDGPSDGQASYKIFRIEKGKIVKSVEMNAPNYHYEECSCYPDSSEITCVCRDNWHGSNRPWVSFNQNLEYQIGYICSGIFGDNPRPNDKTGSCGPVSSNGANGVKGFSFKYGNGVWIGRTKSISSRSGFEMIWDPNGWTGTDNNFSIKQDIIGTNEWSGYSGSFVQHPELTGLDCIRPCFWVELIRGRPKENTIWTSGSSISFCGVNSDTVGWSWPDGAELPFTIDK

SEQ ID NO: 19706 - protein, 469 aa, synthetic construct; identical to SEQ ID NO: 16738
  REGION 1..469: note = neuraminidase__InfluenzaA__ADM95660

SEQ ID NO: 19707 - protein, 469 aa, synthetic construct
  REGION 1..469: note = neuraminidase__InfluenzaA__ADM95661
MNPNQKIITIGSVCMTIGMANLILQIGNIISIWISHSIQLGNQNQIETCNQSVITYENNTWVNQTYVNISNTNFAAGQSVVSVKLAGNSSLCPVSGWAIYSKDNSIRIGSKGDVFVIREPFISCSPLECRTFFLTQGALLNDKHSNGTIKDRSPYRTLMSCPIGEVPSPYNSRFESVAWSASACHDGINWLTIGISGPDNGAVAVLKYNGIITDTIKSWRNNILRTQESECACVNGSCFTVMTDGPSDGQASYKIFRIEKGKIVKSVEMNAPNYHYEECSCYPDSSEITCVCRDNWHGSNRPWVSFNQNLEYQIGYICSGIFGDNPRPNDKTGSCGPVSSNGANGVKGFSFKYGNGVWIGRTKSISSRNGFEMIWDPNGWTGTDNNFSIKQDIVGTNEWSGYSGSFVQHPELTGLDCIRPCFWVELIRGRPKENTIWTSGSIISFCGVNSDTVGWSWPDGAELPFTIDK

SEQ ID NO: 19708 - protein, 469 aa, synthetic construct; identical to SEQ ID NO: 18350
  REGION 1..469: note = neuraminidase__InfluenzaA__ADM95662

SEQ ID NO: 19709 - protein, 469 aa, synthetic construct
  REGION 1..469: note = neuraminidase__InfluenzaA__ADM95663
MNPNQKIITIGSVCMTIGMANLILQIGNIISIWISHSIQLGNQNQIETCNQSVITYENNTWVNQTYVNISNTNFAAGQSVVSVKLAGNSSLCPVNGWAIYSKDNSIRIGSKGDVFVIREPFISCSPLECRTFFLTQGALLNDKHSNGTIKDRSPYRTLMSCPIGEVPSPYNSRFESVAWSASACHDGINWLTIGISGPDNGAVAVLKYNGIITDTIKSWRNNILRTQESECACVNGSCFTVMTDGPSDGQASYKIFRIEKGKIVKSIEMNAPNYHYEECSCYPDSSEITCVCRDNWHGSNRPWVSFNQNLEYQIGYICSGIFGDNPRPNDKTGSCGPVSSNGANGVKGFSFKYGNGVWIGRTKSISSRNGFEMIWDPNGWTGTDNNFSIKQDIVGTNEWSGYSGSFVQHPELTGLDCIRPCFWVELIRGRPKENTIWTSGSIISFCGVNSDTVGWSWPDGAELPFTIDK

SEQ ID NO: 19710 - protein, 469 aa, synthetic construct; identical to SEQ ID NO: 18350
  REGION 1..469: note = neuraminidase__InfluenzaA__ADM95664

SEQ ID NO: 19711 - protein, 469 aa, synthetic construct; identical to SEQ ID NO: 18350
  REGION 1..469: note = neuraminidase__InfluenzaA__ADM95665

SEQ ID NO: 19712 - protein, 469 aa, synthetic construct
  REGION 1..469: note = neuraminidase__InfluenzaA__ADM95666
MNPNQKIITIGSVCMTIGMANLILQIGNIISIWISHSIQLGNQNQIETCNQSVITYENNTWVNQTYVNISNTNFAAGQSVVSVKLAGNSSLCPVNGWAIYSKDNSIRIGSKGDVFVIREPFISCSPLECRTFFLTQGALLNDKHSNGTIKDRSPYRTLMSCPIGEVPSPYNSRFESVAWSASACHDGINWLTIGISGPDNGAVAVLKYNGIITDTIKSWRNNILRTQESECACVNGSCFTVMTDGPSDGQASYKIFKIEKGKIVKSVEMNAPNYHYEECSCYPDSSEITCVCRDNWHGSNRPWVSFNQNLEYQIGYICSGIFGDNPRPNDKTGSCGPVSFNGANGVKGFSFKYGNGVWIGRTKSISSRNGFEMIWDPNGWTGTDNNFSIKQDIVGTNEWSGYSGSFVQHPELTGLDCIRPCFWVELIRGRPKENTIWTSGSIISFCGVNSDTVGWSWPDGAELPFTIDK

SEQ ID NO: 19713 - protein, 469 aa, synthetic construct; identical to SEQ ID NO: 18350
  REGION 1..469: note = neuraminidase__InfluenzaA__ADM95667

SEQ ID NO: 19714 - protein, 469 aa, synthetic construct; identical to SEQ ID NO: 18350
  REGION 1..469: note = neuraminidase__InfluenzaA__ADM95668

SEQ ID NO: 19715 - protein, 469 aa, synthetic construct; identical to SEQ ID NO: 16738
  REGION 1..469: note = neuraminidase__InfluenzaA__ADM95669

SEQ ID NO: 19716 - protein, 469 aa, synthetic construct; identical to SEQ ID NO: 16738
  REGION 1..469: note = neuraminidase__InfluenzaA__ADM95670

SEQ ID NO: 19717 - protein, 469 aa, synthetic construct
  REGION 1..469: note = neuraminidase__InfluenzaA__ADM95672
MNPNQKIITIGSVCMTIGMANLILQIGNIISIWISHTIQLGNQNQIETCNQSVITYENNTWVNQTYVNISNTNFAAGQSVVSVKLAGNSSLCPVSGWAIYSKDNSIRIGSKGDVFVIREPFISCSPLECRTFFLTQGALLNDKHSNGTIKDRSPYRTLMSCPIGEVPSPYNSRFESVAWSASACHDGINWLTIGISGPDNGAVAVLKYNGIITDTIKSWRNNILRTQESECACVNGSCFTVMTDGPSDGQASYKIFRIEKGKIVKSVEMNAPNYHYEECSCYPDSSEITCVCRDNWHGSNRPWVSFNQNLEYQIGYICSGIFGDNPRPNDKTGSCGPVSSNGANGVKGFSFKYGNGVWIGRTKSISSRNGFEMIWDPNGWTGTDNNFSIKQDIVGTNEWSGYSGSFVQHPELTGLDCIRPCFWVELIRGRPKENTIWTSGSSISFCGVNSDTVGWSWPDGAELPFTIDK

SEQ ID NO: 19718 - protein, 469 aa, synthetic construct; identical to SEQ ID NO: 16738
  REGION 1..469: note = neuraminidase__InfluenzaA__ADM95673

SEQ ID NO: 19719 - protein, 469 aa, synthetic construct; identical to SEQ ID NO: 18350
  REGION 1..469: note = neuraminidase__InfluenzaA__ADM95674

SEQ ID NO: 19720 - protein, 469 aa, synthetic construct; identical to SEQ ID NO: 16738
  REGION 1..469: note = neuraminidase__InfluenzaA__ADM95675

SEQ ID NO: 19721 - protein, 469 aa, synthetic construct
  REGION 1..469: note = neuraminidase__InfluenzaA__ADM95677
MNPNQKIITIGSVCMTIGMANLILQIGNIISIWISHSIQLGNQNQIETCNQSVITYENNTWVNQTYVNISNTNFAAGQSVVSVKLAGNSSLCPVNGWAIYSKDNSIRIGSKGDVFVIREPFISCSPLECRTFFLTQGALLNDKHSNGTIKDRSPYRTLMSCPIGEVPSPYNSRFESVAWSASACHDGINWLTIGISGPDNGAVAVLKYNGIITDTIKSWRNNILRTQESECACVNGSCFTVMTDGPSDGQASYKIFRIEKGKIVKSVEMNAPNYHYEECSCYPDSSEITCVCRDNWHGSNRPWVSFNQNLEYQIGYICSGIFGDNPRPNDKTGSCGPVSSNGANGVKGFSFKYGNGVWIGRTKSISSRNGFEMIWDPNGWTGTDNNFSIKQDIVGTNEWSGYSGSFVQHPELTGLDCIRPCFWVELIRGRPKENTIWTSGSIISFCGVNSDTVGWSWPDGAELPFTIDK

SEQ ID NO: 19722 - protein, 469 aa, synthetic construct
  REGION 1..469: note = neuraminidase__InfluenzaA__ADM95678
MNPNQKIITIGSVCMTIGMANLILQIGNIISIWISHSIQLGNQNQIETCNQSVITYENNTWVNQTYVNISNTNFAAGQSVVSVKFAGNSSLCPVSGWAIYSKDNSIRIGSKGDVFVIREPFISCSPLECRTFFLTQGALLNDKHSNGTIKDRSPYRTLMSCPIGEVPSPYNSRFESVAWSASACHDGINWLTIGISGPDNGAVAVLKYNGIITDTIKSWRNNILRTQESECACVNGSCFTVMTDGPSDGQASYKIFRIEKGKIVKSVEMNAPNYHYEECSCYPDSSEITCVCRDNWHGSNRPWVSFNQNLEYQIGYICSGIFGDNPRPNDKTGSCGPVSSNGANGVKGFSFKYGNGVWIGRTKSISSRNGFEMIWDPNGWTGTDNNFSIKQDIVGINEWSGYSGSFVQHPELTGLDCIRPCFWVELIRGRPKENTIWTSGSSISFCGVNSDTVGWSWPDGAELPFTIDK

SEQ ID NO: 19723 - protein, 469 aa, synthetic construct; identical to SEQ ID NO: 19721
  REGION 1..469: note = neuraminidase__InfluenzaA__ADM95679

SEQ ID NO: 19724 - protein, 469 aa, synthetic construct; identical to SEQ ID NO: 19721
  REGION 1..469: note = neuraminidase__InfluenzaA__ADM95680

SEQ ID NO: 19725 - protein, 469 aa, synthetic construct; identical to SEQ ID NO: 16738
  REGION 1..469: note = neuraminidase__InfluenzaA__ADM95681

SEQ ID NO: 19726 - protein, 469 aa, synthetic construct
  REGION 1..469: note = neuraminidase__InfluenzaA__ADM95682
MNPNQKIITIGSVCMTIGMANLILQIGNIISIWISHSIQLGNQNQIEICNQSVITYENNTWVNQTYVNISNTNFAAGQSVVSVKLAGNSSLCPVSGWAIYSKDNSIRIGSKGDVFVIREPFISCSPLECRTFFLTQGALLNDKHSNGTIKDRSPYRTLMSCPIGEVPSPYNSRFESVAWSASACHDGINWLTIGISGPDNGAVAVLKYNGIITDTIKSWRNNILRTQESECACVNGSCFTVMTDGPSDGQASYKIFRIEKGKIVKSVEMNAPNYHYEECSCYPDSSEITCVCRDNWHGSNRPWVSFNQNLEYQIGYICSGIFGDNPRPNDKTGSCGPVSSNGANGVKGFSFKYGNGVWIGRTKSISSRNGFEMIWDPNGWTGTDNNFSIKQDIVGTNEWSGYSGSFVQHPELTGLDCIRPCFWVELIRGRPKENTIWTSGSSISFCGVNSDTVGWSWPDGAELPFTIDK

SEQ ID NO: 19727 - protein, 469 aa, synthetic construct
  REGION 1..469: note = neuraminidase__InfluenzaA__ADM95683
MNPNQKIITIGSVCMTIGMANLILQIGNIISIWISHSIQLGNQNQIETCNQSVITYENNTWVNQTYVNISNTNFAAGQSVVSVKLAGNSSLCPVSGWAIYSKDNSIRIGSKGDVFVIREPFISCSPLECRTFFLTQGALLNDKHSNGTIKDRSPYRTLMSCPIGEVPSPYNSRFESVAWSASACHDGINWLTIGISGPDNGAVAVLKYNGIITDTIKSWRNNILRTQESECACVNGSCFTVMTDGPSDGQASYKIFRIEKGKIVKSVEMNAPNYHYEECSCYPDSSEITCVCRDNWHGSNRPWVSFNQNLEYQIGYICSGIFGDNPRPNDKTGSCGPVSSNGANGVKGFSFKYGNGVWIGRTKSISSRNGFEMIWDPNGWTGTDNNFSIKQDIVGINEWSGYSGSFVQHPELTGLDCIRPCFWVELIRGRPKENTIWTSGSSMSFCGVNSDTVGWSWPDGAELPFTIDK

SEQ ID NO: 19728 - protein, 469 aa, synthetic construct; identical to SEQ ID NO: 16738
  REGION 1..469: note = neuraminidase__InfluenzaA__ADM95684

SEQ ID NO: 19729 - protein, 469 aa, synthetic construct
  REGION 1..469: note = neuraminidase__InfluenzaA__ADM95685
MNPNQKIITIGSVCMTIGMANLILQIGNIISIWISHSIQLGNQNQIETCNQSVITYENNTWVNQTYVNISNTNFAAGQSVVSVKLAGNSSLCPVSGWAIYSKDNSIRIGSKGDVFVIREPFISCSPLECRTFFLTQGALLNDKHSNGTIKDRSPYRTLMSCPIGEVPSPYNSRFESVAWSASACHDGINWLTIGISGPDNGAVAVLKYNGIITDTIKSWRNNILRTQESECACVNGSCFTVMTDGPSDGQASYKIFRIEKGKIVKSVEMNAPNYHYEECSCYPDSSEITCVCRDNWHGSNRPWVSFNQNLEYQIGYICSGIFGDNPRPNDKTGSCGPVSSNGANGVKGFSFKYGNGVWIGRTKSISSRHGFEMIWDPNGWTGTDNNFSIKQDIVGTNEWSGYSGSFVQHPELTGLDCIRPCFWVELIRGRPKENTVWTSGSSISFCGVNSDTVGWSWPDGAELPFTIDK

SEQ ID NO: 19730 - protein, 469 aa, synthetic construct
  REGION 1..469: note = neuraminidase__InfluenzaA__ADM95686
MNPNQKIITIGSVCMTIGMANLILQIGNIISIWISHSIQLGNQNQIETCNQSVITYENNTWVNQTYVNISNTNFAAGQSVVSVKLAGNSSLCPVSGWAIYSKDNSIRIGSKGDVFVIREPFISCSPLECRTFFLTQGALLNDKHSNGTIKDRSPYRTLMSCPIGEVPSPYNSRFESVAWSASACHDGINWLTIGISGPDNGAVAVLKYNGIITDTIKSWRNNILRTQESECACVNGSCFTVMTDGPSDGQASYKIFRIEKGKIVKSVEMNAPNYHYEECSCYPDSSEITCVCRDNWHGSNRPWVSFNQNLEYQIGYICSGIFGDNPRPNDKTGSCGPVSSNGANGVKGFSFKYGNGVWIGRTKSISSRNGFEMIWDPNGWTGTDNDFSIKQDIVGINEWSGYSGSFVQHPELTGLDCIRPCFWVELIRGRPKENTIWTSGSSISFCGVNSDTVGWSWPDGAELPFTIDK

SEQ ID NO: 19731 - protein, 469 aa, synthetic construct; identical to SEQ ID NO: 16738
  REGION 1..469: note = neuraminidase__InfluenzaA__ADM95687

SEQ ID NO: 19732 - protein, 469 aa, synthetic construct
  REGION 1..469: note = neuraminidase__InfluenzaA__ADM95688
MNPNQKIITIGSVCMTIGMANLILQIGNIISIWISHSIQLGNQNQIETCNQSVITYENNTWVNQTYVNISNTNFAAGQSVVSVKLAGNSSLCPVSGWAIYSKDNSIRIGSKGDVFVIREPFISCSPLECRTFFLTQGALLNDKHSNGTIKDRSPYRTLMSCPIGEVPSPYNSRFESVAWSASACHDGINWLTIGISGPDNGAVAVLKYNGIITDTIKSWRNNILRTQESECACVNGSCFTVMTDGPSDGQASYKIFRIEKGKIVKSVEMNAPNYHYEECSCYPDSSEITCVCRDNWHGSNRPWVSFNQNLEYQIGYICSGIFGDNPRPNDKTGSCGPVSSNGANGVKGFSFKYGNGVWIGRTKSISSRNGFEMIWDPNGWTGTDNNFSIKQDIVGTNEWSGYSGSFVQHPELTRLDCIRPCFWVELIRGRPKENTIWTSGSIISFCGVNSDTVGWSWPDGAELPFTIDK

SEQ ID NO: 19733 - protein, 469 aa, synthetic construct; identical to SEQ ID NO: 19730
  REGION 1..469: note = neuraminidase__InfluenzaA__ADM95689

SEQ ID NO: 19734 - protein, 469 aa, synthetic construct
  REGION 1..469: note = neuraminidase__InfluenzaA__ADM95690
MNPNQKIITIGSVCMTIGMANLILQIGNIISIWISHSIQLGNQNQIETCNQSVITYENNTWVNQTYVNISNTNFAAGQSVVSVKLAGNSSLCPVSGWAIYSKDNSIRIGSKGDVFVIREPFISCSPLECRTFFLTQGALLNDKHSNGTIKDRSPYRTLMSCPIGEVPSPYNSRFESVAWSASACHDGINWLTIGISGPDNGAVAVLKYNGIITDTIKSWRNNILRTQESECACVNGSCFTVMTDGPSDGQASYKIFRIEKGKIVKSVEMNAPNYHYEECSCYPDSSEITCVCRDNWHGSNRPWVSFNQNLEYQIGYICSGIFGDNPRPNDKTGSCGPVSSNGANGVKGFSFKYGNGVWIGRTKSISSRNGFEMIWDPNGWTGTDNNFSIKQDIIGTNEWSGYSGSFVQHPELTGLDCIRPCFWVELIRGRPKENTIWTSGSSISFCGVNSDTVGWSWPDGAELPFTIDK

SEQ ID NO: 19735 - protein, 469 aa, synthetic construct; identical to SEQ ID NO: 16738
  REGION 1..469: note = neuraminidase__InfluenzaA__ADM95691

SEQ ID NO: 19736 - protein, 469 aa, synthetic construct
  REGION 1..469: note = neuraminidase__InfluenzaA__ADM95692
MNPNQKIITIGSVCMTIGMANLILQIGNIISIWISHSIQLGNQNQIETCNQSVITYENNTWVNQTYVNIINTNFAAGQSVVSVKLAGNSSLCPVSGWAIYSKDNSIRIGSKGDVFVIREPFISCSPLECRTFFLTQGALLNDKHSNGTIKDRSPYRTLMSCPIGEVPSPYNSRFESVAWSASACHDGINWLTIGISGPDNGAVAVLKYNGIITDTIKSWRNNILRTQESECACVNGSCFTVMTDGPSDGQASYKIFRIEKGKIVKSVEMNAPNYHYEECSCYPDSSEITCVCRDNWHGSNRPWVSFNQNLEYQIGYICSGIFGDNPRPNDKTGSCGPVSSNGANGVKGFSFKYGNGVWIGRTKSISSRNGFEMIWDPNGWTGTDNNFSIKQDIVGINEWSGYSGSFVQHPELTGLDCIRPCFWVELIRGRPKENTIWTSGSSISFCGVNSDTVGWSWPDGAELPFTIDK

SEQ ID NO: 19737 - protein, 469 aa, synthetic construct; identical to SEQ ID NO: 16738
  REGION 1..469: note = neuraminidase__InfluenzaA__ADM95693

SEQ ID NO: 19738 - protein, 469 aa, synthetic construct; identical to SEQ ID NO: 16738
  REGION 1..469: note = neuraminidase__InfluenzaA__ADM95694

SEQ ID NO: 19739 - protein, 469 aa, synthetic construct; identical to SEQ ID NO: 16738
  REGION 1..469: note = neuraminidase__InfluenzaA__ADM95695

SEQ ID NO: 19740 - protein, 469 aa, synthetic construct; identical to SEQ ID NO: 19730
  REGION 1..469: note = neuraminidase__InfluenzaA__ADM95696

SEQ ID NO: 19741 - protein, 469 aa, synthetic construct; identical to SEQ ID NO: 18350
  REGION 1..469: note = neuraminidase__InfluenzaA__ADM95697

SEQ ID NO: 19742 - protein, 470 aa, synthetic construct
  REGION 1..470: note = neuraminidase__InfluenzaA__ADM95698
MNPNQKIITIGSISIAIGIISLMLQIGNIISIWASHSIQTGSQNNTGICNQRIITYENNTWVNHTYVNINNTNVVAEEDKTSVTLAGNSSLCSISGWAIYTKDNSIRIGSKGDVFVIREPFISCSHLECRTFFLTQGALLNDKHSNGTVKDRSPYRALMSCPLGEAPSPYNSKFESVAWSASACHDGMGWLTIGISGPDNGAVAVLKYNGIITGTIKSWKKQILRTQESECVCMNGSCFTIMTDGPSNKAASYKIFKIEKGKVTKSIELNAPNFHYEECSCYPDTGIVMCVCRDNWHGSNRPWVSFNQNLDYQIGYICSGVFGDNPRPEDGEGSCNPVTVDGANGVKGFSYKYDNGVWIGRTKSNRLRKGFEMIWDPNGWTNTDSDFSVKQDVVAITDWSGYSGSFVQHPELTGLDCIRPCFWVELVRGQPRENTTIWTSGSSISFCGVNSDTANWSWPDGAELPFTIDK

SEQ ID NO: 19743 - protein, 470 aa, synthetic construct
  REGION 1..470: note = neuraminidase__InfluenzaA__ADM95699
MNPNQKIITIGSISIAIGIISLMLQIGNIISIWASHSIQTGSQNNTGICNQRIITYENNTWVNHTYVNINNTNVVAEEDKTSVTLAGNSSLCSISGWAIYTKDNSIRIGSKGDVFVIREPFISCSHLECRTFFLTQGALLNDKHSNGTVKDRSPYRALMSCPLGEAPSPYNSKFESVAWSASACHDGMGWLTIGISGPDNGAVAVLKYNGIITGTIKSWKKQILRTQESECVCMNGSCFTIMTDGPSNKAASYKIFKIEKGKVTKSIELNAPNFYYEECSCYPDTGIVMCVCRDNWHGSNRPWVSFNQNLDYQIGYICSGVFGDNPRPEDGEGSCNPVTVDGANGVKGFSYKYDNGVWIGRTKSNRLRKGFEMIWDPNGWTNTDSDFSVKQDVVAITDWSGYSGSFVQHPELTGLDCIRPCFWVELVRGLPRENTTIWTSGSSISFCGVNSDTANWSWPDGAELPFTIDK

SEQ ID NO: 19744 - protein, 470 aa, synthetic construct
  REGION 1..470: note = neuraminidase__InfluenzaA__ADM95701
MNPNQKIITIGSISIAIGIISLMLQIGNIISIWASHSIQTGSQNNTGICNQRIITYENNTWVNHTYVNINNTNVVAEEDKTSVTLAGNSSLCSISGWAIYTKDNSIRIGSKGDVFVIREPFISCSHLECRTFFLTQGALLNDKHSNGTVKDRSPYRALMSCPLGEAPSPYNSKFESVAWSASACHDGMGWLTIGISGPDNGAVAVLKYNGIITGTIKSWKKQILRTQESECVCMNGSCFTIMTDGPSNKAASYKIFKIEKGKVTKSIELNAPNFHYEECSCYPDTGIVMCVCRDNWHGSNRPWVSFNQNLDYQIGYICSGVFGDNPRPEDGEGSCNPVTVDGANGVKGFSYKYDNGVWIGRTKSNRLRKGFEMIWDPNGWTNTDSDFSVKQDVVAITDWSGYSGSFVQHPELTGLDCIRPCFWVELVRGLPRENTTIWTSGSSISFCGVNSDTANWSWPDGAELPFTIDK

SEQ ID NO: 19745 - protein, 470 aa, synthetic construct
  REGION 1..470: note = neuraminidase__InfluenzaA__ADM95702
MNPNQKIITIGSISIAIGIISLMLQIGNIISIWASHSIQTGRQNNTGICNQRIITYENSTWVNHTYVNINNTKVVAGEDKTSVTLAGNSSLCSISGWAIYTKDNSIRIGSKGDVFVIREPFISCSHLECRTFFLTQGALLNDKHSNGTVKDRSPYRALMSCPLGEAPSPYNSKFESVAWSASACHDGMGWLTIGISGPDNGAVAVLKYNGIITGTIKSWKKQILRTQESECVCMNGSCFTIMTDGPSNKAASYKIFKIEKGKVTKSIELNAPNFYYEECSCYPDTGIVMCVCRDNWHGSNRPWVSFNQNLDYQIGYICSGVFGDNPRPEDGEGSCNPVTVDGANGVKGFSYKYGNGVWIGRTKSNRLRKGFEVIWDPNGWTNTDSDFSVKQDVVAITDWSGYSGSFVQHPELTGLDCIRPCFWVELVRGLPRENTTIWTSGSSISFCGVNSDTANWSWPDGAELPFTIDK

SEQ ID NO: 19746 - protein, 470 aa, synthetic construct
  REGION 1..470: note = neuraminidase__InfluenzaA__ADM95704
MNPNQKIITIGSISIAIGIISLMLQIGNIVSIWASHSIQTGSQNNTGICNQRIITYENNTWVNHTYVNINNTNVVAEEDKTSVTLAGNSSLCSISGWAIYTKDNSIRIGSKGDVFVIREPFISCSHLECRTFFLTQGALLNDKHSNGTVKDRSPYRALMSCPLGEAPSPYNSKFESVAWSASACHDGMGWLTIGISGPDNGAVAVLKYNGIITGTIKSWKKQILRTQESECVCMNGSCFTIMTDGPSNRAASYKIFKIEKGKVTKSIELNAPNFHYEECSCYPDTGIVMCVCRDNWHGSNRPWVSFNQNLDYQIGYICSGVFGDNPRPEDGEGSCNPVTVDGANGVKGFSYKYDNGVWIGRTKSNRLRKGFEMIWDPNGWTNTDSDFSVKQDVVAITDWSGYSGSFVQHPELTGLDCIRPCFWVELVRGLPRENTTIWTSGSSISFCGVNSDTANWSWPDGAELPFTIDK

SEQ ID NO: 19747 - protein, 470 aa, synthetic construct
  REGION 1..470: note = neuraminidase__InfluenzaA__ADM95705
MNPNQKIITIGSISIAIGIISLMLQIGNIISIWASHSIQTGRQNNTGICNQRIITYENSTWVNHTYVNINNTKVVAGEDKTSVTLAGNSSLCSISGWAIYTKDNSIRIGSKGDVFVIREPFISCSHLECRTFFLTQGALLNDKHSNGTVKDRSPYRALMSCPLGEAPSPYNSKFESVAWSASACHDGMGWLTIGISGPDNGAVAVLKYNGIITGTIKSWKKQILRTQESECVCMNGSCFTIMTDGPSNKAASYKIFKIEKGKVTKSIELNAPNFYYEECSCYPDTGIVMCVCRDNWHGSNRPWVSFNQNLDYQIGYICSGVFGDNPRPEDGEGSCNPVTVDGANGVKGFSYKYGNGVWIGRTKSNRLRKGFEMIWDPNGWTNTDSDFSVKQDVVAITDWSGYSGSFVQHPELTGLDCIRPCFWVELVRGLPRENTTIWTSGSSISFCGVNSDTANWSWPDGAELPFTIDK

SEQ ID NO: 19748 - protein, 470 aa, synthetic construct; identical to SEQ ID NO: 19747
  REGION 1..470: note = neuraminidase__InfluenzaA__ADM95706

SEQ ID NO: 19749 - protein, 470 aa, synthetic construct; identical to SEQ ID NO: 19747
  REGION 1..470: note = neuraminidase__InfluenzaA__ADM95707

SEQ ID NO: 19750 - protein, 470 aa, synthetic construct; identical to SEQ ID NO: 17461
  REGION 1..470: note = neuraminidase__InfluenzaA__ADM95708

SEQ ID NO: 19751 - protein, 469 aa, synthetic construct
  REGION 1..469: note = neuraminidase__InfluenzaA__ADM95710
MNPNQKIITIGSVSLTISTICFFMQIAILITTVTLHFKQYEFNSPPNNQVMLCEPTIIERNITEIVYLTNTTIEKEICPKLAEYRNWSKPQCDITGFAPFSKDNSIRLSAGGDIWVTREPYVSCDPDKCYQFALGQGTTLNNVHSNNTVRDRTPYRTLLMNELGVPFHLGTKQVCIAWSSSSCHDGKAWLHVCITGDDKNATASFIYNGRLVDSVVSWSKEILRTQESECVCINGTCTVVMTDGSASGKADTKILFIEEGKIVHTSTLSGSAQHVEECSCYPRYPGVRCVCRDNWKGSNRPIVDINIKDHNIVSSYVCSGLVGDTPRKNDSSSSSHCLDPNNEEGGHGVKGWAFDDGNDVWMGRTISEKSRLGYETFKVIEGWSNPKSKLQINRQVIVDRGNRSGYSGIFSVEGKSCINRCFYVELIRGRKEETDVLWTSNSIVVFCGTSGTYGTGSWPDGADINLMPI

SEQ ID NO: 19752 - protein, 469 aa, synthetic construct; identical to SEQ ID NO: 16599
  REGION 1..469: note = neuraminidase__InfluenzaA__ADM95711

SEQ ID NO: 19753 - protein, 469 aa, synthetic construct; identical to SEQ ID NO: 16599
  REGION 1..469: note = neuraminidase__InfluenzaA__ADM95712

SEQ ID NO: 19754 - protein, 469 aa, synthetic construct; identical to SEQ ID NO: 16599
  REGION 1..469: note = neuraminidase__InfluenzaA__ADM95713

SEQ ID NO: 19755 - protein, 469 aa, synthetic construct
  REGION 1..469: note = neuraminidase__InfluenzaA__ADM95714
MNPNQKIITIGSVSLTISTICFFMQIAILITTVTLHFKQYEFNSPPNNQVMLCEPTIIERNITEIVYLTNTTIEKEICPKLAEYRNWSKPQCDITGFAPFSKDNSIRLSAGGDIWVTREPYVSCDPDKCYQFALGQGTTLNNVHSNNTVRDRTPYRTLLMNELGVPFHLGTKQVCIAWSSSSCHDGKAWLHVCITGDDKNATASFIYNGRLVDSVVSWSKEILRTQESECVCINGTCTVVMTDGSASGKADTKILFIEEGKIVHTSTLSGSAQHVEECSCYPRYPGVRCVCRDNWKGSNRPIVDINIKDHSIVSSYVCSGLVGDTPRKNDSSSSSHCLDPNNEEGGHGVKGWAFDDGNDVWMGRTISEKSRLGYETFKVIEGWSNPKSKLQINRQVIVDRGNRSGYSGIFSVEGKSCINRCFYVELIRGRKEETDVLWTSNSIVVFCGTSGTYGTGSWPDGADINLMPI

SEQ ID NO: 19756 - protein, 469 aa, synthetic construct; identical to SEQ ID NO: 16599
  REGION 1..469: note = neuraminidase__InfluenzaA__ADM95715

SEQ ID NO: 19757 - protein, 469 aa, synthetic construct; identical to SEQ ID NO: 19755
  REGION 1..469: note = neuraminidase__InfluenzaA__ADM95716

SEQ ID NO: 19758 - protein, 469 aa, synthetic construct; identical to SEQ ID NO: 19755
  REGION 1..469: note = neuraminidase__InfluenzaA__ADM95717

SEQ ID NO: 19759 - protein, 469 aa, synthetic construct; identical to SEQ ID NO: 16599
  REGION 1..469: note = neuraminidase__InfluenzaA__ADM95718

SEQ ID NO: 19760 - protein, 469 aa, synthetic construct
  REGION 1..469: note = neuraminidase__InfluenzaA__ADM95719
MNPNQKIITIGSVSLTISTICFFMQIAILITTVTLHFKQYEFNSPPNNQVMLCEPTIIERNITEIVYLTNTTIEKEICPKLAEYRNWSKPQCDITGFAPFSKDNSIRLSAGGDIWVTREPYVSCDPDKCYQFALGQGTTLNNVHSNNTVRDRTPYRTLLMNELGVPFHLGTKQVCIAWSSSSCHDGKAWLHVCITGDDKNATASFIYNGRLVDSVVSWSKEILRTQESECVCINGTCTVVMTDGSASGKADTKILFIEEGKIVHTSTLSGSAQHVEECSCYPRYPGVRCVCRDNWKGSNRPIVDINIKDHSIVSSYVCSGLVGDTPRKNDSSSSSHCLDPNNEEGGHGVKGWAFDDGNDVWMGRTISEKSRSGYETFKVIEGWSNPKSKLQINRQVIVDRGNRSGYSGIFSVEGKSCINRCFYVELIRGRKEETEVLWTSNSIVVFCGTSGTYGTGSWPDGADINLMPI

SEQ ID NO: 19761 - protein, 469 aa, synthetic construct; identical to SEQ ID NO: 16599
  REGION 1..469: note = neuraminidase__InfluenzaA__ADM95720

SEQ ID NO: 19762 - protein, 469 aa, synthetic construct; identical to SEQ ID NO: 16599
  REGION 1..469: note = neuraminidase__InfluenzaA__ADM95721

SEQ ID NO: 19763 - protein, 469 aa, synthetic construct; identical to SEQ ID NO: 16599
  REGION 1..469: note = neuraminidase__InfluenzaA__ADM95723

SEQ ID NO: 19764 - protein, 469 aa, synthetic construct
  REGION 1..469: note = neuraminidase__InfluenzaA__ADM95724
MNPNQKIITIGSVSLTISTICFFMQIAILITTVTLHFKQYEFNSPPNNQVMLCEPTIIERNITEIVYLTNTTIEKEICPKLAEYRNWSKPQCDITGFAPFSKDNSIRLSAGGDIWVTREPYVSCDPDKCYQFALGQGTTLNNVHSNNTVRDRTPYRTLLMNELGVPFHLGTKQVCIAWSSSSCHDGKAWLHVCITGDDKNATASFIYNGRLVDSVVSWSKEILRTQESECVCINGTCTVVMTDGSASGKADTKILFIEEGKIVHTSTLSGSAQHVEECSCYPRYPGVRCVCRDNWKGSNRPIVDINIKDHSIVSSYVCSGLVGDTPRKNDSSSSSHCLDPNNEEGGHGVKGWAFDDGNDVWMGRTISEKSRLGYETFKVIEGWSNPNSKLQINRQVIVDRGNRSGYSGIFSVEGKSCINRCFYVELIRGRKEETEVLWTSNSIVVFCGTSGTYGTGSWPDGADINLMPI

SEQ ID NO: 19765 - protein, 469 aa, synthetic construct
  REGION 1..469: note = neuraminidase__InfluenzaA__ADM95725
MNPNQKIITIGSVSLTISTICFFMQIAILITTVTLHFKQYEFNPPPNNQVMLCEPTIIERNITEIVYLTNTTIEKEVCPKLAEYRNWSKPQCDITGFAPFSKDNSIRLSAGGDIWVTREPYVSCDPDKCYQFALGQGTTLNNVHSNNTVRDRTPYRTLLMNELGVPFHLGTKQVCIAWSSSSCHDGKAWLHVCITGDDKNATASFIYNGRLVDSVVSWSKEILRTQESECVCINGTCTVVITDGSASGKADTKILFIEEGKIVHTSTLSGSAQHVEECSCYPRYPGVRCVCRDNWKGSNRPIVDINIKDHSIVSSYVCSGLVGDTPRKNDSSSSSHCLDPNNEEGGHGVKGWAFDDGNDVWMGRTISEKSRLGYETFKVIEGWSNPKSKLQINRQVIVDRGNRSGYSGIFSVEGKSCINRCFYVELIRGRKEETDVLWTSNSIVVFCGTSGTYGTGSWPDGADINLMPI

SEQ ID NO: 19766 - protein, 469 aa, synthetic construct
  REGION 1..469: note = neuraminidase__InfluenzaA__ADM95726
MNPNQKIITIGSVSLTISTICFFMQIAILITAVTLHFKQYEFNSPPNNQVMLCEPTIIERNITEIVYLTNTTIEKEICPKLAEYRNWSKPQCDITGFAPFSKDNSIRLSAGGDIWVTREPYVSCDPDKCYQFALGQGTTLNNVHSNNTVRDRTPYRTLLMNELGVPFHLGTKQVCIAWSSSSCHDGKAWLHVCITGDDKNATASFIYNGRLVDSVVSWSKEILRTQESECVCINGTCTVVMTDGSASGKADTKILFIEEGKIVHTSTLSGSAQHVEECSCYPRYPGVRCVCRDNWKGSNRPIVDINIKDHSIVSSYVCSGLVGDTPRKNDSSSSSHCLDPNNEEGGHGVKGWAFDDGNDVWMGRTISEKSRLGYETFKVIEGWSNPKSKLQINRQVIVDRGNRSGYSGIFSVEGKSCINRCFYVELIRGRKEETDVLWTSNSIVVFCGTSGTYGTGSWPDGADINLMPI

SEQ ID NO: 19767 - protein, 469 aa, synthetic construct; identical to SEQ ID NO: 16599
  REGION 1..469: note = neuraminidase__InfluenzaA__ADM95727

SEQ ID NO: 19768 - protein, 469 aa, synthetic construct
  REGION 1..469: note = neuraminidase__InfluenzaA__ADM95728
MNPNQKIITIGSVSLTISTICFFMQIAILITTVTLHFKQYEFNSPPNNQVMLCEPTIIERNITEIVYLTNTTIEKEICPELAEYRNWSKPQCDITGFAPFSKDNSIRLSAGGDIWVTREPYVSCDPDKCYQFALGQGTTLNNVHSNNTVRDRTPYRTLLMNELGVPFHLGTKQVCIAWSSSSCHDGKAWLHVCITGDDKNATASFIYNGRLVDSVVSWSKEILRTQESECVCINGTCTVVMTDGSASGKADTKILFIEEGKIVHTSTLSGSAQHVEECSCYPRYPGVRCVCRDNWKGSNRPIVDINIKDHSIVSSYVCSGLVGDTPRKNDSSSSSHCLDPNNEEGGHGVKGWAFDDGNDVWMGRTISEKSRLGYETFKVIEGWSNPKSKLQINRQVIVDRGNRSGYSGIFSVEGKSCINRCFYVELIRGRKEETEVLWTSNSIVVFCGTSGTYGTGSWPDGADINLMPI

SEQ ID NO: 19769 - protein, 469 aa, synthetic construct
  REGION 1..469: note = neuraminidase__InfluenzaA__ADM95729
MNPNQKIITIGSVSLTISTICFFMQIAILITTVTLHFKQYEFNSPPNNQVMLCEPTIIERNITEIVYLTNTTIEKEICPKLAEYRNWSKPQCDITGFAPFSKDNSIRLSAGGDIWVTREPYVSCDPDKCYQFALGQGTTLNNVHSNNTVRDRTPYRTLLMNELGVPFHLGTKQVCIAWSSSSCHDGKAWLHVCITGDDKNATASFIYNGRLVDSVVSWSKEILRTQESECVCINGTCTVVMTDGSASGKADTKILFIEEGKIVHTSTLSGSAQHVEECSCYPRYPGVRCVCRDNWKGSNRPIVDINIKDHSIVSSYVCSGLVGDTPRKNDSSSRSHCLDPNNEEGGHGVKGWAFDDGNDVWMGRTISEKSRLGYETFKVIEGWSNPKSKLQINRQVIVDRGNRSGYSGIFSVEGKSCINRCFYVELIRGRKEETEVLWTSNSIVVFCGTSGTYGTGSWPDGADINLMPI

SEQ ID NO: 19770 - protein, 469 aa, synthetic construct
  REGION 1..469: note = neuraminidase__InfluenzaA__ADM95730
MNPNQKIITIGSVSLTISTICFFMQIAILITTVTLHFKQYEFNSPPSNQVMLCEPTIIERNITEIVYLTNTTIEKEICPKLAEYRNWSKPQCDITGFAPFSKDNSIRLSAGGDIWVTREPYVSCDPDKCYQFALGQGTTLNNVHSNNTVRDRTPYRTLLMNELGVPFHLGTKQVCIAWSSSSCHDGKAWLHVCITGDDKNATASFIYNGRLVDSVVSWSKEILRTQESECVCINGTCTVVMTDGSASGKADTKILFIEEGKIVHTSTLSGSAQHVEECSCYPRYPGVRCVCRDNWKGSNRPIVDINIKDHSIVSSYVCSGLVGDTPRKNDSSSSSHCLDPNNEEGGHGVKGWAFDDGNDVWMGRTISEKSRLGYETFKVIEGWSNPKSKLQINRQVIVDRGNRSGYSGIFSVEGKSCINRCFYVELIRGRKEETEVLWTSNSIVVFCGTSGTYGTGSWPDGADINLMPI

SEQ ID NO: 19771 - protein, 469 aa, synthetic construct
  REGION 1..469: note = neuraminidase__InfluenzaA__ADM95732
MNPNQKIITIGSVSLTISTICFFMQIAILITTVTLHFKQYEFNSPPNNQVMLCEPTIIERNITEIVYLTNTTIEKEICPKLAEYRNWSKPQCDITGFAPFSKDNSIRLSAGGDIWVTREPYVSCDPDKCYQFALGQGTTLNNVHSNDTVRDRTPYRTLLMNELGVPFHLGTKQVCIAWSSSSCHDGKAWLHVCITGDDKNATASFIYNGRLVDSIVSWSKEILRTQESECVCINGTCTVVMTDGSASGKADTKILFIEEGKIVHTSTLSGSAQHVEECSCYPRYPGVRCVCRDNWKGSNRPIVDINIKDRSIVSSYVCSGLVGDTPRKNDSSSSSHCLDPNNEEGGHGVKGWAFDDGNDVWMGRTISEKSRLGYETFKVIEGWSNHKSKLQINRQVIVDRGNRSGYSGIFSVEGKSCINRCFYVELIRGRKEETEVLWTSNSIVVFCGTSGTYGTGSWPDGADINLMPI

SEQ ID NO: 19772 - protein, 469 aa, synthetic construct; identical to SEQ ID NO: 16599
  REGION 1..469: note = neuraminidase__InfluenzaA__ADM95733

SEQ ID NO: 19773 - protein, 469 aa, synthetic construct; identical to SEQ ID NO: 16599
  REGION 1..469: note = neuraminidase__InfluenzaA__ADM95734

SEQ ID NO: 19774 - protein, 469 aa, synthetic construct; identical to SEQ ID NO: 16599
  REGION 1..469: note = neuraminidase__InfluenzaA__ADM95735

SEQ ID NO: 19775 - protein, 469 aa, synthetic construct; identical to SEQ ID NO: 16599
  REGION 1..469: note = neuraminidase__InfluenzaA__ADM95736

SEQ ID NO: 19776 - protein, 469 aa, synthetic construct
  REGION 1..469: note = neuraminidase__InfluenzaA__ADM95737
MNPNQKIITIGSVSLTISTICFFMQIAILITTVTLHFKQYEFNSPPNNQVMLCEPTIIERNITEIVYLTNTTIEKEICPKLAEYRNWSKPQCDITGFAPFSKDNSIRLSAGGDIWVTREPYVSCDPDKCYQFALGQGTTLNNVHSNNTVRDRTPYRTLLMNELGVPFHLGTKQVCIAWSSSSCHDGKAWLHVCITGDDKNATASFIYNGRLVDSVVSWSKEILRTQESECVCINGTCTVVMTDGSASGRADTKILFIEEGKIVHTSTLSGSAQHVEECSCYPRYPGVRCVCRDNWKGSNRPIVDINIKDHSIVSSYVCSGLVGDTPRKNDSSSSSHCLDPNNEEGGHGVKGWAFDDGNDVWMGRTISEKSRLGYETFKVIEGWSNPKSKLQINRQVIVDRGNRSGYSGIFSVEGKSCINRCFYVELIRGRKEETDVLWTSNSIVVFCGTSGTYGTGSWPDGADINLMPI

SEQ ID NO: 19777 - protein, 469 aa, synthetic construct; identical to SEQ ID NO: 16599
  REGION 1..469: note = neuraminidase__InfluenzaA__ADM95738

SEQ ID NO: 19778 - protein, 469 aa, synthetic construct; identical to SEQ ID NO: 16599
  REGION 1..469: note = neuraminidase__InfluenzaA__ADM95739

SEQ ID NO: 19779 - protein, 469 aa, synthetic construct
  REGION 1..469: note = neuraminidase__InfluenzaA__ADM95740
MNPNQKIITIGSVSLTISTICFFMQIAILITTVTLHFKQYEFNSPPNNQVMLCEPTIIERNITEIVYLTNTTIEKEICPKLAEYRNWSKPQCDITGFAPFSKDNSIRLSAGGDIWVTREPYVSCDPDKCYQFALGQGTTLNNVHSNNTVRDRTPYRTLLMNELGVPFHLGTKQVCIAWSSSSCHDGKAWLHVCITGDDKNATASFIYNGRLVDSVVSWSKEILRTQESECVCINGTCTVVMTDGSASGKADTKILFIEEGKIVHTSTLSGSAQHVEECSCYPRYPGVRCVCRDNWKGSNRPIVDINIKDHSIVSSYVCSGLVGDTPRKNDSSSSSHCLDPNDEEGGHGVKGWAFDDGNDVWMGRTISEKSRLGYETFKVIEGWSNPKSKLQINRQVIVDRGNRSGYSGIFSVEGKSCINRCFYVELIRGRKEETKVLWTSNSIVVFCGTSGTYGTGSWPDGADINLMPI

SEQ ID NO: 19780 - protein, 469 aa, synthetic construct; identical to SEQ ID NO: 19755
  REGION 1..469: note = neuraminidase__InfluenzaA__ADM95741

SEQ ID NO: 19781 - protein, 469 aa, synthetic construct; identical to SEQ ID NO: 16599
  REGION 1..469: note = neuraminidase__InfluenzaA__ADM95742

SEQ ID NO: 19782 - protein, 469 aa, synthetic construct
  REGION 1..469: note = neuraminidase__InfluenzaA__ADM95743
MNPNQKIITIGSVSLTISTICFFMQIAILITTVTLHFKQYEFNSSPNNQVMLCEPTIIERNITEIVYLTNTTIEKEICPKLAEYRNWSKPQCDITGFAPFSKDNSIRLSAGGDIWVTREPYVSCDPDKCYQFALGQGTTLNNVHSNNTVRDRTPYRTLLMNELGVPFHLGTKQVCIAWSSSSCHDGKAWLHVCITGDDKNATASFIYNGRLVDSVVSWSKEILRTQESECVCINGTCTVVMTDGSASGKADTKILFIEEGKIVHTSTLSGSAQHVEECSCYPRYPGVRCVCRDNWKGSNRPIVDINIKDHSIVSSYVCSGLVGDTPRKNDSSSSSHCLDPNNEEGGHGVKGWAFDDGNDVWMGRTISEKSRLGYETFKVIEGWSNPKSKLQINRQVIVDRGNRSGYSGIFSVEGKSCINRCFYVELIRGRKEETEVLWTSNSIVVFCGTSGTYGTGSWPDGADINLMPI

SEQ ID NO: 19783 - protein, 469 aa, synthetic construct; identical to SEQ ID NO: 16599
  REGION 1..469: note = neuraminidase__InfluenzaA__ADM95744

SEQ ID NO: 19784 - protein, 469 aa, synthetic construct; identical to SEQ ID NO: 16738
  REGION 1..469: note = neuraminidase__InfluenzaA__ADN05229

SEQ ID NO: 19785 - protein, 470 aa, synthetic construct; identical to SEQ ID NO: 17461
  REGION 1..470: note = neuraminidase__InfluenzaA__ADN06292

SEQ ID NO: 19786 - protein, 470 aa, synthetic construct; identical to SEQ ID NO: 18930
  REGION 1..470: note = neuraminidase__InfluenzaA__ADN06303

SEQ ID NO: 19787 - protein, 470 aa, synthetic construct
  REGION 1..470: note = neuraminidase__InfluenzaA__ADN06314
MNPNQKIITIGSISIAIGIISLMLQIGNIISIWASHSIQTGSQNNTGICNQRIITYENSTWVNHTYVNINNTNVVAGEDKTSVTLAGNSSLCSISGWAIYTKDNSIRIGSKGEVFVIREPFISCSHLECRTFFLTQGALLNDKHSNGTVKDRSPYRALMSCPLGEAPSPYNSKFESVAWSASACHDGMGWLTIGISGPDNGAVAVLKYNGIITGTIKSWKKQILRTQESECVCMNGSCFTIMTDGPSNKAASYKIFKIEKGKVTKSIELNAPNFYYEECSCYPDTGIVMCVCRDNWHGSNRPWVSFNQNLDYQIGYICSGVFGDNPRPEDGEGSCNPVTVDGANGVKGFSYKYGNGVWIGRTKSNRLRKGFEMIWDPNGWTNTDSDFSVKQDVVAITDWSGYSGSFVQHPELTGLDCIRPCFWVELVRGLPRENTTIWTSGSSISFCGVNGDTANWSWPDGAELPFTIDK

SEQ ID NO: 19788 - protein, 470 aa, synthetic construct; identical to SEQ ID NO: 18930
  REGION 1..470: note = neuraminidase__InfluenzaA__ADN06325

SEQ ID NO: 19789 - protein, 470 aa, synthetic construct
  REGION 1..470: note = neuraminidase__InfluenzaA__ADN06347
MNPNQKIITIGSISIAIGIISLMLQIGNIISIWASHSIQTESQNNTGICNQRIITYENSTWVNHTYVNINNTNVVAGEDKTSVTLAGNSSLCSISGWAIYTKDNSIRIGSKGDVFVIREPFISCSHLECRTFFLTQGALLNDKHSNGTVKDRSPYRALMSCPLGEAPSPYNSKFESVAWSASACHDGMGWLTIGISGPDNGAVAVLKYNGIITGTIKSWKKQILRTQESECVCMNGSCFTIMTDGPSNKAASYKIFKIEKGKVTKSIELNAPNFYYEECSCYPDTGIVMCVCRDNWHGSNRPWVSFNQNLDYQMGYICSGVFGDNPRPEDGEGSCNPVNVDGANGVKGFSYKYGNGVWIGRTKSNRLRKGFEMIWDPNGWTNTDSDFSVKQDVVAITDWSGYSGSFVQHPELTGLDCIRPCFWVELVRGLPRENTTIWTSGSSISFCGVNSDTANWSWPDGAELPFTIDK

SEQ ID NO: 19790 - protein, 469 aa, synthetic construct; identical to SEQ ID NO: 19410
  REGION 1..469: note = neuraminidase__InfluenzaA__ADN06369

SEQ ID NO: 19791 - protein, 469 aa, synthetic construct; identical to SEQ ID NO: 16738
  REGION 1..469: note = neuraminidase__InfluenzaA__ADN26031

SEQ ID NO: 19792 - protein, 469 aa, synthetic construct; identical to SEQ ID NO: 16738
  REGION 1..469: note = neuraminidase__InfluenzaA__ADN26032

SEQ ID NO: 19793 - protein, 469 aa, synthetic construct; identical to SEQ ID NO: 16738
  REGION 1..469: note = neuraminidase__InfluenzaA__ADN26033

SEQ ID NO: 19794 - protein, 469 aa, synthetic construct; identical to SEQ ID NO: 16738
  REGION 1..469: note = neuraminidase__InfluenzaA__ADN26034

SEQ ID NO: 19795 - protein, 469 aa, synthetic construct; identical to SEQ ID NO: 16738
  REGION 1..469: note = neuraminidase__InfluenzaA__ADN26035

SEQ ID NO: 19796 - protein, 469 aa, synthetic construct; identical to SEQ ID NO: 16738
  REGION 1..469: note = neuraminidase__InfluenzaA__ADN26036

SEQ ID NO: 19797 - protein, 469 aa, synthetic construct
  REGION 1..469: note = neuraminidase__InfluenzaA__ADN26037
MNPNQKIITIGSVCMTIGMANLILQIGNIISIWISHSIQLGNQNQIETCNQSVITYENNTWVNQTYVNISNTNFAAGQSVVSVKLAGNSSLCPVSGWAIYSKDNSVRIGSKGDVFVIREPFISCSPLECRTFFLTQGALLNDKHSNGTIKDRSPYRTLMSCPIGEVPSPYNSRFESVAWSASACHDGINWLTIGISGPDNGAVAVLKYNGIITDTIKSWRNNILRTQESECACVNGSCFTVMTDGPSNGQASYKIFRIEKGKIVKSVEMNAPNYHYEECSCYPDSSEITCVCRDNWHGSNRPWVSFNQNLEYQIGYICSGIFGDNPRPIDKTGSCGPVSSNGANGVKGFSFKYGNGVWIGRTKSISSRNGFEMIWDPNGWTGTDNNFSIKQDIVGINEWSGYSGSFVQHPELTGLDCIRPCFWVELIRGRPKENTIWTSGSSISFCGVNSDTVGWSWPDGAELPFTIDK

SEQ ID NO: 19798 - protein, 469 aa, synthetic construct; identical to SEQ ID NO: 16738
  REGION 1..469: note = neuraminidase__InfluenzaA__ADN26038

SEQ ID NO: 19799 - protein, 469 aa, synthetic construct; identical to SEQ ID NO: 16738
  REGION 1..469: note = neuraminidase__InfluenzaA__ADN26041

SEQ ID NO: 19800 - protein, 469 aa, synthetic construct; identical to SEQ ID NO: 16738
  REGION 1..469: note = neuraminidase__InfluenzaA__ADN26042

SEQ ID NO: 19801 - protein, 469 aa, synthetic construct
  REGION 1..469: note = neuraminidase__InfluenzaA__ADN26043
MNPNQKIITIGSVCMTIGMANLILQIGNIISIWISHSIQLGNQNQIETCNQSVITYENNTWVNQTYVNISNTNFAAGQSVVSVKLAGNSSLCPVSGWAIYSKDNSIRIGSKGDVFVIREPFISCSPLECRTFFLTQGALLNDKHSNGTIKDRSPYRTLMSCPIGEVPSPYNSRFESVAWSASACHDGINWLTIGISGPDNGAVAVLKYNGIITDTIKSWRNNILRTQESECACVNGSCFTVMTDGPSDGQASYKIFRIEKGKIVKSVEMNAPNYHYEECSCYPDSSEITCVCRDNWHGSNRPWVSFNQNLEYQVGYICSGIFGDNPRPNDKTGSCGPVSSNGANGVKGFSFKYGNGVWIGRTKSISSRNGFEMIWDPNGWTGTDNNFSIKQDIVGINEWSGYSGSFVQHPELTGLDCIRPCFWVELIRGRPKENTIWTSGSSISFCGVNSDTVGWSWPDGAELPFTIDK

SEQ ID NO: 19802 - protein, 469 aa, synthetic construct; identical to SEQ ID NO: 16738
  REGION 1..469: note = neuraminidase__InfluenzaA__ADN26044

SEQ ID NO: 19803 - protein, 469 aa, synthetic construct; identical to SEQ ID NO: 16738
  REGION 1..469: note = neuraminidase__InfluenzaA__ADN26045

SEQ ID NO: 19804 - protein, 469 aa, synthetic construct
  REGION 1..469: note = neuraminidase__InfluenzaA__ADN26047
MNPNQKIITIGSVCMTIGMANLILQIGNIISIWISHSIQLGNQNQIETCNQSVITYENNTWVNQTYVNISNTNFAAGQSMVSVKLTGNSSLCPVSGWAIYSKDNSVRIGSKGDVFVIREPFISCSPLECRTFFLTQGALLNDKHSNGTIKDRSPYRTLMSCPIGEVPSPYNSRFESVAWSASACHDGINWLTIGISGPDNGAVAVLKYNGIITDTIKSWRNNILRTQESECACVNGSCFTVMTDGPSNGQASYKIFRIEKGKIVKSVEMNAPNYHYEECSCYPDSSEITCVCRDNWHGSNRPWVSFNQNLEYQIGYICSGIFGDNPRPNDKTGSCGPVSSNGANGVKGFSFKYGNGVWIGRTKSISSRNGFEMIWDPNGWTGTDNNFSIKQDIVGINEWSGYSGSFVQHPELTGLDCIRPCFWVELIRGRPKENTIWTSGSSISFCGVNSDTVGWSWPDGAELPFTIDK

SEQ ID NO: 19805 - protein, 469 aa, synthetic construct; identical to SEQ ID NO: 16738
  REGION 1..469: note = neuraminidase__InfluenzaA__ADN26048

SEQ ID NO: 19806 - protein, 469 aa, synthetic construct; identical to SEQ ID NO: 16738
  REGION 1..469: note = neuraminidase__InfluenzaA__ADN26049

SEQ ID NO: 19807 - protein, 469 aa, synthetic construct; identical to SEQ ID NO: 16738
  REGION 1..469: note = neuraminidase__InfluenzaA__ADN26050

SEQ ID NO: 19808 - protein, 469 aa, synthetic construct; identical to SEQ ID NO: 16738
  REGION 1..469: note = neuraminidase__InfluenzaA__ADN26051

SEQ ID NO: 19809 - protein, 469 aa, synthetic construct; identical to SEQ ID NO: 16738
  REGION 1..469: note = neuraminidase__InfluenzaA__ADN26052

SEQ ID NO: 19810 - protein, 469 aa, synthetic construct; identical to SEQ ID NO: 16728
  REGION 1..469: note = neuraminidase__InfluenzaA__ADN26053

SEQ ID NO: 19811 - protein, 469 aa, synthetic construct; identical to SEQ ID NO: 16738
  REGION 1..469: note = neuraminidase__InfluenzaA__ADN26054

SEQ ID NO: 19812 - protein, 469 aa, synthetic construct; identical to SEQ ID NO: 16738
  REGION 1..469: note = neuraminidase__InfluenzaA__ADN26057

SEQ ID NO: 19813 - protein, 469 aa, synthetic construct; identical to SEQ ID NO: 16738
  REGION 1..469: note = neuraminidase__InfluenzaA__ADN26058

SEQ ID NO: 19814 - protein, 469 aa, synthetic construct; identical to SEQ ID NO: 16738
  REGION 1..469: note = neuraminidase__InfluenzaA__ADN26059

SEQ ID NO: 19815 - protein, 469 aa, synthetic construct; identical to SEQ ID NO: 17105
  REGION 1..469: note = neuraminidase__InfluenzaA__ADN26060

SEQ ID NO: 19816 - protein, 469 aa, synthetic construct; identical to SEQ ID NO: 16738
  REGION 1..469: note = neuraminidase__InfluenzaA__ADN26061

SEQ ID NO: 19817 - protein, 469 aa, synthetic construct; identical to SEQ ID NO: 16738
  REGION 1..469: note = neuraminidase__InfluenzaA__ADN26063

SEQ ID NO: 19818 - protein, 469 aa, synthetic construct; identical to SEQ ID NO: 16738
  REGION 1..469: note = neuraminidase__InfluenzaA__ADN26064

SEQ ID NO: 19819 - protein, 469 aa, synthetic construct; identical to SEQ ID NO: 17811
  REGION 1..469: note = neuraminidase__InfluenzaA__ADN26065

SEQ ID NO: 19820 - protein, 469 aa, synthetic construct; identical to SEQ ID NO: 16738
  REGION 1..469: note = neuraminidase__InfluenzaA__ADN26066

SEQ ID NO: 19821 - protein, 469 aa, synthetic construct; identical to SEQ ID NO: 16738
  REGION 1..469: note = neuraminidase__InfluenzaA__ADN26067

SEQ ID NO: 19822 - protein, 469 aa, synthetic construct; identical to SEQ ID NO: 16738
  REGION 1..469: note = neuraminidase__InfluenzaA__ADN26069

SEQ ID NO: 19823 - protein, 469 aa, synthetic construct; identical to SEQ ID NO: 16738
  REGION 1..469: note = neuraminidase__InfluenzaA__ADN26070

SEQ ID NO: 19824 - protein, 469 aa, synthetic construct; identical to SEQ ID NO: 16738
  REGION 1..469: note = neuraminidase__InfluenzaA__ADN26072

SEQ ID NO: 19825 - protein, 469 aa, synthetic construct; identical to SEQ ID NO: 16738
  REGION 1..469: note = neuraminidase__InfluenzaA__ADN26073

SEQ ID NO: 19826 - protein, 469 aa, synthetic construct; identical to SEQ ID NO: 16738
  REGION 1..469: note = neuraminidase__InfluenzaA__ADN26075

SEQ ID NO: 19827 - protein, 469 aa, synthetic construct; identical to SEQ ID NO: 16738
  REGION 1..469: note = neuraminidase__InfluenzaA__ADN26076

SEQ ID NO: 19828 - protein, 469 aa, synthetic construct; identical to SEQ ID NO: 16738
  REGION 1..469: note = neuraminidase__InfluenzaA__ADN26077

SEQ ID NO: 19829 - protein, 469 aa, synthetic construct; identical to SEQ ID NO: 16738
  REGION 1..469: note = neuraminidase__InfluenzaA__ADN26078

SEQ ID NO: 19830 - protein, 469 aa, synthetic construct; identical to SEQ ID NO: 16738
  REGION 1..469: note = neuraminidase__InfluenzaA__ADN26079

SEQ ID NO: 19831 - protein, 469 aa, synthetic construct; identical to SEQ ID NO: 16738
  REGION 1..469: note = neuraminidase__InfluenzaA__ADN26080

SEQ ID NO: 19832 - protein, 469 aa, synthetic construct; identical to SEQ ID NO: 16738
  REGION 1..469: note = neuraminidase__InfluenzaA__ADN26081

SEQ ID NO: 19833 - protein, 469 aa, synthetic construct; identical to SEQ ID NO: 16738
  REGION 1..469: note = neuraminidase__InfluenzaA__ADN26082

SEQ ID NO: 19834 - protein, 469 aa, synthetic construct; identical to SEQ ID NO: 16738
  REGION 1..469: note = neuraminidase__InfluenzaA__ADN26083

SEQ ID NO: 19835 - protein, 469 aa, synthetic construct; identical to SEQ ID NO: 18640
  REGION 1..469: note = neuraminidase__InfluenzaA__ADN26084

SEQ ID NO: 19836 - protein, 469 aa, synthetic construct; identical to SEQ ID NO: 16738
  REGION 1..469: note = neuraminidase__InfluenzaA__ADN26085

SEQ ID NO: 19837 - protein, 469 aa, synthetic construct; identical to SEQ ID NO: 16738
  REGION 1..469: note = neuraminidase__InfluenzaA__ADN26086

SEQ ID NO: 19838 - protein, 469 aa, synthetic construct; identical to SEQ ID NO: 16738
  REGION 1..469: note = neuraminidase__InfluenzaA__ADN26087

SEQ ID NO: 19839 - protein, 469 aa, synthetic construct; identical to SEQ ID NO: 16738
  REGION 1..469: note = neuraminidase__InfluenzaA__ADN26088

SEQ ID NO: 19840 - protein, 469 aa, synthetic construct; identical to SEQ ID NO: 16738
  REGION 1..469: note = neuraminidase__InfluenzaA__ADN26090

SEQ ID NO: 19841 - protein, 469 aa, synthetic construct; identical to SEQ ID NO: 16738
  REGION 1..469: note = neuraminidase__InfluenzaA__ADN26091

SEQ ID NO: 19842 - protein, 469 aa, synthetic construct; identical to SEQ ID NO: 16738
  REGION 1..469: note = neuraminidase__InfluenzaA__ADN26092

SEQ ID NO: 19843 - protein, 469 aa, synthetic construct; identical to SEQ ID NO: 16738
  REGION 1..469: note = neuraminidase__InfluenzaA__ADN26093

SEQ ID NO: 19844 - protein, 469 aa, synthetic construct
  REGION 1..469: note = neuraminidase__InfluenzaA__ADN26094
MNPNQKIITIGSVCMTIGMANLILQIGNIISIWISHSIQLGNQNQIETCNQSVITYENNTWVNQTYVNISNTNFAAGQSVVSVKLAGNSSLCPVSGWAIYSKDNSIRIGSKGDVFVIREPFISCSPLECRTFFLTQGALLNDKHSNGTIKDRSPYRTLMSCPIGEVPSPYNSRFESVAWSASACHDGINWLTIGISGPDNGAVAVLKYNGIITDTIKSWRNNILRTQESECACVNGSCFTVMTDGPSDGQASYKIFRIEKGKIVKSVEMNAPNYHYEECSCYPDSSEITCVCRDNWHGSNRPWVSFNQNLEYQIGYICSGIFGDNPRPNDKTGSCGPVSSNGANGVKGFSFKYGNGVWIGRTKSISSRNGFEMIWDPNGWTGKDNNFSIKQDIVGINEWSGYSGSFVQHPELTGLDCIRPCFWVELIRGRPKENTIWTSGSSISFCGVNSDTVGWSWPDGAELPFTIDK

SEQ ID NO: 19845 - protein, 469 aa, synthetic construct; identical to SEQ ID NO: 18640
  REGION 1..469: note = neuraminidase__InfluenzaA__ADN26095

SEQ ID NO: 19846 - protein, 469 aa, synthetic construct
  REGION 1..469: note = neuraminidase__InfluenzaA__ADN26096
MNPNQKIITIGSVCMTIGMANLILQIGNIISIWISHSIQLGNQNQIETCNQSVITYENNTWVNQTYVNISNTNFAAGQSVVSVKLAGNSSLCPVNGWAIYSKDNSIRIGSKGDVFVIREPFISCSPLECRTFFLTQGALLNDKHSNGTIKDRSPYRTLMSCPIGEVPSPYNSRFESVAWSASACHDGINWLTIGISGPDNGAVAVLKYNGIITDTIKSWRNNILRTQESECACVNGSCFTVMTDGPSDGQASYKIFRIEKGKIVKSVEMNAPNYHYEECSCYPDSSEITCVCRDNWHGSNRPWVSFNQNLEYQIGYICSGIFGDNPRPNDKTGSCGPVSSNGANGVKGFSFKYGNGVWIGRTKNISSRNGFEMIWDPNGWTGTDNNFSIKQDIVGINEWSGYSGSFVQHPELTGLDCIRPCFWVELIRGRPKENTIWTSGSSISFCGVNSDTVGWSWPDGAELPFTIDK

SEQ ID NO: 19847 - protein, 469 aa, synthetic construct; identical to SEQ ID NO: 16738
  REGION 1..469: note = neuraminidase__InfluenzaA__ADN26097

SEQ ID NO: 19848 - protein, 469 aa, synthetic construct; identical to SEQ ID NO: 16738
  REGION 1..469: note = neuraminidase__InfluenzaA__ADN26098

SEQ ID NO: 19849 - protein, 469 aa, synthetic construct; identical to SEQ ID NO: 16738
  REGION 1..469: note = neuraminidase__InfluenzaA__ADN26099

SEQ ID NO: 19850 - protein, 469 aa, synthetic construct; identical to SEQ ID NO: 16738
  REGION 1..469: note = neuraminidase__InfluenzaA__ADN26100

SEQ ID NO: 19851 - protein, 469 aa, synthetic construct; identical to SEQ ID NO: 16738
  REGION 1..469: note = neuraminidase__InfluenzaA__ADN26101

SEQ ID NO: 19852 - protein, 469 aa, synthetic construct
  REGION 1..469: note = neuraminidase__InfluenzaA__ADN26102
MNPNQKIITIGSVCMTIGMANLILQIGNIISIWISHLIQLGNQNQIETCNQSVITYENNTWVNQTYVNISNTNFAAGQSVVSVKLAGNSSLCPVSGWAIYSKDNSIRIGSKGDVFVIREPFISCSPLECRTFFLTQGALLNDKHSNGTIKDRSPYRTLMSCPIGEVPSPYNSRFESVAWSASACHDGINWLTIGISGPDNGAVAVLKYNGIITDTIKSWRNNILRTQESECACVNGSCFTVMTDGPSDGQASYKIFKIEKGKIVKSVEMNAPNYHYEECSCYPDSSEITCVCRDNWHGSNRPWVSFNQNLEYQIGYICSGIFGDNPRPNDKTGSCGPVSSNGANGVKGFSFKYGNGVWIGRTKSISSRNGFEMIWDPNGWTGTDNNFSIKQDIVGINEWSGYSGSFVQHPELTGLDCIRPCFWVELIRGRPKENSIWTSGSSISFCGVNSDTVGWSWPDGAELPFTIDK

SEQ ID NO: 19853 - protein, 469 aa, synthetic construct; identical to SEQ ID NO: 16738
  REGION 1..469: note = neuraminidase__InfluenzaA__ADN26103

SEQ ID NO: 19854 - protein, 469 aa, synthetic construct; identical to SEQ ID NO: 16738
  REGION 1..469: note = neuraminidase__InfluenzaA__ADN26104

SEQ ID NO: 19855 - protein, 469 aa, synthetic construct; identical to SEQ ID NO: 16738
  REGION 1..469: note = neuraminidase__InfluenzaA__ADN26105

SEQ ID NO: 19856 - protein, 469 aa, synthetic construct; identical to SEQ ID NO: 16738
  REGION 1..469: note = neuraminidase__InfluenzaA__ADN26106

SEQ ID NO: 19857 - protein, 469 aa, synthetic construct; identical to SEQ ID NO: 18640
  REGION 1..469: note = neuraminidase__InfluenzaA__ADN26107

SEQ ID NO: 19858 - protein, 469 aa, synthetic construct; identical to SEQ ID NO: 18640
  REGION 1..469: note = neuraminidase__InfluenzaA__ADN26108

SEQ ID NO: 19859 - protein, 469 aa, synthetic construct; identical to SEQ ID NO: 16738
  REGION 1..469: note = neuraminidase__InfluenzaA__ADN26109

SEQ ID NO: 19860 - protein, 469 aa, synthetic construct; identical to SEQ ID NO: 17712
  REGION 1..469: note = neuraminidase__InfluenzaA__ADN26110

SEQ ID NO: 19861 - protein, 469 aa, synthetic construct; identical to SEQ ID NO: 18640
  REGION 1..469: note = neuraminidase__InfluenzaA__ADN26111

SEQ ID NO: 19862 - protein, 469 aa, synthetic construct; identical to SEQ ID NO: 17712
  REGION 1..469: note = neuraminidase__InfluenzaA__ADN26112

SEQ ID NO: 19863 - protein, 469 aa, synthetic construct; identical to SEQ ID NO: 18640
  REGION 1..469: note = neuraminidase__InfluenzaA__ADN26113

SEQ ID NO: 19864 - protein, 469 aa, synthetic construct
  REGION 1..469: note = neuraminidase__InfluenzaA__ADN26114
MNPNQKIITIGSVCMTIGMANLILQIGNIISIWISHSIQLGNQNQIETCNQSVITYENNTWVNQTYVNINNTNFAAGQSVVSVKLAGNSSLCPVSGWAIYSKDNSIRIGSKGDVFVIREPFISCSPLECRTFFLTQGALLNDKHSNGTIKDRSPYRTLMSCPIGEVPSPYNSRFESVAWSASACHDGINWLTIGISGPDNGAVAVLKYNGIITDTIKSWRNNILRTQESECACVNGSCFTVMTDGPSDGQASYKIFRIEKGKIVKSVEMNAPNYHYEECSCYPDSSEITCVCRDNWHGSNRPWVSFNQNLEYQIGYICSGIFGDNPRPNDKTGSCGPVSSNGANGVKGFSFKYGNGVWIGRTKSISSRNGFEMIWDPNGWTGTDNNFSIKQDIVGINEWSGYSGSFVQHPELTGLDCIRPCFWVELIRGRPKENTIWTSGSSISFCGVNSDTVGWSWPDGAELPFTIDK

SEQ ID NO: 19865 - protein, 469 aa, synthetic construct; identical to SEQ ID NO: 16738
  REGION 1..469: note = neuraminidase__InfluenzaA__ADN26115

SEQ ID NO: 19866 - protein, 469 aa, synthetic construct
  REGION 1..469: note = neuraminidase__InfluenzaA__ADN26116
MNPNQKIITIGSVCMTIGMANLILQIGNIISIWISHSIQLGNQNQIETCNQSVITYENNTWVNQTYVNISNTNFAAGQSVVSVKLAGNSSLCPVNGWAIYSKDNSIRIGSKGDVFVIREPFISCSPLECRTFFLTQGALLNDKHSNGTIKDRSPYRTLMSCPIGEVPSPYNSRFESVAWSASACHDGINWLTIGISGPDNGAVAVLKYNGIITDTIKSWRNNILRTQESECACVNGSCFTVMTDGPSDGQASYKIFRIEKGKIVKSVEMNAPNYHYEECSCYPDSSEITCVCRDNWHGSNRPWVSFNQNLEYQIGYICSGIFGDNPRPNDKTGSCGPVSSNGANGVKGFSFKYGNGVWIGRTKSISSRNGFEMIWDPNGWTGTDNNFSIKQDIVGINEWSGYSGSFVQHPELTRLDCIRPCFWVELIRGRPKENTIWTSGSSISFCGVNSDTVGWSWPDGAELPFTIDK

SEQ ID NO: 19867 - protein, 469 aa, synthetic construct; identical to SEQ ID NO: 18640
  REGION 1..469: note = neuraminidase__InfluenzaA__ADN26117

SEQ ID NO: 19868 - protein, 469 aa, synthetic construct; identical to SEQ ID NO: 18640
  REGION 1..469: note = neuraminidase__InfluenzaA__ADN26118

SEQ ID NO: 19869 - protein, 469 aa, synthetic construct; identical to SEQ ID NO: 16738
  REGION 1..469: note = neuraminidase__InfluenzaA__ADN26119

SEQ ID NO: 19870 - protein, 469 aa, synthetic construct; identical to SEQ ID NO: 17712
  REGION 1..469: note = neuraminidase__InfluenzaA__ADN26120

SEQ ID NO: 19871 - protein, 469 aa, synthetic construct; identical to SEQ ID NO: 18640
  REGION 1..469: note = neuraminidase__InfluenzaA__ADN26121

SEQ ID NO: 19872 - protein, 469 aa, synthetic construct; identical to SEQ ID NO: 16738
  REGION 1..469: note = neuraminidase__InfluenzaA__ADN26122

SEQ ID NO: 19873 - protein, 469 aa, synthetic construct; identical to SEQ ID NO: 16738
  REGION 1..469: note = neuraminidase__InfluenzaA__ADN26123

SEQ ID NO: 19874 - protein, 469 aa, synthetic construct; identical to SEQ ID NO: 16738
  REGION 1..469: note = neuraminidase__InfluenzaA__ADN26124

SEQ ID NO: 19875 - protein, 469 aa, synthetic construct; identical to SEQ ID NO: 17712
  REGION 1..469: note = neuraminidase__InfluenzaA__ADN26125

SEQ ID NO: 19876 - protein, 469 aa, synthetic construct; identical to SEQ ID NO: 17712
  REGION 1..469: note = neuraminidase__InfluenzaA__ADN26126

SEQ ID NO: 19877 - protein, 469 aa, synthetic construct; identical to SEQ ID NO: 17503
  REGION 1..469: note = neuraminidase__InfluenzaA__ADN26127

SEQ ID NO: 19878 - protein, 469 aa, synthetic construct; identical to SEQ ID NO: 16738
  REGION 1..469: note = neuraminidase__InfluenzaA__ADN26128

SEQ ID NO: 19879 - protein, 469 aa, synthetic construct; identical to SEQ ID NO: 17712
  REGION 1..469: note = neuraminidase__InfluenzaA__ADN26129

SEQ ID NO: 19880 - protein, 469 aa, synthetic construct; identical to SEQ ID NO: 18640
  REGION 1..469: note = neuraminidase__InfluenzaA__ADN26130

SEQ ID NO: 19881 - protein, 469 aa, synthetic construct
  REGION 1..469: note = neuraminidase__InfluenzaA__ADN26131
MNPNQKIITIGSVCMTIGMANLILQIGNIISIWISHSIQLGNQNQIETCNQSVITYENNTWVNQTYVNISNTNFAAGQSVVSVKLAGNSSLCPVSGWAIYSKDNSIRIGSKGDVFVIREPFISCSPLECRTFFLTQGALLNDKHSNGTIKDRSPYRTLMSCPIGEVPSPYNSRFESVAWSASACHDGINWLTIGISGPDNGAVAVLKYNGIITDTIKSWRNNILRTQESECACVNGSCFTVMTDGPSDGQASYKIFRIEKGKIVKSVEMNAPNYHYEECSCYPDSSEITCVCRDNWHGSNRPWVSFNQNLEYQIGYICSGIFGDNPRPNDKKGSCGPVSSNGANGVKGFSFKYGNGVWIGRTKSISSRNGFEMIWDPNGWTGTDNNFSIKQDIVGINEWSGYSGSFVQHPELTGLDCIRPCFWVELIRGRPKENTIWTSGSSISLCGVNSDTVGWSWPDGAELPFTIDK

SEQ ID NO: 19882 - protein, 469 aa, synthetic construct; identical to SEQ ID NO: 18640
  REGION 1..469: note = neuraminidase__InfluenzaA__ADN26132

SEQ ID NO: 19883 - protein, 469 aa, synthetic construct; identical to SEQ ID NO: 17712
  REGION 1..469: note = neuraminidase__InfluenzaA__ADN26134

SEQ ID NO: 19884 - protein, 469 aa, synthetic construct; identical to SEQ ID NO: 16738
  REGION 1..469: note = neuraminidase__InfluenzaA__ADN26135

SEQ ID NO: 19885 - protein, 469 aa, synthetic construct; identical to SEQ ID NO: 16738
  REGION 1..469: note = neuraminidase__InfluenzaA__ADN26136

SEQ ID NO: 19886 - protein, 469 aa, synthetic construct; identical to SEQ ID NO: 16738
  REGION 1..469: note = neuraminidase__InfluenzaA__ADN26137

SEQ ID NO: 19887 - protein, 469 aa, synthetic construct; identical to SEQ ID NO: 18640
  REGION 1..469: note = neuraminidase__InfluenzaA__ADN26138

SEQ ID NO: 19888 - protein, 469 aa, synthetic construct; identical to SEQ ID NO: 17712
  REGION 1..469: note = neuraminidase__InfluenzaA__ADN26140

SEQ ID NO: 19889 - protein, 469 aa, synthetic construct
  REGION 1..469: note = neuraminidase__InfluenzaA__ADN26141
MNPNQKIITIGSVCMTIGMANLILQIGNIISIWISHSIQLGNQNRIETCNQSVITYENNTWVNQTYVNISNTNFAAGQSVVSVKLAGNSSLCPVSGWAIYSKDNSIRIGSKGDVFVIREPFISCSPLECRTFFLTQGALLNDKHSNGTIKDRSPYRTLMSCPIGEVPSPYNSRFESVAWSASACHDGINWLTIGISGPDNGAVAVLKYNGIITDTIKSWRNNILRTQESECACVNGSCFTVMTDGPSDGQASYKIFRIEKGKIVKSVEMNAPNYHYEECSCYPDSSEITCVCRDNWHGSNRPWVSFNQNLEYQIGYICSGIFGDNPRPNDKTGSCGPVSSNGANGVKGFSFKYGNGVWIGRTKSISSRNGFEMIWDPNGWTGTDNNFSIKQDIVGINEWSGYSGSFVQHPELTGLDCIRPCFWVELIRGRPKENTIWTSGSSISFCGVNSDTVGWSWPDGAELPFTIDK

SEQ ID NO: 19890 - protein, 469 aa, synthetic construct
  REGION 1..469: note = neuraminidase__InfluenzaA__ADN26142
MNPNQKIITIGSVCMTIGMANLILQIGNIISIWISHSIQLGNQNQIETCNQSVITYENNTWVNQTYVNISNNNFAAGQSVVSVKLAGNSSLCPVNGWAIYSKDNSIRIGSKGDVFVIREPFISCSPLECRTFFLTQGALLNDKHSNGTIKDRSPYRTLMSCPIGEVPSPYNSRFESVAWSASACHDGINWLTIGISGPDNGAVAVLKYNGIITDTIKSWRNNILRTQESECACVNGSCFTVMTDGPSDGQASYKIFRIEKGKIVKSVEMNAPNYHYEECSCYPDSSEITCVCRDNWHGSNRPWVSFNQNLEYQIGYICSGIFGDNPRPNDKTGSCGPVSSNGANGVKGFSFKYGNGVWIGRTKSISSRNGFEMIWDPNGWTGTDNNFSIKQDIVGINEWSGYSGSFVQHPELTGLDCIRPCFWVELIRGRPKENTIWTSGSSISFCGVNSDTVGWSWPDGAELPFTIDK

SEQ ID NO: 19891 - protein, 469 aa, synthetic construct; identical to SEQ ID NO: 16738
  REGION 1..469: note = neuraminidase__InfluenzaA__ADN26143

SEQ ID NO: 19892 - protein, 469 aa, synthetic construct; identical to SEQ ID NO: 18640
  REGION 1..469: note = neuraminidase__InfluenzaA__ADN26144

SEQ ID NO: 19893 - protein, 469 aa, synthetic construct; identical to SEQ ID NO: 18640
  REGION 1..469: note = neuraminidase__InfluenzaA__ADN26145

SEQ ID NO: 19894 - protein, 469 aa, synthetic construct; identical to SEQ ID NO: 16738
  REGION 1..469: note = neuraminidase__InfluenzaA__ADN26146

SEQ ID NO: 19895 - protein, 469 aa, synthetic construct; identical to SEQ ID NO: 18640
  REGION 1..469: note = neuraminidase__InfluenzaA__ADN26147

SEQ ID NO: 19896 - protein, 469 aa, synthetic construct; identical to SEQ ID NO: 16738
  REGION 1..469: note = neuraminidase__InfluenzaA__ADN26148

SEQ ID NO: 19897 - protein, 469 aa, synthetic construct; identical to SEQ ID NO: 18640
  REGION 1..469: note = neuraminidase__InfluenzaA__ADN26149

SEQ ID NO: 19898 - protein, 469 aa, synthetic construct
  REGION 1..469: note = neuraminidase__InfluenzaA__ADN26150
MNPNQKIITIGSVCMTIGMASLILQIGNIISIWISHSIQLGNQNQIETCNQSVITYENNTWVNQTYVNISNTNFAAGQSVVSVKLAGNSSLCPVSGWAIYSKDNSIRIGSKGDVFVIREPFISCSPLECRTFFLTQGALLNDKHSNGTIKDRSPYRTLMSCPIGEVPSPYNSRFESVAWSASACHDGINWLTIGISGPDNGAVAVLKYNGIITDTIKSWRNNILRTQESECACVNGSCFTVMTDGPSDGQASYKIFRIEKGKIVKSVEMNAPNYHYEECSCYPDSSEITCVCRDNWHGSNRPWVSFNQNLEYQIGYICSGIFGDNPRPNDKTGSCGPVSSNGANGVKGFSFKYGNGVWIGRTKSISSRNGFEMIWDPNGWTGTDNNFSIKQDIVGINEWSGYSGSFVQHPELTGLDCIRPCFWVELIRGRPKENTIWTSGSSISFCGVNSDTVGWSWPDGAELPFTIDK

SEQ ID NO: 19899 - protein, 469 aa, synthetic construct; identical to SEQ ID NO: 17712
  REGION 1..469: note = neuraminidase__InfluenzaA__ADN26151

SEQ ID NO: 19900 - protein, 469 aa, synthetic construct
  REGION 1..469: note = neuraminidase__InfluenzaA__ADN26152
MNPNQKIITIGSVCMTIGMANLILQIGNIISIWISHSIQLGNQNQIETCNQSVITYENNTWVNQTYVNISNTNFAAGQSVVSMKLAGNSSLCPVNGWAIYSKDNSIRIGSKGDVFVIREPFISCSPLECRTFFLTQGALLNDKHSNGTIKDRSPYRTLMSCPIGEVPSPYNSRFESVAWSASACHDGINWLTIGISGPDNGAVAVLKYNGIITDTIKSWRNNILRTQESECACVNGSCFTVMTDGPSDGQASYKIFRIEKGKIVKSVEMNAPNYHYEECSCYPDSSEITCVCRDNWHGSNRPWVSFNQNLEYQIGYICSGIFGDNPRPNDKTGSCGPVSSNGANGVKGFSFKYGNGVWIGRTKSISSRNGFEMIWDPNGWTRTDNNFSIKQDIVGINEWSGYSGSFVQHPELTGLDCIRPCFWVELIRGRPKENTIWTSGSSISFCGVNSDTVGWSWPDGAELPFTIDK

SEQ ID NO: 19901 - protein, 469 aa, synthetic construct; identical to SEQ ID NO: 18640
  REGION 1..469: note = neuraminidase__InfluenzaA__ADN26153

SEQ ID NO: 19902 - protein, 469 aa, synthetic construct; identical to SEQ ID NO: 17321
  REGION 1..469: note = neuraminidase__InfluenzaA__ADN26154

SEQ ID NO: 19903 - protein, 469 aa, synthetic construct; identical to SEQ ID NO: 16738
  REGION 1..469: note = neuraminidase__InfluenzaA__ADN26155

SEQ ID NO: 19904 - protein, 469 aa, synthetic construct; identical to SEQ ID NO: 17712
  REGION 1..469: note = neuraminidase__InfluenzaA__ADN26157

SEQ ID NO: 19905 - protein, 469 aa, synthetic construct; identical to SEQ ID NO: 16738
  REGION 1..469: note = neuraminidase__InfluenzaA__ADN26159

SEQ ID NO: 19906 - protein, 469 aa, synthetic construct; identical to SEQ ID NO: 16738
  REGION 1..469: note = neuraminidase__InfluenzaA__ADN26161

SEQ ID NO: 19907 - protein, 469 aa, synthetic construct
  REGION 1..469: note = neuraminidase__InfluenzaA__ADN26162
MNPNQKIITISSVCMTVGMANLILQIGNIISIWISHSIQLGNQNQIETCNQSVITYENNTWVNQTYVNISNTNFAAGQSVVSVKLAGNSSLCPVSGWAIYSKDNSIRIGSKGDVFVIREPFISCSPLECRTFFLTQGALLNDKHSNGTIKDRSPYRTLMSCPIGEVPSPYNSRFESVAWSASACHDGINWLTIGISGPDNGAVAVLKYNGIITDTIKSWRNNILRTQESECACVNGSCFTVMTDGPSDGQASYKIFRIEKGKIVKSVEMNAPNYHYEECSCYPDSSEITCVCRDNWHGSNRPWVSFNQNLEYQIGYICSGIFGDNPRPNDKTGSCGPVSSNGANGVKGFSFKYGNGVWIGRTKSISSRNGFEMIWDPNGWTGTDNNFSIKQDIVGINEWSGYSGSFVQHPELTGLDCIRPCFWVELIRGRPKENTIWTSGSSISFCGVNSDTVGWSWPDGAELPFTIDK

SEQ ID NO: 19908 - protein, 469 aa, synthetic construct
  REGION 1..469: note = neuraminidase__InfluenzaA__ADN26163
MNPNQKIITIGSVCMTIGMANLILQIGNIISIWISHSIQLGNQNQIETCNQSVITYENNTWVNQTYVNISNTNFAAGQSVVSVKLAGNSSLCPVSGWAIYSKDNSIRIGSKGDVFVIREPFISCSPLECRTFFLTQGALLNDKHSNGTIKDRSPYRTLMSCPIGEVPSPYNSRFESVAWSASACHDGINWLTIGISGPDNGAVAVLKYNGIITDTIKSWRNNILRTQESECACVNGSCFTVMTDGPSDGQASYKIFRIEKGKIVKSVEMNAPNYHYEECSCYPDSSEITCVCRDNWHGSNRPWVSFNQNLEYQIGYICSGIFGDNPRPNDKTGSCGPVSSNGANGVKGFSFKYGNGVWIGRTKSISSRNGFEMIWDPNGWTGTDNNFSIKQDIIGINEWSGYSGSFVQHPELTGLDCIRPCFWVELIRGRPKENTIWTSGSSISFCGVNSDTVGWSWPDGAELPFIIDK

SEQ ID NO: 19909 - protein, 469 aa, synthetic construct
  REGION 1..469: note = neuraminidase__InfluenzaA__ADN26164
MNPNQKIITIGSVCMTIGMANLILQIGNIISIWISHSIQLGNQNQIETCNQSVITYENNTWVNQTYVNISNTNFAAGQSVVSVKLAGNSSLCPVSGWAIYSKDNSIRIGSKGDVFVIREPFISCSPLECRTFFLTQGALLNDKHSNGTIKDRSPYRTLMSCPIGEVPSPYNSRFESVAWSASACHDGINWLTIGISGPDNGAVAVLKYNGIITDTIKSWRNNILRTQESECACLNGSCFTVMTDGPSDGQASYKIFRIEKGKIVKSVEMNAPNYHYEECSCYPDSSEITCVCRDNWHGSNRPWVSFNQNLEYQIGYICSGIFGDNPRPNDKTGSCGPVSSNGANGVKGFSFKYGNGVWIGRTKSISSRNGFEMIWDPNGWTGTDNDFSIKQDIVGINEWSGYSGSFVQHPELTGLDCIRPCFWVELIRGRPKENTIWTSGSSISFCGVNSDTVGWSWPDGAELPFTIDK

SEQ ID NO: 19910 - protein, 469 aa, synthetic construct; identical to SEQ ID NO: 18695
  REGION 1..469: note = neuraminidase__InfluenzaA__ADN26168

SEQ ID NO: 19911 - protein, 469 aa, synthetic construct; identical to SEQ ID NO: 17961
  REGION 1..469: note = neuraminidase__InfluenzaA__ADN26178

SEQ ID NO: 19912 - protein, 469 aa, synthetic construct; identical to SEQ ID NO: 16738
  REGION 1..469: note = neuraminidase__InfluenzaA__ADN26868

SEQ ID NO: 19913 - protein, 469 aa, synthetic construct; identical to SEQ ID NO: 16738
  REGION 1..469: note = neuraminidase__InfluenzaA__ADN26869

SEQ ID NO: 19914 - protein, 469 aa, synthetic construct; identical to SEQ ID NO: 16738
  REGION 1..469: note = neuraminidase__InfluenzaA__ADN26870

SEQ ID NO: 19915 - protein, 469 aa, synthetic construct
  REGION 1..469: note = neuraminidase__InfluenzaA__ADN26871
MNPNQKIITIGSVCMTIGMANLILQIGNIISIWISHSIQLGNQNQIETYNQSVITYENNTWVNQTYVNISNTNFAAGQSVVSVKLAGNSSLCPVSGWAIYSKDNSIRIGSKGDVFVIREPFISCSPLECRTFFLTQGALLNDKHSNGTIKDRSPYRTLMSCPIGEVPSPYNSRFESVAWSASACHDGINWLTIGISGPDNGAVAVLKYNGIITDTIKSWRNNILRTQESECACVNGSCFTVMTDGPSDGQASYKIFRIEKGKIVKSVEMNAPNYHYEECSCYPDSSEITCVCRDNWHGSNRPWVSFNQNLEYQIGYICSGIFGDNPRPNDKTGSCGPVSSNGANGVKGFSFKYGNGVWIGRTKSISSRNGFEMIWDPNGWTGTDNNFSIKQDIVGINEWSGYSGSFVQHPELTGLDCIRPCFWVELIRGRPKENTIWTSGSSISFCGVNSDTVGWSWPDGAELPFTIDK

SEQ ID NO: 19916 - protein, 469 aa, synthetic construct
  REGION 1..469: note = neuraminidase__InfluenzaA__ADN26872
MNPNQKIITIGSVCMTIGMANLILQIGNIISIWISHSIQLGNQNQIETCNQSVITYENNTWVNQTYVNISNTNFAAGLSVVSVKLAGNSSLCPVSGWAIYSKDNSIRIGSKGDVFVIREPFISCSPLECRTFFLTQGALLNDKHSNGTIKDRSPYRTLMSCPIGEVPSPYNSRFESVAWSASACHDGISWLTIGISGPDNGAVAVLKYNGIITDTIKSWRNNILRTQESECACVNGSCFTVMTDGPSDGQASYKIFRIEKGKIVKSVEMNAPNYHYEECSCYPDSSEITCVCRDNWHGSNRPWVSFNQNLEYQIGYICSGIFGDNPRPNDKTGSCGPVSSNGANGVKGFSFKYGNGVWIGRTKSISSRNGFEMIWDPNGWTGTDNNFSIKQDIVGINEWSGYSGSFVQHPELTGLDCIRPCFWVELIRGRPKENTIWTSGSSISFCGVNSDTVGWSWPDGAELPFTIDK

SEQ ID NO: 19917 - protein, 469 aa, synthetic construct; identical to SEQ ID NO: 16738
  REGION 1..469: note = neuraminidase__InfluenzaA__ADN26873

SEQ ID NO: 19918 - protein, 469 aa, synthetic construct; identical to SEQ ID NO: 16738
  REGION 1..469: note = neuraminidase__InfluenzaA__ADN26874

SEQ ID NO: 19919 - protein, 469 aa, synthetic construct; identical to SEQ ID NO: 16738
  REGION 1..469: note = neuraminidase__InfluenzaA__ADN26875

SEQ ID NO: 19920 - protein, 469 aa, synthetic construct; identical to SEQ ID NO: 16738
  REGION 1..469: note = neuraminidase__InfluenzaA__ADN26876

SEQ ID NO: 19921 - protein, 469 aa, synthetic construct; identical to SEQ ID NO: 16738
  REGION 1..469: note = neuraminidase__InfluenzaA__ADN26877

SEQ ID NO: 19922 - protein, 469 aa, synthetic construct; identical to SEQ ID NO: 16738
  REGION 1..469: note = neuraminidase__InfluenzaA__ADN26878

SEQ ID NO: 19923 - protein, 469 aa, synthetic construct; identical to SEQ ID NO: 17875
  REGION 1..469: note = neuraminidase__InfluenzaA__ADN26879

SEQ ID NO: 19924 - protein, 469 aa, synthetic construct; identical to SEQ ID NO: 16738
  REGION 1..469: note = neuraminidase__InfluenzaA__ADN26880

SEQ ID NO: 19925 - protein, 469 aa, synthetic construct; identical to SEQ ID NO: 16738
  REGION 1..469: note = neuraminidase__InfluenzaA__ADN26881

SEQ ID NO: 19926 - protein, 469 aa, synthetic construct; identical to SEQ ID NO: 16738
  REGION 1..469: note = neuraminidase__InfluenzaA__ADN26882

SEQ ID NO: 19927 - protein, 469 aa, synthetic construct; identical to SEQ ID NO: 16738
  REGION 1..469: note = neuraminidase__InfluenzaA__ADN26883

SEQ ID NO: 19928 - protein, 470 aa, synthetic construct
  REGION 1..470: note = neuraminidase__InfluenzaA__ADN89064
MNPNQKIITIGSISIAIGIISLMLQIGNIISIWASHSIQTGSQNNTGICNQRIITYENSTWVNHTYVNINNTNVVAGEDKTSVTLAGNSSLCSISGWAIYTKDNSIRIGSKGDVFVIREPFISCSHLECRTFFLTQGALLNDKHSNGTVKDRSPYRALMSCPLGEAPSPYNSKFESVAWSASACHDGMGWLTIGISGPDNGAVAVLKYNGIITGTIKSWKKQILRTQESECVCMNGSCFTIMTDGPSNKAASYKIFKIEKGKVTKSIELNAPNFYYEECSCYPDTGIVMCVCRDNWHGSNRPWVSFNQNLDYQIGYICSGVFGDNPRPEDGEGSCNPVTVDGANGVKGFSYKYGNGVWIGRTKSNRLRRGFEMIWDPNGWTNTDSDFSVKQDVVAITDWSGYSGSFVQHPELTGLDCIRPCFWVELVRGLPRENTTIWTSGSSISFCGVNSDTANWSWPDGAELPFTIDK

SEQ ID NO: 19929 - protein, 470 aa, synthetic construct; identical to SEQ ID NO: 17461
  REGION 1..470: note = neuraminidase__InfluenzaA__ADN89075

SEQ ID NO: 19930 - protein, 470 aa, synthetic construct
  REGION 1..470: note = neuraminidase__InfluenzaA__ADN89086
MNPNQKIITIGSISIAIGIISLMLQIGNIISIWASHSIQTGSQNNTGICNQRIITYENSTWVNHTYVNINNTNVVAGEDKTSVTLAGNSSLCSISGWAIYTKDNSIRIGSKGDVFVIREPFISCSHLECRTFFLTQGALLNDKHSNGTVKDRSPYRALMSCPLGEAPSPYNSKFESVAWSASACHDGMGWLTIGISGPDNGAVAVLKYNGIITGTIKSWKKQILRTQESECVCMNGSCFTIMTDGPSNKTASYKIFKIEKGKVTKSIELNAPNFYYEECSCYPDTGIVMCVCRDNWHGSNRPWVSFNQNLDYQIGYICSGVFGDNPRPEDGEGSCNPVTVDGANGVKGFSYKYGNGVWIGRTKSNRLRKGFEMIWDPNGWTNTDSDFSVKQDVVAITDWSGYSGSFVQHPELTGLDCIRPCFWVELVRGLPRENTTIWTSGSSISFCGVNSDTANWSWPDGAELPFTIDK

SEQ ID NO: 19931 - protein, 470 aa, synthetic construct; identical to SEQ ID NO: 17461
  REGION 1..470: note = neuraminidase__InfluenzaA__ADN89097

SEQ ID NO: 19932 - protein, 470 aa, synthetic construct
  REGION 1..470: note = neuraminidase__InfluenzaA__ADN89108
MNPNQKIITIGSISIAIGIISLMLQIGNIISIWASHSIQTGSQNNTGICNQRIITYENSTWVNHTYVNINNTNVVAGEDKTSVTLAGNSSLCSISGWAIYTKDNSIRIGSKGDVFVIREPFISCSHLECRTFFLTQGALLNDKHSNGTVKDRSPYRALMSCPLGEAPSPYNSKFESVAWSASACHDGMGWLTIGISGPDNGAVAVLKYNGIITGTIKSWKKQILRTQESECVCMNGSCFTIMTDGPSNKAASYKIFKIEKGKVTKSIELNAPNFYYEECSCYPDTGIVMCVCRDNWHGSNRPWVSFNQNLDYQIGYICSGVFGDNPRPEDGEGSCNPVTVDGANGVKGFSYKYGNGVWIGRTKSNRLRKGFEMIWDPNGWTNTDSDFSVKQDVVSITDWSGYSGSFVQHPELTGLDCIRPCFWVELVRGLPRENTTIWTSGSSISFCGVNSDTANWSWPDGAELPFTIDK

SEQ ID NO: 19933 - protein, 470 aa, synthetic construct
  REGION 1..470: note = neuraminidase__InfluenzaA__ADN89119
MNPNQKIITIGSISIAIGIISLMLQIGNIISIWASHSIQTGSQNNTGICNQRIITYENSTWVNHTYVNINNTNVVAGEDKTSVTLAGNSSLCSISGWAIYTKDNSIRIGSKGDVFVIREPFISCSHLECRTFFLTQGALLNDKHSNGTVKDRSPYRALMSCPLGEAPSPYNSKFESVAWSASACHDGMGWLTIGISGPDNGAVAVLKYNGIITGTIKSWKKQILRTQESECVCMNGSCFTIMTDGPSNKAASYKIFKIEKGKVTKSIELNAPNFYYEECSCYPDTGIVMCVCRDNWHGSNRPWVSFNQNLDYQIGYICSGVFGDNPRPEDGEGSCNPVTVNGADGVKGFSYKYGNGVWIGRTKSNRLRKGFEMIWDPNGWTNTDSDFSVKQDVVAITDWSGYSGSFVQHPELTGLDCTRPCFWVELVRGLPRENTTIWTSGSSISFCGVNSDTANWSWPDGAELPFTIDK

SEQ ID NO: 19934 - protein, 470 aa, synthetic construct
  REGION 1..470: note = neuraminidase__InfluenzaA__ADN89130
MNPNQKIITIGSISIAIGIISLMLQIGNIISIWASHSIQTGSQNNTGICNQRIITYENSTWVNHTYVNINNTNVVAGEDKTSVTLAGNSSLCSISGWAIYTKDNSIRIGSKGDVFVIREPFISCSHLECRTFFLTQGALLNDKHSNGTVKDRSPYRALMSCPLGEAPSPYNSNFESVAWSASACHDGMGWLTIGISGPDNGAVAVLKYNGIITGTIKSWKKQILRTQESECVCMNGSCFTIMTDGPSNKAASYKIFKIEKGKVTKSIELNAPNFYYEECSCYPDTGIVMCVCRDNWHGSNRPWVSFNQNLDYQIGYICSGVFGDNPRPEDGEGSCNPVTVDGANGVKGFSYKYGNGVWIGRTKSNRLRKGFEMIWDPNGWTNTDSDFSVKQDVVAITDWSGYSGSFVQHPELTGLDCIRPCFWVELVRGLPRENTTIWTSGSSISFCGVNGDTANWSWPDGAELPFTIDK

SEQ ID NO: 19935 - protein, 470 aa, synthetic construct; identical to SEQ ID NO: 19932
  REGION 1..470: note = neuraminidase__InfluenzaA__ADN89141

SEQ ID NO: 19936 - protein, 470 aa, synthetic construct
  REGION 1..470: note = neuraminidase__InfluenzaA__ADN89152
MNPNQKIITIGSISIAIGIISLMLQIGNIISIWASHSIQTGSQNNTGICNQRIITYENSTWVNHTYVNINNTNVVAGEDKTSVTLAGNSSLCSISGWAIYTKDNSIRIGSKGDVFVIREPFISCSHLECRTFFLTQGALLNDKHSNGTVKDRSPYRALMSCPLGEAPSPYNSKFESVAWSASACHDGMGWLTIGISGPDNGAVAVLKYNGIITGTIKSWKKQILRTQESECVCMNGSCFTIMTDGPSNKAASYKIFKIEKGKVTKSIELNAPNFYYEECSCYPDTGIVMCVCRDNWHGSNRPWVSFNQNLDYQIGYICSGVFGDNPRPEDGEGSCNPVTIDGANGVKGFSYKYGNGVWIGRTKSNRLRKGFEMIWDPNGWTNTDSDFSVKQDVVAITDWSGYSGSFVQHPELTGLDCIRPCFWVELVRGLPRENTTIWTSGSSISFCGVNSDTANWSWPDGAELPFTIDK

SEQ ID NO: 19937 - protein, 470 aa, synthetic construct
  REGION 1..470: note = neuraminidase__InfluenzaA__ADN89163
MNPNQRIITIGSISIAIGIISLMLQIGNIISIWASHSIQTGSQNNTGICNQRIITYENSTWVNHTYVNINNTNVVAGEDKTSVTLAGNSSLCSISGWAIYTKDNSIRIGSKGDVFVIREPFISCSHLECRTFFLTQGALLNDKHSNGTAKDRSPYRALMSCPLGEAPSPYNSKFESVAWSASACHDGMGWLTIGISGPDNGAVAVLKYNGIITGTIKSWKKQILRTQESECVCMNGSCFTIMTDGPSNKAASYKIFKIEKGKVTKSIELNAPNFYYEECSCYPDTGIVMCVCRDNWHGSNRPWVSFNQNLDYQIGYICSGVFGDNPRPEDGEGSCNPVTVDGANGVKGFSYKYGNGVWIGRTKSNRLRKGFEMIWDPNGWTNTDSDFSVKQDVVAITDWSGYSGSFVQHPELTGLDCIRPCFWVELVRGLPRENTTIWTSGSSISFCGVNSDTANWSWPDGAELPFTIDK

SEQ ID NO: 19938 - protein, 470 aa, synthetic construct; identical to SEQ ID NO: 18930
  REGION 1..470: note = neuraminidase__InfluenzaA__ADN89174

SEQ ID NO: 19939 - protein, 470 aa, synthetic construct; identical to SEQ ID NO: 19932
  REGION 1..470: note = neuraminidase__InfluenzaA__ADN89185

SEQ ID NO: 19940 - protein, 470 aa, synthetic construct
  REGION 1..470: note = neuraminidase__InfluenzaA__ADN89196
MNPNQKIITIGSISIAIGIISLMLQIGSIISIWASHSIQTGSQNNTGICNQRIITYENSTWVNHTYVNINNTNVVAGEDKTSVTLAGNSSLCSISGWAIYTKDNSIRIGSKGDVFVIREPFISCSHLECRTFFLTQGALLNDKHSNGTVKDRSPYRALMSCPLGEAPSPYNSKFESVAWSASACHDGMGWLTIGISGPDNGAVAVLKYNGIITGTIKSWKKQILRTQESECVCMNGSCFTIMTDGPSNKAASYKIFKIEKGKVTKSIELNAPNFYYEECSCYPDTGIVMCVCRDNWHGSNRPWVSFNQNLDYQMGYICSGVFGDNPRPEDGEGSCNPVTVDGANGVKGFSYKYGNGVWIGRTKSNRLRKGFEMIWDPNGWTNTDSDFSLKQDVVAITDWSGYSGSFVQHPELTGLDCIRPCFWVELVRGLPRENTTIWTSGSSISFCGVNSDTANWSWPDGAELPFTIDK

SEQ ID NO: 19941 - protein, 470 aa, synthetic construct; identical to SEQ ID NO: 19940
  REGION 1..470: note = neuraminidase__InfluenzaA__ADN89207

SEQ ID NO: 19942 - protein, 470 aa, synthetic construct
  REGION 1..470: note = neuraminidase__InfluenzaA__ADN89218
MNPNQKIITIGSISIAIGIISLMLQIGNIISIWASHSIQPGSQNNTGICNQRIITYENSTWVNHTYVNINNTNVVAGEDKTSVTLAGNSSLCSISGWAIYTKDNSIRIGSKGDVFVIREPFISCSHLECRTFFLTQGALLNDKHSNGTVKDRSPYRALMSCPLGEAPSPYNSKFESVAWSASACHDGMGWLTIGISGPDNGAVAVLKYNGIITGTIKSWKKQILRTQESECVCMNGSCFTIMTDGPSNKAASYKIFKIEKGKVTKSIELNAPNFYYEECSCYPDTGIVMCVCRDNWHGSNRPWVSFNQNLDYQIGYICSGVFGDNPRPEDGEGSCNPVTVDGANGVKGFSYKYGNGVWIGRTKSNRLRKGFEMIWDPNGWTNTDSDFSVKQDVVAITDWSGYSGSFVQHPELTGLDCIRPCFWVELVRGLPRENTTIWTSGSSISFCGVNGDTANWSWPDGAELPFTIDK

SEQ ID NO: 19943 - protein, 470 aa, synthetic construct
  REGION 1..470: note = neuraminidase__InfluenzaA__ADN89229
MNPNQKIITIGSISIAIGIISLMLQIGNIISIWASHSIQTGSQNNTGICNQRIITYENSTWVNHTYVNINNTNVVAGEDKTSVTLAGNSSLCSISGWAIYTKDNSIRIGSKGDVFVIREPFISCSHLECRTFFLTQGALLNDKHSNGTVKDRSPYRALMSCPLGEAPSPYNSKFESVAWSASACHDGMGWLTIGISGPDNGAVAVLKYNGIITGTIKSWKKQILRTQESECVCMNGSCFTIMTDGPSNKAASYKIFKIEKGKVTKSIELNAPNFYYEECSCYPDTGIVMCVCRDNWHGSNRPWVSFNQNLDYQIGYICSGVFGDNPRPEDGEGSCNPVTVDGANGVKGFSYKYGNGVWIGRTKSNRLRKGFEMIWDPNGWTNTDSDFSVKQDVVATTDWSGYSGSFVQHPELTGLDCIRPCFWVELVRGLPRENTTIWTSGSSISFCGVNSDTANWSWPDGAELPFTIDK

SEQ ID NO: 19944 - protein, 470 aa, synthetic construct
  REGION 1..470: note = neuraminidase__InfluenzaA__ADN89240
MNPNQKIITIGSISIAIGIISLMLQIGNIISIWASHSIQTGSQNNTGICNQRIITYENSTWVNHTYVNINNTNVVAGEDKTSVTLAGNSSLCSISGWAIYTKDNSIRIGSKGDVFVIREPFISCSHLECRTFFLTQGALLNDKHSNGTVKDRSPYRALMSCPLGEAPSPYNSKFESVAWSASACHDGMGWLTIGISGPDNGAVAVLKYNGIITGTIKSWKKQILRTQESECVCMNGSCFTIMTDGPSNKAASYKIFKIEKGKVTKSIELNAPNFYYEECSCYPDTGIVMCVCRDNWHGSNRPWVSFNQNLDYQIGYICSGVFGDNPRPEDGEGSCNPVTVDGANGVKGFSYKYGNGVWIGRTKSNRLRKGFEMIWDPNGWTNTDSDFSVKQDVVAITDWSGYSGSFVQHPELTGLDCIRPCFWVELVRGLPRENTTIWTSGSSISFCGVNGDTANWSWPDGAELPFTIDK

SEQ ID NO: 19945 - protein, 470 aa, synthetic construct; identical to SEQ ID NO: 17461
  REGION 1..470: note = neuraminidase__InfluenzaA__ADN89251

SEQ ID NO: 19946 - protein, 470 aa, synthetic construct; identical to SEQ ID NO: 17461
  REGION 1..470: note = neuraminidase__InfluenzaA__ADN89262

SEQ ID NO: 19947 - protein, 470 aa, synthetic construct; identical to SEQ ID NO: 17461
  REGION 1..470: note = neuraminidase__InfluenzaA__ADN89273

SEQ ID NO: 19948 - protein, 470 aa, synthetic construct; identical to SEQ ID NO: 17461
  REGION 1..470: note = neuraminidase__InfluenzaA__ADN89284

SEQ ID NO: 19949 - protein, 470 aa, synthetic construct; identical to SEQ ID NO: 17461
  REGION 1..470: note = neuraminidase__InfluenzaA__ADN89295

SEQ ID NO: 19950 - protein, 470 aa, synthetic construct; identical to SEQ ID NO: 17461
  REGION 1..470: note = neuraminidase__InfluenzaA__ADN89306

SEQ ID NO: 19951 - protein, 470 aa, synthetic construct
  REGION 1..470: note = neuraminidase__InfluenzaA__ADN89317
MNPNQRIITIGSISIAIGIISLMLQIGNIISIWASHSIQTGSQNNTGICNQRIITYENSTWVNHTYVNINSTNVVAGEDKTSVTLAGNSSLCSISGWAIYTKDNSIRIGSKGDVFVIREPFISCSHLECRTFFLTQGALLNDKHSNGTVKDRSPYRALMSCPLGEAPSPYNSKFESVAWSASACHDGMGWLTIGISGPDNGAVAVLKYNGIITGTIKSWKKQILRTQESECVCMNGSCFTIMTDGPSNKAASYKIFKIEKGKVTKSIELNAPNFYYEECSCYPDTGIVMCVCRDNWHGSNRPWVSFNQNLDYQIGYICSGVFGDNPRPEDGEGSCNPVTVDGANGVKGFSYKYGNGVWIGRTKSNRLRKGFEMIWDPNGWTNTDSDFSVKQDVVAITDWSGYSGSFVQHPELTGLDCIRPCFWVELVRGLPRENTTIWTSGSSISFCGVNGDTANWSWPDGAELPFTIDK

SEQ ID NO: 19952 - protein, 470 aa, synthetic construct
  REGION 1..470: note = neuraminidase__InfluenzaA__ADN89328
MNPNQKIITIGSISIAIGIISLMLQIGSIISIWASHSIQTGSQNNTGICNQRIITYENSTWVNHTYVNINNTNVVAGEDKTSVTLAGNSSLCSISGWAIYTKDNSIRIGSKGDVFVIREPFISCSHLECRTFFLTQGALLNDKHSNGTVKDRSPYRALMSCPLGEAPSPYNSKFESVAWSASACHDGMGWLTIGISGPDNGAVAVLKYNGIITGTIKSWKKQILRTQESECVCMNGSCFTIMTDGPSNKAASYKIFKIEKGKVTKSIELNAPNFYYEECSCYPDTGIVMCVCRDNWHGSNRPWVSFNQNLDYQIGYICSGVFGDNPRPEDGEGSCNPVTVDGANGVKGFSYKYGNGVWIGRTKSNRLRKGFEMIWDPNGWTNTDSDFSVKQDVVAITDWSGYSGSFVQHPELTGLDCIRPCFWVELVRGLPRENTTIWASGSSISFCGVNSDTANWSWPDGAELPFTIDK

SEQ ID NO: 19953 - protein, 470 aa, synthetic construct; identical to SEQ ID NO: 19937
  REGION 1..470: note = neuraminidase__InfluenzaA__ADN89339

SEQ ID NO: 19954 - protein, 470 aa, synthetic construct; identical to SEQ ID NO: 19943
  REGION 1..470: note = neuraminidase__InfluenzaA__ADN89350

SEQ ID NO: 19955 - protein, 470 aa, synthetic construct
  REGION 1..470: note = neuraminidase__InfluenzaA__ADN89361
MNPNQKIITIGSISIAIGIISLMLQIGSIISIWASHSIQTGSQNNTGICNQRIITYENSTWVNHTYVNINNTNVVAGEDKTSVTLAGNSSLCSISGWAIYTKDNSIRIGSKGDVFIIREPFISCSHLECRTFFLTQGALLNDKHSNGTVKDRSPYRALMSCPLGEAPSPYNSKFESVAWSASACHDGMGWLTIGISGPDNGAVAVLKYNGIITGTIKSWKKQILRTQESECVCMNGSCFTIMTDGPSNKAASYKIFKIEKGKVTKSIELNAPNFYYEECSCYPDTGIVMCVCRDNWHGSNRPWVSFNQNLDYQIGYICSGVFGDNPRPEDGEGSCNPVTVDGANGVKGFSYKYGNGVWIGRTKSNRLRKGFEMIWDPNGWTNTDSDFSVKQDVVAITDWSGYSGSFVQHPELTGLDCIRPCFWVELVRGLPRENTTIWTSGSSISFCGVNSDTANWSWPDGAELPFTIDK

SEQ ID NO: 19956 - protein, 470 aa, synthetic construct
  REGION 1..470: note = neuraminidase__InfluenzaA__ADN89372
MNPNQKIITIGSISIAIGIISLMLQIGNIISIWASHSIQTGSQNNTGICNQRIITYENSTWVNHTYVNINNTNIVAGEDKTSVTLAGNSSLCSISGWAIYTKDNSIRIGSKGDVFVIREPFISCSHLECRTFFLTQGALLNDKHSNGTVKDRSPYRALMSCPLGEAPSPYNSKFESVAWSASACHDGMGWLTIGISGPDNGAVAVLKYNGIITGTIKSWKKQILRTQESECVCMNGSCFTIMTDGPSNKAASYKIFKIEKGKVTKSIELNAPNFYYEECSCYPDTGIVMCVCRDNWHGSNRPWVSFNQNLDYQIGYICSGVFGDNPRPEDGEGSCNPVTVNGADGVKGFSYKYGNGVWIGRTKSNRLRKGFEMIWDPNGWTNTDSDFSVKQDVVAITDWSGYSGSFVQHPELTGLDCIRPCFWVELVRGLPRENTTIWTSGSSISFCGVNSDTANWSWPDGAELPFTIDK

SEQ ID NO: 19957 - protein, 470 aa, synthetic construct; identical to SEQ ID NO: 19932
  REGION 1..470: note = neuraminidase__InfluenzaA__ADN89383

SEQ ID NO: 19958 - protein, 470 aa, synthetic construct
  REGION 1..470: note = neuraminidase__InfluenzaA__ADN89405
MNPNQKIITIGSISIAIGIISLMLQIGSIISIWASHSIQTGSQNNTGICNQRIITYENSTWVNHTYVNINNTNVVAGEDKTSVTLAGNSSLCSTSGWAIYTKDNSIRIGSKGDVFVIREPFISCSHLECRTFFLTQGALLNDKHSNGTVKDRSPYRALMSCPLGEAPSPYNSKFESVAWSASACHDGMGWLTIGISGPDNGAVAVLKYNGIITGTIKSWKKQILRTQESECVCMNGSCFTIMTDGPSNKAASYKIFKIEKGKVTKSIELNAPNFYYEECSCYPDTGIVMCVCRDNWHGSNRPWVSFNQNLDYQIGYICSGVFGDNPRPEDGEGSCNPVTVDGANGVKGFSYKYGNGVWIGRTKSNRLRKGFEMIWDPNGWTNTDSDFSVKQDVVAITDWSGYSGSFVQHPELTGLDCIRPCFWVELVRGLPRENTTIWTSGSSISFCGVNSDTANWSWPDGAELPFTIDK

SEQ ID NO: 19959 - protein, 470 aa, synthetic construct
  REGION 1..470: note = neuraminidase__InfluenzaA__ADN89416
MNPNQKIITIGSISIAIGIISLMLQIGNIISIWASHSIQTGSQNNTGICNQRIITYENSTWVNHTYVNINNTNVVAGEDKTSVTLAGNSSLCSISGWAIYTKDNSIRIGSKGDVFVIREPFISCSHLECRTFFLTQGALLNDKHSNGTVKDRSPYRALMSCPLGEAPSPYNSKFESVAWSASACHDGMGWLTIGISGPDNGAVAVLKYNGIITGTIKSWKKQILRTQESECVCMNGSCFTIMTDGPSNKAASYKIFKIEKGKVTKSIELNAPNFYYEECSCYPDTGIVMCVCRDNWHGSNRPWVSFNQNLDYQIGYICSGVLGDNPRPEDGEGSCNPVTVDGANGVKGFSYKYGNGVWIGRTKSNRLRKGFEMIWDPNGWTNTDSDFSVKQDVVAITDWSGYSGSFVQHPELTGLDCIRPCFWVELVRGLPRENTTIWTSGSSISFCGVNGDTANWSWPDGAELPFTIDK

SEQ ID NO: 19960 - protein, 470 aa, synthetic construct
  REGION 1..470: note = neuraminidase__InfluenzaA__ADN89427
MNPNQKIITIGSISIAIGIISLMLQIGSIISIWASHSIQTGSQNNTGICNQRIITYENSTWVNHTYVNINNTNVVAGEDKTSVTLAGNSSLCSISGWAIYTKDNSIRIGSKGDVFVIREPFISCSHLECRTFFLTQGALLNDKHSNGTVKDRSPYRALMSCPLGEAPSPYNSKFESVAWSASACHDGMGWLTIGISGPDNGAVAVLKYNGIITGTIKSWKKQILRTQESECVCMNGSCFTIMTDGPSNKAASYKIFKIEKGKVTKSIELNAPNFYYEECSCYPDTGIVMCVCRDNWHGSNRPWVSFNQNLDYQIGYICSGVFGDNPRPEDGEGSCNPVTVDGANGVKGFSYKYGNGVWIGRTKSNRLRKGFEMIWDPNGWTNTDSDFSVKQDVVAITDWSGYSGSFVQHPELTGLDCIRPCFWVELVRGLPRENTTIWTSGSSISFCGVDSDAADWSWPDGAELPFTIDK

SEQ ID NO: 19961 - protein, 470 aa, synthetic construct; identical to SEQ ID NO: 17461
  REGION 1..470: note = neuraminidase__InfluenzaA__ADN89438

SEQ ID NO: 19962 - protein, 470 aa, synthetic construct
  REGION 1..470: note = neuraminidase__InfluenzaA__ADN89449
MNPNQKIITIGSISIAIGIISLMLQIGNIISIWASHSIQTGSQNNTGICNQRIITYENSTWVNHTYVNINNTNVVAGEDKPSVTLAGNSSLCSISGWAIYTKDNSIRIGSKGDVFVIREPFISCSHLECRTFFLTQGALLNDKHSNGTVKDRSPYRALMSCPLGEAPSPYNSKFESVAWSASACHDGMGWLTIGISGPDNGAVAVLKYNGIITGTIKSWKKQILRTQESECVCMNGSCFTIMTDGPSNKAASYKIFKIEKGKVTKSIELNAPNFYYEECSCYPDTGIVMCVCRDNWHGSNRPWVSFNQNLDYQIGYICSGVFGDNPRPEDGEGSCNPVTVDGANGVKGFSYKYGNGVWIGRTKSNRLRKGFEMIWDPNGWTNTDSDFSVKQDVVAITDWSGYSGSFVQHPELTGLDCIRPCFWVELVRGLPRENTTIWTSGSSISFCGVNSDTANWSWPDGAELPFTIDK

SEQ ID NO: 19963 - protein, 470 aa, synthetic construct; identical to SEQ ID NO: 18930
  REGION 1..470: note = neuraminidase__InfluenzaA__ADN89460

SEQ ID NO: 19964 - protein, 470 aa, synthetic construct; identical to SEQ ID NO: 17461
  REGION 1..470: note = neuraminidase__InfluenzaA__ADN89482

SEQ ID NO: 19965 - protein, 470 aa, synthetic construct
  REGION 1..470: note = neuraminidase__InfluenzaA__ADN89493
MNPNQKIITIGSISIAIGIISLMLQIGNIISIWASHSIQTESQNNTGICNQRIITYENSTWVNHTYVNINNTNVVAGEDKTSVTLAGNSSLCSISGWAIYTKDNSIRIGSKGDVFVIREPFISCSHLECRTFFLTQGALLNDKHSNGTVKDRSPYRALMSCPLGEAPSPYNSKFESVAWSASACHDGMGWLTIGISGPDNGAVAVLKYNGIITGTIKSWKKQILRTQESECVCMNGSCFTIMTDGPSNKAASYKIFKIEKGKVTKSIELNAPNFYYEECSCYPDTGIVMCVCRDNWHGSNRPWVSFNQNLDYQMGYICSGVFGDNPRPEDGEGSCNPVTVDGANGVKGFSYKYGNGVWIGRTKSNRLRKGFEMIWDPNGWTNTDSDFSVKQDVVAITDWSGYSGSFVQHPELTGLDCIRPCFWVELVRGLPRENTTIWTSGSSISFCGVNSDTANWSWPDGAELPFTIDK

SEQ ID NO: 19966 - protein, 470 aa, synthetic construct; identical to SEQ ID NO: 17461
  REGION 1..470: note = neuraminidase__InfluenzaA__ADN89504

SEQ ID NO: 19967 - protein, 470 aa, synthetic construct
  REGION 1..470: note = neuraminidase__InfluenzaA__ADN89515
MNPNQKIITIGSISIAIGIISLMLQIGNIISIWASHSIQTGSQNNTGICNQRIITYENSTWVNHTYVNINNTNVVAGEDKTSVTLAGNSSLCSISGWAIYTKDNSIRIGSKGDVFVIREPFISCSHLECRTFFLTQGALLNDKHSNGTVKDRSPYRALMSCPLGEAPSPYNSKFESVAWSASACHDGMGWLTIGISGPDNGAVAVLKYNGIITGTIKSWKKQILRTQESECVCMNGSCFTIMTDGPSNKAASYKIFKIEKGKVTKSIELNAPNFYYEECSCYPDTGIVMCVCRDNWHGSNRPWVSFNQNLDYQIGYICSGVFGDNPRPEDGEGSCNPVTVDGANGVKGFSYKYGNGVWIGRTKSNRLRKGFEMIWDPNGWTNTDSDFTVKQDVVAITDWSGYSGSFVQHPELTGLDCIRPCFWVELVRGLPRENTTIWTSGSSISFCGVNSDTANWSWPDGAELPFTIDK

SEQ ID NO: 19968 - protein, 470 aa, synthetic construct; identical to SEQ ID NO: 17461
  REGION 1..470: note = neuraminidase__InfluenzaA__ADN89526

SEQ ID NO: 19969 - protein, 470 aa, synthetic construct; identical to SEQ ID NO: 19932
  REGION 1..470: note = neuraminidase__InfluenzaA__ADN89537

SEQ ID NO: 19970 - protein, 470 aa, synthetic construct; identical to SEQ ID NO: 17461
  REGION 1..470: note = neuraminidase__InfluenzaA__ADN89548

SEQ ID NO: 19971 - protein, 470 aa, synthetic construct; identical to SEQ ID NO: 17461
  REGION 1..470: note = neuraminidase__InfluenzaA__ADN89570

SEQ ID NO: 19972 - protein, 470 aa, synthetic construct
  REGION 1..470: note = neuraminidase__InfluenzaA__ADN89581
MNPNQKIITIGSISIAIGIISLMLQIGNIISIWASHSIQTGSQNNTGICNQRIITYENSTWVNHTYVNINNTNVVAGEDKTSVTLAGNSSLCSISGWAIYTKDNSIRIGSKGDVFVIREPFISCSHLECRTFFLTQGALLNDKHSNGTVKDRSPYRALMSCPLGEAPSPYNSKFESVAWSASACHDGMGWLTIGISGPDNGAVAVLKYNGIITGTIKSWKKQILRTQESECVCMNGSCFTIMTDGPSNKTASYKIFKIEKGKVTKSIELNAPNFYYEECSCYPDTGIVMCVCRDNWHGSNRPWVSFNQNLDYQIGYICSGVFGDNPRPEDGEGSCNPVTVDGANGVKGFSYKYGNGVWIGRTKSNRLRKGFEMIWDPNGWTNTDSDFSVKQDVVAITDWSGYSGSFVQHPELTGLDCIRPCFWVELVRGLPRENTTIWTSGSSISFCGVNGDTANWSWPDGAELPFTIDK

SEQ ID NO: 19973 - protein, 470 aa, synthetic construct; identical to SEQ ID NO: 18930
  REGION 1..470: note = neuraminidase__InfluenzaA__ADN89592

SEQ ID NO: 19974 - protein, 470 aa, synthetic construct; identical to SEQ ID NO: 18930
  REGION 1..470: note = neuraminidase__InfluenzaA__ADN89603

SEQ ID NO: 19975 - protein, 470 aa, synthetic construct; identical to SEQ ID NO: 19940
  REGION 1..470: note = neuraminidase__InfluenzaA__ADN89614

SEQ ID NO: 19976 - protein, 470 aa, synthetic construct; identical to SEQ ID NO: 19959
  REGION 1..470: note = neuraminidase__InfluenzaA__ADN89625

SEQ ID NO: 19977 - protein, 470 aa, synthetic construct; identical to SEQ ID NO: 17461
  REGION 1..470: note = neuraminidase__InfluenzaA__ADN89636

SEQ ID NO: 19978 - protein, 470 aa, synthetic construct; identical to SEQ ID NO: 17461
  REGION 1..470: note = neuraminidase__InfluenzaA__ADN89647

SEQ ID NO: 19979 - protein, 470 aa, synthetic construct; identical to SEQ ID NO: 17461
  REGION 1..470: note = neuraminidase__InfluenzaA__ADN89658

SEQ ID NO: 19980 - protein, 470 aa, synthetic construct; identical to SEQ ID NO: 18930
  REGION 1..470: note = neuraminidase__InfluenzaA__ADN89669

SEQ ID NO: 19981 - protein, 470 aa, synthetic construct; identical to SEQ ID NO: 17461
  REGION 1..470: note = neuraminidase__InfluenzaA__ADN89680

SEQ ID NO: 19982 - protein, 470 aa, synthetic construct; identical to SEQ ID NO: 17461
  REGION 1..470: note = neuraminidase__InfluenzaA__ADN89691

SEQ ID NO: 19983 - protein, 470 aa, synthetic construct; identical to SEQ ID NO: 19959
  REGION 1..470: note = neuraminidase__InfluenzaA__ADN89702

SEQ ID NO: 19984 - protein, 470 aa, synthetic construct; identical to SEQ ID NO: 17461
  REGION 1..470: note = neuraminidase__InfluenzaA__ADN89713

SEQ ID NO: 19985 - protein, 470 aa, synthetic construct; identical to SEQ ID NO: 17461
  REGION 1..470: note = neuraminidase__InfluenzaA__ADN89724

SEQ ID NO: 19986 - protein, 470 aa, synthetic construct; identical to SEQ ID NO: 17461
  REGION 1..470: note = neuraminidase__InfluenzaA__ADN89735

SEQ ID NO: 19987 - protein, 470 aa, synthetic construct; identical to SEQ ID NO: 17461
  REGION 1..470: note = neuraminidase__InfluenzaA__ADN89746

SEQ ID NO: 19988 - protein, 470 aa, synthetic construct; identical to SEQ ID NO: 17461
  REGION 1..470: note = neuraminidase__InfluenzaA__ADN89757

SEQ ID NO: 19989 - protein, 470 aa, synthetic construct; identical to SEQ ID NO: 17461
  REGION 1..470: note = neuraminidase__InfluenzaA__ADN89768

SEQ ID NO: 19990 - protein, 470 aa, synthetic construct; identical to SEQ ID NO: 19936
  REGION 1..470: note = neuraminidase__InfluenzaA__ADN89779

SEQ ID NO: 19991 - protein, 470 aa, synthetic construct; identical to SEQ ID NO: 17461
  REGION 1..470: note = neuraminidase__InfluenzaA__ADN89790

SEQ ID NO: 19992 - protein, 470 aa, synthetic construct
  REGION 1..470: note = neuraminidase__InfluenzaA__ADN89801
MNPNQKIITIGSISIAIGTISLMLQIGNIISIWASHSIQTGSQNNTGICNQRIITYKNSTWVNHTYVNINNTNVVAGEDKTSVTLAGNSSLCSISGWAIYTKDNSIRIGSKGDVFVIREPFISCSHLECRTFFLTQGALLNDKHSNGTVKDRSPYRALMSCPLGEAPSPYNSKFESVAWSASACHDGMGWLTIGISGPDNGAVAVLKYNGIITGTIKSWKKQILRTQESECVCMNGSCFTIMTDGPSNKAASYKIFKIEKGKVTKSIELNAPNFYYEECSCYPDTGIVMCVCRDNWHGSNRPWVSFNQNLDYQIGYICSGVFGDNPRPEDGEGSCNPVTVDGANGVKGFSYKYGNGVWIGRTKSNRLRKGFEMIWDPNGWTNTDSDFSVKQDVVAITDWSGYSGSFVQHPELTGLDCIRPCFWVELVRGLPRENTTIWTSGSSISFCGVNSDTANWSWPDGAELPFTIDK

SEQ ID NO: 19993 - protein, 470 aa, synthetic construct
  REGION 1..470: note = neuraminidase__InfluenzaA__ADN89823
MNPNQKIITIGSISIAIGIISLMLQIGSIISIWASHSIHTGSQNNTGICNQRIITYENSTWVNHTYVNINNTNVVAGEDKTSVTLAGNSSLCSISGWAIYTKDNSIRIGSKGDVFVIREPFISCSHLECRTFFLTQGALLNDKHSNGTVKDRSPYRALMSCPLGEAPSPYNSKFESVAWSASACHDGMGWLTIGISGPDNGAVAVLKYNGIITGTIKSWKKQILRTQESECVCMNGSCFTIMTDGPSNKAASYKIFKIEKGKVTKSIELNAPNFYYEECSCYPDTGIVMCVCRDNWHGSNRPWVSFNQNLDYQIGYICSGVFGDNPRPEDGEGSCNPVTVDGANGVKGFSYKYGNGVWIGRTKSNRLRKGFEMIWDPNGWTNTDSDFSVKQDVVAITDWSGYSGSFVQHPELTGLDCIRPCFWVELVRGLPRENTTIWTSGSSISFCGVNSDTANWSWPDGAELPFTIDK

SEQ ID NO: 19994 - protein, 470 aa, synthetic construct; identical to SEQ ID NO: 18930
  REGION 1..470: note = neuraminidase__InfluenzaA__ADN89834

SEQ ID NO: 19995 - protein, 470 aa, synthetic construct; identical to SEQ ID NO: 19932
  REGION 1..470: note = neuraminidase__InfluenzaA__ADN89845

SEQ ID NO: 19996 - protein, 470 aa, synthetic construct; identical to SEQ ID NO: 17461
  REGION 1..470: note = neuraminidase__InfluenzaA__ADN89856

SEQ ID NO: 19997 - protein, 469 aa, synthetic construct; identical to SEQ ID NO: 19410
  REGION 1..469: note = neuraminidase__InfluenzaA__ADN89867

SEQ ID NO: 19998 - protein, 469 aa, synthetic construct; identical to SEQ ID NO: 19410
  REGION 1..469: note = neuraminidase__InfluenzaA__ADN89878

SEQ ID NO: 19999 - protein, 469 aa, synthetic construct; identical to SEQ ID NO: 19410
  REGION 1..469: note = neuraminidase__InfluenzaA__ADN89889

SEQ ID NO: 20000 - protein, 469 aa, synthetic construct; identical to SEQ ID NO: 19410
  REGION 1..469: note = neuraminidase__InfluenzaA__ADN89900

SEQ ID NO: 20001 - protein, 469 aa, synthetic construct; identical to SEQ ID NO: 19410
  REGION 1..469: note = neuraminidase__InfluenzaA__ADN89911

SEQ ID NO: 20002 - protein, 469 aa, synthetic construct
  REGION 1..469: note = neuraminidase__InfluenzaA__ADN89922
MNPNQKIITIGSVSLTISTICFFMQIAILITTVTLHFKQYKFNSPPNNQVMLCEPTIIERNITEIVYLTNTTIEKEICPKLAEYRNWSKPQCDITGFAPFSKDNSIRLSAGGDIWVTREPYVSCDPDKCYQFALGQGTTLNNVHSNNTVRDRTPYRTLLMNELGVPFHLGTKQVCIAWSSSSCHDGKAWLHVCITGDDKNATASFIYNGRLVDSVVSWSKEILRTQESECVCINGTCTVVMTDGSASGKADTKILFIEEGKIVHTSTLSGSAQHVEECSCYPRYPGVRCVCRDNWKGSNRPIVDINIKDHSIVSSYVCSGLVGDTPRKNDSSSSSHCLDPNNEEGGHGVKGWAFDDGNDVWMGRTINETSRLGYETFKVIEGWSNPKSKLQINRQVIVDRGNRSGYSGIFSVEGKSCINRCFYVELIRGRKEETEVLWTSNSIVVFCGTSGTYGTGSWPDGADLNIMPI

SEQ ID NO: 20003 - protein, 469 aa, synthetic construct; identical to SEQ ID NO: 19410
  REGION 1..469: note = neuraminidase__InfluenzaA__ADN89933

SEQ ID NO: 20004 - protein, 469 aa, synthetic construct; identical to SEQ ID NO: 19410
  REGION 1..469: note = neuraminidase__InfluenzaA__ADN89955

SEQ ID NO: 20005 - protein, 469 aa, synthetic construct; identical to SEQ ID NO: 19410
  REGION 1..469: note = neuraminidase__InfluenzaA__ADN89966

SEQ ID NO: 20006 - protein, 469 aa, synthetic construct; identical to SEQ ID NO: 19410
  REGION 1..469: note = neuraminidase__InfluenzaA__ADN89977

SEQ ID NO: 20007 - protein, 469 aa, synthetic construct; identical to SEQ ID NO: 19410
  REGION 1..469: note = neuraminidase__InfluenzaA__ADN89988

SEQ ID NO: 20008 - protein, 469 aa, synthetic construct; identical to SEQ ID NO: 19410
  REGION 1..469: note = neuraminidase__InfluenzaA__ADN89999

SEQ ID NO: 20009 - protein, 469 aa, synthetic construct; identical to SEQ ID NO: 19410
  REGION 1..469: note = neuraminidase__InfluenzaA__ADN90010

SEQ ID NO: 20010 - protein, 469 aa, synthetic construct; identical to SEQ ID NO: 19410
  REGION 1..469: note = neuraminidase__InfluenzaA__ADN90021

SEQ ID NO: 20011 - protein, 469 aa, synthetic construct; identical to SEQ ID NO: 19410
  REGION 1..469: note = neuraminidase__InfluenzaA__ADN90032

SEQ ID NO: 20012 - protein, 469 aa, synthetic construct; identical to SEQ ID NO: 19410
  REGION 1..469: note = neuraminidase__InfluenzaA__ADN90043

SEQ ID NO: 20013 - protein, 469 aa, synthetic construct; identical to SEQ ID NO: 19410
  REGION 1..469: note = neuraminidase__InfluenzaA__ADN90054

SEQ ID NO: 20014 - protein, 469 aa, synthetic construct; identical to SEQ ID NO: 19410
  REGION 1..469: note = neuraminidase__InfluenzaA__ADN90065

SEQ ID NO: 20015 - protein, 469 aa, synthetic construct; identical to SEQ ID NO: 19410
  REGION 1..469: note = neuraminidase__InfluenzaA__ADN90076

SEQ ID NO: 20016 - protein, 469 aa, synthetic construct; identical to SEQ ID NO: 19410
  REGION 1..469: note = neuraminidase__InfluenzaA__ADN90087

SEQ ID NO: 20017 - protein, 469 aa, synthetic construct; identical to SEQ ID NO: 19410
  REGION 1..469: note = neuraminidase__InfluenzaA__ADN90098

SEQ ID NO: 20018 - protein, 469 aa, synthetic construct; identical to SEQ ID NO: 19410
  REGION 1..469: note = neuraminidase__InfluenzaA__ADN90109

SEQ ID NO: 20019 - protein, 469 aa, synthetic construct; identical to SEQ ID NO: 19410
  REGION 1..469: note = neuraminidase__InfluenzaA__ADN90120

SEQ ID NO: 20020 - protein, 469 aa, synthetic construct; identical to SEQ ID NO: 19410
  REGION 1..469: note = neuraminidase__InfluenzaA__ADN90131

SEQ ID NO: 20021 - protein, 469 aa, synthetic construct; identical to SEQ ID NO: 19410
  REGION 1..469: note = neuraminidase__InfluenzaA__ADN90142

SEQ ID NO: 20022 - protein, 469 aa, synthetic construct; identical to SEQ ID NO: 19410
  REGION 1..469: note = neuraminidase__InfluenzaA__ADN90153

SEQ ID NO: 20023 - protein, 469 aa, synthetic construct; identical to SEQ ID NO: 19410
  REGION 1..469: note = neuraminidase__InfluenzaA__ADN90164

SEQ ID NO: 20024 - protein, 469 aa, synthetic construct; identical to SEQ ID NO: 19410
  REGION 1..469: note = neuraminidase__InfluenzaA__ADN90186

SEQ ID NO: 20025 - protein, 469 aa, synthetic construct; identical to SEQ ID NO: 19410
  REGION 1..469: note = neuraminidase__InfluenzaA__ADN90197

SEQ ID NO: 20026 - protein, 469 aa, synthetic construct
  REGION 1..469: note = neuraminidase__InfluenzaA__ADN90208
MNPNQKIITIGSVSLTISTICFFMQIAILITTVTLHFKQYKFNSPPNNQVMLCEPTIIERNITEIVYLTNTTIEKEICPKLAEYRNWSKPQCDITGFAPFSKDNSIRLSAGGDIWVTREPYVSCDPDKCYQFALGQGTTLNNVHSNNTVRDRTPYRTLLMNELGVPFHLGTKQVCIAWSSSSCHDGKAWLHVCITGDDKNATASFIYNGRLVDSVVSWSKEILRTQESECVCINGTCTVVMTDGSASGKADTKILFIEEGKIVHTSTLSGSAQHVEECSCYPRYPGVRCVCRDNWKGSNRPIVDINIKDHSIVSSYVCSGLVGDTPRKNDSSSSSHCLDPNNEEGGHGVKGWAFDDGNDVWMGRTINETSRLGYETFKVIEGWSNPKSKLQINRQVIVDRSNRSGYSGIFSVEGKSCINRCFYVELIRGRKEETEVLWTSNSIVVFCGTSGTYGTGSWPDGADLNLMPI

SEQ ID NO: 20027 - protein, 469 aa, synthetic construct; identical to SEQ ID NO: 19410
  REGION 1..469: note = neuraminidase__InfluenzaA__ADN90219

SEQ ID NO: 20028 - protein, 469 aa, synthetic construct
  REGION 1..469: note = neuraminidase__InfluenzaA__ADN92469
MNPNQKIITIGSVSLTISTICFFMQIAILITTVTLHFKQYEFNSPPNNQVMLCEPTIIERNITEIVYLTNTTIEKEICPKLAEYRNWSKPQCDITGFAPFSKDNSIRLSAGGDIWVTREPYVSCDPDKCYQFALGQGTTLNNVHSNNTVRDRTPYRTLLMNELGVPFHLGTKQVCIAWSSSSCHDGKAWLHVCITGDDKNATASFIYNGRLVDSVVSWSKEILRTQESECVCINGTCTVVMTDGSASEKADTKILFIEEGKIVHTSTLSGSAQHVEECSCYPRYPGVRCVCRDNWKGSNRPIVDINIKDHSIVSSYVCSGLVGDTPRKNDSSSSSHCLDPNNEEGGHGVKGWAFDDGNDVWMGRTISEKSRLGYETFKVIEGWSNPKSKLQINRQVIVDRGNRSGYSGIFSVEGKSCINRCFYVELIRGRKEETEVLWTSNSIVVFCGTSGTYGTGSWPDGADINLMPI

SEQ ID NO: 20029 - protein, 469 aa, synthetic construct; identical to SEQ ID NO: 19255
  REGION 1..469: note = neuraminidase__InfluenzaA__ADN92480

SEQ ID NO: 20030 - protein, 469 aa, synthetic construct; identical to SEQ ID NO: 19255
  REGION 1..469: note = neuraminidase__InfluenzaA__ADN92491

SEQ ID NO: 20031 - protein, 469 aa, synthetic construct
  REGION 1..469: note = neuraminidase__InfluenzaA__ADN92502
MNPNQKIITIGSVSLTISTICFFMQIAILITTVTLHFKQYEFNSPPNNQVMLCEPTIIERNITEIVYLTNTTIEKEICPKLAEYRNWSKPQCDITGFAPFSKDNSIRLSAGGDIWVTREPYVSCDPDKCYQFALGQGTTLNNVHSNNTVRDRTPYRTLLMNELGVPFHLGTKQVCIAWSSSSCHDGKAWLHVCITGDDKNATASFIYNGRLVDSVVSWSKEILRTQESECVCINGTCTVVMTDGSASGKADTKILFIEEGKIVHTSTLSGSAQHVEECSCYPRYPGVRCVCRDNWKGSNRPIVDINIKDHSIVSSYVCSGLVGDTPRKNDSSSSSHCLDPNNEEGGNGVKGWAFDDGNDVWMGRTISEKSRLGYETFKVIEGWSNPKSKLQINRQVIVDRGNRSGYSGIFSVEGKSCINRCFYVELIRGRKEENEVLWTSNSIVVFCGTSGTYGTGSWPDGADINLMPI

SEQ ID NO: 20032 - protein, 469 aa, synthetic construct; identical to SEQ ID NO: 16738
  REGION 1..469: note = neuraminidase__InfluenzaA__ADN92512

SEQ ID NO: 20033 - protein, 469 aa, synthetic construct; identical to SEQ ID NO: 16738
  REGION 1..469: note = neuraminidase__InfluenzaA__ADN92522

SEQ ID NO: 20034 - protein, 469 aa, synthetic construct; identical to SEQ ID NO: 16738
  REGION 1..469: note = neuraminidase__InfluenzaA__ADN92532

SEQ ID NO: 20035 - protein, 469 aa, synthetic construct; identical to SEQ ID NO: 16738
  REGION 1..469: note = neuraminidase__InfluenzaA__ADN92542

SEQ ID NO: 20036 - protein, 469 aa, synthetic construct; identical to SEQ ID NO: 16738
  REGION 1..469: note = neuraminidase__InfluenzaA__ADN92552

SEQ ID NO: 20037 - protein, 469 aa, synthetic construct; identical to SEQ ID NO: 16738
  REGION 1..469: note = neuraminidase__InfluenzaA__ADO00733

SEQ ID NO: 20038 - protein, 469 aa, synthetic construct
  REGION 1..469: note = neuraminidase__InfluenzaA__ADO00743
MNPNQKIITIGSVCMTIGMANLILQIGNIISIWISHSIQLGNQNQIETCNQSVITYENNTWVNQTYVNISNTNFAAGQSVVSAKLAGNSSLCPVSGWAIYSKDNSIRIGSKGDVFVIREPFISCSPLECRTFFLTQGALLNDKHSNGTIKDRSPYRTLMSCPIGEVPSPYNSRFESVAWSASACHDGINWLTIGISGPDNGAVAVLKYNGIITDTIKSWRNNILRTQESECACVNGSCFTVMTDGPSDGQASYKIFRIEKGKIVKSVEMNAPNYHYEECSCYPDSSEITCVCRDNWHGSNRPWVSFNQNLEYQIGYICSGIFGDNPRPNDKTGSCGPVSSNGANGVKGFSFKYGNGVWIGRTKSISSRNGFEMIWDPNGWTGTDNNFSIRQDIVGINEWSGYSGSFVQHPELTGLDCIRPCFWVELIRGRPKENTIWTSGSSISFCGVNSDTVGWSWPDGAELPFTIDK

SEQ ID NO: 20039 - protein, 469 aa, synthetic construct; identical to SEQ ID NO: 17915
  REGION 1..469: note = neuraminidase__InfluenzaA__ADO00753

SEQ ID NO: 20040 - protein, 469 aa, synthetic construct; identical to SEQ ID NO: 16738
  REGION 1..469: note = neuraminidase__InfluenzaA__ADO12146

SEQ ID NO: 20041 - protein, 469 aa, synthetic construct; identical to SEQ ID NO: 16738
  REGION 1..469: note = neuraminidase__InfluenzaA__ADO12156

SEQ ID NO: 20042 - protein, 469 aa, synthetic construct; identical to SEQ ID NO: 16738
  REGION 1..469: note = neuraminidase__InfluenzaA__ADO12166

SEQ ID NO: 20043 - protein, 469 aa, synthetic construct; identical to SEQ ID NO: 16738
  REGION 1..469: note = neuraminidase__InfluenzaA__ADO12176

SEQ ID NO: 20044 - protein, 469 aa, synthetic construct; identical to SEQ ID NO: 16738
  REGION 1..469: note = neuraminidase__InfluenzaA__ADO12186

SEQ ID NO: 20045 - protein, 469 aa, synthetic construct; identical to SEQ ID NO: 16738
  REGION 1..469: note = neuraminidase__InfluenzaA__ADO12196

SEQ ID NO: 20046 - protein, 469 aa, synthetic construct; identical to SEQ ID NO: 16738
  REGION 1..469: note = neuraminidase__InfluenzaA__ADO12206

SEQ ID NO: 20047 - protein, 469 aa, synthetic construct; identical to SEQ ID NO: 16738
  REGION 1..469: note = neuraminidase__InfluenzaA__ADO12216

SEQ ID NO: 20048 - protein, 469 aa, synthetic construct; identical to SEQ ID NO: 16738
  REGION 1..469: note = neuraminidase__InfluenzaA__ADO12226

SEQ ID NO: 20049 - protein, 469 aa, synthetic construct; identical to SEQ ID NO: 16738
  REGION 1..469: note = neuraminidase__InfluenzaA__ADO12246

SEQ ID NO: 20050 - protein, 469 aa, synthetic construct; identical to SEQ ID NO: 16738
  REGION 1..469: note = neuraminidase__InfluenzaA__ADO12266

SEQ ID NO: 20051 - protein, 469 aa, synthetic construct
  REGION 1..469: note = neuraminidase__InfluenzaA__ADO12276
MNPNQKIITIGSVCMTIGMANLILQIGNIISIWISHSIQLGNQNQIETCNQSVITYENNTWVNQTYVNISNTNFAAGQSVVSVKLAGNSSLCPVSGWAIYSKDNSIRIGSKGDVFVIREPFISCSPLECRTFFLTQGALLNDKHSNGTIKDRSPYRTLMSCPIGEVPSPYNSRFESVAWSASACHDGINWLTIGISGPDNGAVAVLKYNGIITDTIKSWRNNILRTQESECACVNGSCFTVMTDGPSDGQASYKIFRIEKGKIVKSVEMNAPNYHYEECSCYPDSSEITCVCRDNWHGSNRPWVSFNQNLEYQIGYICSGIFGDNPRPNDKSGSCGPVSSNGANGVKGFSFKYGNGVWIGRTKSISSRNGFEMIWDPNGWTGTDNNFSIKQDIVGINEWSGYSGSFVQHPELTGLDCIRPCFWVELIRGRPKENTIWTSGSSISFCGVNSDTVGWSWPDGAELPFTIDK

SEQ ID NO: 20052 - protein, 469 aa, synthetic construct; identical to SEQ ID NO: 16738
  REGION 1..469: note = neuraminidase__InfluenzaA__ADO12286

SEQ ID NO: 20053 - protein, 469 aa, synthetic construct; identical to SEQ ID NO: 16738
  REGION 1..469: note = neuraminidase__InfluenzaA__ADO12296

SEQ ID NO: 20054 - protein, 469 aa, synthetic construct; identical to SEQ ID NO: 16738
  REGION 1..469: note = neuraminidase__InfluenzaA__ADO12306

SEQ ID NO: 20055 - protein, 469 aa, synthetic construct
  REGION 1..469: note = neuraminidase__InfluenzaA__ADO12316
MNPNQKIITIGSVCMTIGMANLILQIGNIISIWISHSIQLGNQNQIETCNQSVITYENNTWVNQTYVNISNTNFAAGQSVVSVKLAGNSSLCPVSGWAIYSKDNSIRIGSKGDVFVIREPFISCSPLECRTFFLTQGALLNDKHSNGTIKDRSPYRTLMSCPIGEVPSPYNSRFESVAWSASACHDGINWLTIGISGPDNGAVAVLKYNGIITDTIKSWRNNILRTQESECACVNGSCFTVMTDGPSDGQASYKIFRIEKGKIVKSVEMNAPNYHYEECSCYPDSSEITCVCRDNWHGSNRPWVSFNQNLEYQIGYICSGIFGDNPRPNDKTGSCGPVSSNGANGVKGFSFKYGDGVWIGRTKSISSRNGFEMIWDPNGWTGTDNNFSIKQDIVGINEWSGYSGSFVQHPELTGLDCIRPCFWVELIRGRPKENTIWTSGSSISFCGVNSDTVGWSWPDGAELPFTIDK

SEQ ID NO: 20056 - protein, 469 aa, synthetic construct; identical to SEQ ID NO: 16738
  REGION 1..469: note = neuraminidase__InfluenzaA__ADO12326

SEQ ID NO: 20057 - protein, 469 aa, synthetic construct; identical to SEQ ID NO: 16738
  REGION 1..469: note = neuraminidase__InfluenzaA__ADO12336

SEQ ID NO: 20058 - protein, 469 aa, synthetic construct; identical to SEQ ID NO: 16738
  REGION 1..469: note = neuraminidase__InfluenzaA__ADO12346

SEQ ID NO: 20059 - protein, 469 aa, synthetic construct; identical to SEQ ID NO: 16738
  REGION 1..469: note = neuraminidase__InfluenzaA__ADO12356

SEQ ID NO: 20060 - protein, 469 aa, synthetic construct; identical to SEQ ID NO: 16738
  REGION 1..469: note = neuraminidase__InfluenzaA__ADO12366

SEQ ID NO: 20061 - protein, 469 aa, synthetic construct; identical to SEQ ID NO: 16738
  REGION 1..469: note = neuraminidase__InfluenzaA__ADO12376

SEQ ID NO: 20062 - protein, 469 aa, synthetic construct; identical to SEQ ID NO: 16738
  REGION 1..469: note = neuraminidase__InfluenzaA__ADO12386

SEQ ID NO: 20063 - protein, 469 aa, synthetic construct; identical to SEQ ID NO: 16738
  REGION 1..469: note = neuraminidase__InfluenzaA__ADO12396

SEQ ID NO: 20064 - protein, 469 aa, synthetic construct; identical to SEQ ID NO: 16738
  REGION 1..469: note = neuraminidase__InfluenzaA__ADO12406

SEQ ID NO: 20065 - protein, 469 aa, synthetic construct; identical to SEQ ID NO: 17505
  REGION 1..469: note = neuraminidase__InfluenzaA__ADO12416

SEQ ID NO: 20066 - protein, 469 aa, synthetic construct; identical to SEQ ID NO: 16738
  REGION 1..469: note = neuraminidase__InfluenzaA__ADO12426

SEQ ID NO: 20067 - protein, 469 aa, synthetic construct; identical to SEQ ID NO: 16738
  REGION 1..469: note = neuraminidase__InfluenzaA__ADO12436

SEQ ID NO: 20068 - protein, 469 aa, synthetic construct; identical to SEQ ID NO: 16738
  REGION 1..469: note = neuraminidase__InfluenzaA__ADO12446

SEQ ID NO: 20069 - protein, 469 aa, synthetic construct; identical to SEQ ID NO: 16738
  REGION 1..469: note = neuraminidase__InfluenzaA__ADO12456

SEQ ID NO: 20070 - protein, 469 aa, synthetic construct; identical to SEQ ID NO: 16738
  REGION 1..469: note = neuraminidase__InfluenzaA__ADO12466

SEQ ID NO: 20071 - protein, 469 aa, synthetic construct; identical to SEQ ID NO: 16738
  REGION 1..469: note = neuraminidase__InfluenzaA__ADO12476

SEQ ID NO: 20072 - protein, 469 aa, synthetic construct; identical to SEQ ID NO: 16738
  REGION 1..469: note = neuraminidase__InfluenzaA__ADO12486

SEQ ID NO: 20073 - protein, 469 aa, synthetic construct; identical to SEQ ID NO: 16738
  REGION 1..469: note = neuraminidase__InfluenzaA__ADO12496

SEQ ID NO: 20074 - protein, 469 aa, synthetic construct; identical to SEQ ID NO: 16738
  REGION 1..469: note = neuraminidase__InfluenzaA__ADO12506

SEQ ID NO: 20075 - protein, 469 aa, synthetic construct; identical to SEQ ID NO: 16738
  REGION 1..469: note = neuraminidase__InfluenzaA__ADO12516

SEQ ID NO: 20076 - protein, 469 aa, synthetic construct; identical to SEQ ID NO: 16738
  REGION 1..469: note = neuraminidase__InfluenzaA__ADO12526

SEQ ID NO: 20077 - protein, 469 aa, synthetic construct; identical to SEQ ID NO: 16738
  REGION 1..469: note = neuraminidase__InfluenzaA__ADO12536

SEQ ID NO: 20078 - protein, 469 aa, synthetic construct; identical to SEQ ID NO: 16738
  REGION 1..469: note = neuraminidase__InfluenzaA__ADO12546

SEQ ID NO: 20079 - protein, 469 aa, synthetic construct; identical to SEQ ID NO: 16738
  REGION 1..469: note = neuraminidase__InfluenzaA__ADO12556

SEQ ID NO: 20080 - protein, 469 aa, synthetic construct; identical to SEQ ID NO: 16738
  REGION 1..469: note = neuraminidase__InfluenzaA__ADO12566

SEQ ID NO: 20081 - protein, 469 aa, synthetic construct; identical to SEQ ID NO: 16738
  REGION 1..469: note = neuraminidase__InfluenzaA__ADO12576

SEQ ID NO: 20082 - protein, 469 aa, synthetic construct
  REGION 1..469: note = neuraminidase__InfluenzaA__ADO12586
MNPNQKIITIGSVCMTIGMANLILQIGNIISIWISHSIQLGNQNQIETCNQSVITYENNTWVNQTYVNISNTNFAAGQSVVSVKLAGNSSLCPVSGWAIYSKDNSIRIGSKGDVFVIREPFISCSPLECRTFFLTQGALLNDKHSNGTIKDRSPYRTLMSCPIGEVPSPYNSRFESVAWSASACHDGINWLTIGISGPDSGAVAVLKYNGIITDTIKSWRNNILRTQESECACVNGSCFTVMTDGPSDGQASYKIFRIEKGKIVKSVEMNAPNYHYEECSCYPDSSEITCVCRDNWHGSNRPWVSFNQNLEYQIGYICSGIFGDNPRPNDKTGSCGPVSSNGANGVKGFSFKYGNGVWIGRTKSISSRNGFEMIWDPNGWTGTDNNFSIKQDIVGINEWSGYSGSFVQHPELTGLDCIRPCFWVELIRGRPKENTIWTSGSSISFCGVNSDTVGWSWPDGAELPFTIDK

SEQ ID NO: 20083 - protein, 469 aa, synthetic construct; identical to SEQ ID NO: 20082
  REGION 1..469: note = neuraminidase__InfluenzaA__ADO12596

SEQ ID NO: 20084 - protein, 469 aa, synthetic construct; identical to SEQ ID NO: 16738
  REGION 1..469: note = neuraminidase__InfluenzaA__ADO12606

SEQ ID NO: 20085 - protein, 469 aa, synthetic construct; identical to SEQ ID NO: 16738
  REGION 1..469: note = neuraminidase__InfluenzaA__ADO12616

SEQ ID NO: 20086 - protein, 469 aa, synthetic construct; identical to SEQ ID NO: 16738
  REGION 1..469: note = neuraminidase__InfluenzaA__ADO12626

SEQ ID NO: 20087 - protein, 469 aa, synthetic construct; identical to SEQ ID NO: 16738
  REGION 1..469: note = neuraminidase__InfluenzaA__ADO14355

SEQ ID NO: 20088 - protein, 466 aa, synthetic construct
  REGION 1..466: note = neuraminidase__InfluenzaA__ADO21028
MNPNQKIIAIGSVSLTIATICFLMQIAILATTMTLHFKQNECSNPSNNQVVPCEPTIIERNIVHLNSTTIEKEICPKVAEYKNWSKPQCQITGSAPFSKGNSIRLSAGGDIWVTREPYVSCSLGKCYQFALGQGTTLKNKHSNGTTHDRVPHRTLLMSELGVPFHLGTKQVCIAWSSSSCHDGKAWLHVCVTGDDKNATASIIYDGMLVDSIGSWSKNILRTQESECVCINGTCTVVMTDGSASGKADTRILFIREGKIVHISPLSGSAQHVEECSCYPRYPEVRCVCRDNWKGSNRPVLYINMADYSIESSYVCSGLVGDTPRNDDSYSSSNCRDPNNERGAPGVKGWAFDNGNDIWMGRTIKEDSRSGYETFRVVGGWTTANSKSQINRQVIVDSDNWSGYSGIFSVEGKNCINRCFYVELIRGRPQETRVWWTSNSIIVFCGTSGTYGTGSWPDGANINFMPI

SEQ ID NO: 20089 - protein, 466 aa, synthetic construct
  REGION 1..466: note = neuraminidase__InfluenzaA__ADO21039
MNPNQKIIAIGSVSLTIATICFLMQIAILATTMTLHFKQNECSNPSNNQVVPCEPTIIERNIVHLNSTTIEKEICPKVAEYKNWSKPQCQITGSAPFSKGNSIRLSAGGDIWVTREPYVSCSLGKCYQFALGQGTTLKNKHSNGTTHDRDPHRTLLMSELGVPFHLGTKQVCIAWSSSSCHDGKAWLHVCVTGDDKNATASIIYDGMLVDSIGSWSKNILRTQESECVCINGTCTVVMTDGSASGKADTRILFIREGKIVHISPLSGSAQHVEECSCYPRYPEVRCVCRDNWKGSNRPVLYINMADYTIESSYVCSGLVGDTPRNDDSYSSSNCRDPNNERGAPGVKGWAFDNGNDIWMGRTIKEDSRSGYETFRVVGGWTTANSKSQINRQVIVDSDNWSGYSGIFSVEGKNCINRCFYVELIRGRPQETRVWWTSNSIIVFCGTSGTYGTGSWPDGANINFMPI

SEQ ID NO: 20090 - protein, 466 aa, synthetic construct
  REGION 1..466: note = neuraminidase__InfluenzaA__ADO21050
MNPNQKIIAIGSVSLTIATICFLMQIAILATTMTLHFKQNECSNPSNNQVVPCEPTIIERNIVHLNSTTIEKEICPKVAEYKNWSKPQCQITGSAPFSKGNSIRLSAGGDIWVTREPYVSCSLGKCYQFALGQGTTLKNKHSNGTTHDRGPHRTLLMSELGVPFHLGTKQVCIAWSSSSCHDGKAWLHVCVTGDDKNATASIIYDGMLVDSIGSWSKNILRTQESECVCINGTCTVVMTDGSASGKADTRILFIREGKIVHISPLSGSAQHVEECSCYPRYPEVRCVCRDNWKGSNRPVLYINMADYSIESSYVCSGLVGDTPRNDDSYSSSNCRDPNNESGAPGVKGWAFDNGNDIWMGRTIKEDSRSGYETFRVVGGWTTANSKSQINRQVIVDSDNWSGYSGIFSVEGKNCINRCFYVELIRGRPQETRVWWTSNSIIVFCGTSGTYGTGSWPDGANINFMPI

SEQ ID NO: 20091 - protein, 469 aa, synthetic construct
  REGION 1..469: note = neuraminidase__InfluenzaA__ADO25095
MNPNQKIITIGSVCMTIGMANLILQIGNIISIWISHSIQLGNQNQIETCNQSIITYENNTWVNQTYVNISNTNFAAGQSVVSVKLAGNSSLCPVSGWAIYSKDNSIRIGSKGDVFVIREPFISCSPLECRTFFLTQGALLNDKHSNGTIKDRSPYRTLMSCPIGEVPSPYNSRFESVAWSASACHDGINWLTIGISGPDNGAVAVLKYNGIITDTIKSWRNNILRTQESECACVNGSCFTVMTDGPSDGQASYKIFRIEKGKIVKSVEMNAPNYHYEECSCYPDSSEITCVCRDNWHGSNRPWVSFNQNLEYQIGYICSGIFGDNPRPNDKTGSCGPVSSNGANGVKGFSFKYGNGVWIGRTKSISSRSGFEMIWDPNGWTGTDNNFSIKQDIVGINEWSGYSGSFVQHPELTGLDCIRPCFWVELIRGRPKENTIWTSGSSISFCGVNSDTVGWSWPDGAELPFTIDK

SEQ ID NO: 20092 - protein, 469 aa, synthetic construct
  REGION 1..469: note = neuraminidase__InfluenzaA__ADO25105
MNPNQKIITIGSVCMTIGMANLILQIGNIISIWISHSIQLGNQNQIGTCNQSVITYETNTWVNQTYVNISNTNFAAGQSVVSVKLAGNSSLCPVSGWAIYSKDNSIRIGSKGDVFVIREPFISCSPLECRTFFLTQGALLNDKHSNGTIKDRSPYRTLMSCPIGEVPSPYNSRFESVAWSASACHDGINWLTIGISGPDNGAVAVLKYNGIITDTIKSWRNNILRTQESECACVNGSCFTVMTDGPSDRQASYKIFRIEKGKIVKSVEMNAPNYHYEECSCYPDSSEITCVCRDNWHGSNRPWVSFNQNLEYQIGYICSGIFGDNPRPNDKTGSCGPVSSNGANGVKGFSFKYGNGVWIGRTKSISSRNGFEMIWDPNGWTGTDNNFSIKQDIVGINEWSGYSGSFVQHPELTGLDCIRPCFWVELIRGRPKENTIWTSGSSISFCGVNSDTVGWSWPDGAELPFTIDK

SEQ ID NO: 20093 - protein, 469 aa, synthetic construct; identical to SEQ ID NO: 18519
  REGION 1..469: note = neuraminidase__InfluenzaA__ADO25115

SEQ ID NO: 20094 - protein, 469 aa, synthetic construct; identical to SEQ ID NO: 18519
  REGION 1..469: note = neuraminidase__InfluenzaA__ADO25125

SEQ ID NO: 20095 - protein, 469 aa, synthetic construct
  REGION 1..469: note = neuraminidase__InfluenzaA__ADO25135
MNPNQKIITIGSVCMTIGMANLVLQIGNIISIWISHSIQLGNQNQIETCNQSVITYENNTWVNQTYVNISNTNFAAGQSVVSVKLAGNSSLCPVSGWAIYSKDNSIRIGSKGDVFVIREPFISCSPLECRTFFLTQGALLNDKHSNGTIKDRSPYRTLMSCPIGEVPSPYNSRFESVAWSASACHDGINWLTIGISGPDNGAVAVLKYNGIITDTIKSWRNNILRTQESECACVNGSCFTVMTDGPSDGQASYKIFRIEKGKIVKSVEMNAPNYHYEECSCYPDSSEITCVCRDNWHGSNRPWVSFNQNLEYQIGYICSGIFGDNPRPNDKTGSCGPVSSNGANGVKGFSFKYGNGVWIGRTKSISSRNGFEMIWDPNGWTGTDNNFSIKQDIVGINEWSGYSGSFVQHPELTGLDCIRPCFWVELIRGRPKENTIWTSGSSISFCGVNSDTVGWSWPDGAELPFTIDK

SEQ ID NO: 20096 - protein, 469 aa, synthetic construct; identical to SEQ ID NO: 18089
  REGION 1..469: note = neuraminidase__InfluenzaA__ADO25145

SEQ ID NO: 20097 - protein, 469 aa, synthetic construct; identical to SEQ ID NO: 16738
  REGION 1..469: note = neuraminidase__InfluenzaA__ADO25155

SEQ ID NO: 20098 - protein, 469 aa, synthetic construct; identical to SEQ ID NO: 16738
  REGION 1..469: note = neuraminidase__InfluenzaA__ADO25165

SEQ ID NO: 20099 - protein, 469 aa, synthetic construct; identical to SEQ ID NO: 16738
  REGION 1..469: note = neuraminidase__InfluenzaA__ADO25175

SEQ ID NO: 20100 - protein, 469 aa, synthetic construct
  REGION 1..469: note = neuraminidase__InfluenzaA__ADO25185
MNPNQKIITIGSVCMTIGMANLILQIGNIISIWISHSIQLGNQNQIETCNQSVITYENNTWVNQTYVNISNTNFAAGQSVVSVKLAGNSSLCPVSGWAIYSKDNSIRIGSKGDVFVIREPFISCSPLECRTFFLTQGALLNDKHSNGTIKDRSPYRTLMSCPIGEVPSPYNSRFESVAWSASACHDGINWLTIGISGPDNGAVAVLKYNGIITDTIKSWRNNILRTQESECACVNGSCFTVMTDGPSDGQASYKIFRIEKGKIVKSVEMNAPNYHYEECSCYPDSSEITCVCRDNWHGSNRPWVSFNQNLEYQIGYICSGIFGDNPRPNDKTGSCGPVSSNGANGVKGFSFKYGNGVWIGRTKSMSSRNGFEMIWDPNGWTGTDNNFSIKQDIVGINEWSGYSGSFVQHPELTGLDCIRPCFWVELIRGRPKENTIWTSGSSISFCGVNSDTVGWSWPDGAELPFTIDK

SEQ ID NO: 20101 - protein, 469 aa, synthetic construct; identical to SEQ ID NO: 19167
  REGION 1..469: note = neuraminidase__InfluenzaA__ADO25195

SEQ ID NO: 20102 - protein, 469 aa, synthetic construct; identical to SEQ ID NO: 17875
  REGION 1..469: note = neuraminidase__InfluenzaA__ADO25205

SEQ ID NO: 20103 - protein, 469 aa, synthetic construct; identical to SEQ ID NO: 18089
  REGION 1..469: note = neuraminidase__InfluenzaA__ADO25215

SEQ ID NO: 20104 - protein, 469 aa, synthetic construct; identical to SEQ ID NO: 16738
  REGION 1..469: note = neuraminidase__InfluenzaA__ADO25225

SEQ ID NO: 20105 - protein, 469 aa, synthetic construct; identical to SEQ ID NO: 18089
  REGION 1..469: note = neuraminidase__InfluenzaA__ADO25235

SEQ ID NO: 20106 - protein, 469 aa, synthetic construct; identical to SEQ ID NO: 16738
  REGION 1..469: note = neuraminidase__InfluenzaA__ADO25245

SEQ ID NO: 20107 - protein, 469 aa, synthetic construct; identical to SEQ ID NO: 16738
  REGION 1..469: note = neuraminidase__InfluenzaA__ADO25255

SEQ ID NO: 20108 - protein, 469 aa, synthetic construct; identical to SEQ ID NO: 18519
  REGION 1..469: note = neuraminidase__InfluenzaA__ADO25265

SEQ ID NO: 20109 - protein, 469 aa, synthetic construct; identical to SEQ ID NO: 18330
  REGION 1..469: note = neuraminidase__InfluenzaA__ADO25275

SEQ ID NO: 20110 - protein, 469 aa, synthetic construct; identical to SEQ ID NO: 18089
  REGION 1..469: note = neuraminidase__InfluenzaA__ADO25285

SEQ ID NO: 20111 - protein, 470 aa, synthetic construct
  REGION 1..470: note = neuraminidase__InfluenzaA__ADO27623
MNPNQKIITIGSISIAIGIISLMLQIGNIISIWASHSIQTGSQNNTGICNQRIITYENSTWVNHTYVNINNTNVAAGEDKTSVTLAGNSSLCSISGWAIYTKDNSIRIGSKGDVFVIREPFISCSHLECRTFFLTQGALLNDKHSNGTVKDRSPYRALMSCPLGEAPSPYNSKFESVAWSASACHDGMGWLTIGISGPDNGAVAVLKYNGIITGTIKSWKKQILRTQESECVCMNGSCFTIMTDGPSNKAASYKIFKIEKGKVTKSIELNAPNFYYEECSCYPDTGIVMCVCRDNWHGSNRPWVSFNQNLDYQIGYICSGVFGDNPRPEDGEGSCNPVTVDGANGVKGFSYKYGNGVWIGRTKSNRLRKGFEMIWDPNGWTNTDSDFSVKQDVVAITDWSGYSGSFVQHPELTGLDCIRPCFWVELVRGLPRENTTIWTSGSSISFCGVNSDTANWSWPDGAELPFTIDK

SEQ ID NO: 20112 - protein, 469 aa, synthetic construct; identical to SEQ ID NO: 16738
  REGION 1..469: note = neuraminidase__InfluenzaA__ADO30410

SEQ ID NO: 20113 - protein, 469 aa, synthetic construct; identical to SEQ ID NO: 18089
  REGION 1..469: note = neuraminidase__InfluenzaA__ADO30420

SEQ ID NO: 20114 - protein, 469 aa, synthetic construct; identical to SEQ ID NO: 17446
  REGION 1..469: note = neuraminidase__InfluenzaA__ADP95343

SEQ ID NO: 20115 - protein, 469 aa, synthetic construct; identical to SEQ ID NO: 16728
  REGION 1..469: note = neuraminidase__InfluenzaA__ADP95353

SEQ ID NO: 20116 - protein, 469 aa, synthetic construct; identical to SEQ ID NO: 16728
  REGION 1..469: note = neuraminidase__InfluenzaA__ADP95363

SEQ ID NO: 20117 - protein, 469 aa, synthetic construct; identical to SEQ ID NO: 16728
  REGION 1..469: note = neuraminidase__InfluenzaA__ADP95373

SEQ ID NO: 20118 - protein, 469 aa, synthetic construct; identical to SEQ ID NO: 16728
  REGION 1..469: note = neuraminidase__InfluenzaA__ADP95383

SEQ ID NO: 20119 - protein, 469 aa, synthetic construct; identical to SEQ ID NO: 16728
  REGION 1..469: note = neuraminidase__InfluenzaA__ADP95393

SEQ ID NO: 20120 - protein, 469 aa, synthetic construct
  REGION 1..469: note = neuraminidase__InfluenzaA__ADQ43774
MNPNQKIITIGSGCMTIGMANLILQIGNIISIWISHSIQLGNQNQIETCNQSVITYENNTWVNQTYVNISNTNFAAGQSVVSVKLAGNSSLCPVSGWAIYSKDNSIRIGSKGDVFVIREPFISCSPLECRTFFLTQGALLNDKHSNGTIKDRSPYRTLMSCPIGEVPSPYNSRFESVAWSASACHDGINWLTIGISGPDNGAVAVLKYNGIITDTIKSWRNNILRTQESECACVNGSCFTVMTDGPSDGQASYKIFRIEKGKIVKSVEMKAPNYHYEECSCYPDSSEITCVCRDNWHGSNRPWVSFNQNLEYQIGYICSGIFGDNPRPNDKTGSCGPVSSNGANGVKGFSFKYGNGVWIGRTKSISSRNGFEMIWDPNGWTGTDNNFSIKQDIVGINEWSGYSGSFVQHPELTGLDCIRPCFWVELIRGRPKENTIWTSGSSISFCGVNSDTVGWSWPDGAELPFTIDK

SEQ ID NO: 20121 - protein, 469 aa, synthetic construct
  REGION 1..469: note = neuraminidase__InfluenzaA__ADQ92578
MNPNQKIITIGSVSLTISTICFFMQIAILITTVTLHFKQYEFNSPPNNQVILCEPTIIERNITEIVYLTNATIEKEICPKLAEYRNWSKPQCDITGFAPFSKDNSIRLSAGGDIWVTREPYVSCDPDKCYQFALGQGTTLNNVHSNNTVRDRTPYRTLLMNELGVPFHLGTKQVCIAWSSSSCHDGKAWLHVCITGDDKNATASFIYNGRLVDSVVSWSKEILRTQESECVCINGTCTVVMTDGSASGKADTKILFIEEGKIVHTSTLSGSAQHVEECSCYPRYPGVRCVCRDNWKGSNRPIVDINIKDHSIVSSYVCSGLVGDTPRKNDSSSSSHCLDPNNEEGGHGVKGWAFDDGNDVWMGRTISEKSRLGYETFKVIEGWSNPKSKLQINRQVIVDRGNRSGYSGIFSVEGKSCINRCFYVELIRGRKEETEVLWTSNSIVVFCGTSGTYGTGSWPDGADINLMPI

SEQ ID NO: 20122 - protein, 469 aa, synthetic construct; identical to SEQ ID NO: 16599
  REGION 1..469: note = neuraminidase__InfluenzaA__ADR32364

SEQ ID NO: 20123 - protein, 469 aa, synthetic construct
  REGION 1..469: note = neuraminidase__InfluenzaA__ADT64478
MNPNQKIITIGSVCMTIGMANLILQIGNIISIWIGHSIQLGNQNQIETCNQSVITYENNTWVNQTYVNISNTNFAAGQSVVSVKLAGNSSLCPVSGWAIYSKDNSVRIGSKGDVFVIREPFISCSPLECRTFFLTQGALLNDKHSNGTIKDRSPYRTLMSCPIGEVPSPYNSRFESVAWSASACHDGINWLTIGISGPDNGAVAVLKYNGIITDTIKSWRNNILRTQESECACVNGSCFTVMTDGPSNGQASYKIFRIEKGKIVKSVEMNAPNYHYEECSCYPDSSEITCVCRDNWHGSNRPWVSFNQNLEYQIGYICSGIFGDNPRPNDKTGSCGPVSSNGANGVKGFSFKYGNGVWIGRTKSISSRNGFEMIWDPNGWTGTDNNFSIKQDIVGINEWSGYSGSFVQHPELTGLDCIRPCFWVELIRGRPKENTIWTSGSSISFCGVNSDTVGWSWPDGAELPFTIDK

SEQ ID NO: 20124 - protein, 469 aa, synthetic construct
  REGION 1..469: note = neuraminidase__InfluenzaA__ADT78889
MNPNQKIITIGSVSLTIATVCFLMQIAILVTTVTLHFKQHECDSPASNQVMPCEPIIIERNITEIVYLNNTTIEKEICPKVVEYRNWSKPQCQITGFAPFSKDNSIRLSAGGDIWVTREPYVSCDPGKCYQFALGQGTTLDNKHSNDTIHDRIPHRTLLMNELGVPFHLGTRQVCVAWSSSSCHDGKAWLHVCVTGDDKNATASFIYDGRLVDSIGSWSQNILRTQESECVCINGTCTVVMTDGSASGRADTRILFIEEGKIVHISPLSGSAQHVEECSCYPRYPDVRCICRDNWKGSNRPVIDINMEDYSIDSSYVCSGLVGDTPRNDDRSSNSNCRDPNNERGNPGVKGWAFDNGDDVWMGRTISKDLRSGYETFKVIGGWSTPNSKSQINRQVIVDSNNWSGYSGIFSVEGKSCINRCFYVELIRGRQQETRVWWTSNSIVVFCGTSGTYGTGSWPDGANISFMPI

SEQ ID NO: 20125 - protein, 469 aa, synthetic construct
  REGION 1..469: note = neuraminidase__InfluenzaA__ADT78899
MNPNQKIITIGSVSLTIATVCFLMQIAILATTVTLHFKQHECDSPASNQVMPCEPIIIERNITEIVYLNNTTIEKEICPEVVEYRNWSKPQCQITGFAPFSKDNSIRLSAGGDIWVMREPYVSCNPGKCYQFALGQGTTLDNKHSNGTIHDRIPHRTLLMNELGVPFHLGTKQVCVAWSSSSCHDGKAWLHVCVTGDDRNATASFIYDGRLVDSIGSWSQNILRTQESECVCINGTCTVVMTDGSASGRADTRILFIKEGKIVHISPLSGSAQHIEECSCYPRYPDVRCICRDNWKGSNRPVIDINMEDYSIDSSYVCSGLVGDTPRNDDSSSNSNCRDPNNERGNPGVKGWAFDNGDDVWMGRTISKDLRSGYETFKVIGGWSTPNSKSQVNRQVIVDNNNWSGYSGIFSVEGKSCINRCFYVELIRGRPQETRVWWTSSSIVVFCGTSGTYGTGSWPDGANINFMPI

SEQ ID NO: 20126 - protein, 469 aa, synthetic construct
  REGION 1..469: note = neuraminidase__InfluenzaA__ADT78963
MNPNQKIITIGSVSLTIATVCFLMQIAILATTVTLHFKQHECDSPASNQVMPCEPIIIERNITEIVYLNNTTIEKEICPEVVEYRNWSKPQCQITGFAPFSKDNSIRLSAGGDIWVTREPYVSCDPGKCYQFALGQGTTLDNKHSNDTIHDRIPHRTLLMNELGVPFHLGTRQVCVAWSSSSCHDGKAWLHVCVTGDDRNATASFIYDGRLVDSIGSWSQNILRTQESECVCINGTCTVVMTDGSASGRADTRILFIKEGKIVHISPLSGSAQHVEECSCYPRYPDVRCICRDNWKGSNRPVIDINMEDYSIDSSYVCSGLVGDTPRNDDRSSNSNCRDPNNERGNPGVKGWAFDNGNDVWMGRTISKDLRSGYETFKVIGGWSTPNSKSQVNRQVIVDNNNWSGYSGIFSVEGKSCINRCFYVELIRGRQQETRVWWTSNSIVVFCGTSGTYGTGSWPDGANINFMPI

SEQ ID NO: 20127 - protein, 469 aa, synthetic construct
  REGION 1..469: note = neuraminidase__InfluenzaA__ADT79001
MNPNQKIITIGSISLTIATICFLMQIAILVTTVTLHFKQYECDSPANNQVMPCEPIIIERNITEIVYLTNTTIEKEICPKLVEYRNWSKPQCKITGFAPFSKDNSIRLSAGGDIWVTREPYVSCDPGKCYQFALGQGTTLDNKHSNDTIHDRIPHRTLLMNELGVPFHLGTRQVCIAWSSSSCHDGKAWLHVCVTGDDKNATASFIYDGRLVDSIGSWSQNILRTQESECVCINGTCTVVMTDGSASGKADTRILFIEEGKIVHISPLSGSAQHVEECSCYPRYPGVRCICRDNWKGSNRPVVDINVKDYSIDSSYVCSGLVGDTPRNNDRSSSSYCRNPNNERGNHGVKGWAFDDGNDVWMGRTISKDSRSGYETFKVIGGWSTPNSKSQINRQVIVDSDNRSGYSGIFSVEGKSCINRCFYVELIRGREQETRVWWTSNSIVVFCGTSGTYGTGSWPDGADINLMPI

SEQ ID NO: 20128 - protein, 469 aa, synthetic construct; identical to SEQ ID NO: 14118
  REGION 1..469: note = neuraminidase__InfluenzaA__ADT79021

SEQ ID NO: 20129 - protein, 469 aa, synthetic construct
  REGION 1..469: note = neuraminidase__InfluenzaA__ADT79041
MNPNQKIITIGSVSLTIATVCFLMQIAILVTTVTLHFRQYECDSPANNQVMPCEPIIIERNITEIVYLNNTTIEKEICPKLVEYRNWSKPQCKITGFAPFSKDNSIRLSAGGDIWVTREPYVSCDPGKCYQFALGQGTTLDNKHSNDTIHDRIPHRTLLMNELGVPFHLGTRQVCIAWSSSSCHDGKAWLHVCVTGDDKNATASFIYDGRLVDSIGSWSQNILRTQESECVCINGTCTVVMTDGSASGRADTKILFIEEGKIVHISPLSGSAQHVEECSCYPRYPGVRCICRDNWKGSNRPVVDINVEDYSIDSSYVCSGLVGDTPRNNDRSSNSNCRNPNNERGNHGVKGWAFDDGNDVWMGRTISKDLRSGYETFKVIGGWSTPNSKSQINRQVIVDSDNRSGYSGIFSVEGKSCINRCFYVELIRGREQETRVWWTSNSIVVFCGTSGTYGTGSWPDGADINLMPI

SEQ ID NO: 20130 - protein, 469 aa, synthetic construct; identical to SEQ ID NO: 15760
  REGION 1..469: note = neuraminidase__InfluenzaA__ADT79121

SEQ ID NO: 20131 - protein, 469 aa, synthetic construct
  REGION 1..469: note = neuraminidase__InfluenzaA__ADT79131
MNPNQKIITIGSVSLTIATVCFLMQIAILATTVTLHFKQHECDSPASNQVMPCEPIIIERNITEIVYLNNTTIEKEICPEVVEYRNWSKPQCQITGFAPFSKDNSIRLSAGGDIWVTREPYVSCDPGKCYQFALGQGTTLDNKHSNGTIHDRIPHRTLLMNELGVPFHLGTKQVCVAWSSSSCHDGKAWLHVCVTGDDRNATASFIYDGRLEDSIGSWSQNILRTQESECVCINGTCTVVMTDGSASGRADTRILFIKEGKIVHISPLSGSAQHIEECSCYPRYPDVRCICRDNWKGSNRPVLDISMEDYSIDSSYVCSGLVGDTPRNDDSSSNSNCRDPNNERGNPGVKGWAFDNGDDVWMGRTISKDLRSGYETFKVIGGWSTPNSKSQVNRQVIVDNNNWSGYSGIFSVEGKSCINRCFYVELIRGRSQETRVWWTSNSIVVFCGTSGTYGTGSWPDGANINFMPI

SEQ ID NO: 20132 - protein, 469 aa, synthetic construct; identical to SEQ ID NO: 16738
  REGION 1..469: note = neuraminidase__InfluenzaA__ADT79234

SEQ ID NO: 20133 - protein, 469 aa, synthetic construct; identical to SEQ ID NO: 16728
  REGION 1..469: note = neuraminidase__InfluenzaA__ADT79244

SEQ ID NO: 20134 - protein, 469 aa, synthetic construct
  REGION 1..469: note = neuraminidase__InfluenzaA__ADU25480
MNPNQKIIIISSICLINGITSLILQIGNIISIWISHSIQIGNQNQTETCSQNIITYENNTWVNQTYVNISNNNFVAEQAVVSMKLAGSSPLCPVSGWAIYSKDNSVRIGSKGDVFVIREPFISCSHLECRTFFLTQGALLNDKHSNGTIKDRSPYRTLMSCPIGEVPSPYNSRFESVAWSASACHDGTSWLTIGISGPDNGAVAVLKYNDIITDTIKSWRNNILRTQESECVCVNGSCFTVMTDGPSNGQASYKIFKIEKGKVVKSVELNAPNYHYEECSCYPDSGEIICVCRDNWHGSNRPWVSFNQNLEYQIGYICSGILGDNPRPNDRTGSCGPVSLNGANGVKGFSFKYGNGVWIGRTKSSSSRSGFEMIWDPNGWTETDNNFLVKQDIVGMTDWSGYSGSFVQHPELTGMNCMRPCFWVELIRGRPKENTIWTSGSSISFCGVNSDTVDWSWPDGAELPFTIDK

SEQ ID NO: 20135 - protein, 469 aa, synthetic construct; identical to SEQ ID NO: 16738
  REGION 1..469: note = neuraminidase__InfluenzaA__ADU59780

SEQ ID NO: 20136 - protein, 469 aa, synthetic construct
  REGION 1..469: note = neuraminidase__InfluenzaA__ADU59789
MNPNQKIITIGSVCMTIGMANLILQIGNIISIWISHSIQLGNQNQIETCNQSVITYENNTWVNQTYVNVSNTNFAAGQSVVSVKLAGNSSLCPVSGWAIYSKDNSIRIGSKGDVFVIREPFISCSPLECRTFFLTQGALLNDKHSNGTIKDRSPYRTLMSCPIGEVPSPYNSRFESVAWSASACHDGINWLTIGISGPDNGAVAVLKYNGIITDTIKSWRNNILRTQESECACVNGSCFTVMTDGPSDGQASYKIFRIEKGKIVKSVEMNAPNYHYEECSCYPDSSEITCVCRDNWHGSNRPWVSFNQNLEYQIGYICSGIFGDNPRPNDKTGSCGPVSSNGANGVKGFSFKYGNGVWIGRTKSISSRNGFEMIWDPNGWTGTDNNFSIKQDIVGINEWSGYSGSFVQHPELTGLDCIRPCFWVELIRGRPKENTIWTSGSSISFCGVNSDTVGWSWPDGAELPFTIDK

SEQ ID NO: 20137 - protein, 469 aa, synthetic construct; identical to SEQ ID NO: 16738
  REGION 1..469: note = neuraminidase__InfluenzaA__ADU59829

SEQ ID NO: 20138 - protein, 469 aa, synthetic construct
  REGION 1..469: note = neuraminidase__InfluenzaA__ADU59838
MNPNQKIIIIGSVCMTIGMANLILQIGNIISIWISHSIQLGNQNQIETCNQSVITYENNTWVNQTYVNISNTNFAAGQSVVSVKLAGNSSLCPVSGWAIYSKDNSIRIGSKGDVFVIREPFISCSPLECRTFFLTQGALLNDKHSNGTIKDRSPYRTLMSCPIGEVPSPYNSRFESVAWSASACHDGINWLTIGISGPDNGAVAVLKYNGIITDTIKSWRNNILRTQESECACVNGSCFTVMTDGPSDGQASYKIFRIEKGKIVKSVEMNAPNYHFEECSCYPDSSEITCVCRDNWHGSNRPWVSFNQNLEYQIGYICSGIFGDNPRPNDKTGSCGPVSSNGANGVKGFSFKYGNGVWIGRTKSISSRNGFEMIWDPNGWTGTDNNFSIKQDIVGINEWSGYSGSFVQHPELTGLDCIRPCFWVELIRGRPKENTIWTSGSSISFCGVNSDTVDWSWPDGAELPFTIDK

SEQ ID NO: 20139 - protein, 469 aa, synthetic construct; identical to SEQ ID NO: 18089
  REGION 1..469: note = neuraminidase__InfluenzaA__ADU59847

SEQ ID NO: 20140 - protein, 469 aa, synthetic construct; identical to SEQ ID NO: 16738
  REGION 1..469: note = neuraminidase__InfluenzaA__ADU59907

SEQ ID NO: 20141 - protein, 469 aa, synthetic construct; identical to SEQ ID NO: 16738
  REGION 1..469: note = neuraminidase__InfluenzaA__ADU59917

SEQ ID NO: 20142 - protein, 469 aa, synthetic construct; identical to SEQ ID NO: 16738
  REGION 1..469: note = neuraminidase__InfluenzaA__ADU59920

SEQ ID NO: 20143 - protein, 469 aa, synthetic construct; identical to SEQ ID NO: 16738
  REGION 1..469: note = neuraminidase__InfluenzaA__ADU59941

SEQ ID NO: 20144 - protein, 469 aa, synthetic construct
  REGION 1..469: note = neuraminidase__InfluenzaA__ADU76311
MNPNQKIITIGSVCMTIGMANLILQIGNIISIWISHSIQLGNQNQIETCNQSVITYENNTWVNQTYVNISNTNFAAGQSVVSVKLAGNSSLCPVSGWAIYSKDNSIRIGSKGDVFVIREPFISCSPLECRTFFLTQGALLNDKHSNGTIKDRSPYRTLMSCPIGEVPSPYNSRFESVAWSASACHDGINWLTIGISGPDNGAVAVLKYNGIITDTIKSWRNNILRTQESECACVNGSCFTVMTDGPSDGQASYKIFRIEKGKIVKSVEMNAPNYHYEECSCYPDSSEITCVCRDNWHGSNRPWVSFNQNLEYQIGYICSGIFGDNPRPNDKTGSCGPVSSNGANGVKGFSFKYGNGVWIGRTKSISSRNGFEMIWDPNGWTGTDNNFSIKQDIVGINEWSGYSGSFVQHPELTGLDCIRPCFWVELIRGRPKENTIWTSGSSISFCGVNSDTVGWSWPDGAKLPFTIDK

SEQ ID NO: 20145 - protein, 469 aa, synthetic construct
  REGION 1..469: note = neuraminidase__InfluenzaA__ADU76313
MNPNQKIITIGSVCMTIGMANLILQIGNIISIWISHSIQLGNQNQIETCNQSVITYENNTWVNQTYVNISNTNFAAGQSVVSVKLAGNSSLCPVSGWAIYSKDNSIRIGSKGDVFVIREPFISCSPLECRTFFLTQGALLNDKHSNGTIKDRSPYRTLMSCPIGEVPSPYNSRFESVAWSASACHDGINWLTIGISGPDNGAVAVLKYNGIITDTIKSWRNNILRTQESECACVNGSCFTVMTDGPSDGQASYKIFRIEKGKIVKSVEMNAPNYYYEECSCYPDSSEITCVCRDNWHGSNRPWVSFNQNLEYQIGYICSGIFGDNPRPNDKTGSCGPVSSNGANGVKGFSFKYGNGVWIGRTKSISSRNGFEMIWDPNGWTGTDNNFSIKQDIVGINEWSGYSGSFVQHPELTGLDCIRPCFWVELIRGRPKENTIWTSGSSISFCGVNSDTVGWSWPDGAKLPFTIDK

SEQ ID NO: 20146 - protein, 469 aa, synthetic construct; identical to SEQ ID NO: 20145
  REGION 1..469: note = neuraminidase__InfluenzaA__ADU76314

SEQ ID NO: 20147 - protein, 469 aa, synthetic construct; identical to SEQ ID NO: 20145
  REGION 1..469: note = neuraminidase__InfluenzaA__ADU76315

SEQ ID NO: 20148 - protein, 469 aa, synthetic construct; identical to SEQ ID NO: 20145
  REGION 1..469: note = neuraminidase__InfluenzaA__ADU76316

SEQ ID NO: 20149 - protein, 469 aa, synthetic construct
  REGION 1..469: note = neuraminidase__InfluenzaA__ADU76317
MNPNQKIITIGSVCMTIGMANLILQIGNIISIWISHSIQLGNQNQIETCNQSVITYENNTWVNQTYVNISNTNFAAGQSVVSVKLAGNSSLCPVSGWAIYSKDNSIRIGSKGDVFVIREPFISCSPLECRTFFLTQGALLNDKHSNGTIKDRSPYRTLMSCPIGEVPSPYNSRFESVAWSASACHDGINWLTIGISGPDNGAVAVLKYNGIITDTIKSWRNNILRTQESECACVNGSCFTVMTDGPSDGQASYKIFRIEKGKIVKSVEMNAPNYHYEECSCYPDSSEITCVCRDNWHGSNRPWVSFNQNLEYQIGYICSGIFGDNPRPNDKTGSCGPVSSNGANGVKGFSFKYGNGVWIGRTKSTSSRNGFEMIWDPNGWTGTDNNFSIKQDIVGINEWSGYSGSFVQHPELTGLDCIRPCFWVELIRGRPKENTIWTSGSSISFCGVNSDTVGWSWPDGAELPFTIDK

SEQ ID NO: 20150 - protein, 469 aa, synthetic construct
  REGION 1..469: note = neuraminidase__InfluenzaA__ADU76318
MNPNQKIITIGSVCMTIGMANLILQIGNIISIWISHSIQLGNQNQIETCNQSVITYENNTWVNQTYVNISNTNFAAGQSVVSVKLAGNSSLCPVSGWAIYSKDNSIRIGSKGDVFVIREPFISCSPLECRTFFLTQGALLNDKHSNGTIKDRSPYRTLMSCPIGEVPSPYNSRFESVAWSASACHDGINWLTIGISGPDNGAVAVLKYNGIITDTIKSWRNNILRTQESECACVNGSCFTVMTDGPSDGQASYKIFRIEKGKIVKSVEMNAPNYHYEECSCYPDSSEITCVCRDNWHGSNRPWVSFNHNLEYQIGYICSGIFGDNPRPNDKTGSCGPVSSNGANGVKGFSFKYGNGVWIGRTKSISSRNGFEMIWDPNGWTGTDNNFSIKQDIVGINEWSGYSGSFVQHPELTGLDCIRPCFWVELIRGRPKENTIWTSGSSISFCGVNSDTVGWSWPDGAELPFTIDK

SEQ ID NO: 20151 - protein, 469 aa, synthetic construct; identical to SEQ ID NO: 17981
  REGION 1..469: note = neuraminidase__InfluenzaA__ADU76319

SEQ ID NO: 20152 - protein, 469 aa, synthetic construct; identical to SEQ ID NO: 16738
  REGION 1..469: note = neuraminidase__InfluenzaA__ADU76320

SEQ ID NO: 20153 - protein, 469 aa, synthetic construct; identical to SEQ ID NO: 16738
  REGION 1..469: note = neuraminidase__InfluenzaA__ADU76321

SEQ ID NO: 20154 - protein, 469 aa, synthetic construct
  REGION 1..469: note = neuraminidase__InfluenzaA__ADU76322
MNPNQKIITIGSVCMTIGMANLILQIGNIISIWISHSIQLGNQNQIETCNQSVITYENNTWVNQTYVNISNTNFAAGQSVVSVKLAGNSSLCPVSGWAIYSKDNSIRIGSKGDVFVIREPFISCSPLECRTFFLTQGALLNDKHSNGTIKDRSPYRTLMSCPIGEVPSPYNSRFESVAWSASACHDGINWLTIGISGPDNGAVAVLKYNGIITDTIKSWRNNILRTQESECACVNGSCFTVMTDGPSDGQASYKIFRIEKGKVVKSVEMNAPNYHYEECSCYPDSSEITCVCRDNWHGSNRPWVSFNQNLEYQIGYICSGIFGDNPRPNDKTGSCGPVSSNGANGVKGFSFKYGNGVWIGRTKSISSRNGFEMIWDPNGWTGTDNNFSIKQDIVGINEWSGYSGSFVQHPELTGLDCIRPCFWVELIRGRPKENTIWTSGSIISFCGVNSDTVGWSWPDGAELPFTIDK

SEQ ID NO: 20155 - protein, 469 aa, synthetic construct; identical to SEQ ID NO: 20144
  REGION 1..469: note = neuraminidase__InfluenzaA__ADU76323

SEQ ID NO: 20156 - protein, 469 aa, synthetic construct; identical to SEQ ID NO: 20145
  REGION 1..469: note = neuraminidase__InfluenzaA__ADU76324

SEQ ID NO: 20157 - protein, 469 aa, synthetic construct; identical to SEQ ID NO: 20144
  REGION 1..469: note = neuraminidase__InfluenzaA__ADU76325

SEQ ID NO: 20158 - protein, 469 aa, synthetic construct; identical to SEQ ID NO: 20145
  REGION 1..469: note = neuraminidase__InfluenzaA__ADU76326

SEQ ID NO: 20159 - protein, 469 aa, synthetic construct; identical to SEQ ID NO: 20145
  REGION 1..469: note = neuraminidase__InfluenzaA__ADU76327

SEQ ID NO: 20160 - protein, 469 aa, synthetic construct; identical to SEQ ID NO: 20144
  REGION 1..469: note = neuraminidase__InfluenzaA__ADU76328

SEQ ID NO: 20161 - protein, 469 aa, synthetic construct; identical to SEQ ID NO: 20145
  REGION 1..469: note = neuraminidase__InfluenzaA__ADU76329

SEQ ID NO: 20162 - protein, 469 aa, synthetic construct; identical to SEQ ID NO: 20145
  REGION 1..469: note = neuraminidase__InfluenzaA__ADU76330

SEQ ID NO: 20163 - protein, 469 aa, synthetic construct; identical to SEQ ID NO: 20145
  REGION 1..469: note = neuraminidase__InfluenzaA__ADU76331

SEQ ID NO: 20164 - protein, 469 aa, synthetic construct; identical to SEQ ID NO: 20145
  REGION 1..469: note = neuraminidase__InfluenzaA__ADU76332

SEQ ID NO: 20165 - protein, 469 aa, synthetic construct; identical to SEQ ID NO: 16738
  REGION 1..469: note = neuraminidase__InfluenzaA__ADU76333

SEQ ID NO: 20166 - protein, 469 aa, synthetic construct; identical to SEQ ID NO: 16738
  REGION 1..469: note = neuraminidase__InfluenzaA__ADU76334

SEQ ID NO: 20167 - protein, 469 aa, synthetic construct; identical to SEQ ID NO: 16738
  REGION 1..469: note = neuraminidase__InfluenzaA__ADU76335

SEQ ID NO: 20168 - protein, 469 aa, synthetic construct; identical to SEQ ID NO: 20145
  REGION 1..469: note = neuraminidase__InfluenzaA__ADU76336

SEQ ID NO: 20169 - protein, 469 aa, synthetic construct; identical to SEQ ID NO: 17505
  REGION 1..469: note = neuraminidase__InfluenzaA__ADU76337

SEQ ID NO: 20170 - protein, 469 aa, synthetic construct; identical to SEQ ID NO: 18640
  REGION 1..469: note = neuraminidase__InfluenzaA__ADU76338

SEQ ID NO: 20171 - protein, 469 aa, synthetic construct; identical to SEQ ID NO: 20144
  REGION 1..469: note = neuraminidase__InfluenzaA__ADU76339

SEQ ID NO: 20172 - protein, 469 aa, synthetic construct; identical to SEQ ID NO: 16738
  REGION 1..469: note = neuraminidase__InfluenzaA__ADU76341

SEQ ID NO: 20173 - protein, 469 aa, synthetic construct; identical to SEQ ID NO: 16738
  REGION 1..469: note = neuraminidase__InfluenzaA__ADU76342

SEQ ID NO: 20174 - protein, 469 aa, synthetic construct; identical to SEQ ID NO: 16738
  REGION 1..469: note = neuraminidase__InfluenzaA__ADU76343

SEQ ID NO: 20175 - protein, 469 aa, synthetic construct; identical to SEQ ID NO: 20145
  REGION 1..469: note = neuraminidase__InfluenzaA__ADU76344

SEQ ID NO: 20176 - protein, 469 aa, synthetic construct; identical to SEQ ID NO: 20145
  REGION 1..469: note = neuraminidase__InfluenzaA__ADU76345

SEQ ID NO: 20177 - protein, 469 aa, synthetic construct
  REGION 1..469: note = neuraminidase__InfluenzaA__ADU76346
MNPNQKIITIGSVCMTIGMANLILQIGNIISIWISHSIQLGNQNQIETCNQSVITYENNTWVNQTYVNISNTNFAAGQSVVSVKLAGNSSLCPVSGWAIYSKDNSIRIGSKGDVFVIREPFISCSPLECRTFFLTQGALLNDKHSNGTIKDRSPYRTLMSCPIGEVPSPYNSRFESVAWSASACHDGINWLTIGISGPDNGAVAVLKYNGIITDTIKSWRNNILRTQESECACVNGSCFTVMTDGPSDGQASYKIFRIEKGKIVKSVEMNAPNYHYEECSCYPDSSEITCVCRDNWHGSNRPWVSFNQNLEYQIGYICSGIFGDNPRPNDKTGSCGPVSSNGANGVKGFSFKYGNGVWIGRTKSISSRNGFEMIWDPNGWTETDNNFSIKQDIVGINEWSGYSGSFVQHPELTGLDCIRPCFWVELIRGRPKENTIWTSGSSISFCGVNSDTVGWSWPDGAELPFTIDK

SEQ ID NO: 20178 - protein, 469 aa, synthetic construct; identical to SEQ ID NO: 17505
  REGION 1..469: note = neuraminidase__InfluenzaA__ADU76347

SEQ ID NO: 20179 - protein, 469 aa, synthetic construct
  REGION 1..469: note = neuraminidase__InfluenzaA__ADV17285
MNPNQEIITIGSVCMTIGMANLILQIGNIISIWISHSIQLGNQNQIETCNQSVITYENNTWVNQTYVNISNTNFAAGQSVVSVKLAGNSSLCPVSGWAIYSKDNSIRIGSKGDVFVIREPFISCSPLECRTFFLTQGALLNDKHSNGTIKDRSPYRTLMSCPIGEVPSPYNSRFESVAWSASACHDGINWLTIGISGPDNGAVAVLKYNGIITDTIKSWRNNILRTQESECACVNGSCFTVMTDGPSDGQASYKIFRIEKGKIVKSVEMNAPNYHYEECSCYPDSSEITCVCRDNWHGSNRPWVSFNQNLEYQIGYICSGIFGDNPRPNDKTGSCGPVSSNGANGVKGFSFRYGNGVWIGRTKSISSRNGFEMIWDPNGWTGTDNNFSIKQDIVGINEWSGYSGSFVQHPELTGLDCIRPCFWVELIRGRPKENTIWTSGSSISFCGVNSDTVGWSWPDGAELPFTIDK

SEQ ID NO: 20180 - protein, 469 aa, synthetic construct; identical to SEQ ID NO: 16738
  REGION 1..469: note = neuraminidase__InfluenzaA__ADV17295

SEQ ID NO: 20181 - protein, 469 aa, synthetic construct
  REGION 1..469: note = neuraminidase__InfluenzaA__ADV17305
MNPNQKIITIGSVCMTIGMANLILQIGNIISIWISHSIQLGNQNQIETCNQSVITYENNTWVNQTYVNISNTNFAAGQSVVSVKLAGNSSLCPVSGWAIYSKDNSIRIGSKGDVFVIREPFISCSSLECRTFFLTQGALLNDKHSNGTIKDRSPYRTLMSCPIGEVPSPYNSRFESVAWSASACHDGINWLTIGISGSDNGAVAVLKYNGIITDTIKSWRNNILRTQESECACVNGSCFTIMTDGPSDGQASYKIFRIEKGKIVKSVEMNAPNYHYEECSCYPDSSEITCVCRDNWHGSNRPWVSFNQNLEYQIGYICSGIFGDNPRPNDKTGSCGPVSSNGANGVKGFSFKYGNGVWIGRTKSISSRNGFEMIWDPNGWTGTDNNFSIKQDIVGINEWSGYSGSFVQHPELTGLDCIRPCFWVELIRGRPKENTIWTSGSSISFCGVNSDTVGWSWPDGAELPFTIDK

SEQ ID NO: 20182 - protein, 469 aa, synthetic construct; identical to SEQ ID NO: 16738
  REGION 1..469: note = neuraminidase__InfluenzaA__ADV17315

SEQ ID NO: 20183 - protein, 469 aa, synthetic construct; identical to SEQ ID NO: 18169
  REGION 1..469: note = neuraminidase__InfluenzaA__ADV17325

SEQ ID NO: 20184 - protein, 469 aa, synthetic construct
  REGION 1..469: note = neuraminidase__InfluenzaA__ADV17335
MNPNQKIITIGSVCMTIGMANLILQIGNIISIWISHSIQLGNQNQIETCNQSVITYENNTWVNQTYVNISNTNFAAGQSVVSVKLAGNSSLCPVSGWAIYSKDNSIRIGSKGDVFVIREPFISCSPLECRTFFLTQGALLNDKHSNGTIKDRSPYRTLMSCPIGEVPSPYNSRFESVAWSASACHDGINWLTIGISGPDNGAVAVLKYNGIITDTIKSWRNNILRTQESECACVNGSCFTVMTDGPSDGQASYKIFRIEKGKIVKSVEMNAPNYHYEECSCYPDSSEITCVCRDNWHGSNRPWVSFNQNLEYQIGYICSGVFGDNPRPNDKTGSCGPVSSNGANGVKGFSFKYGNGVWIGRTKSISSRNGFEMIWDPNGWTGTDNNFSIKQDIVGINEWSGYSGSFVQHPELTGLDCIRPCFWVELIRGRPKENTIWTSGSSISFCGVNSDTVGWSWPDGAECPFTIDK

SEQ ID NO: 20185 - protein, 469 aa, synthetic construct; identical to SEQ ID NO: 16738
  REGION 1..469: note = neuraminidase__InfluenzaA__ADV19022

SEQ ID NO: 20186 - protein, 469 aa, synthetic construct
  REGION 1..469: note = neuraminidase__InfluenzaA__ADV41679
MNPNQKIITIGSVCMTIGMANLILQIGNIISIWISHSIQLRNQNQIETCNQSVITYENNTWVNQTYVNISNTNFAAGQSVVSVKLAGNSSLCPVSGWAIYSKDNSIRIGSKGDVFVIREPFISCSPLECRTFFLTQGALLNDKHSNGTIKDRSPYRTLMSCPIGEVPSPYNSRFESVAWSASACHDGINWLTIGISGPDNGAVAVLKYNGIITDTIKSWRNNILRTQESECACVNGSCFTVMTDGPSDGQASYKIFRIEKGKIVKSVEMNAPNYHYEECSCYPDSSEITCVCRDNWHGSNRPWVSFNQNLEYQIGYICSGIFGDNPRPNDKTGSCGPVSSNGANGVKGFSFKYGNGVWIGRTKSISSRNGFEMIWDPNGWTGTDNNFSIKQDIVGINEWSGYSGSFVQHPELTGLDCIRPCFWVELIRGRPKENTIWTSGSSISFCGVNSDTVGWSWPDGAELPFTIDK

SEQ ID NO: 20187 - protein, 469 aa, synthetic construct
  REGION 1..469: note = neuraminidase__InfluenzaA__ADV76582
MNPNQKIITIGSVSLTISTVCFFMQIAILITTVTLHFKQYEFNSPPNNQVMLCEPTIIERNITEIVYLTNTTIEKEICPKLAEYRNWSKPQCDITGFAPFSKDNSIRLSAGGDIWVTREPYVSCDPDKCYQFALGQGTTLNNVHSNNTVRDRTPYRTLLMNELGVPFHLGTKQVCIAWSSSSCHDGKAWLHVCITGDDKNATASFIYNGRLVDSVVSWSKEILRTQESECVCINGTCTVVMTDGSASGKADTKILFIEEGKIVHTSTLSGSAQHVEECSCYPRYPGVRCVCRDNWKGSNRPIVDINIKDHSIVSSYVCSGLVGDTPRKNDSSSSSHCLDPNNEEGGHGVKGWAFDDGNDVWMGRTINETSRLGYETFKVIEGWSNPKSKLQINRQVIVDKGNRSGYSGIFSVEGKSCINRCFYVELIRGRKEETEVLWTSNSIVVFCGTSGTYGTGSWPDGADLNLMPI

SEQ ID NO: 20188 - protein, 469 aa, synthetic construct; identical to SEQ ID NO: 16599
  REGION 1..469: note = neuraminidase__InfluenzaA__ADV76590

SEQ ID NO: 20189 - protein, 469 aa, synthetic construct; identical to SEQ ID NO: 16599
  REGION 1..469: note = neuraminidase__InfluenzaA__ADV76601

SEQ ID NO: 20190 - protein, 469 aa, synthetic construct; identical to SEQ ID NO: 17592
  REGION 1..469: note = neuraminidase__InfluenzaA__ADV76612

SEQ ID NO: 20191 - protein, 469 aa, synthetic construct; identical to SEQ ID NO: 16599
  REGION 1..469: note = neuraminidase__InfluenzaA__ADV76623

SEQ ID NO: 20192 - protein, 469 aa, synthetic construct; identical to SEQ ID NO: 16599
  REGION 1..469: note = neuraminidase__InfluenzaA__ADV76634

SEQ ID NO: 20193 - protein, 469 aa, synthetic construct; identical to SEQ ID NO: 19466
  REGION 1..469: note = neuraminidase__InfluenzaA__ADV76645

SEQ ID NO: 20194 - protein, 469 aa, synthetic construct
  REGION 1..469: note = neuraminidase__InfluenzaA__ADV76667
MNPNQKIITIGSVSLTIATVCFLMQIAILVTTVTLHFKQYECDSPASNQVMPCEPIIIERNITEIVYLNNTTIEKEICPKVVEYRNWSKPQCQITGFAPFSKDNSIRLSAGGDIWVTREPYVSCDHGKCYQFALGQGTTLDNKHSNDTIHDRIPHRTLLMNELGVPFHLGTRQVCIAWSSSSCHDGKAWLHVCITGDDKNATASFIYDGRLVDSIGSWSQNILRTQESECVCINGTCTVVMTDGSASGRADTRILFIEEGKIVHISPLSGSAQHVEECSCYPRYPGVRCICRDNWKGSNRPVVDINMEDYSIDSSYVCSGLVGDTPRNDDRSSNSKSRNPNNERGNQGVKGWAFDNGDDVWMGRTISRDLRSGYETFKVIGGWSTPNSKSQINRQVIVDSDNRSGYSGIFSVEGKSCINRCFYVELIRGRKQETRVWWTSNSIVVFCGTSGTYGTGSWPDGANINFMPI

SEQ ID NO: 20195 - protein, 469 aa, synthetic construct; identical to SEQ ID NO: 19468
  REGION 1..469: note = neuraminidase__InfluenzaA__ADV76676

SEQ ID NO: 20196 - protein, 469 aa, synthetic construct; identical to SEQ ID NO: 18609
  REGION 1..469: note = neuraminidase__InfluenzaA__ADV76697

SEQ ID NO: 20197 - protein, 469 aa, synthetic construct
  REGION 1..469: note = neuraminidase__InfluenzaA__ADV76708
MNPNQKIITIGSVSLTISTICFFMQTAILITTVTLHFKQCEFNSPPNNQVMLCEPTIIERNITEIVYLTNITIEKEICPKLAEYRNWSKPQCDITGFAPFSKDNSIRLSAGGDIWVTREPYVSCDPDKCYQFALGQGTTLNNVHSNNTVRDRTPYRTLLMNELGVPFHLGTKQVCIAWSSSSCHDGKAWLHVCITGDDKNATASFIYNGRLVDSVVSWSKEILRTQESECVCINGTCTVVMTDGSASGKADTKILFIEEGKIVHTSTLSGSAQHVEECSCYPRYPGVRCVCRDNWKGSNRPIVDINIKDHSIVSSYVCSGLVGDTPRKNDSSSSSHCLDPNNEEGGHGVKGWAFDDGNDVWMGRTISEKSRLGYETFKVIEGWSNPKSKLQINRQVIVDRGNRSGYSGIFSVEGKSCINRCFYVELIRGRKEETEVLWTSNSIVVFCGTSGTYGTGSWPDGADINLMPI

SEQ ID NO: 20198 - protein, 469 aa, synthetic construct
  REGION 1..469: note = neuraminidase__InfluenzaA__ADV76719
MNPNQKIITIGSVSLTISTICFFMQIAILITTVTLHFKQYEFNSPPNNQVMLCEPTIIEKNITEIVYLTNTTIEKEICPKLAEYRNWSKPQCDITGFAPFSKDNSIRLSAGGDIWVTREPYVSCDPDKCYQFALGQGTTLNNVHSNNTVRDRTPYRTLLMNELGVPFHLGTKQVCIAWSSSSCHDGKAWLHVCITGDDKNATASFIYNGRLVDSVVSWSKEILRTQESECVCINGTCTVVMTDGSASGKADTKILFIEEGKIVHTSTLSGSAQHVEECSCYPRYPGVRCVCRDNWKGSNRPIVDINIKDHSIVSSYVCSGLVGDTPRKNDSSSSSHCLDPNNEEGGHGVKGWAFDDGNDVWMGRTISEKSRLGYETFKVIEGWSNPKSKLQMNRQVIVDRGNRSGYSGIFSVEGKSCINRCFYVELIRGRKEETEVLWTSNSIVVFCGTSGTYGTGSWPDGADINLMPI

SEQ ID NO: 20199 - protein, 469 aa, synthetic construct
  REGION 1..469: note = neuraminidase__InfluenzaA__ADV76730
MNPNQKIITIGSVSLTISTICFFMQIAILITTVTLHFKQYEFNSPPNNQVMLCEPTIIERNITEIVYLTNTTIEKEICPKLAEYRNWSKPQCDITGFAPFSKDNSIRLSAGGDIWVTREPYVSCDPDKCYQFALGQGTTLNNVHSNNTVRDRTPYRTLLMNELGVPFHLGTKQVCIAWSSSSCHDGKAWLHVCITGDDKNATASFIYNGRLVDSVVSWSKETLRTQESECVCINGTCTVVMTDGSASGKADTKILFIEEGKIVHTSTLSGSAQHVEECSCYPRYPGVRCVCRDNWKGSNRPIVDINIKDHSIVSSYVCSGLVGDTPRKDDSSSSSHCLDPNNEEGGHGVKGWAFDDGNDVWMGRTISEKSRLGYETFKVIEGWSNPKSKLQINRQVIVDRGNRSGYSGIFSVEGKSCINRCFYVELIRGRKEETEVLWTSNSIVVFCGTSGTYGTGSWPDGADINLMPI

SEQ ID NO: 20200 - protein, 469 aa, synthetic construct
  REGION 1..469: note = neuraminidase__InfluenzaA__ADV78132
MNPNQKIITIGSVCMTIGMANLILQIGNIISIWISHSIQLGNQSQIETCNQSVITYENNTWLNQTYVNISNTNFAAGQSVVSVKLAGNSSLCPVSGWAIYSKDNSIRIGSKGDVFVIREPFISCSPSECRTFFLTQGALLNDKHSNGTIKDRSPYRTLMSCPIGEVPSPYNSRFESVAWSASACHDGINWLTIGISGPDNGAVAVLKYNGIITDTIKSWRNNILRTQESECACVNGSCFTIMTDGPSDGQASYKIFRIEKGKIVKSVGMNAPNYHYEECSCYPDSSEITCVCRDNWHGSNRPWVSFNQNLEYQIGYICSGIFGDNPRPNDKTGSCGPVSSNGANGVKGFSFKYGNGVWIGRTKSISSRKGFEMIWDPNGWTGTDNNFSIKQDIVGINEWSGYSGSFVQHPELTGLDCIRPCFWVELIRGRPKENTIWASGSSISFCGVNSDTVGWSWPDGAELPFIIDK

SEQ ID NO: 20201 - protein, 470 aa, synthetic construct
  REGION 1..470: note = neuraminidase__InfluenzaA__ADW09104
MNPNQKIITIGSISIAIGIISLMLQIGNIISIWASHSIQTGSQNNTGICNQRIITYENSTWVNHTYVNINNTNVVAGEDKTSVTLAGNSSLCSISGWAIYTKDNSIRIGSKGDVFVIREPFISCSHLECRTFFLTQGALLNDKHSNGTVKDRSPYRALMSCPLGEAPSPYNSKFESVAWSASACHDGMGWLTIGISGPDNGAVAVLKYNGIITGTIKSWKKQILRTQESECVCMNGSCFTIMTDGPNNKAASYKIFKIEKGKVTKSIELNAPNFYYEECSCYPDTGIVMCVCRDNWHGSNRPWVSFNQNLDYQIGYICSGVFGDNPRPEDGEGSCNPVTVDGANGVKGFSYKYGNGVWIGRTKSNRLRKGFEMIWDPNGWTNTDSDFSVKQDVVAITDWSGYSGSFVQHPELTGLDCIRPCFWVELVRGLPRENTTIWTSGSSISFCGVNSDTANWSWPDGAELPFTIDK

SEQ ID NO: 20202 - protein, 470 aa, synthetic construct; identical to SEQ ID NO: 17461
  REGION 1..470: note = neuraminidase__InfluenzaA__ADW09114

SEQ ID NO: 20203 - protein, 470 aa, synthetic construct
  REGION 1..470: note = neuraminidase__InfluenzaA__ADW09123
MNPNQKIITIGSISIAIGITSLMLQIGNIISIWASHSIQTGSQNNTGICNQRIITYENSTWVNHTYVNINNTNVVAGEDKTSVTLAGNSSLCSISGWAIYTKDNSIRIGSKGDVFVIREPFISCSHLECRTFFLTQGALLNDKHSNGTVKDRSPYRALMSCPLGEAPSPYNSKFESVAWSASACHDGMGWLTIGISGPDNGAVAVLKYNGIITGTIKSWKKQILRTQESECVCMNGSCFTIMTDGPSNKAASYKIFKIEKGKVTKSIELNAPNFYYEECSCYPDTGIVMCVCRDNWHGSNRPWVSFNQNLDYQIGYICSGVFGDNPRPEDGEGSCNPVTVDGADGVKGFSYKYGNGVWIGRTKSNRLRKGFEMIWDPNGWTNTDSDFSVKQDVVAITDWSGYSGSFVQHPELTGLDCIRPCFWVELVRGLPRENTTIWTSGSSISFCGVNSDTANWSWPDGAELPFTIDK

SEQ ID NO: 20204 - protein, 470 aa, synthetic construct
  REGION 1..470: note = neuraminidase__InfluenzaA__ADW09156
MNPNQKIITIGSISIAIGIISLMLQIGNIISIWASHSIQTGSQNNTGICNQRIITYENSTWVNHTYVNINNTNVVAGEDKTSVTLAGNSSLCSISGWAIYTKDNSIRIGSKGDVFVIREPFISCSHLECRTFFLTQGALLNDKHSNGTVKDRSPYRALMSCPLGEAPSPYNSKFESVAWSASACHDGMGWLTIGISGPDNGAVAVLKYNGIITGTIKSWKKQILRTQESECVCMNGSCFTIMTDGPSNKAASYKIFKIEKGKVTKSIELNAPNFYYEECSCYPDTGIVMCVCRDNWHGSNRPWVSFNQNLDYQIGYICSGVFGDNPRPEDGEGSCNPVTVDGADGVKGFSYKYGNGVWIGRTKSNRLRKGFEMIWDPNGWTNTDSDFSVKQDVVAITDWSGYSGSFVQHPELTGLDCIRPCFWVELVRGLPRENTTIWTSGSSISFCGVNSDTANWSWPDGAELPFTIDK

SEQ ID NO: 20205 - protein, 470 aa, synthetic construct
  REGION 1..470: note = neuraminidase__InfluenzaA__ADW09167
MNPNQKIITIGSISIAIGIISLMLQIGNIISIWASHSIQTGSQNNTGICNQRIITYENSTWVNHTYVNINNTNVVAGEDKTSVTLAGNSSLCSISGWAIYTKDNSIRIGSKGDVFVIREPFISCSHLECRTFFLTQGALLNDKHSNGTVKDRSPYRALMSCPLGEAPSPYNSKFESVAWSASACHDGMGWLTIGISGPDNGAVAVLKYNGIITGTIKSWKKQILRTQESECVCMNGSCFTIMTDGPSNKAASYKIFKIEKGKVTKSIELNAPNFYYEECSCYPDTGIVMCVCRDNWHGSNRPWVSFNQNLDYQIGYICSGVFGDNPRPEDGEGSCNPVTVNGADGVKGFSYKYGNGVWIGRTKSNRLRKGFEMIWDPNGWTNTDSDFSVKQDVVAITDWSGYSGSFVQHPELTGLDCIRPCFWVELVRGLPRENTTIWTSGSSISFCGVNSDTANWSWPDGAELPFTIDK

SEQ ID NO: 20206 - protein, 470 aa, synthetic construct; identical to SEQ ID NO: 17461
  REGION 1..470: note = neuraminidase__InfluenzaA__ADW09178

SEQ ID NO: 20207 - protein, 470 aa, synthetic construct; identical to SEQ ID NO: 17461
  REGION 1..470: note = neuraminidase__InfluenzaA__ADW09189

SEQ ID NO: 20208 - protein, 470 aa, synthetic construct; identical to SEQ ID NO: 20205
  REGION 1..470: note = neuraminidase__InfluenzaA__ADW09211

SEQ ID NO: 20209 - protein, 470 aa, synthetic construct
  REGION 1..470: note = neuraminidase__InfluenzaA__ADW09222
MNPNQKIITIGSISIAIGIISLMLQIGNIISIWASHSIQTGSQNNTGICNQRIITYENSTWVNHTYVNINNTNVVAGEDKTSVTLAGNSSLCSISGWAIYTKDNSIRIGSKGDVFVIREPFISCSHLECRTFFLTQGALLNDKHSNGTVKDRSPYRALMSCPLGEAPSPYNSKFESVAWSASACHDGMGWLTIGISGPDNGAVAVLKYNGIITGTIKSWKKQILRTQESECVCMNGSCFTIMTDGPSNKAASYKIFKIEKGKVTKSIELNAPNFYYEECSCYPDTGIVMCVCRDNWHGSNRPWVSFNQNLDYQIGYICSGVFGDNPRPEDGEGSCNSVTVDGADGVKGFSYKYGNGVWIGRTKSNRLRKGFEMIWDPNGWTNTDSDFSVKQDVVAITDWSGYSGSFVQHPELTGLDCIRPCFWVELVRGLPRENTTIWTSGSSISFCGVNSDTANWSWPDGAELPFTIDK

SEQ ID NO: 20210 - protein, 470 aa, synthetic construct
  REGION 1..470: note = neuraminidase__InfluenzaA__ADW09233
MNPNQKIITIGSISIAIGTISLMLQIGNIISIWASHSIQTGSQNNTGICNQRIITYENSTWVNHTYVNINNTNVVAGEDKTSVTLAGNSSLCSISGWAIYTKDNSIRIGSKGDVFVIREPFISCSHLECRTFFLTQGALLNDKHSNGTVKDRSPYRALMSCPLGEAPSPYNSKFESVAWSASACHDGMGWLTIGISGPDNGAVAVLKYNGIITGTIKSWKKQILRTQESECVCMNGSCFTIMTDGPSNKAASYKIFKIEKGKVTKSIELNAPNFYYEECSCYPDTGIVMCVCRDNWHGSNRPWVSFNQNLDYQIGYICSGVFGDNPRPEDGEGSCNPVTVDGANGVKGFSYKYGNGVWIGRTKSNRLRKGFEMIWDPNGWTNTDSDFSVKQDVVAITDWSGYSGSFVQHPELTGLDCIRPCFWVELVRGLPRENTTIWTSGSSISFCGVNSDTANWSWPDGAELPFTIDK

SEQ ID NO: 20211 - protein, 470 aa, synthetic construct; identical to SEQ ID NO: 20204
  REGION 1..470: note = neuraminidase__InfluenzaA__ADW09244

SEQ ID NO: 20212 - protein, 470 aa, synthetic construct; identical to SEQ ID NO: 20204
  REGION 1..470: note = neuraminidase__InfluenzaA__ADW09255

SEQ ID NO: 20213 - protein, 470 aa, synthetic construct; identical to SEQ ID NO: 20204
  REGION 1..470: note = neuraminidase__InfluenzaA__ADW09266

SEQ ID NO: 20214 - protein, 470 aa, synthetic construct; identical to SEQ ID NO: 20204
  REGION 1..470: note = neuraminidase__InfluenzaA__ADW09277

SEQ ID NO: 20215 - protein, 470 aa, synthetic construct; identical to SEQ ID NO: 17461
  REGION 1..470: note = neuraminidase__InfluenzaA__ADW09288

SEQ ID NO: 20216 - protein, 470 aa, synthetic construct; identical to SEQ ID NO: 20205
  REGION 1..470: note = neuraminidase__InfluenzaA__ADW09299

SEQ ID NO: 20217 - protein, 470 aa, synthetic construct; identical to SEQ ID NO: 17461
  REGION 1..470: note = neuraminidase__InfluenzaA__ADW09310

SEQ ID NO: 20218 - protein, 470 aa, synthetic construct; identical to SEQ ID NO: 17461
  REGION 1..470: note = neuraminidase__InfluenzaA__ADW09330

SEQ ID NO: 20219 - protein, 470 aa, synthetic construct; identical to SEQ ID NO: 20204
  REGION 1..470: note = neuraminidase__InfluenzaA__ADW10475

SEQ ID NO: 20220 - protein, 470 aa, synthetic construct; identical to SEQ ID NO: 20205
  REGION 1..470: note = neuraminidase__InfluenzaA__ADW10486

SEQ ID NO: 20221 - protein, 470 aa, synthetic construct; identical to SEQ ID NO: 17461
  REGION 1..470: note = neuraminidase__InfluenzaA__ADW10497

SEQ ID NO: 20222 - protein, 470 aa, synthetic construct
  REGION 1..470: note = neuraminidase__InfluenzaA__ADW10508
MNPNQKIITIGSISIAIGIISLMLQIGNIISIWASHSIQTGSQNNTGICNQRIITYENSTWVNHTYVNINNTNVVAGEDKTSVTLAGNSSLCSISGWAIYTKDNSIRIGSKGDVFVIREPFISCSHLECRTFFLTQGALVNDKHSNGTVKDRSPYRALMSCPLGEAPSPYNSKFESVAWSASACHDGMGWLTIGISGPDNGAVAVLKYNGIITGTIKSWKKQILRTQESECVCMNGSCFTIMTDGPSNKAASYKIFKIEKGKVTKSIELNAPNFYYEECSCYPDTGIVMCVCRDNWHGSNRPWVSFNQNLDYQIGYICSGVFGDNPRPEDGEGSCNPVTVNGADGVKGFSYKYGNGVWIGRTKSNRLRKGFEMIWDPNGWTNTDSDFSVKQDVVAITDWSGYSGSFVQHPELTGLDCIRPCFWVELVRGLPRENTTIWTSGSSISFCGVNSDTANWSWPDGAELPFTIDK

SEQ ID NO: 20223 - protein, 470 aa, synthetic construct; identical to SEQ ID NO: 17461
  REGION 1..470: note = neuraminidase__InfluenzaA__ADW10519

SEQ ID NO: 20224 - protein, 470 aa, synthetic construct; identical to SEQ ID NO: 17461
  REGION 1..470: note = neuraminidase__InfluenzaA__ADW10530

SEQ ID NO: 20225 - protein, 470 aa, synthetic construct
  REGION 1..470: note = neuraminidase__InfluenzaA__ADW10541
MNPNQKIITIGSISIAIGIISLMLQIGNIISIWASHSIQTGSQNNTGICNQRIITYENSTWVNHTYVNINNTNVVAGEDKTSVTLAGNSSLCSISGWAIYTKDNSIRIGSKGDVFVIREPFISCSHLECRTFFLTQGALLNDKHSNGTVKDRSPYRALMSCPLGEAPSPYNSKFESVAWSASACHDGMGWLTIGISGPDNGAVAVLKYNGIITGTIKSWKKQILRTQESECVCMDGSCFTIMTDGPSNKAASYKIFKIEKGKVTKSIELNAPNFYYEECSCYPDTGIVMCVCRDNWHGSNRPWVSFNQNLDYQIGYICSGVFGDNPRPEDGEGSCNPVTVDGANGVKGFSYKYGNGVWIGRTKSNRLRKGFEMIWDPNGWTNTDSDFSVKQDVVAITDWSGYSGSFVQHPELTGLDCIRPCFWVELVRGLPRENTTIWTSGSSISFCGVNSDTANWSWPDGAELPFTIDK

SEQ ID NO: 20226 - protein, 470 aa, synthetic construct
  REGION 1..470: note = neuraminidase__InfluenzaA__ADW10552
MNPNQKIITIGSISIAIGIISLMLQIGNIISIWASHSIQTGSQNNTGICNQRIITYENSTWVNHTYVNINNTNVVAGEDKTSVTLAGNSSLCSISGWAIYTKDNSIRIGSKGDVFVIREPFISCSHLECRTFFLTQGALLNDKHSNGTVKDRSPYRALMSCPLGEAPSPYNSKFESVAWSASACHDGMGWLTIGISGPDNGAVAVLKYNGIITGTIKSWKKQILRTQESECVCMNGSCFTIMTDGPSNKAASYKIFKIEKGKVTKSIELNAPDFYYEECSCYPDTGIVMCVCRDNWHGSNRPWVSFNQNLDYQIGYICSGVFGDNPRPEDGEGSCNPVTVNGADGVKGFSYKYGNGVWIGRTKSNRLRKGFEMIWDPNGWTNTDSDFSVKQDVVAITDWSGYSGSFVQHPELTGLDCIRPCFWVELVRGLPRENTTIWTSGSSISFCGVNSDTANWSWPDGAELPFTIDK

SEQ ID NO: 20227 - protein, 470 aa, synthetic construct; identical to SEQ ID NO: 19937
  REGION 1..470: note = neuraminidase__InfluenzaA__ADW10563

SEQ ID NO: 20228 - protein, 470 aa, synthetic construct; identical to SEQ ID NO: 17461
  REGION 1..470: note = neuraminidase__InfluenzaA__ADW10574

SEQ ID NO: 20229 - protein, 470 aa, synthetic construct
  REGION 1..470: note = neuraminidase__InfluenzaA__ADW10585
MNPNQKIITIGSISIAIGIISLMLQIGSIISIWASHSIQTGSQNNTGICNQRIITYENSTWVNHTYVNINNTNVVAGEDKKSVTLAGNSSLCSISGWAIYTKDNSIRIGSKGDVFVIREPFISCSHLECRTFFLTQGALLNDKHSNGTVKDRSPYRALMSCPLGEAPSPYNSKFESVAWSASACHDGMGWLTIGISGPDNGAVAVLKYNGIITGTIKSWKKQILRTQESECVCMNGSCFTIMTDGPSNKAASYKIFKIEKGKVTKSIELNAPNFYYEECSCYPDTGIVMCVCRDNWHGSNRPWVSFNQNLEYQIGYICSGVFGDNPRPEDGEGSCNPVTVDGANGVKGFSYKYGNGVWIGRTKSNRLRKGFEMIWDPNGWTNTDSDFSVKQDVVAITDWSGYSGSFVQHPELTGLDCIRPCFWVELVRGLPRENTTIWTSGSSISFCGVNSDTANWSWPDGAELPFTIDK

SEQ ID NO: 20230 - protein, 470 aa, synthetic construct; identical to SEQ ID NO: 20205
  REGION 1..470: note = neuraminidase__InfluenzaA__ADW10596

SEQ ID NO: 20231 - protein, 470 aa, synthetic construct; identical to SEQ ID NO: 20204
  REGION 1..470: note = neuraminidase__InfluenzaA__ADW10607

SEQ ID NO: 20232 - protein, 470 aa, synthetic construct; identical to SEQ ID NO: 20204
  REGION 1..470: note = neuraminidase__InfluenzaA__ADW10618

SEQ ID NO: 20233 - protein, 470 aa, synthetic construct; identical to SEQ ID NO: 20204
  REGION 1..470: note = neuraminidase__InfluenzaA__ADW10629

SEQ ID NO: 20234 - protein, 470 aa, synthetic construct; identical to SEQ ID NO: 20204
  REGION 1..470: note = neuraminidase__InfluenzaA__ADW10724

SEQ ID NO: 20235 - protein, 470 aa, synthetic construct; identical to SEQ ID NO: 20205
  REGION 1..470: note = neuraminidase__InfluenzaA__ADW10735

SEQ ID NO: 20236 - protein, 470 aa, synthetic construct; identical to SEQ ID NO: 20205
  REGION 1..470: note = neuraminidase__InfluenzaA__ADW10746

SEQ ID NO: 20237 - protein, 470 aa, synthetic construct
  REGION 1..470: note = neuraminidase__InfluenzaA__ADW10757
MNPNQKIITIGSISIAIGIISLMLQIGNIISIWASHSIQTRSQNNTGICNQRIITYENSTWVNHTYVNINNTNVVAGGDKTSVTLAGNSSLCSISGWAIYTKDNSIRIGSKGDVFVIREPFISCSHLECRTFFLTQGALLNDKHSNGTVKDRSPYRALMSCPLGEAPSPYNSKFESVAWSASACHDGMGWLTIGISGPDNGAVAVLKYNGIITGTIKSWKKQILRTQESECVCMNGSCFTLMTDGPSNKAASYKIFKIEKGKVTKSIELNAPNFYYEECSCYPDTGIVMCVCRDNWHGSNRPWVSFNQNLDYQIGYICSGVFGDNPRPEDGEGSCNPVTVDGANGVKGFSYKYGNGVWIGRTKSNRLRKGFEMIWDPNGWTNTDSDFSVKQDVVAITDWSGYSGSFVQHPELTGLDCIRPCFWVELVRGLPRENTTIWTSGSSISFCGVNSDTANWSWPDGAELPFTIDK

SEQ ID NO: 20238 - protein, 470 aa, synthetic construct; identical to SEQ ID NO: 20204
  REGION 1..470: note = neuraminidase__InfluenzaA__ADW10768

SEQ ID NO: 20239 - protein, 470 aa, synthetic construct; identical to SEQ ID NO: 17461
  REGION 1..470: note = neuraminidase__InfluenzaA__ADW10779

SEQ ID NO: 20240 - protein, 470 aa, synthetic construct
  REGION 1..470: note = neuraminidase__InfluenzaA__ADW10790
MNPNQKIITIGSISIAIGIISLMLQIGNIISIWASHSIQTGSQNNTGICNQRIITYENSTWVNHTYVNINNTNVVAGEDKTSVTLAGNSSLCSISGWAIYTKDNSIRIGSKGDVFVIREPFISCSHLECRTFFLTQGALLNDKHSNGTVKDRSPYRALMSCPLGEAPSPYNSKFESVAWSASACHDGMGWLTIGISGPDNGAVAVLKYNGIITGTIKSWKKQILRTQESECVCMNGSCFTIMTDGPSNKAASYKIFKIEKGKVTKSIELNAPNFYYEECSCYPDTGIVMCVCRDNWHGSNRPWVSFNQNLDYQIGYICSGVFGDNPRPEDGEGSCNPVTVDGANGVKGFSYKYGNGVWIGRTKSNRLRKGFEMIWDPNGWTNTDSDFSVKQDVVAITDWSGYSGSFVQHPELTGLDCIIPCFWVELVRGLPRENATIWTSGSSISFCGVNSDTANWSWPDGAELPFTIDK

SEQ ID NO: 20241 - protein, 470 aa, synthetic construct; identical to SEQ ID NO: 18930
  REGION 1..470: note = neuraminidase__InfluenzaA__ADW10801

SEQ ID NO: 20242 - protein, 470 aa, synthetic construct; identical to SEQ ID NO: 20204
  REGION 1..470: note = neuraminidase__InfluenzaA__ADW10812

SEQ ID NO: 20243 - protein, 470 aa, synthetic construct; identical to SEQ ID NO: 19956
  REGION 1..470: note = neuraminidase__InfluenzaA__ADW10823

SEQ ID NO: 20244 - protein, 470 aa, synthetic construct
  REGION 1..470: note = neuraminidase__InfluenzaA__ADW10834
MNPNQKIITIGSISIAIGIISLMLQIGNIISIWASHSIQTGSQNNTGICNQRIITYENSTWVNHTYVNINNTNVVAGEDKTSVTLAGNSSLCSISGWAIYTKDNSIRIGSKGDVFVIREPFISCSHLECRTFFLTQGALLNDKHSNGTVKDRSPYRALMSCPLGEAPSPYNSKFESVAWSASACHDGMGWLTIGISGPDNGAVAVLKYNGIITGTIKSWKKQILRTQESECVCMNGSCFTIMTDGPSNKAASYKIFKIEKGKVIKSIELNAPNFYYEECSCYPDTGIVMCVCRDNWHGSNRPWVSFNQNLDYQIGYICSGVFGDNPRPEDGEGSCNPVTVDGANGVKGFSYKYGNGVWIGRTKSNRLRKGFEMIWDPNGWTNTDSDFSVKQDVVAITDWSGYSGSFVQHPELTGLDCIRPCFWVELVRGLPRENTTIWTSGSSISFCGVNSDTANWSWPDGAELPFTIDK

SEQ ID NO: 20245 - protein, 470 aa, synthetic construct; identical to SEQ ID NO: 20205
  REGION 1..470: note = neuraminidase__InfluenzaA__ADW10845

SEQ ID NO: 20246 - protein, 470 aa, synthetic construct
  REGION 1..470: note = neuraminidase__InfluenzaA__ADW10856
MNPNQRIITIGSISIAIGIISLMLQIGNIISIWASHSIQTGSQNNTGICNQRIITYENSTWVNHTYVNINNTNVVAGEDKTSMTLAGNSSLCSISGWAIYTKDNSIRIGSKGDVFVIREPFISCSHLECRTFFLTQGALLNDKHSNGTAKDRSPYRALMSCPLGEAPSPYNSKFESVAWSASACHDGMGWLTIGISGPDNGAVAVLKYNGIITGTIKSWKKQILRTQESECVCMNGSCFTIMTDGPSNKAASYKIFKIEKGKVTKSIELNAPNFYYEECSCYPDTGIVMCVCRDNWHGSNRPWVSFNQNLDYQIGYICSGVFGDNPRPEDGEGSCNPVTVDGANGVKGFSYKYGNGVWIGRTKSNRLRKGFEMIWDPNGWTNTDSDFSVKQDVVAITDWSGYSGSFVQHPELTGLDCIRPCFWVELVRGLPRENTTIWTSGSSISFCGVNSDTANWSWPDGAELPFTIDK

SEQ ID NO: 20247 - protein, 470 aa, synthetic construct; identical to SEQ ID NO: 20204
  REGION 1..470: note = neuraminidase__InfluenzaA__ADW10867

SEQ ID NO: 20248 - protein, 470 aa, synthetic construct; identical to SEQ ID NO: 20204
  REGION 1..470: note = neuraminidase__InfluenzaA__ADW10878

SEQ ID NO: 20249 - protein, 470 aa, synthetic construct; identical to SEQ ID NO: 20204
  REGION 1..470: note = neuraminidase__InfluenzaA__ADW10889

SEQ ID NO: 20250 - protein, 470 aa, synthetic construct; identical to SEQ ID NO: 17461
  REGION 1..470: note = neuraminidase__InfluenzaA__ADW10900

SEQ ID NO: 20251 - protein, 469 aa, synthetic construct; identical to SEQ ID NO: 18484
  REGION 1..469: note = neuraminidase__InfluenzaA__ADW11155

SEQ ID NO: 20252 - protein, 469 aa, synthetic construct; identical to SEQ ID NO: 16738
  REGION 1..469: note = neuraminidase__InfluenzaA__ADW23530

SEQ ID NO: 20253 - protein, 469 aa, synthetic construct
  REGION 1..469: note = neuraminidase__InfluenzaA__ADW54483
MNPNQKIITIGSVCMTIGMANLMLQIGNIISIWISHSIQLGNQSQIETCNQSVITYENNTWVNQTYVNISNTNFAAGQSVVSVKLAGNSSLCPVSGWAIYSKDNSIRIGSKGDVFVIREPFISCSPLECRTFFLTQGALLNDKHSNGTIKDRSPYRTLMSCPIGEVPSPYNSRFESVAWSASACHDGINWLTIGISGPDNGAVAVLKYNGIITDTIKSWRNNILRTQESECACVNGSCFTIMTDGPSDGQASYKIFRIEKGKIVKSVEMNAPNYHYEECSCYPDSSEITCVCRDNWHGSNRPWVSFNQNLEYQIGYICSGIFGDNPRPNDKTGSCGPVSSNGANGVKGFSFKYGNGVWIGRTKSISSRKGFEMIWDPNGWTGTDNNFSIKQDIVGINEWSGYSGSFVQHPELTGLDCIRPCFWVELIRGRPKENTIWTSGSSISFCGVNSDTVGWSWPDGAELPFTIDK

SEQ ID NO: 20254 - protein, 469 aa, synthetic construct
  REGION 1..469: note = neuraminidase__InfluenzaA__ADW54494
MNPNQKIITIGSVCMTIGMANLILQIGNIISIWISHSIQLGNQNQIETCNQSVITYENNTWVNQTYVNISNTNFAAGQSVVSVKLAGNSSLCPVSGWAIYSKDNSIRIGSKGDVFVIREPFISCSPLECRTFFLTQGALLNDKHSNGTIKDRSPYRTLMSCPIGEVPSPYNSRFESVAWSASACHDGINWLTIGISGPDNGAVAVLKYNGIITDTIKSWRNNILRTQESECACVNGSCFTVMTDGPSDGQASYKIFRIEKGKIVKSVEMNAPNYHYEECSCYPDSSEITCVCRDNWHGSNRPWVSFNQNLEYRIGYICSGIFGDNPRPNDKTGSCGPVSSNGANGVKGFSFKYGNGVWIGRTKSISSRNGFEMIWDPNGWTGTDNNFSIKQDIIGINEWSGYSGSFVQHPELTGLDCIRPCFWVELIRGRPKENTIWTSGSSISFCGVNSDTVGWSWPDGAELPFTIDK

SEQ ID NO: 20255 - protein, 469 aa, synthetic construct
  REGION 1..469: note = neuraminidase__InfluenzaA__ADW54514
MNPNQKIITIGSVCMTIGMANLILQIGNIISIWISHSIQLGNQNQIETCNQSVITYENNTWVNQTYVNISNTNFAAGQSVVSVKLAGNSSLCPVSGWAIYSKDNSIRIGSKGDVFVIREPFISCSPLECRTFFLTQGALLNDKHSNGTIKDRSPYRTLMSCPIGEVPSPYNSRFESVAWSASACHDGINWLTIGISGPDNGAVAVLKYNGIITDTIKSWKNNILRTQESECACVNGSCFTVMTDGPSDGQASYKIFRIEKGKIVKSVEMNAPNYHYEECSCYPDSSEITCVCRDNWHGSNRPWVSFNQNLEYRIGYICSGIFGDNPRPNDKTGSCGPVSSNGANGVKGFSFKYGNGVWIGRTKSISSRNGFEMIWDPNGWTGTDNNFSKKQDIIGINEWSGYSGSFVQHPELTGLDCIRPCFWVELIRGRPKENTIWTSGSSISFCGVNSDTVGWSWPDGAELPFTIDK

SEQ ID NO: 20256 - protein, 469 aa, synthetic construct
  REGION 1..469: note = neuraminidase__InfluenzaA__ADW54522
MNPNQKIITIGSVCMIIGMANLILQIGNIISIWISHSIQLGNQNQIETCNQSVITYENNTWVNQTYVNISNTNFAAGQSVVSVKLAGNSSLCPVSGWAIYSKDNSIRIGSKGDVFVIREPFISCSPLECRTFFLTQGALLNDKHSNGTIKDRSPYRTLMSCPIGEVPSPYNSRFESVAWSASACHDGINWLTIGISGPDNGAVAVLKYNGIITDTIKSWRNNRLRTQESECACVNGSCFTVMTDGPSDGQASYKIFRIEKGKIVKSVEMNAPNYHYEECSCYPDSSEITCVCRDNWHGSNRPWVSFNQNLEYQIGYICSGIFGDNPRPNDKTGSCGPVSSNGANGVKGFSFKYGNGVWIGRTKSISSRKGFEMIWDPNGWTGTDNNFSIKQDIVGINEWSGYSGSFVQHPELTGLDCIRPCFWVELIRGRPKENTIWTSGSSISFCGVNSDTVGWSWPDGAELPFTIDK

SEQ ID NO: 20257 - protein, 469 aa, synthetic construct
  REGION 1..469: note = neuraminidase__InfluenzaA__ADW65826
MNPNQKIITIGSVCMTIGMANLILQIGNIISIWISHSIQLGNQSQIETCNQSVITYENNTWVNQTYVNISNTNFAAGQSVVSVKLAGNSSLCPVSGWAIYSKDNSIRIGSKGDVFVIREPFISCSPLECRTFFLTQGALLNDKHSNGTIKDRSPYRTLMSCPIGEVPSPYNSRFESVAWSASACHDGINWLTIGISGPDNGAVAVLKYNGIITDTIKSWRNNILRTQESECACVNGSCFTIMTDGPSDGQASYKIFRIEKGKIVKSVEMNAPNYHYEECSCYPDSSEITCVCRDNWHGSNRPWVSFNQNLEYQIGYICSGIFGDNPRPNDKTGSCGPVSSNGANGVKGFSFKYGNGVWIGRTKSISSRKGFEMIWDPNGWTGTDNNFSIKQDIVGINEWSGYSGSFVQHPELTGLDCIRPCFWVELIRGRPKENTIWTSGSSISFCGVNSDTVGWSWPDGAELPFTIDK

SEQ ID NO: 20258 - protein, 469 aa, synthetic construct; identical to SEQ ID NO: 16599
  REGION 1..469: note = neuraminidase__InfluenzaA__ADW80519

SEQ ID NO: 20259 - protein, 469 aa, synthetic construct; identical to SEQ ID NO: 16599
  REGION 1..469: note = neuraminidase__InfluenzaA__ADW82127

SEQ ID NO: 20260 - protein, 469 aa, synthetic construct; identical to SEQ ID NO: 16599
  REGION 1..469: note = neuraminidase__InfluenzaA__ADW82138

SEQ ID NO: 20261 - protein, 469 aa, synthetic construct; identical to SEQ ID NO: 16599
  REGION 1..469: note = neuraminidase__InfluenzaA__ADW82149

SEQ ID NO: 20262 - protein, 469 aa, synthetic construct; identical to SEQ ID NO: 16599
  REGION 1..469: note = neuraminidase__InfluenzaA__ADW82158

SEQ ID NO: 20263 - protein, 469 aa, synthetic construct; identical to SEQ ID NO: 16599
  REGION 1..469: note = neuraminidase__InfluenzaA__ADW82169

SEQ ID NO: 20264 - protein, 469 aa, synthetic construct; identical to SEQ ID NO: 16599
  REGION 1..469: note = neuraminidase__InfluenzaA__ADW82180

SEQ ID NO: 20265 - protein, 469 aa, synthetic construct; identical to SEQ ID NO: 16738
  REGION 1..469: note = neuraminidase__InfluenzaA__ADW82191

SEQ ID NO: 20266 - protein, 469 aa, synthetic construct; identical to SEQ ID NO: 16738
  REGION 1..469: note = neuraminidase__InfluenzaA__ADW82201

SEQ ID NO: 20267 - protein, 469 aa, synthetic construct; identical to SEQ ID NO: 16738
  REGION 1..469: note = neuraminidase__InfluenzaA__ADW82211

SEQ ID NO: 20268 - protein, 469 aa, synthetic construct; identical to SEQ ID NO: 16738
  REGION 1..469: note = neuraminidase__InfluenzaA__ADW82221

SEQ ID NO: 20269 - protein, 469 aa, synthetic construct; identical to SEQ ID NO: 16738
  REGION 1..469: note = neuraminidase__InfluenzaA__ADW82231

SEQ ID NO: 20270 - protein, 469 aa, synthetic construct; identical to SEQ ID NO: 16738
  REGION 1..469: note = neuraminidase__InfluenzaA__ADW82241

SEQ ID NO: 20271 - protein, 469 aa, synthetic construct; identical to SEQ ID NO: 16738
  REGION 1..469: note = neuraminidase__InfluenzaA__ADW82251

SEQ ID NO: 20272 - protein, 469 aa, synthetic construct; identical to SEQ ID NO: 16738
  REGION 1..469: note = neuraminidase__InfluenzaA__ADW82261

SEQ ID NO: 20273 - protein, 469 aa, synthetic construct; identical to SEQ ID NO: 16738
  REGION 1..469: note = neuraminidase__InfluenzaA__ADW82271

SEQ ID NO: 20274 - protein, 469 aa, synthetic construct; identical to SEQ ID NO: 20257
  REGION 1..469: note = neuraminidase__InfluenzaA__ADW95306

SEQ ID NO: 20275 - protein, 469 aa, synthetic construct; identical to SEQ ID NO: 20257
  REGION 1..469: note = neuraminidase__InfluenzaA__ADW95313

SEQ ID NO: 20276 - protein, 469 aa, synthetic construct; identical to SEQ ID NO: 20257
  REGION 1..469: note = neuraminidase__InfluenzaA__ADW95320

SEQ ID NO: 20277 - protein, 469 aa, synthetic construct; identical to SEQ ID NO: 20257
  REGION 1..469: note = neuraminidase__InfluenzaA__ADW95327

SEQ ID NO: 20278 - protein, 469 aa, synthetic construct
  REGION 1..469: note = neuraminidase__InfluenzaA__ADW95333
MNPNQKIITIGSVCMTIGMANLILQIGNIISIWISHSIQLGNQSQIETCNQSVITYENNTWVNQTYVNISNTNFAAGQSVVSVKLAGNSSLCPVSGWAIYSKDNSIRIGSKGDVFVIREPFISCSPLECRTFFLTQGALLNDKHSNGTIKDRSPYRTLMSCPIGEVPSPYNSRFESVAWSASACHDGINWLTIGISGPDNGAVAVLKYNGIITDTIKSWRNNILRTQESECACVNGSCFTIMTDGPSDGQASYKIFRIEKGKIVKSVEMNAPNYHYEECSCYPDSSEITCVCRDNWHGSNRPWVSFNQNLEYQIGYICSGIFGDNPRPNDKTGSCGPVSSNGANGVKGFSFKYGNGVWIGSAKSISSRKAFEMIWDPNGWTGTDNNFSIKQYIVGINEWSGYSGSFVEHPELTGLDCIRPCFWVELIRGRPKENTIWTSGSSISFCGVNSDTVGWSWPDGAELPFTIDK

SEQ ID NO: 20279 - protein, 469 aa, synthetic construct
  REGION 1..469: note = neuraminidase__InfluenzaA__ADX20813
MNPNQKIITIGSVCMTIGMANLILQIGNIISIWISHSIQLGNQNQIETCNQSVITYENNTWVNQTYVNISNTNFAAGQSVVSVKLAGNSSLCPVSGWAIYSKDNSIRIGSKGDVFVIREPFISCSPLECRTFFLTQGALLNDKHSNGTIKDRSPYRTLMSCPIGEVPSPYNSRFELVAWSASACHDGINWLTIGISGPDNGAVAVLKYNGIITDTIKSWRNNILRTQESECACVNGSCFTVMTDGPSDGQTSYKIFRIEKGKIVKSVEMNAPNYYYEECSCYPDSSEITCVCRDNWHGSNRPWVSFNQNLEYQIGYICSGIFGDNPRPNDKTGSCGPVSSNGANGVKGFSFKYGNGVWIGRTKSISSRKGFEMIWDPNGWTGTDNNFSIKQDIVGINEWSGYSGSFVQHPELTGLDCIRPCFWVELIRGRPKENTIWTSGSSISFCGVNSDTVGWSWPDGAELPFTIDK

SEQ ID NO: 20280 - protein, 469 aa, synthetic construct
  REGION 1..469: note = neuraminidase__InfluenzaA__ADX20814
MNPNQKIITIGSVCMTIGMANLILQIGNIISIWISHSIQLGNQSQIETCNQSVITYENNTWVNQTYVNISNTNFAAGQSVVSVKLAGNSSLCPVSGWAIYSKDNSIRIGSKGDVFVIREPFISCSPLECRTFFLTQGALLNDKHSNGTIKDRSPYRTLMSCPIGEVPSPYNSRFESVAWSASACHDGINWLTIGISGPDNGAVAVLKYNGIITDTIKSWRNNILRTQESECACVNGSCFTIMTDGPSDGQASYKIFRIEKGKIVKSVEMNAPNYYYEECSCYPDSSEITCVCRDNWHGSNRPWVSFNQNLEYQIGYICSGIFGDNPRPNDKTGSCGPVSSNGANGVKGFSFKYGNGVWIGRTKSISSRKGFEMIWDPNGWTGTDNNFSIKQDIVGINEWSGYSGSFVQHPELTGLDCIRPCFWVELIRGRPKENTIWTSGSSISFCGVNSDTVGWSWPDGAELPFTIDK

SEQ ID NO: 20281 - protein, 469 aa, synthetic construct; identical to SEQ ID NO: 16599
  REGION 1..469: note = neuraminidase__InfluenzaA__ADX21091

SEQ ID NO: 20282 - protein, 469 aa, synthetic construct; identical to SEQ ID NO: 16738
  REGION 1..469: note = neuraminidase__InfluenzaA__ADX21101

SEQ ID NO: 20283 - protein, 469 aa, synthetic construct; identical to SEQ ID NO: 17605
  REGION 1..469: note = neuraminidase__InfluenzaA__ADX36112

SEQ ID NO: 20284 - protein, 469 aa, synthetic construct
  REGION 1..469: note = neuraminidase__InfluenzaA__ADX87386
MNPNQRIITIGSVSLTISTICFFMQIAILITTVTLHFKQYEFNSPPNNQVMLCEPTIIERNITEIVYLTNTTIEKEICPKLAEYRNWSKPQCDITGFAPFSKDNSIRLSAGGDIWVTREPYVSCDPDKCYQFALGQGTTLNNVHSNNTVRDRTPYRTLLMNELGVPFHLGTKQVCIAWSSSSCHDGKAWLHVCITGDDKNATASFIYNGRLVDSVVSWSKEILRTQESECVCINGTCTVVMTDGSASGKADTKILFIEEGKIVHTSTLSGSAQHVEECSCYPRYPGVRCVCRDNWKGSNRPIVDINIKDHSIVSSYVCSGLVGDTPRKNDSSSSSHCLDPNNEEGGHGVKGWAFDDGNDVWMGRTISEKSRLGYETFKVIEGWSNPKSKLQINRQVIVDRGNRSGYSGIFSVEGKSCINRCFYVELIRGRKEETEVLWTSNSIVVFCGTSGTYGTGSWPDGADINLMPV

SEQ ID NO: 20285 - protein, 469 aa, synthetic construct
  REGION 1..469: note = neuraminidase__InfluenzaA__ADX96270
MNPNQKIITIGSVCMTIGMANLILQIGNIISIWISHSIQLGNQNQIETCNQSIITYENNTWVNQTYVNISNTNFAAGQSVASVKLAGNSSLCPVSGWAIYSKDNSVRIGSKGDVFVIREPFISCSPLECRTFFLTQGALLNDKHSNGTIKDRSPYRTLMSCPIGEVPSPYNSRFESVAWSASACHDGINWLTIGISGPDNGAVAVLKYNGIITDTIKSWRNNILRTQESECACVNGSCFTVMTDGPSDGQASYKIFRIEKGKIVKSVEMNAPNYHYEECSCYPDSSEITCVCRDNWHGSNRPWVSFNQNLEYQIGYICSGIFGDNPRPNDKTGSCGPVSSNGANGVKGFSFKYGNGVWIGRTKSISSRNGFEMIWDPNGWTGTDNNFSIKQDIVGINEWSGYSGSFVQHPELTGLDCIRPCFWVELIRGRPKENTIWTSGSSISFCGVNSDTVGWSWPDGAELPFTIDK

SEQ ID NO: 20286 - protein, 469 aa, synthetic construct; identical to SEQ ID NO: 20285
  REGION 1..469: note = neuraminidase__InfluenzaA__ADX96280

SEQ ID NO: 20287 - protein, 469 aa, synthetic construct; identical to SEQ ID NO: 17321
  REGION 1..469: note = neuraminidase__InfluenzaA__ADX96290

SEQ ID NO: 20288 - protein, 469 aa, synthetic construct; identical to SEQ ID NO: 16738
  REGION 1..469: note = neuraminidase__InfluenzaA__ADX96300

SEQ ID NO: 20289 - protein, 469 aa, synthetic construct; identical to SEQ ID NO: 16738
  REGION 1..469: note = neuraminidase__InfluenzaA__ADX96310

SEQ ID NO: 20290 - protein, 469 aa, synthetic construct
  REGION 1..469: note = neuraminidase__InfluenzaA__ADX96330
MNPNQKIITIGSVCMTIGMANLILQIGNGISIWISHSIQLGNQNQIETCNQSVITYENNTWVNQTYVNISNTNFAAGQSVVSVKLAGNSSLCPVSGWAIYSKDNSIRIGSKGDVFVIREPFISCSPLECRTFFLTQGALLNDKHSNGTIKDRSPYRTLMSCPIGEVPSPYNSRFESVAWSASACHDGINWLTIGISGPDNGAVAVLKYNGIITDTIKSWRNNILRTQESECACVNGSCFTVMTDGPSDGQASYKIFRIEKGKIVKSVEMNAPNYHYEECSCYPDSNEITCVCRDNWHGSNRPWVSFNQNLEYQIGYICSGIFGDNPRPNDKTGSCGPVSSNGANGVKGFSFKYGNGVWIGRTKSISSRNGFEMIWDPNGWTGTDNNFSIKQDIVGINEWSGYSGSFVQHPELTGLDCIRPCFWVELIRGRPKENTIWTSGSSISFCGVNSDTVGWSWPDGAELPFTIDK

SEQ ID NO: 20291 - protein, 469 aa, synthetic construct; identical to SEQ ID NO: 16738
  REGION 1..469: note = neuraminidase__InfluenzaA__ADX96339

SEQ ID NO: 20292 - protein, 469 aa, synthetic construct
  REGION 1..469: note = neuraminidase__InfluenzaA__ADX96349
MNPNQKIITIGSVCMTIGMANLILQIGNIISIWISHSIQLGNQNQIETCNQSVITYENNTWVNQTYVNISNTNFAAGQSVVSVKLAGNSSLCPVSGWAIYSKDNSIRIGSKGDVFVIREPFISCSPLECRTFFLTQGALLNDKHSNGTIKDRSPYRTLMSCPIGEVPSPYNSRFESVAWSASACHDGINWLTIGISGPDNGAVAVLKYNGIITDTIKSWRNNILRTQESECACVNGSCFTVMTDGPSDGQASYKIFRIEKGKIVKSVEMNAPNYHYEECSCYPDSNEITCVCRDNWHGSNRPWVSFNQNLEYQIGYICSGIFGDNPRPNDKTGSCGPVSSNGANGVKGFSFKYGNGVWIGRTKSISSRNGFEMIWDPNGWTGTDNNFSIKQDIVGINEWSGYSGSFVQHPELTGLDCIRPCFWVELIRGRPKENTIWTSGSSISFCGVNSDTVGWSWPDGAELPFTIDK

SEQ ID NO: 20293 - protein, 469 aa, synthetic construct; identical to SEQ ID NO: 16738
  REGION 1..469: note = neuraminidase__InfluenzaA__ADX96359

SEQ ID NO: 20294 - protein, 469 aa, synthetic construct; identical to SEQ ID NO: 16738
  REGION 1..469: note = neuraminidase__InfluenzaA__ADX96369

SEQ ID NO: 20295 - protein, 469 aa, synthetic construct
  REGION 1..469: note = neuraminidase__InfluenzaA__ADX96380
MNPNQKIITIGSVCMTIGMANLILQIGNIISIWPVHSIQLGNQNQIETCNQSVITYENNTWVNQTYVNISNTNFAAGQSVVSMKLAGNSSLCPVGGWAIYSKDNSVRIGSKGDVFVIREPFISCSPLECRTFFLTQGALLNDKHSNGTIKDRSPYRTLMSCPIGEVPSPYNSRFESVAWSASACHDGINWLTIGISGPDNGAVAVLKYNGIITDTIKSWRNNILRTQESECACVNGSCFTVMTDGPSDGQASYKIFRIEKGKIVESVEMNAPNYHYEECSCYPDSSEITCVCRDNWHGSNRPWVSFNQNLEYQIGYICSGIFGDNPRPNDKTGSCGPVSSNGANGVKGFSFKYGNGVWIGRTKSISSRNGFEMIWDPNGWTGTDNNFSIKQDIVGINEWSGYSGSFVQHPELTGLDCIRPCFWVELIRGRPKENTIWTSGSSISFCGVNSDTVGWSWPDGAELPFTIDK

SEQ ID NO: 20296 - protein, 469 aa, synthetic construct
  REGION 1..469: note = neuraminidase__InfluenzaA__ADX96390
MNPNQKIITIGSVCMTIGMANLILQIGNIISIWLSHSIQLGNQNQIETCNQSVITYENNTWVNQTYVNISNTNFAAGQSVVSVKLAGNSSLCPVSGWAIYSKDNSIRIGSKGDVFVIREPFISCSPLECRTFFLTQGALLNDKHSNGTIKDRSPYRTLMSCPIGEVPSPYNSRFESVAWSASACHDGINWLTIGISGPDNGAVAVLKYNGIITDTIKSWRNNILRTQESECACVNGSCFTVMTDGPSDGQASYKIFRIEKGKIVKSVEMNAPNYHYEECSCYPDSSEITCVCRDNWHGSNRPWVSFNQNLEYQIGYICSGIFGDNPRPNDKTGSCGPVSSNGANGVKGFSFKYGNGVWIGRTKSISSRNGFEMIWDPNGWTGTDNNFSIKQDIVGINEWSGYSGSFVQHPELTGLDCIRPCFWVELIRGRPKENTIWTSGSSISFCGVNSDTVGWSWPDGAELPFTIDK

SEQ ID NO: 20297 - protein, 469 aa, synthetic construct; identical to SEQ ID NO: 16738
  REGION 1..469: note = neuraminidase__InfluenzaA__ADX96400

SEQ ID NO: 20298 - protein, 469 aa, synthetic construct; identical to SEQ ID NO: 16738
  REGION 1..469: note = neuraminidase__InfluenzaA__ADX96410

SEQ ID NO: 20299 - protein, 469 aa, synthetic construct; identical to SEQ ID NO: 16738
  REGION 1..469: note = neuraminidase__InfluenzaA__ADX96419

SEQ ID NO: 20300 - protein, 469 aa, synthetic construct
  REGION 1..469: note = neuraminidase__InfluenzaA__ADX96429
MNPNQKIITIGSVCMTIGMANLILQIGNIISIWISHSIQLGNQNQIETCNQSVITYENNTWVNQTYVNISNTNFAAGQSVVSVKLAGNSSLCPVSGWAIYSKDNSVRIGSKGDVFVIREPFISCSPLECRTFFLTQGALLNDKHSNGTIKDRSPYRTLMSCPIGEVPSPYNSRFESVAWSASACHDGINWLTIGISGPDNGAVAVLKYNGIITDTIKSWRNNILRTQESECACVNGSCFTVMTDGPSNGQASYKIFRIEKGKIVKSVEMNAPNYHYEECSCYPDSSEITCVCRDNWHGSNRPWVSFNQNLEYQIGYICSGIFGDNPRPNDKTGSCGPVSSNGANGVKGFSFKYGNGVWIGRTKSISSRNGFEMIWDPNGWTGTDNNFSIKQDIVRINEWSGYSGSFVQHPELTGLDCIRPCFWVELIRGRPKENTIWTSGSSISFCGVNSDTVGWSWPDGAELPFTIDK

SEQ ID NO: 20301 - protein, 469 aa, synthetic construct; identical to SEQ ID NO: 16738
  REGION 1..469: note = neuraminidase__InfluenzaA__ADX96449

SEQ ID NO: 20302 - protein, 469 aa, synthetic construct; identical to SEQ ID NO: 16738
  REGION 1..469: note = neuraminidase__InfluenzaA__ADX96469

SEQ ID NO: 20303 - protein, 469 aa, synthetic construct; identical to SEQ ID NO: 16738
  REGION 1..469: note = neuraminidase__InfluenzaA__ADX96489

SEQ ID NO: 20304 - protein, 469 aa, synthetic construct; identical to SEQ ID NO: 16738
  REGION 1..469: note = neuraminidase__InfluenzaA__ADX96499

SEQ ID NO: 20305 - protein, 469 aa, synthetic construct
  REGION 1..469: note = neuraminidase__InfluenzaA__ADX96509
MNPNQKIITIGSVCMTIGMANLILQIGNIISIWISHSIQLGNQNQIETCNQSVITYENNTWVNQTYVNISNTNFAAGQSVVSVKLAGNSSLCPVSGWAIYSKDNSIRIGSNGDVFVIREPFISCSPLECRTFFLTQGALLNDKHSNGTIKDRSPYRTLMSCPIGEVPSPYNSRFESVAWSASACHDGINWLTIGISGPDNGAVAVLKYNGIITDTIKSWRNNILRTQESECACVNGSCFTVMTDGPSDGQASYKIFRIEKGKIVKSVEMNAPNYHYEECSCYPDSSEITCVCRDNWHGSNRPWVSFNQNLEYQIGYICSGIFGDNPRPNDKTGSCGPVSSNGANGVKGFSFKYGNGVWIGRTKSISSRNGFEMIWDPNGWTGTDNNFSIKQDIVGINEWSGYSGSFVQHPELTGLDCIRPCFWVELIRGRPKENTIWTSGSSISFCGVNSDTVGWSWPDGAELPFTIDK

SEQ ID NO: 20306 - protein, 469 aa, synthetic construct; identical to SEQ ID NO: 16738
  REGION 1..469: note = neuraminidase__InfluenzaA__ADX96519

SEQ ID NO: 20307 - protein, 469 aa, synthetic construct; identical to SEQ ID NO: 16738
  REGION 1..469: note = neuraminidase__InfluenzaA__ADX96529

SEQ ID NO: 20308 - protein, 469 aa, synthetic construct; identical to SEQ ID NO: 16738
  REGION 1..469: note = neuraminidase__InfluenzaA__ADX96539

SEQ ID NO: 20309 - protein, 469 aa, synthetic construct; identical to SEQ ID NO: 16738
  REGION 1..469: note = neuraminidase__InfluenzaA__ADX96549

SEQ ID NO: 20310 - protein, 469 aa, synthetic construct; identical to SEQ ID NO: 16738
  REGION 1..469: note = neuraminidase__InfluenzaA__ADX96559

SEQ ID NO: 20311 - protein, 469 aa, synthetic construct; identical to SEQ ID NO: 16738
  REGION 1..469: note = neuraminidase__InfluenzaA__ADX96569

SEQ ID NO: 20312 - protein, 469 aa, synthetic construct; identical to SEQ ID NO: 16728
  REGION 1..469: note = neuraminidase__InfluenzaA__ADX96579

SEQ ID NO: 20313 - protein, 469 aa, synthetic construct; identical to SEQ ID NO: 16738
  REGION 1..469: note = neuraminidase__InfluenzaA__ADX96589

SEQ ID NO: 20314 - protein, 469 aa, synthetic construct; identical to SEQ ID NO: 16738
  REGION 1..469: note = neuraminidase__InfluenzaA__ADX96599

SEQ ID NO: 20315 - protein, 469 aa, synthetic construct
  REGION 1..469: note = neuraminidase__InfluenzaA__ADX96609
MNPNQKIITIGSVCMTIGMANLILQIGNIISIWISHSIQLGNQNQIETCNQSVITYENNTWVNQTYVNISNTNFAAGQSVVSVKLAGNSSLCPVGGWAIYSKDNSVRIGSKGDVFVIREPFISCSPLECRTFFLTQGALLNDKHSNGTIKDRSPYRTLMSCPIGEVPSPYNSRFESVAWSASACHDGINWLTIGISGPDNGAVAVLKYNGIITDTIKSWRNNILRTQESECACVNGSCFTVMTDGPSNGQASYKIFRIEKGKIVKSVEMNAPNYHYEECSCYPDSSEITCVCRDNWHGSNRPWVSFNQNLEYQIGYICSGIFGDNPRPNDKTGSCGPVSSNGANGVKGFSFKYGDGVWIGRTKSISSRNGFEMIWDPNGWTGTDNNFSIKQDIVGINEWSGYSGSFVQHPELTGLDCIRPCFWVELIRGRPKENTIWTSGSSISFCGVNSDTVGWSWPDGAELPFTIDK

SEQ ID NO: 20316 - protein, 469 aa, synthetic construct; identical to SEQ ID NO: 16728
  REGION 1..469: note = neuraminidase__InfluenzaA__ADX96619

SEQ ID NO: 20317 - protein, 469 aa, synthetic construct; identical to SEQ ID NO: 16738
  REGION 1..469: note = neuraminidase__InfluenzaA__ADX96629

SEQ ID NO: 20318 - protein, 469 aa, synthetic construct; identical to SEQ ID NO: 16738
  REGION 1..469: note = neuraminidase__InfluenzaA__ADX96639

SEQ ID NO: 20319 - protein, 469 aa, synthetic construct; identical to SEQ ID NO: 16738
  REGION 1..469: note = neuraminidase__InfluenzaA__ADX96649

SEQ ID NO: 20320 - protein, 469 aa, synthetic construct; identical to SEQ ID NO: 16728
  REGION 1..469: note = neuraminidase__InfluenzaA__ADX96659

SEQ ID NO: 20321 - protein, 469 aa, synthetic construct; identical to SEQ ID NO: 16738
  REGION 1..469: note = neuraminidase__InfluenzaA__ADX96669

SEQ ID NO: 20322 - protein, 469 aa, synthetic construct; identical to SEQ ID NO: 16738
  REGION 1..469: note = neuraminidase__InfluenzaA__ADX96679

SEQ ID NO: 20323 - protein, 469 aa, synthetic construct; identical to SEQ ID NO: 16738
  REGION 1..469: note = neuraminidase__InfluenzaA__ADX96689

SEQ ID NO: 20324 - protein, 469 aa, synthetic construct; identical to SEQ ID NO: 16738
  REGION 1..469: note = neuraminidase__InfluenzaA__ADX96699

SEQ ID NO: 20325 - protein, 469 aa, synthetic construct
  REGION 1..469: note = neuraminidase__InfluenzaA__ADX96709
MNPNQKIITIGSVCMTIGMANLILQIGNIISIWISHSIQLGNQNQIETCNQSVITYENNTWVNQTYVNISNTNFAAGQSVVSVKLAGNSSLCPVSGWAIYSKDNSIRIGSKGDVFVIREPFISCSPLECRTFFLTQGALLNDKHSNGTIKDRSPYRTLMSCPIGEVPSPYNSRFESVAWSASACHDGINWLTIGISGPDNGAVAVLKYNGIITDTIKSWRNNILRTQESECACVNGSCFTVMTDGPSDGQASYKIFRIEKGKIVKSVEINAPNYHYEECSCYPDSSEITCVCRDNWHGSNRPWVSFNQNLEYQIGYICSGIFGDNPRPNDETGSCGPVSSNGANGVKGFSFKYGNGVWIGRTKSISSRNGFEMIWDPNGWTGTDNNFSIKQDIVGINEWSGYSGSFVQHPELTGLDCIRPCFWVELIRGRPKENTIWTSGSSISFCGVNSDTVGWSWPDGAELPFTIDK

SEQ ID NO: 20326 - protein, 469 aa, synthetic construct
  REGION 1..469: note = neuraminidase__InfluenzaA__ADX96719
MNPNQKIITIGSVCMTIGMANLILQIGNIISIWISHSIQLGNQNQIETCNQSVITYENNTWVNQTYVNISNTNFAAGQSVVSVKFAGNSSLCPVSGWAIYSKDNSIRIGSKGDVFVIREPFISCSPLECRTFFLTQGALLNDKHSNGTIKDRSPYRTLMSCPIGEVPSPYNSRFESVAWSASACHDGINWLTIGISGPDNGAVAVLKYNGIITDTIKSWRNNILRTQESECACVNGSCFTVMTDGPSDGQASYKIFRIEKGKIVKSVEMNAPNYHYEECSCYPDSSEITCVCRDNWHGSNRPWVSFNQNLEYQIGYICSGIFGDNPRPNDKTGSCGPVSSNGANGVKGFSFKYGNGVWIGRTKSISSRNGFEMIWDPNGWTGTDNNFSIKQDIVGINEWSGYSGSFVQHPELTGLDCIRPCFWVELIRGRPKESTVWTSGSSISFCGVNSDTVGWSWPDGAELPFTIDK

SEQ ID NO: 20327 - protein, 469 aa, synthetic construct; identical to SEQ ID NO: 16738
  REGION 1..469: note = neuraminidase__InfluenzaA__ADX96729

SEQ ID NO: 20328 - protein, 469 aa, synthetic construct
  REGION 1..469: note = neuraminidase__InfluenzaA__ADX96739
MNPNQKIITIGSVCMTIGMANLILQIGNIISIWISHSIQLGNQNQIETCNQSVITYENNTWVNQTYVNISNTNFAAGQSVVSVKLAGNSSLCPVSGWAIYSKDNSIRIGSKGDVFVIREPFISCSPLECRTFFLTQGALLNDKHSNGTIKDRSPYRTLMSCPIGEVPSPYNSRFESVAWSASACHDGINWLTIGISGPDNGAVAVLKYNGIITDTIKSWRNNILRTQESECACVNGSCFTVMTDGPSDGQASYKIFRIEKGKIVKSVEMNAPNYHYEECSCYPDSSEITCVCRDNWHGSNRPWVSFNQNLEYQIGYICSGIFGDNPRPNDKTGSCGPVSSNGANGVKGFSFKYGNGVWIGRTKSISSRNGFEMIWDPNGWTGTDNNFSIKQDIVGINEWSGYSGSFVQHPELTGLDCIRPCFWVELIRGRPKENTIWTSGSSISFCGVKSDTVGWSWPDGAELPFTIDK

SEQ ID NO: 20329 - protein, 469 aa, synthetic construct; identical to SEQ ID NO: 16738
  REGION 1..469: note = neuraminidase__InfluenzaA__ADX96749

SEQ ID NO: 20330 - protein, 469 aa, synthetic construct; identical to SEQ ID NO: 16738
  REGION 1..469: note = neuraminidase__InfluenzaA__ADX96759

SEQ ID NO: 20331 - protein, 469 aa, synthetic construct; identical to SEQ ID NO: 17712
  REGION 1..469: note = neuraminidase__InfluenzaA__ADX96769

SEQ ID NO: 20332 - protein, 469 aa, synthetic construct; identical to SEQ ID NO: 16738
  REGION 1..469: note = neuraminidase__InfluenzaA__ADX96779

SEQ ID NO: 20333 - protein, 469 aa, synthetic construct
  REGION 1..469: note = neuraminidase__InfluenzaA__ADX96789
MNPNQKIITIGSVCMTIGMANLILQIGNIISIWISHSIQLGNQNQIETCNQSVITYENNTWVNQTYVNISNTNFAAGQSVVSLKLAGNSSLCPVSGWAIYSKDNSIRIGSKGDVFVIREPFISCSPLECRTFFLTQGALLNDKHSNGTIKDRSPYRTLMSCPIGEVPSPYNSRFESVAWSASACHDGINWLTIGISGPDNGAVAVLKYNGIITDTIKSWRNNILRTQESECACVNGSCFTVMTDGPSDGQASYKIFRIEKGKIVKSVEMNAPNYHYEECSCYPDSSEITCVCRDNWHGSNRPWVSFNQNLEYQIGYICSGIFGDNPRPNDKTGSCGPVSSNGANGVKGFSFKYGNGVWIGRTKSISSRNGFEMIWDPNGWTGTDNNFSIKQDIVGINEWSGYSGSFVQHPELTGLDCIRPCFWVELIRGRPKENTIWTSGSSISFCGVNSDTVGWSWPDGAELPFTIDK

SEQ ID NO: 20334 - protein, 469 aa, synthetic construct; identical to SEQ ID NO: 16738
  REGION 1..469: note = neuraminidase__InfluenzaA__ADX96799

SEQ ID NO: 20335 - protein, 469 aa, synthetic construct; identical to SEQ ID NO: 16893
  REGION 1..469: note = neuraminidase__InfluenzaA__ADX96809

SEQ ID NO: 20336 - protein, 469 aa, synthetic construct; identical to SEQ ID NO: 16738
  REGION 1..469: note = neuraminidase__InfluenzaA__ADX96819

SEQ ID NO: 20337 - protein, 469 aa, synthetic construct; identical to SEQ ID NO: 17961
  REGION 1..469: note = neuraminidase__InfluenzaA__ADX96829

SEQ ID NO: 20338 - protein, 469 aa, synthetic construct
  REGION 1..469: note = neuraminidase__InfluenzaA__ADX96839
MNPNQKIITIGSVCMTIGMANLILQIGNIISIWISHSIQLGNQNQIETCNQSVITYENNTWVNQTYVNISNTNFAAGQSVVSVKLAGNSSLCPVSGWAIYSKDNNVRIGSKGDVFVIREPFISCSPLECRTFFLTQGALLNDKHSNGTIKDRSPYRTLMSCPIGEVPSPYNSRFESVAWSASACHDGINWLTIGISGPDNGAVAVLKYNGIITDTIKSWRNNILRTQESECACVNGSCFTVMTDGPSDGQASYKIFRIEKGKIVKSVEMNAPNYHYEECSCYPDSSEITCVCRDNWHGSNRPWVSFNQNLEYQIGYICSGIFGDNPRPNDKTGSCGPVSSNGANGVKGFSFKYGNGVWIGRTKSISSRNGFEMIWDPNGWTGTDNNFSIKQDIVGINEWSGYSGSFVQHPELTGLDCIRPCFWVELIRGRPKENTIWTSGSSISFCGVNSDTVGWSWPDGAELPFTIDK

SEQ ID NO: 20339 - protein, 469 aa, synthetic construct; identical to SEQ ID NO: 16738
  REGION 1..469: note = neuraminidase__InfluenzaA__ADX96849

SEQ ID NO: 20340 - protein, 469 aa, synthetic construct; identical to SEQ ID NO: 16738
  REGION 1..469: note = neuraminidase__InfluenzaA__ADX96859

SEQ ID NO: 20341 - protein, 469 aa, synthetic construct; identical to SEQ ID NO: 17961
  REGION 1..469: note = neuraminidase__InfluenzaA__ADX96869

SEQ ID NO: 20342 - protein, 469 aa, synthetic construct; identical to SEQ ID NO: 16738
  REGION 1..469: note = neuraminidase__InfluenzaA__ADX96879

SEQ ID NO: 20343 - protein, 469 aa, synthetic construct; identical to SEQ ID NO: 16738
  REGION 1..469: note = neuraminidase__InfluenzaA__ADX96899

SEQ ID NO: 20344 - protein, 469 aa, synthetic construct
  REGION 1..469: note = neuraminidase__InfluenzaA__ADX96909
MNPNQKIITIGSVCMTIGMANLILQIGNIISIWISHSIQLGNQNQIETCNQSVITYENNTWVNQTYVNISNTNFAAGQSVVSVKLAGNSSLCPVSGWAIYSKDNSIRIGSKGDVFVIREPFISCSPLECRTFFLTQGALLNDKHSNGTIKDRSPYRTLMSCPIGEVPSPYNSRFESVAWSASACHDGINWLTIGISGPDNGAVAVLKYNGIITDTIKSWRNDILRTQESECACVNGSCFTVMTDGPSDGQASYKIFRIEKGKIVKSVEINAPNYHYEECSCYPDSSEITCVCRDNWHGSNRPWVSFNQNLEYQIGYICSGIFGDNPRPNDKTGSCGPVSSNGANGVKGFSFKYGNGVWIGRTKSINSRNGFEMIWDPNGWTGTDNNFSIKQDIVGINEWSGYSGSFVQHPELTGLDCIRPCFWVELIRGRPKENTIWTSGSSISFCGVNSDTVGWSWPDGAELPFTIDK

SEQ ID NO: 20345 - protein, 469 aa, synthetic construct; identical to SEQ ID NO: 16738
  REGION 1..469: note = neuraminidase__InfluenzaA__ADX96919

SEQ ID NO: 20346 - protein, 469 aa, synthetic construct; identical to SEQ ID NO: 16738
  REGION 1..469: note = neuraminidase__InfluenzaA__ADX96929

SEQ ID NO: 20347 - protein, 469 aa, synthetic construct; identical to SEQ ID NO: 16738
  REGION 1..469: note = neuraminidase__InfluenzaA__ADX96939

SEQ ID NO: 20348 - protein, 469 aa, synthetic construct; identical to SEQ ID NO: 17321
  REGION 1..469: note = neuraminidase__InfluenzaA__ADX96949

SEQ ID NO: 20349 - protein, 469 aa, synthetic construct; identical to SEQ ID NO: 16738
  REGION 1..469: note = neuraminidase__InfluenzaA__ADX96959

SEQ ID NO: 20350 - protein, 469 aa, synthetic construct
  REGION 1..469: note = neuraminidase__InfluenzaA__ADX96969
MNPNQMIITIGSVCMTIGMANLILQIGNIISIWISHSIQLGNQNQIETCNQSVITYENNTWVNQTYVNISNTNFAAGQSVVSVKLAGNSSLCPVSGWAIYSKDNSVRIGSKGDVFVIREPFISCSPLECRTFFLTQGALLNDKHSNGTIKDRSPYRTLMSCPIGEVPSPYNSRFESVAWSASACHDGINWLTIGISGPDNGAVAVLKYNGIITDTIKSWRNNILRTQESECACVNGSCFTVMTDGPSNGQASYKIFRIEKGKIVKSVEMNAPNYHYEECSCYPDSSEITCVCRDNWHGSNRPWVSFNQNLEYQIGYICSGIFGDNPRPNDKTGSCGPVSSNGANGVKGFSFKYGNGVWIGRTKSISSRNGFEMIWDPNGWTGTDNNFSIKQDIVGINEWSGYSGSFVQHPELTGLDCIRPCFWVELIRGRPKENTIWTSGSSISFCGVNSDTVGWSWPDGAELPFTIDK

SEQ ID NO: 20351 - protein, 469 aa, synthetic construct; identical to SEQ ID NO: 17961
  REGION 1..469: note = neuraminidase__InfluenzaA__ADX96979

SEQ ID NO: 20352 - protein, 469 aa, synthetic construct; identical to SEQ ID NO: 17961
  REGION 1..469: note = neuraminidase__InfluenzaA__ADX96989

SEQ ID NO: 20353 - protein, 468 aa, synthetic construct
  REGION 1..468: note = neuraminidase__InfluenzaA__ADX96999
MNPNQKIITIGSVCMTIGMANLILQIGIISIWISHSIQLGNQNQIETCNQSVITYENNTWVNQTYVNISNTNFAAGQSVVSVKLAGNSSLCPVSGWAIYSKDNSIRIGSKGDVFVIREPFISCSPLECRTFFLTQGALLNDKHSNGTIKDRSPYRTLMSCPIGEVPSPYNSRFESVAWSASACHDGINWLTIGISGPDNGAVAVLKYNGIITDTIKSWRNNILRTQESECACVNGSCFTVMTDGPSNGQASYKIFRIEKGKIVKSVEMNAPNYHYEECSCYPDSSEITCVCRDNWHGSNRPWVSFNQNLEYQIGYICSGIFGDNPRPNDKTGSCGPVSSNGANGVKGFSFKYGNGVWIGRTKSISSRNGFEMIWDPNGWTGTDNNFSIKQDIVGINEWSGYSGSFVQHPELTGLDCIRPCFWVELIRGRPKENTIWTSGSSISFCGVNSDTVGWSWPDGAELPFTIDK

SEQ ID NO: 20354 - protein, 469 aa, synthetic construct; identical to SEQ ID NO: 16738
  REGION 1..469: note = neuraminidase__InfluenzaA__ADX97009

SEQ ID NO: 20355 - protein, 469 aa, synthetic construct; identical to SEQ ID NO: 16893
  REGION 1..469: note = neuraminidase__InfluenzaA__ADX97020

SEQ ID NO: 20356 - protein, 469 aa, synthetic construct
  REGION 1..469: note = neuraminidase__InfluenzaA__ADX97030
MNPNQKIITIGSVCMIIGMANLMLQIGNIISIWISHSIQLGNQNQIETCNQSVITYENNTWVNQTYVNISNTNFAAGQSVVSVKLAGNSSLCPVSGWAIYSKDNSVRIGSKGDVFVIREPFISCSPLECRTFFLTQGALLNDKHSNGTIKDRSPYRTLMSCPIGEVPSPYNSRFESVAWSASACHDGINWLTIGISGPDNGAVAVLKYNGIITDTIKSWRNNILRTQESECACVNGSCFTVMTDGPSDGQASYKIFRIEKGKIVKSVEMNAPNYHYEECSCYPDSSEITCVCRDNWHGSNRPWVSFNQNLEYQIGYICSGIFGDNPRPNDKTGSCGPVSSNGANGVKGFSFKYGNGVWIGRTKSISSRNGFEMIWDPNGWTGTDNNFSIKQDIVGINEWSGYSGSFVQHPELTGLDCIRPCFWVELIRGRPKENTIWTSGSSISFCGVNSDTVGWSWPDGAELPFTIDK

SEQ ID NO: 20357 - protein, 469 aa, synthetic construct; identical to SEQ ID NO: 18286
  REGION 1..469: note = neuraminidase__InfluenzaA__ADX98643

SEQ ID NO: 20358 - protein, 469 aa, synthetic construct; identical to SEQ ID NO: 16738
  REGION 1..469: note = neuraminidase__InfluenzaA__ADX98653

SEQ ID NO: 20359 - protein, 469 aa, synthetic construct
  REGION 1..469: note = neuraminidase__InfluenzaA__ADX98668
MNPNQKIITIGSICITIGMANLILQIGNIISIWISHSIQLGNQNQIETCNQSVITYENNTWVNQTYVNISNTNFAAGQSVVSVKLAGNSSLCPVSGWAIYSKDNSIRIGSKGDVFVIREPFISCSPLECRTFFLTQGALLNDKHSNGTIKDRSPYRTLMSCPIGEVPSPYNSRFESVAWSASACHDGINWLTIGISGPDNGAVAVLKYNGIITDTIKSWRNNILRTQESECACVNGSCFTVMTDGPSDGQASYKIFRIEKGKIVKSVEMNAPNYHYEECSCYPDSSEITCVCRDNWHGSNRPWVSFNQNLEYQIGYICSGIFGDNPRPNDKTGSCGPVSSNGANGVKGFSFKYGNGVWIGRTKSISSRNGFEMIWDPNGWTGTDNNFSIKQDIVGINEWSGYSGSFVQHPELTGLDCIRPCFWVELIRGRPKENTIWTSGSSISFCGVNSDTVGWSWPDGAELPFTIDK

SEQ ID NO: 20360 - protein, 469 aa, synthetic construct; identical to SEQ ID NO: 16738
  REGION 1..469: note = neuraminidase__InfluenzaA__ADX98678

SEQ ID NO: 20361 - protein, 469 aa, synthetic construct; identical to SEQ ID NO: 16738
  REGION 1..469: note = neuraminidase__InfluenzaA__ADX98698

SEQ ID NO: 20362 - protein, 469 aa, synthetic construct
  REGION 1..469: note = neuraminidase__InfluenzaA__ADX98708
MNPNQKIITIGSVCMTIGMANLILQIGNIISIWISHSIQLGNQNQIETCNQSVIIYENNTWVNQTYVNISNTNFAAGQSVVSVKLAGNSSLCPVSGWAIYSKDNSIRIGSKGDVFVIREPFISCSPLECRTFFLTQGALLNDKHSNGTIKDRSPYRTLMSCPIGEVPSPYNSRFESVAWSASACHDGINWLTIGISGPDNGAVAVLKYNGIITDTIKSWRNNILRTQESECACVNGSCFTVMTDGPSDGQASYKIFRIEKGKIVKSVEMNAPNYHYEECSCYPDSSEITCVCRDNWHGSNRPWVSFNQNLEYQIGYICSGIFGDNPRPNDKTGSCGPVSSNGANGVKGFSFKYGNGVWIGRTKSISSRNGFEMIWDPNGWTGTDNNFSIKQDIVGINEWSGYSGSFVQHPELTGLDCIRPCFWVELIRGRPKENTIWTSGSSISFCGVNSDTVGWSWPDGAELPFTIDK

SEQ ID NO: 20363 - protein, 469 aa, synthetic construct; identical to SEQ ID NO: 16738
  REGION 1..469: note = neuraminidase__InfluenzaA__ADX98722

SEQ ID NO: 20364 - protein, 469 aa, synthetic construct; identical to SEQ ID NO: 16738
  REGION 1..469: note = neuraminidase__InfluenzaA__ADX98732

SEQ ID NO: 20365 - protein, 469 aa, synthetic construct; identical to SEQ ID NO: 16738
  REGION 1..469: note = neuraminidase__InfluenzaA__ADX98742

SEQ ID NO: 20366 - protein, 469 aa, synthetic construct; identical to SEQ ID NO: 18089
  REGION 1..469: note = neuraminidase__InfluenzaA__ADX98751

SEQ ID NO: 20367 - protein, 469 aa, synthetic construct; identical to SEQ ID NO: 16738
  REGION 1..469: note = neuraminidase__InfluenzaA__ADX98761

SEQ ID NO: 20368 - protein, 469 aa, synthetic construct
  REGION 1..469: note = neuraminidase__InfluenzaA__ADX98770
MNPNQKIITIGSVCMTIGMANLILQIGNIISIWISHSIQLGNQNQIETCNQSVITYENNTWVNQTYVNISNTNFAAGQSVVSVKLAGNSSLCPVSGWAIYSKDNSIRIGSKGDVFVIREPFISCSPLECRTFFLTQGALLNDKHSNGTIKDRSPYRTLMSCPIGEVPSPYNSRFESVAWSASACHDGINWLTIGISGPDNGAVAVLKYNGIITDTIKSWRNNILRTQESECACVNGSCFTVMTDGPSDGQASYKIFRIEKGKIVKSVEMNAPNYHYEECSCYPDSSEITCVCRDNWHGSNRPWGSFNQNLEYQIGYICSGIFGDNPRPNDKTGSCGPVSSNGANGVKGFSFKYGNGVWIGRTKSISSRNGFEMIWDPNGWTGTDNNFSIKQDIVGINEWSGYSGSFVQHPELTGLDCIRPCFWVELIRGRPKENTIWTSGSSISFCGVNSDTVGWSWPDGAELPFTIDK

SEQ ID NO: 20369 - protein, 469 aa, synthetic construct; identical to SEQ ID NO: 16738
  REGION 1..469: note = neuraminidase__InfluenzaA__ADX98780

SEQ ID NO: 20370 - protein, 469 aa, synthetic construct
  REGION 1..469: note = neuraminidase__InfluenzaA__ADX98788
MNPNQKIITIGSVCMTIGMANLVLQIGNIISIWISHSIQLGNQNQIETCNQSVITYENNTWVNQTYVNISNTNFAAGQSVVSVKLAGNSSLCPVSGWAIYSKDNSIRIGSKGDVFVIREPFISCSPLECRTFFLTQGALLNDKHSNGTIKDRSPYRTLMSCPIGEVPSPYNSRFESVAWSASACHDGINWLTIGISGPDNGAVAVLKYNGIITDTIKSWRNNILRTQESECACVNGSCFTVMTDGPSDGQASYKIFRIEKGKIVKSVEMNAPNYHYEECSCYPDSSEITCVCRDNWHGSNRPWVSFNQNLEYQIGYICSGIFGDNPRPNDKTGSCGPVSSNGANGVKGFSFKYGNGVWIGRTKSISSRNGFEMIWDPNGWTGTDNKFSIKQDIVGINEWSGYSGSFVQHPELTGLDCIRPCFWVELIRGRPKENTIWTSGSSISFCGVNSDTVGWSWPDGAELPFTIDK

SEQ ID NO: 20371 - protein, 469 aa, synthetic construct
  REGION 1..469: note = neuraminidase__InfluenzaA__ADX98809
MNPNQKIITIGSVCMTIGMANLILQIGNIILIWISHSIQLGNQNQIETCNQSVITYENNTWVNQTYVNISNTNFAAGQSVVSVKLAGNSSLCPVSGWAIYSKDNSIRIGSKGDVFVIREPFISCSPLECRTFFLTQGALLNDKHSNGTIKDRSPYRTLMSCPIGEVPSPYNSRFESVAWSASACHDGINWLTIGISGPDNGAVAVLKYNGIITDTIKSWRNNILRTQESECACVNGSCFTVMTDGPSDGQASYKIFRIEKGKIVKSVEMNAPNYHYEECSCYPDSSEITCVCRDNWHGSNRPWVSFNQNLEYQIGYICSGIFGDNPRPNDKTGSCGPVSSNGANGVKGFSFKYGNGVWIGRTKSISSRNGFEMIWDPNGWTGTDNNFSIKQDIVGINEWSGYSGSFVQHPELTGLDCIRPCFWVELIRGRPKENTIWTSGSSISFCGVNSDTVGWSWPDGAELPFTIDK

SEQ ID NO: 20372 - protein, 469 aa, synthetic construct; identical to SEQ ID NO: 16738
  REGION 1..469: note = neuraminidase__InfluenzaA__ADX98821

SEQ ID NO: 20373 - protein, 469 aa, synthetic construct; identical to SEQ ID NO: 16738
  REGION 1..469: note = neuraminidase__InfluenzaA__ADX98846

SEQ ID NO: 20374 - protein, 469 aa, synthetic construct
  REGION 1..469: note = neuraminidase__InfluenzaA__ADX98856
MNPNQKIMTIGSVCMTIGMANLILQIGNIISIWISHSIQLGIQNQIETCNQSVITYENNTWVNQTYVNISNTNFAAGQSVVSVKLAGNSSLCPVSGWAIYSKDNSIRIGSKGDVFVIREPFISCSPLECRTFFLTQGALLNDKHSNGTIKDRSPYRTLMSCPIGEVPSPYNSRFESVAWSASACHDGINWLTIGISGPDNGAVAVLKYNGIITDTIKSWRNNILRTQESECACVNGSCFTVMTDGPSDGQASYKIFRIEKGKIVKSVEMNAPNYHYEECSCYPDSSEITCVCRDNWHGSNRPWVSFNQNLEYQIGYICSGIFGDNPRPNDKTGSCGPVSSNGANGVKGFSFKYGNGVWIGRTKSISSRNGFEMIWDPNGWTGTDNNFSIKQDIVGINEWSGYSGSFVQHPELTGLDCIRPCFWVELIRGRPKENTIWTSGSSISFCGVNSDTVGWSWPDGAELPFTIDK

SEQ ID NO: 20375 - protein, 469 aa, synthetic construct; identical to SEQ ID NO: 16738
  REGION 1..469: note = neuraminidase__InfluenzaA__ADX98863

SEQ ID NO: 20376 - protein, 469 aa, synthetic construct; identical to SEQ ID NO: 16738
  REGION 1..469: note = neuraminidase__InfluenzaA__ADX98873

SEQ ID NO: 20377 - protein, 469 aa, synthetic construct
  REGION 1..469: note = neuraminidase__InfluenzaA__ADX98883
MNPNQKIITIGSVCMTIGMANLILQIGNIISIWISHSIQLGNQNQIETCNQSVITYENNTWVNQTYVNISNTNVAAGQSVVSVKLAGNSSLCPVSGWAIYSKDNSIRIGSKGDAFVIREPFISCSPLECRTFFLTQGALLNDKHSNGTIKDRSPYRTLMSCPIGEVPSPYNSRFESVAWSASACHDGINWLTIGISGPDNGAVAVLKYNGIITDTIKSWRNNILRTQESECACVNGSCFTVMTDGPSDGQASYKIFRIEKGKIVKSVEMNAPNYHYEECSCYPDSSEITCVCRDNWHGSNRPWVSFNQNLEYQIGYICSGIFGDNPRPNDKTGSCGPVSSNGANGVKGFSFKYGNGVWIGRTKSISSRSGFEMIWDPNGWTGTDNNFSIKQDIVGINEWSGYSGSFVQHPELTGLDCIRPCFWVELIRGRPKENTIWTSGSSISFCGVNSDTVGWSWPDGAELPFTIDK

SEQ ID NO: 20378 - protein, 469 aa, synthetic construct; identical to SEQ ID NO: 16738
  REGION 1..469: note = neuraminidase__InfluenzaA__ADX98893

SEQ ID NO: 20379 - protein, 469 aa, synthetic construct; identical to SEQ ID NO: 16738
  REGION 1..469: note = neuraminidase__InfluenzaA__ADX98903

SEQ ID NO: 20380 - protein, 469 aa, synthetic construct; identical to SEQ ID NO: 18291
  REGION 1..469: note = neuraminidase__InfluenzaA__ADX98913

SEQ ID NO: 20381 - protein, 469 aa, synthetic construct; identical to SEQ ID NO: 18169
  REGION 1..469: note = neuraminidase__InfluenzaA__ADX98923

SEQ ID NO: 20382 - protein, 469 aa, synthetic construct; identical to SEQ ID NO: 18175
  REGION 1..469: note = neuraminidase__InfluenzaA__ADX98933

SEQ ID NO: 20383 - protein, 469 aa, synthetic construct; identical to SEQ ID NO: 16738
  REGION 1..469: note = neuraminidase__InfluenzaA__ADX98943

SEQ ID NO: 20384 - protein, 469 aa, synthetic construct; identical to SEQ ID NO: 18695
  REGION 1..469: note = neuraminidase__InfluenzaA__ADX98953

SEQ ID NO: 20385 - protein, 469 aa, synthetic construct; identical to SEQ ID NO: 16738
  REGION 1..469: note = neuraminidase__InfluenzaA__ADX98963

SEQ ID NO: 20386 - protein, 469 aa, synthetic construct
  REGION 1..469: note = neuraminidase__InfluenzaA__ADX98973
MNPNQKIITIGSVCMTIGMANLILQIGNIISIWISHSIQLGNQNQIETCNQSVITYENNTWVNQTYVNISNTNFAAGQSVVSVKLAGNSSLCPVSGWAIYSKDNSIRIGSKGDVFVIREPFISCSPLECRTFFLTQGALLNDKHSNGTIKDRSPYRTLMICPIGEVPSPYNSRFESVAWSASACHDGINWLTIGISGPDNGAVAVLKYNGIITDTIKSWRNNILRTQESECACVNGSCFTVMTDGPSDGQASYKIFRIEKGKIVKSVEMNAPNYHYEECSCYPDSSEITCVCRDNWHGSNRPWVSFNQNLEYQIGYICSGIFGDNPRPNDKTGSCGPVSSNGANGVKGFSFKYGNGVWIGRTKSISSRNGFEMIWDPNGWTGTDNNFSIKQDIVGINEWSGYSGSFVQHPELTGLDCIRPCFWVELIRGRPKENTIWTSGSSISFCGVNSDTVGWSWPDGAELPFTIDK

SEQ ID NO: 20387 - protein, 469 aa, synthetic construct; identical to SEQ ID NO: 16738
  REGION 1..469: note = neuraminidase__InfluenzaA__ADX98983

SEQ ID NO: 20388 - protein, 469 aa, synthetic construct; identical to SEQ ID NO: 16738
  REGION 1..469: note = neuraminidase__InfluenzaA__ADX98993

SEQ ID NO: 20389 - protein, 469 aa, synthetic construct; identical to SEQ ID NO: 16738
  REGION 1..469: note = neuraminidase__InfluenzaA__ADX99003

SEQ ID NO: 20390 - protein, 454 aa, synthetic construct
  REGION 1..454: note = neuraminidase__InfluenzaA__ADX99584
MNPNQKITTIGSICLVVGLISLILQIGNIISIWISHSIQTGSQNHTGICNQNIITYKNSTWVKDTTSVILTGNSSLCPIRGWAIYSKDNSIRIGSKGDVFVIREPFISCSHLECRTFFLTQGALLNDKHSNGTVKDRSPYRALMSCPVGEAPSPYNSRFESVAWSASACHDGMGWLTIGISGPDNGAVAVLKYNGIITETIKSWRKKILRTQESECACVNGSCFTIMTDGPSDGLASYKIFKIEKGKVTKSIELNAPNSHYEECSCYPDTGKVMCVCRDNWHGSNRPWVSFDQNLDYQIGYICSGVFGDNPRPEDGTGSCGPVYVDGANGVKGFSYRYGNGVWIGRTKSHSSRHGFEMIWDPNGWTETDSKFSVRQDVVAMTDWSGYSGSFVQHPELTGLDCMRPCFWVELIRGRPKEKTIWTSASSISFCGVNSDTVDWSWPDGAELPFSIDK

SEQ ID NO: 20391 - protein, 454 aa, synthetic construct; identical to SEQ ID NO: 20390
  REGION 1..454: note = neuraminidase__InfluenzaA__ADX99595

SEQ ID NO: 20392 - protein, 454 aa, synthetic construct; identical to SEQ ID NO: 20390
  REGION 1..454: note = neuraminidase__InfluenzaA__ADX99606

SEQ ID NO: 20393 - protein, 454 aa, synthetic construct; identical to SEQ ID NO: 20390
  REGION 1..454: note = neuraminidase__InfluenzaA__ADX99617

SEQ ID NO: 20394 - protein, 454 aa, synthetic construct; identical to SEQ ID NO: 20390
  REGION 1..454: note = neuraminidase__InfluenzaA__ADX99628

SEQ ID NO: 20395 - protein, 454 aa, synthetic construct; identical to SEQ ID NO: 20390
  REGION 1..454: note = neuraminidase__InfluenzaA__ADX99639

SEQ ID NO: 20396 - protein, 454 aa, synthetic construct; identical to SEQ ID NO: 15719
  REGION 1..454: note = neuraminidase__InfluenzaA__ADX99650

SEQ ID NO: 20397 - protein, 454 aa, synthetic construct; identical to SEQ ID NO: 15719
  REGION 1..454: note = neuraminidase__InfluenzaA__ADX99672

SEQ ID NO: 20398 - protein, 454 aa, synthetic construct; identical to SEQ ID NO: 15719
  REGION 1..454: note = neuraminidase__InfluenzaA__ADX99683

SEQ ID NO: 20399 - protein, 454 aa, synthetic construct; identical to SEQ ID NO: 15719
  REGION 1..454: note = neuraminidase__InfluenzaA__ADX99694

SEQ ID NO: 20400 - protein, 454 aa, synthetic construct; identical to SEQ ID NO: 15719
  REGION 1..454: note = neuraminidase__InfluenzaA__ADX99705

SEQ ID NO: 20401 - protein, 454 aa, synthetic construct; identical to SEQ ID NO: 15719
  REGION 1..454: note = neuraminidase__InfluenzaA__ADX99846

SEQ ID NO: 20402 - protein, 454 aa, synthetic construct; identical to SEQ ID NO: 15719
  REGION 1..454: note = neuraminidase__InfluenzaA__ADX99857

SEQ ID NO: 20403 - protein, 454 aa, synthetic construct; identical to SEQ ID NO: 15719
  REGION 1..454: note = neuraminidase__InfluenzaA__ADX99868

SEQ ID NO: 20404 - protein, 454 aa, synthetic construct; identical to SEQ ID NO: 15719
  REGION 1..454: note = neuraminidase__InfluenzaA__ADX99879

SEQ ID NO: 20405 - protein, 454 aa, synthetic construct; identical to SEQ ID NO: 15719
  REGION 1..454: note = neuraminidase__InfluenzaA__ADX99890

SEQ ID NO: 20406 - protein, 454 aa, synthetic construct; identical to SEQ ID NO: 15719
  REGION 1..454: note = neuraminidase__InfluenzaA__ADX99901

SEQ ID NO: 20407 - protein, 454 aa, synthetic construct
  REGION 1..454: note = neuraminidase__InfluenzaA__ADX99912
MNPNQKIITIGSICLVVGLISLILQIGNIISIWISHSIQTGSQNHTGICNQNIITYKNSTWVKDTTSVILTGNSSLCPIRGWAIYSKDNSIRIGSKGDVFIIREPFISCSHLECRTFFLTQGALLNDKHSSGTVKDRSPYRALMSCPVGEAPSPYNSRFESVAWSASACHDGMGWLTIGISGPDNGAVAVLKYNGIITETIKSWRKKILRTQESECACVNGSCFTIMTDGPSDGLASYKIFKIEKGKVTKSIELNAPNSHYEECSCYPDTGKVMCVCRDNWHGSNRPWVSFDQNLDYQIGYICSGVFGDNPRPEDGTGSCGPVYVDGANGVKGFSYRYGNGVWIGRTKSHSSRHGFEMIWDPNGWTETDSKFSVRQDVVAMTDWSGYSGSFVQHPELTGLDCMRPCFWVELIRGRPKEKTIWTSASSISFCGVNSDTVDWSWPDGAELPFSIDK

SEQ ID NO: 20408 - protein, 454 aa, synthetic construct; identical to SEQ ID NO: 15719
  REGION 1..454: note = neuraminidase__InfluenzaA__ADX99923

SEQ ID NO: 20409 - protein, 454 aa, synthetic construct; identical to SEQ ID NO: 15719
  REGION 1..454: note = neuraminidase__InfluenzaA__ADX99934

SEQ ID NO: 20410 - protein, 454 aa, synthetic construct; identical to SEQ ID NO: 15719
  REGION 1..454: note = neuraminidase__InfluenzaA__ADX99956

SEQ ID NO: 20411 - protein, 454 aa, synthetic construct; identical to SEQ ID NO: 15719
  REGION 1..454: note = neuraminidase__InfluenzaA__ADX99967

SEQ ID NO: 20412 - protein, 454 aa, synthetic construct; identical to SEQ ID NO: 15719
  REGION 1..454: note = neuraminidase__InfluenzaA__ADX99978

SEQ ID NO: 20413 - protein, 454 aa, synthetic construct; identical to SEQ ID NO: 15719
  REGION 1..454: note = neuraminidase__InfluenzaA__ADX99989

SEQ ID NO: 20414 - protein, 454 aa, synthetic construct; identical to SEQ ID NO: 15719
  REGION 1..454: note = neuraminidase__InfluenzaA__ADY00001

SEQ ID NO: 20415 - protein, 454 aa, synthetic construct; identical to SEQ ID NO: 15719
  REGION 1..454: note = neuraminidase__InfluenzaA__ADY00012

SEQ ID NO: 20416 - protein, 454 aa, synthetic construct; identical to SEQ ID NO: 15719
  REGION 1..454: note = neuraminidase__InfluenzaA__ADY00023

SEQ ID NO: 20417 - protein, 470 aa, synthetic construct
  REGION 1..470: note = neuraminidase__InfluenzaA__ADY04729
MNPNQKIITIGSISIAIGIISLMLQIGNIISIWASHSIQTGSQNHTGVCNQRIITYENSTWVNHTYVNINNTNVIAGKDKTSVTMAGNSSLCSISGWAIYTKDNSIRIGSKGDVFVIREPFISCSHLECRTFFLTQGALLNDKHSNGTVKDRSPYRALMSCPLGEAPSPYNSKFESVAWSASACHDGMGWLTIGISGPDNGAVAVLKYNGIITETIKSWKKQILRTQESECVCVNGSCFTIMTDGPSNGAASYKIFKIEKGKVTKSIELNAPNFHYEECSCYPDTGTVMCVCRDNWHGSNRPWVSFNQNLDYQIGYICSGVFGDNPRPKDGEGSCNPVTVDGANGVKGFSYKYGNGVWIGRTKSNRLRKGFEMIWDPNGWTDTDSDFSVKQDVVAITDWSGYSGSFVQHPELTGLDCIRPCFWVELVRGLPKENTTIWTSGSSISFCGVNSDTANWSWPDGAELPFTIDK

SEQ ID NO: 20418 - protein, 469 aa, synthetic construct; identical to SEQ ID NO: 19518
  REGION 1..469: note = neuraminidase__InfluenzaA__ADY11828

SEQ ID NO: 20419 - protein, 469 aa, synthetic construct; identical to SEQ ID NO: 16599
  REGION 1..469: note = neuraminidase__InfluenzaA__ADY11839

SEQ ID NO: 20420 - protein, 469 aa, synthetic construct; identical to SEQ ID NO: 16599
  REGION 1..469: note = neuraminidase__InfluenzaA__ADY17657

SEQ ID NO: 20421 - protein, 469 aa, synthetic construct; identical to SEQ ID NO: 16599
  REGION 1..469: note = neuraminidase__InfluenzaA__ADY17668

SEQ ID NO: 20422 - protein, 469 aa, synthetic construct; identical to SEQ ID NO: 16599
  REGION 1..469: note = neuraminidase__InfluenzaA__ADY17679

SEQ ID NO: 20423 - protein, 469 aa, synthetic construct; identical to SEQ ID NO: 16599
  REGION 1..469: note = neuraminidase__InfluenzaA__ADY17690

SEQ ID NO: 20424 - protein, 469 aa, synthetic construct; identical to SEQ ID NO: 16599
  REGION 1..469: note = neuraminidase__InfluenzaA__ADY17701

SEQ ID NO: 20425 - protein, 469 aa, synthetic construct; identical to SEQ ID NO: 16738
  REGION 1..469: note = neuraminidase__InfluenzaA__ADY38722

SEQ ID NO: 20426 - protein, 469 aa, synthetic construct; identical to SEQ ID NO: 18487
  REGION 1..469: note = neuraminidase__InfluenzaA__ADY38723

SEQ ID NO: 20427 - protein, 469 aa, synthetic construct; identical to SEQ ID NO: 16738
  REGION 1..469: note = neuraminidase__InfluenzaA__ADY38734

SEQ ID NO: 20428 - protein, 469 aa, synthetic construct; identical to SEQ ID NO: 18330
  REGION 1..469: note = neuraminidase__InfluenzaA__ADY38753

SEQ ID NO: 20429 - protein, 469 aa, synthetic construct; identical to SEQ ID NO: 16738
  REGION 1..469: note = neuraminidase__InfluenzaA__ADY38763

SEQ ID NO: 20430 - protein, 469 aa, synthetic construct; identical to SEQ ID NO: 16738
  REGION 1..469: note = neuraminidase__InfluenzaA__ADZ04600

SEQ ID NO: 20431 - protein, 469 aa, synthetic construct; identical to SEQ ID NO: 16738
  REGION 1..469: note = neuraminidase__InfluenzaA__ADZ04610

SEQ ID NO: 20432 - protein, 469 aa, synthetic construct; identical to SEQ ID NO: 16738
  REGION 1..469: note = neuraminidase__InfluenzaA__ADZ04693

SEQ ID NO: 20433 - protein, 469 aa, synthetic construct; identical to SEQ ID NO: 16738
  REGION 1..469: note = neuraminidase__InfluenzaA__ADZ04701

SEQ ID NO: 20434 - protein, 469 aa, synthetic construct; identical to SEQ ID NO: 16738
  REGION 1..469: note = neuraminidase__InfluenzaA__ADZ04711

SEQ ID NO: 20435 - protein, 469 aa, synthetic construct
  REGION 1..469: note = neuraminidase__InfluenzaA__ADZ05393
MNPNQKIITIDSVCMTIGMANLILQIGNIISIWISHSIQLGNQNQIETCNQSVITYENNTWVNQTYVNISNTNFAAGQSVVSVKLAGNSSLCPVSGWAIYSKDNSVRIGSKGDVFVIREPFISCSPLECRTFFLTQGALLNDKHSNGTIKDRSPYRTLMSCPIGEVPSPYNSRFESVAWSASACHDGINWLTIGISGPDNGAVAVLKYNGIITDTIKSWRNNILRTQESECACVNGSCFTVMTDGPSNGQASYKIFRIEKGKIVKSVEMNAPNYHYEECSCYPDSSEITCVCRDNWHGSNRPWVSFNQNLEYQIGYICSGIFGDNPRPNDKTGSCGPVSSNGANGVKGFSFKYGNGVWIGRTKSISSRNGFEMIWDPNGWTGTDNNFSIKQDIVGINEWSGYSGSFVQHPELTGLDCIRPCFWVELIRGRPKENTIWTSGSSISFCGVNSDTVGWSWPDGAELPFTIDK

SEQ ID NO: 20436 - protein, 470 aa, synthetic construct
  REGION 1..470: note = neuraminidase__InfluenzaA__ADZ05837
MNPNQKIITIGSISIAIGIISLMLQIGNIISIWASHSIQTGSQNNTGICNQRIITCENSTWVNHTYVNINNTNVVAGEDKTSVTLAGNSSLCSISGWAIYTKDNSIRIGSKGDVFVIREPFISCSHLECRTFFLTQGALLNDKHSNGTVKDRSPYRALMSCPLGEAPSPYNSKFESVAWSASACHDGMGWLTIGISGPDNGAVAVLKYNGIITGTIKSWKKQILRTQESECVCMNGSCFTIMTDGPSNKAASYKIFKIEKGKVTKSIELNAPNFYYEECSCYPDTGIVMCVCRDNWHGSNRPWVSFNQNLDYQIGYICSGVFGDNPRPEDGEGSCNPVTVDGANGVKGFSYKYGNGVWIGRTKSNRLRKGFEMIWDPNGWTNTDSDFSVKQDVVATTDWSGYSGSFVQHPELTGLDCIRPCFWVELVRGLPRENTTIWTSGSSISFCGVNSDTANWSWPDGAELPFTIDK

SEQ ID NO: 20437 - protein, 470 aa, synthetic construct; identical to SEQ ID NO: 17461
  REGION 1..470: note = neuraminidase__InfluenzaA__ADZ05848

SEQ ID NO: 20438 - protein, 469 aa, synthetic construct; identical to SEQ ID NO: 17905
  REGION 1..469: note = neuraminidase__InfluenzaA__ADZ05858

SEQ ID NO: 20439 - protein, 469 aa, synthetic construct; identical to SEQ ID NO: 16738
  REGION 1..469: note = neuraminidase__InfluenzaA__ADZ47841

SEQ ID NO: 20440 - protein, 469 aa, synthetic construct; identical to SEQ ID NO: 16738
  REGION 1..469: note = neuraminidase__InfluenzaA__ADZ47851

SEQ ID NO: 20441 - protein, 469 aa, synthetic construct
  REGION 1..469: note = neuraminidase__InfluenzaA__ADZ47861
MNPNQKIITIGSVCMTIGLANLILQIGNIISIWISHSIQLGNQNQIETCNQSVITYENNTWVNQTYVNISNINFAAGQSVVSVKLAGNSSLCPVSGWAIYSKDNSVRIGSKGDVFVIREPFISCSPLECRTFFLTQGALLNDKHSNGTIKDRSPYRTLMSCPIGEVPSPYNSRFESVAWSASACHDGINWLTIGISGPDNGAVAVLKYNGIITDTIKSWRNNILRTQESECACVNGSCFTVMTDGPSDGQASYKIFRIEKGKIVKSVEMNAPNYHYEECSCYPDSSEITCVCRDNWHGSNRPWVSFNQNLEYRIGYICSGIFGDNPRPNDKTGSCGPVSSNGANGVKGFSFKYGNGVWIGRTKSISSRNGFEMIWDPNGWTGTDKNFSIKQDIVGINEWSGYSGSFVQHPELTGLDCIRPCFWVELIRGRPKENTIWTSGSSISFCGVNSDTVGWSWPDGAELPFTIDK

SEQ ID NO: 20442 - protein, 470 aa, synthetic construct
  REGION 1..470: note = neuraminidase__InfluenzaA__ADZ53101
MNPNQKIITIGSISIAIGIISLMLQIGNIISIWASHSIQTGSQNNTGICNQRIITYENSTWVNHTYVNINNTKVVAGEDKTSVTLAGNSSLCSISGWAINTKDNSIRIGSKGDVFVIREPFISCSHLECRTFFLTQGALLNDKHSNGTVKDRSPYRALMSCPLGEAPSPYNSKFESVAWSASACHDGMGWLTIGISGPDNGAVAVLKYNGIITGTIKSWKKQILRTQESECVCMNGSCFTIMTDGPSNKAASYKIFKIEKGKVTKSIELNAPNFYYEECSCYPDTGIVMCVCRDNWHGSNRPWVSFNQNLDYQIGYICSGVFGDNPRPEDGEGSCNPVTVDGANGVKGFSYKYGNGVWIGRTKSNRLRKGFEMIWDPNGWTNTDSDFSVKQDVVAITDWSGYSGSFVQHPELTGLDCIRPCFWVELVRGLPRENTTIWTSGSSISFCGVNSDTANWSWPDGAELPFTIDK

SEQ ID NO: 20443 - protein, 469 aa, synthetic construct
  REGION 1..469: note = neuraminidase__InfluenzaA__ADZ53124
MNPNQKIITIGSVCMTIGMANLILQIGNIISIWISHSIQLGNQNQIETCNQSVITYENNTWVNQTYVNISNTNFAAGQSVVSVKLAGNSSLCPVSGWAIYSKDNSIRIGSKGDVFVIREPFISCSPLECRTFFLTQGALLNDKHSNGTIKDRSPYRTLMSCPIGEVPSPYNSRFESVAWSASACHDGINWLTIGISGPDNGAVAVLKYNGIITDTIKSWRNNILRTQESECACVNGSCFTVMTDGPSDGQASYKIFRIEKGKIVKSVEMNAPNYYYEECSCYPDSSEITCVCRDNWHGSNRPWVSFNQNLEYQIGYICSGIFGDNPRPNDKTGSCGPVSSNGANGVKGFSFKYGNGVWIGRTKSISSRNGFEMIWDPNGWTGTDNDFSIKQDIVGINEWSGYSGSFVQHPELTGLDCIRPCFWVELIRGRPKENTIWTSGSSISFCGVNSDTVGWSWPDGAELPFTIDK

SEQ ID NO: 20444 - protein, 469 aa, synthetic construct; identical to SEQ ID NO: 16738
  REGION 1..469: note = neuraminidase__InfluenzaA__ADZ53130

SEQ ID NO: 20445 - protein, 469 aa, synthetic construct; identical to SEQ ID NO: 16728
  REGION 1..469: note = neuraminidase__InfluenzaA__ADZ53132

SEQ ID NO: 20446 - protein, 469 aa, synthetic construct; identical to SEQ ID NO: 16738
  REGION 1..469: note = neuraminidase__InfluenzaA__ADZ53134

SEQ ID NO: 20447 - protein, 469 aa, synthetic construct; identical to SEQ ID NO: 16738
  REGION 1..469: note = neuraminidase__InfluenzaA__ADZ53136

SEQ ID NO: 20448 - protein, 469 aa, synthetic construct; identical to SEQ ID NO: 17092
  REGION 1..469: note = neuraminidase__InfluenzaA__ADZ53137

SEQ ID NO: 20449 - protein, 469 aa, synthetic construct; identical to SEQ ID NO: 16738
  REGION 1..469: note = neuraminidase__InfluenzaA__ADZ53139

SEQ ID NO: 20450 - protein, 469 aa, synthetic construct
  REGION 1..469: note = neuraminidase__InfluenzaA__ADZ53141
MNPNQKIITIGSVCMTIGMANLILQIGNIISIWISHSIQLGNQNQIETCNQSVITYENNTWVNQTYVNISNTNFAAGQSVVSVKLAGNSSLCPVSGWAIYSKDNSIRIGSKGDVFVIREPFISCSPLECRTFFLTQGALLNDKHSNGTIKDRSPYRTLMSCPIGEVPSPYNSRFESVAWSASACHDGINWLTIGISGPDNGAVAVLKYNGIITDTIKSWRNNILRTQESECACVNGSCFTVMTDGPSDGQASYKIFRIEKGKIVKSVEMNAPNYHYEECSCYPDSSEITCVCRDNWHGSNRPWVSFNQNLEYQIGYICSGIFGDNPRPNDKTGSCGPVSSNGANGVKGFSFKYGNGVWIGRTKSISSRNGFEMIWDPNGWTGTDNDFSIKQDIVGINEWSGYSGSFVQHSELTGLDCIRPCFWVELIRGRPKENTIWTSGSSISFCGVNSDTVGWSWPDGAELPFTIDK

SEQ ID NO: 20451 - protein, 469 aa, synthetic construct; identical to SEQ ID NO: 16599
  REGION 1..469: note = neuraminidase__InfluenzaA__AEA03712

SEQ ID NO: 20452 - protein, 469 aa, synthetic construct; identical to SEQ ID NO: 16599
  REGION 1..469: note = neuraminidase__InfluenzaA__AEA03722

SEQ ID NO: 20453 - protein, 469 aa, synthetic construct; identical to SEQ ID NO: 16599
  REGION 1..469: note = neuraminidase__InfluenzaA__AEA03744

SEQ ID NO: 20454 - protein, 469 aa, synthetic construct
  REGION 1..469: note = neuraminidase__InfluenzaA__AEA03755
MNPNQKIITIGSVSLTISTICFFMQIAILITTVTLHFKQYEFNSPPNNQVMLCEPTIIERNITEIVYLTNTTIEKEICPKLAEYRNWSKPQCDITGFAPFSKDNSIRLSAGGDIWVTREPYVSCDPDKCYQFALGQGTTLNNVHSNNTVRGRTPYRTLLMNELGVPFHLGTKQVCIAWSSSSCHDGKAWLHVCITGDDKNATASFIYNGRLVDSVVSWSKEILRTQESECVCINGTCTVVMTDGSASGKADTKILFIEEGKIVHTSTLSGSAQHVEECSCYPRYPGVRCVCRDNWKGSNRPIVDINIKDHSIVSSYVCSGLVGDTPRKNDSSSSSHCLDPNNEEGGHGVKGWAFDDGNDVWMGRTISEKSRLGYETFKVIEGWSNPKSKLQINRQVIVDRGNRSGYSGIFSVEGKSCINRCFYVELIRGRKEETEVLWTSNSIVVFCGTSGTYGTGSWPDGADINLMPI

SEQ ID NO: 20455 - protein, 469 aa, synthetic construct; identical to SEQ ID NO: 16599
  REGION 1..469: note = neuraminidase__InfluenzaA__AEA03766

SEQ ID NO: 20456 - protein, 469 aa, synthetic construct; identical to SEQ ID NO: 16599
  REGION 1..469: note = neuraminidase__InfluenzaA__AEA03796

SEQ ID NO: 20457 - protein, 469 aa, synthetic construct; identical to SEQ ID NO: 16599
  REGION 1..469: note = neuraminidase__InfluenzaA__AEA03806

SEQ ID NO: 20458 - protein, 469 aa, synthetic construct
  REGION 1..469: note = neuraminidase__InfluenzaA__AEA03817
MNPNQKIITIGSVSLTISTICFFMQIAILITTVTLHFKQYEFNSPPNNQVMLCEPTIIERNITEIVYLTNTTIEKEICPKLAEYRNWSKPQCDITGFAPFSKDNSIRLSAGGDIWVTREPYVSCDPDRCYQFALGQGTTLNNVHSNNTVRDRTPYRTLLMNELGVPFHLGTKQVCIAWSSSSCHDGKAWLHVCITGDDKNATASFIYNGRLVDSVVSWSKEILRTQESECVCINGTCTVVMTDGSASGKADTKILFIEEGKIVHTSTLSGSAQHVEECSCYPRYPGVRCVCRDNWKGSNRPIVDINIKDHSIVSSYVCSGLVGDTPRKNDSSSSSHCLDPNNEEGGHGVKGWAFDDGNDVWMGRTISEKSRLGYETFKVIEGWSNPKSKLQINRQVIVDRGNRSGYSGIFSVEGKSCINRCFYVELIRGRKEETEVLWTSNSIVVFCGTSGTYGTGSWPDGADINLMPI

SEQ ID NO: 20459 - protein, 469 aa, synthetic construct; identical to SEQ ID NO: 16599
  REGION 1..469: note = neuraminidase__InfluenzaA__AEA03828

SEQ ID NO: 20460 - protein, 469 aa, synthetic construct; identical to SEQ ID NO: 16599
  REGION 1..469: note = neuraminidase__InfluenzaA__AEA03838

SEQ ID NO: 20461 - protein, 469 aa, synthetic construct; identical to SEQ ID NO: 19755
  REGION 1..469: note = neuraminidase__InfluenzaA__AEA03849

SEQ ID NO: 20462 - protein, 469 aa, synthetic construct; identical to SEQ ID NO: 16599
  REGION 1..469: note = neuraminidase__InfluenzaA__AEA03860

SEQ ID NO: 20463 - protein, 469 aa, synthetic construct
  REGION 1..469: note = neuraminidase__InfluenzaA__AEA03871
MNPNQKIITIGSVSLTISTICFFMQIAILITTVTLHFKQYEFNSPPNNQVMLCEPTIIERNITEIVYLTNTTIEKEICPKLAEYRNWSKPQCDITGFAPFSKDNSIRLSAGGDIWVTREPYVSCDPDKCYQFALGQGTTLNNVHSNNTVRDRTPYRTLLMNELGVPFHLGTKQVCIAWSSSSCHDGKAWLHVCITGDDKNATASFIYNGRLVDSVVSWSKEILRTQESECVCINGTCTVVITDGSASGKADTKILFIEEGKIVHTSTLSGSAQHVEECSCYPRYPGVRCVCRDNWKGSNRPIVDINIKDHSIVSSYVCSGLVGDTPRKNDSSSSSHCLDPNNEEGGHGVKGWAFDDGNDVWMGRTISEKSRLGYETFKVIEGWSNPKSKLQINRQVIVDRGNRSGYSGIFSVEGKSCINRCFYVELIRGRKEETEVLWTSNSIVVFCGTSGTYGTGSWPDGADINLMPI

SEQ ID NO: 20464 - protein, 469 aa, synthetic construct; identical to SEQ ID NO: 16599
  REGION 1..469: note = neuraminidase__InfluenzaA__AEA03879

SEQ ID NO: 20465 - protein, 469 aa, synthetic construct
  REGION 1..469: note = neuraminidase__InfluenzaA__AEA03889
MNPNQKIITIGSVSLTISTICFFMQIAILITTVTLHFKQYEFNSPPNNQVMLCEPTIIERNITEIVYLTNTTIEKEICPKLAEYRNWSKPQCDITGFAPFSKDNSIRLSAGGDIWVTREPYVSCDPDKCYQFALGQGTTLNNVHSNNKVRDRTPYRTLLMNELGVPFHLGTKQVCIAWSSSSCHDGKAWLHVCITGDDKNATASFIYNGRLVDSVVSWSKEILRTQESECVCINGTCTVVMTDGSASGKADTKILFIEEGKIVHTSTLSGSAQHVEECSCYPRYPGVRCVCRDNWKGSNRPIVDINIKDHSIVSSYVCSGLVGDTPRKNDSSSSSHCLDPNNEEGGHGVKGWAFDDGNDVWMGRTISEKSRLGYETFKVIEGWSNPKSKLQINRQVIVDRGNRSGYSGIFSVEGKSCINRCFYVELIRGRKEETEVLWTSNSIVVFCGTSGTYGTGSWPDGADINLMPI

SEQ ID NO: 20466 - protein, 469 aa, synthetic construct
  REGION 1..469: note = neuraminidase__InfluenzaA__AEA03898
MNPNQKIITIGSVSLTISTICFFMQIAILITTVTLHFKQYEFNSPPNNQVMLCEPTIIERNITEIVYLTNTTIEKEICPKLAEYRNWSKPQCDITGFAPFSKDNSIRLSAGGDIWVTREPYVSCDPDKCYQFALGQGTTLNNVHSNNTVRDRTPYRTLLMNELGVPFHLGTKQVCIAWSSSSCHDGKAWLHVCITGDDKNATASFIYNGRLVDSVVSWSKEILRTQESECVCINGTCTVVMTDGSASGKADTKILFIEEGKIVHTSTLSGSAQHVEECSCYPRYPGVRCVCRDNWKGSNRPIVDINIKDHSIVSSYVCSGLVGDTPRKSDSSSSSHCLDPNNEEGGHGVKGWAFDDGNDVWMGRTISEKSRLGYETFKVIEGWSNPKSKLQINRQVIVDRGNRSGYSGIFSVEGKSCINRCFYVELIRGRKEETEVLWTSNSIVVFCGTSGTYGTGSWPDGADINLMPI

SEQ ID NO: 20467 - protein, 469 aa, synthetic construct; identical to SEQ ID NO: 16599
  REGION 1..469: note = neuraminidase__InfluenzaA__AEA03909

SEQ ID NO: 20468 - protein, 469 aa, synthetic construct
  REGION 1..469: note = neuraminidase__InfluenzaA__AEA03924
MNPNQKIITIGSVSLTISTICFFMQIAILITTVTLHFKQYEFNSPPNNQVMLCEPTIIERNITEIVYLTNTTIEKEICPKLAEYRNWSKPQCDITGFAPFSKDNSIRLSAGGDIWVTREPYVSCDPDKCYQFALGQGTTLNNVHSNNTVRDRTPYRTLLMNELGVPFHLGTKQVCIAWSSSSCHDGKAWLHVCITGDDKNATASFIYNGRLVDSVVSWSKEILRTQESECVCINGTCTVVMTDGSASGKADTKILFIEEGKIIHTSTLSGSAQHVEECSCYPRYPGVRCVCRDNWKGSNRPIVDINIKDHSIVSSYVCSGLVGDTPRKNDSSSSSHCLDPNNEEGGHGVKGWAFDDGNDVWMGRTISEKSRLGYETFKVIEGWSNPKSKLQINRQVIVDRGNRSGYSGIFSVEGKSCINRCFYVELIRGRKEETEVLWTSNSIVVFCGTSGTYGTGSWPDGADINLMPI

SEQ ID NO: 20469 - protein, 469 aa, synthetic construct; identical to SEQ ID NO: 16599
  REGION 1..469: note = neuraminidase__InfluenzaA__AEA03935

SEQ ID NO: 20470 - protein, 469 aa, synthetic construct
  REGION 1..469: note = neuraminidase__InfluenzaA__AEA03946
MNPNQKIITIGSVSLTISTICFFMQIAILITTVTLHFKQYEFNSPPNNQVMLCEPTIIERNITEIVYLTNTTIEKEICPKLAEYRNWSKPQCDITGFAPFSKDNSIRLSAGGDIWVTREPYVSCDPDKCYQFALGQGTTLNNVHSNNTVRDRTPYRTLLMNELGVPFHLGTKQVCIAWSSSSCHDGKAWLHVCITGDDKNATASFIYNGRLVDSVVSWSEEILRTQESECVCINGTCTVVMTDGSASGKADTKILFIEEGKIVHTSTLSGSAQHVEECSCYPRYPGVRCVCRDNWKGSNRPIVDINIKDHSIVSSYVCSGLVGDTPRKNDSSSSSHCLDPNNEEGGHGVKGWAFDDGNDVWMGRTISEKSRLGYETFKVIEGWSNPKSKLQINRQVIVDRGNRSGYSGIFSVEGKSCINRCFYVELIRGRKEETEVLWTSNSIVVFCGTSGTYGTGSWPDGADINLMPI

SEQ ID NO: 20471 - protein, 469 aa, synthetic construct
  REGION 1..469: note = neuraminidase__InfluenzaA__AEA03957
MNPNQKIITIGSVSLTISTICFFMQIAILITTVTLHFKQYEFNSPPNNQVMLCEPTIIERNITEIVYLTNTTIEKEICPKLAEYRNWSKPQCDITGFAPFSKDNSIRLSAGGDIWVTREPYVSCDPDKCYQFALGQGTTLNNVHSNNTVRDRTPYRTLLMNELGVPFHLGTKQVCIAWSSSSCHDGKAWLHVCITGDDKNATASFIYNGRLVDSVVSWSKEILRTQESECVCINGTCTVVMTDGSASGKADTKILFIEEGKIVHTSTLSGSAQHVEECSCYPRYPGVRCVCRDNWKGSNRPIVDINIKDHSIVSSYVCSGLVGDTPRKNDSSSSSHCLDPNNEEGGHGVKGWAFDDGNDVWMGRTISEKSRLGYETFKVIEGWSNSKSKLQINRQVIVDRGNRSGYSGIFSVEGKSCINRCFYVELIRGRKEETEVLWTSNSIVVFCGTSGTYGTGSWPDGADINLMPI

SEQ ID NO: 20472 - protein, 469 aa, synthetic construct; identical to SEQ ID NO: 16599
  REGION 1..469: note = neuraminidase__InfluenzaA__AEA03989

SEQ ID NO: 20473 - protein, 469 aa, synthetic construct; identical to SEQ ID NO: 19755
  REGION 1..469: note = neuraminidase__InfluenzaA__AEA04000

SEQ ID NO: 20474 - protein, 469 aa, synthetic construct; identical to SEQ ID NO: 16599
  REGION 1..469: note = neuraminidase__InfluenzaA__AEA04011

SEQ ID NO: 20475 - protein, 469 aa, synthetic construct; identical to SEQ ID NO: 19755
  REGION 1..469: note = neuraminidase__InfluenzaA__AEA04022

SEQ ID NO: 20476 - protein, 469 aa, synthetic construct; identical to SEQ ID NO: 16599
  REGION 1..469: note = neuraminidase__InfluenzaA__AEA04033

SEQ ID NO: 20477 - protein, 469 aa, synthetic construct; identical to SEQ ID NO: 16599
  REGION 1..469: note = neuraminidase__InfluenzaA__AEA04044

SEQ ID NO: 20478 - protein, 469 aa, synthetic construct; identical to SEQ ID NO: 16599
  REGION 1..469: note = neuraminidase__InfluenzaA__AEA04049

SEQ ID NO: 20479 - protein, 469 aa, synthetic construct; identical to SEQ ID NO: 16599
  REGION 1..469: note = neuraminidase__InfluenzaA__AEA04059

SEQ ID NO: 20480 - protein, 469 aa, synthetic construct; identical to SEQ ID NO: 16599
  REGION 1..469: note = neuraminidase__InfluenzaA__AEA04070

SEQ ID NO: 20481 - protein, 469 aa, synthetic construct; identical to SEQ ID NO: 19755
  REGION 1..469: note = neuraminidase__InfluenzaA__AEA04081

SEQ ID NO: 20482 - protein, 469 aa, synthetic construct; identical to SEQ ID NO: 16599
  REGION 1..469: note = neuraminidase__InfluenzaA__AEA04092

SEQ ID NO: 20483 - protein, 469 aa, synthetic construct; identical to SEQ ID NO: 16599
  REGION 1..469: note = neuraminidase__InfluenzaA__AEA04103

SEQ ID NO: 20484 - protein, 469 aa, synthetic construct; identical to SEQ ID NO: 16599
  REGION 1..469: note = neuraminidase__InfluenzaA__AEA04125

SEQ ID NO: 20485 - protein, 469 aa, synthetic construct; identical to SEQ ID NO: 16599
  REGION 1..469: note = neuraminidase__InfluenzaA__AEA04133

SEQ ID NO: 20486 - protein, 469 aa, synthetic construct
  REGION 1..469: note = neuraminidase__InfluenzaA__AEA04144
MNPNQKIITIGSVSLTISTICFFMQIAILITTVTLHFKQYEFNSPPNNQVMLCEPTIIERNITEIVYLTNTTIEKEICPKLAEYRNWSKPQCDITGFAPFSKDNSIRLSAGGDIWVTREPYVSCDPDKCYQFALGQGTTLNNVHSNNTVRDRTPYRTLLMNELGVPFHLGTKQVCIAWSSSSCHDGKAWLHVCITGDDKNATASFIYNGRLVDSVVSWSKEILRTQESECVCINGTCTVVMTDGSASGKADTKILFIEEGKIIHTSTLSGSAQHVEECSCYPRYPGVRCVCRDNWKGSNRPIVDINIKDHSIVSSYVCSGLVGDTPRKNDSSSSSHCLDPNNEEGGHGVKGWAFDDGNDVWMGRTISEKSRLGYETFKVIEGWSNPKSKLQINRQVIVDRGNRSGYSGIFSVEGKSCINRCFYVELIRGRKEETEVLWTSNSIIVFCGTSGTYGTGSWPDGADINLMPI

SEQ ID NO: 20487 - protein, 469 aa, synthetic construct; identical to SEQ ID NO: 16599
  REGION 1..469: note = neuraminidase__InfluenzaA__AEA04155

SEQ ID NO: 20488 - protein, 469 aa, synthetic construct; identical to SEQ ID NO: 16599
  REGION 1..469: note = neuraminidase__InfluenzaA__AEA04166

SEQ ID NO: 20489 - protein, 469 aa, synthetic construct
  REGION 1..469: note = neuraminidase__InfluenzaA__AEA04177
MNPNQKIITIGSVSLTISTICFFMQIAILITTVTLHFKQYEFNSPPNNQVMLCEPTIIERNITEIVYLTNTTIEKEICPKLAEYRNWSKPQCDITGFAPFSKDNSIRLSAGGDIWVTREPYVSCDPDKCYQFALGQGTTLNNVHSNNTVRNRTPYRTLLMNELGVPFHLGTKQVCIAWSSSSCHDGKAWLHVCITGDDKNATASFIYNGRLVDSVVSWSKEILRTQESECVCINGTCTVVMTDGSASGKADTKILFIEEGKIVHTSTLSGSAQHVEECSCYPRYPGVRCVCRDNWKGSNRPIVDINIKDHSIVSSYVCSGLVGDTPRKNDSSSSSHCLDPNNEEGGHGVKGWAFDDGNDVWMGRTISEKSRLGYETFKVIEGWSNPKSKLQINRQVIVDRGNRSGYSGIFSVEGKSCINRCFYVELIRGRKEETEVLWTSNSIVVFCGTSGTYGTGSWPDGADINLMPI

SEQ ID NO: 20490 - protein, 469 aa, synthetic construct; identical to SEQ ID NO: 16599
  REGION 1..469: note = neuraminidase__InfluenzaA__AEA04188

SEQ ID NO: 20491 - protein, 469 aa, synthetic construct; identical to SEQ ID NO: 17592
  REGION 1..469: note = neuraminidase__InfluenzaA__AEA04199

SEQ ID NO: 20492 - protein, 469 aa, synthetic construct; identical to SEQ ID NO: 16599
  REGION 1..469: note = neuraminidase__InfluenzaA__AEA04210

SEQ ID NO: 20493 - protein, 469 aa, synthetic construct; identical to SEQ ID NO: 17592
  REGION 1..469: note = neuraminidase__InfluenzaA__AEA04229

SEQ ID NO: 20494 - protein, 469 aa, synthetic construct; identical to SEQ ID NO: 17592
  REGION 1..469: note = neuraminidase__InfluenzaA__AEA04239

SEQ ID NO: 20495 - protein, 469 aa, synthetic construct
  REGION 1..469: note = neuraminidase__InfluenzaA__AEA04250
MNPNQKIITIGSVSLTISTICFFMQTAILITTVTLHFKQCEFNSPPNNQVMLCEPTIIERNITEIVYLTNTTIEKEICPKLAEYRNWSKPQCDITGFAPFSKDNSIRLSAGGDIWVTREPYVSCDPDKCYQFALGQGTTLNNVHSNNTVRVRTPYRTLLMNELGVPFHLGTKQVCIAWSSSSCHDGKAWLHVCITGDDKNATASFIYNGRLVDSVVSWSKEILRTQESECVCINGTCTVVMTDGSASGKADTKILFIEEGKIVHTSTLSGSAQHVEECSCYPRYPGVRCVCRDNWKGSNRPIVDINIKDHSIVSSYVCSGLVGDTPRKNDSSSSSHCLDPNNEEGGHGVKGWAFDDGNDVWMGRTISEKSRLGYETFKVIEGWSNPKSKLQINRQVIVDRGNRSGYSGIFSVEGKSCINRCFYVELIRGRKEETEVLWTSNSIVVFCGTSGTYGTGSWPDGADINLMPI

SEQ ID NO: 20496 - protein, 469 aa, synthetic construct; identical to SEQ ID NO: 17592
  REGION 1..469: note = neuraminidase__InfluenzaA__AEA04260

SEQ ID NO: 20497 - protein, 469 aa, synthetic construct
  REGION 1..469: note = neuraminidase__InfluenzaA__AEA04268
MNPNQKIITIGSVSLTISTICLFMQTAILITTVTLHFKQCEFNSPPNNQAMLCEPTIIERNITEIVYLTNTTIEKEICPKLAEYRNWSKPQCDITGFAPFSKDNSIRLSAGGDIWVTREPYVSCDPDKCYQFALGQGTTLNNVHSNNTVRDRTPYRTLLMNELGVPFHLGTKQVCIAWSSSSCHDGKAWLHVCITGDDKNATASFIYNGRLVDSVVSWSKEILRTQESECVCINGTCTVVMTDGSASGKADTKILFIEEGKIVHTSTLSGSAQHVEECSCYPRYPGVRCVCRDNWKGSNRPIVDINIKDHSIVSSYVCSGLVGDTPRKNDSSSSSHCLDPNNEEGGHGVKGWAFDDGNDVWMGRTISEKSRLGYETFKVIEGWSNPKSKLQINRQVIVDRGNRSGYSGIFSVEGKSCINRCFYVELIRGRKEETEVLWTSNSIVVFCGTSGTYGTGSWPDGADINLMPI

SEQ ID NO: 20498 - protein, 469 aa, synthetic construct; identical to SEQ ID NO: 17592
  REGION 1..469: note = neuraminidase__InfluenzaA__AEA04276

SEQ ID NO: 20499 - protein, 469 aa, synthetic construct; identical to SEQ ID NO: 17592
  REGION 1..469: note = neuraminidase__InfluenzaA__AEA04287

SEQ ID NO: 20500 - protein, 469 aa, synthetic construct; identical to SEQ ID NO: 17592
  REGION 1..469: note = neuraminidase__InfluenzaA__AEA04298

SEQ ID NO: 20501 - protein, 469 aa, synthetic construct
  REGION 1..469: note = neuraminidase__InfluenzaA__AEA04307
MNPNQKIITIGSVSLTISTICFFMQTAILITTVTLHFKQCEFNSPPNNQVMLCEPTIIERNITEIVYLTNTTIEKEICPKLAEYRNWSKPQCDITGFAPFSKDNSIRLSAGGDIWVTREPYVSCDPDKCYQFALGQGTTLNNVHSNNTVRDRTPYRTLLMNELGVPFHLGTKQVCIAWSSSSCHDGKAWLHVCITGDDKNATASFIYNGRLVDSVVSWSKEILRTQESECVCINGTCTVVMTDGSASGKADTKILFIEEGKIVHTSTLSGSAQHVEECSCYPRYPDVRCVCRDNWKGSNRPIVDINIKDHSIVSSYVCSGLVGDTPRKNDSSSSSHCLDPNNEEGGHGVKGWAFDDGNDVWMGRTISEKSRLGYETFKVIEGWSNPKSKLQINRQVIVDRGNRSGYSGIFSVEGKSCINRCFYVELIRGRKEETEVLWTSNSIVVFCGTSGTYGTGSWPDGADINLMPI

SEQ ID NO: 20502 - protein, 464 aa, synthetic construct
  REGION 1..464: note = neuraminidase__InfluenzaA__AEA04357
MNPNQKIITIGSICMVVGIISLILQIGNIVSIWISHSIQTGNQNHTGTCDQSIITYKNSTWVNQTYVNVVAGKDTTSVILAGNSSLCPIRGWAIYSKDNGVRIGSKGDVFVIREPFISCSHLECRTFFLTQGALLNDKHSNGTVKDRSPYRALMSCPVGEAPSPYNSRFESVAWSASACHDGMGWLTIGISGPDDGAVAVLKYNGIITETIKSWRKEILRTQESECVCVNGSCFTIMTDGPSGGPASYKIFKIEKGKVTKSIELDAPNSHYEECSCYPDTSKVMCVCRDNWHGSNRPWVSFDQNLDYQMGYICSGVFGDNPRPKDGKGSCGPVYVDGANGVKGFSYKYGNGVWIGRTKSISSRQGFEMIWDPNGWTETDSNFFTKQDVVAVTDWSGYSGSFVQHPELTGLDCMRPCFWVELIRGRPKENTIWTSGSSISFCGVNSDTVDWSWPDGAELPFTIDK

SEQ ID NO: 20503 - protein, 469 aa, synthetic construct; identical to SEQ ID NO: 16467
  REGION 1..469: note = neuraminidase__InfluenzaA__AEA04368

SEQ ID NO: 20504 - protein, 469 aa, synthetic construct
  REGION 1..469: note = neuraminidase__InfluenzaA__AEA04379
MNPNQKTITIGSVSLTIETVCFLMQIAILATTVTLHFKQHECDSPASNQVMPCEPIIIERNITEIVYLNNTTIEKEICPEVVEYRNWSKPQCQITGFAPFSKDNSIRLSAGGDIWVTREPYVSCDPGKCYQFALGQGTTLDNKHSNGTIHDRIPHRTLLMNELGVPFHLGTKQVCVAWSSSSCHDGKAWLHVCVTGDDRNATASFIYDGRLVDSIGSWSQNILRTQESECVCINGTCTVVMTDGSASGRADTRILFIKEGKIVHISPLSGSAQHIEECSCYPRYPDVRCICRDNWKGSNRPVIDINMEDYSIDSSYVCSGLVGDTPRNDDSSSNSKSRDPNNERGNPGVKGWAFDNGDDVWMGRTISKDSRSGYETFKVIGGWSTPNSKSQVNRQVIVDNNNWSGYSGIFSVEGKSCINRCFYVELIRGRPQETRVWWTSNSIVVFCGTSGTYGTGSWPDGANINFMPI

SEQ ID NO: 20505 - protein, 470 aa, synthetic construct; identical to SEQ ID NO: 20204
  REGION 1..470: note = neuraminidase__InfluenzaA__AEA10295

SEQ ID NO: 20506 - protein, 469 aa, synthetic construct; identical to SEQ ID NO: 16738
  REGION 1..469: note = neuraminidase__InfluenzaA__AEA10306

SEQ ID NO: 20507 - protein, 469 aa, synthetic construct; identical to SEQ ID NO: 20091
  REGION 1..469: note = neuraminidase__InfluenzaA__AEA10316

SEQ ID NO: 20508 - protein, 469 aa, synthetic construct; identical to SEQ ID NO: 16738
  REGION 1..469: note = neuraminidase__InfluenzaA__AEA10326

SEQ ID NO: 20509 - protein, 469 aa, synthetic construct; identical to SEQ ID NO: 18026
  REGION 1..469: note = neuraminidase__InfluenzaA__AEA10335

SEQ ID NO: 20510 - protein, 469 aa, synthetic construct; identical to SEQ ID NO: 16738
  REGION 1..469: note = neuraminidase__InfluenzaA__AEA10342

SEQ ID NO: 20511 - protein, 469 aa, synthetic construct
  REGION 1..469: note = neuraminidase__InfluenzaA__AEA10352
MNPNQKIITIGSVCMTIGMANLILQIGNIISIWISHSIQLGNQNQIETCNQSVITYENNTWVNQTYVNISNTNFAAGQSVVSVKLAGNSSLCPVSGWAIYSKDNSIRIGSKGDVFVIREPFISCSPLECRTFFLTQGALLNDKHSNGTIKDRSPYRTLMSCPIGEVPSPYNSRFESVAWSASACHDGINWLTIGISGPDNGAVAVLKYNGIITDTIKSWRNNILRTQESECACINGSCFTVMTDGPSDGQASYKIFRIEKGKIVKSVEMNAPNYHYEECSCYPDSSEITCVCRDNWHGSNRPWVSFNQNLEYQIGYICSGIFGDNPRPNDKTGSCSPVSSNGANGVKGFSFKYGNGVWIGRTKSISSRNGFEMIWDPNGWTGTDNNFSIKQDIVGINEWSGYSGSFVQHPELTGLDCIRPCFWVELIRGRPKENTIWTSGSSISFCGVNSDTVGWSWPDGAELPFTIDK

SEQ ID NO: 20512 - protein, 469 aa, synthetic construct; identical to SEQ ID NO: 16738
  REGION 1..469: note = neuraminidase__InfluenzaA__AEA48991

SEQ ID NO: 20513 - protein, 469 aa, synthetic construct; identical to SEQ ID NO: 19410
  REGION 1..469: note = neuraminidase__InfluenzaA__AEA72707

SEQ ID NO: 20514 - protein, 469 aa, synthetic construct; identical to SEQ ID NO: 19410
  REGION 1..469: note = neuraminidase__InfluenzaA__AEA72718

SEQ ID NO: 20515 - protein, 469 aa, synthetic construct; identical to SEQ ID NO: 19410
  REGION 1..469: note = neuraminidase__InfluenzaA__AEA72729

SEQ ID NO: 20516 - protein, 469 aa, synthetic construct
  REGION 1..469: note = neuraminidase__InfluenzaA__AEA72742
MNPNQKIITIGSVCMTIGMANLILQIGNIISIWISHSIQLGNQSQIETCNQSVITYENNTWVNQTYVNISNTNFAAGQSVVSVKLAGNSSLCPVSGWAIYSKDNSIRIGSKGDVFVIREPFISCSPLECRTFFLTQGALLNDKHSNGTIKDRSPYRTLMSCPIGEVPSPYNSRFESVAWSASACHDGINWLTIGISGPDNGAVAVLKYNGIITDTIKSWRNNILRTQESECACVNGSCFTIMTDGPSDGQASYKIFRIEKGKIVKSVEMNAPNYHYEECSCYPDSSEITCVCRDNWHGSNRPWVSFNQNLEYQIGYICSGIFGDNPRPNDKTGSCGPVSSNGANGVKGFSFKYGNGVWIGRTKSISSRNGFEMIWDPNGWTGTDNNFSIKQDIVGINEWSGYSGSFVQHPELTGLDCIRPCFWVELIRGRPKENTIWTSGSSISFCGVNSDTVGWSWPDGAELPFTIDK

SEQ ID NO: 20517 - protein, 469 aa, synthetic construct; identical to SEQ ID NO: 19013
  REGION 1..469: note = neuraminidase__InfluenzaA__AEA72779

SEQ ID NO: 20518 - protein, 469 aa, synthetic construct
  REGION 1..469: note = neuraminidase__InfluenzaA__AEA72789
MNPNQKIITIGSVCMTIGMANLILQIGNIISIWISHSIQLGNQSQIETCNQSVITYENNTWVNQTYVNISNTNFAAGQSVVSVKLAGNSSLCPVSGWAIYSKDDSIRIGSKGDVFVIREPFISCSPLECRTFFLTQGALLNDKHSNGTIKDRSPYRTLMSCPIGEVPSPYNSRFESVAWSASACHDGINWLTIGISGPDNGAVAVLKYNGIITDTIKSWRNNILRTQESECACVNGSCFTVMTDGPSDGQASYKIFRIEKGKIVKSVEMNAPNYHYEECSCYPDSSEITCVCRDNWHGSNRPWVSFNQNLEYQIGYICSGIFGDNPRPNDKTGSCGPVSSNGANGVKGFSFKYGNGVWIGRTKSISSRNGFEMIWDPNGWTGTDNNFSIKQDIVGINEWSGYSGSFVQHPELTGLDCIRPCFWVELIRGRPKENTIWTSGSSISFCGVNSDTVGWSWPDGAELPFTIDK

SEQ ID NO: 20519 - protein, 469 aa, synthetic construct; identical to SEQ ID NO: 19410
  REGION 1..469: note = neuraminidase__InfluenzaA__AEA73291

SEQ ID NO: 20520 - protein, 469 aa, synthetic construct; identical to SEQ ID NO: 19410
  REGION 1..469: note = neuraminidase__InfluenzaA__AEA73302

SEQ ID NO: 20521 - protein, 469 aa, synthetic construct; identical to SEQ ID NO: 19410
  REGION 1..469: note = neuraminidase__InfluenzaA__AEA73313

SEQ ID NO: 20522 - protein, 469 aa, synthetic construct; identical to SEQ ID NO: 19410
  REGION 1..469: note = neuraminidase__InfluenzaA__AEA73324

SEQ ID NO: 20523 - protein, 469 aa, synthetic construct; identical to SEQ ID NO: 19410
  REGION 1..469: note = neuraminidase__InfluenzaA__AEA73335

SEQ ID NO: 20524 - protein, 469 aa, synthetic construct; identical to SEQ ID NO: 19410
  REGION 1..469: note = neuraminidase__InfluenzaA__AEA73346

SEQ ID NO: 20525 - protein, 469 aa, synthetic construct; identical to SEQ ID NO: 19410
  REGION 1..469: note = neuraminidase__InfluenzaA__AEA73357

SEQ ID NO: 20526 - protein, 469 aa, synthetic construct; identical to SEQ ID NO: 19410
  REGION 1..469: note = neuraminidase__InfluenzaA__AEA73368

SEQ ID NO: 20527 - protein, 469 aa, synthetic construct; identical to SEQ ID NO: 19410
  REGION 1..469: note = neuraminidase__InfluenzaA__AEA73379

SEQ ID NO: 20528 - protein, 469 aa, synthetic construct; identical to SEQ ID NO: 19410
  REGION 1..469: note = neuraminidase__InfluenzaA__AEA73390

SEQ ID NO: 20529 - protein, 469 aa, synthetic construct; identical to SEQ ID NO: 19410
  REGION 1..469: note = neuraminidase__InfluenzaA__AEA73401

SEQ ID NO: 20530 - protein, 469 aa, synthetic construct; identical to SEQ ID NO: 19410
  REGION 1..469: note = neuraminidase__InfluenzaA__AEA73412

SEQ ID NO: 20531 - protein, 469 aa, synthetic construct; identical to SEQ ID NO: 19410
  REGION 1..469: note = neuraminidase__InfluenzaA__AEA73423

SEQ ID NO: 20532 - protein, 469 aa, synthetic construct; identical to SEQ ID NO: 19410
  REGION 1..469: note = neuraminidase__InfluenzaA__AEA73455

SEQ ID NO: 20533 - protein, 469 aa, synthetic construct; identical to SEQ ID NO: 19410
  REGION 1..469: note = neuraminidase__InfluenzaA__AEA73466

SEQ ID NO: 20534 - protein, 469 aa, synthetic construct
  REGION 1..469: note = neuraminidase__InfluenzaA__AEA73477
MNPNQKIITIGSVSLTISTICFFMQIAILITTVTLHFKQYKFNSPPNNQVMLCEPTIIERNITEIVYLTNTTIEKEICPKLAEYRNWSKPQCDITGFAPFSKDNSIRLSAGGDIWVTREPYVSCDPDKCYQFALGQGTTLNNVHSNNTVRDRTPYRTLLMNELGVPFHLGTKQVCIAWSSSSCHDGKAWLHVCITGDDKNATASFIYNGRLVDSVVSWSKEILRTQESECVCINGTCTVVMTDGSASGKADTKILFIEEGKIVHTSTLSGSAQHVEECSCYPRYPGVRCVCRDNWKGSNRPIVDINIKDHSIVSSYVCSGLVGDTPRKNDSSSSSHCLDPNNEEGGHGVKGWAFDDGNDVWMGRTINETSRLGYETFKVIEGWSNPKSKLQINRQVIVDRGNRSGYSGIFSVEGKSCINRCFYVELIRGRKEETKVLWTSNSIVVFCGTSGTYGTGSWPDGADLNLMPI

SEQ ID NO: 20535 - protein, 469 aa, synthetic construct; identical to SEQ ID NO: 19410
  REGION 1..469: note = neuraminidase__InfluenzaA__AEA73488

SEQ ID NO: 20536 - protein, 469 aa, synthetic construct
  REGION 1..469: note = neuraminidase__InfluenzaA__AEA73499
MNPNQKIITIGSVSLTISTICFFMQIAILITTVTLHFKQYKFNSPPNNQVMLCEPTIIERNITEIVYLTNTTIEKEICPKLAEYRNWSKPQCDITGFAPFSKDNSIRLSAGGDIWVTREPYVSCDPDKCYQFALGQGTTINNVHSNNTVRDRTPYRTLLMNELGVPFHLGTKQVCIAWSSSSCHDGKAWLHVCITGDDKNATASFIYNGRLVDSVVSWSKEILRTQESECVCINGTCTVVMTDGSASGKADTKILFIEEGKIVHTSTLSGSAQHVEECSCYPRYPGVRCVCRDNWKGSNRPIVDINIKDHSIVSSYVCSGLVGDTPRKNDSSSSSHCLDPNNEEGGHGVKGWAFDDGNDVWMGRTINETSRLGYETFKVIEGWSNPKSKLQINRQVIVDRGNRSGYSGIFSVEGKSCINRCFYVELIRGRKEETEVLWTSNSIVVFCGTSGTYGTGSWPDGADLNLMPI

SEQ ID NO: 20537 - protein, 469 aa, synthetic construct; identical to SEQ ID NO: 19410
  REGION 1..469: note = neuraminidase__InfluenzaA__AEA73510

SEQ ID NO: 20538 - protein, 469 aa, synthetic construct; identical to SEQ ID NO: 19410
  REGION 1..469: note = neuraminidase__InfluenzaA__AEA73521

SEQ ID NO: 20539 - protein, 469 aa, synthetic construct; identical to SEQ ID NO: 19410
  REGION 1..469: note = neuraminidase__InfluenzaA__AEA73532

SEQ ID NO: 20540 - protein, 469 aa, synthetic construct; identical to SEQ ID NO: 19410
  REGION 1..469: note = neuraminidase__InfluenzaA__AEA73543

SEQ ID NO: 20541 - protein, 469 aa, synthetic construct; identical to SEQ ID NO: 19410
  REGION 1..469: note = neuraminidase__InfluenzaA__AEA73554

SEQ ID NO: 20542 - protein, 469 aa, synthetic construct; identical to SEQ ID NO: 19410
  REGION 1..469: note = neuraminidase__InfluenzaA__AEA73565

SEQ ID NO: 20543 - protein, 470 aa, synthetic construct; identical to SEQ ID NO: 17461
  REGION 1..470: note = neuraminidase__InfluenzaA__AEA73576

SEQ ID NO: 20544 - protein, 470 aa, synthetic construct; identical to SEQ ID NO: 17461
  REGION 1..470: note = neuraminidase__InfluenzaA__AEA73587

SEQ ID NO: 20545 - protein, 470 aa, synthetic construct; identical to SEQ ID NO: 20204
  REGION 1..470: note = neuraminidase__InfluenzaA__AEA73598

SEQ ID NO: 20546 - protein, 470 aa, synthetic construct; identical to SEQ ID NO: 17461
  REGION 1..470: note = neuraminidase__InfluenzaA__AEA73609

SEQ ID NO: 20547 - protein, 470 aa, synthetic construct; identical to SEQ ID NO: 17461
  REGION 1..470: note = neuraminidase__InfluenzaA__AEA73620

SEQ ID NO: 20548 - protein, 470 aa, synthetic construct
  REGION 1..470: note = neuraminidase__InfluenzaA__AEA73631
MNPNQKIITIGSISIAIGIISLMLQIGNIISIWASHSIQTGSQNNTGICNQRIITYENSTWVNHTYVNINNTNVVAGEDKTSVTLAGNSSLCSISGWAIYTKDNSIRIGSKGDVFVIREPFISCSHLECRTFFLTQGALLNDKHSNGTVKDRSPYRALMSCPLGEAPSPYNSKFESVAWSASACHDGMGWLTIGISGPDNGAVAVLKYNGIITGTIKSWKKQILRTQESECVCMNGSCFTIMTDGPSNKAASYKIFKIEKGKVTKSIELNAPNFYYEECSCYPDTGIVMCVCRDNWHGSNRPWVSFNQNLDYQIGYICSGVFGDNPRPEDGEGSCNPVTVDGANGVKGFSYKYGNGVWIGRIKSNRLRKGFEMIWDPNGWTNTDSDFSVKQDVVAITDWSGYSGSFVQHPELTGLDCIRPCFWVELVRGLPRENTTIWTSGSSISFCGVNSDTANWSWPDGAELPFTIDK

SEQ ID NO: 20549 - protein, 470 aa, synthetic construct
  REGION 1..470: note = neuraminidase__InfluenzaA__AEA73642
MNPNQRIITIGSISIAIGIISLMLQIGNIISIWASHSIQTGSQNNTGICKQRIITYENSTWVNHTYVNINNTNVVAGEDKTSVTLAGNSSLCSISGWAIYTKDNSIRIGSKGDVFVIREPFISCSHLECRTFFLTQGALLNDKHSNGTAKDRSPYRALMSCPLGEAPSPYNSKFESVAWSASACHDGMGWLTIGISGPDNGAVAVLKYNGIITGTIKSWKKQILRTQESECVCMNGSCFTIMTDGPSNKAASYKIFKIEKGKVTKSIELNAPNFYYEECSCYPDTGIVMCVCRDNWHGSNRPWVSFNQNLDYQIGYICSGVFGDNPRPEDGEGSCNPVTVDGANGVKGFSYKYGNGVWLGRTKSNRLRKGFEMIWDPNGWTNTDSDFSVKQDVVAITDWSGYSGSFVQHPELTGLDCIRPCFWVELVRGLPRENTTIWTSGSSISFCGVNSDTANWSWPDGAELPFTIDK

SEQ ID NO: 20550 - protein, 470 aa, synthetic construct; identical to SEQ ID NO: 17461
  REGION 1..470: note = neuraminidase__InfluenzaA__AEA73653

SEQ ID NO: 20551 - protein, 470 aa, synthetic construct
  REGION 1..470: note = neuraminidase__InfluenzaA__AEA73664
MNPNQKIITIGSISIAIGIISLMLQIGNIISIWASHSIQTGSQNNTGICNQRIITYENSTWVNHTYVNINNTNVVAGEDKTSVTLAGNSSLCSISGWAIYTKDNSIRIGSKGDVFVIREPFISCSHLECRTFFLTQGALLNDKHSNGTVKDRSPYRALMSCPLGEAPSPYNSKFESVAWSASACHDGMGWLTIGISGPDNGAVAVLKYNGIITGTIKSWKKQILRTQESECVCMNGSCFTIMTDGPSNKAASYKIFKIEKGKVTKSIELNAPNFYYEECSCYPDTGIVMCVCRDNWHGSNRPWVSFNQNLDYQIGYICSGVFGDNPRPEDGEGSCNPVTVNGADGVKGFSYKYGNGVWIGRTKSNRLRKGFEMIWDPNGWTNTDSDFSVKQDVVAITDWSGYSGSFVQHPELTGLDCIRPCFWVELVRGLPKENTTIWTSGSSISFCGVNSDTANWSWPDGAELPFTIDK

SEQ ID NO: 20552 - protein, 470 aa, synthetic construct
  REGION 1..470: note = neuraminidase__InfluenzaA__AEA73675
MNPNQKIITIGSISIAIGIISLMLQIGNIISIWASHSIQTGSQNNTGICNQRIITYENSTWVNHTYVNINNTNVVAGEDKTSVTLAGNSSLCSISGWAIYTKDNSIRIGSKGDVFVIREPFISCSHLECRTFFLTQGALLNDKHSNGTVKDRSPYRALMSCPLGEAPSPYNSKFESVAWSASACHDGMGWLTIGISGPDNGAVAVLKYNGIITGTIKSWKKQILRTQESECVCMNGSCFTIMTDGPSNKAASYKIFKIEKGKVTKSIELNAPNFYYEECSCYPDTGIVMCVCRDNWHGSNRPWVSFNQNLDYQIGYICSGVFGDNPRPEDGEGSCNPVTVDGADGVKGFSYKYGNGVWIGRTKSNRLRKGFEMIWDPNGWTNTDSDFSVKQDVVAITDWSGYSGSFVQHPELTGLDCIRPCFWIELVRGLPRENTTIWTSGSSISFCGVNSDTANWSWPDGAELPFTIDK

SEQ ID NO: 20553 - protein, 470 aa, synthetic construct; identical to SEQ ID NO: 20204
  REGION 1..470: note = neuraminidase__InfluenzaA__AEA73686

SEQ ID NO: 20554 - protein, 470 aa, synthetic construct
  REGION 1..470: note = neuraminidase__InfluenzaA__AEA73697
MNPNQKIITIGSISIAIGIISLMLQIGNIISIWASHSIQTGSQNNTGICNQRIITYENSTWVNHTYVNINNTNIVAGEDKTSVTLAGNSSLCSISGWAIYTKDNSIRIGSKGDVFVIREPFISCSHLECRTFFLTQGALLNDKHSNGTVKDRSPYRALMSCPLGEAPSPYNSKFESVAWSASACHDGMGWLTIGISGPDNGAVAVLKYNGIITGTIKSWKKQILRTQESECVCMNGSCFTIMTDGPSNKAASYKIFKIEKGKVTKSVELNAPNFYYEECSCYPDTGIVMCVCRDNWHGSNRPWVSFNQNLDYQIGYICSGVFGDNPRPEDGEGSCNPVTVNGADGVKGFSYKYGNGVWIGRTKSNRLRKGFEMIWDPNGWTNTDSDFSVKQDVVAITDWSGYSGSFVQHPELTGLDCIRPCFWVELVRGLPRENTTIWTSGSSISFCGVNSDTANWSWPDGAELPFTIDK

SEQ ID NO: 20555 - protein, 470 aa, synthetic construct; identical to SEQ ID NO: 20205
  REGION 1..470: note = neuraminidase__InfluenzaA__AEA73708

SEQ ID NO: 20556 - protein, 470 aa, synthetic construct; identical to SEQ ID NO: 17461
  REGION 1..470: note = neuraminidase__InfluenzaA__AEA73719

SEQ ID NO: 20557 - protein, 470 aa, synthetic construct; identical to SEQ ID NO: 17461
  REGION 1..470: note = neuraminidase__InfluenzaA__AEA73730

SEQ ID NO: 20558 - protein, 470 aa, synthetic construct; identical to SEQ ID NO: 17461
  REGION 1..470: note = neuraminidase__InfluenzaA__AEA73741

SEQ ID NO: 20559 - protein, 470 aa, synthetic construct; identical to SEQ ID NO: 17461
  REGION 1..470: note = neuraminidase__InfluenzaA__AEA73752

SEQ ID NO: 20560 - protein, 470 aa, synthetic construct; identical to SEQ ID NO: 20204
  REGION 1..470: note = neuraminidase__InfluenzaA__AEA73763

SEQ ID NO: 20561 - protein, 469 aa, synthetic construct; identical to SEQ ID NO: 16738
  REGION 1..469: note = neuraminidase__InfluenzaA__AEA73774

SEQ ID NO: 20562 - protein, 469 aa, synthetic construct; identical to SEQ ID NO: 16738
  REGION 1..469: note = neuraminidase__InfluenzaA__AEA73784

SEQ ID NO: 20563 - protein, 469 aa, synthetic construct; identical to SEQ ID NO: 16738
  REGION 1..469: note = neuraminidase__InfluenzaA__AEA73794

SEQ ID NO: 20564 - protein, 469 aa, synthetic construct; identical to SEQ ID NO: 16738
  REGION 1..469: note = neuraminidase__InfluenzaA__AEA73804

SEQ ID NO: 20565 - protein, 469 aa, synthetic construct; identical to SEQ ID NO: 16738
  REGION 1..469: note = neuraminidase__InfluenzaA__AEA73814

SEQ ID NO: 20566 - protein, 469 aa, synthetic construct; identical to SEQ ID NO: 16738
  REGION 1..469: note = neuraminidase__InfluenzaA__AEA73824

SEQ ID NO: 20567 - protein, 469 aa, synthetic construct
  REGION 1..469: note = neuraminidase__InfluenzaA__AEA73834
MNPNQKIITIGSICMTIGMANLILQIGNIISIWISHSIQLGNQNQIETCNQSVITYENNTWVNQTYVNISNTNFAAGQSVVSVKLAGNSSLCPVSGWAIYSKDNSIRIGSKGDVFVIREPFISCSPLECRTFFLTQGALLNDKHSNGTIKDRSPYRTLMSCPIGEVPSPYNSRFESVAWSASACHDGINWLTIGISGPDNGAVAVLKYNGIITDTIKSWKNNILRTQESECACVNGSCFTVMTDGPSDGQASYKIFRIEKGKIVKSVEMNAPNYHYEECSCYPDSSEITCVCRDNWHGSNRPWVSFNQNLEYQIGYICSGIFGDNPRPNDKTGSCGPVSSNGANGVKGFSFKYGNGVWIGRTKSISSRNGFEMIWDPNGWTGTDNNFSIKQDIVGINEWSGYSGSFVQHPELTGLDCIRPCFWVELIRGRPKENTIWTSGSSISFCGVNSDTVGWSWPDGAELPFTIDK

SEQ ID NO: 20568 - protein, 469 aa, synthetic construct; identical to SEQ ID NO: 20100
  REGION 1..469: note = neuraminidase__InfluenzaA__AEA73844

SEQ ID NO: 20569 - protein, 469 aa, synthetic construct; identical to SEQ ID NO: 16738
  REGION 1..469: note = neuraminidase__InfluenzaA__AEA73854

SEQ ID NO: 20570 - protein, 469 aa, synthetic construct; identical to SEQ ID NO: 16738
  REGION 1..469: note = neuraminidase__InfluenzaA__AEA73864

SEQ ID NO: 20571 - protein, 469 aa, synthetic construct; identical to SEQ ID NO: 18519
  REGION 1..469: note = neuraminidase__InfluenzaA__AEA73874

SEQ ID NO: 20572 - protein, 469 aa, synthetic construct; identical to SEQ ID NO: 18519
  REGION 1..469: note = neuraminidase__InfluenzaA__AEA73884

SEQ ID NO: 20573 - protein, 469 aa, synthetic construct; identical to SEQ ID NO: 20100
  REGION 1..469: note = neuraminidase__InfluenzaA__AEA73894

SEQ ID NO: 20574 - protein, 469 aa, synthetic construct
  REGION 1..469: note = neuraminidase__InfluenzaA__AEA73904
MNPNQKIITIGSVCMTIGMANLVLQIGNIISIWISHSIQLGNQNQIETCNQSVITYENNTWVNQTYVNISNTNFAAGQSVVSVKLAGNSSLCPVSGWAIYSKDNSIRIGSKGDVFVIREPFISCSPLECRTFFLTQGALLNDKHSNGTIKDRSPYRTLMSCPIGEVPSPYNSRFESVAWSASACHDGINWLTIGISGPDNGAVAVLKYNGIITDTIKSWRNNILRTQESECACVNGSCFTVMTDGPSDGQASYKIFRIEKGKIVKSVEMNAPNYHYEECSCYPDSSEITCVCRDNWHGSNRPWVSFNQNLEYQIGYICSGIFGDNPRPNDKTGSCGPVSSNGANGVKGFSFKYGNGVWIGRTKSISSRNGFEMIWDPNGWTGTDNNFSIKQDIIGINEWSGYSGSFVQHPELTGLDCIRPCFWVELIRGRPKEKTIWTSGSSISFCGVNSDTVGWSWPDGAELPFTIDK

SEQ ID NO: 20575 - protein, 469 aa, synthetic construct; identical to SEQ ID NO: 16738
  REGION 1..469: note = neuraminidase__InfluenzaA__AEA73914

SEQ ID NO: 20576 - protein, 469 aa, synthetic construct; identical to SEQ ID NO: 18519
  REGION 1..469: note = neuraminidase__InfluenzaA__AEA73924

SEQ ID NO: 20577 - protein, 469 aa, synthetic construct; identical to SEQ ID NO: 20177
  REGION 1..469: note = neuraminidase__InfluenzaA__AEA73934

SEQ ID NO: 20578 - protein, 469 aa, synthetic construct
  REGION 1..469: note = neuraminidase__InfluenzaA__AEA73944
MNPNQKIITIGSVCMTIGMANLILQVGNIISIWISHSIQLGNQNQIETCNQSVITYENNTWVNQTYVNISNTNFAAGQSVVSVKLAGNSSLCPVSGWAIYSKDNSIRIGSKGDVFVIREPFISCSPLECRTFFLTQGALLNDKHSNGTIKDRSPYRTLMSCPIGEVPSPYNSRFESVAWSASACHDGINWLTIGISGPDNGAVAVLKYNGIITDTIKSWRNNILRTQESECACVNGSCFTVMTDGPSDGQASYKIFRIEKGKIVKSVEMNAPNYYYEECSCYPDSSEITCVCRDNWHGSNRPWVSFNQNLEYQIGYICSGIFGDNPRPNDKTGSCGPVSSNGANGVKGFSFKYGNGVWIGRTKSISSRNGFEMIWDPNGWTGTDNNFSIKQDIVGINEWSGYSGSFVQHPELTGLDCIRPCFWVELIRGRPKENTIWTSGSSISFCGVNSDTVGWSWPDGAELPFTIDK

SEQ ID NO: 20579 - protein, 469 aa, synthetic construct; identical to SEQ ID NO: 16738
  REGION 1..469: note = neuraminidase__InfluenzaA__AEA73954

SEQ ID NO: 20580 - protein, 469 aa, synthetic construct; identical to SEQ ID NO: 16738
  REGION 1..469: note = neuraminidase__InfluenzaA__AEA73964

SEQ ID NO: 20581 - protein, 469 aa, synthetic construct
  REGION 1..469: note = neuraminidase__InfluenzaA__AEA73974
MNPNQKIITIGSVCMTIGMANLILQIGNIISIWISHSIQHGNQNQIETCNQSVITYENNTWVNQTYVNISNTNFAAGQSVVSVKLAGNSSLCPVSGWAIYSKDNSIRIGSKGDVFVIREPFISCSPLECRTFFLTQGALLNDKHSNGTIKDRSPYRTLMSCPIGEVPSPYNSRFESVAWSASACHDGINWLTIGISGPDNGAVAVLKYNGIITDTIKSWRNNILRTQESECACVNGSCFTVMTDGPSDGQASYKIFRIEKGKIVKSVEMNAPNYHYEECSCYPDSSEITCVCRDNWHGSNRPWVSFNQNLEYQIGYICSGIFGDNPRPNDKTGSCGPVSSNGANGVKGFSFKYGNGVWIGRTKSISSRNGFEMIWDPNGWTGTDNNFSIKQDIVGINEWSGYSGSFVQHPELTGLDCIRPCFWVELIRGRPKENTIWTSGSSISFCGVNSDTVGWSWPDGAELPFTIDK

SEQ ID NO: 20582 - protein, 469 aa, synthetic construct; identical to SEQ ID NO: 16738
  REGION 1..469: note = neuraminidase__InfluenzaA__AEA73984

SEQ ID NO: 20583 - protein, 469 aa, synthetic construct; identical to SEQ ID NO: 18089
  REGION 1..469: note = neuraminidase__InfluenzaA__AEA73994

SEQ ID NO: 20584 - protein, 469 aa, synthetic construct
  REGION 1..469: note = neuraminidase__InfluenzaA__AEA74004
MNPNKKIIIIGSVCMTIGMANLILQIGNIISIWISHSIQLGNQNQIETCNQSVITYENNTWVNQTYVNISNTNFAAGQSVVSVKLAGNSSLCPVSGWAIYSKDNSIRIGSKGDVFVIREPFISCSPLECRTFFLTQGALLNDKHSNGTIKDRSPYRTLMSCPIGEVPSPYNSRFESVAWSASACHDGINWLTIGISGPDNGAVAVLKYNGIITDTIKSWRNNILRTQESECACVNGSCFTVMTDGPSDGQASYKIFRIEKGKIVKSVEMNAPNYHYEECSCYPDSSEITCVCRDNWHGSNRPWVSFNQNLEYQIGYICSGIFGDNPRPNDKTGSCGPVSSNGANGVKGFSFKYGNGVWIGRTKSISSRNGFEMIWDPNGWTGTDNNFSIKQDIVGINEWSGYSGSFVQHPELTGLDCIRPCFWVELIRGRPKENTIWTSGSSISFCGVNSDTVGWSWPDGAELPFTIDK

SEQ ID NO: 20585 - protein, 469 aa, synthetic construct; identical to SEQ ID NO: 17915
  REGION 1..469: note = neuraminidase__InfluenzaA__AEA74014

SEQ ID NO: 20586 - protein, 469 aa, synthetic construct; identical to SEQ ID NO: 17915
  REGION 1..469: note = neuraminidase__InfluenzaA__AEA74024

SEQ ID NO: 20587 - protein, 469 aa, synthetic construct; identical to SEQ ID NO: 16738
  REGION 1..469: note = neuraminidase__InfluenzaA__AEA74032

SEQ ID NO: 20588 - protein, 469 aa, synthetic construct; identical to SEQ ID NO: 16738
  REGION 1..469: note = neuraminidase__InfluenzaA__AEA74034

SEQ ID NO: 20589 - protein, 469 aa, synthetic construct
  REGION 1..469: note = neuraminidase__InfluenzaA__AEA77302
MNPNQKIITIGSVSLTISTICFFMQIAILITTVTLHFKQYEFNSPPNNQVMLCEPTIIERNITEIVYLTNTTIEKEKCPKLAEYRNWSKPQCDITGFAPFSKDNSIRLSAGGDIWVTREPYVSCDPDKCYQFALGQGTTLNNVHSNNTVRDRTPYRTLLMNELGVPFHLGTKQVCIAWSSSSCHDGKAWLHVCITGDDKNATASFIYNGRLVDSVVSWSKEILRTQESECVCINGTCTVVMTDGSASGKADTKILFIEEGKIVHTSTLSGSAQHVEECSCYPRYPGVRCVCRDNWKGSNRPIVDINIKDHSIVSSYVCSGLVGDTPKKNDSSSSSHCLDPNNEEGGHGVKGWAFDDGNDVWMGRTISEKSRLGYETFKVIEGWSNPKSKLQINRQVIVDRGNRSGYSGIFSVEGKSCINRCFYVELIRGRKEETEVLWTSNSIVVFCGTSGTYGTGSWPDGADINLMPI

SEQ ID NO: 20590 - protein, 469 aa, synthetic construct; identical to SEQ ID NO: 20257
  REGION 1..469: note = neuraminidase__InfluenzaA__AEB21318

SEQ ID NO: 20591 - protein, 469 aa, synthetic construct
  REGION 1..469: note = neuraminidase__InfluenzaA__AEB21328
MNPNQKIITIGSVCMTIGMANLILQIGNIISIWISHSIQLGNQSQIETCNQSVITYENNTWVNQTYVNISNTNFAAGQSVVSVKLAGNSSLCPVSGWAIYSKDNSIRIGSKGDVFVIREPFISCSPLECRTFFLTQGALLNDKHSNGTIKDRSPYRTLMSCPIGEVPSPYNSRFESVAWSASACHDGFNWLTIGISGPDNGAVAVLKYNGIITDTIKSWRNNILRTQESECACVNGSCFTIMTDGPSDGQASYKIFRIEKGKIVKSVEMNAPNYHYEECSCYPDSSEITCVCRDNWHGSNRPWVSFNQNLEYQIGYICSGIFGDNPRPNDKTGSCGPVSSNGANGVKGFSFKYGNGVWIGRTKSISSRKGFEMIWDPNGWTGTDNNFSIKQDIVGINEWSGYSGSFVQHPELTGLDCIRPCFWVELIRGRPKENTIWTSGSSMSFCGVNSDTVGWSWPDGAELPFTIDK

SEQ ID NO: 20592 - protein, 469 aa, synthetic construct; identical to SEQ ID NO: 20257
  REGION 1..469: note = neuraminidase__InfluenzaA__AEB21340

SEQ ID NO: 20593 - protein, 469 aa, synthetic construct
  REGION 1..469: note = neuraminidase__InfluenzaA__AEB21350
MNPNQKIITIGSVCMTIGMANLILQIGNIISIWISHSIQLGNQSQIETCNQSVITYENNTWVNQTYVNISNTNFAAGQSVVSVKLAGNSSLCPVSGWAIYSKDNSIRIGSKGDVFVIREPFISCSPSECRTFFLTQGALLNDKHSNGTIKDRSPYRTLMSCPIGEVPSPYNSRFESVAWSASACHDGINWLTIGISGPDNGAVAVLKYNGIITDTIKSWRNNILRTQESECACVNGSCFTIMTDGPSDGQASYKIFRIEKGKIVKSVEMNAPNYHYEECSCYPDSSEITCVCRDNWHGSNRPWVSFNQNLEYQIGYICSGIFGDNPRPNDKTGSCGPVSSNGANGVKGFSFKYGNGVWIGRTKSIISRKGFEMIWDPNGWTGTDNNFSIKQDIVGINEWSGYSGSFVQHPELTGLDCIRPCFWVELIRGRPKENTIWTSGSSISFCGVNSDTVGWSWPDGAELPFTIDK

SEQ ID NO: 20594 - protein, 469 aa, synthetic construct; identical to SEQ ID NO: 20257
  REGION 1..469: note = neuraminidase__InfluenzaA__AEB21360

SEQ ID NO: 20595 - protein, 469 aa, synthetic construct; identical to SEQ ID NO: 17605
  REGION 1..469: note = neuraminidase__InfluenzaA__AEB40209

SEQ ID NO: 20596 - protein, 469 aa, synthetic construct; identical to SEQ ID NO: 16599
  REGION 1..469: note = neuraminidase__InfluenzaA__AEB66898

SEQ ID NO: 20597 - protein, 470 aa, synthetic construct
  REGION 1..470: note = neuraminidase__InfluenzaA__AEB71103
MNPNQKIITIGSVSLGLVVFNVLLHVVSIIVTVVVLGNDGGNGICNGTVVKEYNETVRIERVIQWHNTSVVEYIPYLNGGTYTNNTESVCDVKGFAPFSKDNGVRIGSRGHVFVIREPFVSCSPRECRTFFLTQGSLLNDKHSNGTVKDRSPFKTLMSVEVGQSPNVYQARFEAVAWSATACHDGKKWMTIGVTGPDSKAVAVVHYGGVPTDIINSWAGDILRTQESSCTCIQGDCYWVMTDGPANRQAQYRIYKSNQGKIIGQMDINFNGGHIEECSCYPNDGKVECVCRDNWTGTNRPVLVISPDLSYKVGYLCAGLPSDTPRGEDAQFSGSCTSPVGGQGYGVKGFGFRQGNDVWMGRTISRTSRSGFEVIRVKNGWTQTSKEQIRKQVVVDNLNWSGYSGSFTLPIELSGKSCLVPCFWVETIRGKPEEKTIWTSSSSIVMCGVDYEVADWSWHDGAILPFDIDKM

SEQ ID NO: 20598 - protein, 470 aa, synthetic construct; identical to SEQ ID NO: 18930
  REGION 1..470: note = neuraminidase__InfluenzaA__AEB71899

SEQ ID NO: 20599 - protein, 469 aa, synthetic construct
  REGION 1..469: note = neuraminidase__InfluenzaA__AEB71910
MNPNQKIITIGSVCMTIGMANLILQIGNIISIWISHSIQLGNQNQIETCNQSVITYENNTWVNQTYVNISNTYFAAGQSVVSVKLAGNSSLCPVSGWAIYSKDNSIRIGSKGDVFVIREPFISCSPLECRTFFLTQGALLNDKHSNGTIKDRSPYRTLMSCPIGEVPSPYNSRFESVAWSASACHDGINWLTIGISGPDNGAVAVLKYNGIITDTIKSWRNNILRTQESECACVNGSCFTVMTDGPSDGQASYKIFRIEKGKIVKSVEMNAPNYHYEECSCYPDSSEITCVCRDNWHGSNRPWVSFNQNLEYQIGYICSGIFGDNPRPNDKTGSCGPVSSNGANGVKGFSFKYGNGVWIGRTKSISSRNGFEMIWDPNGWTGTDNNFSIKQDIVGINEWSGYSGSFVQHPELTGLDCIRPCFWVELIRGRPKENTIWTSGSSISFCGVNSDTVGWSWPDGAELPFTIDK

SEQ ID NO: 20600 - protein, 469 aa, synthetic construct; identical to SEQ ID NO: 16738
  REGION 1..469: note = neuraminidase__InfluenzaA__AEB71919

SEQ ID NO: 20601 - protein, 469 aa, synthetic construct; identical to SEQ ID NO: 18484
  REGION 1..469: note = neuraminidase__InfluenzaA__AEB71928

SEQ ID NO: 20602 - protein, 469 aa, synthetic construct
  REGION 1..469: note = neuraminidase__InfluenzaA__AEB71939
MNPNQKIITIGSVSLTISAICFFMQIAILITTVTLHFKQYEFNSPPNNQVMLCEPTIIERNITEIVYLTNTTIEKEICPKLAEYRNWSKPQCDITGFAPFSKDNSIRLSAGGDIWVTREPYVSCDPDKCYQFALGQGTTLNNVHSNNTVRDRTPYRTLLMNELGVPFHLGTKQVCIAWSSSSCHDGKAWLHVCITGDDKNATASFIYNGRLVDSVVSWSKEILRTQESECVCINGTCTVVMTDGSASGKADTKILFIEEGKIVHTSTLSGSAQHVEECSCYPRYPGVRCVCRDNWKGSNRPIVDINIKDHSIVSSYVCSGLVGDTPRKNDSSSSSHCLDPNNEEGGHGVKGWAFDDGNDVWMGRTISEKSRLGYETFKVIEGWSNHKSKLQINRQVIVDRGNRSGYSGIFSVEGKSCINRCFYVELIRGRKEETEVLWTSNSIVVFCGTSGTYGTGSWPDGADLNLMPI

SEQ ID NO: 20603 - protein, 469 aa, synthetic construct
  REGION 1..469: note = neuraminidase__InfluenzaA__AEB71950
MNPNQKIITIGSVSLTISTICFFMQIAILITTVTLHFKQYEFNSPPNNQVMLCEPTIIERNITEIVYLTNTTIEKEICPKLAEYRNWSKPQCDITGFAPFSKDNSIRLSAGGDIWVTREPYVSCDPDKCYQFALGQGTTLNNVHSNNTVRDRTPYRTLLMNELGVPFHLGTKQVCIAWSSSSCHDGKAWLHVCITGDDKNATASFIYNGRLVDSVVSWSKEILRTQESECVCINGTCTVVMTDGSASGKADTKILFIEEGKIVHTSTLSGSAQHVEECSCYPRYPGVRCVCRDNWKGSNRPIVDINIKDHSIVSSYVCSGLVGDTPRKNDSSSSSHCLDPNNEEGDHGVKGWAFDDGNDVWMGRTISEKSRLGYETFKVIEGWSNHKSKLQINRQVIVDRGNRSGYSGIFSVEGKSCINRCFYVELIRGRKEETEVLWTSNSIVVFCGTSGTYGTGSWPDGADLNLMPI

SEQ ID NO: 20604 - protein, 470 aa, synthetic construct; identical to SEQ ID NO: 19937
  REGION 1..470: note = neuraminidase__InfluenzaA__AEB71961

SEQ ID NO: 20605 - protein, 469 aa, synthetic construct
  REGION 1..469: note = neuraminidase__InfluenzaA__AEB71972
MNPNQKIITIGSVSLTISTICFFMQIAILITTVTLHFKQYEFNSPPNNQVMLCEPTIIERNITEIVYLTNTTIVKEICPKLAEYRNWSKPQCDITGFAPFSKDNSIRLSAGGDIWVTREPYVSCDPDKCYQFALGQGTTLNNVHSNNTVRDRTPYRTLLMNELGVPFHLGTKQVCIAWSSSSCHDGKAWLHVCITGDDKNATASFIYNGRLVDSVVSWSKEILRTQESECVCINGTCTVVMTDGSASGKADTKILFIEEGKIVHTSTLSGSAQHVEECSCYPRYPGVRCVCRDNWKGSNRPIVDINIKDHSIVSSYVCSGLVGDTPRKNDSSSSSHCLDPNNEEGGHGVKGWAFDDGNDVWMGRTISEKSRLGYETFKVIEGWSNPKSKLQINRQVIVDRGNRSGYSGIFSVEGKSCINRCFYVELIRGRKEETEVLWTSNSIVVFCGTSGTYGTGSWPDGADINLMPI

SEQ ID NO: 20606 - protein, 469 aa, synthetic construct
  REGION 1..469: note = neuraminidase__InfluenzaA__AEB71983
MNPNQKIITIGSVSLTISTICFFMQIAILITTVTLHFKQYEFNSPPNNQVMLCEPTIIERNITEIVYLTNTTIEKEICPKLAEYRNWSKPQCDITGFAPFSKDNSIRLSAGGDIWVTREPYVSCDPDKCYQFALGQGTTLNNVHSNNTVRDRTPYRTLLMNELGVPFHLGTKQVCIAWSSSSCHDGKAWLHVCITGDDKNATASFIYNGRLVDSVVSWSKEILRTQESECVCINGTCTVVMTDGSASGKADTKILFIEEGKIVHTSTLSGSAQHVEECSCYPRYPGVRCVCRDNWKGSNRPIVDINMKDHSIVSSYVCSGLVGDTPRRNDSSSSSHCLDPNNEEGGHGVKGWAFDDGNDVWMGRTISEKSRLGYETFKVIEGWSNPKSKLQINRQVIVDRGNRSGYSGIFSVEGKSCINRCFYVELIRGRKEETEVLWTSNSIVVFCGTSGTYGTGSWPDGADINLMPI

SEQ ID NO: 20607 - protein, 470 aa, synthetic construct
  REGION 1..470: note = neuraminidase__InfluenzaA__AEB71995
MNPNQKIITIGSISIAIGIISLMLQIGNIISIWASHSIQTGSQNNTGICNQRIITYENSTWVNHTYININNTNVVAGEDKTSVTLAGNSSLCSISGWAIYTKDNSIRIGSKGDVFVIREPFISCSHLECRTFFLTQGALLNDKHSNGTVKDRSPYRALMSCPLGEAPSPYNSKFESVAWSASACHDGMGWLTIGISGPDNGAVAVLKYNGIITGTIKSWKKQILRTQESECVCMNGSCFTIMTDGPSNKAASYKIFKIEKGKVTKSIELNAPNFYYEECSCYPDTGIVMCVCRDNWHGSNRPWVSFNQNLDYQIGYICSGVFGDNPRPEDGEGSCNPVTVNGADGVKGFSYKYGNGVWIGRTKSNRLRKGFEMIWDPNGWTNTDSDFSVKQDVVAITDWSGYSGSFVQHPELTGLECIRPCFWVELVRGLPRENTTIWTSGSSISFCGVNSDTANWSWPDGAELPFTIDK

SEQ ID NO: 20608 - protein, 470 aa, synthetic construct; identical to SEQ ID NO: 20205
  REGION 1..470: note = neuraminidase__InfluenzaA__AEC13316

SEQ ID NO: 20609 - protein, 469 aa, synthetic construct; identical to SEQ ID NO: 16738
  REGION 1..469: note = neuraminidase__InfluenzaA__AEC53262

SEQ ID NO: 20610 - protein, 469 aa, synthetic construct; identical to SEQ ID NO: 16738
  REGION 1..469: note = neuraminidase__InfluenzaA__AEC53272

SEQ ID NO: 20611 - protein, 469 aa, synthetic construct; identical to SEQ ID NO: 16738
  REGION 1..469: note = neuraminidase__InfluenzaA__AEC53282

SEQ ID NO: 20612 - protein, 469 aa, synthetic construct; identical to SEQ ID NO: 16738
  REGION 1..469: note = neuraminidase__InfluenzaA__AEC53292

SEQ ID NO: 20613 - protein, 469 aa, synthetic construct
  REGION 1..469: note = neuraminidase__InfluenzaA__AEC53302
MNPNQKIITIGSVCMTIGMANLILQIGNIISIWISHSIQLGNQNQIETCNQSVITYENNTWVNQTYVNISNTNFAAGQSVVSVKLAGNSSLCPVSGWAIYSKDNSIRIGSKGDVFVIREPFISCSPLECRTFFLTQGALLNDKHSNGTIKDRSPYRTLMSCPIGEVPSPYNSRFESVAWSASACHDGINWLTIGISGPDNGAVAVLKYNGIITDIIKSWRNNILRTQESECACVNGSCFTVMTDGPSDGQASYKIFRIEKGKIVKSVEMNAPNYHYEECSCYPDSSEITCVCRDNWHGSNRPWVSFNQNLEYQIGYICSGIFGDNPRPNDKTGSCGPVSSNGANGVKGFSFKYGNGVWIGRTKSISSRNGFEMIWDPNGWTGTDNNFSIKQDIVGINEWSGYSGSFVQHPELTGLDCIRPCFWVELIRGRPKENTIWTSGSSISFCGVNSDTVGWSWPDGAELPFTIDK

SEQ ID NO: 20614 - protein, 469 aa, synthetic construct; identical to SEQ ID NO: 16738
  REGION 1..469: note = neuraminidase__InfluenzaA__AEC53350

SEQ ID NO: 20615 - protein, 469 aa, synthetic construct; identical to SEQ ID NO: 17446
  REGION 1..469: note = neuraminidase__InfluenzaA__AEC53407

SEQ ID NO: 20616 - protein, 469 aa, synthetic construct; identical to SEQ ID NO: 16738
  REGION 1..469: note = neuraminidase__InfluenzaA__AEC53427

SEQ ID NO: 20617 - protein, 469 aa, synthetic construct; identical to SEQ ID NO: 17564
  REGION 1..469: note = neuraminidase__InfluenzaA__AED99967

SEQ ID NO: 20618 - protein, 469 aa, synthetic construct; identical to SEQ ID NO: 16728
  REGION 1..469: note = neuraminidase__InfluenzaA__AEE27161

SEQ ID NO: 20619 - protein, 469 aa, synthetic construct; identical to SEQ ID NO: 16738
  REGION 1..469: note = neuraminidase__InfluenzaA__AEE27170

SEQ ID NO: 20620 - protein, 469 aa, synthetic construct; identical to SEQ ID NO: 16728
  REGION 1..469: note = neuraminidase__InfluenzaA__AEE27180

SEQ ID NO: 20621 - protein, 469 aa, synthetic construct
  REGION 1..469: note = neuraminidase__InfluenzaA__AEE27190
MNPNQKIITIGSVCMTIGMANLILQIGNIISIWISHSIQLGNQNQIETCNQSVITYENNTWVNQTYVNISNTNFAAGQSVVSVKLAGNSSLCPVSGWAIYSKDNSVRIGSKGDVFVIREPFISCSPLECRTFFLTQGALLNDKHSNGTIKDRSPYRTLMSCPIGEVPSPYNSRFESVAWSASACHDGINWLTIGISGPDNGAVAVLKYNGVITDTIKSWRNNILRTQESECACVNGSCFTVMTDGPSNGQASYKIFKIEKGKIVKSVEMNAPNYHYEECSCYPDSSEITCVCRDNWHGSNRPWVSFNQNLEYQIGYICSGIFGDNPRPNDKTGSCGPVSSNGANGVKGFSFKYGNGVWIGRTKSISSRNGFEMIWDPNGWTGTDNNFSIKQDIVGINEWSGYSGSFVQHPELTGLDCIRPCFWVELIRGRPKENTIWTSGSSISFCGVNSDTVGWSWPDGAELPFTIDK

SEQ ID NO: 20622 - protein, 469 aa, synthetic construct; identical to SEQ ID NO: 17961
  REGION 1..469: note = neuraminidase__InfluenzaA__AEE27200

SEQ ID NO: 20623 - protein, 469 aa, synthetic construct; identical to SEQ ID NO: 19797
  REGION 1..469: note = neuraminidase__InfluenzaA__AEG64755

SEQ ID NO: 20624 - protein, 453 aa, synthetic construct
  REGION 1..453: note = neuraminidase__InfluenzaA__AEG64765
MNPNQKIITIGSICMVVGIISLILQIGNIISIWISHSIQTGNQNHTGICNQGIITYNVVAGQDSTSVILTGNSSLCPIRGWAIHSKDNGIRIGSKGDVFVIREPFISCSHLECRTFFLTQGALLNDKHSNGTVKDRSPYRALMSCPVGEAPSPYNSRFESVAWSASACHDGMGWLTIGISGPDNGAVAVLKYNGIITETIKSWRKKILRTQESECTCVNGSCFTIMTDGPSDGLASYKIFKIEKGKVTKSIELNAPNSHYEECSCYPDTGKVMCVCRDNWHGSNRPWVSFDQNLDYQIGYICSGVFGDNPRPKDGTGSCGPVSADGANGVKGFSYRYGNGVWIGRTKSDSSRHGFEMIWDPNGWTETDSRFSVRQDVVAMTDRSGYSGSFVQHPELTGLDCMRPCFWVELIRGRPEEKTIWTSGSIISFCGVNSDTVDWSWPDGAELPFTIDK

SEQ ID NO: 20625 - protein, 469 aa, synthetic construct
  REGION 1..469: note = neuraminidase__InfluenzaA__AEG64787
MNPNQKIITIGSVCMTIGMANLILQIGNIISIWISHSIQLGNQNQIETCNQSVITYENNTWVNQTYVNISNTNFAAGQSVVSVKLAGNSSLCPVSGWAIYSKDNSIRIGSKGDVFVIREPFISCSPLECRTFFLTQGALLNDKHSNGTIKDRSPYRTLMSCPIGEVPSPYNSRFESVAWSASACHDGINWLTIGISGPDNGAVAVLKYNGIITDTIKSWRNNRLRTQESECACVNGSCFTVMTDGPSDGQASYKIFRIEKGKIVKSVEMNAPNYHYEECSCYPDSSEITCVCRDNWHGSNRPWVSFNQNLEYQIGYICSGIFGDNPRPNDKTGSCGPVSSNGANGVKGFSFKYGNGVWIGRTKSISSRNGFEMIWDPNGWTGTDNDFSIKQDIVGINEWSGYSGSFVQHPELTGLDCIRPCFWVELIRGRPKENTIWTSGSSISFCGVNSDTVGWSWPDGAELPFTIDK

SEQ ID NO: 20626 - protein, 469 aa, synthetic construct
  REGION 1..469: note = neuraminidase__InfluenzaA__AEG64837
MNPNQKIITIGSVSLTISTICFFMQIAILITTVTLHFKQYEFNSPPNNQVMLCEPTIIERNITEIVYLTNTTIEKEICPKLAEYRNWSKPQCDITGFAPFSKDNSIRLSAGGDIWVTREPYVSCDPDKCYQFALGQGTTLNNVHSNNTVRDRTPYRTLLMNELGVPFHLGTKQVCIAWSSSSCHDGKAWLHVCITGDDKNATASLIYNGRLVDSVVSWSKEILRTQESECVCINGTCTVVMTDGSASGKADTKILFIEEGKIVHTSTLSGSAQHVEECSCYPRYPGVRCVCRDNWKGSNRPIVDINIKDHSIVSSYVCSGLVGDTPRKNDSSSSSHCLDPNNEEGGHGVKGWAFDDGNDVWMGRTINETSRLGYETFKVIEGWSNPKSKLQINRQVIVDRGNRSGYSGIFSVEGKSCINRCFYVELIRGRKEETEVLWTSNSIVVFCGTSGTYGTGSWPDGADLNLMPI

SEQ ID NO: 20627 - protein, 469 aa, synthetic construct
  REGION 1..469: note = neuraminidase__InfluenzaA__AEG64848
MNPNQKIITIGSVSLTISTICFFMQIAILITTVTLHFKQYEFYSPPNNQVMLCEPTIIERNITEIVYLTNTTIEKEICPKLAEYRNWLKPQCDITGFAPFSKDNSIRLSAGGDIWVTREPYVSCDPDKCYQFALGQGTTLNNVHSNNTVRDRTPYRTLLMNELGVPFHLGTKQVCIAWSSSSCHDGKAWLHVCITGDDKNATASFIYNGRLVDSVVSWSKEILRTQESECVCINGTCTVVMTDGSASGKADTKILFIEEGKIVHTSTLSGSAQHVEECSCYPRYPGVRCVCRDNWKGSNRPIVDINIKDHSIVSSYVCSGLVGDTPRKNDSSSSSHCLDPNNEEGGHGVKGWAFDDGNDVWMGRTINETSRLGYETFKVIEGWSNPKSKLQINKQVIVDRGNRSGYSGIFSVEGKSCINRCFYVELIRGRKEETEVLWTSNSIVVFCGTSGTYGTGSWPDGADLNLMPI

SEQ ID NO: 20628 - protein, 469 aa, synthetic construct; identical to SEQ ID NO: 14233
  REGION 1..469: note = neuraminidase__InfluenzaA__AEG64859

SEQ ID NO: 20629 - protein, 469 aa, synthetic construct; identical to SEQ ID NO: 14061
  REGION 1..469: note = neuraminidase__InfluenzaA__AEG64870

SEQ ID NO: 20630 - protein, 469 aa, synthetic construct; identical to SEQ ID NO: 14253
  REGION 1..469: note = neuraminidase__InfluenzaA__AEG64881

SEQ ID NO: 20631 - protein, 469 aa, synthetic construct; identical to SEQ ID NO: 14061
  REGION 1..469: note = neuraminidase__InfluenzaA__AEG64892

SEQ ID NO: 20632 - protein, 469 aa, synthetic construct; identical to SEQ ID NO: 14137
  REGION 1..469: note = neuraminidase__InfluenzaA__AEG64914

SEQ ID NO: 20633 - protein, 469 aa, synthetic construct; identical to SEQ ID NO: 14137
  REGION 1..469: note = neuraminidase__InfluenzaA__AEG64925

SEQ ID NO: 20634 - protein, 469 aa, synthetic construct
  REGION 1..469: note = neuraminidase__InfluenzaA__AEG64936
MNPNQKIITIGSVSLTIATICFLMQIAILVTTVTLHFKQHECNSPPNNQVMLCEPTIIERNITEIVYLTNTTIEKEICPKLAEYRNWSKPQCNITGFAPFSKDNSIRLSAGGDIWVTREPYVSCDPDKCYQFALGQGTTLNNGHSNDTVHDRTPYRTLLMNELGVPFHLGTRQVCIAWSSSSCHDGKAWLHVCVTGEDKNATASFIYNGRLVDSIGSWSKKILRTQESECVCINGTCTVVMTDGSASGKADTKILFIEEGKIVHISTLSGSAQHVEECSCYPRYPGVRCVCRDNWKGSNRPIVDINVKDYSIVSSYVCSGLVGDTPRKNDSSSSSHCLDPNNEEGGHGVKGWAFDDGNDVWMGRTISEKLRSGYETFKVIEGWSKPNSKLQINRQVIVERGNRSGYSGIFSVEGKSCINRCFYVELIRGRKEETEVWWTSNSIVVFCGTSGTYGTGSWPDGADINLMPI

SEQ ID NO: 20635 - protein, 469 aa, synthetic construct; identical to SEQ ID NO: 14150
  REGION 1..469: note = neuraminidase__InfluenzaA__AEG64947

SEQ ID NO: 20636 - protein, 469 aa, synthetic construct; identical to SEQ ID NO: 14137
  REGION 1..469: note = neuraminidase__InfluenzaA__AEG64958

SEQ ID NO: 20637 - protein, 469 aa, synthetic construct; identical to SEQ ID NO: 14137
  REGION 1..469: note = neuraminidase__InfluenzaA__AEG64969

SEQ ID NO: 20638 - protein, 469 aa, synthetic construct; identical to SEQ ID NO: 14137
  REGION 1..469: note = neuraminidase__InfluenzaA__AEG64980

SEQ ID NO: 20639 - protein, 469 aa, synthetic construct
  REGION 1..469: note = neuraminidase__InfluenzaA__AEG64991
MNPNQKIITIGSVSLTISTICFFMQIAILITTVTLHFKQYESNSPPNNQVMLCEPTIIERNITEIVYLTNTTIEKEICPKLAEYRNWSKPQCNITGFAPFSKDNSIRLSAGGDIWVTREPYVSCDPDKCYQFALGQGTTLNNVHSNDTVHDRTPYRTLLMNELGVPFHLGTKQVCIAWSSSSCHDGKAWLHVCVTGDDKNATASFIYNGRLVDSIVSWSKEILRTQESECVCINGTCTVVMTDGSASGKADTKILFIEEGKIVHTSTLSGSAQHVEECSCYPRYPGVRCVCRDNWKGSNRPIVDINIKDYSIVSSYVCSGLVGDTPRKNDSSSSSHCLDPNNEEGGHGVKGWAFDDGNDVWMGRTISEKLRSGYETFKVIEGWSNPNSKLQTNRQVIVDRGNRSGYSGIFSVEGKSCINRCFYVELIRGRKEETEVLWTSNSIVVFCGTSGTYGTGSWPDGADINLMPI

SEQ ID NO: 20640 - protein, 469 aa, synthetic construct; identical to SEQ ID NO: 14327
  REGION 1..469: note = neuraminidase__InfluenzaA__AEG65002

SEQ ID NO: 20641 - protein, 469 aa, synthetic construct
  REGION 1..469: note = neuraminidase__InfluenzaA__AEG65013
MNPNQKIITIGSVSLTISTICFFMQIAILITTVTLHFKQYEFNSPPNNQVMLCEPTIIERNITEIVYLTNTTIEKEICPKLAEYRNWSKPQCDITGFAPFSKDNSIRLSAGGDIWVTREPYVSCDPDKCYQFALGQGTTLNNVHSNDTVHDRTPYRTLLMNELGVPFHLGTKQVCIAWSSSSCHDGKAWLHVCVTGDDKNATASFIYNGRLVDSIVSWSKDILRTQESECVCINGTCTVVMTDGSASGKADTKILFIEEGKIVHTSTLSGSAQHVEECSCYPRYPGVRCVCRDNWKGSNRPIVDINIKDYSIVSSYVCSGLVGDTPRKNDSSSSSHCLDPNNEEGGHGVKGWAFDDGNDVWMGRTISEKLRLGYETFKVIEGWSNPNSKLQTNRQVIVERGNRSGYSGIFSVEGKSCINRCFYVELIRGRKEETEVLWTSNSIVVFCGTSGTYGTGSWPDGADINLMPI

SEQ ID NO: 20642 - protein, 469 aa, synthetic construct
  REGION 1..469: note = neuraminidase__InfluenzaA__AEG65024
MNPNQKIITIGSVSLTISTICFFMQIAILITTVTLHFKQYEFNSPPNNHVMLCEPTIIERNITEIVYLTNTTIEKEICPKLAEYRNWSKPQCDITGFAPFSKDNSIRLSAGGDIWVTREPYVSCDPDKCYQFALGQGTTLNNVHSNDTVHDRTPYRTLLMNELGVPFHLGTKQVCIAWSSSSCHDGKAWLHVCVTGDDKNATASFIYNGRLVDSIVSWSKEILRTQESECVCINGTCTVVMTDGSASGKADTKILFIEEGKIVHTSTLSGSAQHVEECSCYPRYPGVRCVCRDNWKGSNRPIVDINIKDYSIVSSYVCSGLVGDTPRKNDSSSSSHCLDPNNEEGGHGVKGWAFDDGNDVWMGRTISEKLRLGYETFKVIEGWSNPNSKLQINRQVIVDRGNRSGYSGIFSVEGKSCINRCFYVELIRGRKEETEVLWTSNSIVVFCGTSGTYGTGSWPDGADINLMPI

SEQ ID NO: 20643 - protein, 469 aa, synthetic construct
  REGION 1..469: note = neuraminidase__InfluenzaA__AEG65035
MNPNQKIITIGSVSLTISTICFFMQIAILITTVTLHFKQYEFNSPPNNQVMLCEPTIIERNITEIVYLTNTTIEKEVCPKLAEYRNWSKPQCNITGFAPFSKDNSIRLSAGGDIWVTREPYVSCDLDKCYQFALGQGTTLNNVHSNDTVHDRTPYRTLLMNELGVPFHLGTKQVCIAWSSSSCHDGKAWLHVCVTGDDKNATASFIYNGRLVDSIVSWSKEILRTQESECVCINGTCTVVMTDGSASGKADTKILFIEEGKIVHTSTLSGSAQHVEECSCYPRYPGVRCVCRDNWKGSNRPIVDINIKDYSIVSSYVCSGLVGDTPRKNDSSSSSHCLDPNNEEGGHGVKGWAFDDGNDVWMGRTISEKLRSGYETFKVIEGWSNPNSKLQINRQVIVDRGNRSGYSGIFSVEGKSCINRCFYVELIRGRKEENEVLWTSNSIVVFCGTSGTYGTGSWPDGADINLMPI

SEQ ID NO: 20644 - protein, 469 aa, synthetic construct; identical to SEQ ID NO: 14712
  REGION 1..469: note = neuraminidase__InfluenzaA__AEG65057

SEQ ID NO: 20645 - protein, 469 aa, synthetic construct; identical to SEQ ID NO: 15707
  REGION 1..469: note = neuraminidase__InfluenzaA__AEG65068

SEQ ID NO: 20646 - protein, 469 aa, synthetic construct
  REGION 1..469: note = neuraminidase__InfluenzaA__AEG65079
MNPNQKIITIGSVSLTISTICFFMQIAILITTVTLHFKQYEFNSPPNNQVMLCEPTIIERNITEIVYLTNTTIEKEICPKLAEYRNWSKPQCNITGFAPFSKDNSIRLSAGGDIWVTREPYVSCDPDKCYQFALGQGTTLNNVHSNDTVHDRTPYRTLLMNELGVPFHLGTKQVCIAWSSSSCHDGKAWLHVCVTGDDKNATASFIYNGRLVDSIVSWSKEILRTQESECVCINGTCTVVMTDGSASGKADTKILFIEEGKIVHTSTLSGSAKHVEECSCYPRYPGVRCVCRDNWKGSNRPIVDINIKDYSIVSSYVCSGLVGDTPRKNDSSSSGHCLDPNNEEGGHGVKGWAFDDGNDVWMGRTISEKLRSGYETFKVIEGWSNPNSKLQINRQVIVDRGNRSGYSGIFSVEGKSCINRCFYVELIRGRKEETEVLWTSNSIVVFCGTSGTYGTGSWPDGADINLMPI

SEQ ID NO: 20647 - protein, 469 aa, synthetic construct
  REGION 1..469: note = neuraminidase__InfluenzaA__AEG65090
MNPNQKIITIGSVSLTISTICFFMQIAILITTVTLHFKQYEFNSPPNNQVMLCEPTIIERNITEIVYLTNTTIEKEICPKLAEYRNWSKPQCNITGFAPFSKDNSIRLSAGGDIWVTREPYVSCDPDKCYQFALGQGTTLNNVHSNDTVHDRTPYRTLLMNELGVPFHLGTKQVCIAWSSSSCHDGKAWLHVCVTGDDKNATASFIYNGRLVDSIVSWSKEILRTQESECVCINGTCTVVMTDGSASGKADTKILFIEEGKIIHTSTLSGSAQHVEECSCYPRYPGVRCVCRDNWKGSNRPIVDINIKDYSIVSSYVCSGLVGDTPRKNDSSSSSHCLDPNNEEGGHGVKGWAFDDGNDVWMGRTISEKLRSGYETFKVIEGWSNPNSKLQINRQVIVDRGNRSGYSGIFSVEGKSCINRCFYVELIRGRKEETEVLWTSNSIVVFCGTSGTYGTGSWPDGADISLMPI

SEQ ID NO: 20648 - protein, 469 aa, synthetic construct
  REGION 1..469: note = neuraminidase__InfluenzaA__AEG65101
MNPNQKIITIGSVSLTISTICFFMQIAILITTVTLHFKQYEFNSPPDNQVMLCEPTIIERNITEIVYLTNTTIEKEICPKLAEYRNWSKPQCDITGFAPFSKDNSIRLSAGGDIWVTREPYVSCDPDKCYQFALGQGTTLNNVHSNDTVHDRTPYRTLLMNELGVPFHLGTKQVCIAWSSSSCHDGKAWLHVCVTGDDKNATASFIYNGRLVDSVVSWSKDILRTQESECVCINGTCTVVMTDGSASGKADTKILFIEEGKIVHTSTLSGSAQHVEECSCYPRYPGVRCVCRDNWKGSNRPIVDINIKNYSIVSSYVCSGLVGDTPRKTDSSSSSHCLDPNNEEGGHGVKGWAFDDGNDVWMGRTISEKLRLGYETFKVIEGWSNPNSKLQINRQVIVDRGNRSGYSGIFSVEGKSCINRCFYVELIRGRKEETEVLWTSNSIVVFCGTSGTYGTGSWPDGADINLMPI

SEQ ID NO: 20649 - protein, 469 aa, synthetic construct
  REGION 1..469: note = neuraminidase__InfluenzaA__AEG65123
MNPNQKIITIGSVSLTISTICFFMQIAILITTVTLHFKQYEFNSPPNNQVMLCEPTTIERNITEIVYLTNTTIEKEICPKLAEYRNWSKPQCDITGFAPFSKDNSIRLSAGGDIWVTREPYVSCDPDKCYQFALGQGTTLNNVHSNDTVHDRTPYRTLLMNELGVPFHLGTKQVCIAWSSSSCHDGKAWLHVCVTGDDKNATASFIYNGRLVDSVVSWSKDILRTQESECVCINGTCTVVMTDGSASGKADTKILFIEEGKIVHTSTLSGSAQHVEECSCYPRYPGVRCVCRDNWKGSNRPIVDINIKNYSIVSSYVCSGLVGDTPRKTDSSSSSHCLDPNNEEGGHGVKGWAFDDGNDVWMGRTISEKLRLGYETFKVIEGWSNPNSKLQINRQVIVDRGNRSGYSGIFSVEGKSCINRCFYVELIRGRKEENEVLWTSNSIVVFCGTSGTYGTGSWPDGADINLMPI

SEQ ID NO: 20650 - protein, 469 aa, synthetic construct; identical to SEQ ID NO: 15707
  REGION 1..469: note = neuraminidase__InfluenzaA__AEG65134

SEQ ID NO: 20651 - protein, 469 aa, synthetic construct
  REGION 1..469: note = neuraminidase__InfluenzaA__AEG65145
MNPNQKIITIGSVSLTIATICFLMQIAILVTTVTLHFKQYECNSPPNNQVMLCEPTIIERNITEIVYLTNTTIEKEICPKLAEYRNWSKPQCNITGFAPFSKDNSIRLSAGGDIWVTREPYVSCDPDKCYQFALGQGTTLNNGHSNDTVHDRTPYRTLLMNELGVPFHLGTRQVCIAWSSSSCHDGKAWLHVCVTGDDENATASFIYNGRLVDSIGSWSKKILRTQESECVCINGTCTVVMTDGSASGKADTKILFIEEGKIVHISTLSGSAQHVEECSCYPRYPGVRCVCRDNWKGSNRPIVDINVKDYSIVSSYVCSGLVGDTPRKNDSFSNSHCLDPNNEEGGHGVKGWAFDDGNDVWMGRTISEKLRSGYETFKVIEGWSKPNSKLQINRQVIVERGNRSGYSGIFSVEGKSCINRCFYVELIRGRKEETEVWWTSNSIVVFCGTSGTYGTGSWPDGADINLMPI

SEQ ID NO: 20652 - protein, 469 aa, synthetic construct
  REGION 1..469: note = neuraminidase__InfluenzaA__AEG65156
MNPNQKIITIGSVSLTIATICFLMQIAILVTTVTLHFKQYECNSPPNNQVMLCEPTIIERNITEIVYLTNTTIEKEICPKLAEYRNWSKPQCNITGFAPFSKDNSIRLSAGGDIWVTREPYVSCDPDKCYQFALGQGTTLNNGHSNDTVHDRTPYRTLLMNELGVPFHLGTRQVCIAWSSSSCHDGKAWLHVCVTGDDENATASFIYNGRLVDSIGSWSKKILRTQESECVCINGTCTVVMTDGSASGKADTKILFIEEGKIVHTSTLSGSAQHVEECSCYPRYPGVRCVCRDNWKGSNRPIVDINVKDYSIVSSYVCSGLVGDTPRKNDSFSSSHCLDPNNEEGGHGVKGWAFDDGNDVWMGRTISEKLRSGYETFKVIEGWSKPNSKLQINRQVIVERGNRSGYSGIFSVEGKSCINRCFYVELIRGRKEETEVWWTSNSIVVFCGTSGTYGTGSWPDGADINLMPI

SEQ ID NO: 20653 - protein, 469 aa, synthetic construct
  REGION 1..469: note = neuraminidase__InfluenzaA__AEG65167
MNPNQKIITIGSVSLTIATICFLMQIAILVTTVTLHFKQYECNSPPNNQVMLCEPTIIERNITEIVYLTNTTIEKEICPKLAEYRNWSKPQCNITGFAPFSKDNSIRLSAGGDIWVTREPYVSCDPDKCYQFALGQGTTLNNGHSNDTVHDRTPYRTLLMNELGVPFHLGTRQVCIAWSSSSCHDGKAWLHVCVTGDDENATASFIYNGRLVDSIGSWSKKILRTQESECVCINGTCTVVMTDGSASGKADTKILFIEEGKIVHISTLSGSARHVEECSCYPRYPGVRCVCRDNWKGSNRPIVDINVKDYSIVSSYVCSGLVGDTPRKNDSFSSSHCLDPNNEEGGHGVKGWAFDDGNDVWMGRTISEKLRSGYETFKVIEGWSKPNSKLQINRQVIVERGNRSGYSGIFSVEGKSCINRCFYVELIRGRKEETEVWWTSNSIVVFCGTSGTYGTGSWPDGADINLMPI

SEQ ID NO: 20654 - protein, 469 aa, synthetic construct
  REGION 1..469: note = neuraminidase__InfluenzaA__AEG65178
MNPNQKIITIGSVSLTIATICFLMQIAILVTTVTLHFKQHECNSPPNNQVMLCEPTIIERNITEIVYLTNTTIEKEICPKLAEYRNWSKPQCNITGFAPFSKDNSIRLSAGGDIWVTREPYVSCDPDKCYQFALGQGTTLNNGHSNNTVHDRTPYRTLLMNELGVPFHLGTRQVCIAWSSSSCHDGKAWLHVCVTGDDKNATASFIYNGRLVDSIGSWSKNILRTQESECVCINGTCTVVMTDGSASGKADTKILFIEEGKIVHISTLSGSAQHVEECSCYPRYPGVRCVCRDNWKGSNRPIVDINVKDYSIVSSYVCSGLVGDTPRKNDSFSSSHCLDPNNEEGGHGVKGWAFDDGNDVWMGRTISEKLRSGYETFKVIEGWSKPNSKLQINRQVIVERGNRSGYSGIFSVEGKSCINRCFYVELIRGRKEETEVWWTSNSIVVFCGTSGTYGTGSWPDGADINLMPI

SEQ ID NO: 20655 - protein, 469 aa, synthetic construct
  REGION 1..469: note = neuraminidase__InfluenzaA__AEG65189
MNPNQKIITIGSVSLTISTICFFMQIAILITTVTLHFKQYEFNSPPNNQVMLCEPTIIERNITEIVYLTNTTIEKEICPKLAEYRNWSKPQCDITGFAPFSKDNSIRLSAGGDIWVTREPYVSCDPDKCYQFALGQGTTLNNVHSNDTVHDRTPYRTLLMNELGVPFHLGTKQVCIAWSSSSCHDGKAWLHVCVTGDDKNATASFIYNGRLVDSIVSWSKEILRTQESECVCINGTCTVVMTDGSASGKADTKILFIEEGKIVHTSTLSGSAQHVEECSCYPRYPGVRCVCRDNWKGSNRPIVDININDYSIVSSYVCSGLVGDTPRKNDSSSSSHCLDPNNEEGGHGVKGWAFDDGNDVWMGRTISEKLRSGYETFKVIEGWSNPNSKLQINRQVIVDRGNRSGYSGIFSVEGKSCINRCFYVELIRGRKEETEVLWTSNSIVVFCGTSGTYGTGSWPDGADINLMPI

SEQ ID NO: 20656 - protein, 469 aa, synthetic construct
  REGION 1..469: note = neuraminidase__InfluenzaA__AEG65200
MNPNQKIITIGSVSLTISTICFFMQIAILITTVTLHFKQYEFNSPPNNQVMLCEPTIIERNITEIVYLTNTTIEKEICPKLAEYRNWSKPQCDITGFAPFSKDNSIRLSAGGDIWVTREPYVSCDPDKCYQFALGQGTTLNNVHSNDTVHDRTPYRTLLMNELGVPFHLGTKQVCIAWSSSSCHDGKAWLHVCVTGDDKNATASFIYNGRLVDSIVSWSKEVLRTQESECVCINGTCTVVMTDGSASGKADTKILFIEEGKIVHTSTLSGSAQHVEECSCYPRYPGVRCVCRDNWKGSNRPIVDINIKDYSIVSSYVCSGLVGDTPRKNDSSSSSHCLDPNNEEGGHGVKGWAFDDGNDVWMGRTISEKLRSGYETFKVIEGWSNPNSKLQTNRQVIVDRGNRSGYSGIFSVEGKSCINRCFYVELIRGRKEETEVLWTSNSIVVFCGTSGTYGTGSWPDGADINLMPI

SEQ ID NO: 20657 - protein, 469 aa, synthetic construct; identical to SEQ ID NO: 14712
  REGION 1..469: note = neuraminidase__InfluenzaA__AEG65211

SEQ ID NO: 20658 - protein, 469 aa, synthetic construct; identical to SEQ ID NO: 14714
  REGION 1..469: note = neuraminidase__InfluenzaA__AEG65222

SEQ ID NO: 20659 - protein, 469 aa, synthetic construct
  REGION 1..469: note = neuraminidase__InfluenzaA__AEG65233
MNPNQKIITIGSVSLTISTICFFMQIAILITTVTLHFKQYEFNSPPNNQVMLCEPTIIERNITEIVYLTNTTIEKEICPKLAEYRNWSKPQCDITGFAPFSKDNSIRLSAGGDIWVTREPYVSCDPDKCYQFALGQGTTLNNVHSNDTVHDRTPYRTLLMNELGVPFHLGTKQVCIAWSSSSCHDGKAWLHVCVTGDDKNATASFIYNGRLVDSIVSWSKKILRTQESECVCINGTCTVVMTDGSASGKADTKILFIEEGKIVHTSTLSGSAQHVEECSCYPRYPGVRCVCRDNWKGSNRPIIDINIKDYSIVSSYVCSGLVGDTPRKNDSSSSSHCLDPNNEEGGHGVKGWAFDDGNDVWMGRTISEKLRSGYETFKVIEGWSNPNSKLQINRQVIVDRGNRSGYSGIFSVEGKSCINRCFYVELIRGRKEETEVLWTSNSIVVFCGTSGTYGTGSWPDGADINLMPI

SEQ ID NO: 20660 - protein, 469 aa, synthetic construct
  REGION 1..469: note = neuraminidase__InfluenzaA__AEG65244
MNPNQKIITIGSVSLTISTICFFMQIAILITTVTLHFKQYEFNSPPNNQVMLCEPTIIERNITEIVYLTNTTIEKEICPKLAEYRNWSKPQCNITGFAPFSKDNSIRLSAGGDIWVTREPYVSCDPDKCYQFALGQGTTLNNVHSNDTVHDRTPYRTLLMNELGVPFHLGTQQVCIAWSSSSCHDGKAWLHVCVTGDDENATASFIYNGRLVDSIVSWSKKILRTQESECVCINGTCTVVMTDGSASGKADTKILFIEEGKIVHTSTLSGSAQHVEECSCYPRYPGVRCVCRDNWKGSNRPIVDINIKDYSIASSYVCSGLVGDTPRKNDSSSSSHCLDPNNEEGGHGVKGWAFDDGNDVWMGRTISEKLRSGYETFKVIEGWSNPNSKLQINRQVIVDRGNRSGYSGIFSVEGKSCINRCFYVELIRGRNQETEVLWTSNSIVVFCGTSGTYGTGSWPDGADINLMPI

SEQ ID NO: 20661 - protein, 469 aa, synthetic construct; identical to SEQ ID NO: 14714
  REGION 1..469: note = neuraminidase__InfluenzaA__AEG65255

SEQ ID NO: 20662 - protein, 469 aa, synthetic construct; identical to SEQ ID NO: 14591
  REGION 1..469: note = neuraminidase__InfluenzaA__AEG65266

SEQ ID NO: 20663 - protein, 469 aa, synthetic construct; identical to SEQ ID NO: 14591
  REGION 1..469: note = neuraminidase__InfluenzaA__AEG65277

SEQ ID NO: 20664 - protein, 469 aa, synthetic construct
  REGION 1..469: note = neuraminidase__InfluenzaA__AEG65288
MNPNQKIITIGSVSLTIATICFLMQIAILVTTVTLHFKQHECNSPPNNQVMLCEPTIIERNITEIVYLTNTTIEKEICPKLVEYRNWSKPQCNITGFAPFSKDNSIRLSAGGDIWVTREPYVSCDPDKCYQFALGQGTTLNNGHSNDTVHDRTPYRTLLMNELGVPFHLGTRQVCIAWSSSSCHDGKAWLHVCVTGDDKNATASFIYNGRLVDSIGSWSKKILRTQESECVCINGTCTVVMTDGSASGKADTKILFIEEGKIVHISTLSGSAQHVEECSCYPRYPGVRCVCRDNWKGSNRPIVDINVKDYSIVSSYVCSGLVGDTPRKNNSFSSSHCLDPNNEEGGHGVKGWAFDDGNDVWMGRTISEKLRSGYETFKVIEGWSKPNSKLQINRQVIVERGNRSGYSGIFSVEGKSCINRCFYVELIRGRKEETEVWWTSNSIVVFCGTSGTYGTGSWPDGADINLMPI

SEQ ID NO: 20665 - protein, 469 aa, synthetic construct; identical to SEQ ID NO: 14591
  REGION 1..469: note = neuraminidase__InfluenzaA__AEG65299

SEQ ID NO: 20666 - protein, 469 aa, synthetic construct; identical to SEQ ID NO: 14714
  REGION 1..469: note = neuraminidase__InfluenzaA__AEG65310

SEQ ID NO: 20667 - protein, 469 aa, synthetic construct; identical to SEQ ID NO: 14714
  REGION 1..469: note = neuraminidase__InfluenzaA__AEG65321

SEQ ID NO: 20668 - protein, 469 aa, synthetic construct; identical to SEQ ID NO: 14714
  REGION 1..469: note = neuraminidase__InfluenzaA__AEG65332

SEQ ID NO: 20669 - protein, 469 aa, synthetic construct; identical to SEQ ID NO: 14714
  REGION 1..469: note = neuraminidase__InfluenzaA__AEG65354

SEQ ID NO: 20670 - protein, 469 aa, synthetic construct; identical to SEQ ID NO: 14714
  REGION 1..469: note = neuraminidase__InfluenzaA__AEG65365

SEQ ID NO: 20671 - protein, 469 aa, synthetic construct
  REGION 1..469: note = neuraminidase__InfluenzaA__AEG65376
MNPNQKIITIGSVSLTISTICFFMQIAILITTVTLHFKQYEFNSPPNNQVMLCEPTIIERNITEIVYLTNTTIEKEICPKLAEYRNWSKPQCNITGFAPFSKDNSIRLSAGGDIWVTREPYVSCDPDKCYQFALGQGTTLNNVHSNDTVHDRTPYRTLLMNELGVPFHLGTQQVCIAWSSSSCHDGKAWLHVCVTGDDENATASFIYNGRLVDSIVSWSKKILRTQESECVCINGTCTVVMTDGSASGKADTKILFIEEGKIVHTSTLSGSAQHVEECSCYPRYPGVRCVCRDNWKGSNRPIVDINIKDYSIVSSYVCSGLVGDTPRKNDSSSSSHCLDPNNEEGGHGVKGWAFDDGNDVWMGRTISEKLRSGYETFKVIEGWSNPNSKLQINRQVIVDRGNRSGYSGIFSVEGKSCINRCFYVELIRGRNQETEVLWTSNSIVVFCGTSGTYGTGSWPDGADINLMPI

SEQ ID NO: 20672 - protein, 469 aa, synthetic construct; identical to SEQ ID NO: 14591
  REGION 1..469: note = neuraminidase__InfluenzaA__AEG65387

SEQ ID NO: 20673 - protein, 469 aa, synthetic construct; identical to SEQ ID NO: 14591
  REGION 1..469: note = neuraminidase__InfluenzaA__AEG65398

SEQ ID NO: 20674 - protein, 469 aa, synthetic construct; identical to SEQ ID NO: 14591
  REGION 1..469: note = neuraminidase__InfluenzaA__AEG65409

SEQ ID NO: 20675 - protein, 469 aa, synthetic construct; identical to SEQ ID NO: 14591
  REGION 1..469: note = neuraminidase__InfluenzaA__AEG65420

SEQ ID NO: 20676 - protein, 469 aa, synthetic construct; identical to SEQ ID NO: 14591
  REGION 1..469: note = neuraminidase__InfluenzaA__AEG65431

SEQ ID NO: 20677 - protein, 469 aa, synthetic construct; identical to SEQ ID NO: 14712
  REGION 1..469: note = neuraminidase__InfluenzaA__AEG65442

SEQ ID NO: 20678 - protein, 469 aa, synthetic construct; identical to SEQ ID NO: 14714
  REGION 1..469: note = neuraminidase__InfluenzaA__AEG65453

SEQ ID NO: 20679 - protein, 469 aa, synthetic construct; identical to SEQ ID NO: 14714
  REGION 1..469: note = neuraminidase__InfluenzaA__AEG65464

SEQ ID NO: 20680 - protein, 469 aa, synthetic construct; identical to SEQ ID NO: 14714
  REGION 1..469: note = neuraminidase__InfluenzaA__AEG65475

SEQ ID NO: 20681 - protein, 469 aa, synthetic construct
  REGION 1..469: note = neuraminidase__InfluenzaA__AEG65486
MNPNQKIITIGSVSLTISTICFFMQIAILITTVTLHFKQYEFNSPPNNQVMLCEPTIIERNITEIVYLTNTTIEKEICPKLAEHRNWSKPQCDITGFAPFSKDNSIRLSAGGDIWVTREPYVSCDPDKCYQFALGQGTTLNNVHSNDTVHDRTPYRTLLMNELGVPFHLGTKQVCIAWSSSSCHDGKAWLHVCVTGDDKNATASFIYNGRLVDSIVSWSKKILRTQESECVCINGTCTVVMTDGSASGKADTKILFIEEGKIVHTSTLSGSAQHVEECSCYPRYPGVRCVCRDNWKGSNRPIVDINIKDYSIVSSYVCSGLVGDTPRKNDSSSSSHCLDPNNEEGGHGVKGWAFDDGNDVWMGRTISEKLRSGYETFKVIEGWSNPNSKLQINRQVIVDRGNRSGYSGIFSVEGKSCINRCFYVELIRGRKEETEVLWTSNSIVVFCGTSGTYGTGSWPDGADINLMPI

SEQ ID NO: 20682 - protein, 469 aa, synthetic construct; identical to SEQ ID NO: 14714
  REGION 1..469: note = neuraminidase__InfluenzaA__AEG65497

SEQ ID NO: 20683 - protein, 469 aa, synthetic construct; identical to SEQ ID NO: 14714
  REGION 1..469: note = neuraminidase__InfluenzaA__AEG65508

SEQ ID NO: 20684 - protein, 469 aa, synthetic construct; identical to SEQ ID NO: 14714
  REGION 1..469: note = neuraminidase__InfluenzaA__AEG65519

SEQ ID NO: 20685 - protein, 469 aa, synthetic construct; identical to SEQ ID NO: 14714
  REGION 1..469: note = neuraminidase__InfluenzaA__AEG65530

SEQ ID NO: 20686 - protein, 469 aa, synthetic construct; identical to SEQ ID NO: 14714
  REGION 1..469: note = neuraminidase__InfluenzaA__AEG65541

SEQ ID NO: 20687 - protein, 469 aa, synthetic construct
  REGION 1..469: note = neuraminidase__InfluenzaA__AEG65563
MNPNQKIITIGSVSLTISTICFFMQIAILITTVTLHFKQYEFNSPPNNQVMLCEPTIIERNITEIVYLTNTTIEKEICPKLAEYRNWSKPQCDITGFAPFSKDNSIRLSAGGDIWVTREPYVSCDPDRCYQFALGQGTTLNNVHSNDTVHDRTPYRTLLMNELGVPFHLGTKQVCIAWSSSSCHDGKAWLHVCVTGDDKNATASFIYNGRLVDSIVSWSKKILRTQESECVCINGTCTVVMTDGSASGKADTKILFIEEGKIVHTSTLSGSAQHVEECSCYPRYPGVRCVCRDNWKGSNRPIVDINIKDYSIVSSYVCSGLVGDTPRKNDSSSSSHCLDPNNEEGGHGVKGWAFDDGNDVWMGRTISEKLRSGYETFKVIEGWSNPNSKLQINRQVIVDRGNRSGYSGIFSVEGKSCINRCFYVELIRGRKEETEVLWTSNSIVVFCGTSGTYGTGSWPDGADINLMPI

SEQ ID NO: 20688 - protein, 469 aa, synthetic construct
  REGION 1..469: note = neuraminidase__InfluenzaA__AEG65574
MNPNQKIITIGSVSLTISTICFFMQIAILITTVTLHFKQYEFNSPPNNQVMLCEPTIIERNITEIVYLTNTTIEKEICPKLAEYRSWSKPQCDITGFAPFSKDNSIRLSAGGDIWVTREPYVSCDPDRCYQFALGQGTTLNNVHSNDTVHDRTPYRTLLMNELGVPFHLGTKQVCIAWSSSSCHDGKAWLHVCVTGDDKNATASFIYNGRLVDSIVSWSKKILRTQESECVCINGTCTVVMTDGSASGKADTKILFIEEGKIVHTSTLSGSAQHVEECSCYPRYPGVRCVCRDNWKGSNRPIVDINIKDYSIVSSYVCSGLVGDTPRKNDSSSSSHCLDPNNEEGGHGVKGWAFDDGNDVWMGRTISEKLRSGYETFKVIEGWSNPNSKLQINRQVIVDRGNRSGYSGIFSVEGKSCINRCFYVELIRGRKEETEVLWTSNSIVVFCGTSGTYGTGSWPDGADINLMPI

SEQ ID NO: 20689 - protein, 469 aa, synthetic construct; identical to SEQ ID NO: 20687
  REGION 1..469: note = neuraminidase__InfluenzaA__AEG65585

SEQ ID NO: 20690 - protein, 469 aa, synthetic construct; identical to SEQ ID NO: 20687
  REGION 1..469: note = neuraminidase__InfluenzaA__AEG65596

SEQ ID NO: 20691 - protein, 469 aa, synthetic construct
  REGION 1..469: note = neuraminidase__InfluenzaA__AEG65607
MNPNQKIITIGSVSLTISTICFFMQIAILITTVTLHFKQYEFNSPPNNQVMLCEPTIIERNITEIVYLTNTTIEKEICPKLAEYRNWSKPQCDITGFAPFSKDNSIRLSAGGDIWVTREPYVSCDPDKCYQFALGQGTTLNNVHSNDTVHDRTPYRTLLMNELGVPFHLGTKQVCIAWSSSSCHDGKAWLHVCVTGDDKNATASFIYNGRLVDSIVSWSKKILRTQESECVCINGTCTVVMTDGSASGKADTKILFIEEGKIVHTSTLSGSAQHVEECSCYPRYPGVRCVCRDNWKGSNRPIVDINIKDYSIASSYVCSGLVGDTPRKNDSSSSSHCLDPNNEEGGHGVKGWAFDDGNDVWMGRTISEKLRSGYETFKVIEGWSNPNSKLQINRQVIVDRGNRSGYSGIFSVEGKSCINRCFYVELIRGRKEETEVLWTSNSIVVFCGTSGTYGTGSWPDGADINLMPI

SEQ ID NO: 20692 - protein, 469 aa, synthetic construct
  REGION 1..469: note = neuraminidase__InfluenzaA__AEG65629
MNPNQKIITIGSVSLTISTICFFMQIAILITTVTLHFKQYEFNSPPNNQVMLCEPTIIERNITEIVYLTNTTIEKEICPKLAEYRNWSKPQCDITGFAPFSKDNSIRLSAGGDIWVTREPYVSCDPDKCYQFALGQGTTLNNVHSNDTVHDRTPYRTLLMNELGVPFHLGTKQVCIAWSSSSCHDGKAWLHVCVTGDDKNATASFIYNGRLVDSIVSWSKEILRTQESECVCINGTCTVVMTDGSASGKADTKILFIEEGKIVHTSTLSGSAQHVEECSCYPRYPGVRCVCRDNWKGSNRPIVDINIKDYSIVSSYVCSGLVGDTPRKNDSSSSSHCLDPNDEEGGHGVKGWAFDDGNDVWMGRTISEKLRSGYETFKVIEGWSNPNSKLQINRQVIVDRGNRSGYSGIFSVEGKSCINRCFYVELIRGRKEEIEVLWTSNSIVVFCGTSGTYGTGSWPDGADINLMPI

SEQ ID NO: 20693 - protein, 469 aa, synthetic construct; identical to SEQ ID NO: 20692
  REGION 1..469: note = neuraminidase__InfluenzaA__AEG65640

SEQ ID NO: 20694 - protein, 469 aa, synthetic construct; identical to SEQ ID NO: 14135
  REGION 1..469: note = neuraminidase__InfluenzaA__AEG65651

SEQ ID NO: 20695 - protein, 469 aa, synthetic construct; identical to SEQ ID NO: 14714
  REGION 1..469: note = neuraminidase__InfluenzaA__AEG65662

SEQ ID NO: 20696 - protein, 469 aa, synthetic construct; identical to SEQ ID NO: 14714
  REGION 1..469: note = neuraminidase__InfluenzaA__AEG65673

SEQ ID NO: 20697 - protein, 469 aa, synthetic construct; identical to SEQ ID NO: 14714
  REGION 1..469: note = neuraminidase__InfluenzaA__AEG65684

SEQ ID NO: 20698 - protein, 469 aa, synthetic construct; identical to SEQ ID NO: 20671
  REGION 1..469: note = neuraminidase__InfluenzaA__AEG65695

SEQ ID NO: 20699 - protein, 469 aa, synthetic construct
  REGION 1..469: note = neuraminidase__InfluenzaA__AEG65706
MNPNQKIITIGSVSLTISTICFFMQIAILITTVTLHFKQYEFNSPPNNQVMLCEPTIIERNITEIVYLTNTTIEKEICPKLAEYRNWSKPQCNITGFAPFSKDNSIRLSAGGDIWVTREPYVSCDPDKCYQFALGQGTTLNNVHSNDTVHDRTPYRTLLMNELGVPFHLGTKQVCIAWSSSSCHDGKAWLHVCVTGDDKNATASFIYNGRLVDSIVSWSKEILRTQESECVCINGTCTVVMTDGSASGKADTKILFIEEGKIVHTSTLSGSAQHVEECSCYPRYPGVRCVCRDNWKGSNRPIVDINIKDYSIVSSYVCSGLVGDTPRKNDSSSSSHCLDPNNEEGGHGVKGWAFDDGNDVWMGRTISEKLRSGYETFKVIEGWSNPNSKLQINRQVIVDRGNRSGYSGIFSVEGKSCINRCFYVELIRGRKEENEVLWTSNSIVVFCGTSGTYGTGSWPDGADINLMPI

SEQ ID NO: 20700 - protein, 469 aa, synthetic construct
  REGION 1..469: note = neuraminidase__InfluenzaA__AEG65728
MNPNQKIITIGSVSLTISTICFFMQIAILITTVTLHFKQYEFNSPPNNQVMLCEPTIIERNITEIVYLTNTTIEKEICPKLAEYRNWSKPQCNITGFAPFSKDNSIRLSAGGDIWVTREPYVSCDPDKCYQFALGQGTTLNNVHSNDTVHDRTPYRTLLMNELGVPFHLGTKQVCIAWSSSSCHDGKAWLHVCVTGDDKNATASFIYNGRLVDSIVSWSKEILRTQESECVCINGTCTVVMTDGSASGKADTKILFIEEGKIVHTSTLSGSAQHVEECSCYPRYPGVRCVCRDNWKGSNRPIVDINIKDYSIVSSYVCSGLVGDTPRKNDSSSSSHCLDPNNEEGGHGVKGWAFDDGNDVWMGRTISEKLRSGYETFKVIEGWSNPNSKLQINRQVIVDRGNRSGYSGIFSVEGKSCINRCFYVELIRGRKEETEVLWTSNSIVVFCGTSGTYGTGSWPDGAEINLMPI

SEQ ID NO: 20701 - protein, 469 aa, synthetic construct
  REGION 1..469: note = neuraminidase__InfluenzaA__AEG65739
MNPNQKIITIGSVSLTISTICFFMQIAILITTVTLHFKQYEFSSPPNNQVMPCEPTIIERNITEIVYLTNTTIEKEICPKLAEYRNWSKPQCDITGFAPFSKDNSIRLSAGGDIWVTREPYVSCDPDKCYQFALGQGTTLNNVHSNDTVHDRTPYRTLLMNELGVPFHLGTKQVCIAWSSSSCHDGKAWLHVCVTGDDKNATASFIYNGRLVDSIVSWSKEILRTQESECVCINGTCTVVMTDGSASGKADTKILFIEEGKIVHTSTLSGSAQHVEECSCYPRYPGVRCVCRDNWKGSNRPIVDINMKDYSIVSSYVCSGLVGDTPRKNDSSSSSHCLDPNNEEGGHGVKGWAFDDGNDVWMGRTISEKLRSGYETFKVIEGWSNPNSKLQINRQVIVDRGNRSGYSGIFSVEGKSCINRCFYVELIRGRKEETEVLWTSNSIVVFCGTSGTYGTGSWPDGADINLMPI

SEQ ID NO: 20702 - protein, 469 aa, synthetic construct; identical to SEQ ID NO: 16564
  REGION 1..469: note = neuraminidase__InfluenzaA__AEG65750

SEQ ID NO: 20703 - protein, 469 aa, synthetic construct; identical to SEQ ID NO: 20700
  REGION 1..469: note = neuraminidase__InfluenzaA__AEG65761

SEQ ID NO: 20704 - protein, 469 aa, synthetic construct
  REGION 1..469: note = neuraminidase__InfluenzaA__AEG65772
MNPNQKIITIGSVSLTISTICFFMQTAILITTVTLHFKQYEFNSPPNNQVMLCEPTIIERNITEIVYLTNTTIEKEMCPKLAEYRNWSKPQCDITGFAPFSKDNSIRLSAGGDIWVTREPYVSCDPDKCYQFALGQGTTLNNVHSNDTVHDRTPYRTLLMNELGVPFHLGTKQVCIAWSSSSCHDGKAWLHVCVTGDDKNATASFIYNGRLVDSIVSWSKKILRTQESECVCINGTCTVVMTDGSASGKADTKILFIEEGKIIHTSTLSGSAQHVEECSCYPRYPGVRCVCRDNWKGSNRPIVDINIKDYSIVSSYVCSGLVGDTPRKNDSSSSSHCLDPNNEEGGHGVKGWAFDDGNDVWMGRTISEKLRSGYETFKVIEGWSKPNSKLQINRQVIVDRGNRSGYSGIFSVEGKSCINRCFYVELIRGRKEETEVLWTSNSIVVFCGTSGTYGTGSWPDGADINLMPI

SEQ ID NO: 20705 - protein, 469 aa, synthetic construct; identical to SEQ ID NO: 19518
  REGION 1..469: note = neuraminidase__InfluenzaA__AEG65783

SEQ ID NO: 20706 - protein, 469 aa, synthetic construct
  REGION 1..469: note = neuraminidase__InfluenzaA__AEG65794
MNPNQKIITIGSVSLTISTICFFMQIAILITTITLHFKQYEFNSPPNNQVMLCEPTIIERNITEIVYLTNTTIEKEICPKLAEYRNWSKPQCDITGFAPFSKDNSIRLSAGGDIWVTREPYVSCDPDKCYQFALGQGTTLNNVHSNNTVRDRTPYRTLLMNELGVPFHLGTKQVCIAWSSSSCHDGKAWLHVCITGDDKNATASFIYNGRLVDSVVSWSKEILRTQESECVCINGTCTVVMTDGSASGKADTKILFIEEGKIVHTSTLSGSAQHVEECSCYPRYPGVRCVCRDNWKGSNRPIVDINIKDHSIVSSYVCSGLVGDTPRKNDSSSSSHCLDPNNEEGGHGVKGWAFDDGNDVWMGRTINETSRLGYETFKVIEGWSNPKSKLQINRQVIVDKGNRSGYSGIFSVEGKSCINRCFYVELIRGRKEETEVLWTSNSIVVFCGTSGTYGTGSWPDGADLNLMPI

SEQ ID NO: 20707 - protein, 469 aa, synthetic construct; identical to SEQ ID NO: 19518
  REGION 1..469: note = neuraminidase__InfluenzaA__AEG65805

SEQ ID NO: 20708 - protein, 469 aa, synthetic construct
  REGION 1..469: note = neuraminidase__InfluenzaA__AEG65816
MNPNQKIITIGSVSLTISTICFFMQIAILITTVTLHFKQYEFNSPPNNQVMLCEPTIIERNITEIVYLTNTTIEKEICPKLAEYRNWSKPQCDITGFAPFSKDNSIRLSAGGDIWVTREPYVSCDPDKCYQFALGQGTTLNNVHSNNTVRDRTPYRTLLMNELGVPFHLGTKQVCIAWSSSSCHDGKAWLHVCITGDDKNATASFIYNGRLVDSVVSWSKEILRTQESECVCINGTCTVVMTDGSASGEADTKILFIEEGKIVHTSTLSGSAQHVEECSCYPRYPGVRCVCRDNWKGSNRPIVDINIKDHSIVSSYVCSGLVGDTPRKNDSSSSSHCLDPNNEEGGHGVKGWAFDDGNDVWMGRTINETSRLGYETFKVIEGWSNPKSKLQINRQVIVDRGNRSGYSGIFSVEGKSCINRCFYVELIRGRKEETEVLWTSNSIVVFCGTSGTYGTGSWPDGADLNLMPI

SEQ ID NO: 20709 - protein, 469 aa, synthetic construct
  REGION 1..469: note = neuraminidase__InfluenzaA__AEG79808
MNPNQKIITIGSVCMTIGMANLILQIGNIISIWISHSIQLGNQNQIETCNQSVITYENNTWVNQTYVNISNTNFAAGQSVVSVKLAGNSSLCPVSGWAIYSKDNSIRIGSKGDVFVIREPFISCSPLECRTFFLTQGALLNDKHSNGTIKDRSPYRTLMSCPIGEVPSPYNSRFESVAWSASACHDGINWLTIGISGPDNGAVAVLKYNGIITDTIKSWRNNILRTQESECACVNGSCFTIMTDGPSDGQASYKIFRIEKGKIVKSVEMNAPNYHYEECSCYPDSSEITCVCRDNWHGSNRPWVSFNQNLEYQIGYICSGIFGDNPRPNDKTGSCGPVSSNGANGVKGFSFKYGNGVWIGRTKSISSRKGFEMIWDPNGWTGTDNNFSIKQDIVGINEWSGYSGSFVQHPELTGLDCIRPCFWVELIRGRPKENTIWTSGSSISFCGVNSDTVGWSWPDGAELPFTIDK

SEQ ID NO: 20710 - protein, 469 aa, synthetic construct; identical to SEQ ID NO: 20709
  REGION 1..469: note = neuraminidase__InfluenzaA__AEG79814

SEQ ID NO: 20711 - protein, 469 aa, synthetic construct
  REGION 1..469: note = neuraminidase__InfluenzaA__AEG79826
MNPNQKIITISSVCMTIGMANLILQIGNIISIWISHSIQLGNQNQIETCNQSVITYENNTWVNQTYVNISNTNFAAGQSVVSVKLAGNSSLCPVSGWAIYSKDNSIRIGSKGDVFVIREPFISCSPLECRTFFLTQGALLNDKHSNGTIKDRSPYRTLMSCPIGEVPSPYNSRFESVAWSASACHDGINWLTIGISGPDNGAVAVLKYNGIITDTIKSWRNNILRTQESECACVNGSCFTIMTDGPSDGQASYKIFRIEKGKIVKSVEMNAPNYHYEECSCYPDSSEITCVCRDNWHGSNRPWVSFNQNLEYQIGYICSGIFGDNPRPNDKTGSCGPVSSNGANGVKGFSFKYGNGVWIGRTKSISSRKGFEMIWDPNGWTGTDNNFSIKQDIVGINEWSGYSGSFVQHPELTGLDCIRPCFWVELIRGRPKENTIWTSGSSISFCGVNSDTMGWSWPDGAELPFTIDK

SEQ ID NO: 20712 - protein, 469 aa, synthetic construct
  REGION 1..469: note = neuraminidase__InfluenzaA__AEG79830
MNPNQKIITISSVCMTIGMANLILQIGNIISIWISHSIQLGNQNQIETCNQSVITYENNTWVNQTYVNISNTNFAAGQSVVSVKLAGNSSLCPVSGWAIYSKDNSIRIGSKGDVFVIREPFISCSPLECRTFFLTQGALLNDKHSNGTIKDRSPYRTLMSCPIGEVPSPYNSRFESVAWSASACHDGINWLTIGISGPDNGAVAVLKYNGIITDTIKSWRNNILRTQESECACVNGSCFTVMTDGPSDGQASYKIFRIEKGKIVKSVEMNAPNYHYEECSCYPDSSEITCVCRDNWHGSNRPWVSFNQNLEYQIGYICSGIFGDNPRPNDKTGSCGPVSSNGANGVKGFSFKYGNGVWIGRTKSISSRKGFEMIWDPNGWTGTDNNFSIKQDIVGINEWSGYSGSFVQHPELTGLDCIRPCFWVELIRGRPKENTIWTSGSSISFCGVNSDTVGWSWPDGAELPFTIDK

SEQ ID NO: 20713 - protein, 469 aa, synthetic construct; identical to SEQ ID NO: 20257
  REGION 1..469: note = neuraminidase__InfluenzaA__AEG79836

SEQ ID NO: 20714 - protein, 469 aa, synthetic construct
  REGION 1..469: note = neuraminidase__InfluenzaA__AEH59356
MNPNQKIITIGSVCMTIGMANLILQIGNIISIWISHSIQLGNQNQIETCNQSVITYENNTWVNQTYVNISNTNFAAGQSVVSVKLAGNSSLCPVSGWAIYSKDNSIRIGSKGDVFVIREPFISCSPLECRTFFLTQGTLLNDKHSNGTIKDRSPYRTLMSCPIGEVPSPYNSRFESVAWSASACHDGINWLTIGISGPDNGAVAVLKYNGIITDTIKSWRNNILRTQESECACVNGSCFTIMTDGPSDGQASYKIFRIEKGKIVKSVEMNAPNYYYEECSCYPDSSEITCVCRDNWHGSNRPWVSFNQNLEYQIGYICSGIFGDNPRPNDKTGSCGPVSSNGANGVKGFSFKYGNGVWIGRTKSISSRKGFEMIWDPNGWTGTDNNFSIKQDIVGINEWSGYSGSFVQHPELTGLDCIRPCFWVELIRGRPKENTVWTSGSSISFCGVNSDTVGWSWPDGAELPFTIDK

SEQ ID NO: 20715 - protein, 469 aa, synthetic construct; identical to SEQ ID NO: 20709
  REGION 1..469: note = neuraminidase__InfluenzaA__AEH59360

SEQ ID NO: 20716 - protein, 469 aa, synthetic construct
  REGION 1..469: note = neuraminidase__InfluenzaA__AEH59364
MNPNQKIITIGSVCMTIGMANLILQIGNIISIWISHSIQLGNQNQIETCNQSVITYENNTWVNQTYVNISNTNFAAGQSVVSVKLAGNSSLCPVSGWAIYSKDNSIRIGSKGDVFVIREPFISCSPLECRTFFLTQGALLNDKHSNGTIKDRSPYRTLMSCPIGEVPSPYNSRFESVAWSASACHDGINWLTIGISGPDNGAVAVLKYNGIITDTIKSWRNNILRTQESECACVNGSCFTVMTDGPNDGQASYKIFRIEKGKIVKSVEMNAPNYHYEECSCYPDSSEITCVCRDNWHGANRPWVSFNQNLEYQIGYICSGIFGDNPRPNDKTGSCGPVSSNGANGVKGFSFKYGNGVWIGRTKSISSRNGFEMIWDPNGWTGTDNNFSIKQDIVGINEWSGYSGSFVQHPELTGLDCIRPCFWVELIRGRPKENTIWTSGSSISFCGVNSDTVGWSWPDGAELPFTIDK

SEQ ID NO: 20717 - protein, 469 aa, synthetic construct
  REGION 1..469: note = neuraminidase__InfluenzaA__AEH59366
MNPNQKIITIGSVCMTIGMANLILQIGNIISIWISHSIQLGNQNQIETCNQSVITYENNTWVNQTYVNISNTNFAAGQSVVSVKLAGNSSLCPVSGWAIYSKDNSIRIGSKGDVFVIREPFISCSPLECRTFFLTQGALLNDKHSNGTIKDRSPYRTLMSCPIGGVPSPYNSRFESVAWSASACHDGINWLTIGISGPDNGAVAVLKYNGIITDTIKSWRNNILRTQESECACVNGSCFTIMTDGPSDGQASYKIFRIEKGKIVKSVEMNAPNYHYEECSCYPDSSEITCVCRDNWHGSNRPWVSFNQNLEYQIGYICSGIFGDNPRPNDKTGSCGPVSSNGANGVKGFSFKYGNGVWIGRTKSISSRKGFEMIWDPNGWTGTDNNFSIKQDIVGINEWSGYSGSFVQHPELTGLDCIRPCFWVELIRGRPKENTIWTSGSSISFCGVNSDTVGWSWPDGAELPFTIDK

SEQ ID NO: 20718 - protein, 469 aa, synthetic construct; identical to SEQ ID NO: 20709
  REGION 1..469: note = neuraminidase__InfluenzaA__AEH59368

SEQ ID NO: 20719 - protein, 469 aa, synthetic construct; identical to SEQ ID NO: 20257
  REGION 1..469: note = neuraminidase__InfluenzaA__AEH59370

SEQ ID NO: 20720 - protein, 469 aa, synthetic construct; identical to SEQ ID NO: 20716
  REGION 1..469: note = neuraminidase__InfluenzaA__AEH59372

SEQ ID NO: 20721 - protein, 469 aa, synthetic construct; identical to SEQ ID NO: 20716
  REGION 1..469: note = neuraminidase__InfluenzaA__AEH59376

SEQ ID NO: 20722 - protein, 469 aa, synthetic construct; identical to SEQ ID NO: 20257
  REGION 1..469: note = neuraminidase__InfluenzaA__AEH59378

SEQ ID NO: 20723 - protein, 469 aa, synthetic construct; identical to SEQ ID NO: 20716
  REGION 1..469: note = neuraminidase__InfluenzaA__AEH59382

SEQ ID NO: 20724 - protein, 469 aa, synthetic construct
  REGION 1..469: note = neuraminidase__InfluenzaA__AEH59384
MNPNQKIITIGSVCMTIGMANLILQIGNIISIWISHSIQLGNQSQIETCNQSVITYENNTWVNQTYVNISNTNFAAGQSVVSVKLAGNSSLCPVSGWAIYSKDNSIRIGSKGDVFVIREPFISCSPLECRTFFLTQGALLNDKHSNGTIKDRSPYRTLMSCPIGEVPSPYNSRFESVAWSASACHDGINWLTIGISGPDNGAVAVLKYNGIITDTIKSWRNNILRTQESECACVNGSCFTIMTDGPSDGQASYKIFRIEKGRIVKSVEMNAPNYHYEECSCYPDSSEITCVCRDNWHGSNRPWVSFNQNLEYQIGYICSGIFGDNPRPNDKTGSCGPVSSNGANGVKGFSFKYGNGVWIGRTKSISSRKGFEMIWDPNGWTGTDNNFSIKQDIVGINEWSGYSGSFVQHPELTGLDCIRPCFWVELIRGRPKENTIWTSGSSISFCGVNSDTVGWSWPDGAELPFTIDK

SEQ ID NO: 20725 - protein, 469 aa, synthetic construct
  REGION 1..469: note = neuraminidase__InfluenzaA__AEH59386
MNPNQKIITIGSVCMTIGMANLILQIGNIISIWISHSIQIGNQNQIETCNQSVITYENNTWVNQTYVNISNTNFAAGQSVVSVKLAGNSSLCPVSGWAIYSKDNSIRIGSKGDVFVIREPFISCSPLECRTFFLTQGALLNDKHSNGTIKDRSPYRTLMSCPIGEVPSPYNSRFESVAWSASACHDGINWLTIGISGPDNGAVAVLKYNGIITDTIKSWRNNILRTQESECACVNGSCFTIMTDGPSDGQASYKIFRIEKGKIVKSVEMNAPNYHYEECSCYPDSSEITCVCRDNWHGSNRPWVSFNQNLEYQIGYICSGIFGDNPRPNDKTGSCGPVSSNGANGVKGFSFKYGNGVWIGRTKSISSRKGFEMIWDPNGWTGTDNNFSIKQDIVGINEWSGYSGSFVQHPELTGLDCIRPCFWVELIRGRPKENTIWTSGSSISFCGVNSDTVGWSWPDGAELPFTIDK

SEQ ID NO: 20726 - protein, 469 aa, synthetic construct; identical to SEQ ID NO: 20716
  REGION 1..469: note = neuraminidase__InfluenzaA__AEH59388

SEQ ID NO: 20727 - protein, 469 aa, synthetic construct
  REGION 1..469: note = neuraminidase__InfluenzaA__AEH59390
MNPNQKIITIGSVCMTIGMANLILQIGNIISIWISHSIQLGNQSQIETCNQSVITYENNTWVNQTYVNISNTNFAAGQSVVSVKLAGNSSLCPVSGWAIYSKDNSIRIGSKGDVFVIREPFISCSPLECRTFFLTQGALLNDKHSNGTIKDRSPYRTLMSCPIGEVPSPYNSRFESVAWSASACHDGINWLTIGISGPDNGAVAVLKYNGIITDTIKSWRNNILRTQESECACVNGSCFTIMTDGPSDGQASYKIFRIEKGKIVKSVEMNAPNYHYEECSCYPDSSEITCVCRDNWHGSNRPWVSFNQNLEYQIGYICSGIFGDNPRPNDKTGSCGPVSSNGANGVKGFSFKYGNGVWIGRTKSISSRKGFEMIWDPNGWTGTDNNFSIKQDIVGLNEWSGYSGSFVQHPELTGLDCIRPCFWVELIRGLPKENTIWTSGSSISFCGVNSDTVGWSWPDGAELPFTIDK

SEQ ID NO: 20728 - protein, 469 aa, synthetic construct; identical to SEQ ID NO: 20716
  REGION 1..469: note = neuraminidase__InfluenzaA__AEH59392

SEQ ID NO: 20729 - protein, 469 aa, synthetic construct; identical to SEQ ID NO: 20716
  REGION 1..469: note = neuraminidase__InfluenzaA__AEH59396

SEQ ID NO: 20730 - protein, 469 aa, synthetic construct
  REGION 1..469: note = neuraminidase__InfluenzaA__AEH59398
MNPNQKIITIGSVCMTIGVANLILQIGNIISIWISHSIQLGNQNQIETCNQSVITYENNTWVNQTYVNISNTNFAAGQSVVSVKLAGNSSLCPVSGWAIYSKDNSIRIGSKGDVFVIREPFISCSPLECRTFFLTQGALLNDKHSNGTIKDRSPYRTLMSCPIGEVPSPYNSRFESVAWSASACHDGINWLTIGISGPDNGAVAVLKYNGIITDTIKSWRNYILRTQESECACVNGSCFTIMTDGPSDGQASYKIFRIEKGKVVKSVEMNAPNYHYEECSCYPDSSEITCVCRDNWHGSNRPWVSFNQNLEYQIGYICSGIFGDNPRPNDKTGSCGPVSSNGANGVKGFSFKYGNGVWIGRTKSISSRKGFEMIWDPNGWTGTDNNFSIKQDIIGINEWSGYSGSFVQHPELTGLDCIRPCFWVELIRGRPKENTIWTSGSSISFCGVNSDTVGWSWPDGAELPFTIDK

SEQ ID NO: 20731 - protein, 469 aa, synthetic construct
  REGION 1..469: note = neuraminidase__InfluenzaA__AEH59400
MNPNQKIITIGSVCMTIGMANLILQIGNIISIWISHSIQLGNQSQIETCNQSVITYENNTWVNQTYVNISNTNFAAGQSVVSVKLAGNSSLCPVSGWAIYSKDNSIRIGSKGDVFVIREPFISCSPLECRTFFLTQGALLNDKHSNGTIKDRSPYRTLMSCPIGEVPSPYNSRFESVAWSASACHDGINWLTIGISGPDNGAVAVLKYNGIITDTIKSWRNNILRTQESECACVNGSCFTVMTDGPNDGQASYKIFRIEKGKIVKSVEMNAPNYHYEECSCYPDSSEITCVCRDNWHGANRPWVSFNQNLEYQIGYICSGIFGDNPRPNDKTGSCGPVSSNGANGVKGFSFKYGNGVWIGRTKSISSRNGFEMIWDPNGWTGTDNNFSIKQDIVGINEWSGYSGSFVQHPELTGLDCIRPCFWVELIRGRPKENTIWTSGSSISFCGVNSDTVGWSWPDGAELPFTIDK

SEQ ID NO: 20732 - protein, 469 aa, synthetic construct
  REGION 1..469: note = neuraminidase__InfluenzaA__AEH59402
MNPNQKIITIGSVCMTIGMANLILQIGNIISIWISHSIQLGNQNQIETCNQSVITYENNTWVNQTYVNISNTNFAAGQSVVSVKLAGNSSLCPVSGWAIYSKDNSIRIGSKGDVFVIREPFISCSPLECRTFFLTQGALLNDKHSNGTIKDRSPYRTLMSCPIGEVPSPYNSRFESVAWSASACHDGINWLTIGISGPDNGAVAVLKYNGIITDTIKSWRNNILRTQESECACVNGSCFTVMTDGPNDGQASYKIFRIEKGKIVKSVEMNAPNYHYEECSCYPDSSEITCVCRDNWHGANRPWVSFNQNLEYQIGYICSGIFGDNPRPNDKTGSCGPVSSNGANGVKGFSFKYGNGVWIGRTKSISSRNGFEMIWDPNGWTETDNNFSIKQDIVGINEWSGYSGSFVQHPELTGLDCIRPCFWVELIRGRPKENTIWTSGSSISFCGVNSDTVGWSWPDGAELPFTIDK

SEQ ID NO: 20733 - protein, 469 aa, synthetic construct
  REGION 1..469: note = neuraminidase__InfluenzaA__AEH59404
MNPNQKIITIGSACMTIGMANLILQIGNIISIWISHSIQLGNQSQIETCNQSVITYENNTWVNQTYVNISNTNFAAGQPVVSVKLAGNSSLCPVSGWAIYSKDNSIRIGSKGDVFVIREPFISCSPLECRTFFLTQGALLNDKHSNGTIKDRSPYRTLMSCPIGEVPSPYNSRFESVAWSASACHDGINWLTIGISGPDNGAVAVLKYNGIITDTIKSWRNNILRTQESECACVNGSCFTIMTDGPSDGQASYKIFRIEKGKIVKSVEMNAPNYHYEECSCYPDSSEITCVCRDNWHGSNRPWVSFNQNLEYQIGYICSGIFGDNPRPNDKTGSCGPVSSNGANGVKGFSFKYGNGVWIGRTKSISSRKGFEMIWDPNGWTGTDNNFSIKQDIVGINEWSGYSGSFVQHPELTGLDCIRPCFWVELIRGRPKENTIWTSGSSISFCGVNSDTVGWSWPDGAELPFTIDK

SEQ ID NO: 20734 - protein, 469 aa, synthetic construct
  REGION 1..469: note = neuraminidase__InfluenzaA__AEH59406
MNPNQKIITIGSVCMTIGMANLILQIGNIISIWISHSIQLGNQSQIETCNQSVITYENNTWVNQTYVNISNTNFAAGQSVVSVKLAGNSSLCPVSGWAIYSKDNSIRIGSKGDVFVIREPFISCSPLECRTFFLTQGALLNDKHSNGTIKDRSPYRTLMSCPIGEVPSPYNSRFESVAWSASACHDGINWLTIGISGPDNGAVAVLKYNGIITDTIKSWRNNILRTQESECACVNGSCFTIMTDGPSDGQASYKIFRIEKGKIVKSVEMNAPTYHYEECSCYPDSSEITCVCRDNWHGSNRPWVSFNQNLEYQIGYICSGIFGDNPRPNDKTGSCGPVSFNGANGVKGFSFKYGNGVWIGRTKSISSRKGFEMIWDPNGWTGTDNNFSIKQDIVGIDEWSGYSGSFVQHPELTGLDCIRPCFWVELIRGRPKENTIWTSGSSISFCGVNSDTVGWSWPDGAELPFTIDK

SEQ ID NO: 20735 - protein, 469 aa, synthetic construct; identical to SEQ ID NO: 20257
  REGION 1..469: note = neuraminidase__InfluenzaA__AEH59408

SEQ ID NO: 20736 - protein, 469 aa, synthetic construct
  REGION 1..469: note = neuraminidase__InfluenzaA__AEH59412
MNPNQKIITIGSVCMTIGMANLILQIGNIISIWISHSIQLGNQSQIETCNQSVITYENNTWVNQTYVNISNTNFAAGQSVVSVKLAGNSSLCPVSGWAIYSKDNSIRIGSKGDVFVIREPFISCSPLECRTFFLTQGALLNDKHSNGTIKDRSPYRTLMSCPIGEVPSPYNSRFESVAWSASACHDGINWLTIGISGPDNGAVAVLKYNGIITDTIRSWRNNILRTQESECACVNGSCFTIMTDGPSDGQASYKIFRIEKGKIIKSVEMNAPNYHYEECSCYPDSSEITCVCRDNWHGSNRPWVSFNQNLEYQIGYICSGIFGDNPRPNDKTGSCGPVLSNGANGVKGFSFKYGNGVWIGRTKSISSRKGFEMIWDPNGWTGTDNNFSIKQDIVGINEWSGYSGSFVQHPELTGLDCIRPCFWVELIRGRPKENTIWTSGSSISFCGVNSDTVGWSWPDGAELPFTIDK

SEQ ID NO: 20737 - protein, 469 aa, synthetic construct; identical to SEQ ID NO: 20709
  REGION 1..469: note = neuraminidase__InfluenzaA__AEH59416

SEQ ID NO: 20738 - protein, 469 aa, synthetic construct; identical to SEQ ID NO: 16738
  REGION 1..469: note = neuraminidase__InfluenzaA__AEH59584

SEQ ID NO: 20739 - protein, 469 aa, synthetic construct; identical to SEQ ID NO: 16738
  REGION 1..469: note = neuraminidase__InfluenzaA__AEH59586

SEQ ID NO: 20740 - protein, 469 aa, synthetic construct; identical to SEQ ID NO: 16738
  REGION 1..469: note = neuraminidase__InfluenzaA__AEH59588

SEQ ID NO: 20741 - protein, 469 aa, synthetic construct; identical to SEQ ID NO: 16738
  REGION 1..469: note = neuraminidase__InfluenzaA__AEH59592

SEQ ID NO: 20742 - protein, 469 aa, synthetic construct; identical to SEQ ID NO: 16738
  REGION 1..469: note = neuraminidase__InfluenzaA__AEH59594

SEQ ID NO: 20743 - protein, 469 aa, synthetic construct; identical to SEQ ID NO: 16738
  REGION 1..469: note = neuraminidase__InfluenzaA__AEH59596

SEQ ID NO: 20744 - protein, 469 aa, synthetic construct; identical to SEQ ID NO: 16738
  REGION 1..469: note = neuraminidase__InfluenzaA__AEH59598

SEQ ID NO: 20745 - protein, 469 aa, synthetic construct; identical to SEQ ID NO: 16738
  REGION 1..469: note = neuraminidase__InfluenzaA__AEH59600

SEQ ID NO: 20746 - protein, 469 aa, synthetic construct
  REGION 1..469: note = neuraminidase__InfluenzaA__AEH59602
MNPNQKIITIGSVCMTIGMANLILQIGNIISIWISHSIQLGSQNQIETCNQSVITYENNTWVNQTYVNISNTNFAAGQSVVSVKLAGNSSLCPVSGWAIYSKDNSIRIGSKGDVFVIREPFISCSPLECRTFFLTQGALLNDKHSNGTIKDRSPYRTLMSCPIGEVPSPYNSRFESVAWSASACHDGINWLTIGISGPDNGAVAVLKYNGIITDTIKSWRNNILRTQESECACVNGSCFTVMTDGPSDGQASYKIFRIEKGKIVKSVEMNAPNYHYEECSCYPDSSEITCVCRDNWHGSNRPWVSFNQNLEYQIGYICSGIFGDNPRPNDKTGSCGPVSSNGANGVKGFSFKYGNGVWIGRTKSISSRNGFEMIWDPNGWTGTDNNFSIKQDIVGINEWSGYSGSFVQHPELTGLDCIRPCFWVELIRGRPKENTIWTSGSSISFCGVNSDTVGWSWPDGAELPFTIDK

SEQ ID NO: 20747 - protein, 469 aa, synthetic construct; identical to SEQ ID NO: 16738
  REGION 1..469: note = neuraminidase__InfluenzaA__AEH59606

SEQ ID NO: 20748 - protein, 469 aa, synthetic construct; identical to SEQ ID NO: 16738
  REGION 1..469: note = neuraminidase__InfluenzaA__AEH59616

SEQ ID NO: 20749 - protein, 469 aa, synthetic construct; identical to SEQ ID NO: 16738
  REGION 1..469: note = neuraminidase__InfluenzaA__AEH59626

SEQ ID NO: 20750 - protein, 470 aa, synthetic construct; identical to SEQ ID NO: 17461
  REGION 1..470: note = neuraminidase__InfluenzaA__AEH77262

SEQ ID NO: 20751 - protein, 469 aa, synthetic construct
  REGION 1..469: note = neuraminidase__InfluenzaA__AEH77273
MNPNQKIITIGSVCMTIGMANLILQIGNITSIWISHSIQLGNQNQIETCNQSVITYENNTWVNQTYVNISNTNFAAGQSVVSVKLAGNSSLCPVSGWAIYSKDNSIRIGSKGDVFVIREPFISCSPLECRTFFLTQGALLNDKHSNGTIKDRSPYRTLMSCPIGEVPSPYNSRFESVAWSASACHDGINWLTIGISGPDNGAVAVLKYNGIITDTIKSWRNNILRTQESECACVNGSCFTVMTDGPSDGQASYKIFRIEKGKIVKSVEMNAPNYHYEECSCYPDSSEITCVCRDNWHGSNRPWVSFNQNLEYQIGYICSGIFGDNPRPNDKTGSCGPVSSNGANGVKGFSFKYGNGVWIGRTKSISSRNGFEMIWDPNGWTGTDNNFSIKQDIVGINEWSGYSGSFVQHPELTGLDCIRPCFWVELIRGRPKENTIWTSGSSISFCGVNSDTVGWSWPDGAELPFTIDK

SEQ ID NO: 20752 - protein, 469 aa, synthetic construct
  REGION 1..469: note = neuraminidase__InfluenzaA__AEH77282
MNPNQKIITIGSVSLTIATICFLMQIAILVTTVTLHFKQHECNSPPNNQVMLCEPTIIERNITEIVYLTNTTIEKEICPKLAEYRNWSKPQCNITGFAPFSKDNSIRLSAGGDIWVTREPYVSCDPDKCYQFALGQGTTLNNGHSNDTVHDRTPYRTLLMNELGVPFHLGTRQVCIAWSSSSCHDGKAWLHVCVTGDDKNATASFIYNGRLVDSIGSWSKKILRTQESECVCINGTCTVVMTDGSASGKADTKILFVEEGKIVHISTLSGSAQHVEECSCYPRYPGVRCVCRDNWKGSNRPIVDINVKDYSIVSSYVCSGLVGDTPRKNDSSSSSHCLDPNNEEGGHGVKGWAFDDGNDVWMGRTISEKLRSGYETFKVIEGWSKPNSKLQINRQVIVERGNRSGYSGIFSVEGKSCINRCFYVELIRGRKEETEVWWTSNSIVVFCGTSGTYGTGSWPDGADINLMPI

SEQ ID NO: 20753 - protein, 469 aa, synthetic construct; identical to SEQ ID NO: 16738
  REGION 1..469: note = neuraminidase__InfluenzaA__AEI29218

SEQ ID NO: 20754 - protein, 469 aa, synthetic construct; identical to SEQ ID NO: 18105
  REGION 1..469: note = neuraminidase__InfluenzaA__AEI29228

SEQ ID NO: 20755 - protein, 469 aa, synthetic construct; identical to SEQ ID NO: 14137
  REGION 1..469: note = neuraminidase__InfluenzaA__AEI54350

SEQ ID NO: 20756 - protein, 469 aa, synthetic construct; identical to SEQ ID NO: 14150
  REGION 1..469: note = neuraminidase__InfluenzaA__AEI54361

SEQ ID NO: 20757 - protein, 469 aa, synthetic construct; identical to SEQ ID NO: 14714
  REGION 1..469: note = neuraminidase__InfluenzaA__AEI54372

SEQ ID NO: 20758 - protein, 469 aa, synthetic construct; identical to SEQ ID NO: 14591
  REGION 1..469: note = neuraminidase__InfluenzaA__AEI54383

SEQ ID NO: 20759 - protein, 469 aa, synthetic construct; identical to SEQ ID NO: 14714
  REGION 1..469: note = neuraminidase__InfluenzaA__AEI54394

SEQ ID NO: 20760 - protein, 469 aa, synthetic construct; identical to SEQ ID NO: 15884
  REGION 1..469: note = neuraminidase__InfluenzaA__AEI54416

SEQ ID NO: 20761 - protein, 469 aa, synthetic construct; identical to SEQ ID NO: 20704
  REGION 1..469: note = neuraminidase__InfluenzaA__AEI54427

SEQ ID NO: 20762 - protein, 469 aa, synthetic construct; identical to SEQ ID NO: 19518
  REGION 1..469: note = neuraminidase__InfluenzaA__AEI54438

SEQ ID NO: 20763 - protein, 469 aa, synthetic construct; identical to SEQ ID NO: 19518
  REGION 1..469: note = neuraminidase__InfluenzaA__AEI54449

SEQ ID NO: 20764 - protein, 469 aa, synthetic construct; identical to SEQ ID NO: 19518
  REGION 1..469: note = neuraminidase__InfluenzaA__AEI54460

SEQ ID NO: 20765 - protein, 469 aa, synthetic construct
  REGION 1..469: note = neuraminidase__InfluenzaA__AEI54471
MNPNQKIITIGSVSLTISTICFFMQIAVLITTVTLHFKQYKFNSPPNNQVMLCEPTIIERNITEIVYLTNTTIEKEICPKLAEYRNWSKPQCDITGFAPFSKDNSIRLSAGGDIWVTREPYVSCDPDKCYQFALGQGTTLNNVHSNNTVRDRTPYRTLLMNELGVPFHLGTKQVCIAWSSSSCHDGKAWLHVCITGDDKNATASFIYNGRLVDSVVSWSKEILRTQESECVCINGTCTVVMTDGSASGKADTKILFIEEGKIVHTSTLSGSAQHVEECSCYPRYPGVRCVCRDNWKGSNRPIVDINIKDHSIVSSYVCSGLVGDTPRKNDSSSSSHCLDPNNEEGGHGVKGWAFDDGNDVWMGRTINETSRLGYETFKVIEGWSNPKSKLQINRQVIVDRGNRSGYSGIFSVEGKSCINRCFYVELIRGRKEETEVLWTSNSIVVFCGTSGTYGTGSWPDGADLNLMPI

SEQ ID NO: 20766 - protein, 469 aa, synthetic construct; identical to SEQ ID NO: 19410
  REGION 1..469: note = neuraminidase__InfluenzaA__AEI54482

SEQ ID NO: 20767 - protein, 469 aa, synthetic construct
  REGION 1..469: note = neuraminidase__InfluenzaA__AEI54493
MNPNQKIITIGSVSLTISTICFFMQIAILITTVTLHFKQYEFNSPPNNQVMLCEPTIIERNITEIVYLTNTTIEKEICPKLAEYRNWSKPQCDITGFAPFSKDNSIRLSAGGDIWVTREPYVSCDPDKCYQFALGQGTTLNNVHSNNTVRDRTPYRTLLMNELGVPFHLGTKQVCIAWSSSSCHDGKAWLHVCITGDDKNATASFIYNGRLVDSVVSWSKEILRTQESECVCINGTCTVVMTDGSASGKADTKILFIEEGKIVHTSTLSGSAQHVEECSCYPRYPGVRCVCRDNWKGSNRPIVDINIKDHSIVSSYVCSGLVGDTPRKNDSSSSSHCLDPNNEEGGHGVKGWAFDDGNDVWMGRTINETSRLGYETFKVIEGWSNPKSKLQINRQVIVDRGNRSGYSGIFSVEGKSCINRCFYVELIRGRKEETEVLWTSNSIVVFCGTSGTYGTGSWPDGADLNLMSI

SEQ ID NO: 20768 - protein, 469 aa, synthetic construct; identical to SEQ ID NO: 19518
  REGION 1..469: note = neuraminidase__InfluenzaA__AEI54504

SEQ ID NO: 20769 - protein, 469 aa, synthetic construct; identical to SEQ ID NO: 19038
  REGION 1..469: note = neuraminidase__InfluenzaA__AEI59982

SEQ ID NO: 20770 - protein, 470 aa, synthetic construct; identical to SEQ ID NO: 19936
  REGION 1..470: note = neuraminidase__InfluenzaA__AEI59993

SEQ ID NO: 20771 - protein, 470 aa, synthetic construct; identical to SEQ ID NO: 19932
  REGION 1..470: note = neuraminidase__InfluenzaA__AEI60004

SEQ ID NO: 20772 - protein, 469 aa, synthetic construct
  REGION 1..469: note = neuraminidase__InfluenzaA__AEI60015
MNPNQKIITIGSVSLTISTICFFMQIAILITTVTLHFKQYEFNSPPNNQVMLCEPTIIERNITEIVYLTNTTIEKEICPKLAEYRNWSKPQCDITGFAPFSKDNSIRLSAGGDIWVTREPYVSCDPDKCYQFALGQGTTLNNVHSNNTVRDRTPYRTLLMNELGVPFHLGTKQVCIAWSSSSCHDGKAWLHVCITGDDKNATASFIYNGRLVDSVVSWSKEILRTQESECVCINGTCTVVMTDGSASGKADTKILFIEEGKIVHTSTLSGSAQHVEECSCYPRYPGVRCVCRDNWKGSNRPIVDINIKDHSIVSSYVCSGLVGDTPRKNDSSSSGHCLDPNNEEGGNGVKGWAFDDGNDVWMGRTISEKSRLGYETFKVIEGWSNHKSKLQINRQVIVDRGNRSGYSGIFSVEGKSCINRCFYVELIRGRKEETEVLWTSNSIVVFCGTSGTYGTGSWPDGADLNLMPI

SEQ ID NO: 20773 - protein, 469 aa, synthetic construct; identical to SEQ ID NO: 18484
  REGION 1..469: note = neuraminidase__InfluenzaA__AEI60026

SEQ ID NO: 20774 - protein, 469 aa, synthetic construct
  REGION 1..469: note = neuraminidase__InfluenzaA__AEI60037
MNPNQKIITIGSVSLTISTICFFMQIAILITTVTLHFKQYEFNSPPNNQVMLCEPTIIERNITEIVYLTNTTIEKEICPKLAEYRNWSKPQCDITGFAPFSKDNSIRLSAGGDIWVTREPYVSCDPDKCYQFALGQGTTLNNVHSNNTVRDRTPYRTLLMNELGVPFHLGTKQVCIAWSSSSCHDGKAWLHVCITGDDKNATASFIYNGRLVDSVVSWSKEILRTQESECVCINGTCTVVMTDGSASGKADTKILFIEEGKIVHTSTLSGSAQHVEECSCYPRYPGVRCVCRDNWKGSNRPIVDINIKDHSIVSSYVCSGLVGDTPRRNDSSSSSHCLDPNNEEGGHGVKGWAFDDGNDVWMGRTISEKSRLGYETFKVIEGWSNHKSKLQINRQVIVDRGNRSGYSGIFSVEGKSCINRCFYVELIRGRKEETEVLWTSNSIVVFCGTSGTYGTGSWPDGADLNLMPI

SEQ ID NO: 20775 - protein, 469 aa, synthetic construct
  REGION 1..469: note = neuraminidase__InfluenzaA__AEI60048
MNPNQKIITIGSVSLTISTICFFMQIAILITTVTLHFKQYEFNSPPNNQVMLCAPTIIERNITEIVYLTNTTIEKEICPKLAEYRNWSKPQCDITGFAPFSKDNSIRLSAGGDIWVTREPYVSCDPDKCYQFALGQGTTLNNVHSNNTVRDRTPYRTLLMNELGVPFHLGTKQVCIAWSSSSCHDGKAWLHVCITGDDKNATASFIYNGRLVDSVVSWSKEILRTQESECVCINGTCTVVMTDGSASGKADTKILFIEEGKIVHTSTLSGSAQHVEECSCYPRYPGVRCVCRDNWKGSNRPIVDINIKDHSIVSSYVCSGLVGDTPRKNDSSSSSHCLDPNNEEGGHGVKGWAFDDGNDVWMGRTISEKSRLGYETFKVIEGWSNPKSKLQINRQVIVDRGNRSGYSGIFSVEGKSCINRCFYVELIRGRKEETEVLWTSNSIVVFCGTSGTYGTGSWPDGADINLMPI

SEQ ID NO: 20776 - protein, 469 aa, synthetic construct
  REGION 1..469: note = neuraminidase__InfluenzaA__AEI60089
MNPNQKIITIGSVCMTIGMANLILQIGNIISIWISHSIQLGNQNQIETCNQSVITYENNTWVNQTYVNISNTNFAAGQSVVSVKLAGNSSLCPVSGWAIYSKDNSIRIGSKGDVFVIREPFISCSPLECRTFFLTQGALLNDKHSNGTIKDRSPYRTLMSCPIGEVPSPYNSRFESVAWSASACHDGINWLTIGISGPDNGAVAVLKYNGIITDTIKSWRNNILRTQESECACVNGSCFTIMTDGPSDGQASYKIFRIEKGKIVKSVEMNAPNYYYEECSCYPDSSEITCVCRDNWHGSNRPWVSFNQNLEYQIGYICSGIFGDNPRPNDKTGSCGPVSSNGANGVKGFSFKYGNGVWIGRTKSISSRKGFEMIWDPNGWTGTDNNFSIKQDIVGINEWSGYSGSFVQHPELTGLDCIRPCFWVELIRGRPKENTIWTSGSSISFCGVNSDTVGWSWPDGAELPFTIDK

SEQ ID NO: 20777 - protein, 469 aa, synthetic construct; identical to SEQ ID NO: 20709
  REGION 1..469: note = neuraminidase__InfluenzaA__AEI60099

SEQ ID NO: 20778 - protein, 469 aa, synthetic construct
  REGION 1..469: note = neuraminidase__InfluenzaA__AEI60111
MNPNQKIITIGSISLTIATICFLMQIAILVTTVTLHFKQYKCNSPPNNRVMLCEPTIIERNITEIVYLTNTTIEKEICPKLAEYRNWSKPQCNIKGFAPFSKDNSIRLSAGGDIWVTREPYVSCDPDKCYQFALGQGTTLNNGHSNDTVHDRTPYRTLLMNELGVPFHLGTRQVCIAWSSSSCHDGKAWLHVCITGDDENATASFIYNGRLVDSIGSWSKKILRTQESECVCINGTCTVVMTDGSASGKADTKILFIEEGKIVHISTLSGSAQHVEECSCYPRYPGVRCVCRDNWKGSNRPIVDINVRDYSIVSSYVCSGLVGDTPRKNDSFSSSHCLDPNNEEGGHGVKGWAFDDGNDVWMGRTISEKLRSGYETFKVIEGWSKPNSKLQVNRQVIVERGNRSGYSGIFSVEGKSCINRCFYVELIRGRKEETKVWWTSNSIVVFCGTSGTYGTGSWPDGADINIMPI

SEQ ID NO: 20779 - protein, 469 aa, synthetic construct; identical to SEQ ID NO: 16738
  REGION 1..469: note = neuraminidase__InfluenzaA__AEI73669

SEQ ID NO: 20780 - protein, 469 aa, synthetic construct
  REGION 1..469: note = neuraminidase__InfluenzaA__AEI86727
MNPNQKIITIGSVCITIGMANLILQIGNIISIWISHSIQLGNQNQIETCNQSVITYENNTWVNQTYVNISNTNFAAGQSVVSVKLAGNSSLCPVSGWAIYSKDNSIRIGSKGDVFVIREPFISCSPLECRTFFLTQGALLNDKHSNGTIKDRSPYRTLMSCPIGEVPSPYNSKFESVAWSASACHDGISWLTIGISGPDNGAVAVLKYNGIITDTIKSWRNNILRTQESECACVNGSCFTVMTDGPSDGQASYKIFRIEKGKIVKSVEMNAPNYHYEECSCYPDSSEITCVCRDNWHGSNRPWVSFNQNLEYQIGYICSGIFGDNPRPNDKTGSCGPVSSNGANGVKGFSFKYGNGVWIGRTKSISSRNGFEMIWDPNGWTGTDNNFSIKQDIVGINEWSGYSGSFVQHPELTGLDCIRPCFWVELIRGRPKENTIWTSGSSISFCGVNSDTVGWSWPDGAELPFTIDK

SEQ ID NO: 20781 - protein, 469 aa, synthetic construct
  REGION 1..469: note = neuraminidase__InfluenzaA__AEI86737
MNPNQKIITIGSVCMTIGMANLILQIGNIISIWISHSIQLGNQNQIETCNQSVITYENKTWVNQTYVNISNTNFAAGQSVVSVKLAGNSSLCPVSGWAIYSKDNSIRIGSKGDVFVIREPFISCSPLECRTFFLTQGALLNDKHSNGTIKDRSPYRTLMSCPIGEVPSPYNSRFESVAWSASACHDGINWLTIGISGPDNGAVAVLKYNGIITDTIKSWRNNILRTQESECACVNGSCFTVMTDGPSDGQASYKIFRIEKGKVVKSVEMNAPNYHYEECSCYPDSSEITCVCRDNWHGSNRPWVSFNQNLEYQIGYICSGIFGDNPRPNDKTGSCGPVSSNGANGVKGFSFKYGNGVWIGRTKSISSRNGFEMIWDPNGWTGTDNNFSIKQDIVGINEWSGYSGSFVQHPELTGLDCIRPCFWVELIRGRPKENTIWTSGSSISFCGVNSDTVGWSWPDGAELPFTIDK

SEQ ID NO: 20782 - protein, 469 aa, synthetic construct
  REGION 1..469: note = neuraminidase__InfluenzaA__AEI86757
MNPNQKIITIGSVCITIGMANLILQIGNIISIWISHSIQLGNQNQIETCNQSVITYENNTWVNQTYVNISNTNFAAGQSVVSVKLAGNSSLCPVSGWAIYSKDNSIRIGSKGDVFVIREPFISCSPLECRTFFLTQGALLNDKHSNGTIKDRSPYRTLMSCPIGEVPSPYNSRFESVAWSASACHDGISWLTIGISGPDNGAVAVLKYNGIITDTIKSWRNNILRTQESECACVNGSCFTVMTDGPSDGQASYKIFRIEKGKIVKSVEMNAPNYHYEECSCYPDSSEITCVCRDNWHGSNRPWVSFNQNLEYQIGYICSGIFGDNPRPNDKTGSCGPVSSNGANGVKGFSFKYGNGVWIGRTKSIISRNGFEMIWDPNGWTGTDNNFSIKQDIVGINEWSGYSGSFVQHPELTGLDCIRPCFWVELIRGRPKENTIWTSGSSISFCGVNSDTVGWSWPDGAELPFTIDK

SEQ ID NO: 20783 - protein, 469 aa, synthetic construct
  REGION 1..469: note = neuraminidase__InfluenzaA__AEI86767
MNPNQKIITIGSVCITIGMANLILQIGNIISIWISHSIQLGNQNQIETCNQSVITYENNTWVNQTYVNISNTNFAAGQSVVSVKLAGNSSLCPVSGWAIYSKDNSIRIGSKGDVFVIREPFISCSPLECRTFFLTQGALLNDKHSNGTIKDRSPYRTLMSCPIGEVPSPYNSRFESVAWSASACHDGISWLTIGISGPDNGAVAVLKYNGIITDTIKSWRNNILRTQESECACVNGSCFTVMTDGPSDGQASYKIFRIEKGKIVKSVEMNAPNYHYEECSCYPDSSEITCVCRDNWHGSNRPWVSFNHNLEYQIGYICSGIFGDNPRPNDKTGSCGPVSSNGANGVKGFSFKYGNGVWIGRTKSISSRNGFEMIWDPNGWTGTDNNFSIKQDIVGINEWSGYSGSFVQHPELTGLDCIRPCFWVELIRGRPKENTIWTSGSSISFCGVNSDTVGWSWPDGAELPFTIDK

SEQ ID NO: 20784 - protein, 469 aa, synthetic construct; identical to SEQ ID NO: 20783
  REGION 1..469: note = neuraminidase__InfluenzaA__AEI86777

SEQ ID NO: 20785 - protein, 469 aa, synthetic construct
  REGION 1..469: note = neuraminidase__InfluenzaA__AEI86787
MNPNQKIITIGSVCMTIGMANLMLQIGNIISIWISHSIQLGNQNQIETCNQSVITYENNTWVNQTYVNISNTNFAAGQSVVSVKLAGNSSLCPVSGWAIYSKDNSIRIGSKGDVFVIREPFISCSPLECRTFFLTQGALLNDKHSNGTIKDRSPYRTLMSCPIGEVPSPYNSRFESVAWSASACHDGINWLTIGISGPDNGAVAVLKYNGIITDTIKSWRNNILRTQESECACVNGSCFTVMTDGPSDGQASYKIFRIEKGKIVKSVEMNAPNYHYEECSCYPDSSEITCVCRDNWHGSNRPWVSFNQNLEYQIGYICSGIFGDNPRPNDKTGSCGPVSSNGANGVKGFSFKYGNGVWIGRTKSISSRNGFEMIWDPNGWTGTDNNFSIKQDIVGINEWSGYSGSFVQHPELTGLDCIRPCFWVELIRGRPKENTIWTSGSSISFCGVNSDTVGWSWPDGAELPFTIDK

SEQ ID NO: 20786 - protein, 469 aa, synthetic construct
  REGION 1..469: note = neuraminidase__InfluenzaA__AEI86797
MNPNQKIITIGSVCITIGMANLILQIGNIISIWISHSIQLGNQNQIETCNQSVITYENNTWVNQTYVNISNTNFAAGQSVVSVKLAGNSSLCPVSGWAIYSKDNSIRIGSKGDVFVIREPFISCSPLECRTFFLTQGALLNDKHSNGTIKDRSPYRTLMSCPIGEVPSPYNSRFESVAWSASACHDGISWLTIGISGPDNGAVAVLKYNGIITDTIKSWRNNILRTQESECACVNGSCFTVMTDGPSDGQASYKIFRIEKGKIVKSVEMNAPNYHYEECSCYPDSSEITCVCRDNWHGSNRPWVSFNQNLEYQIGYICSGIFGDNPRPNDKTGSCGPVSSNGANGVKGFSFKYGNGVWIGRTKSISSRNGFEMIWDPNGWTGTDNNFSIKQDIVGINEWSGYSGSFVQHPELTGLDCIRPCFWVELIRGRPKENTIWTSGSSISFCGVNSDTVGWSWPDGAELPFTIDK

SEQ ID NO: 20787 - protein, 469 aa, synthetic construct
  REGION 1..469: note = neuraminidase__InfluenzaA__AEI86807
MNPNQKIITIGSVCMTIGMANLILQIGNIISIWISHSIQLGNQNQIETCNQSVITYENNTWVNQTYVNISNTNFAAGQSVVSVKLAGNSSLCPVSGWAIYSKDNSIRIGSKGDVFVIREPFISCSPLECRTFFLTQGALLNDKHSNGTIKDRSPYRTLMSCPIGEVPSPYNSRFESVAWSASACHDGINWLTIGISGPDNGAVAVLKYNGIITDTIKSWRNNILRTQESECACVNGSCFTVMTDGPSDGQASYKIFRIEKGKIVKSVEMNAPNYHYEECSCYPDSSKITCVCRDNWHGSNRPWVSFNQNLEYQIGYICSGIFGDNPRPNDKTGSCGPVSSNGANGVKGFSFKYGNGVWIGRTKSISSRNGFEMIWDPNGWTGTDNNFSIKQDIVGINEWSGYSGSFVQHPELTGLDCIRPCFWVELIRGRPKENTIWTSGSSISFCGVNSDTVGWSWPDGAELPFIIDK

SEQ ID NO: 20788 - protein, 469 aa, synthetic construct; identical to SEQ ID NO: 20783
  REGION 1..469: note = neuraminidase__InfluenzaA__AEI86817

SEQ ID NO: 20789 - protein, 469 aa, synthetic construct
  REGION 1..469: note = neuraminidase__InfluenzaA__AEI86827
MNPNQKIITIGSVCITIGMANLILQIGNIISIWISHSIQLGNQNQIETCNQSVITYENNTWVNQTYVNISNTNFAAGQSVVSVKLAGNSSLCPVSGWAIYSKDNSIRIGSKGDVFVIREPFISCSPLECRTFFLTQGALLNDKHSNGTIKDRSPYRTLMSCPIGEVPSPYNSRFESVAWSASACHDGISWLTIGISGPDNGAVAVLKYNGIITDTIKSWRNNILRTQESECACVNGSCFTVMTDGPSDGQASYKIFRIEKGKIVKSVEMNAPNYHYEECSCYPDSSEITCVCRDNWHGSNRPWVSFNHNLEYQIGYICSGIFGDNPRPNDKTGSCGPVSSNGANGVKGFSFKYGNGVWIGRTKSTSSRNGFEMIWDPNGWTGTDNNFSIKQDIVGINEWSGYSGSFVQHPELTGLNCIRPCFWVELIRGRPKENTIWTSGSSISFCGVNSDTVGWSWPDGAELPFTIDK

SEQ ID NO: 20790 - protein, 469 aa, synthetic construct; identical to SEQ ID NO: 20786
  REGION 1..469: note = neuraminidase__InfluenzaA__AEI86837

SEQ ID NO: 20791 - protein, 469 aa, synthetic construct; identical to SEQ ID NO: 20257
  REGION 1..469: note = neuraminidase__InfluenzaA__AEI86847

SEQ ID NO: 20792 - protein, 469 aa, synthetic construct
  REGION 1..469: note = neuraminidase__InfluenzaA__AEI86867
MNPNQKIITIGSVCMTIGMANLILQIGNIISIWISHSIQLGNQNQIETCNQSVITYENNTWVNQTYVNISNTNLAAGQSVVSVKLAGNSSLCPVSGWAIYSKDNSIRIGSKGDVFVIREPFISCSPLECRTFFLTQGALLNDKHSNGTIKDRSPYRTLMSCPIGEVPSPYNSKFESVAWSASACHDGINWLTIGISGPDNGAVAVLKYNGIITDTIKSWRNNILRTQESECACVNGSCFTIMTDGPSDGQASYKIFRIEKGKIVKSVEMNAPNYHYEECSCYPDSSEITCVCRDNWHGSNRPWVSFNQNLEYQIGYICSGIFGDNPRPNDKTGSCGPVSSNGANGVKGFSFKYGNGVWIGRTKSISSRKGFEMIWDPNGWTGTDNNFSIKQDIVGINEWSGYSGSFVQHPELTGLDCIRPCFWVELIRGRPKENTIWTSGSSISFCGVNSDTVGWSWPDGAELPFTIDK

SEQ ID NO: 20793 - protein, 469 aa, synthetic construct; identical to SEQ ID NO: 20786
  REGION 1..469: note = neuraminidase__InfluenzaA__AEI86887

SEQ ID NO: 20794 - protein, 469 aa, synthetic construct; identical to SEQ ID NO: 20786
  REGION 1..469: note = neuraminidase__InfluenzaA__AEI86897

SEQ ID NO: 20795 - protein, 469 aa, synthetic construct
  REGION 1..469: note = neuraminidase__InfluenzaA__AEI86907
MNPNQKIITIGSVCMTIGMANLILQIGNIISIWISHSIQLGNQNQIETCNQSVITYENNTWVNQTYVNISNTNFAAGQSVVSVKLAGNSSLCPVSGWAIYSKDNSIRIGSKGDVFVIREPFISCSPLECRTFFLTQGALLNDIHSNGTIKDRSPYRTLMSCPIGEVPSPYNSRFESVAWSASACHDGINWLTIGISGPDNGAVAVLKYNGIITDTIKSWRNNILRTQESECACVNGSCFTIMTDGPSDGQASYKIFRIEKGKIVKSVEMNAPNYHYEECSCYPDSSEITCVCRDNWHGSNRPWVSFNQNLEYQIGYICSGIFGDNPRPNDKTGSCGPVSSNGANGVKGFSFKYGNGVWIGRTKSISSRKGFEMIWDPNGWTGTDNNFSIKQDIVGINEWSGYSGSFVQHPELTGLDCIRPCFWVELIRGRPKENTIWTSGSSISFCGVNSDTVGWSWPDGAELPFTIDK

SEQ ID NO: 20796 - protein, 469 aa, synthetic construct
  REGION 1..469: note = neuraminidase__InfluenzaA__AEI86917
MNPNQKIITIGSICMTIGMANLILQIGNIISIWISHSIQLGNQNQIETCNQSVITYENNTWVNQTYVNISNTNFAAGQSVVSVKLAGNSSLCPVSGWAIYSKDNSIRIGSKGDVFVIREPFISCSPLECRTFFLTQGALLNDKHSNGTIKDRSPYRTLMSCPIGEVPSPYNSRFESVAWSASACHDGINWLTIGISGPDNGAVAVLKYNGIITDTIKSWRNNILRTQESECACVNGSCFTIMTDGPSDGQASYKIFRIEKGKIVKSVEMNAPNYHYEECSCYPDSSEITCVCRDNWHGSNRPWVSFNQNLEYQIGYICSGIFGDNPRPNDKTGSCGPVSSNGANGVKGFSFKYGNGVWIGRTKSISSRKGFEMIWDPNGWTGTDNNFSIKQDIVGINEWSGYSGSFVQHPELTGLDCIRPCFWVELIRGRPKENTIWTSGSSISFCGVNSDTVGWSWPDGAELPFTIDK

SEQ ID NO: 20797 - protein, 469 aa, synthetic construct; identical to SEQ ID NO: 20709
  REGION 1..469: note = neuraminidase__InfluenzaA__AEI86927

SEQ ID NO: 20798 - protein, 469 aa, synthetic construct; identical to SEQ ID NO: 20783
  REGION 1..469: note = neuraminidase__InfluenzaA__AEI86937

SEQ ID NO: 20799 - protein, 469 aa, synthetic construct
  REGION 1..469: note = neuraminidase__InfluenzaA__AEI86947
MNPNQKIITIGSVCMTIGMANLILQIGNIISIWISHSIQLGNKNQIETCNQSVITYENNTWVNQTYVNISNTNFAAGQSVVSVKLAGNSSLCPVSGWAIYSKDNSIRIGSKGDVFVIREPFISCSPLECRTFFLTQGALLNDKHSNGTIKDRSPYRTLMSCPIGEVPSPYNSRFESVAWSASACHDGINWLTIGISGPDNGAVAVLKYNGIITDTIKSWRNNILRTQESECACVNGSCFTVMTDGPSDGQASYKIFRIEKGKIVKSVEMNAPNYHYEECSCYPDSSEITCVCRDNWHGSNRPWVSFNQNLEYQIGYICSGIFGDNPRPNDKTGSCGPVSSNGANGVKGFSFKYGNGVWIGRTKSISSRNGFEMIWDPNGWTGTDNNFSIKQDIVGIKEWSGYSGSFVQHPELTGLDCIRPCFWVELIRGRPKENTIWTSGSSISFCGVNSDTVGWSWPDGAELPFTIDK

SEQ ID NO: 20800 - protein, 469 aa, synthetic construct
  REGION 1..469: note = neuraminidase__InfluenzaA__AEI86967
MNPNQKIITIGSVCMTIGMANLILQIGNIISIWISHSIQLGNQNQIETCNQSVITYENNTWVNQTYVNISNTNFAAGQSVVSVKLAGNSSLCPVSGWAIYSKDNSIRIGSKGDAFVIREPFISCSPLECRTFFLTQGALLNDKHSNGTIKDRSPYRTLMSCPIGEVPSPYNSRFESVAWSASACHDGINWLTIGISGPDNGAVAVLKYNGIITDTIKSWRNNILRTQESECACVNGSCFTIMTDGPSDGQASYKIFRIEKGKIVKSVEMNAPNYHYEECSCYPDSSEITCVCRDNWHGSNRPWVSFNQNLEYQIGYICSGIFGDNPRPNDKTGSCGPVSSNGANGVKGFSFKYGNGVWIGRTKSISSRKGFEMIWDPNGWTGTDNNFSIKQDIVGINEWSGYSGSFVQHPELTGLDCIRPCFWVELIRGRPKENTIWTSGSSISFCGVNSDTVGWSWPDGAELPFTIDK

SEQ ID NO: 20801 - protein, 469 aa, synthetic construct
  REGION 1..469: note = neuraminidase__InfluenzaA__AEI86977
MNPNQKIITIGSVCMTIGMANLILQIGNIISIWISHSIQLGNQNQIGTCNQSVITYENNTWVNQTYVNISNTNFAAGQSVVSVKLAGNSSLCPVSGWAIYSKDNSIRIGSKGDVFVIREPFISCSPLECRTFFLTQGALLNDKHSNGTIKDRSPYRTLMSCPIGEVPSPYNSRFESVAWSASACHDGINWLTIGISGPDNGAVAVLKYNGIITDTIKSWRNNILRTQESECTCVNGSCFTVMTDGPSDGQASYKIFKIEKGKIVKSVEMNAPNYHYEECSCYPDSSEITCVCRDNWHGSNRPWVSFNQNLEYQIGYICSGIFGDNPRPNDKTGSCGPVSSNGANGVKGFSFKYGNGVWIGRTKSISSRNGFEMIWDPNGWTGTDNNFSIKQDIVGINEWSGYSGSFVQHPELTGLDCIRPCFWVELIRGRPKENTIWTSGSSISFCGVNSDTVGWSWPDGAELPFTIDK

SEQ ID NO: 20802 - protein, 469 aa, synthetic construct
  REGION 1..469: note = neuraminidase__InfluenzaA__AEI86997
MNPNQKIITIGSVCMTIGMANLILQIGNIISIWISHSIQLGNQNQIETCNQSVITYENNTWVNQTYVNISNTNFAAGQSVVSVKLAGNSSLCPVSGWAIYSKDNSIRIGSKGDVFVIREPFISCSPLECRTFFLTQGALLNDKHSNGTIKDRSPYRTLMSCPIGEVPSPYNSRFESVAWSASACHDGINWLTIGISGPDNGAVAVLKYNGIITDTIKSWRNNILRTQESECACVNGSCFTVMTDGPSDGQASYKIFRIEKGKIVKSVEMNAPNYHYEECSCYPDSSEITCVCRDNWHGSNRPWVSFNQNLEYQIGYICSGIFGDNPRPNDKTGSCGPVSSNGANGVKGFSFKYGNGVWIGRTKSISSRNGFEMIWDPNGWTGTDNNFSIKQDIVGIKEWSGYSGSFVQHPELTGLDCIRPCFWVELIRGRPKENTIWTSGSIISFCGVNSDTVGWSWPDGAELPFTIDK

SEQ ID NO: 20803 - protein, 469 aa, synthetic construct
  REGION 1..469: note = neuraminidase__InfluenzaA__AEI87007
MNPNQKIITIGSVCITIGMANLILQIGNIISIWISHSIQLGNQNQIETCNQSVITYENNTWVNQTYVNISNTNFAAGQSVVSVKLAGNSSLCPVSGWAIYSKDNSIRIGSKGDVFVIREPFISCSSLECRTFFLTQGALLNDKHSNGTIKDRSPYRTLMSCPIGEVPSPYNSRFESVAWSASACHDGISWLTIGISGPDNGAVAVLKYNGIITDTIKSWRNNILRTQESECACVNGSCFTVMTDGPSDGQASYKIFRIEKGKIVKSVEMNAPNYHYEECSCYPDSSEITCVCRDNWHGSNRPWVSFNQNLEYQIGYICSGIFGDNPRPNDKTGSCGPVSSNGANGVKGFSFKYGNGVWIGRTKSISSRNGFEMIWDPNGWTGTDNNFSIKQDIVGINEWSGYSGSFVQHPELTGLDCIRPCFWVELIRGRPKENTIWTSGSSISFCGVNSDTVGWSWPDGAELPFTIDK

SEQ ID NO: 20804 - protein, 469 aa, synthetic construct
  REGION 1..469: note = neuraminidase__InfluenzaA__AEI87017
MNPNQKIITIGSVCMTIGMANLILQIGNIISIWISHSIQLGNQNQIETCNQSVITYENNTWVNQTYVNISNTNFAAGQSVVSVKLAGNSSLCPVSGWAIYSKDNSIRIGSKGDVFVIREPFISCSPLECRTFFLTQGALLNDKHSNGTIKDRSPYRTLMSCPIGEVPSPYNSRFESVAWSASACHDGINWLTIGISGPDNGAVAVLKYNGIITDTIKSWRNNILRTQESECACVNGSCFTVMTDGPSDGQASYKIFRIEKGKIVKSVEMNAPNYHYEECSCYPDSSEITCVCRDNWHGSNRPWVSFNQNLEYQIGYICSGIFGDNPRPNDKTGSCGPVSSNGANGVKGFSFKYGNGVWIGRTKSISSRNGFEMIWDPNGWTGTDNNFSIKQDIVGINEWSGYSGSFVQHPELTGLDCIRPCFWVELIRGRPKENTIWTSGSSISFCGVNGDTGGWSWPDGAELPFTIDK

SEQ ID NO: 20805 - protein, 469 aa, synthetic construct; identical to SEQ ID NO: 20709
  REGION 1..469: note = neuraminidase__InfluenzaA__AEI87027

SEQ ID NO: 20806 - protein, 469 aa, synthetic construct; identical to SEQ ID NO: 20802
  REGION 1..469: note = neuraminidase__InfluenzaA__AEI87037

SEQ ID NO: 20807 - protein, 469 aa, synthetic construct; identical to SEQ ID NO: 20786
  REGION 1..469: note = neuraminidase__InfluenzaA__AEI87047

SEQ ID NO: 20808 - protein, 469 aa, synthetic construct
  REGION 1..469: note = neuraminidase__InfluenzaA__AEI87057
MNPNQKIITIGSVCMTIGMANLILQIGNIISIWISHSIQLGNQNQIETCNQSVITYENNTWVNQTYVNISNTNFAAGQSVVSVKLAGNSSLCPVSGWAIYSKDNSIRIGSKGDVFVIREPFISCSPLECRTFFLTQGALLNDKHSNGTIKDRSPYRTLMSCPIGEVPSPYNSRFESVAWSASACHDGINWLTIGISGPDNGAVAVLKYNGIITDTIKSWRNNILRTQESECACVNGSCFTVMTDGPSDGQASYKIFRIEKGKIVKSVEMNAPNYHYEECSCYPDSSEITCVCRDNWHGSNRPWVSFNQNLEYQIGYICSGIFGDNPRPNDKTGSCGPVSSNGANGVKGFSFKYGNGVWIGRTKSISSRNGFEMIWDPNGWTGTDNNFSIKQDIVGIKEWSGYSGSFVQHPELTGLDCIRPCFWVELIRGRPKENTIWTSGSSISFCGVNSDTVGWSWPDGAELPFTIDK

SEQ ID NO: 20809 - protein, 469 aa, synthetic construct; identical to SEQ ID NO: 20257
  REGION 1..469: note = neuraminidase__InfluenzaA__AEI87067

SEQ ID NO: 20810 - protein, 469 aa, synthetic construct
  REGION 1..469: note = neuraminidase__InfluenzaA__AEI87077
MNPNQKIITIGSICMTIGMANLILQIGNIISIWISHSIQFGNQNQIGTCNQSVITYENNTWVNQTYVNISNTNFAAGQSVVSVKLAGNSSLCPVSGWAIYSKDNSIRIGSKGDVFVIREPFISCSPLECRTFFLTQGALLNDKHSNGTIKDRSPYRTLMSCPIGEVPSPYNSRFESVAWSASACHDGINWLTIGISGPDNGAVAVLKYNGIITDTIKSWRNNILRTQESECACVNGSCFTIMTDGPSDGQASYKIFRIEKGKIVKSVEMNAPNYHYEECSCYPDSSEITCVCRDNWHGSNRPWVSFNQNLEYQIGYICSGIFGDNPRPNDKTGSCGPVSSNGANGVKGFSFKYGNGVWIGRTKSISSRKGFEMIWDPNGWTGTDNNFSIKQDIVGINEWSGYSGSFVQHPELTGLDCIRPCFWVELIRGRPKENTIWTSGSSISFCGVNSDTVGWSWPDGAELPFTIDK

SEQ ID NO: 20811 - protein, 469 aa, synthetic construct
  REGION 1..469: note = neuraminidase__InfluenzaA__AEI87087
MNPNQKIITIGSVCMTIGMANLILQIGNIISIWISHSIQLGNQNQIETCNQSVITYENNTWVNQTYVNISNTNFAAGQSVVSVKLAGNSSLCPISGWAIYSKDNSIRIGSKGDVFVIREPFISCSPLECRTFFLTQGALLNDKHSNGTIKDRSPYRTLMSCPIGEVPSPYNSRFESVAWSASACHDGINWLTIGISGPDNGAVAVLKYNGIITDTIKSWRNNILRTQESECACVNGSCFTVMTDGPSDGQASYKIFRIEKGKIVKSVEMNAPNYHYEECSCYPDSSEITCVCRDNWHGSNRPWVSFNQNLEYQIGYICSGIFGDNPRPNDKTGSCGPVSSNGANGVKGFSFKYGNGVWIGRTKSISSRNGFEMIWDPNGWTGTDNNFSIKQDIVGIKEWSGYSGSFVQHPELTGLDCIRPCFWVELIRGRPKENTIWTSGSIISFCSVNSDTVGWSWPDGAELPFTIDK

SEQ ID NO: 20812 - protein, 469 aa, synthetic construct; identical to SEQ ID NO: 20783
  REGION 1..469: note = neuraminidase__InfluenzaA__AEI87097

SEQ ID NO: 20813 - protein, 469 aa, synthetic construct; identical to SEQ ID NO: 20783
  REGION 1..469: note = neuraminidase__InfluenzaA__AEI87107

SEQ ID NO: 20814 - protein, 470 aa, synthetic construct
  REGION 1..470: note = neuraminidase__InfluenzaA__AEI91968
MNPNQKIITIGSISIAIGIISLMLQIGNIISIWASHSIQTGSQNNTGICNQRIITYENSTWVNHTYVNINNTNVVAGEDKTSVTLAGNSSLCSISGWAIYTKDNSIRIGSKGDVFVIREPFISCSHLECRTFFLTQGALLNDKHSNGTVKDRSPYRALMSCPLGEAPSPYNSKFESVAWSASACHDGMGWLTIGISGPDNGAVAVLKYNGIITGTIKSWKKQILRTQESECVCMNGSCFTIMTDGPSNKAASYKIFKIEKGKVTKSIELNAPNFYYEECSCYPDTGIVMCVCRDNWHGSNRPWVSFNQNLDYQIGYICSGVFGDNPRPEDGEGSCNPVTVDGANGVKGFSYKYGNGVWIGRTKSNRLRKGFEMIWDPNGWTNTDSDFSVKQDVVAITDWSGYSGSFVQHPELTGLDCIKPCFWVELVRGLPRENTTIWTSGSSISFCGVNSDTANWSWPDGAELPFTIDK

SEQ ID NO: 20815 - protein, 469 aa, synthetic construct; identical to SEQ ID NO: 16738
  REGION 1..469: note = neuraminidase__InfluenzaA__AEI91983

SEQ ID NO: 20816 - protein, 469 aa, synthetic construct; identical to SEQ ID NO: 19224
  REGION 1..469: note = neuraminidase__InfluenzaA__AEI91984

SEQ ID NO: 20817 - protein, 469 aa, synthetic construct
  REGION 1..469: note = neuraminidase__InfluenzaA__AEI92004
MNPNQKIITIGSVCMTIGMANLILQIGNIISIWISHSIQLGNQNQIETCNQSVITYENNTWVNQTYVNISNTNFAAGQSVVSVKLAGNSSLCPVSGWAIYSKDNSIRIGSKGDVFVIREPFISCSPLECRTFFLTQGALLNDKHSNGTIKDRSPYRTLMSCPIGEVPSPYNSRFESVAWSASACHDGINWLTIGISGPDNGAVAVLKYNGIITDTIKSWRNNILRTQESECACVNGSCFTVMTDGPSDGQASYKIFRIEKGKIVKSVEMNAPNYHYEECSCYPDSSEITCVCRDNWHGSNRPWVSFNQNLEYQIGYICSGIFGDNPRPNDKTGSCGPVSSNGAYGVKGFSFKYGNGVWIGRTKSISSRNGFEMIWDPNGWTGTDNNFSIKQDIVGINEWSGYSGSFVQHPELTGLDCIRPCFWVELIRGRPKENTIWTSGSSISFCGVNSDTVGWSWPDGAELPFTIDK

SEQ ID NO: 20818 - protein, 470 aa, synthetic construct
  REGION 1..470: note = neuraminidase__InfluenzaA__AEI92023
MNPNQKIITIGSISIAIGIISLMLQIGNIISIWASHSIQTGSQNNTGICNQKIITYENSTWVNHTYVNINNTNVVAGEDKTSVTLAGNSSLCSISGWAIYTKDNSIRIGSKGDVFVIREPFISCSHLECRTFFLTQGALLNDKHSNGTVKDRSPYRALMSCPLGEAPSPYNSKFESVAWSASACHDGMGWLTIGISGPDNGAVAVLKYNGIITGTIKSWKKQILRTQESECVCMNGSCFTIMTDGPSNKAASYKIFKIEKGKVTKSIELNAPNFYYEECSCYPDTGIVMCVCRDNWHGSNRPWVSFNQNLDYQIGYICSGVFGDNPRPEDGEGSCNPVTVDGTNGVKGFSYKYGNGVWIGRTKSNRLRKGFEMIWDPNGWTNTDSDFSVKQDVVAITDWSGYSGSFVQHPELTGLDCIRPCFWVELVRGLPRENTTIWTSGSSISFCGVNSDTANWSWPDGAELPFTIDK

SEQ ID NO: 20819 - protein, 469 aa, synthetic construct
  REGION 1..469: note = neuraminidase__InfluenzaA__AEJ10403
MNPNQKIITIGSVCITIGMANLILQIGNIISIWISHSIQLGNQNQIETCNQSVITYENNTWVNQTYVNISNTNFAAGQSVVSVKLAGNSSLCPVSGWAIYSKDNSIRIGSKGDVFVIREPFISCSPLECRTFFLTQGALLNDKHSNGTIKDRSPYRTLMSCPIGEVPSPYNSRFESVAWSASACHDGISWLTIGISGPDNGAVAVLKYNGIITDTIKSWRNNILRTQESECACVNGSCFTVMTDGPSDGQASYKIFRIEKGKIVKSVEMNAPNYHYEECSCYPDSSEITCVCRDNWHGSNRPWVSFNQNLEYQIGYICSGIFGDNPRPNDKTGSCGPVSANGANGVKGFSFKYGNGVWIGRTKSISSRNGFEMIWDPNGWTGTDNNFSIKQDIVGINEWSGYSGSFVQHPELTGLDCIRPCFWVELIRGRPKENTIWTSGSSISFCGVNSDTVGWSWPDGAELPFTIDK

SEQ ID NO: 20820 - protein, 469 aa, synthetic construct; identical to SEQ ID NO: 20786
  REGION 1..469: note = neuraminidase__InfluenzaA__AEJ10413

SEQ ID NO: 20821 - protein, 469 aa, synthetic construct; identical to SEQ ID NO: 20808
  REGION 1..469: note = neuraminidase__InfluenzaA__AEJ10423

SEQ ID NO: 20822 - protein, 469 aa, synthetic construct
  REGION 1..469: note = neuraminidase__InfluenzaA__AEJ10433
MNPNQKIITIGSVCMTIGMANLILQIGNIISIWISHSIQLGNQNQIETCNQSVITYENNTWVNQTYVNISNTNFAAGQSVVSVKLAGNSSLCPVSGWAIYSKDNSIRIGSKGDVFVIREPFISCSPLECRTFFLTQGALLNDKHSNGTIKDRSPYRTLMSCPIGEVPSPYNSRFESVAWSASACHDGINWLTIGISGPDNGAVAVLKYNGIITDTIKSWRNNILRTQESECACVNGSCFTVMTDGPSDGQASYKIFRIEKGKIVKSVEMNAPNYHYEECSCYPDSSEITCVCRDNWHGSNRPWVSFNQNLEYRIGYICSGIFGDNPRPNDKTGSCGPVSSNGANGVKGFSFKYGNGVWIGRTKSISSRNGFEMIWDPNGWTGTDNNFSIKQDIIGINEWSGYSGSFVQHPELTGLDCIRPCFWVELIRGRPKENTIWTSGSSISFCGVNSGTVGWSWPDGAELPFTIDK

SEQ ID NO: 20823 - protein, 469 aa, synthetic construct; identical to SEQ ID NO: 20257
  REGION 1..469: note = neuraminidase__InfluenzaA__AEJ10443

SEQ ID NO: 20824 - protein, 469 aa, synthetic construct; identical to SEQ ID NO: 20257
  REGION 1..469: note = neuraminidase__InfluenzaA__AEJ10453

SEQ ID NO: 20825 - protein, 469 aa, synthetic construct; identical to SEQ ID NO: 20709
  REGION 1..469: note = neuraminidase__InfluenzaA__AEJ10463

SEQ ID NO: 20826 - protein, 469 aa, synthetic construct
  REGION 1..469: note = neuraminidase__InfluenzaA__AEJ10473
MNPNQKIITIGSVCMTIGMANLILQIGNIISIWISHSIQLGNQNQIETCNQSVITYENKTWVNQTYVNISNTNFAAGQSVVSVKLAGNSSLCPVSGWAIYSKDNSIRIGSKGDVFVIREPFISCSPLECRTFFLTQGALLNDKHSNGTIKDRSPYRTLMSCPIGEVPSPYNSRFESVAWSASACHDGINWLTIGISGPDNGAVAVLKYNGIITDTIKSWRNNILRTQESECACVNGSCFTVMTDGPSDGQASYKIFRIEKGKIVKSVEMNAPNYHYEECSCYPDSSEITCVCRDNWHGSNRPWVSFNQNLEYQIGYICSGIFGDNPRPNDKTGSCGPVSSNGANGVKGFSFKYGNGVWIGRTKSISSRNGFEMIWDPNGWTGTDNKFSIKQDIVGINEWSGYSGSFVQHPELTGLNCIRPCFWVELIRGRPKENTIWTSGSSISFCGVNSDTVGWSWPDGAELPFTIDK

SEQ ID NO: 20827 - protein, 469 aa, synthetic construct; identical to SEQ ID NO: 20257
  REGION 1..469: note = neuraminidase__InfluenzaA__AEJ10503

SEQ ID NO: 20828 - protein, 469 aa, synthetic construct; identical to SEQ ID NO: 16738
  REGION 1..469: note = neuraminidase__InfluenzaA__AEJ10523

SEQ ID NO: 20829 - protein, 469 aa, synthetic construct; identical to SEQ ID NO: 16738
  REGION 1..469: note = neuraminidase__InfluenzaA__AEJ10533

SEQ ID NO: 20830 - protein, 469 aa, synthetic construct; identical to SEQ ID NO: 16738
  REGION 1..469: note = neuraminidase__InfluenzaA__AEJ10543

SEQ ID NO: 20831 - protein, 469 aa, synthetic construct; identical to SEQ ID NO: 16738
  REGION 1..469: note = neuraminidase__InfluenzaA__AEJ10553

SEQ ID NO: 20832 - protein, 469 aa, synthetic construct; identical to SEQ ID NO: 19013
  REGION 1..469: note = neuraminidase__InfluenzaA__AEJ10563

SEQ ID NO: 20833 - protein, 469 aa, synthetic construct; identical to SEQ ID NO: 19013
  REGION 1..469: note = neuraminidase__InfluenzaA__AEJ10573

SEQ ID NO: 20834 - protein, 469 aa, synthetic construct; identical to SEQ ID NO: 19013
  REGION 1..469: note = neuraminidase__InfluenzaA__AEJ10583

SEQ ID NO: 20835 - protein, 469 aa, synthetic construct
  REGION 1..469: note = neuraminidase__InfluenzaA__AEJ36305
MNPNQKIITIGSVCMTIGMANLILQIGNIISIWISHSIQLGNQNQIETCNQSVITYENNTWVNQTYVNISNTNFAAGQSVVSVKLAGNSSLCPVSGWAIYSKDNSIRIGSKGDVFVIREPFISCSPLECRTFFLTQGALLNDKHSNGTIKDRSPYRTLMSCPIGEVPSPYNSRFESVAWSASACHDGINWLTIGISGPDNGAVAVLKYNGIITDTIKSWRNNILRTQESECACVNGSCFTVMTDGPSDGQASYKIFRIEKGKIVKSVEMNAPNYHYEECSCYPDSSEITCVCRDNWHGSNRPWVSFNQNLEYQIGYICSGIFGDNPRPNDKTGSCGPVSSNGANGVKGFSFKYGNGVWIGRTKSTSSRNGFEMIWDPNGWTGTDNSFSIKQDIVGINEWSGYSGSFVQHPELTGLDCIRPCFWVELIRGRPKENTIWTSGSSISFCGVNSDTVGWSWPDGAELPFTIDK

SEQ ID NO: 20836 - protein, 469 aa, synthetic construct; identical to SEQ ID NO: 16738
  REGION 1..469: note = neuraminidase__InfluenzaA__AEJ37856

SEQ ID NO: 20837 - protein, 469 aa, synthetic construct; identical to SEQ ID NO: 16738
  REGION 1..469: note = neuraminidase__InfluenzaA__AEJ37866

SEQ ID NO: 20838 - protein, 469 aa, synthetic construct; identical to SEQ ID NO: 16738
  REGION 1..469: note = neuraminidase__InfluenzaA__AEJ37876

SEQ ID NO: 20839 - protein, 469 aa, synthetic construct; identical to SEQ ID NO: 20786
  REGION 1..469: note = neuraminidase__InfluenzaA__AEJ37886

SEQ ID NO: 20840 - protein, 469 aa, synthetic construct
  REGION 1..469: note = neuraminidase__InfluenzaA__AEJ37896
MNPNQKIITIGSVCITIGMANLILQIGNIISIWISHSIQLGNQNQIETCNQSVITYENNTWVNQTYVNISNTNFAAGQSVVSVKLAGNSSLCPVSGWAIYSKDNSIRIGSKGDVFVIREPFISCSPLECRTFFLTQGALLNDKHSNGTIKDRSPYRTLMSCPIGEVPSPYNSRFESVAWSASACHDGISWLTIGISGPDNGAVAVLKYNGIITDTIKSWRNNILRTQESECACVNGSCFTVMTDGPSDGQASYKIFRIEKGRIVKSVEMNAPNYHYEECSCYPDSSEITCVCRDNWHGSNRPWVSFNQNLEYQIGYICSGIFGDNPRPNDKTGSCGPVSSNGANGVKGFSFKYGNGVWIGRTKSISSRNGFEMIWDPNGWTGTDNNFSIKQDIVGINEWSGYSGSFVQHPELTGLDCIRPCFWVELIRGRPKENTIWTSGSSISFCGVNSDTVGWSWPDGAELPFTIDK

SEQ ID NO: 20841 - protein, 469 aa, synthetic construct; identical to SEQ ID NO: 20786
  REGION 1..469: note = neuraminidase__InfluenzaA__AEJ37906

SEQ ID NO: 20842 - protein, 469 aa, synthetic construct; identical to SEQ ID NO: 20786
  REGION 1..469: note = neuraminidase__InfluenzaA__AEJ37916

SEQ ID NO: 20843 - protein, 469 aa, synthetic construct; identical to SEQ ID NO: 20786
  REGION 1..469: note = neuraminidase__InfluenzaA__AEJ37926

SEQ ID NO: 20844 - protein, 469 aa, synthetic construct; identical to SEQ ID NO: 18640
  REGION 1..469: note = neuraminidase__InfluenzaA__AEJ37936

SEQ ID NO: 20845 - protein, 469 aa, synthetic construct; identical to SEQ ID NO: 16738
  REGION 1..469: note = neuraminidase__InfluenzaA__AEJ37946

SEQ ID NO: 20846 - protein, 469 aa, synthetic construct; identical to SEQ ID NO: 20786
  REGION 1..469: note = neuraminidase__InfluenzaA__AEJ37956

SEQ ID NO: 20847 - protein, 469 aa, synthetic construct; identical to SEQ ID NO: 20786
  REGION 1..469: note = neuraminidase__InfluenzaA__AEJ37966

SEQ ID NO: 20848 - protein, 469 aa, synthetic construct; identical to SEQ ID NO: 16738
  REGION 1..469: note = neuraminidase__InfluenzaA__AEJ37976

SEQ ID NO: 20849 - protein, 469 aa, synthetic construct; identical to SEQ ID NO: 20786
  REGION 1..469: note = neuraminidase__InfluenzaA__AEJ37986

SEQ ID NO: 20850 - protein, 469 aa, synthetic construct; identical to SEQ ID NO: 19410
  REGION 1..469: note = neuraminidase__InfluenzaA__AEK21372

SEQ ID NO: 20851 - protein, 470 aa, synthetic construct; identical to SEQ ID NO: 20204
  REGION 1..470: note = neuraminidase__InfluenzaA__AEK21383

SEQ ID NO: 20852 - protein, 469 aa, synthetic construct; identical to SEQ ID NO: 18640
  REGION 1..469: note = neuraminidase__InfluenzaA__AEK21399

SEQ ID NO: 20853 - protein, 469 aa, synthetic construct; identical to SEQ ID NO: 16738
  REGION 1..469: note = neuraminidase__InfluenzaA__AEK21409

SEQ ID NO: 20854 - protein, 469 aa, synthetic construct; identical to SEQ ID NO: 20709
  REGION 1..469: note = neuraminidase__InfluenzaA__AEK21419

SEQ ID NO: 20855 - protein, 469 aa, synthetic construct; identical to SEQ ID NO: 20786
  REGION 1..469: note = neuraminidase__InfluenzaA__AEK21429

SEQ ID NO: 20856 - protein, 469 aa, synthetic construct
  REGION 1..469: note = neuraminidase__InfluenzaA__AEK21439
MNPNQKIITIGSVCMTIGMANLILQIGNIISIWISHSIQLGNQNQIETCNQSVITYENNTWVNQTYVNISNTNFAAGQSVVSVKLAGNSSLCPVSGWAIYSKDNSIRIGSKGDVFVIREPFISCSPLECRTFFLTQGALLNDKHSNGTIKDRSPYRTLMSCPIGEVPSPYNSRFESVAWSASACHDGINWLTIGISGPDNGAVAVLKYNGIITDTIKSWRNNILRTQESECACVNGSCFTVMTDGPSDGQASYKIFRIEKGKIVKSVEMNAPNYHYEECSCYPDSSEITCVCRDNWHGSNRPWVSFNQNLEYQIGYICSGIFGDNPRPNDKTGSCGPVSSNGANGVKGFSFKYGNGVWIGRTKSISSRNGFEMIWDPNGWTGTDNNFSKKQDIVGINEWSGYSGSFVQHPELTGLDCIRPCFWVELIRGRPKENTIWTSGSSISFCGVNSDTVGWSWPDGAELPFTIDK

SEQ ID NO: 20857 - protein, 469 aa, synthetic construct; identical to SEQ ID NO: 20786
  REGION 1..469: note = neuraminidase__InfluenzaA__AEK21449

SEQ ID NO: 20858 - protein, 469 aa, synthetic construct; identical to SEQ ID NO: 18640
  REGION 1..469: note = neuraminidase__InfluenzaA__AEK21459

SEQ ID NO: 20859 - protein, 469 aa, synthetic construct; identical to SEQ ID NO: 20786
  REGION 1..469: note = neuraminidase__InfluenzaA__AEK21469

SEQ ID NO: 20860 - protein, 469 aa, synthetic construct; identical to SEQ ID NO: 20786
  REGION 1..469: note = neuraminidase__InfluenzaA__AEK21479

SEQ ID NO: 20861 - protein, 469 aa, synthetic construct; identical to SEQ ID NO: 16738
  REGION 1..469: note = neuraminidase__InfluenzaA__AEK21489

SEQ ID NO: 20862 - protein, 469 aa, synthetic construct; identical to SEQ ID NO: 20454
  REGION 1..469: note = neuraminidase__InfluenzaA__AEK28776

SEQ ID NO: 20863 - protein, 469 aa, synthetic construct
  REGION 1..469: note = neuraminidase__InfluenzaA__AEK28787
MNPNQKIITIGSVSLTISTICFFMQIAILITTVTLHFKQYEFYSPPNNQVMLCEPTIIERNITEIVYLTNTTIEKEICPKLAEYRNWSKPQCDITGFAPFSKDNSIRLSAGGDIWVTREPYVSCDPDKCYQFALGQGTTLNNVHSNNTVRDRTPYRTLLMNELGVPFHLGTKQVCIAWSSSSCHDGKAWLHVCITGDDKNATASFIYNGRLVDSVVSWSKEILRTQESECVCINGTCTVVMTDGSASGKADTKILFIEEGKIVHTSTLSGSAQHVEECSCYPRYPGVRCVCRDNWKGSNRPIVDINIKDHSIVSSYVCSGLVGDTPRKNDSSSSSHCLDPNNEEGGHGVKGWAFDDGNDVWMGRTINETSRLGYETFKVIEGWSNPKSKLQINRQVIVDRGNRSGYSGIFSVEGRSCINRCFYVELIRGRKEETEVLWTSNSIVVFCGTSGTYGTGSWPDGADLNLMPI

SEQ ID NO: 20864 - protein, 469 aa, synthetic construct
  REGION 1..469: note = neuraminidase__InfluenzaA__AEK28798
MNPNQKIITIGSVSLTISTICFFMQIAILITTVTLHFKQYEFNSPPNNQVMLCEPTIIERNITEIVYLTNTTIEKEICPKLAEYRNWSKPQCDITGFAPFSKDNSIRLSAGGDIWVTREPYVSCDPDKCYQFALGQGTTLNNVHSNNTVRDRTPYRTLLMNELGVPFHLGTKQVCIAWSSSSCHDGKAWLHVCITGDDKNATASFIYNGRLVDSVVSWSKEILRTQESECVCINGTCTVVMTDGNASGKADTKILFIEEGKIVHTSTLSGSAQHVEECSCYPRYPGVRCVCRDNWKGSNRPIVDINIKDHSIVSSYVCSGLVGDTPRKNDSSSSSHCSDPNNEEGGHGVKGWAFDDGNDVWMGRTISEKSRLGYETFKVIEGWSNPKSKLQINRQVIVDRGNRSGYSGIFSVEGKSCINRCFYVELIRGRKEETEVLWTSNSIVVFCGTSGTYGTGSWPDGADINLMPI

SEQ ID NO: 20865 - protein, 469 aa, synthetic construct
  REGION 1..469: note = neuraminidase__InfluenzaA__AEK28809
MNPNQKIITIGSVSLTISTICFFMQIAILITTVTVHFKQYEFNSPPNNQVMLCEPTIIERNITEIVYLTNTTIEKEICPKLAEYRNWSKPQCDITGFAPFSKDNSIRLSAGGDIWVTREPYVSCDPDKCYQFALGQGTTLNNVHSNNKVRDRTPYRTLLMNELGVPFHLGTKQVCIAWSSSSCHDGKAWLHVCITGDDKNATASFIYNGRLVDSVVSWSKEILRTQESECVCINGTCTVVMTDGSASGKADTKILFIEEGKIVHTSTLSGSAQHVEECSCYPRYPGVRCVCRDNWKGSNRPIVDINIKDHSIVSSYVCSGLVGDTPRKNDSSSSSHCLDPNNEEGGHGVKGWAFDDGNDVWMGRTISEKSRLGYETFKVIEGWSNPKSKLQINRQVIVDRGNRSGYSGIFSVEGKSCINRCFYVELIRGRKEETEVLWTSNSIVVFCGTSGTYGTGSWPDGADINLMPI

SEQ ID NO: 20866 - protein, 469 aa, synthetic construct
  REGION 1..469: note = neuraminidase__InfluenzaA__AEK28819
MNPNQKIITIGSVSLTISTICFFMQIAILITTVTLHFKQYEFNYPPNNQVMLCEPTIIERNITEIVYLTNTTIEKEICPKLAEYRNWSKPQCDITGFAPFSKDNSIRLSAGGDIWVTREPYVSCDPDKCYQFALGQGTTLNNVHSNNTVRERTPYRTLLMNELGVPFHLGTKQVCIAWSSSSCHDGKAWLHVCITGDDKNATASFIYNGRLVDSVVSWSKEILRTQESECVCINGTCTVVMTDGSASGKADTKILFIEEGKIVHTSTLSGSAQHVEECSCYPRYPGVRCVCRDNWKGSNRPIVDINIKDHSIVSSYVCSGLVGDTPRKNDSSSSSHCLDPNNEEGGHGVKGWAFDDGNDVWMGRTISEKSRLGYETFKVIEGWSNPKSKLQINRQVIVDRGNRSGYSGIFSVEGKSCINRCFYVELIRGRKEETEVLWTSNSIVVFCGTSGTYGTGSWPDGADINLMPI

SEQ ID NO: 20867 - protein, 469 aa, synthetic construct
  REGION 1..469: note = neuraminidase__InfluenzaA__AEK28830
MNPNQKIITIGSVSLTISTICFFMQIAILITTVTLHFKQYEFNSPPNNQVMLCEPTIIERNITEIVYLTNTTIEKEICPNLAEYRNWSKPQCDITGFAPFSKDNSIRLSAGGDIWVTREPYVSCDPDKCYQFALGQGTTLNNVHSNNTVRGRTPYRTLLMNELGVPFHLGTKQVCIAWSSSSCHDGKAWLHVCITGDDKNATASFIYNGRLVDSVVSWSKEILRTQESECVCINGTCTVVMTDGSASGKADTKILFIEEGKIVHTSTLSGSAQHVEECSCYPRYPGVRCVCRDNWKGSNRPIVDINIKDHSIVSSYVCSGLVGDTPRKNDSSSSSHCLDPNNEEGGHGVKGWAFDDGNDVWMGRTISEKSRLGYETFKVIEGWSNPKSKLQINRQVIVDRGNRSGYSGIFSVEGKSCINRCFYVELIRGRKEETEVLWTSNSIVVFCGTSGTYGTGSWPDGADINLMPI

SEQ ID NO: 20868 - protein, 469 aa, synthetic construct
  REGION 1..469: note = neuraminidase__InfluenzaA__AEK28841
MNPNQKIITIGSVSLTISTICFFMQIAILITTVTLHFKQYEFNSPPNNQVMLCEPTIIERNITEIVYLTNTTIEKEICPKLAEYRNWSKPQCDITGFAPFSKDNSIRLSAGGDIWVTREPYVSCDPDKCYQFALGQGTTVNNVHSNNTVRGRTPYRTLLMNELGVPFHLGTKQVCIAWSSSSCHDGKAWLHVCITGDDKNATASFIYNGRLVDSVVSWSKEILRTQESECVCINGTCTVVMTDGSASGKADTKILFIEEGKIVHTSTLSGSAQHVEECSCYPRYPGVRCVCRDNWKGSNRPIVDINIKDHSIVSSYVCSGLVGDTPRKNDSSSSSHCLDPNNEEGGHGVKGWAFDDGNDVWMGRTISEKSRLGYETFKVIEGWSNHKSKLQINRQVIVDRGNRSGYSGIFSVEGKSCINRCFYVELIRGRKEETEVLWTSNSIVVFCGTSGTYGTGSWPDGADLNLMPI

SEQ ID NO: 20869 - protein, 469 aa, synthetic construct
  REGION 1..469: note = neuraminidase__InfluenzaA__AEK28852
MNPNQKIITIGSVSLTISTICFFMQIAILITTVTLHFKQYEFNSPPNNQVMLCEPTIIEKNITEIVYLTNTTIEKEICPKLAEYRNWSKPQCDITGFAPFSKDNSIRLSAGGDIWVTREPYVSCDPDKCYQFALGQGTTLNNVHSNNRVRDRTPYRTLLMNELGVPFHLGTKQVCIAWSSSSCHDGKAWLHVCITGDDKNATASFIYNGRLVDSVVSWSKEILRTQESECVCINGTCTVVMTDGSASGKADTKILFIEEGKIVHTSTLSGSAQHVEECSCYPRYPGVRCVCRDNWKGSNRPIVDINIKDHSIVSSYVCSGLVGDTPRKNDSSSSSHCLDPNNEEGGHGVKGWAFDDGNDVWMGRTISEKSRLGYETFKVIEGWSNPKSKLQINRQVIVDRGNRSGYSGIFSVEGKSCINRCFYVELIRGRKEETEVLWTSNSIVVFCGTSGTYGTGSWPDGADINLMPI

SEQ ID NO: 20870 - protein, 469 aa, synthetic construct; identical to SEQ ID NO: 18484
  REGION 1..469: note = neuraminidase__InfluenzaA__AEK28863

SEQ ID NO: 20871 - protein, 469 aa, synthetic construct
  REGION 1..469: note = neuraminidase__InfluenzaA__AEK28874
MNPNQKIITIGSVSLTISTICFFMQIAILITTVTLHFKQYEFNSPPNNQVMLCEPTIIERNITEIVYLTNTTIEKEICPKLAEYRNWSKPQCDITGFAPFSKDNSIRLSAGGDIWVTREPYVSCDPDKCYQFALGQGTTLNNVHSNNKVRDRTPYRTLLMNELGVPFHLGTKQVCIAWSSSSCHDGKAWLHVCITGDDKNATASFIYNGRLVDSVVSWSKEILRTQESECVCINGTCTVVMTDGSASGKADTKILFIEEGKIVHTSTLSGSAQHVEECSCYPRYPGVRCVCRDNWKGSNRPIVDINIKDHSIVSSYVCSGLVGDTPRKNDSSSSSHCLDPNNEEGGHGVKGWAFDDGNDVWMGRTISEKSRLGYETFKVIEGWSNHKSKLQINRQVIVDRGNRSGYSGIFSVEGKSCINRCFYVELIRGRKEETEVLWTSNSIVVFCGTSGTYGTGSWPDGADLNLMPI

SEQ ID NO: 20872 - protein, 469 aa, synthetic construct
  REGION 1..469: note = neuraminidase__InfluenzaA__AEK28885
MNPNQKIITIGSVSLTISTICFFMQIAILITTVTLHFKQYEFNLPPNNQVMLCEPTIIERNITEIVYLTNTTIEKEICPKLAEYRNWSKPQCDITGFAPFSKDNSIRLSAGGDIWVTREPYVSCDPDKCYQFALGQGTTLNNVHSNNTVRDRTPYRTLLMNELGVPFHLGTKQVCIAWSSSSCHDGKAWLHVCITGDDKNATASFIYNGRLVDSVVSWSKEILRTQESECVCINGTCTVVMTDGSASGKADTKILFIEEGKIVHTSTLSGSAQHVEECSCYPRYPGVRCVCRDNWKGSNRPIVDINIKDHSIVSSYVCSGLVGDTPRKNDSSSSSHCLDPNNEEGGHGVKGWAFDDGNDVWMGRTISEKSRLGYETFKVIEGWSNPKSKLQINRQVIVDRGNRSGYSGIFSVEGKSCINRCFYVELIRGRKEETEVLWTSNSIVVFCGTSGTYGTGSWPDGADINLMPI

SEQ ID NO: 20873 - protein, 469 aa, synthetic construct; identical to SEQ ID NO: 18609
  REGION 1..469: note = neuraminidase__InfluenzaA__AEK28896

SEQ ID NO: 20874 - protein, 469 aa, synthetic construct
  REGION 1..469: note = neuraminidase__InfluenzaA__AEK28907
MNPNQKIITIGSVSLTISTICFFMQIAILITTVTLHFKQYEFNSPPNNQVMLCEPTIIEKNITEIVYLTNTTIEKEICPRLAEYRNWSKPQCDITGFAPFSKDNSIRLSAGGDIWVTREPYVSCDPDKCYQFALGQGTTLNNVHSNNTVRDRTPYRTLLMNELGVPFHLGTKQVCIAWSSSSCHDGKAWLHVCITGDDKNATASFIYNGRLVDSVVSWSKEILRTQESECVCINGTCTVVMTDGSASGKADTKILFIEEGKIVHTSTLSGSAQHVEECSCYPRYPGVRCVCRDNWKGSNRPIVDINIKDHSIVSSYVCSGLVGDTPRKNDSSSSSHCLDPNNEEGGHGVKGWAFDDGNDVWMGRTISEKSRLGYETFKVIEGWSNPKSKLQINRQVIVDRGNRSGYSGIFSVEGKSCINRCFYVELIRGRKEETEVLWTSNSIVVFCGTSGTYGTGSWPDGADINLMPI

SEQ ID NO: 20875 - protein, 469 aa, synthetic construct; identical to SEQ ID NO: 16599
  REGION 1..469: note = neuraminidase__InfluenzaA__AEK28918

SEQ ID NO: 20876 - protein, 469 aa, synthetic construct; identical to SEQ ID NO: 17905
  REGION 1..469: note = neuraminidase__InfluenzaA__AEK28929

SEQ ID NO: 20877 - protein, 469 aa, synthetic construct
  REGION 1..469: note = neuraminidase__InfluenzaA__AEK28951
MNPNQKIITIGSVSLTISTICFFMQIAILITTVTLHFKQYEFNSPPNNQVMLCEPTIIERNITEIVYLTNTTIEKEICPKLAEYRNWSKPQCDITGFAPFSKDNSIRLSAGGDIWVTREPYVSCDPDKCYQFALGQGTTLNNVHSNNTVRDRTPYRTLLMNELGVPFHLGTKQVCIAWSSSSCHDGKAWLHVCITGDDKNATASFIYNGRLVDSVVSWSKEILRTQESECVCINGTCTVVMTDGSASGKADTKILFIEEGKIVHTSTLSGSAQHVEECSCYPRYPGVRCVCRDNWKGSNRPIVDINIKDHSIVSSYVCSGLVGDTPRKNDSSSSSHCLDPNNEEGGHGVKGWAFDDGNDVWMGRTISEKSRSGYETFKVIEGWSNHKSKLQINRQVIVDRGNRSGYSGIFSVEGKSCINRCFYVELIRGRKEETEALWTSNSIVVFCGTSGTYGTGSWPDGADLNLMPI

SEQ ID NO: 20878 - protein, 469 aa, synthetic construct
  REGION 1..469: note = neuraminidase__InfluenzaA__AEK28962
MNPNQKIITIGSVSLTISTICFFMQIAILITTVTLHFKQYEFNSPPNNQVMLCEPTIIERNITEIVYPTNTTIEKEICPKLAEYRNWSKPQCDITGFAPFSKDNSIRLSAGGDIWVTREPYVSCDPDKCYQFALGQGTTLNNVHSNNTVRDRTPYRTLLMNELGVPFHLGTKQVCIAWSSSSCHDGKAWLHVCITGDDKNATASFIYNGRLVDSVVSWSKEILRTQESECVCINGTCTVVMTDGSASGKADTKILFIEEGKIVHTSTLSGSAQHVEECSCYPRYPGVRCVCRDNWKGSNRPIVDINIKDHSIVSSYVCSGLVGDTPRKNDSSSSSHCLDPNNEEGGHGVKGWAFDDGNDVWMGRTISEKSRLGYETFKVIEGWSNPKSKLQINRQVIVDRGNRSGYSGIFSVEGKSCINRCFYVELIRGRKEETEVLWTSNSIVVFCGTSGTYGTGSWPDGADINLMPI

SEQ ID NO: 20879 - protein, 469 aa, synthetic construct
  REGION 1..469: note = neuraminidase__InfluenzaA__AEK28973
MNPNQKIITIGSVSLTISTICFFMQIAILITTVTLHFKQYEFNSPPNNQVMLCEPTIIERNITEIVYLTNTTIEKEICPKLAEYRNWSKPQCDITGFAPFSKDNSIRLSAGGDIWVTREPYVSCDPDKCYQFALGQGTTLNNVHSNNTVRDRTPYRTLLMNELGVPFHLGTKQVCIAWSSSSCHDGKAWLHVCITGDDKNATASFIYNGRLVDSVVSWSKEILRTQESECVCINGTCTVVMTDGSASGKADTKILFIEEGKIVHTSTLSGSAQHVEECSCYPRYPGVRCVCRDNWKGSNRPIVDINIKDHSIVSSYVCSGLVGDTPRKNDSSSSSHCLDPNNEEGGHGVKGWAFDDGNDVWMGRTISEKSRLGYETFKVIEGWSNHKSKLQINRQVIVDRGNRSGYSGIFSVEGKSCINRCFYVELIRGRKEETEVLWTSNSIVVFCGTSGTYGTGSWPDGADLNFMPI

SEQ ID NO: 20880 - protein, 469 aa, synthetic construct
  REGION 1..469: note = neuraminidase__InfluenzaA__AEK28984
MNPNQKIITIGSVSLTISTICFFMQIAILITTVTLHFKQYEFNSPPNNQVMLCEPTIIERNITEIVYLTNTTIEKEICPKLAEYRNWSKPQCDITGFAPFSKDNSVRLSAGGDIWVTREPYVSCDPDKCYQFALGQGTTLNNVHSNNTVRDRTPYRTLLMNELGVPFHLGTKQVCIAWSSSSCHDGKAWLHVCITGDDKNATASFIYNGRLVDSVVSWSKEILRTQESECVCINGTCTVVMTDGSASGKADTKILFIEEGKIVHTSTLSGSAQHVEECSCYPRYPGVRCVCRDNWKGSNRPIVDINIKDHSIVSSYVCSGLVGDTPRKNDSSSSSHCLDPNNEEGGHGVKGWAFDDGNDVWMGRTISEKSRLGYETFKVIEGWSNPKSKLQINRQVIVDRGNRSGYSGIFSVEGKSCINRCFYVELIRGRKEETEVLWTSNSIVVFCGTSGTYGTGSWPDGADINLMPI

SEQ ID NO: 20881 - protein, 469 aa, synthetic construct; identical to SEQ ID NO: 20880
  REGION 1..469: note = neuraminidase__InfluenzaA__AEK28995

SEQ ID NO: 20882 - protein, 469 aa, synthetic construct; identical to SEQ ID NO: 19518
  REGION 1..469: note = neuraminidase__InfluenzaA__AEK29006

SEQ ID NO: 20883 - protein, 469 aa, synthetic construct
  REGION 1..469: note = neuraminidase__InfluenzaA__AEK29028
MNPNQKIITIGSVSLTISTICFFMQIAILITTVTLHFKQYEFNSPPNNQVMLCEPTIIERNITEIVYLTNTTIEKEICPKLAEYRNWSKPQCDITGFAPFSKDNSIRLSAGGDIWVTREPYVSCDPNKCYQFALGQGTTLNNVHSNNTVRDRTPYRTLLMNELGVPFHLGTKQVCIAWSSSSCHDGKAWLHVCITGDDKNATASFIYNGRLVDSVVSWSKEILRTQESECVCINGTCTVVMTDGSASGKADTKILFIEEGKIVHTSTLSGSAQHVEECSCYPRYPGVRCVCRDNWKGSNRPIVDINMKDHSIVSSYVCSGLVGDTPRKNDSSSSSHCFDPNDEEGGHGVKGWAFDDGNDVWMGRTISEKSRLGYETFKVIEGWSNPKSKLQINRQVIVDRGNRSGYSGIFSVEGKSCINRCFYVELIRGRKEETEVLWTSNSIVVFCGTSGTYGTGSWPDGADINLMPI

SEQ ID NO: 20884 - protein, 469 aa, synthetic construct
  REGION 1..469: note = neuraminidase__InfluenzaA__AEK29050
MNPNQKIITIGSVSLTISTICFFMQIAILITTVTLHFKQYEFNPPPNNQVMLCEPTIIERNITEIVYLTNTTIEKEICPKLAEYRNWSKPQCDITGFAPFSKDNSIRLSAGGDIWVTREPYVSCDPDKCYQFALGQGTTLNNVHSNNTVRDRTPYRTLLMNELGVPFHLGTKQVCIAWSSSSCHDGKAWLHVCITGDDKNATASFIYNGRLVDSVVSWSKEILRTQESECVCINGTCTVVMTDGSASGKADTKILFIEEGKIVHTSTLSGSAQHVEECSCYPRYPGVRCVCRDNWKGSNRPIVDINIKDHSIVSSYVCSGLVGDTPRKNDSSSSSHCLDPNNEEGGHGVKGWAFDDGNDVWMGRTINETSRLGYETFKVIEGWSNPKSKLQINRQVIVDRGNRSGYSGIFSVEGKSCINRCFYVELIRGRKEETEVLWTSNSIVVFCGTSGTYGTGSWPDGADLNLMPI

SEQ ID NO: 20885 - protein, 469 aa, synthetic construct
  REGION 1..469: note = neuraminidase__InfluenzaA__AEK29061
MNPNQKIITIGSVSLTISTICFFIQIAILITTVTLHFKQYEFNSPPNNQVMLCEPTIIEKNITEIVYLTNTTIEKEICPKLAEYRNWSKPQCDITGFAPFSKDNSIRLSAGGDIWVTREPYVSCDPDKCYQFALGQGTTLNNVHSNNIVRDRTPYRTLLMNELGVPFHLGTKQVCIAWSSSSCHDGKAWLHVCITGDDKNATASFIYNGRLVDSVVSWSKEILRTQESECVCINGTCTVVMTDGSASGKADTKILFIEEGKIVHTSTLSGSAQHVEECSCYPRYPGVRCVCRDNWKGSNRPIVDINIKDHSIVSSYVCSGLVGDTPRKNDSSSSSHCLDPNNEEGGHGVKGWAFDDGNDVWMGRTINETSRLGYETFKVIEGWSNPKSKLQINRQVIVDRGNRSGYSGIFSVEGKSCINRCFYVELIRGRKEETEVLWTSNSIVVFCGTSGTYGTGSWPDGADLNLMPI

SEQ ID NO: 20886 - protein, 469 aa, synthetic construct
  REGION 1..469: note = neuraminidase__InfluenzaA__AEK29083
MNPNQKIITIGSVSLTISTICFFIQIAILITTVTLHFKQYEFNSPPNNQVMLCEPTIIEKNITEIVYLTNTTIEKEICPKLAEYRNWSKPQCDITGFAPFSKDNSIRLSAGGDIWVTREPYVSCDPDKCYQFALGQGTTLNNVHSNNTVRDRTPYRTLLMNELGVPFHLGTKQVCIAWSSSSCHDGKAWLHVCITGDDKNATASFIYNGRLVDSVVSWSKEILRTQESECVCINGTCTVVMTDGSASGKADTKILFIEEGKIVHTSTLSGSAQHVEECSCYPRYPGVRCVCRDNWKGSNRPIVDINIKDHSIVSSYVCSGLVGDTPRKNDSSSSSHCLDPNNEEGGHGVKGWAFDDGNDVWMGRTINETSRLGYETFKVIEGWSNPKSKLQINRQVIVDRGNRSGYSGIFSVEGKSCINRCFYVELIRGRKEETEVLWTSNSIVVFCGTSGTYGTGSWPDGADLNLMPI

SEQ ID NO: 20887 - protein, 469 aa, synthetic construct; identical to SEQ ID NO: 19410
  REGION 1..469: note = neuraminidase__InfluenzaA__AEK29094

SEQ ID NO: 20888 - protein, 469 aa, synthetic construct; identical to SEQ ID NO: 19518
  REGION 1..469: note = neuraminidase__InfluenzaA__AEK29127

SEQ ID NO: 20889 - protein, 469 aa, synthetic construct; identical to SEQ ID NO: 19518
  REGION 1..469: note = neuraminidase__InfluenzaA__AEK29138

SEQ ID NO: 20890 - protein, 469 aa, synthetic construct
  REGION 1..469: note = neuraminidase__InfluenzaA__AEK29182
MNPNQKIITIGSVSLTISTICFFMQIAILITTVTLHFKQYEFNSPPNNQVMLCEPTIIERNITEIVYLTNTTIEKEICPKLAEYRNWSKPQCDITGFAPFSKDNSIRLSAGGDIWVTREPYVSCDPDKCYQFALGQGTTLNNVHSNNTVRDRTPYRTLLMNELGVPFHLGTKQVCIAWSSSSCHDGKAWLHVCITGDDKNATASFIYNGRLVDSVVSWSKEILRTQESECVCINGTCTVVMTDGSASGKADTKILFIEEGKIVHTSTLSGSAQHVEECSCYPRYPGVRCVCRDNWKGSNRPIVDINIKDHSIVSSYVCSGLVGDTPRKNDSSSSSHCLDPNNEEGGHGVKGWAFDDGNDVWMGRTINETSRLGYETFKVIEGWSNPKSKLQVNRQVIVDRGNRSGYSGIFSVEGKSCINRCFYVELIRGRKEETEVLWTSNSIVVFCGTSGTYGTGSWPDGADLNLMPI

SEQ ID NO: 20891 - protein, 469 aa, synthetic construct
  REGION 1..469: note = neuraminidase__InfluenzaA__AEK29204
MNPNQKIITIGSVSLTISTICFFMQIAILITTVTLHFKQYEFNSPPNNQVMLCEPTIIERNITEIVYLTNTTIEKEICPKLAEYRNWSKPQCDITGFAPFSKDNSIRLSAGGDIWVTREPYVSCDPDKCYQFALGQGTTLNNVHSNNTVRDRTPYRTLLMNELGVPFHLGTKQVCIAWSSSSCHDGKAWLHVCITGDDKNATASFIYNGRLVDSVVSWSKEILRTQESECVCINGTCTVVMTDGSASGKANTKVLFIEEGKIVHTSTLSGSAQHVEECSCYPRYPGVRCVCRDNWKGSNRPIVDINIKDHSIVSSYVCSGLVGDTPRKNDSSSSSHCLDPNNEEGGHGVKGWAFDDGNDVWMGRTINETSRLGYETFKVIEGWSNPKSKLQINRQVIVDRGNRSGYSGIFSVEGKSCINRCFYVELIRGRKEETEVLWTSNSIVVFCGTSGTYGTGSWPDGADLNLMPI

SEQ ID NO: 20892 - protein, 469 aa, synthetic construct
  REGION 1..469: note = neuraminidase__InfluenzaA__AEK29215
MNPNQKIITIGSVSLTISTICFFMQIAILITTVTLHFKQYEFNSPPNNQVMLCEPTIIERNITEIVYLTNTTIEKEICPKLAEYRNWSKPQCDITGFAPFSKDNSIRLSAGGDIWVTREPYVSCDPDKCYQFALGQGTTLNNVHSNNTVRNRTPYRTLLMNELGVPFHLGTKQVCIAWSSSSCHDGKAWLHVCITGDDKNATASFIYNGRLVDSVVSWSKEILRTQESECVCINGTCTVVMTDGSASGKADTKILFIEEGKIVHTSTLSGSAQHVEECSCYPRYPGVRCVCRDNWKGSNRPIVDINIKDHSIVSSYVCSGLVGDTPRKNDSSSSSHCLDPNNEEGGHGVKGWAFDDGNDVWMGRTINETSRLGYETFKVIEGWSNPKSKLQINRQVIVDRGDRSGYSGIFSVEGKSCINRCFYVELIRGRKEETEVLWTSNSIVVFCGTSGTYGTGSWPDGADLNLMPI

SEQ ID NO: 20893 - protein, 469 aa, synthetic construct; identical to SEQ ID NO: 20891
  REGION 1..469: note = neuraminidase__InfluenzaA__AEK29237

SEQ ID NO: 20894 - protein, 469 aa, synthetic construct; identical to SEQ ID NO: 19518
  REGION 1..469: note = neuraminidase__InfluenzaA__AEK29248

SEQ ID NO: 20895 - protein, 469 aa, synthetic construct; identical to SEQ ID NO: 19518
  REGION 1..469: note = neuraminidase__InfluenzaA__AEK29259

SEQ ID NO: 20896 - protein, 469 aa, synthetic construct; identical to SEQ ID NO: 19518
  REGION 1..469: note = neuraminidase__InfluenzaA__AEK29270

SEQ ID NO: 20897 - protein, 470 aa, synthetic construct
  REGION 1..470: note = neuraminidase__InfluenzaA__AEK59839
MNPNQKIITIGSISIAIGIISLMLQIGNIISIWASHSIQTGSQNHTGICNQRIITYENSTWVNHTYVNINNTNVVAGKDKTSVTLAGNSSLCSISGWAIYTKDNSIRIGSKGDVFVIREPFISCSHLECRTFFLTQGALLNDKHSNGTVKDRSPYRALMSCPLGEAPSPYNSKFESVAWSASACHDGLGWLTIGISGPDNGAVAVLKYNGIITGTIKSWKKQILRTQESECVCMNGSCFTIMTDGPSNGAASYKIFKIEKGKVTKSIELNAPNFHYEECSCYPDTGIVMCVCRDNWHGSNRPWVSFNQNLDYQIGYICSGVFGDNPRPKDGEGSCNPVTVDGADGVKGFSYKYDNGVWIGRTKSNRLRKGFEMIWDPNGWTNTDSDFSVKQDVVAITDWSGYSGSFVQHPELTGLDCIRPCFWVELVRGLPRENTTIWTSGSSISFCGVNSDTANWSWPDGAELPFTIDK

SEQ ID NO: 20898 - protein, 469 aa, synthetic construct
  REGION 1..469: note = neuraminidase__InfluenzaA__AEK98375
MNPNQKIITIGSVSLTISTICFFMQIAILITTVTLHFKQYEFNSPPNNQVMLCEPTIIERNITEIVYLTNTTIEKEICPKLAEYRNWSKPQCDITGFAPFSKDNSIRLSAGGDIWVTREPYVSCDPDKCYQFALGQGTTLNNVHSNDTVRDRTPYRTLLMNELGVPFHLGTKQVCIAWSSSSCHDGKAWLHVCITGDDKNATASFIYNGRLVDSIVSWSKEILRTQESECVCINGTCTVVMTDGSASGEADTKILFIEEGKIVHTSTLSGSAQHVEECSCYPRYPGVRCVCRDNWKGSNRPIVDINIKDHSIVSSYVCSGLVGDTPRKNDSSSSSHCLDPNNEEGGHGVKGWAFDDGNDVWMGRTISEKSRLGYETFKVIEGWSNPKSKLQTNRQVIVDRGNRSGYSGIFSVEGKSCINRCFYVELIRGRKEETEVLWTSNSIVVFCGTSGTYGTGSWPDGADINLMPI

SEQ ID NO: 20899 - protein, 469 aa, synthetic construct; identical to SEQ ID NO: 16599
  REGION 1..469: note = neuraminidase__InfluenzaA__AEK98377

SEQ ID NO: 20900 - protein, 469 aa, synthetic construct; identical to SEQ ID NO: 16041
  REGION 1..469: note = neuraminidase__InfluenzaA__AEK98379

SEQ ID NO: 20901 - protein, 469 aa, synthetic construct
  REGION 1..469: note = neuraminidase__InfluenzaA__AEK98381
MNPNQKIITIGSVSLTISTICFFMQIAILITTVTLHFKQYEFNSPPNNQVMLCEPTIIERNITEIVYLTNTTIEKEICPKLAEYRNWSKPQCDITGFAPFSKDNSIRLSAGGDIWVTREPYVSCDPDKCYQFALGQGTTLNNVHSNDTVRDRTPYRTLLMNELGVPFHLGTKQVCIAWSSSSCHDGEAWLHVCITGDDKNATASFIYNGRLVDSIVSWSKEILRTQESECVCINGTCTVVMTDGSASGEADTKILFIEEGKIVHTSTLSGSAQHVEECSCYPRYPGVRCVCRDNWKGSNRPIVDINIKDHSIVSSYVCSGLVGDTPRKNDSSSSSHCLDPNNEEGGHGVKGWAFDDGNDVWMGRTISEKSRLGYETFKVIEGWSNPKSKLQINRQVIVDRGNRSGYSGIFSVEGKSCINRCFYVELIRGRKEETEVLWTSNSIVVFCGTSGTYGTGSWPDGADINLMPI

SEQ ID NO: 20902 - protein, 469 aa, synthetic construct; identical to SEQ ID NO: 16041
  REGION 1..469: note = neuraminidase__InfluenzaA__AEK98383

SEQ ID NO: 20903 - protein, 469 aa, synthetic construct; identical to SEQ ID NO: 16599
  REGION 1..469: note = neuraminidase__InfluenzaA__AEK98385

SEQ ID NO: 20904 - protein, 469 aa, synthetic construct
  REGION 1..469: note = neuraminidase__InfluenzaA__AEK98387
MNPNQKIITIGSVSLTISTICFFMQIAILITTVTLHFKQYEFNSPPNNQVMLCEPTIIERNITEIVYLTNTTIEKEICPKLAEYRNWSKPQCDITGFAPFSKDNSIRLSAGGDIWVTREPYVSCDPDKCYQFALGQGTTLNNVHSNNTVRDRTPYRTLLMNELGVPFHLGTKQVCIAWSSSSCHDGKAWLHVCITGDDKNATASFIYNGRLIDSVVSWSKEILRTQESECVCINGTCTVVMTDGSASGKADTKILFIEEGKIVHTSTLSGSAQHVEECSCYPRYPGVRCVCRDNWKGSNRPIVDINIKDHSIVSSYVCSGLVGDTPRKNDSSSSSHCLDPNNEEGGHGVKGWAFDDGNDVWMGRTINETSRLGYETFKVIEGWSNPKSKLQINRQVIVDRGNRSGYSGIFSVEGKSCINRCFYVELIRGRKEETEVLWTSNSIVVFCGTSGTYGTGSWPDGADLNLMPI

SEQ ID NO: 20905 - protein, 469 aa, synthetic construct; identical to SEQ ID NO: 16599
  REGION 1..469: note = neuraminidase__InfluenzaA__AEK98389

SEQ ID NO: 20906 - protein, 469 aa, synthetic construct
  REGION 1..469: note = neuraminidase__InfluenzaA__AEK98393
MNPNQKIITIGSVSLTISTICFFMQIAILITTVTLHFKQYEFNSPPNNQVMLCEPTIIERNITEIVYLTNTTIEKEICPKLAEYRNWSKPQCDITGFAPFSKDNSIRLSAGGDIWVTREPYVSCDPDKCYQFALGQGTTLNNVHSNNTVRDRTPYRTLLMNELGVPFHLGTKQVCIAWSSSSCHDGKAWLHVCITGDDKNATASFIYNGRLVDSVVSWSKEILRTQESECVCINGTCTVVMTDGSASGKADTKILFIEEGKIVHTSTLSGSAQHVEECSCYPRYPGVRCVCRDNWKGSNRPIVDINIKDHSIASSYVCSGLVGDTPRKNDSSSSSHCLDPNNEEGGHGVKGWAFDDGNDVWMGRTINETSRLGYETFKVIEGWSNPKSKLQINRQVIVDRGNRSGYSGIFSVEGKSCINRCFYVELIRGRKEETEVLWTSNSIVVFCGTSGTYGTGSWPDGADLNLMPI

SEQ ID NO: 20907 - protein, 469 aa, synthetic construct; identical to SEQ ID NO: 19518
  REGION 1..469: note = neuraminidase__InfluenzaA__AEK98395

SEQ ID NO: 20908 - protein, 469 aa, synthetic construct
  REGION 1..469: note = neuraminidase__InfluenzaA__AEK98397
MNPNQKIITIGSVSLTISTICFFMQIAILITTVTLHFKQYEFNSPPNNQVMLCEPTIIERNITEIVYLTNTTIEKEICPKLAEYRNWSKPQCDITGFAPFSKDNSIRLSAGGDIWVTREPYVSCDPNKCYQFALGQGTTLNNVHSNNTVRDRTPYRTLLMNELGVPFHLGTKQVCIAWSSSSCHDGKAWLHVCITGDDKNATASFIYNGRLVDSVVSWSKEILRTQESECVCINGTCTVVMTDGSASGKADTKILFIEEGKIVHTSTLSGSAQHVEECSCYPRYPGVRCVCRDNWKGSNRPIVDINMKDHSIVSSYVCSGLVGDTPRKNDSSSSSHCLDPNNEEGGHGVKGWAFDDGNDVWMGRTISEKSRLGYETFKVIEGWSNPKSKLQINRQVIVDRGNRSGYSGIFSVEGKSCINRCFYVELIRGRKEETEVLWTSNSIVVFCGTSGTYGTGSWPDGADINFMPI

SEQ ID NO: 20909 - protein, 469 aa, synthetic construct; identical to SEQ ID NO: 16599
  REGION 1..469: note = neuraminidase__InfluenzaA__AEK98399

SEQ ID NO: 20910 - protein, 469 aa, synthetic construct; identical to SEQ ID NO: 16512
  REGION 1..469: note = neuraminidase__InfluenzaA__AEK98403

SEQ ID NO: 20911 - protein, 469 aa, synthetic construct
  REGION 1..469: note = neuraminidase__InfluenzaA__AEK98405
MNPNQKIITIGSVSLTISTICFFMQIAILITTVTLHFKQYEFNSPPNNQVMLCEPTIIERNITEIVYLTNTTIEKEICPKLAEYRNWSKPQCDITGFAPFSKDNSIRLSAGGDIWVTREPYVSCDPDKCYQFALGQGTTLNNVHSNNTVRDRTPYRTLLMNELGVPFHLGTKQVCIAWSSSSCHDGKAWLHVCITGDDKNATASFIYNGRLVDSIVSWSKEILRTQESECVCINGTCTVVMTDGSASGKADTKILFIEEGKIVHTSTLSGSAQHVEECSCYPRYPGVRCVCRDNWKGSNRPIVDINIKDHSIVSSYVCSGLVGDTPRKNDSSSSSHCLDPNNEEGGHGVKGWAFDDGNDVWMGRTISEKSRLGYETFKVIEGWSNPKSKLQINRQVIVDRDNRSGYSGIFSVEGKSCINRCFYVELIRGRKEETEVLWTSNSIVVFCGTSGTYGTGSWPDGADINLMPI

SEQ ID NO: 20912 - protein, 469 aa, synthetic construct
  REGION 1..469: note = neuraminidase__InfluenzaA__AEK98407
MNPNQKIITIGSVSLTISTICFFMQIAILITTVTLHFKQYEFNSPPNNQVMLCEPTIIERNITEIVYLTNTTIEKEICPKLAEYRNWSKPQCDITGFAPFSKDNSIRLSAGGDIWVTREPYVSCDPDKCYQFALGQGTTLNNVHSNNTVRVRTPYRTLLMNELGVPFHLGTKQVCIAWSSSSCHDGKAWLHVCITGDDKNATASFIYNGRLVDSIVSWSKEILRTQESECVCINGTCTVVMTDGSASGKADTKILFIEEGKIVHTSTLSGSAQHVEECSCYPRYPGVRCVCRDNWKGSNRPIVDINIKDHSIVSSYVCSGLVGDTPRKNDSSSSSHCLDPNNEEGGHGVKGWAFDDGNDVWMGRTISEKSRLGYETFKVIEGWSNPKSKLQINRQVIVDRDNRSGYSGIFSVEGKSCINRCFYVELIRGRKEETEVLWTSNSIVVFCGTSGTYGTGSWPDGADINLMPI

SEQ ID NO: 20913 - protein, 469 aa, synthetic construct; identical to SEQ ID NO: 14327
  REGION 1..469: note = neuraminidase__InfluenzaA__AEL11690

SEQ ID NO: 20914 - protein, 469 aa, synthetic construct; identical to SEQ ID NO: 19013
  REGION 1..469: note = neuraminidase__InfluenzaA__AEL89300

SEQ ID NO: 20915 - protein, 469 aa, synthetic construct; identical to SEQ ID NO: 19013
  REGION 1..469: note = neuraminidase__InfluenzaA__AEL89310

SEQ ID NO: 20916 - protein, 469 aa, synthetic construct; identical to SEQ ID NO: 19013
  REGION 1..469: note = neuraminidase__InfluenzaA__AEL89320

SEQ ID NO: 20917 - protein, 469 aa, synthetic construct; identical to SEQ ID NO: 19013
  REGION 1..469: note = neuraminidase__InfluenzaA__AEL89330

SEQ ID NO: 20918 - protein, 469 aa, synthetic construct; identical to SEQ ID NO: 19013
  REGION 1..469: note = neuraminidase__InfluenzaA__AEL89340

SEQ ID NO: 20919 - protein, 469 aa, synthetic construct; identical to SEQ ID NO: 19013
  REGION 1..469: note = neuraminidase__InfluenzaA__AEL89350

SEQ ID NO: 20920 - protein, 469 aa, synthetic construct; identical to SEQ ID NO: 19013
  REGION 1..469: note = neuraminidase__InfluenzaA__AEL89360

SEQ ID NO: 20921 - protein, 469 aa, synthetic construct; identical to SEQ ID NO: 19013
  REGION 1..469: note = neuraminidase__InfluenzaA__AEL89370

SEQ ID NO: 20922 - protein, 469 aa, synthetic construct; identical to SEQ ID NO: 19013
  REGION 1..469: note = neuraminidase__InfluenzaA__AEL89394

SEQ ID NO: 20923 - protein, 469 aa, synthetic construct; identical to SEQ ID NO: 19013
  REGION 1..469: note = neuraminidase__InfluenzaA__AEL89404

SEQ ID NO: 20924 - protein, 469 aa, synthetic construct; identical to SEQ ID NO: 19013
  REGION 1..469: note = neuraminidase__InfluenzaA__AEL89414

SEQ ID NO: 20925 - protein, 469 aa, synthetic construct; identical to SEQ ID NO: 19013
  REGION 1..469: note = neuraminidase__InfluenzaA__AEL89424

SEQ ID NO: 20926 - protein, 469 aa, synthetic construct; identical to SEQ ID NO: 19013
  REGION 1..469: note = neuraminidase__InfluenzaA__AEL89434

SEQ ID NO: 20927 - protein, 469 aa, synthetic construct; identical to SEQ ID NO: 19013
  REGION 1..469: note = neuraminidase__InfluenzaA__AEL89444

SEQ ID NO: 20928 - protein, 469 aa, synthetic construct; identical to SEQ ID NO: 19013
  REGION 1..469: note = neuraminidase__InfluenzaA__AEL89454

SEQ ID NO: 20929 - protein, 469 aa, synthetic construct; identical to SEQ ID NO: 19013
  REGION 1..469: note = neuraminidase__InfluenzaA__AEL89464

SEQ ID NO: 20930 - protein, 469 aa, synthetic construct; identical to SEQ ID NO: 19013
  REGION 1..469: note = neuraminidase__InfluenzaA__AEL89474

SEQ ID NO: 20931 - protein, 469 aa, synthetic construct
  REGION 1..469: note = neuraminidase__InfluenzaA__AEL89484
MNPNQKIITIGSVCMTIGMANLMLQIGNIISIWISHSIQLGNQNQIETCNQSVITYENNTWVNQTYVNISNTNFAAGQSVVSVKLAGNSSLCPVSGWAIYSKDNSIRIGSKGDVFVIREPFISCSPLECRTFFLTQGALLNDKHSNGTIKDRSPYRTLMSCPIGEVPSPYNSRFESVAWSASACHDGINWLTIGISGPDNGAVAVLKYNGIITDTIKSWRNNILRTQESECACVNGSCFTVMTDGPSDGQASYKIFRIEKGKIVKSVEINAPNYHYEECSCYPDSSEITCVCRDNWHGSNRPWVSFNQNLEYQIGYICSGIFGDNPRPNDKTGSCGPVSSNGANGVKGFSFKYGNGVWIGRTKSISSRNGFEMIWDPNGWTGTDNNFSIKQDIVGINEWSGYSGSFVQHPELTGLDCIRPCFWVELIRGRPKENTIWTSGSSISFCGVNSDTVGWSWPDGAELPFTIDK

SEQ ID NO: 20932 - protein, 469 aa, synthetic construct; identical to SEQ ID NO: 20802
  REGION 1..469: note = neuraminidase__InfluenzaA__AEL89494

SEQ ID NO: 20933 - protein, 469 aa, synthetic construct; identical to SEQ ID NO: 20808
  REGION 1..469: note = neuraminidase__InfluenzaA__AEL89514

SEQ ID NO: 20934 - protein, 469 aa, synthetic construct; identical to SEQ ID NO: 20786
  REGION 1..469: note = neuraminidase__InfluenzaA__AEL89524

SEQ ID NO: 20935 - protein, 469 aa, synthetic construct
  REGION 1..469: note = neuraminidase__InfluenzaA__AEL89534
MNPNQKIITIGSVCMTIGMANLILQIGNIISIWISHSIQLGNQNQIGTCNQSVITYENNTWVNQTYVNISNTNFAAGQSVVSVKLAGNSSLCPVSGWAIYSKDNSIRIGSKGDVFVIREPFISCSPLECRTFFLTQGALLNDKHSNGTIKDRSPYRTLMSCPIGEVPSPYNSRFESVAWSASACHDGINWLTIGISGPDNGAVAVLKYNGIITDTIKSWRNNILRTQESECACVNGSCFTVMTDGPSDGQASYKIFRIEKGKIVKSVEINAPNYHYEECSCYPDSSEITCVCRDNWHGSNRPWVSFNQNLEYQIGYICSGIFGDNPRPNDKTGSCGPVSSNGANGVKGFSFKYGNGVWIGRTKSISSRNGFEMIWDPNGWTGTDNNFSKKQDIVGINEWSGYSGSFVQHPELTGLDCIRPCFWVELIRGRPKENTIWTSGSSISFCGVNSDTVGWSWPDGAELPFTIDK

SEQ ID NO: 20936 - protein, 469 aa, synthetic construct; identical to SEQ ID NO: 20808
  REGION 1..469: note = neuraminidase__InfluenzaA__AEL89544

SEQ ID NO: 20937 - protein, 469 aa, synthetic construct; identical to SEQ ID NO: 20808
  REGION 1..469: note = neuraminidase__InfluenzaA__AEL89554

SEQ ID NO: 20938 - protein, 469 aa, synthetic construct
  REGION 1..469: note = neuraminidase__InfluenzaA__AEL89564
MNPNQKIITIGSVCITIGMANLILQIGNIISIWISHSIQLGNQNQIETCNQSVVTYENNTWVNQTYVNISNTNFAAGQSVVSVKLAGNSSLCPVSGWAIYSKDNSIRIGSKGDVFVIREPFISCSPLECRTFFLTQGALLNDKHSNGTIKDRSPYRTLMSCPIGEVPSPYNSRFESVAWSASACHDGISWLTIGISGPDNGAVAVLKYNGIITDTIKSWRNNILRTQESECACVNGSCFTVMTDGPSDGQASYKIFRIEKGKIVKSVEMNAPNYHYEECSCYPDSSEITCVCRDNWHGSNRPWVSFNQNLEYQIGYICSGIFGDNPRPNDKTGSCGPVSSNGANGVKGFSFKYGNGVWIGRTKSISSRNGFEMIWDPNGWTGTDNNFSIKQDIVGINEWSGYSGSFVQHPELTGLDCIRPCFWVELIRGRPKENTIWTSGSSISFCGVNSDTVGWSWPDGAELPFTIDK

SEQ ID NO: 20939 - protein, 469 aa, synthetic construct; identical to SEQ ID NO: 20808
  REGION 1..469: note = neuraminidase__InfluenzaA__AEL89574

SEQ ID NO: 20940 - protein, 469 aa, synthetic construct; identical to SEQ ID NO: 20808
  REGION 1..469: note = neuraminidase__InfluenzaA__AEL89584

SEQ ID NO: 20941 - protein, 469 aa, synthetic construct; identical to SEQ ID NO: 17755
  REGION 1..469: note = neuraminidase__InfluenzaA__AEL89604

SEQ ID NO: 20942 - protein, 469 aa, synthetic construct; identical to SEQ ID NO: 20257
  REGION 1..469: note = neuraminidase__InfluenzaA__AEL89624

SEQ ID NO: 20943 - protein, 469 aa, synthetic construct
  REGION 1..469: note = neuraminidase__InfluenzaA__AEL89634
MNPNQKIITIGSVCITIGMANLILQIGNIISIWISHSIQLGNQNQIETCNQSVITYENNTWVNQTYVNISNTNFAAGQSVVSVKLAGNSSLCPVSGWAIYSKDNSIRIGSKGDVFVIREPFISCSPLECRTFFLTQGALLNDKHSNGTIKDRSPYRTLMSCPIGEVPSPYNSRFESVAWSASACHDGISWLTIGISGPDNGAVAVLKYNGIITDTIKSWRNNILRTQESECACVNGSCFTVMTDGPSDGQASYKIFRIEKGKIVKSVEMNAPNYHYEECSCYPDSSEITCVCRDNWHGSNRPWVSFNQNLEYQIGYICSGIFGDNPRPNDKTGSCGPVSSNGANGVKGFSYKYGNGVWIGRTKSISSRNGFEMIWDPNGWTGTDNNFSIKQDIVGINEWSGYSGSFVQHPELTGLDCIRPCFWVELIRGRPKENTIWTSGSSISFCGVNSDTVGWSWPDGAELPFTIDK

SEQ ID NO: 20944 - protein, 469 aa, synthetic construct; identical to SEQ ID NO: 19013
  REGION 1..469: note = neuraminidase__InfluenzaA__AEL89644

SEQ ID NO: 20945 - protein, 469 aa, synthetic construct; identical to SEQ ID NO: 20709
  REGION 1..469: note = neuraminidase__InfluenzaA__AEL89654

SEQ ID NO: 20946 - protein, 469 aa, synthetic construct; identical to SEQ ID NO: 20257
  REGION 1..469: note = neuraminidase__InfluenzaA__AEL89664

SEQ ID NO: 20947 - protein, 469 aa, synthetic construct; identical to SEQ ID NO: 20257
  REGION 1..469: note = neuraminidase__InfluenzaA__AEL89674

SEQ ID NO: 20948 - protein, 469 aa, synthetic construct; identical to SEQ ID NO: 20257
  REGION 1..469: note = neuraminidase__InfluenzaA__AEL89694

SEQ ID NO: 20949 - protein, 469 aa, synthetic construct
  REGION 1..469: note = neuraminidase__InfluenzaA__AEL89704
MNPNQKIITIGSVCMTIGMANLILQIGNIILIWISHSIQLGNQNQIETCNQSVITYENNTWVNQTYVNISNTNFAAGQSVVSVKLAGNSSLCPVSGWAIYSKDNSIRIGSKGDVFVIREPFISCSPLECRTFFLTQGALLNDKHSNGTIKDRSPYRTLMSCPIGEVPSPYNSRFESVAWSASACHDGINWLTIGISGPDNGAVAVLKYNGIITDTIKSWRNNILRTQESECACVNGSCFTVMTDGPNDGQASYKIFRIEKGKIVKSVEMNAPNYHYEECSCYPDSSEITCVCRDNWHGSNRPWVSFNQNLEYQIGYICSGIFGDNPRPNDKTGSCGPVSSNGANGVKGFSFKYGNGVWIGRTKSISSRNGFEMIWDPNGWTGTDNNFSVKQDIIGINEWSGYSGSFVQHPELTGLDCIRPCFWVELIRGRPKENTIWTSGSSISFCGVNSDTVGWSWPDGAELPFTIDK

SEQ ID NO: 20950 - protein, 469 aa, synthetic construct; identical to SEQ ID NO: 20949
  REGION 1..469: note = neuraminidase__InfluenzaA__AEL89714

SEQ ID NO: 20951 - protein, 469 aa, synthetic construct; identical to SEQ ID NO: 20257
  REGION 1..469: note = neuraminidase__InfluenzaA__AEL89744

SEQ ID NO: 20952 - protein, 469 aa, synthetic construct
  REGION 1..469: note = neuraminidase__InfluenzaA__AEL89754
MNPNQKIITIGSVCITIGMANLILQIGNIISIWISHSIQLGNQNQIETCNQSVITYENNTWVNQTYVNISNTNFAAGQSVVSVKLAGNSSLCPVSGWAIYSKDNSIRIGSKGDVFVIREPFISCSPLECRTFFLTQGALLNDKHSNGTIKDRSPYRTLMSCPIGEVPSPYNSRFESVAWSASACHDGISWLTIGISGPDNGAVAVLKYNGIITDTIKSWRNNILRTQESECACVNGSCFTVMTDGPSDGQASYKIFRIEKGKIVKSVEMNAPNYHYEECSCYPDSSEITCVCRDNWHGSNRPWVSFNQNLEYQIGYICSGIFGDNPRPNDKTGSCGPVSSNGANGVKGFSFKYGNGVWIGRTKSISSRNGFEMIWDPNGWTGTDNNFSIKQDIVGINEWSGYSGSFVQHPELTGLDCIRPCFWVELIRGRPKENTIWTSGSSISFCGVNSDTVGWSWPDGAELPFIIDK

SEQ ID NO: 20953 - protein, 469 aa, synthetic construct; identical to SEQ ID NO: 19013
  REGION 1..469: note = neuraminidase__InfluenzaA__AEL89774

SEQ ID NO: 20954 - protein, 469 aa, synthetic construct
  REGION 1..469: note = neuraminidase__InfluenzaA__AEL89784
MNPNQKIITIGSVCMTIGMANLILQIGNIISIWISHSIQLGNQNQIETCNQSVITYENNTWVNQTYVNISNTNFAAGQSVVSVKLAGNSSLCPVSGWAIYSKDNSIRIGSKGDVFVIREPFISCSPLECRTFFLTQGALLNDKHSNGTIKDRSPYRTLMSCPIGEVPSPYNSRFESVAWSASACHDGINWLTIGISGPDNGAVAVLKYNGIITDTIKSWRNNILRTQESECACVNGSCFTVMTDGPSDGQASYKIFRIEKGKIVKSVEMNAPNYHYEECSCYPDSSEITCVCRDNWHGSNRPWVSFNQNLEYQIGYICSGIFGDNPRPNDKTGSCGPVSSNGANGVKGFSFKYGNGVWIGRTKSISLRNGFEMIWDPNGWTGTDNNFSVKQDIIGINEWSGYSGSFVQHPELTGLDCIRPCFWVELIRGRPKENTIWTSGSSISFCGVNSDTVGWSWPDGAELPFTIDK

SEQ ID NO: 20955 - protein, 469 aa, synthetic construct
  REGION 1..469: note = neuraminidase__InfluenzaA__AEL89794
MNPNQKIITIGSVCMTIGMANLILQIGNIISIWISHSIQLGNQSQIETCNQSVITYENNTWVNQTYVNISNTNFAAGQSVVSVKLAGNSSLCPVSGWAIYSKDNSIRIGSKGDVFVIREPFISCSPLECRTFFLTQGALLNDKHSNGTIKDRSPYRTLMSCPIGEVPSPYNSRFESVAWSASACHDGINWLTIGISGPDNGAVAVLKYNGIITDTIKSWRNNILRTQESECACVNGSCFTIMTDGPSDGQASYKIFRIEKGKIVKSVEMNAPNYHYEECSCYPDSSEITCVCRDNWHGSNRPWVSFNQNLEYQIGYICSGIFGDNPRPNDKTGSCGPVSSNGANGVKGFSFKYGNGVWIGRTKSISSRKGFEMIWDPNGWTGTDNNFSIKQDIVGINEWSGYSGSFVQHPELTGLDCIRPCFWVELIRGRPKENTIWTSGSSISFCGVNSDAVGWSWPDGAELPFTIDK

SEQ ID NO: 20956 - protein, 469 aa, synthetic construct; identical to SEQ ID NO: 20709
  REGION 1..469: note = neuraminidase__InfluenzaA__AEL89804

SEQ ID NO: 20957 - protein, 469 aa, synthetic construct
  REGION 1..469: note = neuraminidase__InfluenzaA__AEL89815
MNPNQKIITIGSVCMTIGMANLILQIGNIISIWISHSIQLGNQNQIETCNQSVITYENNTWVNQTYVNISNTNFAAGQSVVSVKLAGNSSLCPVSGWAIYSKDNSIRIGSKGDVFVIREPFISCSPLECRTFFLTQGALLNDKHSNGTIKDRSPYRTLMSCPIGEVPSPYNSRFESVAWSASACHDGINWLTIGISGPDNGAVAVLKYNGIITDTIKSWRNNILRTQESECACVNGSCFTVMTDGPSDGQASYKIFRIEKGKIVKSVEMNAPNYHYEECSCYPDSSEITCVCRDNWHGSNRPWVSFNQNLEYQIGYICSGIFGDNPRPNDKTGSCGPVSSNGANGVKGFSFKYGNGVWIGRTKSISSRNGFEMIWDPNGWTGTDNNFSVKQDIIGINEWSGYSGSFVQHPELTGLDCIRPCFWVELIRGRPKENTIWTSGSSISFCGVNSDTVGWSWPDGAELPFTIDK

SEQ ID NO: 20958 - protein, 469 aa, synthetic construct
  REGION 1..469: note = neuraminidase__InfluenzaA__AEL89825
MNPNQKIITIGSVCMTIGMANLILQIGNIISIWISHSIQLGNQNQIETCNQSVITYENNTWVNQTYVNISNTNFAAGQSVVSVKLAGNSSLCPVSGWAIYSKDNSIRIGSKGDVFVIREPFISCSPLECRTFFLTQGALLNDKHSNGTIKDRSPYRTLMSCPIGEVPSPYNSRFESVAWSASACHDGINWLTIGISGPDNGAVAVLKYNGIITDTIKSWRNNILRTQESECACVNGSCFTVMTDGPSDGQASYKIFRIEKGKIVKSVEMNAPNYHYEECSCYPDSSEITCVCRDNWHGANRPWVSFNQNLEYQIGYICSGIFGDNPRPNDKTGSCGPVSSNGANGVKGFSFKYGNGVWIGRTKSISSRNGFEMIWDPNGWTGTDNNFSIKQDIVGINEWSGYSGSFVQHPELTGLDCIRPCFWVELIRGRPKENTIWTSGSSISFCGVNSDTVGWSWPDGAELPFTIDK

SEQ ID NO: 20959 - protein, 469 aa, synthetic construct
  REGION 1..469: note = neuraminidase__InfluenzaA__AEL89835
MNPNQKIITIGSVCMTIGMANLILQIGNIISIWISHSIQLGNQSQIETCNQSVITYENNTWVNQTYVNISNTNFAAGQSVVSVKLAGNSSLCPVSGWAIYSKDNSIRIGSKGDVFVIREPFISCSPLECRTFFLTQGALLNDKHSNGTIKDRSPYRTLMSCPIGEVPSPYNSRFESVAWSASACHDGINWLTIGISGPDNGAVAVLKYNGIITDTIKSWRNNILRTQESECVCVNGSCFTIMTDGPSDGQASYKIFRIEKGKIVKSVEMNAPNYHYEECSCYPDSSEITCVCRDNWHGSNRPWVSFNQNLEYQIGYICSGIFGDNPRPNDKTGSCGPVSSNGANGVKGFSFKYGNGVWIGRTKSISSRKGFEMIWDPNGWTGTDNNFSIKQDIVGINEWSGYSGSFVQHPELTGLDCIRPCFWVELIRGRPKENTIWTSGSSISFCGVNSDTVGWSWPDGAELPFTIDK

SEQ ID NO: 20960 - protein, 469 aa, synthetic construct
  REGION 1..469: note = neuraminidase__InfluenzaA__AEL89845
MNPNQKIITIGSVCMTIGMANLILQIGNIISIWISHSIQLGNKNQIETCNQSVITYENNTWVNQTYVNISNTNFATGQSVVSVKLAGNSSLCPVSGWAIYSKDNSIRIGSKGDVFVIREPFISCSPLECRTFFLTQGALLNDKHSNGTIKDRSPYRTLMSCPIGEAPSPYNSRFESVAWSASACHDGINWLTIGISGPDNGAVAVLKYNGIITDTIKSWRNNILRTQESECACVNGSCFTVMTDGPSDGQASYKIFRIEKGKIVKSVEMNAPNYHYEECSCYPDSSEITCVCRDNWHGSNRPWVSFNQNLEYQIGYICSGIFGDNPRPNDKKGSCGPVSSNGANGVKGFSFKYGNGVWIGRTKSISSRNGFEMIWDPNGWTGTDNNFSIKQDIVGINEWSGYSGSFVQHPELTGLDCIRPCFWVELIRGRPKENTIWTSGSSISFCGVNSDTVGWSWPDGAELPFTIDK

SEQ ID NO: 20961 - protein, 469 aa, synthetic construct; identical to SEQ ID NO: 20958
  REGION 1..469: note = neuraminidase__InfluenzaA__AEL89855

SEQ ID NO: 20962 - protein, 469 aa, synthetic construct; identical to SEQ ID NO: 20257
  REGION 1..469: note = neuraminidase__InfluenzaA__AEL93581

SEQ ID NO: 20963 - protein, 469 aa, synthetic construct
  REGION 1..469: note = neuraminidase__InfluenzaA__AEL93591
MNPNQKIITIGSVCMTIGMANLILQIGNIISIWISHSIQLGNQNQIETCNQSVITYENNTWVNQTYVNISNTNFAAGQSVVSVNLAGNSSLCPVSGWAIYSKDNSIRIGSKGDVFVIREPFISCSPLECRTFFLTQGALLNDKHSNGTIKDRSPYRTLMSCPIGEVPSPYNSRFESVAWSASACHDGINWLTIGISGPDNGAVAVLKYNGIITDTIKSWRNNILRTQESECACVNGSCFTIMTDGPSDGQASYKIFRIEKGKIVKSVEMNAPNYHYEECSCYPDSSEITCVCRDNWHGSNRPWVSFNQNLEYQIGYICSGIFGDNPRPNDKTGSCGPVSSNGANGVKGFSFKYGNGVWIGRTKSISSRKGFEMIWDPNGWTGTDNNFSIKQDIVGINEWSGYSGSFVQHPELTGLDCIRPCFWVELIRGRPKENTIWTSGSSISFCGVNSDTVGWSWPDGAELPFTIDK

SEQ ID NO: 20964 - protein, 469 aa, synthetic construct; identical to SEQ ID NO: 20709
  REGION 1..469: note = neuraminidase__InfluenzaA__AEL93601

SEQ ID NO: 20965 - protein, 469 aa, synthetic construct; identical to SEQ ID NO: 20257
  REGION 1..469: note = neuraminidase__InfluenzaA__AEL93611

SEQ ID NO: 20966 - protein, 469 aa, synthetic construct; identical to SEQ ID NO: 20257
  REGION 1..469: note = neuraminidase__InfluenzaA__AEL93621

SEQ ID NO: 20967 - protein, 469 aa, synthetic construct; identical to SEQ ID NO: 20257
  REGION 1..469: note = neuraminidase__InfluenzaA__AEL93631

SEQ ID NO: 20968 - protein, 469 aa, synthetic construct
  REGION 1..469: note = neuraminidase__InfluenzaA__AEL93641
MNPNQKIITIGSVCITIGMANLILQIGNIISIWISHSIQLGNQNQIETCNQSVITYENNTWVNQTYVNISNTNFAAGQSVVSVKLAGNSSLCPVSGWAIYSKDNSIRIGSKGDVFVIREPFISCSPLECRTFFLTQGALLNDKHSNGTIKDRSPYRTLMSCPIGEVPSPYNSRFESVAWSASACHDGISWLTIGISGPDNGAVAVLKYNGIITDTIKSWRNNILRTQESECACVNGSCFTVMTDGPSDGQASYKIFRIEKGKIVKSVEMNAPNYHYEECSCYPDSSEITCVCRDNWHGSNRPWVSFNHNLEYQIGYICSGIFGDNPRPNDKTGSCGPVSSNGANGVKGFSFKYGNGVWIGRTKSISSRNGFEMIWDPNGWTGTDNNFSIKQDIVGINEWSGYSGSFVQHPELTGLDCIRPCFWVELIRGQPKENTIWTSGSSISFCGVNSDTVGWSWPDGAELPFTIDK

SEQ ID NO: 20969 - protein, 469 aa, synthetic construct; identical to SEQ ID NO: 20808
  REGION 1..469: note = neuraminidase__InfluenzaA__AEL94890

SEQ ID NO: 20970 - protein, 469 aa, synthetic construct
  REGION 1..469: note = neuraminidase__InfluenzaA__AEL95429
MNPNQKIITIGSVCMTIGMANLILQIGNIISIWISHSIQLGNQSQIETCNQSVITYENNTWVNQTYVNISNTNFAAGQSVVSVKLAGNSSLCPVSGWAIYSKDNSIRIGSKGDVFVIREPFISCSPLECRTFFLTQGALLNDKHSNGTIKDRSPHRTLMSCPIGEVPSPYNSRFESVAWSASACHDGINWLTIGISGPDNGAVAVLKYNGIITDTIKSWRNNILRTQESECACVNGSCFTIMTDGPSDGQASYKIFRIEKGKIVKSVEMNAPNYHYEECSCYPDSSEITCVCRDNWHGSNRPWVSFNQNLEYQIGYICSGIFGDNPRPNDKTGSCGPVSSNGANGVKGFSFKYGNGVWIGRTKSISSRKGFEMIWDPNGWTGTDNNFSIKQDIVGINEWSGYSGSFVQHPELTGLDCIRPCFWVELIRGRPKENTIWTSGSSISFCGVNSDTVGWSWPDGAELPFTIDK

SEQ ID NO: 20971 - protein, 469 aa, synthetic construct
  REGION 1..469: note = neuraminidase__InfluenzaA__AEL97634
MNPNQKIITIGSVCMTIGMANLILQIGNIISIWVSHSIQLGNQNQIETCNQSVITYENNTWVNQTYVNISNTNFAAGQSVVSVKLAGNSSLCPVSGWAIYSKDNSIRIGSKGDVFVIREPFISCSPLECRTFFLTQGALLNDKHSNGTIKDRSPYRTLMSCPIGEVPSPYNSRFESVAWSASACHDGINWLTIGISGPDNGAVAVLKYNGIITDTIKSWRNNILRTQESECACVNGSCFTVMTDGPSDGQASYKIFRIEKGKIVKSVEMNAPNYHYEECSCYPDSSEITCVCRDNWHGSNRPWVSFNQNLEYQIGYICSGIFGDNPRPNDKTGSCGPVSSNGANGVKGFSFKYGNGVWIGRTKSISSRNGFEMIWDPNGWTGTDNNFSIKQDIVGVNEWSGYSGSFVQHPELTGLDCIRPCFWVELIRGRPKENTIWTSGSSISFCGVNSDTVGWSWPDGAELPFTIDK

SEQ ID NO: 20972 - protein, 469 aa, synthetic construct; identical to SEQ ID NO: 16738
  REGION 1..469: note = neuraminidase__InfluenzaA__AEL99667

SEQ ID NO: 20973 - protein, 469 aa, synthetic construct; identical to SEQ ID NO: 16738
  REGION 1..469: note = neuraminidase__InfluenzaA__AEL99677

SEQ ID NO: 20974 - protein, 469 aa, synthetic construct; identical to SEQ ID NO: 15776
  REGION 1..469: note = neuraminidase__InfluenzaA__AEM53471

SEQ ID NO: 20975 - protein, 470 aa, synthetic construct; identical to SEQ ID NO: 16453
  REGION 1..470: note = neuraminidase__InfluenzaA__AEM60040

SEQ ID NO: 20976 - protein, 470 aa, synthetic construct; identical to SEQ ID NO: 16043
  REGION 1..470: note = neuraminidase__InfluenzaA__AEM60061

SEQ ID NO: 20977 - protein, 469 aa, synthetic construct
  REGION 1..469: note = neuraminidase__InfluenzaA__AEM60072
MNPNQKIITIGSVSLTIATICFLMQIAILVTTVTLHFKQYECSSPPNNQVMPCEPTIIERNITEIVYLTNTTIEKEICPKLVEYRNWSKPQCKITGFAPFSKDNSIRLSAGGDIWVTREPYVSCDPGKCYQFALGQGTTLNNRHSNDTVHDRTPYRTLLMNELGVPFHLGTKQVCIAWSSSSCHDGKAWLHVCVTGHDENATASFIYDGRLVDSIGSWSKNILRTQESECVCINGTCTVVMTDGSASERADTKILFIEEGKIVHISPLSGSAQHVEECSCYPRYPGVRCVCRDNWKGSNRPIVDINVKDYSIVSSYVCSGLVGDTPRKNDRSSSSYCRNPNNEKGSHGVKGWAFDDGNDVWMGRTIGEELRSGYETFKVIGGWSTPNSKLQINRQVIVDSGNRSGYSGIFSVEGKSCINRCFYVELIRGREQETRVWWTSNSIVVFCGTSGTYGTGSWPDGADINLMPI

SEQ ID NO: 20978 - protein, 469 aa, synthetic construct; identical to SEQ ID NO: 16738
  REGION 1..469: note = neuraminidase__InfluenzaA__AEM62774

SEQ ID NO: 20979 - protein, 469 aa, synthetic construct; identical to SEQ ID NO: 16738
  REGION 1..469: note = neuraminidase__InfluenzaA__AEM62783

SEQ ID NO: 20980 - protein, 469 aa, synthetic construct
  REGION 1..469: note = neuraminidase__InfluenzaA__AEM62792
MNPNQKIITIGSVCMTIGMANLILQIGNIISIWISHSIQLGSQNQIETCNQSVITYENNTWVNQTYVNISNTNFAAGQSVISVRLAGNSSLCPVSGWAIYSKDNSIRIGSKGDVFVIREPFISCSPLECRTFFLTQGALLNDKHSNGTIKDRSPYRTLMSCPIGEVPSPYNSRFESVAWSASACHDGINWLTIGISGPDNGAVAVLKYNGIITDTIKSWRNNILRTQESECACVNGSCFTVMTDGPSDGQASYKIFRIEKGKIVKSVEMNAPNYHYEECSCYPDSSEITCVCRDNWHGSNRPWVSFNQNLEYQIGYICSGIFGDNPRPNDKTGSCGPVSSNGANGVKGFSFKYGNGVWIGRTKSISSRNGFEMIWDPNGWTGTDNNFSIKQDIIGINEWSGYSGSFVQHPELTGLDCIRPCFWVELIRGRPKENTIWTSGSSISFCGVNSDTVGWSWPDGAELPFTIDK

SEQ ID NO: 20981 - protein, 469 aa, synthetic construct; identical to SEQ ID NO: 16738
  REGION 1..469: note = neuraminidase__InfluenzaA__AEM62801

SEQ ID NO: 20982 - protein, 469 aa, synthetic construct
  REGION 1..469: note = neuraminidase__InfluenzaA__AEM62810
MNPNQKIITIGSVCMTIGMGNLILQIGNIISIWISHSIQLGNQNQIETCNQSVITYENNTWVNQTYVNISNTNFAAGQSVVSVKLAGNSSLCPVSGWAIYSKDNSIRIGSKGDVFVIREPFISCSPLECRTFFLTQGALLNDKHSNGTIKDRSPYRTLMSCPIGEVPSPYNSRFESVAWSASACHDGINWLTIGISGPDNGAVAVLKYNGIITDTIKSWRNNILRTQESECACVNGSCFTVMTDGPSDGQASYKIFRIEKGKIVKSVEMNAPNYHYEECSCYPDSSEITCVCRDNWHGSNRPWVSFNQNLEYQIGYICSGIFGDNPRPNDKTGSCGPVSSNGANGVKGFSFKYGNGVWIGRTKSISSRNGFEMIWDPNGWTGTDNNFSIKQDIVGINEWSGYSGSFVQHPELTGLDCIRPCFWVELIRGRPKENTIWTSGSSISFCGVNSDTVGWSWPDGAELPFTIDK

SEQ ID NO: 20983 - protein, 469 aa, synthetic construct
  REGION 1..469: note = neuraminidase__InfluenzaA__AEM62819
MNPNQKIITIGSVCMTIGMANLILQIGNIISIWISHSIQLGNQNQIETCNQSVITYENDTWVNQTYVNISNTNFAAGQSVVSVKLAGNSSLCPVSGWAIYSKDNSIRIGSKGDVFVIREPFISCSPLECRTFFLTQGALLNDKHSNGTIKDRSPYRTLMSCPIGEVPSPYNSRFESVAWSASACHDGINWLTIGISGPDNGAVAVLKYNGIITDTIKSWRNNILRTQESECACVNGSCFTVMTDGPSDGQASYKIFRIEKGKIVKSVEMNAPNYHYEECSCYPDSSEITCVCRDNWHGSNRPWVSFNQNLEYQIGYICSGIFGDNPRPNDKTGSCGPVSSNGANGVKGFSFKYGNGVWIGRTKSISSRNGFEMIWDPNGWTGTDNNFSIKQDIVGINEWSGYSGSFVQHPELTGLDCIRPCFWVELIRGRPKENTIWTSGSSISFCGVNSDTVGWSWPDGAELPFTIDK

SEQ ID NO: 20984 - protein, 469 aa, synthetic construct; identical to SEQ ID NO: 16738
  REGION 1..469: note = neuraminidase__InfluenzaA__AEM62828

SEQ ID NO: 20985 - protein, 469 aa, synthetic construct; identical to SEQ ID NO: 17321
  REGION 1..469: note = neuraminidase__InfluenzaA__AEM62837

SEQ ID NO: 20986 - protein, 469 aa, synthetic construct; identical to SEQ ID NO: 16738
  REGION 1..469: note = neuraminidase__InfluenzaA__AEM62846

SEQ ID NO: 20987 - protein, 469 aa, synthetic construct
  REGION 1..469: note = neuraminidase__InfluenzaA__AEM62855
MNPNQKIITIGSVCITIGMANLILQIGNIISIWISHSIQLGNQNQIETCNQSVITYENNTWVNQTYVNISNTNFAAGQSVVSVKLAGNSSLCPVSGWAIYSKDNSVRIGSKGDVFVIREPFISCSPLECRTFFLTQGALLNDKHSNGTIKDRSPYRTLMSCPIGEVPSPYNSRFESVAWSASACHDGINWLTIGISGPDNGAVAVLKYNGIITDTIKSWRNNILRTQESECACVNGSCFTVMTDGPSNGQASYKIFRIEKGKIVKSVEMNAPNYHYEECSCYPDSGEITCVCRDNWHGSNRPWVSFNQNLEYQIGYICSGIFGDNPRPNDKTGSCGPVSSNGANGVKGFSFKYGNGVWIGRTKSISSRNGFEMIWDPNGWTGTDNNFSIKQDIVGINEWSGYSGSFVQHPELTGLDCIRPCFWVELIRGRPKENTIWTSGSSISFCGVNSDTVGWSWPDGAELPFTIDK

SEQ ID NO: 20988 - protein, 469 aa, synthetic construct
  REGION 1..469: note = neuraminidase__InfluenzaA__AEM62864
MNPNQKIITIGSVCMTIGMANLILQIGNIISIWISHSIQLGNQNQIETCNQSVITYENNTWVNQTYVNISNTNFAAGQSVVSVKLAGNSSLCPVSGWAIYSKDNSIRIGSKGDVFVIREPFISCSPLECRTFFLTQGALLNDKHSNGTIKDRSPYRTLMSCPIGEVPSPYNSRFESVAWSASACHDGINWLTIGIFGPDNGAVAVLKYNGIITDTIKSWRNNILRTQESECACVNGSCFTVMTDGPSDGQASYKIFRIEKGKIVKSVEMNAPNYHYEECSCYPDSSEITCVCRDNWHGSNRPWVSFNQNLEYQIGYICSGIFGDNPRPNDKTGSCGPVSSNGANGVKGFSFKYGNGVWIGRTKSISSRNGFEMIWDPNGWTGTDNNFSIKQDIVGINEWSGYSGSFVQHPELTGLDCIRPCFWVELIRGRPKENTIWTSGSSISFCGVNSDTVGWSWPDGAELPFTIDK

SEQ ID NO: 20989 - protein, 469 aa, synthetic construct
  REGION 1..469: note = neuraminidase__InfluenzaA__AEM62872
MNPNQKIITIGSVCMTIGMANLILQIGNIISIWISHSIQLGNQNQIETCNQSVITYENNTWVNQTYVNISNTNFAAGQSVVSVKLAGNSSLCPVSGWAIYSKDNSIRIGSKGDVFVIREPFISCSPLECRTFFLTQGALLNDKHSNGTIKDRSPYRTLMSCPIGEVPSPYNSRFESVAWSASACHDGINWLTIGISGPDNGAVAVLKYNGIITDTIKSWRNNILRTQESECACVNGSCFTVMTDGPSDGQASYKIFRIEKGKIVKSVEMNAPNYHYEECSCYPDSSEITCVCRDNWHGSNRPWVSFNQNLEYQIGYICSGIFGDNPRPNDKTGSCGPVSFNGANGVKGFSFKYGNGVWIGRTKSISSRNGFEMIWDPNGWTGTDNNFSIKQDIVGINEWSGYSGSFVQHPELTGLDCIRPCFWVELIRGRPKENTIWTSGSSISFCGVNSDTVGWSWPDGAELPFTIDK

SEQ ID NO: 20990 - protein, 469 aa, synthetic construct; identical to SEQ ID NO: 16738
  REGION 1..469: note = neuraminidase__InfluenzaA__AEM92310

SEQ ID NO: 20991 - protein, 469 aa, synthetic construct; identical to SEQ ID NO: 18200
  REGION 1..469: note = neuraminidase__InfluenzaA__AEM92320

SEQ ID NO: 20992 - protein, 469 aa, synthetic construct
  REGION 1..469: note = neuraminidase__InfluenzaA__AEM92340
MNPNQKIITIGSVCMTIGMANLILQIGNIISIWISHSIQLGNQNQIETCNQSVITYENNTWVNQTYVNISNTNFAAGQSVVSVKLAGNSSLCPVSGWAIYSKDNSIRIGSKGDVFVIREPFISCSPLECRTFFLTQGALLNDKHSNGTIKDRSPYRTLMSCPIGEVPSPYNSRFESVAWSASACHDGINWLTIGISGPDNGAVAVLKYNGIITDTIKSWRNNILRTQESECACVNGSCFTIMTDGPSDGQASYKIFRIEKGKIVKSVEMNAPNYHYEECSCYPDSSEITCVCRDNWHGSNRPWVSFNQNLEYQIGYICSGIFGDNPRPNDKTGSCGPVSSNGANGVKGFSFKYGNGVWIGRTKSISSRKGFEMIWDPNGWTRTDNNFSIKQDIVGINEWSGYSGSFVQHPELTGLDCIRPCFWVELIRGRPKENTIWTSGSSISFCGVNSDTVGWSWPDGAELPFTIDK

SEQ ID NO: 20993 - protein, 469 aa, synthetic construct; identical to SEQ ID NO: 18200
  REGION 1..469: note = neuraminidase__InfluenzaA__AEM92350

SEQ ID NO: 20994 - protein, 469 aa, synthetic construct
  REGION 1..469: note = neuraminidase__InfluenzaA__AEM92360
MNPNQKIITIGSVCMTIGMANLILQIGNIISIWISHSIQLGNQNQIETCNQSVITYENNTWVNQTYVNISNTNFAAEQSVVSVKLAGNSSLCPVSGWAIYSKDNSIRIGSKGDVFVIREPFISCSPLECRTFFLTQGALLNDKHSNGTIKDRSPYRTLMSCPIGEVPSPYNSRFESVAWSASACHDGINWLTIGISGPDNGAVAVLKYNGIITDTIKSWRNNILRTQESECACVNGSCFTIMTDGPSDGQASYKIFRIEKGKIVKSVEMNAPNYHYEECSCYPDSSEITCVCRDNWHGSNRPWVSFNQNLEYQIGYICSGIFGDNPRPNDKTGSCGPVSSNGANGVKGFSFKYGNGVWIGRTKSISSRKGFEMIWDPNGWTGTDNNFSIKQDIVGINEWSGYSGSFVQHPELTGLDCIRPCFWVELIRGRPKENTIWTSGSSISFCGVNSDTVGWSWPDGAELPFTIDK

SEQ ID NO: 20995 - protein, 469 aa, synthetic construct; identical to SEQ ID NO: 20992
  REGION 1..469: note = neuraminidase__InfluenzaA__AEM92370

SEQ ID NO: 20996 - protein, 469 aa, synthetic construct; identical to SEQ ID NO: 20992
  REGION 1..469: note = neuraminidase__InfluenzaA__AEM92380

SEQ ID NO: 20997 - protein, 469 aa, synthetic construct
  REGION 1..469: note = neuraminidase__InfluenzaA__AEM92399
MNPNQKIITIGSVCMTIGMANLILQIGNIISIWISHSIQLGNQNQIETCNQSVITYENNTWVNQTYVNISNTNFAAGQSVVSVKLAGNSSLCPVSGWAIYSKDNSIRIGSKGDVFVIREPFISCSPLECRTFFLTQGALLNDKHSNGTIKDRSPYRTLMSCPIGEVPSPYNSRFESVAWSASACHDGTNWLTIGISGPDNGAVAVLKYNGIITDTIKSWRNNILRTQESECACVNGSCFTVMTDGPSDGQASYKIFRIEKGKIVKSVEMNAPNYHYEECSCYPDSSEITCVCRDNWHGSNRPWVSFNQNLEYQIGYICSGIFGDNPRPNDKTGSCGPVLSNGANGVKGFSFKYGNGVWIGRTKSISSRNGFEMIWDPNGWTGTDNNFSIKQDIVGINEWSGYSGSFVQHPELTGLDCIRPCFWVELIRGRPKENTIWTSGSSISFCGVNSDTVGWSWPDGAELPFTIDK

SEQ ID NO: 20998 - protein, 469 aa, synthetic construct; identical to SEQ ID NO: 20997
  REGION 1..469: note = neuraminidase__InfluenzaA__AEM92409

SEQ ID NO: 20999 - protein, 469 aa, synthetic construct; identical to SEQ ID NO: 17162
  REGION 1..469: note = neuraminidase__InfluenzaA__AEM92419

SEQ ID NO: 21000 - protein, 469 aa, synthetic construct
  REGION 1..469: note = neuraminidase__InfluenzaA__AEM92430
MNPNQKIMTIGSVCMTIGMANLILQIGNIISIWISHSIQLGNQNQIETCNQSVITYENNTWVNQTYVNISNTNFAAGQSVVSVKLAGNSSLCPVSGWAIYSKDNSIRIGSKGDVFVIREPFISCSPLECRTFFLTQGALLNDKHSNGTIKDRSPYRTLMSCPIGEVPSPYNSRFESVAWSASACHDGINWLTIGISGPDNGAVAVLKYNGIITDTIKSWRNNILRTQESECACVNGSCFTVMTDGPSDGQASYKIFRIEKGKIVKSVEMNAPNYHYEECSCYPDSSEITCVCRDNWHGSNRPWVSFNQNLEYQIGYICSGIFGDNPRPNDKTGSCGPVSSNGANGVKGFSFKYGNGVWIGRTKSISSRNGFEMIWDPNGWTGTDNNFSIKQDIVGINEWSGYSGSFVQHPELTGLDCIRPCFWVELIRGRPKENTIWTSGSSISFCGVNSDTVGWSWPDGAELPFTIDK

SEQ ID NO: 21001 - protein, 469 aa, synthetic construct
  REGION 1..469: note = neuraminidase__InfluenzaA__AEM92440
MNPNQKIITIGSVCITIGMANLILQIGNIISIWISHSIQLGNQSQIETCNQSVITYENNTWVNQTYVNISNTNFAAGQSVVSVKLAGNSSLCPVSGWAIYSKDNSIRIGSKGDVFVIREPFISCSPLECRTFFLTQGALLNDKHSNGTIKDRSPYRTLMSCPIGEVPSPYNSRFESVAWSASACHDGINWLTIGISGPDNGAVAVLKYNGIITDTIKSWRNNILRTQESECACVNGSCFTIMTDGPSDGQASYKIFRIEKGKIVKSVEMIAPNYHYEECSCYPDSSEITCVCRDNWHGSNRPWVSFNQNLEYQIGYICSGIFGDNPRPNDKTGSCGPVSSNGANGVKGFSFKYGNGVWIGRTKSISSRKGFEMIWDPNGWTGTDNNFSIKQDIVGINEWSGYSGSFVQHPELTGLDCIRPCFWVELIRGRPKENTIWTSGSSISFCGVNSDTVGWSWPDGAELPFTIDK

SEQ ID NO: 21002 - protein, 469 aa, synthetic construct; identical to SEQ ID NO: 20958
  REGION 1..469: note = neuraminidase__InfluenzaA__AEM92450

SEQ ID NO: 21003 - protein, 469 aa, synthetic construct; identical to SEQ ID NO: 20958
  REGION 1..469: note = neuraminidase__InfluenzaA__AEM92460

SEQ ID NO: 21004 - protein, 469 aa, synthetic construct; identical to SEQ ID NO: 20709
  REGION 1..469: note = neuraminidase__InfluenzaA__AEM92470

SEQ ID NO: 21005 - protein, 469 aa, synthetic construct; identical to SEQ ID NO: 20709
  REGION 1..469: note = neuraminidase__InfluenzaA__AEM92480

SEQ ID NO: 21006 - protein, 469 aa, synthetic construct
  REGION 1..469: note = neuraminidase__InfluenzaA__AEM92490
MNPNQKIITIGSVCMIIGMANLMLQIGNIISIWISHSIQLGNQNQIETCNQSVITYENNTWVNQTYVNISNTNFAAGQSVVSVKLAGNSSLCPVSGWAIYSKDNSIRIGSKGDVFVIREPFISCSPLECRTFFLTQGALLNDKHSNGTIKDRSPYRTLMSCPIGEVPSPYNSRFESVAWSASACHDGINWLTIGISGPDNGAVAVLKYNGIITDTIKSWRNNILRTQESECACVNGSCFTIMTDGPSDGQASYKIFRIEKGKIVKSVEMNAPNYHYEECSCYPDSSEITCVCRDNWHGSNRPWVSFNQNLEYQIGYICSGIFGDNPRPNDKTGSCGPVSSNGANGVKGFSFKYGNGVWIGRTKSISSRNGFEMIWDPNGWTGTDNNFSIKQDIVGINEWSGYSGSFVQHPELTGLDCIRPCFWVELIRGRPKENTIWTSGSSISFCGVNSDTVGWSWPDGAELPFTIDK

SEQ ID NO: 21007 - protein, 469 aa, synthetic construct
  REGION 1..469: note = neuraminidase__InfluenzaA__AEM92500
MNPNQKIITIGSVCMIIGMANLMLQIGNIISIWISHSIQLGNQNQIETCNQSVITYENNTWVNQTYVNISNTNFAAGQSVVSVKLAGNSSLCPVSGWAIYSKDNSIRIGSKGDVFVIREPFISCSPLECRTFFLTQGALLNDKHSNGTIKDRSPYRTLMSCPIGEVPSPYNSRFESVAWSASACHDGINWLTIGISGPDNGAVAVLKYNGIITDTIKSWRNNILRTQESECACVNGSCFTIMTDGPSDGQASYKIFRIEKGKIVKSVEMNAPNYHYEECSCYPDSSEITCVCRDNWHGSNRPWVSFNQNLEYQMGYICSGIFGDNPRPNDKTGSCGPVSSNGANGVKGFSFKYGNGVWIGRTKSISSRNGFEMIWDPNGWTGTDNKFSIKQDIVGINEWSGYSGSFVQHPELTGLDCIRPCFWVELIRGRPKENTIWTSGSSISFCGVNSDTVGWSWPDGAELPFTIDK

SEQ ID NO: 21008 - protein, 469 aa, synthetic construct
  REGION 1..469: note = neuraminidase__InfluenzaA__AEM92520
MNPNQKIITIGSVCMTIGMANLMLQIGNIISIWISHSIQLGNQNQIETCNQSVITYENNTWVNQTYVNISNTNFAAGQSVVSVKLAGNSSLCPVSGWAIYSKDNSIRIGSKGDVFVIREPFISCSPLECRTFFLTQGALLNDKHSNGTIKDRSPYRTLMSCPIGEVPSPYNSRFESVAWSASACHDGINWLTIGISGPDNGAVAVLKYNGIITDTIKSWRNNILRTQESECACVNGSCFTVMTDGPSDGQASYKIFRIEKGKIVKSVEMNAPNYHYEECSCYPDSSEITCVCRDNWHGSNRPWVSFNQNLEYQIGYICSGIFGDNPRPNDKTGSCGPVSSNGANGVKGFSFKYGNGVWIGRTKSISSRNGFEMIWDPNGWTGTDNNFSIKQDIIGINEWSGYSGSFVQHPELTGLDCIRPCFWVELIRGRPKENTIWTSGSSISFCGVNSDTVGWSWPDGAELPFTIDK

SEQ ID NO: 21009 - protein, 469 aa, synthetic construct; identical to SEQ ID NO: 20709
  REGION 1..469: note = neuraminidase__InfluenzaA__AEM92550

SEQ ID NO: 21010 - protein, 469 aa, synthetic construct
  REGION 1..469: note = neuraminidase__InfluenzaA__AEM92570
MNPNQKIITIGSVCMTIGMANLILQIGNIISIWISHSIQLGNQNQIETCNQSVITYENNTWVNQTYVNISNTNFAAGQSVVSVKLAGNSSLCPVSGWAIYSKDNSIRIGSKGNVFVIREPFISCSPLECRTFFLTQGALLNDKHSNGTIKDRSPYRTLMSCPIGEVPSPYNSRFESVAWSASACHDGINWLTIGISGPDNGAVAVLKYNGIITDTIKSWRNNILRTQESECACVNGSCFTIMTDGPSDGQASYKIFRIEKGKIVKSVEMNAPNYHYEECSCYPDSSEITCVCRDNWHGSNRPWVSFNQNLEYQIGYICSGIFGDNPRPNDKTGSCGPVSSNGANGVKGFSFKYGNGVWIGRTKSISSRKGFEMIWDPNGWTGTDNNFSIKQDIVGINEWSGYSGSFVQHPELTGLDCIRPCFWVELIRGRPKENTIWTSGSSISFCGVNSDTVGWSWPDGAELPFTIDK

SEQ ID NO: 21011 - protein, 469 aa, synthetic construct
  REGION 1..469: note = neuraminidase__InfluenzaA__AEM92580
MNPNQKIITIGSVCMTIGMANLILQIGNIISIWISHSIQLGNQNQIETCNQSVITYENNTWVNQTYVNISNTNFAAGQSVVSVKLAGNSSLCPVSGWAIYSKDNSIRIGSKGDVFVIREPFISCSPLECRTFFLTQGALLNDKHSNGTIKDRSPYRTLMSCPIGEVPSPYNSRFESVAWSASACHDGINWLTIGISGPDNGAVAVLKYNGIITDTIKSWRNNILRTQESECACVNGSCFTIMTDGPSNGQASYKIFRIEKGKIVKSVEMNAPNYHYEECSCYPDSSEITCVCRDNWHGSNRPWVSFNQNLEYQIGYICSGIFGDNPRPNDKTGSCGPVSSNGANGVKGFSFKYGNGVWIGRTKSISSRKGFEMIWDPNGWTGTDNNFSIKQDIVGINEWSGYSGSFVQHPELTGLDCIRPCFWVELIRGRPKENTIWTSGSSISFCGVNSDTVGWSWPDGAELPFTIDK

SEQ ID NO: 21012 - protein, 469 aa, synthetic construct; identical to SEQ ID NO: 20709
  REGION 1..469: note = neuraminidase__InfluenzaA__AEM92590

SEQ ID NO: 21013 - protein, 469 aa, synthetic construct; identical to SEQ ID NO: 20709
  REGION 1..469: note = neuraminidase__InfluenzaA__AEM92600

SEQ ID NO: 21014 - protein, 469 aa, synthetic construct
  REGION 1..469: note = neuraminidase__InfluenzaA__AEM92610
MNPNQKIITIGSVCMTIGMANLMLQIGNIISIWISHSIQLGNQNQIETCNQSVITYENNTWVNQTYVNISNTNFAAGQSVVSVKLAGNSSLCPVSGWAIYSKDNSIRIGSKGDVFVIREPFISCSPLECRTFFLTQGALLNDKHSNGTIKDRSPYRTLMSCPIGEVPSPYNSRFESVAWSASACHDGINWLTIGISGPDNGAVAVLKYNGIITDTIKSWRNNILRTQESECACVNGSCFTVMTDGPSDGQASYKIFRIEKGKIVKSVEMNAPNYHYEECSCYPDSSEITCVCRDNWHGSNRPWVSFNQNLEYQIGYICSGIFGDNPRPNDKTGSCGPVSSNGANGVKGFSFKYGNGVWIGRTKSISSRNGFEMIWDPNGWTGTDNNFSIKQDIVGINEWSGYSGSFVQHPELTGLDCIRPCFWVELIRGRPKENTIWTSGSSISFCGVNSDTVSWSWPDGAELPFTIDK

SEQ ID NO: 21015 - protein, 469 aa, synthetic construct
  REGION 1..469: note = neuraminidase__InfluenzaA__AEM92620
MNPNQKIITIGSVCMIIGMANLMLQIGNIISIWISHSIQLGNQNQIETCNQSVITYENNTWVNQTYVNISNTNFAAGQSVVSVKLAGNSSLCPVSGWAIYSKDNSIRIGSKGDVFVIREPFISCSPLECRTFFLTQGALLDDKHSNGTIKDRSPYRTLMSCPIGEVPSPYNSRFESVAWSASACHDGINWLTIGISGPDNGAVAVLKYNGIITDTIKSWRNNILRTQESECACVNGSCFTIMTDGPSDGQASYKIFRIEKGKIVKSVEMNAPNYHYEECSCYPDSSEITCVCRDNWHGSNRPWVSFNQNLEYQMGYICSGIFGDNPRPNDKTGSCGPVSSNGANGVKGFSFKYGNGVWIGRTKSISSRNGFEMIWDPNGWTGTDNKFSIKQDIVGINEWSGYSGSFVQHPELTGLDCIRPCFWVELIRGRPKENTIWTSGSSISFCGVNSDTVGWSWPDGAELPFTIDK

SEQ ID NO: 21016 - protein, 469 aa, synthetic construct
  REGION 1..469: note = neuraminidase__InfluenzaA__AEM92650
MNPNQKIITIGSVCMTIGMANLILQIGNIISIWISHSIQLGNQNQIETCNQSVITYENNTWVNQTYVNISNTNFAAGQSVVSVKLAGNSSLCPVSGWAIYSKDNSVRIGSKGDVFVIREPFISCSPLECRTFFLTQGALLNDKHSNGTIKDRSPYRTLMSCPIGEVPSPYNSRFESVAWSASACHDGINWLTIGISGPDNGAVAVLKYNGIITDTIKSWRNNILRTQESECACVNGSCFTVMTDGPSDGQASYKIFRIEKGKIVKSVEMNAPNYHYEECSCYPDSSEITCVCRDNWHGSNRPWVSFNQNLEYQIGYICSGIFGDNPRPNDKTGSCGPVSSNGANGVKGFSFKYGNGVWIGRTKSISSRNGFEMIWDPNGWTGTDTKFSIKQDIVGINEWSGYSGSFVQHPELTGLDCIRPCFWVELIRGRPKENTIWTSGSSISFCGVNSDTVGWSWPDGAELPFTIDK

SEQ ID NO: 21017 - protein, 469 aa, synthetic construct; identical to SEQ ID NO: 19410
  REGION 1..469: note = neuraminidase__InfluenzaA__AEM98410

SEQ ID NO: 21018 - protein, 469 aa, synthetic construct; identical to SEQ ID NO: 19410
  REGION 1..469: note = neuraminidase__InfluenzaA__AEM98421

SEQ ID NO: 21019 - protein, 469 aa, synthetic construct; identical to SEQ ID NO: 19410
  REGION 1..469: note = neuraminidase__InfluenzaA__AEM98432

SEQ ID NO: 21020 - protein, 469 aa, synthetic construct; identical to SEQ ID NO: 20786
  REGION 1..469: note = neuraminidase__InfluenzaA__AEN55401

SEQ ID NO: 21021 - protein, 469 aa, synthetic construct; identical to SEQ ID NO: 19013
  REGION 1..469: note = neuraminidase__InfluenzaA__AEN55411

SEQ ID NO: 21022 - protein, 469 aa, synthetic construct
  REGION 1..469: note = neuraminidase__InfluenzaA__AEN55421
MNPNQKIITIGSVCMTIGMANLILQIGNIISIWISHSIQLGNQSQIETCNQSVITYENNTWVNQTYVNISNTNFAARQSVVSVKLAGNSSLCPVSGWAIYSKDNSIRIGSKGDVFVIREPFISCSPLECRTFFLTQGALLNDKHSNGTIKDRSPYRTLMSCPIGEVPSPYNSRFESVAWSASACHDGINWLTIGISGPDNGAVAVLKYNGIITDTIKSWRNNILRTQESECVCVNGSCFTIMTDGPSDGQASYKIFRIEKGKIVKSVEMNAPNYHYEECSCYPDSSEITCVCRDNWHGSNRPWVSFNQNLEYQIGYICSGIFGDNPRPNDKTGSCGPVSSNGANGVKGFSFKYGNGVWIGRTKSISSRKGFEMIWDPNGWTGTDNNFSIKQDIVGINEWSGYSGSFVQHPELTGLDCIRPCFWVELIRGRPKENTIWTSGSSISFCGVNSDTVGWSWPDGAELPFTIDK

SEQ ID NO: 21023 - protein, 469 aa, synthetic construct
  REGION 1..469: note = neuraminidase__InfluenzaA__AEN55466
MNPNQKIITIGSVCITIGMANLILQIGNTISIWISHSIQLGNQNQIETCNQSVITYENNTWVNQTYVNISNTNFAAGQSVVSVKLAGNSSLCPVSGWAIYSKDNSIRIGSKGDVFVIREPFISCSPLECRTFFLTQGALLNDKHSNGTIKDRSPYRTLMSCPIGEVPSPYNSRFESVAWSASACHDGISWLTIGISGPDNGAVAVLKYNGIITDTIKSWRNNILRTQESECACVNGSCFTVMTDGPSDGQASYKIFRIEKGKIVKSVEMNAPNYHYEECSCYPDSSEITCVCRDNWHGSNRPWVSFNQNLEYQIGYICSGIFGDNPRPNDKTGSCGPVSSNGANGVKGFSFKYGNGVWIGRTKSISSRNGFEMIWDPNGWTGTDNNFSIKQDIVGINEWSGYSGSFVQHPELTGLDCIRPCFWVELIRGRPKENTIWTSGSSISFCGVNSDTVGWSWPDGAELPFTIDK

SEQ ID NO: 21024 - protein, 469 aa, synthetic construct
  REGION 1..469: note = neuraminidase__InfluenzaA__AEN55476
MNPNQKIITIGSVCMTIGMANLILQIGNIISIWISHSIQLGNQSQIETCNQSVITYENNTWVNQTYVNISNTNFAAGQSVVSVKLAGNSSLCPVSGWAIYSKDNSIRIGSKGDVFVIREPFISCSPLECRTFFLTQGALLNDKHSNGTIKDRSPYRTLMSCPIGEVPSPYNSRFESVAWSASACHDGINWLTIGISGPDNGAVAVLKYNGIITDTIKSWRNNILRTQESECACVNGSCFTIMTDGPSDGQASYKIFRIEKGKIVKSVEMNAPNYHYEECSCYPDSSEITCVCRDNWHGSNRPWVSFNQNLEYQIGYICSGIFGDNPRPNDKTGSCGPVSSNGANGVKGFSFKYGNGVWIGRTKSISSRKGFEMIWDPNGWTGTDNNFSIKQDIVGINEWSGYSGSFVQHPELTGLDCIRPCFWVELIRGRPKENTIWTSGSSISFCGVNSDTVSWSWPDGAELPFTIDK

SEQ ID NO: 21025 - protein, 469 aa, synthetic construct; identical to SEQ ID NO: 20257
  REGION 1..469: note = neuraminidase__InfluenzaA__AEN55486

SEQ ID NO: 21026 - protein, 469 aa, synthetic construct; identical to SEQ ID NO: 20257
  REGION 1..469: note = neuraminidase__InfluenzaA__AEN55506

SEQ ID NO: 21027 - protein, 469 aa, synthetic construct
  REGION 1..469: note = neuraminidase__InfluenzaA__AEN55516
MNPNQKIITIGSVCMTIGMANLILQIGNIISIWISHSIQLGNQSQIETCNQSVITYENNTWVNQTYVNISNTNFAAGQSVVSVKLAGNSSLCPVSGWAIYSKDNSIRIGSRGDVFVIREPFISCSPLECRTFFLTQGALLNDKHSNGTIKDRSPYRTLMSCPIGEVPSPYNSRFESVAWSASACHDGINWLTIGISGPDNGAVAVLKYNGIITDTIKSWRNNILRTQESECACVNGSCFTIMTDGPSDGQASYKIFRIEKGKIVKSVEMNAPNYHYEECSCYPDSSEITCVCRDNWHGSNRPWVSFNQNLEYQIGYICSGIFGDNPRPNDKTGSCGPVSSNGANGVKGFSFKYGNGVWIGRTKSISSRKGFEMIWDPNGWTGTDNNFSIKQDIVGINEWSGYSGSFVQHPELTGLDCIRPCFWVELIRGRPKENTIWTSGSSISFCGVNSDTVGWSWPDGAELPFTIDK

SEQ ID NO: 21028 - protein, 469 aa, synthetic construct; identical to SEQ ID NO: 20257
  REGION 1..469: note = neuraminidase__InfluenzaA__AEN55526

SEQ ID NO: 21029 - protein, 469 aa, synthetic construct; identical to SEQ ID NO: 20786
  REGION 1..469: note = neuraminidase__InfluenzaA__AEN69429

SEQ ID NO: 21030 - protein, 469 aa, synthetic construct; identical to SEQ ID NO: 20783
  REGION 1..469: note = neuraminidase__InfluenzaA__AEN69438

SEQ ID NO: 21031 - protein, 469 aa, synthetic construct; identical to SEQ ID NO: 19013
  REGION 1..469: note = neuraminidase__InfluenzaA__AEN69484

SEQ ID NO: 21032 - protein, 469 aa, synthetic construct; identical to SEQ ID NO: 16685
  REGION 1..469: note = neuraminidase__InfluenzaA__AEO01627

SEQ ID NO: 21033 - protein, 469 aa, synthetic construct; identical to SEQ ID NO: 16685
  REGION 1..469: note = neuraminidase__InfluenzaA__AEO01638

SEQ ID NO: 21034 - protein, 469 aa, synthetic construct
  REGION 1..469: note = neuraminidase__InfluenzaA__AEO01644
MNPNQKIITIGSVSLTISTICFFMQIAILITTVTLHFKQYEFNSPPNNQVMLCEPTIIERNITEIVYLTNTTIEKEICPKLAEYRNWSKPQCDITGFAPFSKDNSIRLSAGGDIWVTREPYVSCDPDKCYQFALGQGTTLNNVHSNDTVRDRTPYRTLLMNELGVPFHLGTKQVCIAWSSSSCHDGKAWLHVCITGDDKNATASFIYNGRLVDSIVSWSKEILRTQESECVCINGTCTVVMTDGSASGKADTKILFIEEGKIVHTSTLSGSAQHVEECSCYPRYPGVRCVCRDNWKGSNRPIVDINIKDHSIVSSYVCSGLVGDTPRKTDSSSSGHCLDPNNEEGGHGVKGWAFDDGNDVWMGRTISEKSRLGYETFKVIEGWSNPKSKLQINRQVIVDRGNRSGYSGIFSVEGKSCINRCFYVELIRGRKEETEVLWTSNSIVVFCGTSGTYGTGSWPDGADINLMPI

SEQ ID NO: 21035 - protein, 469 aa, synthetic construct
  REGION 1..469: note = neuraminidase__InfluenzaA__AEO01654
MNPNQKIITIGSVSLTISTICFFMQIAILITTVTLHFKQYEFNSPPNNQVMLCEPTIIERNITEIVYLTNTTIEKEICPKLAEYRNWSKPQCDITGFAPFSKDNSIRLSAGGDIWVTREPYVSCDPDKCYQFALGQGTTLNNVHSNDTVRDRTPYRTLLMNELGVPFHLGTKQVCIAWSSSSCHDGKAWLHVCITGDDKNATASFIYNGRLVDSIVSWSKDILRTQESECVCINGTCTVVMTDGSASGKADTKILFIEEGKIVHTSTLSGSAQHVEECSCYPRYPGVRCVCRDNWKGSNRPIVDINIKDHSIVSSYVCSGLVGDTPRKNDSSSSGHCLDPNNEEGGHGVKGWAFDDGNDVWMGRTISEKSRLGYETFKVIEGWSNPKSKLQINRQVIVDRGNRSGYSGIFSVEGKSCINRCFYVELIRGRKEETKVLWTSNSIVVFCGTSGTYGTGSWPDGAEINLMPI

SEQ ID NO: 21036 - protein, 470 aa, synthetic construct; identical to SEQ ID NO: 16632
  REGION 1..470: note = neuraminidase__InfluenzaA__AEO01665

SEQ ID NO: 21037 - protein, 470 aa, synthetic construct
  REGION 1..470: note = neuraminidase__InfluenzaA__AEO01676
MNPNQKIITIGSISIAIGIISLMLQIGNIISIWASHSIQTGSQNNTGICNQRIITYENSTWVNHTYVNINNTNVVAGEDKTSVTLAGNSSLCSISGWAIYTKDNSIRIGSKGDVFVIREPFISCSHLECRTFFLTQGALLNDKHSNGTVKDRSPYRALMSCPLGEAPSPYNSKFESVAWSASACHDGMGWLTIGISGPDNGAVAVLKYNGIITGTIKSWKKQILRTQESECVCMNGSCFTIMTDGPSNKAASYKIFKIEKGKVTKSIELNAPNFHYEECSCYPDTGIVMCVCRDNWHGSNRPWVSFNQNLDYQIGYICSGVFGDNPRPEDGEGSCNPVTVDGANGVKGFSYKYDNGVWIGRTKSNRLRKGFEMIWDPNGWTNTDSDFSVKQDVVAITDWSGYSGSFVQHPELTGLDCIRPCFWVELVRGLPRENTTIWTSGSSIFFRGDNSDTANWSWPDGAEMTFTIDK

SEQ ID NO: 21038 - protein, 469 aa, synthetic construct; identical to SEQ ID NO: 16685
  REGION 1..469: note = neuraminidase__InfluenzaA__AEO01693

SEQ ID NO: 21039 - protein, 470 aa, synthetic construct; identical to SEQ ID NO: 16632
  REGION 1..470: note = neuraminidase__InfluenzaA__AEO01711

SEQ ID NO: 21040 - protein, 469 aa, synthetic construct; identical to SEQ ID NO: 20808
  REGION 1..469: note = neuraminidase__InfluenzaA__AEO37533

SEQ ID NO: 21041 - protein, 469 aa, synthetic construct
  REGION 1..469: note = neuraminidase__InfluenzaA__AEO37543
MNPNQKIITIGSVCMTIGMANLILQIGNIISIWISHSIQLGNQNQIEPCNQSVITYENNTWVNQTYVNISNTNFAAGQSVVSVKLAGNSSLCPVSGWAIYSKDNSIRIGSKGDVFVIREPFISCSPLECRTFFLTQGALLNDKHSNGTIKDRSPYRTLMSCPIGEVPSPYNSRFESVAWSASACHDGINWLTIGISGPDNGAVAVLKYNGIITDTIKSWRNNILRTQESECACVNGSCFTVMTDGPSDGQASYKIFRIEKGKIVKSVEMNAPNYHYEECSCYPDSSEITCVCRDNWHGSNRPWVSFNQNLEYQIGYICSGIFGDNPRPNDKTGSCGPVSSNGANGVKGFSFKYGNGVWIGRTKSISSRNGFEMIWDPNGWTGTDNNFSVKQDIIGINEWSGYSGSFVQHPELTGLDCIRPCFWVELIRGRPKENTIWTSGSSISFCGVNSDTVGWSWPDGAELPFTIDK

SEQ ID NO: 21042 - protein, 469 aa, synthetic construct; identical to SEQ ID NO: 20257
  REGION 1..469: note = neuraminidase__InfluenzaA__AEO72179

SEQ ID NO: 21043 - protein, 449 aa, synthetic construct
  REGION 1..449: note = neuraminidase__InfluenzaA__AEO88957
MNPNQKIITIGSICMVIGIVSLMLQIGNMISIWVSHSTQTGNQHQAEPIRNTNFLTENAVASVTLAGNSSLCPIRGWAVHSKDNSIRIGSKGDVFVIREPFISCSHLECRTFFLTQGALLNDKHSNGTVKDRSPHRTLMSCPVGEAPSPYNSRFESVAWSASACHDGTSWLTIGISGPDNGAVAVLKYNGIITDTIKSWRNNILRTQESECACVNGSCFTVMTDGPSNGQASYKIFKMEKGKVVKSVELNAPNYHYEECSCYPDAGEIICVCRDNWHGSNRPWVSFNQNLEYQIGYICSGVFGDNPRPNDGTGSCGPVSPNGAYGIKGFSFKYGNGVWIGRTKSTNSRSGFEMIWDPNGWTGTDSNFSVKQDIVAITDWSGYSGSFVQHPELTGLDCIRPCFWVELIRGRPKESTIWTSGSSISFCGVNSDTVSWSWPDGAELPFTIDK

SEQ ID NO: 21044 - protein, 449 aa, synthetic construct
  REGION 1..449: note = neuraminidase__InfluenzaA__AEO88965
MNPNQKIITIGSICMVIEIVSLMLQIGNMISIWVSHSIQTKNQRQAEPISNTKFLTEKAVASVTLAGNSSLCPISGWAVHSKDNSIRIGSKGDVFVIREPFISCSHLECRTFFLTQGALLNDKHSNGTVKDRSPHRTLMSCPVGEAPSPYNSRFESVAWSASACHDGTSWLTIGISGPDNGAVAVLKYNGIITDTIKSWRNNILRTQESECACVNGSCFTVMTDGPSNGQASYKIFKMEKGKVVKSVELDAPNYHYEECSCYPDAGEITCVCRDNWHGSNRPWVSFNQNLEYQIGYICSGVFGDNPRPNDGTGSCGPVSPNGAYGVKGFSFKYGNGVWIGRTKSTNSRSGFEMIWDPNGWTGTDSSFSVKQDIVAITDWSGYSGSFVQHPELTGLNCIRPCFWVELVRGRPKESTIWTSGSSISFCGVNSDTVGWSWPDGAELPFTIDK

SEQ ID NO: 21045 - protein, 449 aa, synthetic construct
  REGION 1..449: note = neuraminidase__InfluenzaA__AEO88973
MNPNQKIITIGSICMVIGIVSLMLQIGNMISLWVSHSIQTGNQHQVEPISNTNFLTEKAVASVTLAGNSSLCPIRGWAVHSKDNSIRIGSKGDVFVIREPFISCSHLECRTFFLTQGALLNDKHSNGTVKDRSPHRTLMSCPVGEAPSPYNSRFESVAWSASACHDGTSWLTIGISGPDNGAVAVLKYNGMITDTIKSWRNNILRTQESECACVNGSCFTVMTDGPSNGQASYKIFKMEKGRVVKSVELDAPNYHYEECSCYPDAGEITCVCRDNWHGSNRPWVSFNQNLEYQIGYICSGVFGDNPRPNDGTGSCGPVSPNGAYGVKGFSFKYGNGVWIGRTKSPNSRSGFEMIWDPNGWIETDSSFSVKQDIVAITDWSGYSGSFVQHPELTGLDCIRPCFWVELIRGRPKESTIWTSGSSISFCGVNSDTVSWSWPDGAELPFTIDK

SEQ ID NO: 21046 - protein, 449 aa, synthetic construct
  REGION 1..449: note = neuraminidase__InfluenzaA__AEO88982
MNPNQKIITIGSICMVIGIVSLMLQIGNMISIWVSHSIQTGNQHQAEPIRNTNFLTENAVASVTLAGNSSLCPVRGWAVHSKDNSIRIGSKGDVFVIREPFISCSHLECRTFFLTQGALLNDKHSNGTVKDRSPHRTLMSCPVGEAPSPYNSRFESVAWSASACHDGTSWLTIGISGPDNGAVAVLKYNGIITDTIKSWRNNILRTQESECACVNGSCFTVMTDGPSNGQASYKIFKMEKGKVVKSVELNAPNYHYEECSCYPDAGEITCVCRDNWHGSNRPWVSFNQNLEYQIGYICSGIFGDNPRPHDGTGSCGPVSPNGAYGIKGFSFKYGNGVWIGRTKSTNSRSGFEMIWDPNGWTGTDSNFSVKQDIVAITDWSGYSGSFVQHPELTGLDCIRPCFWVELIRGRPKESTIWTSGSSISFCGVNSDTVSWSWPDDAELPFTIDK

SEQ ID NO: 21047 - protein, 449 aa, synthetic construct
  REGION 1..449: note = neuraminidase__InfluenzaA__AEO88990
MNPNQKIITIGSICMVIGIVSLMLQIGNMISIWVSHSIQTGNQHQAEPIRNTNFLTENAVASVTLAGNSSLCPVRGWAVHSKDNSIRIGSKGDVFVIREPFISCSHLECRTFFLTQGALLNDKHSNGTVKDRSPHRTLMSCPVGEAPSPYNSRFESVAWSASACHDGTSWLTIGISGPDNGAVAVLKYNGIITDTIKSWRNNILRTQESECACVNGSCFTVMTDGPSNGQASYKIFKMEKGKVVKSVELNAPNYHYEECSCYPDAGEITCVCRDNWHGSNRPWVSFNQNLEYQIGYICSGVFGDNPRPNDGTGSCGPVSPNGAYGIKGFSFKYGNGVWIGRTKSTNSRSGFEMIWDPNGWTGTDSNFSVKQDIVAITDWSGYSGSFVQHPELTGLDCIRPCFWVELIRGRPKESTIWTSGSSISFCGVNSDTVSWSWPDDAELPFTIDK

SEQ ID NO: 21048 - protein, 449 aa, synthetic construct
  REGION 1..449: note = neuraminidase__InfluenzaA__AEO88998
MNPNQKIITIGSICMVIGIVSLMLQIGNMISIWVSHSIQTGNQHQAEPIRNTNFLTENAVASVTLAGNSSLCPIRGWAVHSKDNSIRIGSKGDVFVIREPFISCSHLECRTFFLTQGALLNDKHSNGTVKDRSPHRTLMSCPVGEAPSPYNSRFESVAWSASACHDGTSWLTIGISGPDNGAVAVLKYNGIITDTIKSWRNNILRTQESECACVNGSCFTVMTDGPSNEQASYKIFKMEKGKVVKSVELNAPNYHYEECSCYPDAGEIICVCRDNWHGSNRPWVSFNQNLEYQIGYICSGVFGDNPRPNDGTGSCGPVSPNGAYGIKGFSFKYGNGVWIGRTKSTNSRSGFEMIWDPNGWTGTDSNFSVKQDIVAITDWSGYSGSFVQHPELTGLDCIRPCFWVELIRGRPKESTIWTSGSSISFCGVNSDTVSWSWPDGAELPFTIDK

SEQ ID NO: 21049 - protein, 449 aa, synthetic construct
  REGION 1..449: note = neuraminidase__InfluenzaA__AEO89006
MNPNQKIITIGSICMVIGIVSLMLQIGNMISIWVSHSIQTGNQHQAEPIRNTNFLTENAVASVTLAGNSSLCPVRGWAVHSKDNSIRIGSKGDVFVIREPFISCSHLECRTFFLTQGALLNDKHSNGTVKDRSPHRTLMSCPVGEAPSPYNSRFESVAWSASACHDGTSWLTIGISGPDNGAVAVLKYNGIITDTIKSWRNNILRTQESECACVNGSCFTVMTDGPSNGQASYKIFKMEKGKVVKSVELNAPNYHYEECSCYPDAGEITCVCRDNWHGSNRPWVSFNQNLEYQIGYICSGVFGDNPRPNDGTGSCGPVSPNGAYGIKGFSFKYGNGVWIGRTKSTNSRSGFEMIWDPNGWTGTDSDFSVKQDIIAITDWSGYSGSFVQHPELTGLDCIRPCFWVELIRGRPKESTIWTSGSSISFCGVNSDTVSWSWPDGAELPFTIDK

SEQ ID NO: 21050 - protein, 449 aa, synthetic construct
  REGION 1..449: note = neuraminidase__InfluenzaA__AEO89023
MNPNQKIITIGSICMVIGIVSLMLQIGNMVSLWVSHSIQTGNQHQVEPISNTNFLTEKAVASVTLAGNSSLCPIRGWAVHSKDNSIRIGSKGDVFVIREPFISCSHLECRTFFLTQGALLNDKHSNGTVKDRSPHRTLMSCPVGEAPSPYNSRFESVAWSASACHDGTSWLTIGISGPDNGAVAVLKYNGMITDTIKSWRNNILRTQESECACVNGSCFTVMTDGPSNGQASYKIFKMEKGKVVKSVELDAPNYHYEECSCYPDAGEITCVCRDNWHGSNRPWVSFNQNLEYQIGYICSGVFGDNPRPNDGTGSCGPVSPNGAYGVKGFSFKYGNGVWIGRTKSPSSRSGFEMIWDPNGWTETDSSFSVKQDIVAITDWSGYSGSFVQHPELTGLDCIRPCFWVELIRGRPKESTIWTSGSSISFCGVNSDTVSWSWPDGAELPFTIDK

SEQ ID NO: 21051 - protein, 449 aa, synthetic construct
  REGION 1..449: note = neuraminidase__InfluenzaA__AEO89032
MNPNQKIITIGSICMVIGIVSLMLQIGNMISIWVSHSIQTGNQHQAEPIRNTNFLTENAVASVTLAGNSSLCPVRGWAVHSKDNSIRIGSKGDVFVIREPFISCSHLECRTFFLTQGALLNDKHSNGTVKDRSPHRTLMSCPVGEAPSPYNSRFESVAWSASACHDGTSWLTIGISGPDNGAVAVLKYNGIITDTIKSWRNNILRTQESECACVNGSCFTVMTDGPSNGQASYKIFKMEKGKVVKSVELNAPNYHYEECSCYPDAGEITCVCRDNWHGSNRPWVSFNQNLEYQIGYICSGVFGDNPRPNDGTGSCGPVSPNGAYGIKGFSFKYGNGVWIGRTKSTNSRSGFEMIWDPNGWTGTDSNFSVKQDIVAITDWSGYSGSFVQHPELTGLDCIRPCFWVELIRGRPKESTIWTSGSSISFCGVNSDTVSWSWPDGAELPFTIDK

SEQ ID NO: 21052 - protein, 449 aa, synthetic construct
  REGION 1..449: note = neuraminidase__InfluenzaA__AEO89041
MNPNQKIITIGSICMVIGLVSLMLQIGNMISIWVSHSIQTGNQHQAEPIRNTNFLTENAVASVTLAGNSSLCPVRGWAVHSKDNSIRIGSKGDVFVIREPFISCSHLECRTFFLTQGALLNDKHSNGTVKDRSPHRTLMSCPVGEAPSPYNSRFESVAWSASACHDGTSWLTIGISGPDNGAVAVLKYNGIITDTIKSWRNNILRTQESECACVNGSCFTVMTDGPSNGQASYKIFKMEKGKVVKSVELNAPNYHYEECSCYPDAGEITCVCRDNWHGSNRPWVSFNQNLEYQIGYICSGVFGDNPRPNDGTGSCGPVSPNGAYGIKGFSFKYGNGVWIGRTKSTNSRSGFEMIWDPNGWTGTDSNFSVKQDIVAITDWSGYSGSFVQHPELTGLDCIRPCFWIELIRGRPKESTIWTSGSSISFCGVNSDTVSWSWPDGAELPFTIDK

SEQ ID NO: 21053 - protein, 449 aa, synthetic construct
  REGION 1..449: note = neuraminidase__InfluenzaA__AEO89050
MNPNQKIITIGSICMVIGIVSLMLQIGNMISIWVSHSIQTGNQHQAEPIRNTNFLTENAVASVTLAGNSSLCPIRGWAVHSKDNSIRIGSKGDVFVIREPFISCSHLECRTFFLTQGALLNDKHSNGTVKDRSPHRTLMSCPMGEAPSPYNSRFESVAWSASACHDGTSWLTIGISGPDNGAVAVLKYNGIITDTIKSWRNNILRTQESECACVNGSCFTVMTDGPSNGQASYKIFKMEKGKVVKSVELNAPNYHYEECSCYPDAGEIICVCRDNWHGSNRPWVSFNQNLEYQIGYICSGVFGDNPRPNDGTGSCGPVSPNGAYGIKGFSFKYGNGVWIGRTKSTNSRSGFEMIWDPNGWTGTDSDFSVKQDIVAITDWSGYSGSFVQHPELTGLDCIRPCFWVELIRGRPKESTIWTSGSSISFCGVNSDTVSWSWPDGAELPFTIDK

SEQ ID NO: 21054 - protein, 449 aa, synthetic construct
  REGION 1..449: note = neuraminidase__InfluenzaA__AEO89058
MNPNQKIITIGSICMVIGIVSLMLQIGNMISIWVSHSIQTGNQRQAEPISNTKFLTEKAVASVTLAGNSSLCPISGWAVYSKDNSIRIGSRGDVFVIREPFISCSHLECRTFFLTQGALLNDKHSNGTVKDRSPHRTLMSCPVGEAPSPYNSRFESVAWSASACHDGTSWLTIGISGPDNGAVAVLKYNGIITDTIKSWRNNILRTQESECACVNGSCFTVMTDGPSNGQASYKIFKMEKGKVVKSVELDAPNYHYEECSCYPDAGEITCVCRDNWHGSNRPWVSFNQNLDYQIGYICSGVFGDNPRPNDGTGSCGPVSPNGAYGVKGFSFKYGNGVWIGRTKSTNSRSGFEMIWDPNGWTGTDSSFSVKQDIVAITDWSGYSGSFVQHPELTGLDCIRPCFWVELIRGRPKESTIWTSGSSISFCGVNSDTVSWSWPDGAELPFTIDK

SEQ ID NO: 21055 - protein, 449 aa, synthetic construct
  REGION 1..449: note = neuraminidase__InfluenzaA__AEO89075
MNPNQKIITIGSICMVIGIVSLMLQIGNMISIWVSHSIQRGNLNQVEPISNTNFLTEKAVASVTLAGNSSLCPIRGWAIHSKDNSIRIGSKGDVFVIREPFISCSHLECRTFFLTQGALLNDKHSNGTVKDRSPHRTLMSCPVGEVPSPYNSRFESVAWSASACHDGTSWLTIGISGPDNGAVAVVKYNGIITDTIKSWRNNILRTQESECACVNGSCFTVMTDGPSNGQASYKIFKMEKGKVIKSVELDAPNYHYEECSCYPDAGEITCVCRDNWHGSNRPWVSFNQNLEYQIGYICSGVFGDNPRPNDGTGSCGPVSPNGAYGVKGFSFKYGNGVWIGRTKSPNSRSGFEMIWDPNGWSETDSSFSVKQDIVAITDWSGYSGSFVQHPELTGLDCIRPCFWVELIRGRPKESTIWTSGSSISFCGVNSDTVSWSWPDGAELPFTIDK

SEQ ID NO: 21056 - protein, 449 aa, synthetic construct
  REGION 1..449: note = neuraminidase__InfluenzaA__AEO89084
MNPNQKIITIGSICMVIGIVSLMLQIGNMISIWISYSIQTGNQHQAEPTRNATFLTENAVASVTLAGNSSLCPVRGWAVHSKDNSIRIGSKGDVFVIREPFISCSHLECRTFFLTQGALLNDKHSNGTVKDRSPHRTLMSCPVGEAPSPYNSRFESVAWSASACHDGTSWLTIGISGPDNGAVAVLKYNGIITDTIKSWRNNILRTQESECACVNGSCFTVMTDGPSDGQASYKIFKMEKGKVVKSVELIAPNYHYEECSCYPDAGEITCVCRDNWHGSNRPWVSFNQNLEYQIGYICSGVFGDNPRPNDGTGSCGPVSPNGAYGIKGFSFKYGNGVWIGRTKSTNSRSGFEMIWDPNGWTETDSNFSVKQDIVAITDWSGYSGSFVQHPELTGLDCIRPCFWVELIRGRPKESTIWTSGSSISFCGVNSDTVSWSWPDGAELPFTIDK

SEQ ID NO: 21057 - protein, 449 aa, synthetic construct
  REGION 1..449: note = neuraminidase__InfluenzaA__AEO89093
MNPNQKIITIGSICMVIGIVSLMLQIGNMISLWVSHSIQTGNQHQVEPISNTNFLVEKAVASVTLAGNSSLCPIRGWAVHSKDNSIRIGSKGDVFVIREPFISCSHLECRTFFLTQGALLNDKHSNGTVKDRSPHRTLMSCPVGEAPSPYNSRFESVAWSASACHDGTSWLTIGISGPDNGAVAVLKYNGMITDTIKSWRNNILRTQESECACVNGSCFTVMTDGPSNGQASYKIFKMEKGRVVKSVELDAPNYHYEECSCYPDAGEITCVCRDNWHGSNRPWVSFNQNLEYQIGYICSGVFGDNPRPNDGTGSCGPVSSNGAYGVKGFSFKYGNGVWIGRTKSPNSRSGFEMIWDPNGWTETDSSFSVKQDIVAITDWSGYSGSFVQHPELTGLDCIRPCFWVELIRGRPKESTIWTSGSSISFCGVNSDTVSWSWPDGAELPFTIDK

SEQ ID NO: 21058 - protein, 449 aa, synthetic construct
  REGION 1..449: note = neuraminidase__InfluenzaA__AEO89102
MNPNQKIITIGSICMVIGIVSLMLQIGNMISIWISHSIQTGNQNQVEPISNTNFLTEKAVASVILAGNSSLCPIRGWAIHSKDNSIRIGSKGDVFVIREPFISCSHLECRTFFLTQGALLNDKHSNGTVKDRSPHRTLMSCPVGEAPSPYNSRFESVAWSASACHDGTSWLTIGISGPDSGAVAVLKYNGIITDTIKSWRNNILRTQESECACVNGSCFTVMTDGPSNGQASYKIFKMEKGKVIKSVELDAPNYHYEECSCYPDAGEITCVCRDNWHGSNRPWVSFNQNLEYQIGYICSGVFGDNPRPNDGTGSCGPVSHNGAYGVKGFSFKYGNGVWIGRTKSPNSRSGFEMIWDPNGWSETDSSFSVKQDIVAITDWSGYSGSFVQHPELTGLDCIRPCFWVELIRGRPKESTVWTSGSSISFCGVNSDTVSWSWPDGAELPFTIDK

SEQ ID NO: 21059 - protein, 449 aa, synthetic construct
  REGION 1..449: note = neuraminidase__InfluenzaA__AEO89111
MNPNQKIITIGSICMVIGIVSLMLQIGNIISIWVSHSIQTGNQHQDEPIRNANVLTENAVASVTLAGNSSLCPVRGWAVHSKDNSIRIGSKGDVFVIREPFISCSHLECRTFFLTQGALLNDKHSNGTVKDRSPHRTLMSCPVGEAPSPYNSRFESVAWSASACHDGTSWLTIGISGPDNGAVAVLKYNGIITDTIKSWRNNILRTQESECACVNGSCFTVMTDGPSNGQASYKIFKMEKGKVVKSVELNAPNYHYEECSCYPDAGEITCVCRDNWHGSNRPWVSFNQNLEYQIGYICSGVFGDNPRPNDGTGSCDPVSPNGAYGIKGFSFKYGNGVWIGRTKSTNSRSGFEMIWDPNGWTETDSNFSVKQDIVAITDWSGYSGSFVQHPELTGLDCIRPCFWVELIRGRPKESTIWTSGSSISFCGVNSDTVSWSWPDGAELPFTIDK

SEQ ID NO: 21060 - protein, 449 aa, synthetic construct
  REGION 1..449: note = neuraminidase__InfluenzaA__AEO89120
MNPNQKIITIGSICMVIGIVSLMLQIGNMISIWVSHSIQTGNQHQAEPIRNASFLTENAVASVTLAGNSSLCPVRGWAVHSKDNSIRIGSKGDVFVIREPFISCSHLECRTFFLTQGALLNDKHSNGTVKDRSPHRTLMSCPVGEAPSPYNSRFESVAWSASACHDGISWLTIGISGPDNGAVAVLKYNGIITDTIKSWRNNILRTQESECACVNGSCFTVMTDGPSNGQASYKIFKMEKGKVVKSVELNAPNYHYEECSCYPDAGEITCVCRDNWHGSNRPWVSFNQNLEYQIGYICSGVFGDNPRPNDGTGSCGPVSPNGAYGIKGFSFKYGNGVWIGRTKSTNSRSGFEMIWDPNGWAETDSNFSVKQDIVAITDWSGYSGSFVQHPELTGLDCIRPCFWVELIRGRPKEGTIWTSGSSISFCGVNSDTVSWSWPDGAELPFTIDK

SEQ ID NO: 21061 - protein, 449 aa, synthetic construct
  REGION 1..449: note = neuraminidase__InfluenzaA__AEO89129
MNPNQKIITIGSICMVIGIVSLMLQIGNIISIWVSHSTQTGNQHQDEPIRNANFLTENAVASVTLAGNSSLCPVRGWAVHSKDNSIRVGSKGDVFVIREPFISCSHLECRTFFLTQGALLNDKHSNGTVKDRSPHRTLMSCPVGEAPSPYNSRFESVAWSASACHDGTSWLTIGISGPDNGAVAVLKYNGIITDTIKSWRNNILRTQESECACVNGSCFTVMTDGPSNGQASYKIFKMEKGKVVKSVELNAPNYHYEECSCYPDAGEITCVCRDNWHGSNRPWVSFNQNLEYQIGYICSGVFGDNPRPNDGTGSCDPVSPNGAYGIKGFSFKYGNGVWIGRTKSTNSRSGFEMIWDPNGWTETDSNFSVKQDIVAITDWSGYSGSFVQHPELTGLDCIRPCFWVELIRGRPKESTIWTSGSSISFCGVNSDTVSWSWPDGAELPFTIDK

SEQ ID NO: 21062 - protein, 449 aa, synthetic construct
  REGION 1..449: note = neuraminidase__InfluenzaA__AEO89138
MNPNQKIITIGSICMVTGIVSLMLQIGNIISMWVSHSIQTRNQHQAEPIRNTNFLTENAVASVTLTGNSSLCPIRGWAVHSKDNSIRIGSKGDVFVIREPFISCSHLECRTFFLTQGALLNDKHSNGTVKDRSPHRTLMSCPVGEAPSPYNSRFESVAWSASACHDGTSWLTIGISGPDNGAVAVLKYNGIITDTIKSWRNNILRTQESECACVNGSCFTVMTDGPSNGQASYKIFKMEKGKVVKSVELNAPNYHYEECSCYPDAGEIICVCRDNWHGSNRPWVSFNQNLEYQIGYICSGVFGDNPRPNDGTGSCGPVSPNGAYGIKGFSFKYGNGVWIGRTKSTNSRSGFEMIWDPNGWTGTDNDFSVKQDIVAITDWSGYSGSFVQHPELTGLDCIRPCFWVELIRGRPKESTVWTSGSSISFCGVNSDTVSWSWPDGAELPFTIDK

SEQ ID NO: 21063 - protein, 449 aa, synthetic construct
  REGION 1..449: note = neuraminidase__InfluenzaA__AEO89156
MNPNQKIITIGSICMVTGIVSLMLQIGNITSMWVSHSIQTRNQHQAEPIRNTNFLTENAVASVTLAGNSSLCPIRGWAVHSKDNSIRIGSKGDVFVIREPFISCSHLECRTFFLTQGALLNDKHSNGTVKDRSPHRTLMSCPVGEAPSPYNSRFESVAWSASACHDGTSWLTIGISGPDNGAVAVLKYNGIITDTIKSWRNNILRTQESECACVNGSCFTVMTDGPSNGQASYKIFKMEKGKVVKSVELNAPNYHYEECSCYPDAGEIICVCRDNWHGSNRPWVSFNQNLEYQIGYICSGVFGDNPRPNDGTGSCGPVSPNGAYGIKGFSFKYGNGVWIGRTKSTNSRSGFEMIWDPNGWTGTDSDFSVKQDIVAITDWSGYSGSFVQHPELTGLDCIRPCFWVELIRGRPKESTIWTSGSSISFCGVNSDTVSWSWPDGAELPFTIDK

SEQ ID NO: 21064 - protein, 449 aa, synthetic construct
  REGION 1..449: note = neuraminidase__InfluenzaA__AEO89174
MNPNQKIITIGSICMVTGIVSLMLQIGNIISMWVSHSIQTRNQHQAEPIRNTNFLTENAVASVTLAGNSSLCPIRGWAVHSKDNSIRIGSKGDVFVIREPFISCSHLECRTFFLTQGALLNDKHSNGTVKDRSPHRTLMSCPVGEAPSPYNSRFESVAWSASACHDGTSWLTIGISGPDNGAVAVLKYNGIITDTIKSWRNNILRTQESECACVNGSCFTVMTDGPSNGQASYKIFKMEKGKVVKSVELNAPNYHYEECSCYPDAGEIICVCRDNWHGSNRPWVSFNQNLEYQIGYICSGVFGDNPRPNDGTGSCGPVSPNGAYGIKGFSFKYGNGVWIGRTKSTNSRSGFEMIWDPNGWTGTDSDFSVKQDIVAITDWSGYSGSFVQHPELTGLDCIRPCFWVELIRGRPKESTIWTSGSSISFCGVNSDTVSWSWPDGAELPFTIDK

SEQ ID NO: 21065 - protein, 449 aa, synthetic construct
  REGION 1..449: note = neuraminidase__InfluenzaA__AEO89183
MNPNQKIVTIGSICMVIGIVSLMLQIGNMISIWVSHSIQTGNQHQTEPIRNTNFLTENTVASVTLAGNSSLCPIRGWAVHSKDNSIRIGSKGDVFVIREPFISCSHLECRTFFLTQGALLNDKHSNGTVKDRSPHRTLMSCPIGEAPSPYNSRFESVAWSASACHDGTSWLTIGISGPDNGAVAVLKYNGIITDTIKSWRNNILRTQESECACVNGSCFTVMTDGPSNGQASYKIFKMEKGKVVKSVELNAPNYHYEECSCYPDAGEIICVCRDNWHGSNRPWVSFNQNLEYQIGYICSGVFGDNPRPNDGKGSCGPVSPNGAYGVKGFSFKYGNGVWIGRTKSTHSRSGFEMIWDPNGWTGTDSEFSMKQDIVAITDWSGYSGSFVQHPELTGLDCIRPCFWVELIRGRPKESTIWTSGSSISFCGVNSDTVSWSWPDGAELPFTIDK

SEQ ID NO: 21066 - protein, 449 aa, synthetic construct
  REGION 1..449: note = neuraminidase__InfluenzaA__AEO89205
MNPTQKIITIGSICMVIGIVSLMLQIGNMISIWVSHSIQTGNQHQAEPIRNASFLTENAVASVTLAGNSSLCPVRGWAVHSKDNSIRIGSKGDVFVIREPFISCSHLECRTFFLTQGALLNDKHSNGTVKDRSPHRTLMSCPVGEAPSPYNSRFESVAWSASACHDGISWLTIGISGPDNGAVAVLKYNGIITDTIKSWRNNILRTQESECACVNGSCFTVMTDGPSNGQASYKIFKMEKGKVVKSVELNAPNYHYEECSCYPDAGEITCVCRDNWHGSNRPWVSFNQNLEYQIGYICSGVFGDNPRPNDGTGSCGPVSPNGAYGIKGFSFKYGNGVWIGRTKSTNSRSGFEMIWDPNGWAETDSNFSVKQDIVAITDWSGYSGSFVQHPELTGLDCIRPCFWVELIRGRPKEGTIWTSGSSISFCGVNSDTVSWSWPDGAELPFTIDK

SEQ ID NO: 21067 - protein, 449 aa, synthetic construct
  REGION 1..449: note = neuraminidase__InfluenzaA__AEO89215
MNPNQKIITIGSICMAIGIVSLMLQIGNMISIWVSHSIQTGNQHQAEPIRNASFLTENAVASVTLAGNSSLCPVRGWAVHSKDNSIRIGSKGDVFVIREPFISCSHLECRTFFLTQGALLNDKHSNGTVKDRSPHRTLMSCPVGEAPSPYNSRFESVAWSASACHDGISWLTIGISGPDNGAVAVLKYNGIITDTIKSWRNNILRTQESECACVNGSCFTVMTDGPSNGQASYKIFKMEKGKVVKSVELNAPNYHYEECSCYPDAGEITCVCRDNWHGSNRPWVSFNQNLEYQIGYICSGVFGDNPRPNDGTGSCGPVSPNGAYGIKGFSFKYGNGVWIGRTKSTNSRSGFEMIWDPNGWAETDSNFSVKQDIVAITDWSGYSGSFVQHPELTGLDCIRPCFWVELIRGRPKEGTIWTSGSSISFCGVNSDTVSWSWPDGAELPFTIDK

SEQ ID NO: 21068 - protein, 449 aa, synthetic construct
  REGION 1..449: note = neuraminidase__InfluenzaA__AEO89226
MNPTQKIITIGSICMAIGIVSLMLQIGNMISIWVSHSIQTGNQHQAEPIRNASFLTENAVASVTLAGNSSLCPVRGWAVHSKDNSIRIGSKGDVFVIREPFISCSHLECRTFFLTQGALLNDKHSNGTVKDRSPHRTLMSCPVGEAPSPYNSRFESVAWSASACHDGISWLTIGISGPDNGAVAVLKYNGIITDTIKSWRNNILRTQESECACVNGSCFTVMTDGPSNGQASYKIFKMEKGKVVKSVELNAPNYHYEECSCYPDAGEITCVCRDNWHGSNRPWVSFNQNLEYQIGYICSGVFGDNPRPNDGTGSCGPVSPNGAYGIKGFSFKYGNGVWIGRTKSTNSRSGFEMIWDPNGWAETDSNFSVKQDIVAITDWSGYSGSFVQHPELTGLDCIRPCFWVELIRGRPKEGTIWTSGSSISFCGVNSDTVSWSWPDGAELPFTIDK

SEQ ID NO: 21069 - protein, 449 aa, synthetic construct
  REGION 1..449: note = neuraminidase__InfluenzaA__AEO89237
MNPNQKIITIGSICMVIGIVSLMLQIGNIISMWVSHSIQTRNQHQAEPIRNTNFLTENAVASVTLAGNSSLCPIRGWAVHSKDNSIRIGSKGDVFVIREPFISCSHLECRTFFLTQGALLNDKHSNGTVKDRSPHRTLMSCPVGEAPSPYNSRFESVAWSASACHDGTSWLTIGISGPDNGAVAVLKYNGIITDTIKSWRNNILRTQESECACVNGSCFTVMTDGPSNGQASYKIFKMEKGKVVKSVELNAPNYHYEECSCYPDAGEIICVCRDNWHGSNRPWVSFNQNLEYQIGYICSGVFGDNPRPNDGTGSCGPVSPNGAYGIKGFSFKYGNGVWIGRTKSTNSRSGFEMIWDPNGWTGTDSDFSVKQDIVAITDWSGYSGSFVQHPELTGLDCIRPCFWVELIRGRPKESTIWTSGSSISFCGVNSDTVSWSWPDGAELPFTIDK

SEQ ID NO: 21070 - protein, 449 aa, synthetic construct
  REGION 1..449: note = neuraminidase__InfluenzaA__AEO89248
MNPNQKIITIGSICMVIGIVSLMLQIGNIISIWVSHSFQTRVQHQAEPIRNTNFLTENAVASVTLAGNSSLCPIRGWAVHSKDNSIRIGSKGDVFVIREPFISCSHLECRTFFLTQGALLNDKHSNGTVKDRSPHRTLMSCPVGEAPSPYNSRFESVAWSASACHDGTSWLTIGISGPDNGAVAVLKYNGIITDTIKSWRNNILRTQESECACVNGSCFTVMTDGPSNGQASYKIFKMKKGKVVKSVELNAPNYHYEECSCYPDAGEIICVCRDNWHGSNRPWVSFNQNLEYQIGYICSGVFGDNPRPNDGTGSCGPVSPNGAYGIKGFSFKYGNGVWIGRTKSTNSRSGFEMIWDPNGWTGTDSDFSMKQDIVAITDWSGYSGSFVQHPELTGLDCIRPCFWVELIRGRPKESTIWTSGSSISFCGVNSDTVSWSWPDGAELPFTIDK

SEQ ID NO: 21071 - protein, 449 aa, synthetic construct
  REGION 1..449: note = neuraminidase__InfluenzaA__AEO89270
MNPNQKIITIGSICMVTGIVSLMLQIGNITSMWVSHSIQTRNQHQAEPIRNTNFLTENAVASVTLAGNSSLCPIRGWAVHSKDNSIRIGSKGDVFVIREPFISCSHLECRTFFLTQGALLNDKHSNGTVKDRSPHRTLMSCPVGEAPSPYNSRFESVAWSASACHDGTSWLTIGISGPDNGAVAVLKYNGIITDTIKSWRNNILRTQESECACVNGSCFTVMTDGPSNGQASYKIFKMEKGKVVKSVELNAPNYHYEECSCYPDAGEIICVCRDNWHGSNRPWVSFNQNLEYQIGYICSGVFGDNPRPNDGTGSCGPVSPNGAYGIKGFSFKYGNGVWIGRTKSTNSRSGFEMIWDPNGWTGTDSDFSVKQDIVAITDWSGYSGSFVQHPELTGLDCIRPCFWVELIRGRPKESTIWTSGSSISFCGVNSDTVGWSWPDGAELPFTIDK

SEQ ID NO: 21072 - protein, 449 aa, synthetic construct
  REGION 1..449: note = neuraminidase__InfluenzaA__AEO89281
MNPNQKIITIGSICMVVGIVSLMLQIGNIVSIWVSHSIQTGHQQQAEPIKNTNFLTKNAVASVTLAGNSSLCPIRGWAVHSKDNSIRIGSKGDVFVIREPFISCSHLECRTFFLTQGALLNDKHSNGTVKDRSPHRTLMSCPVGEAPSPYNSRFESVAWSASACHDGTSWLTIGISGPDNGAVAVLKYNGIITDTIKSWRNNTLRTQESECACVNGSCFTVMTDGPSNGQASYKIFKMEKGKVVKSAELNAPNYHYEECSCYPDAGEIICVCRDNWHGSNRPWVSFNQNLEYQIGYICSGVFGDNPRPNDGTGSCGPVSPNGAYGIKGFSFKYGNGVWIGRTKSTNSRSGFEMIWDPNGWTGTDSNFSMKQDIVAITEWSGYSGSFVQHPELTGLDCIRPCFWVELIRGRPKESTIWTSGSSISFCGVNSDTVSWSWPDGAELPFTIDK

SEQ ID NO: 21073 - protein, 449 aa, synthetic construct
  REGION 1..449: note = neuraminidase__InfluenzaA__AEO89291
MNPNQKIITIGSICMVVGIVSLMLQIGNIVSIWVSHSIQTGHQQQAEPIKNTNFLTENAVASVTLAGNSSLCPIRGWAVHSKDNSIRIGSKGDVFVIREPFISCSHLECRTFFLTQGALLNDKHSNGTVKDRSPHRTLMSCPVGEAPSPYNSRFESVAWSASACHDGTSWLTIGISGPDNGAVAVLKYNGIITDTIKSWRNNILRTQESECACVNGSCFTVMTDGPSNGQASYKIFKMEKGKVVKSAELNAPNYHYEECSCYPDAGEIICVCRDNWHGSNRPWVSFNQNLEYQIGYICSGVFGDNPRPNDGTGSCGPVSPNGAYGIKGFSFKYGNGVWIGRTKSTNSRSGFEMIWDPNGWTGTDSNFSMKQDIVAITEWSGYSGSFVQHPELTGLDCIRPCFWVELIRGRPKESTIWTSGSSISFCGVNSDTVSWSWPDGAELPFTIDK

SEQ ID NO: 21074 - protein, 449 aa, synthetic construct
  REGION 1..449: note = neuraminidase__InfluenzaA__AEO89302
MNPNQKIITIGSICMVIGIVSLMLQIGNIISIWVSHSIQTGNQHQDEPIRNANFLTENAVASVTLAGNSSLCPVRGWAVHSKDNSIRIGSKGDVFVIREPFISCSHLECRTFFLTQGALLNDKHSNGTVKDRSPHRTLMSCPVGEAPSPYNSRFESVAWSASACHDGTSWLTIGISGPDNGAVAVLKYNGIITDTIKSWRNNILRTQESECACVNGSCFTVMTDGPSNGQASYKIFKMEKGKVVRSVELNAPNYHYEECSCYPDAGEITCVCRDNWHGSNRPWVSFNQNLEYQIGYICSGVFGDNPRPNDGTGSCDPVSPNGAYGIKGFSFKYGNGVWIGRTKSTNSRSGFEMIWDPNGWTETDSDFSVKQDIVAITDWSGYSGSFVQHPELTGLDCIRPCFWVELIRGRPKESTIWTSGSSISFCGVSSDTVSWSWPDGAELPFTIDK

SEQ ID NO: 21075 - protein, 469 aa, synthetic construct; identical to SEQ ID NO: 16057
  REGION 1..469: note = neuraminidase__InfluenzaA__AEO99218

SEQ ID NO: 21076 - protein, 469 aa, synthetic construct
  REGION 1..469: note = neuraminidase__InfluenzaA__AEQ49739
MNPNQKIITIGSVCMTIGMANLILQIGNIISIWISHSIQLGNQSQIETCNQSVITYENNTWVNQTYVNISNTNFAAGQSVVSVKLAGNSSLCPVSGWAIYSKDNSIRIGSKGDVFVIREPFISCSPLECRTFFLTQGALLNDKHSNGTIKDRSPYRTLMSCPIGEVPSPYNSRFESVAWSASACHDGINWLTIGISGPDNGAVAVLKYNGIITDTIKSWRNNILRTQESECACVNGSCFTIMTDGPSDGQASYKIFRIEKGKIVKSVEMNAPNYHYEECSCYPDSSEVTCVCRDNWHGSNRPWVSFNQNLEYQIGYICSGIFGDNPRPNDKTGSCGPVSSNGANGVKGFSFKYGNGVWIGRTKSISSRKGFEMIWDPNGWTGTDNNFSIKQDIVGINEWSGYSGSFVQHPELTGMDCIRPCFWVELIRGRPKENTIWTSGSSISFCGVNSDTVGWSWPDGAELPFTIDK

SEQ ID NO: 21077 - protein, 469 aa, synthetic construct; identical to SEQ ID NO: 20257
  REGION 1..469: note = neuraminidase__InfluenzaA__AEQ49740

SEQ ID NO: 21078 - protein, 469 aa, synthetic construct
  REGION 1..469: note = neuraminidase__InfluenzaA__AEQ49741
MNPNQKIITIGSVCMTIGMANLILQIGNIISIWISHSIQLGNQSQIETCNQSVITYENNTWVNQTYVNISNTNFAAGQSVVSVKLAGNSSLCPVSGWAIYSKDNSIRIGSKGDVFVIREPFISCSPLECRTFFLTQGALLNDKHSNGTIKDRSPYRTLMSCPIGEVPSPYNSRFESVAWSASACHDGINWLTIGISGPDNGAVAVLKYNGIITDTIKSWRNNILRTQESECACVNGSCFTIMTDGPSDGQASYKIFRIEKGKIVKSVEMNAPNYHYEECSCYPDSSEITCVCRDNWHGSNRPWVSFNQNLEYQIGYICSGIFGDNPRPNDKTGSCGPVSSNGANGVKGFSFKYGNGVWIGRTKSISSRKGFEMIWDPNGWTGTDNNFSIKQDIVGINEWSGYSGSFVQHPELTGMDCIRPCFWVELIRGRPKENTIWTSGSSISFCGVNSDTVGWSWPDGAELPFTIDK

SEQ ID NO: 21079 - protein, 469 aa, synthetic construct
  REGION 1..469: note = neuraminidase__InfluenzaA__AEQ49742
MNPNQKIITIGSVCMTIGMANLILQIGNIISIWISHSIQLGNQSQIETCNQSVITYENNTWVNQTYVNISNTNFAAGQSVVSVKLAGNSSLCPVSGWAIHSKDNSIRIGSKGDVFVIREPFISCSPLECRTFFLTQGALLNDKHSNGTIKDRSPYRTLMSCPIGEVPSPYNSRFESVAWSASACHDGINWLTIGISGPDNGAVAVLKYNGIITDTIKSWRNNILRTQESECACVNGSCFTIMTDGPSDGQASYKIFRIEKGKIVKSVEMNAPNYHYEECSCYPDSSEITCVCRDNWHGSNRPWVSFNQNLEYQIGYICSGIFGDNPRPNDKTGSCGPVSSNGANGVKGFSFKYGNGVWIGRTKSISSRKGFEMIWDPNGWTGTDNNFSIKQDIVGINEWSGYSGSFVQHPELTGMDCIRPCFWVELIRGRPKENTIWTSGSSISFCGVNSDTVGWSWPDGAELPFTIDK

SEQ ID NO: 21080 - protein, 469 aa, synthetic construct
  REGION 1..469: note = neuraminidase__InfluenzaA__AEQ49743
MNPNQKIITIGSVCMTIGMANLILQIGNIISIWISHSIQLGNQSQIETCNQSVITYENNTWVNQTYVNISNTNFAAGQSVVSVKLAGNSSLCPVSGWAIYSKDNSIRIGSKGDVFVIREPFISCSPLECRTFFLTQGALLNDKHSNGTIKDRSPYRTLMSCPIGEVPSPYNSRFESVAWSASACHDGINWLTIGISGPDNGAVAVLKYNGIITDTIKSWRNNILRTQESECACVNGSCFTIMTDGPSDGQASYKIFRIEKGKIVKSVEMNAPNYHYEECSCYPDSSEITCVCRDNWHGSNRPWVSFNQNLEYQIGYICSGIFGDNPRPNDKTGSCGPVSSNGANGVKGFSFKYGNGVWIGRTKSISSRKGFEMIWDPNGWTGTDNNFSIKQDIVGTNEWSGYSGSFVQHPELTGLDCIRPCFWVELIRGRPKENTIWTSGSSISFCGVNSDTVGWSWPDGAELPFTIDN

SEQ ID NO: 21081 - protein, 469 aa, synthetic construct
  REGION 1..469: note = neuraminidase__InfluenzaA__AEQ49744
MNPNQKIITIGSVCMTIGMANLILQIGNIISIWISHSIQLGNQSQIETCNQSVITYENNTWVNQTYVNISNTNFAAGQSVVSVKLAGNSSLCPVSGWAIYSKDNSIRIGSKGDVFVIREPFISCSPLECRTFFLTQGALVNDKHSNGTIKDRSPYRTLMSCPIGEVPSPYNSRFESVAWSASACHDGINWLTIGISGPDNGAVAVLKYNGIITDTIKSWRNNIFRTQESECACVNGSCFTIMTDGPSDGQASYKIFRIEKGKIVKSVEMNAPNYHYEECSCYPDSSEITCVCRDNWHGSNRPWVSFNQDLEYQIGYICSGIFGDNPRPNDKTGSCGPVSSNGANGVKGFSFKYGNGVWIGRTKSISSRKGFEMIWDPNGWTGTDNNFSIKQNIVGINEWSGYSGSFVQHPELTGLDCIRPCFWVELIRGRPKENTIWTSGSSISFCGVNSDTVGWSWPDGAELPFTIDK

SEQ ID NO: 21082 - protein, 469 aa, synthetic construct; identical to SEQ ID NO: 21078
  REGION 1..469: note = neuraminidase__InfluenzaA__AEQ49745

SEQ ID NO: 21083 - protein, 469 aa, synthetic construct; identical to SEQ ID NO: 21078
  REGION 1..469: note = neuraminidase__InfluenzaA__AEQ49746

SEQ ID NO: 21084 - protein, 469 aa, synthetic construct; identical to SEQ ID NO: 21078
  REGION 1..469: note = neuraminidase__InfluenzaA__AEQ49747

SEQ ID NO: 21085 - protein, 469 aa, synthetic construct; identical to SEQ ID NO: 20257
  REGION 1..469: note = neuraminidase__InfluenzaA__AEQ49748

SEQ ID NO: 21086 - protein, 469 aa, synthetic construct; identical to SEQ ID NO: 21078
  REGION 1..469: note = neuraminidase__InfluenzaA__AEQ49749

SEQ ID NO: 21087 - protein, 469 aa, synthetic construct
  REGION 1..469: note = neuraminidase__InfluenzaA__AEQ49750
MNPNQKIITIGSVCMTIGMANLILQIGNIISIWISHSIQLGNQSQIETCNQSVITYENNTWVNQTYVNISNTNFAAGQSVVSVKLAGNSSLCPVSGWAIYSKDNSIRIGSKGDVFVIREPFISCSPLECRTFFLTQGALLNDNHSNGTIKDRSPYRTLMSCPIGEVPSPYNSRFESVAWSASACHDGINWLTIGISGPDNGAVAVLKYNGIITDTIKSWRNNILRTQESECACVNGSCFTIMTDGPSDGQASYKIFRIEKGKIVKSVEMNAPNYHYEECSCYPDSSEITCVCRDNWHGSNRPWVSFNQNLEYQIGYICSGIFGDNPRPNDKTGSCGPVSSNGANGVKGFSFKYGNGVWIGRTKNISSRKGFEMIWDPNGWTGTDNNFSIKQDIVGINEWSGYSGSFVQHPELTGLDCIRPCFWVELIRGRPKENTIWTSGSSISFCGVNSDTVGWSWPDGAELPFTIDK

SEQ ID NO: 21088 - protein, 469 aa, synthetic construct
  REGION 1..469: note = neuraminidase__InfluenzaA__AEQ49751
MNPNQKIITIGSVCMTIGMANLILQIGNIISIWISHSFQLGNQSQIETCNQSVITYENNTWVNQTYVNISNTNFAAGQSVVSVKLAGNSSLCPVSGWAIYSKDNSIRIGSKGDVFVIREPFISCSPLECRTFFLTQGALLNDNHSNGTIKDRSPYRTLMSCPIGEVPSPYNSRFESVAWSASACHDGINWLTIGISGPDNGAVAVLKYNGIITDTIKSWRNNILRTQESECACVNGSCFTIMTDGPSDGQASYKIFRIEKGKIVKSVEMNAPNYHYEECSCYPDSSEITCVCRDNWHGSNRPWVSFNQNLEYQIGYICSGIFGDNPRPNDKTGSCGPVSSNGANGVKGFSFKYGNGVWIGRTKSISSRKGFEMIWDPNGWTGTDNNFSIKQDIVGINEWSGYSGSFVQHPELTGMDCIRPCFWVELIRGRPKENTIWTSGSSISFCGVNSDTVGWSWPDGAELPFTIDK

SEQ ID NO: 21089 - protein, 469 aa, synthetic construct
  REGION 1..469: note = neuraminidase__InfluenzaA__AEQ49752
MNPNQKIITIGSVCMTIGMANLILQIGNIISIWISHSIQLGNQSQIGTCNQSVITYENNTWVNQTYVNISNTNFAAGQSVVSVKLAGNSSLCPVSGWAIYSKDNSIRIGSKGDVFVIREPFISCSPLECRTFFLTQGALLNDKHSNGTIKDRSPYRTLMSCPIGEVPSPYNSRFESVAWSASACHDGINWLTIGISGPDNGAVAVLKYNGIITDTIKSWRNNILRTQESECACVNGSCFTIMTDGPSDGQASYKIFRIEKGKIVKSVEMNAPNYYYEECSCYPDSSEITCVCRDNWHGSNRPWVSFNQNLEYQIGYICSGIFGDNPRPNDKTGSCGPVSSNGANGVKGFSFKYGNGVWIGRTKSISSRKGFEMIWDPNGWTGTDNNFSIKQDIVGINEWSGYSGSFVQHPELTGMDCIRPCFWVELIRGRPKENTIWTSGSSISFCGVNSDTVGWSWPDGAELPFTIDK

SEQ ID NO: 21090 - protein, 469 aa, synthetic construct
  REGION 1..469: note = neuraminidase__InfluenzaA__AEQ49753
MNPNQKIITIGSVCMTIGMANLILQIGNIISIWISHSIQLGNQSQIETCNQSVITYENNTWVNQTYVNISNTNFAAGQSVVSVKLAGNSSLCPVSGWAIYSKDNSIRIGSKGDVFVIREPFISCSPLECRTFFLTQGALLNDKHSNGTIKDRSPYRTLMSCPIGEVPSPYNSRFESVAWSASACHDGINWLTIGISGPDNGAVAVLKYNGIITDTIKSWRNNILRTQESECACVNGSCFTIMTDGPSDGQASYKIFRIEKGKIVKSVEMNAPNYHYEECSCYPDSSEITCVCRDNWHGSNRPWVSFNQNLEYQIGYICSGIFGDNPRPNDKTGSCGPVSSNGANGVKGFSFKYGNGVWIGRTKSISSRKGFEMIWDPNGWTGTDNNFSIKQDIVGINEWSGYSGSFVQHPELTGMDCIRPCFWVELIRGRPKENTIWTSGSSISFCGVNSDTVDWSWPDGAELPFTIDK

SEQ ID NO: 21091 - protein, 469 aa, synthetic construct
  REGION 1..469: note = neuraminidase__InfluenzaA__AEQ49754
MNPNQKIITIGSVCMTIGMANLILQIGNIISIWISHSIQLGNQSQIETCNQSVITYENNTWVNQTYVNISNTNFAAGQSVVSVKLAGNSSLCPVSGWAIYSKDNSIRIGSKGDVFVIREPFISCSPLECRTFFLTQGALLNDKHSNGTIKDRSPYRTLMSCPIGEVPSPYNSRFESVAWSASACHDGINWLTIGISGPDNGAVAVLKYNGIITDTIKSWRNNILRTQESECACVNGSCFTIMTDGPSDGQASYKIFRIEKGKIVKSVEMNAPNYHYEECSCYPDSSEITCVCRDNWHGSNRPWVSFNQNLEYQIGYICSGIFGDNPRPNDKTGSCGPVSSNGANGVKGFSFKYGNGVWIGRTKSISSRKGFEMIWDPNGWTGTDNNFSIKQDIVGINEWSGYSGSFVQHPELTGLDCIRPCFWVELIRGRPKENTIWTSGSSISFCGVNSNTVGWSWPDGAELPFTIDK

SEQ ID NO: 21092 - protein, 469 aa, synthetic construct; identical to SEQ ID NO: 21078
  REGION 1..469: note = neuraminidase__InfluenzaA__AEQ49755

SEQ ID NO: 21093 - protein, 469 aa, synthetic construct
  REGION 1..469: note = neuraminidase__InfluenzaA__AEQ49756
MNPNQKIITIGSVCMTIGMANLILQIGNIISIWISHSIQLGNQSQVETCNQSVITYENNTWVNQTYVNISNTNFAAGQSVVSVKLAGNSSLCPVSGWAIYSKDNSIRIGSKGDVFVIREPFISCSPLECRTFFLTQGALLNDKHSNGTIKDRSPYRTLMSCPIGEVPSPYNSRFESVAWSASACHDGINWLTIGISGPDNGAVAVLKYNGIITDTIKSWRNNILRTQESECACVNGSCFTIMTDGPSDGQASYKIFRIEKGKIVKSVEMNAPNYHYEECSCYPDSSEITCVCRDNWHGSNRPWVSFNQNLEYQIGYICSGIFGDNPRPNDKTGSCGPVSSNGANGVKGFSFKYGNGVWIGRTKSISSRKGFEMIWDPNGWTGTDNNFSIKQDIVGINEWSGYSGSFVQHPELTGLDCIRPCFWVELIRGRPKENTIWTSGSSISFCGVNSDTVGWSWPDGAELPFTIDK

SEQ ID NO: 21094 - protein, 469 aa, synthetic construct; identical to SEQ ID NO: 21078
  REGION 1..469: note = neuraminidase__InfluenzaA__AEQ49757

SEQ ID NO: 21095 - protein, 469 aa, synthetic construct
  REGION 1..469: note = neuraminidase__InfluenzaA__AEQ49758
MNPNQKIITIGSVCMTIGMANLILQIGNIISIWISHSIQLGNHSQIETCNQSVITYENNTWVNQTYVNISNTNFAAGQSVVSVKLAGNSSLCPVSGWAIYSKDNSIRIGSKGDVFVIREPFISCSPLECRTFFLTQGALLNDKHSNGTIKDRSPYRTLMSCPIGEVPSPYNSRFESVAWSASACHDGINWLTIGISGPDNGAVAVLKYNGIITDTIKSWRNNILRTQESECACVNGSCFTIMTDGPSDGQASYKIFRIEKGKIVKSVEMNAPNYYYEECSCYPDSSEITCVCRDNWHGSNRPWVSFNQNLEYQIGYICSGIFGDNPRPNDKTGSCGPVSSNGANGVKGFSFKYGNGVWIGRTKSISSRKGFEMIWDPNGWAGTDNNFSIKQDIVGINEWSGYSGSFVQHPELTGLDCIRPCFWVELIRGRPKENTIWTSGSSISFCGVNSDTVGWSWPDGAELPFTIDK

SEQ ID NO: 21096 - protein, 469 aa, synthetic construct; identical to SEQ ID NO: 21078
  REGION 1..469: note = neuraminidase__InfluenzaA__AEQ49759

SEQ ID NO: 21097 - protein, 469 aa, synthetic construct; identical to SEQ ID NO: 21078
  REGION 1..469: note = neuraminidase__InfluenzaA__AEQ49760

SEQ ID NO: 21098 - protein, 469 aa, synthetic construct
  REGION 1..469: note = neuraminidase__InfluenzaA__AEQ49761
MNPNQKIITIGSVCMTIGMANLILQIGNIISIWISHSIQLGNQSQIETCNQSVITYENNTWLNQTYVNISNTNFAAGQSVVSVKLAGNSSLCPVSGWAIYSKDNSIRIGSKGDVFVIREPFISCSPSECRTFFLTQGALLNDKHSNGTIKDRSPYRTLMSCPIGEVPSPYNSRFESVAWSASACHDGINWLTIGISGPDNGAVAVLKYNGIITDTIKSWRNNILRTQESECACVNGSCFTIMTDGPSDGQASYKIFRIEKGKIVKSVEMNAPNYHYEECSCYPDSSEITCVCRDNWHGSNRPWVSFNQNLEYQIGYICSGIFGDNPRPNDKTGSCGPVSSNGANGVKGFSFKYGNGVWIGRTKSISSRKGFEMIWDPNGWTGTDNNFSIKQDIVGINEWSGYSGSFVQHPELTGLDCIRPCFWVELIRGRSKENTIWTSGSSISFCGVNSDTVGWSWPDGAELPFTIDK

SEQ ID NO: 21099 - protein, 469 aa, synthetic construct
  REGION 1..469: note = neuraminidase__InfluenzaA__AEQ49762
MNPNQKIITIGSVCMTIGMANLILQIGNIISIWISHSIQLGNQSQIETCNQSVITYENNTWINQTYVNISNTNFAAGQSVVSVKLAGNSSLCPVSGWAIYSKDNSIRIGSKGDVFVIREPFISCSPLECRTFFLTQGALLNDKHSNGTIKDRSPYRTLMSCPIGEVPSPYNSRFESVAWSASACHDGINWLTIGISGPDNGAVAVLKYNGIITDTIKSWRNNILRTQESECACVNGSCFIIMTDGPSDGQASYKIFRIEKGKIVKSVEMNAPNYHYEECSCYPDSSEITCVCRDNWHGSNRPWVSFNQNLEYQIGYICSGIFGDNPRPNDKTGSCGPVSSNGANGVKGFSFKYGNGVWIGRTKSISSRKGFEMIWDPNGWTGTDNNFSIKQDIVGINEWSGYSGSFVQHPELTGLDCIRPCFWVELIRGRPKENTIWTSGSSISFCGVNSDTVGWSWPDGAELPFTIDK

SEQ ID NO: 21100 - protein, 469 aa, synthetic construct; identical to SEQ ID NO: 21078
  REGION 1..469: note = neuraminidase__InfluenzaA__AEQ49763

SEQ ID NO: 21101 - protein, 469 aa, synthetic construct; identical to SEQ ID NO: 21078
  REGION 1..469: note = neuraminidase__InfluenzaA__AEQ49764

SEQ ID NO: 21102 - protein, 469 aa, synthetic construct; identical to SEQ ID NO: 21078
  REGION 1..469: note = neuraminidase__InfluenzaA__AEQ49765

SEQ ID NO: 21103 - protein, 469 aa, synthetic construct
  REGION 1..469: note = neuraminidase__InfluenzaA__AEQ49766
MNPNQKIITIGSVCMTIGMANLILQIGNIISIWISHSIQLGNQSQIETCNQSVITYENNTWVNQTYVNISNTNFAAGQSVVSVKLTGNSSLCPVSGWAIYSKDNSIRIGSKGDVFVIREPFISCSPLECRTFFLTQGALLNDKHSNGTIKDRSPYRTLMSCPIGEVPSPYNSRFESVAWSASACHDGINWLTIGISGPDNGAVAVLKYNGIITDTIKSWRNNILRTQESECACVNGSCFTIMTDGPSDGQASYKIFRIEKGKIVKSVEMNAPNYHYEECSCYPDSSEITCVCRDNWHGSNRPWVSFNQNLEYQIGYICSGIFGDNPRPNDKTGSCGPVSSNGANGVKGFSFKYGNGVWIGRTKSISSRKGFEMIWDPNGWTGTDNNFSIKQDIVGINEWSGYSGSFVQHPELTGLDCIRPCFWVELIRGRPKENTIWTSGSSISFCGVNSDTVGWSWPDGAELPFTIDK

SEQ ID NO: 21104 - protein, 469 aa, synthetic construct
  REGION 1..469: note = neuraminidase__InfluenzaA__AEQ49767
MNPNQKIITIGSVCMTIGMANLILQIGNIISIWISHSIQLGNQSQIETCNQSVITYENNTWVNQTYVNISNTNFAAGQSVVSVKLAGNSSLCPVSGWAIYSKDNSIRIGSKGDVFVIREPFISCSPLECRTFFLTQGALLNDKHSNGTIKDRSPYRTLMSCPIGEVPSPYNSRFESVAWSASACHDGINWLTIGISGPDNGAVAVLKYNGIITDTIKSWRNNILRTQESECACVNGSCFTIMTDGPSDGQASYKIFKIEKGKIVKSVEMNAPNYHYEECSCYPDSSEITCVCRDNWHGSNRPWVSFNQNLEYQIGYICSGIFGDNPRPNDKTGSCGPVSSNGANGVKGFSYKYGNGVWIGRTKSISSRKGFEMIWDPNGWTGTDNNFSIKQDIVGINEWSGYSGSFVQHPELTGMGCIRPCFWVELIRGRPKENTIWTSGSSISFCGVNSDTVGWSWPDGAELPFTIDK

SEQ ID NO: 21105 - protein, 469 aa, synthetic construct; identical to SEQ ID NO: 20257
  REGION 1..469: note = neuraminidase__InfluenzaA__AEQ49768

SEQ ID NO: 21106 - protein, 469 aa, synthetic construct; identical to SEQ ID NO: 21078
  REGION 1..469: note = neuraminidase__InfluenzaA__AEQ49769

SEQ ID NO: 21107 - protein, 469 aa, synthetic construct
  REGION 1..469: note = neuraminidase__InfluenzaA__AEQ49770
MNPNQKIITIGSVCMTIGMANLILQIGNIISVWISHSIQLGNQNQTETCNQSVITYENNTWVNQTYVNISNTNFAAGQSVVSVKLAGNSSLCPVSGWAIYSKDNSIRIGSKGDVFVIREPFISCSPLECRTFFLTQGALLNDKHSNGTIKDRSPYRTLMSCPIGEVPSPYNSRFESVAWSASACHDGINWLTIGISGPDNGAVAVLKYNGIITDTIKSWRNNILRTQESECACVNGSCFTVMTDGPSDGQASYKIFRIEKGKIVKSVEMNAPNYHYEECSCYPDSSEITCVCRDNWHGSNRPWVSFNQNLEYRIGYICSGIFGDNPRPNDKTGSCGPVSSNGANGVKGFSFKYGNGVWIGRTKSISSRNGFEMIWDPNGWTGTDNNFSIKQDIIGINEWSGYSGSFVQHPELTGLDCIRPCFWVELIRGRPKENTIWTSGSSISFCGVNSDTVGWSWPDGAELPFTVDK

SEQ ID NO: 21108 - protein, 469 aa, synthetic construct; identical to SEQ ID NO: 21091
  REGION 1..469: note = neuraminidase__InfluenzaA__AEQ49771

SEQ ID NO: 21109 - protein, 469 aa, synthetic construct; identical to SEQ ID NO: 20257
  REGION 1..469: note = neuraminidase__InfluenzaA__AEQ49772

SEQ ID NO: 21110 - protein, 469 aa, synthetic construct
  REGION 1..469: note = neuraminidase__InfluenzaA__AEQ49773
MNPNQKIITIGSICMTIGMANLILQIGNIISIWISHSIQLGNQSQIETCNQSVITYENNTWVNQTYVNISNTNFAAGQSVVSVKLAGNSSLCPVSGWAIYSKDNSIRIGSKGDVFVIREPFISCSPLECRTFFLTQGALLNDKHSNGTIKDRSPYRTLMSCPIGEVPSPYNSRFESVAWSASACHDGINWLTIGISGPDNGAVAVLKYNGIITDTIKSWRNNILRTQESECACVNGSCFTIMTDGPSDGQASYKIFRIEKGKIVKSVEMNAPNYHYEECSCYPDSSEITCVCRDNWHGSNRPWVSFNQNLEYQIGYICSGIFGDNPRPNDKTGSCGPVSSNGANGVKGFSFKYGNGVWIGRTKSISSRKGFEMIWDPNGWTGTDNNFSIKQDIVGINEWSGYSGSFVQHPELTGLDCIRPCFWVELIRGRPKENTIWTSGSSISFCGVNSNTVGWSWPDGAELPFTIDK

SEQ ID NO: 21111 - protein, 469 aa, synthetic construct
  REGION 1..469: note = neuraminidase__InfluenzaA__AEQ49774
MNPNQKIITIGSVCMTIGMANLILQIGNIISIWISHSIQLGNQSQIETCNQSVITYEYNTWVNQTYINISNTNFAAGQSVVSVKLVGNSSLCPVSGWAIYSKDNSIRIGSKGDVFVIREPFISCSPLECRTFFLTQGALLNDKHSNGTIKDRSPYRTLMSCPIGEVPSPYNSRFESVAWSASACHDGINWLTIGISGPDNGAVAVLKYNGIITDTIKSWRNNILRTQESECACVNGSCFTIMTDGPSDGQASYKIFRIEKGKIVKSVEMNAPNYHYEECSCYPDSSEITCVCRDNWHGSNRPWVSFNQNLEYQIGYICSGIFGDNPRPNDKTGSCGPVSSNGANGVKGFSFKYGNGVWIGRTKSISSRKGYEMIWDPNGWTGTDNNFSIKQDIVGINEWSGYSGSFVQHPELTGMDCIRPCFWVELIRGRPKENTIWTSGSSISFCGVNSDTVGWSWPDGAELPFTIDK

SEQ ID NO: 21112 - protein, 469 aa, synthetic construct; identical to SEQ ID NO: 20257
  REGION 1..469: note = neuraminidase__InfluenzaA__AEQ49775

SEQ ID NO: 21113 - protein, 469 aa, synthetic construct
  REGION 1..469: note = neuraminidase__InfluenzaA__AEQ49776
MNPNQKIITIGSVCMTIGMANLILQIGNIISIWISHSIQLGNQSQIETCNQSVITYENNTWVNQTYVNISNTNFAAGQSVVSVKLAGNSSLCPVSGWAIYSKDNSIRIGSKGDVFVIREPFISCSPSECRTFFLTQGALLNDKHSNGTIKDRSPYRTLMSCPIGEVPSPYNSRFESVAWSASACHDGINWLTIGISGPDNGAVAVLKYNGIITDTIKSWRNNILRTQESECACVNGSCFTIMTDGPSDGQASYKIFRIEKGKIVKSVEMNAPNYHYEECSCYPDSSEITCVCRDNWHGSNRPWVSFNQNLEYQIGYICSGIFGDNPRPNDKTGSCGPVSSNGANGVKGFSFKYGNGVWIGRTKSISSRKGFEMIWDPNGWTGTDNNFSIKQDIVGINEWSGYSGSFVQHPELTGLDCIRPCFWVELIRGRPTENTIWTSGSSISFCGVNSDTVGWSWPDGAELPFTIDK

SEQ ID NO: 21114 - protein, 469 aa, synthetic construct; identical to SEQ ID NO: 21078
  REGION 1..469: note = neuraminidase__InfluenzaA__AEQ49777

SEQ ID NO: 21115 - protein, 469 aa, synthetic construct
  REGION 1..469: note = neuraminidase__InfluenzaA__AEQ49778
MNPNQKIITIGSVCMTIGMANLILQIGNIISIWISHSIQLGNQSQIETCNQSVITYENNTWINQTYVNISNTNFAAVQSVVSVKLAGNSTLCPVSGWAIYSKDNSIRIGSKGDVFVIREPFISCSPLECRTFFLTQGALLNDKHSNGTIKDRSPYRTLMSCPIGEVPSPYNSRFESVAWSASACHDGINWLTIGISGPDNGAVAVLKYNGIITDTIKSWRNNILRTQESECACVNGSCFTIMTDGPSDGQASYKIFRIEKGKIVKSVEMNAPNYHYEECSCYPDSSEITCVCRDNWHGSNRPWVSFNQNLEYQIGYICSGIFGDNPRPNDKTGSCGPVSSNGANGVKGFSFKYGNGVWIGRTKSISSRKGFEMIWDPNGWTGTDNNFSIKQDIVGINEWSGYSGSFVQHPELTGLDCIRPCFWVELIRGRPKENTIWTSGSSISFCGVNSDTVGWSWPDGAELPFTIDK

SEQ ID NO: 21116 - protein, 469 aa, synthetic construct
  REGION 1..469: note = neuraminidase__InfluenzaA__AEQ49779
MNPNQKIITIGSVCMTIGMANLILQIGNIISIWISHSIQLGNQNQTETCNQSVITYENNTWVNQTYVNISNTNFAAGQSVVSVKLAGNSSLCPVSGWAIYSKDNSIRIGSKGDVFVIREPFISCSPLECRTFFLTQGALLNDKHSNGTIKDRSPYRTLMSCPIGEVPSPYNSRFESVAWSASACHDGINWLTIGISGPDNGAVAVLKYNGIITDTIKSWRNNILRTQESECACVNGSCFTVMTDGPSDGQASYKIFRIEKGKIVKSVEMNAPNYHYEECSCYPDSSEITCVCRDNWHGSNRPWVSFNQNLEYRIGYICSGIFGDNPRPNDKTGSCGPVSSNGANGVKGFSFKYGNGVWIGRTKSISSRNGFEMIWDPNGWTGTDNNFSIKQDIIGINEWSGYSGSFVQHPELTGLDCIRPCFWVELIRGRPKENTIWTSGSSISFCGVNSDTVGWSWPDGAELPFTVDK

SEQ ID NO: 21117 - protein, 469 aa, synthetic construct; identical to SEQ ID NO: 20257
  REGION 1..469: note = neuraminidase__InfluenzaA__AEQ49780

SEQ ID NO: 21118 - protein, 469 aa, synthetic construct; identical to SEQ ID NO: 20257
  REGION 1..469: note = neuraminidase__InfluenzaA__AEQ49781

SEQ ID NO: 21119 - protein, 469 aa, synthetic construct; identical to SEQ ID NO: 21078
  REGION 1..469: note = neuraminidase__InfluenzaA__AEQ49782

SEQ ID NO: 21120 - protein, 469 aa, synthetic construct
  REGION 1..469: note = neuraminidase__InfluenzaA__AEQ49783
MNPNQKIITIGSACMTIGMANLILQIGNIISIWISHSIQLGNQSQIETCNQSVITYENNTWVNQTYVNISNTNFAAGQSVVSVKLAGNSSLCPVSGWAIYSKDNSIRIGSKGDVFVIREPFISCSPLECRTFFLTQGALLNDKHSNGTIKDRSPYRTLMSCPIGEVPSPYNSRFESVAWSASACHDGINWLTIGISGPDNGAVAVLKYNGIITDTIKSWRNNILRTQESECACVNGSCFTIMTDGPSDGQASYKIFRIEKGKIVKSVEMNAPNYHYEECSCYPDSSEITCVCRDNWHGSNRPWVSFNQNLEYQIGYICSGIFGDNPRPNDKTGSCGPVSSNGANGVKGFSFKYGNGVWIGRTKSISSRKGFEMIWDPNGWTGTDNNFSIKQDIVGINEWSGYSGSFVQHPELTGLDCIRPCFWVELIRGRPKENTIWTSGSSISFCGVNSDTVGWSWPDGAELPFTIDK

SEQ ID NO: 21121 - protein, 469 aa, synthetic construct
  REGION 1..469: note = neuraminidase__InfluenzaA__AEQ49785
MNPNQKIITIGSVSLTISTICFFMQIAILITTVTLHFKQYEFNSPPNNQVMLCEPTIIERNITEIVYLTNTTIEKEICPKLAEYRNWSKPQCDITGFAPFSKDNSIRLSAGGDIWVTREPYVSCDPNKCYQFALGQGTTLNNVHSNNTVRDRTPYRTLLMNELGVPFHLGTKQVCIAWSSSSCHDGKAWLHVCITGDDKNATASFIYNGRLVDSVVSWSKEILRTQESECVCINGTCTVVMTDGSASGKADTKILFIEEGKIVHTSTLSGSAQHVEECSCYPRYPGVRCVCRDNWKGSNRPIVDINMKDHSIVSSYVCSGLVGDTPRKNDSSSSSHCFDPNDEEGGHGVKGWAFDDGNDVWMGRTISEKSRLGYETFKVIEGWSNPKSKLQINRQVIVDRGDRSGYSGIFSVEGKSCINRCFYVELIRGSKEETEVLWTSNSIVVFCGTSGTYGTGSWPDGADINLMPI

SEQ ID NO: 21122 - protein, 469 aa, synthetic construct; identical to SEQ ID NO: 21121
  REGION 1..469: note = neuraminidase__InfluenzaA__AEQ49786

SEQ ID NO: 21123 - protein, 469 aa, synthetic construct; identical to SEQ ID NO: 21121
  REGION 1..469: note = neuraminidase__InfluenzaA__AEQ49788

SEQ ID NO: 21124 - protein, 469 aa, synthetic construct; identical to SEQ ID NO: 21121
  REGION 1..469: note = neuraminidase__InfluenzaA__AEQ49789

SEQ ID NO: 21125 - protein, 469 aa, synthetic construct
  REGION 1..469: note = neuraminidase__InfluenzaA__AEQ49790
MNPNQKIITIGSVSLTISTICFFMQIAILITTVTLHFKQYEFYSPPNNQVMLCEPTIIERNITEIVYLTNTTIEKEICPKLAEYRNWSKPQCDITGFAPFSKDNSIRLSAGGDIWVTREPYVSCDPDKCYQFALGQGTTLNNVHSNNTVRGRTPYRTLLMNELGVPFHLGTKQVCIAWSSSSCHDGKAWLHVCITGDDKNATASFIYNGRLVDSVVSWSKEILRTQESECVCINGTCTVVMTDGSASGKADTKILFIEEGKIVHTSTLSGSAQHVEECSCYPRYPGVRCVCRDNWKGSNRPIVDINIKDHSIVSSYVCSGLVGDTPRKNDSSSSSHCLDPNNEEGGHGVKGWAFDDGNDVWMGRTINETSRLGYETFKVIEGWSNPKSKLQINRQVIVDRGNRSGYSGIFSVEGKSCINRCFYVELIRGRKEETEVLWTSNSIVVFCGTSGTYGTGSWPDGADLNLMPI

SEQ ID NO: 21126 - protein, 469 aa, synthetic construct
  REGION 1..469: note = neuraminidase__InfluenzaA__AEQ49791
MNPNQKIITIGSVSLTISTICFFMQIAILITTVTLHFKQYEFYPPPNNQVMLCEPTIIERNITEIVYLTNTTIEKEICPKLAEYRNWSKPQCDITGFAPFSKDNSIRLSAGGDIWVTREPYVSCDPDKCYQFALGQGTTLNNVHSNNTVRNRTPYRTLLMNELGVPFHLGTKQVCIAWSSSSCHDGKAWLHVCITGDDKNATASFIYNGRLVDSVVSWSKEILRTQESECVCINGTCTVVMTDGSASGKADTKILFIEEGKIVHTSTLSGSAQHVEECSCYPRYPGVRCVCRDNWKGSNRPIVDINIKDHSIVSSYVCSGLVGDTPRKNDSSSSSHCLDPNNEEGGHGVKGWAFDDGNDVWMGRTINETSRLGYETFKVIEGWSNPKSKLQINRQVIVDRGNRSGYSGIFSVEGKSCINRCFYVELIRGRKEETEVLWTSNSIVVFCGTSGTYGTGSWPDGADLNLMPI

SEQ ID NO: 21127 - protein, 469 aa, synthetic construct; identical to SEQ ID NO: 21121
  REGION 1..469: note = neuraminidase__InfluenzaA__AEQ49792

SEQ ID NO: 21128 - protein, 469 aa, synthetic construct; identical to SEQ ID NO: 21121
  REGION 1..469: note = neuraminidase__InfluenzaA__AEQ49793

SEQ ID NO: 21129 - protein, 469 aa, synthetic construct; identical to SEQ ID NO: 21121
  REGION 1..469: note = neuraminidase__InfluenzaA__AEQ49794

SEQ ID NO: 21130 - protein, 469 aa, synthetic construct; identical to SEQ ID NO: 21121
  REGION 1..469: note = neuraminidase__InfluenzaA__AEQ49795

SEQ ID NO: 21131 - protein, 469 aa, synthetic construct
  REGION 1..469: note = neuraminidase__InfluenzaA__AEQ49796
MNPNQKIITIGSVSLTISTICFFMQIAILITTVTLHFKQYEFNSPPNNQVMLCEPTIIERNITEIVYLTNTTIEKEICPKLAEYRNWSKPQCDITGFAPFSKDNSIRLSAGGDIWVTREPYVSCDPDKCYQFALGQGTTLNNVHSNNTVRGRTPYRTLLMNELGVPFHLGTKQVCIAWSSSSCHDGKAWLHVCITGDDKNATASFIYNGRLVDSVVSWSKEILRTQESECVCINGTCTVVMTDGSASGKADTKILFIEEGKIVHTSTLSGSAQHVEECSCYPRYPGVRCVCRDNWKGSNRPIVDINIKDHSIVSSYVCSGLVGDTPRKNDSSSSSHCLDPNNEEGGHGVKGWAFDDGNDVWMGRTINETSRLGYETFKVIEGWSNPKSKLQINRQVIVDKGNRSGYSGIFSVEGKSCINRCFYVELIRGRKEETEVLWTSNSIVVFCGTSGTYGTGSWPDGADLNLMPI

SEQ ID NO: 21132 - protein, 469 aa, synthetic construct; identical to SEQ ID NO: 21121
  REGION 1..469: note = neuraminidase__InfluenzaA__AEQ49797

SEQ ID NO: 21133 - protein, 469 aa, synthetic construct; identical to SEQ ID NO: 21121
  REGION 1..469: note = neuraminidase__InfluenzaA__AEQ49798

SEQ ID NO: 21134 - protein, 469 aa, synthetic construct; identical to SEQ ID NO: 21121
  REGION 1..469: note = neuraminidase__InfluenzaA__AEQ49799

SEQ ID NO: 21135 - protein, 469 aa, synthetic construct; identical to SEQ ID NO: 21121
  REGION 1..469: note = neuraminidase__InfluenzaA__AEQ49800

SEQ ID NO: 21136 - protein, 469 aa, synthetic construct; identical to SEQ ID NO: 21121
  REGION 1..469: note = neuraminidase__InfluenzaA__AEQ49801

SEQ ID NO: 21137 - protein, 469 aa, synthetic construct; identical to SEQ ID NO: 21121
  REGION 1..469: note = neuraminidase__InfluenzaA__AEQ49802

SEQ ID NO: 21138 - protein, 469 aa, synthetic construct
  REGION 1..469: note = neuraminidase__InfluenzaA__AEQ49803
MNPNQKIITIGSVSLTISTICFFMQIAILITTVTLHFKQYEFNSPPNNQVMLCEPTIIERNITEIVYLTNTTIEKEICPKLAEYRNWSKPQCDITGFAPFSKDNSIRLSAGGDIWVTREPYVSCDPNKCYQFALGQGTTLNNVHSNNTVRDRTPYRTLLMNELGVPFHLGTKQVCIAWSSSSCHDGKAWLHVCITGDDKNATASFIYNGRLVDSVVSWSKEILRTQESECVCINGTCTVVMTDGSASGKADTKILFIEEGKIVHTSTLSGSAQHVEECSCYPRYPGVRCVCRDNWKGSNRPIVDINIKDHSIVSSYVCSGLVGDTPRKNDSTSSSHCLDPNNEEGGHGVKGWAFDDGNDVWMGRTISETSRLGYETFKVIEGWSNPKSKLQINRQVIVDKGNRSGYSGIFSVEGKSCINRCFYVELIRGRKEETEVLWTSNSIVVFCGTSGTYGTGSWPDGADLNLMTI

SEQ ID NO: 21139 - protein, 469 aa, synthetic construct
  REGION 1..469: note = neuraminidase__InfluenzaA__AEQ49804
MNPNQKIITIGSVSLTISTICFFMQIAILITTVTLHFKQYEFNSPPNNQVMLCEPTIIERNITEIVYLTNTTIEKEICPKPAEYRNWSKPQCDITGFAPFSKDNSIRLSAGGDIWVTREPYVSCDPDKCYQFALGQGTTLNNVHSNNTVRDRTPYRTLLMNELGVPFHLGTKQVCIAWSSSSCHDGKAWLHVCITGDDKNATASFIYNGRLVDSVVSWSKDILRTQESECVCINGTCTVVMTDGSASGKADTKILFIEEGKIVHTSTLSGSAQHVEECSCYPRYPGVRCVCRDNWKGSNRPIVDINIKDHSIVSSYVCSGLVGDTPRKNDSSSSSHCLDPNNEEGGHGVKGWAFDDGNDVWMGRTINETSRLGYETFKVIEGWSNPKSKLQINRQVIVDRGNRSGYSGIFSVEGKSCINRCFYVELIRGRKEETEVLWTSNSIVVFCGTSGTYGTGSWPDGADLNLMPI

SEQ ID NO: 21140 - protein, 469 aa, synthetic construct
  REGION 1..469: note = neuraminidase__InfluenzaA__AEQ49805
MNPNQKIITIGSVSLTISTICFFMQIAILITTVTLHFKQYEFNSPPNNQVMLCEPTIIERNITEIVYLTNTTIEKEICPKPAEYRNWSKPQCDITGFAPFSKDNSIRLSAGGDIWVTREPYVSCDPDKCYQFALGQGTTLNNVHSNNTVRNRTPYRTLLMNELGVPFHLGTKQVCIAWSSSSCHDGKAWLHVCITGDDKNATASFIYNGRLVDSVVSWSKDILRTQESECVCINGTCTVVMTDGSASGKADTKILFIEEGKIVHTSTLSGSAQHVEECSCYPRYPGVRCVCRDNWKGSNRPIVDINIKDHSIVSSYVCSGLVGDTPRKNDSSSSSHCLDPNNEEGGHGVKGWAFDDGNDVWMGRTINETSRLGYETFKVIEGWSNPKSKLQINRQVIVDRGNRSGYSGIFSVEGKSCINRCFYVELIRGRKEETEVLWTSNSIVVFCGTSGTYGTGSWPDGADLNLMPI

SEQ ID NO: 21141 - protein, 469 aa, synthetic construct
  REGION 1..469: note = neuraminidase__InfluenzaA__AEQ49806
MNPNQKIITIGSVSLTISTICFFMQIAILITTVTLHFKQYEFNSPPNNQVMLCEPTIIERNITEIVYLTNTTIEKEICPKLAEYRNWSKPQCDITGFAPFSKDNSIRLSAGGDIWVTREPYVSCDPDKCYQFALGQGTTLNNVHSNNTVRDRTPYRTLLMNELGVPFHLGTKQVCIAWSSSSCHDGKAWLHVCITGDDKNATASFIYNGRLVDSVVSWSKEILRTQESECVCINGTCTVVMTDGSASGKADTKILFIEEGKIVHTSTLSGSAQHVEECSCYPRYPGVRCVCRDNWKGSNRPIVDINIKDHSIVSSYVCSGLVGDTPRKNDSFSSSHCLDPNNEEGGHGVKGWAFDDGNDVWMGRTINETSRLGYETFKVIEGWSNPKSKLQINRQVIVDRGNRSGYSGIFSVEGKSCINRCFYVELIRGRKEETEVLWTSNSIVVFCGTSGTYGTGSWPDGADLNLMPI

SEQ ID NO: 21142 - protein, 469 aa, synthetic construct; identical to SEQ ID NO: 19518
  REGION 1..469: note = neuraminidase__InfluenzaA__AEQ49807

SEQ ID NO: 21143 - protein, 469 aa, synthetic construct
  REGION 1..469: note = neuraminidase__InfluenzaA__AEQ49809
MNPNQKIITIGSVSLTISTICFFMQIAILITTVTLHFKQYEFNSPPNNQVMLCEPTIIERNITEIVYLTNTTIEKEICPKLAEYRNWSKPQCDITGFAPFSKDNSIRLSAGGDIWVTREPYVSCDPDKCYQFALGQGTTLNNVHSNNTVRDRTPYRTLLMNELGVPFHLGTKQVCIAWSSSSCHDGKAWLHVCITGDDKNATASFIYNGKLVDSVVSWSKEILRTQESECVCINGTCTVVMTDGSASGKADTKILFIEEGKIVHTSTLSGSAQHVEECSCYPRYPGVRCVCRDNWKGSNRPIVDINIKDHSIVSSYVCSGLVGDTPRKNDSSSSSHCLDPNNEEGGHGVKGWAFDDGNDVWMGRTINETSRLGYETFKVIEGWSNPKSKLQINRQVIVDRGNRSGYSGIFSVEGKSCINRCFYVELIRGRKEETEVLWTSNSIVVFCGTSGTYGTGSWPDGADLNLMPI

SEQ ID NO: 21144 - protein, 469 aa, synthetic construct; identical to SEQ ID NO: 21143
  REGION 1..469: note = neuraminidase__InfluenzaA__AEQ49811

SEQ ID NO: 21145 - protein, 469 aa, synthetic construct; identical to SEQ ID NO: 19518
  REGION 1..469: note = neuraminidase__InfluenzaA__AEQ49812

SEQ ID NO: 21146 - protein, 469 aa, synthetic construct; identical to SEQ ID NO: 19518
  REGION 1..469: note = neuraminidase__InfluenzaA__AEQ49813

SEQ ID NO: 21147 - protein, 469 aa, synthetic construct; identical to SEQ ID NO: 19518
  REGION 1..469: note = neuraminidase__InfluenzaA__AEQ49815

SEQ ID NO: 21148 - protein, 469 aa, synthetic construct
  REGION 1..469: note = neuraminidase__InfluenzaA__AEQ49816
MNPNQKIITIGSVSLTISTICFFMQIAILITTVTLHFKQYEFNSPPNNQVMLCEPTIIERNITEIVYLTNTTIEKEICPKLAEYRNWSKPQCDITGFAPFSKDNSIRLSAGGDIWVTREPYVSCDPNKCYQFALGQGTTLNNVHSNNTVRDRTPYRTLLMNELGVPFHLGTKQVCIAWSSSSCHDGKAWLHVCITGDDKNATASFIYNGRLVDSVVSWSKEILRTQESECVCINGTCTVVMTDGSASGKADTKILFVEEGKIVHTSTLSGSAQHVEECSCYPRYPGVRCVCRDNWKGSNRPIVDINMKDHSIVSSYVCSGLVGDTPRKNDSSSSSHCFDPNDEEGGHGVKGWAFDDGNDVWMGRTISEKSRLGYETFKVIEGWSNPKSKLQINRQVIVDRGNRSGYSGIFSVEGKSCINRCFYVELIRGRKEETEVLWTSNSIVVFCGTSGTYGTGSWPDGADINLMPI

SEQ ID NO: 21149 - protein, 469 aa, synthetic construct; identical to SEQ ID NO: 20883
  REGION 1..469: note = neuraminidase__InfluenzaA__AEQ49820

SEQ ID NO: 21150 - protein, 469 aa, synthetic construct; identical to SEQ ID NO: 20883
  REGION 1..469: note = neuraminidase__InfluenzaA__AEQ49821

SEQ ID NO: 21151 - protein, 469 aa, synthetic construct; identical to SEQ ID NO: 21121
  REGION 1..469: note = neuraminidase__InfluenzaA__AEQ49822

SEQ ID NO: 21152 - protein, 469 aa, synthetic construct; identical to SEQ ID NO: 21121
  REGION 1..469: note = neuraminidase__InfluenzaA__AEQ49823

SEQ ID NO: 21153 - protein, 469 aa, synthetic construct; identical to SEQ ID NO: 21121
  REGION 1..469: note = neuraminidase__InfluenzaA__AEQ49824

SEQ ID NO: 21154 - protein, 469 aa, synthetic construct; identical to SEQ ID NO: 21121
  REGION 1..469: note = neuraminidase__InfluenzaA__AEQ49825

SEQ ID NO: 21155 - protein, 469 aa, synthetic construct; identical to SEQ ID NO: 21121
  REGION 1..469: note = neuraminidase__InfluenzaA__AEQ49826

SEQ ID NO: 21156 - protein, 469 aa, synthetic construct; identical to SEQ ID NO: 21121
  REGION 1..469: note = neuraminidase__InfluenzaA__AEQ49827

SEQ ID NO: 21157 - protein, 469 aa, synthetic construct; identical to SEQ ID NO: 21121
  REGION 1..469: note = neuraminidase__InfluenzaA__AEQ49828

SEQ ID NO: 21158 - protein, 469 aa, synthetic construct
  REGION 1..469: note = neuraminidase__InfluenzaA__AEQ49829
MNPNQKIITIGSVSLTISTICFFMQIAILITTVTLHFKQYEFNSPPNNQVMLCEPTIIERNITEIVYLTNTTIEKEICPKLAEYRNWSKPQCDITGFAPFSKDNSIRLSAGGDIWVTREPYVSCDPNKCYQFALGQGTTLNNVHSNNTVRDRTPYRTLLMNELGVPFHLGTKQVCIAWSSSSCHDGKAWLHVCITGDDKNATASFIYNGRLVDSVVSWSKEILRTQESECVCINGTCTVVMTDGSALGKADTKILFIEEGKIVHTSTLSGSAQHVEECSCYPRYPGVRCVCRDNWKGSNRPIVDINMKDHSIVSSYVCSGLVGDTPRKNDSSSSSHCFDPNDEEGGHGVKGWAFDDGNDVWMGRTISEKSRLGYETFKVIEGWSNPKSKLQINRQVIVDRGDRSGYSGIFSVEGKSCINRCFYVELIRGSKEETEVLWTSNSIVVFCGTSGTYGTGSWPDGADINLMPI

SEQ ID NO: 21159 - protein, 469 aa, synthetic construct; identical to SEQ ID NO: 21121
  REGION 1..469: note = neuraminidase__InfluenzaA__AEQ49830

SEQ ID NO: 21160 - protein, 469 aa, synthetic construct; identical to SEQ ID NO: 21121
  REGION 1..469: note = neuraminidase__InfluenzaA__AEQ49831

SEQ ID NO: 21161 - protein, 469 aa, synthetic construct
  REGION 1..469: note = neuraminidase__InfluenzaA__AEQ49832
MNPNQKIITIGSVSLTISTICFFMQIAILITTVTLHFKQYEFNSPPNNQVMLCEPTIIERNITEIVYLTNTTIEKEICPKLAEYRNWSKPQCDITGFAPFSKDNSIRLSAGGDIWVTREPYVSCDPNKCYQFALGQGTTLNNVHSNNTVRDRTPYRTLLMNELGVPFHLGTKQVCIAWSSSSCHDGKAWLHVCITGDDKNATASFIYNGRLVDSVVSWSKEILRTQESECVCINGTCTVVMTDGSASGKADTKILFIEEGKIVHTSTLSGSAQHVEECSCYPRYPGVRCVCRDNWKGSNRPIVDINMKDHSIVSSYVCSGLVGDTPRKNDSSSSSHCFDPNDEEGGHGVKGWAFDDGNDVWMGRTISEKSRLGYETFKVVEGWSNPKSKLQINRQVIVDRGDRSGYSGIFSVEGKSCINRCFYVELIRGSKEETEVLWTSNSIVVFCGTSGTYGTGSWPDGADINLMPI

SEQ ID NO: 21162 - protein, 469 aa, synthetic construct
  REGION 1..469: note = neuraminidase__InfluenzaA__AEQ49833
MNPNQKIITIGSVSLTISTICFFMQIAILITTVTLHFKQYEFNSPPNNQVMLCEPTIIERNITEIVYLTNTTIEKEICPKLAEYRNWSKPQCDITGFAPFSKDNSIRLSAGGDIWVTREPYVSCDPDKCYQFALGQGTTLNNVHSNNTVRDRTPYRTLLMNELGVPFHLGTKQVCIAWSSSSCHDGKAWLHVCITGDDKNATASFIYNGKLVDSVVSWSKEILRTQESECVCINGTCTVVMTDGSASGKADTKILFIEEGKIVHTSTLSGSAQHVEECSCYPRYPGVRCVCRDNWKGSNRPIVDINIKDHSIVSSYVCSGLVGDTPRKNDSSSSSHCLDPNNEEGGHGVKGWAFDDGNDVWMGRTINETSRLGYETFKVIEGWSNPKSKLQISRQVIVDRGNRSGYSGIFSVEGKSCINRCFYVELIRGRKEETEVLWTSNSIVVFCGTSGTYGTGSWPDGADLNLMPI

SEQ ID NO: 21163 - protein, 469 aa, synthetic construct
  REGION 1..469: note = neuraminidase__InfluenzaA__AEQ49835
MNPNQKIITIGSVSLTISTICFFMQIAILITTVTLHFKQYEFNSPPNNQVMLCEPTIIERNITEIVYLTNTTIEKEICPKLAEYRNWSKPQCDITGFAPFSKDNSIRLSAGGDIWVTREPYVSCDPNKCYQFALGQGTTLNNVHSNNTVRDRTPYRTLLMNELGVPFHLGTKQVCMAWSSSSCHDGKAWLHVCITGDDKNATASFIYNGRLVDSVVSWSKEILRTQESECVCINGTCTVVMTDGSASGKADTKILFIEEGKIVHTSTLSGSAQHVEECSCYPRYPGVRCVCRDNWKGSNRPIVDINMKDHSIVSSYVCSGLVGDTPRKNDSSSSSHCFDPNDEEGGHGVKGWAFDDGNDVWMGRTISEKSRLGYETFKVIEGWSNPKSKLQINRQVIVDRGNRSGYSGIFSVEGKSCINRCFYVELIRGRKEETEVLWTSNSIVVFCGTSGTYGTGSWPDGADINLMPI

SEQ ID NO: 21164 - protein, 469 aa, synthetic construct; identical to SEQ ID NO: 21163
  REGION 1..469: note = neuraminidase__InfluenzaA__AEQ49836

SEQ ID NO: 21165 - protein, 469 aa, synthetic construct; identical to SEQ ID NO: 21163
  REGION 1..469: note = neuraminidase__InfluenzaA__AEQ49838

SEQ ID NO: 21166 - protein, 469 aa, synthetic construct; identical to SEQ ID NO: 21163
  REGION 1..469: note = neuraminidase__InfluenzaA__AEQ49839

SEQ ID NO: 21167 - protein, 469 aa, synthetic construct
  REGION 1..469: note = neuraminidase__InfluenzaA__AEQ49840
MNPNQKIITIGSVSLTISTICFFMQIAILITTVTLHFKQYEFNSPPNNQVMLCEPTIIERNITEIVYLTNTTIEKEICPKLAEYRNWSKPQCDITGFAPFSKDNSIRLSAGGDIWVTREPYVSCDPNKCYQFALGQGTTLNNVHSNNTVRDRTPYRTLLMNELGVPFHLGTKQVCMAWSSSSCHDGKAWLHVCITGDDKNATASFIYNGRLVDSVVSWSKEILRTQESECVCINGTCTVVMTDGSASGKADTKILFIEEGKIVHTSTLSGSAQHVEECSCYPRYPGVRCVCRDNWKGSNRPIVDINMKDHSIVSSYVCSGLVGDTPRKNDSSSSSHCFDPNDEEGGHGVKGWAFDDGNDVWMGRTISEKSRLGYETFKVIEGWSNHKSKLQINRQVIVDRGNRSGYSGIFSVEGKSCINRCFYVELIRGRKEETEVLWTSNSIVVFCGTSGTYGTGSWPDGADINLMPI

SEQ ID NO: 21168 - protein, 469 aa, synthetic construct; identical to SEQ ID NO: 21163
  REGION 1..469: note = neuraminidase__InfluenzaA__AEQ49841

SEQ ID NO: 21169 - protein, 469 aa, synthetic construct; identical to SEQ ID NO: 21163
  REGION 1..469: note = neuraminidase__InfluenzaA__AEQ49842

SEQ ID NO: 21170 - protein, 469 aa, synthetic construct; identical to SEQ ID NO: 21163
  REGION 1..469: note = neuraminidase__InfluenzaA__AEQ49843

SEQ ID NO: 21171 - protein, 469 aa, synthetic construct; identical to SEQ ID NO: 21121
  REGION 1..469: note = neuraminidase__InfluenzaA__AEQ49844

SEQ ID NO: 21172 - protein, 469 aa, synthetic construct
  REGION 1..469: note = neuraminidase__InfluenzaA__AEQ49845
MNPNQKIITIGSVSLTISTICFFMQIAILITTVTLHFKQYEFNSPPNNQVMLCEPTIIERNITEIVYLTNTTIEREICPKLAEYRNWSKPQCDITGFAPFSKDNSIRLSAGGDIWVTREPYVSCDPNKCYQFALGQGTTLNNVHSNNTVRDRTPYRTLLMNELGVPFHLGTKQVCMAWSSSSCHDGKAWLHVCITGDDKNATASFIYNGRLVDSVVSWSKEILRTQESECVCINGTCTVVMTDGSASGKADTKILFIEEGKIVHTSTLSGSAQHVEECSCYPRYPGVRCVCRDNWKGSNRPIVDINMKDHSIVSSYVCSGLVGDTPRKNDSSSSSHCFDPNDEEGGHGVKGWAFDDGNDVWMGRTISEKSRLGYETFKVIEGWSNPKSKLQINRQVIVDRGNRSGYSGIFSVEGKSCINRCFYVELIRGRKEETEVLWTSNSIVVFCGTSGTYGTGSWPDGADINLMPI

SEQ ID NO: 21173 - protein, 469 aa, synthetic construct
  REGION 1..469: note = neuraminidase__InfluenzaA__AEQ49846
MNPNQKIITIGSVSLTISTICFFMQIAILITTVTLHFKQYEFNSPPNNQVMLCEPTIIERNITEIVYLTNTTIEKEICPKLAEYRNWSKPQCDITGFAPFSKDNSIRLSAGGDIWVTREPYVSCDPNKCYQFALGQGTTLNNVHSNNTVRDRTPYRTLLMNELGVPFHLGTKQVCMAWSSSSCHDGKAWLHVCITGDDKNATASFIYNGRLVDSVVSWSKEILRTQESECVCINGTCTVVMTDGSASGKADTKILFIEEGKIVHTSTLSGSAQHVEECSCYPRYPGVRCVCRDNWKGSNRPIVDINLKDHSIVSSYVCSGLVGDTPRKNDSSSSSHCFDPNDEEGGHGVKGWAFDDGNDVWMGRTISEKSRLGYETFKVIEGWSNPKSKLQINRQVIVDRGNRSGYSGIFSVEGKSCINRCFYVELIRGRKEETEVLWTSNSIVVFCGTSGTYGTGSWPDGADINLMPI

SEQ ID NO: 21174 - protein, 469 aa, synthetic construct
  REGION 1..469: note = neuraminidase__InfluenzaA__AEQ49850
MNPNQKIITIGSVSLTISTICFFMQIAILITTVTLHFKQYEFNSPPNNQVMLCEPTIIERNITEIVYLTNTTIEKEICPKLAEYRNWSKPQCDITGFAPFSKDNSIRLSAGGDIWVTREPYVSCDPNKCYQFALGQGTTLNNVHSNNTVRDRTPYRTLLMNELGVPFHLGTKQVCIAWSSSSCHDGKAWLHVCITGDDKNATASFIYNGRLVDSVVSWSKEILRTQESECVCINGTCTVVMTDGSASGKADTKILFIEEGKIVHTSTLSGSAQHVEECSCYPRYPGVRCVCRDNWKGSNRPIVDINMKDHSIVSSYVCSGLVGDTPRKNDSSSSSHCFDPNDEEGGHGVKGWAFDDGNDVWMGRTISEKSRLGYETFKVIEGWSNPKSKLQINRQVIVDRGDRSGYSGIFSVEGKSCINRCFYVELIRGSKEETEVLWTSNSIVVFCGTSGTYGTGSWPDGADIKIMPI

SEQ ID NO: 21175 - protein, 469 aa, synthetic construct
  REGION 1..469: note = neuraminidase__InfluenzaA__AEQ49851
MNPNQKIITIGSVSLTISTICFFMQIAILITTVTLHFKQYEFNSPPNNQVMLCEPTIMERNITEIVYLTNTTIEKEICPKLAEYRNWSKPQCDITGFAPFSKDNSIRLSAGGDIWVTREPYVSCDPDKCYQFALGQGTTLNNVHSNNTVRDRTPYRTLLMNELGVPFHLGTKQVCIAWSSSSCHDGKAWLHVCITGDDKNATASFIYNGKLVDSVVSWSKEILRTQESECVCINGTCTVVMTDGSASGKADTKILFIEEGKIVHTSTLSGSAQHVEECSCYPRYPGVRCVCRDNWKGSNRPIVDINIKDHSIVSSYVCSGLVGDTPRKNDSSSSSHCLDPNNEEGGHGVKGWAFDDGNDVWMGRTINETSRLGYETFKVIEGWSNPKSKLQINRQVIVDRGNRSGYSGIFSVEGKSCINRCFYVELIRGRKEETEVLWTSNSIVVFCGTSGTYGTGSWPDGADLNLMPI

SEQ ID NO: 21176 - protein, 469 aa, synthetic construct; identical to SEQ ID NO: 21143
  REGION 1..469: note = neuraminidase__InfluenzaA__AEQ49852

SEQ ID NO: 21177 - protein, 469 aa, synthetic construct; identical to SEQ ID NO: 21121
  REGION 1..469: note = neuraminidase__InfluenzaA__AEQ49969

SEQ ID NO: 21178 - protein, 469 aa, synthetic construct; identical to SEQ ID NO: 21143
  REGION 1..469: note = neuraminidase__InfluenzaA__AEQ49970

SEQ ID NO: 21179 - protein, 469 aa, synthetic construct
  REGION 1..469: note = neuraminidase__InfluenzaA__AEQ54954
MNPNQKIITIGSVSLTISTICFFMQIAILITTVTLHFKQYEFNSPPNNQVMLCEPTIIERNITEIVYLTNTTIEKEICPKLAEYRNWSKPQCDITGFAPFSKDNSIRLSAGGDIWVTREPYVSCDPDKCYQFALGQGTTLNNVHSNNTVRDRTPYRTLLMNELGVPFHLGTKQVCIAWSSSSCHDGKAWLHVCITGDDKNATASFIYNGKLVDSVVSWSKEILRTQESECVCINGTCTVVMTDGSASGKADTKILFIEEGKIVHTSTLSGSAQHVEECSCYPRYPGVRCVCRDNWKGSNRPIVDINIKDHSIVSSYVCSGLVGDTPRKNDSSSSSHCLDPNNEEGGHGVKGWAFDDGNDVWMGRTISETSRLGYETFKVIEGWSNPKSKLQINRQVIVDRGNRSGYSGIFSVEGKSCINRCFYVELIRGRKEETEVLWTSNSIVVFCGTSGTYGTGSWPDGADLNLMPI

SEQ ID NO: 21180 - protein, 469 aa, synthetic construct; identical to SEQ ID NO: 16599
  REGION 1..469: note = neuraminidase__InfluenzaA__AER08645

SEQ ID NO: 21181 - protein, 469 aa, synthetic construct
  REGION 1..469: note = neuraminidase__InfluenzaA__AER08649
MNPNQKIITIGSVSLTISTICFFMQIAILITTVTLHFKQYEFNSPPNNQVMLCEPTIIERNITEIVYLTNTTIEKEICPKLAEYRNWSKPQCDITGFAPFSKDNSIRLSAGGDIWVTREPYVSCDPDKCYQFALGQGTTLNNVHSNNTVRDRTPYRTLLMNELGVPFHLGTKQVCIAWSSSSCHDGKAWLHVCITGDDKNATASFIYNGRLVDSVVSWSKEILRTQESECVCINGTCTVVMTDGSASGKADTKILFIEEGKLVHTSTLSGSAQHVEECSCYPRYPGVRCVCRDNWKGSNRPIVDINIKDHSIVSSYVCSGLVGDTPRKNDSSSSSHCLDPNNEEGGHGVKGWAFDDGNDVWMGRTISEKSRLGYETFKVIEGWSNPKSKLQINRQVIVDRGNRSGYSGIFSVEGKSCINRCFYVELIRGRKEETEVLWTSNSIVVFCGTSGTYGTGSWPDGADINLMPI

SEQ ID NO: 21182 - protein, 469 aa, synthetic construct
  REGION 1..469: note = neuraminidase__InfluenzaA__AER08657
MNPNQKIITIGSVSLTISTVCFFMQIAILITTVTLHFKQYEFNSPPNNQVMLCEPTIIERNITEIVYLTNTTIEKEMCPKLAEYRNWSKPQCDITGFAPFSKDNSIRLSAGGDIWVTREPYVSCDPDKCYQFALGQGTTLNNVHSNNTVRDRTPYRTLLMNELGVPFHLGTKQVCIAWSSSSCHDGKAWLHVCITGDDKNATASFIYNGRLVDSVVSWSKEILRTQESECVCINGTCTVVMTDGSASGKADTKILFIEEGKIVHTSTLSGSAQHVEECSCYPRYPGVRCVCRDNWKGSNRPIVDINIKDHSIVSSYVCSGLVGDTPRKNDSSSSSHCLDPNNEEGGHGVKGWAFDDGNDVWMGRTISEKSRLGYETFKVIEGWSNPKSKLQINRQVIVDRGNRSGYSGIFSVEGKSCINRCFYVELIRGRKEETEVLWTSNSIVVFCGTSGTYGTGSWPDGADINLMPI

SEQ ID NO: 21183 - protein, 469 aa, synthetic construct; identical to SEQ ID NO: 16599
  REGION 1..469: note = neuraminidase__InfluenzaA__AER08659

SEQ ID NO: 21184 - protein, 469 aa, synthetic construct
  REGION 1..469: note = neuraminidase__InfluenzaA__AER08661
MNPNQKIITIGSVSLTISTICFFMQIAILITTVTLHFKQYEFNSPPNNQVMLCEPTIIERNITEIVYLTNTTIEKEICPKLAEYRNWSKPQCDITGFAPFSKDNSIRLSAGGDIWVTREPYVSCDPDKCYQFALGQGTTLNNVHSNNTVRDRTPYRTLLMNELGVPFHLGTKQVCIAWSSSSCHDGKAWLHVCITGDDKNATASFIYNGRLVDSVVSWSKEILRTQESECVCINGTCTVVMTDGSASGKADTKILFIEEGKIVHTSTLSGSAQHVEECSCYPRYPGVRCVCRDNWKGSNRPIVDINIKDHSIVSSYVCSGLVGDTPRKNDSSSSSHCLDPNNEEGDHGVKGWAFDDGNDVWMGRTINETSRLGYETFKVIEGWSNPKSKLQINRQVIVDRGNRSGYSGIFSVEGKSCINRCFYVELIRGRKEETEVLWTSNSIVVFCGTSGTYGTGSWPDGADLNLMPI

SEQ ID NO: 21185 - protein, 469 aa, synthetic construct; identical to SEQ ID NO: 19518
  REGION 1..469: note = neuraminidase__InfluenzaA__AER08663

SEQ ID NO: 21186 - protein, 469 aa, synthetic construct; identical to SEQ ID NO: 19518
  REGION 1..469: note = neuraminidase__InfluenzaA__AER08665

SEQ ID NO: 21187 - protein, 469 aa, synthetic construct
  REGION 1..469: note = neuraminidase__InfluenzaA__AER08669
MNPNQKIITIGSVSLTISTICFFMQIAILITTVTLHFKQYEFNSPPNNQVMLCEPTIIERNITEIVYLTNTTIEKEICPTLAEYRNWSKPQCDITGFAPFSKDNSIRLSAGGDIWVTREPYVSCDPDKCYQFALGQGTTLNNVHSNNTVRDRTPYRTLLMNELGVPFHLGTKQVCIAWSSSSCHDGKAWLHVCITGDDKNATASFIYNGRLVDSVVSWSKEILRTQESECVCINGTCTVVMTDGSASGKADTKILFIEEGKIVHTSTLSGSAQHVEECSCYPRYPGVRCVCRDNWKGSNRPIVDINIKDHSIVSSYVCSGLVGDTPRKNDSSSSSHCLDPNNEEGGHGVKGWAFDDGNDVWMGRTISETSRLGYETFKVIEGWSNPKSKLQINRQVIVDRGNRSGYSGIFSVEGKSCINRCFYVELIRGRKEETEVLWTSNSIVVFCGTSGTYGTGSWPDGADLNLMPI

SEQ ID NO: 21188 - protein, 469 aa, synthetic construct
  REGION 1..469: note = neuraminidase__InfluenzaA__AER08671
MNPNQKIITIGSVSLTISTICFFMQIAILITTVTLHFKQYGFNSPPNNQVMLCEPTIIERNITEIVYLTNTTIEKEICPTLAEYRNWSKPQCDITGFAPFSKDNSIRLSAGGDIWVTREPYVSCDPDKCYQFALGQGTTLNNVHSNNTVRDRTPYRTLLMNELGVPFHLGTKQVCIAWSSSSCHDGKAWLHVCITGDDKNATASFIYNGRLVDSVVSWSKEILRTQESECVCINGTCTVVMTDGSASGKADTKILFIEEGKIVHTSTLSGSAQHVEECSCYPRYPGVRCVCRDNWKGSNRPIVDINIKDHSIVSSYVCSGLVGDTPRKNDSSSSSHCLDPNNEEGGHGVKGWAFDDGNDVWMGRTINETSRLGYETFKVIEGWSNPKSKLQINRQVIVDRGNRSGYSGIFSVEGKSCINRCFYVELIRGRKEETEVLWTSNSIVVFCGTSGTYGTGSWPDGADLNLMPI

SEQ ID NO: 21189 - protein, 469 aa, synthetic construct; identical to SEQ ID NO: 19518
  REGION 1..469: note = neuraminidase__InfluenzaA__AER08673

SEQ ID NO: 21190 - protein, 469 aa, synthetic construct; identical to SEQ ID NO: 19518
  REGION 1..469: note = neuraminidase__InfluenzaA__AER08675

SEQ ID NO: 21191 - protein, 469 aa, synthetic construct; identical to SEQ ID NO: 19518
  REGION 1..469: note = neuraminidase__InfluenzaA__AER08677

SEQ ID NO: 21192 - protein, 469 aa, synthetic construct; identical to SEQ ID NO: 19518
  REGION 1..469: note = neuraminidase__InfluenzaA__AER08679

SEQ ID NO: 21193 - protein, 469 aa, synthetic construct
  REGION 1..469: note = neuraminidase__InfluenzaA__AER08681
MNPNQKIITIGSVSLTISTICFFMQIAILITTVTLHFKQYEFNSPPNNQVMLCEPTIIERNITEIVYLTNTTIEKEICPKLAEYRNWSKPQCDITGFAPFSKDNSIRLSAGGDIWVTREPYVSCDPDKCYQFALGQGTTLNNVHSNNTVRDRTPYRTLLMNELGVPFHLGTKQVCIAWSSSSCHDGKAWLHVCITGDDKNATASFIYNGRLVDSVVSWSKEILRTQESECVCINGTCTVVMTDGSASGKADTKILFIEEGKIVHTSTLSGSAQHVEECSCYPRYPGVRCVCRDNWKGSNRPIVDINIKDHSIVSSYVCSGLVGDTPRKNDSSSSSHCLDPNDEEGGHGVKGWAFDDGNDVWMGRTINETSRLGYETFKVIEGWSNPKSKLQINRQVIVDKGNRSGYSGIFSVEGKSCINRCFYVELIRGRKEETEVLWTSNSIVVFCGTSGTYGTGSWPDGADLNLMPI

SEQ ID NO: 21194 - protein, 469 aa, synthetic construct; identical to SEQ ID NO: 19518
  REGION 1..469: note = neuraminidase__InfluenzaA__AER08683

SEQ ID NO: 21195 - protein, 469 aa, synthetic construct; identical to SEQ ID NO: 21143
  REGION 1..469: note = neuraminidase__InfluenzaA__AER08685

SEQ ID NO: 21196 - protein, 469 aa, synthetic construct; identical to SEQ ID NO: 21143
  REGION 1..469: note = neuraminidase__InfluenzaA__AER08687

SEQ ID NO: 21197 - protein, 469 aa, synthetic construct
  REGION 1..469: note = neuraminidase__InfluenzaA__AER08689
MNPNQKIITIGSVSLTISTICFFMQIAILITTVTLHFKQYEFNSPPNNQVTLCEPTIIERNITEIVYLTNTTIEKEICPKLAEYRNWSKPQCDITGFAPFSKDNSIRLSAGGDIWVTREPYVSCDPDKCYQFALGQGTTLNNVHSNNTVRDRTPYRTLLMNELGVPFHLGTKQVCIAWSSSSCHDGKAWLHVCITGDDKNATASFIYNGRLVDSVVSWSKEILRTQESECVCINGTCTVVMTDGSASGKADTKILFIEEGKIVHTSTLSGSAQHVEECSCYPRYPGVRCVCRDNWKGSNRPIVDINIKDHSIVSSYVCSGLVGDTPRKDDSSSSSHCLDPNNEEGGHGVKGWAFDDGNDVWMGRTINETSRLGYETFKVIEGWSNPKSKLQINRQVIVDRGNRSGYSGIFSVEGKSCINRCFYVELIRGRKEETEVLWTSNSIVVFCGTSGTYGTGSWPDGADLNLMPI

SEQ ID NO: 21198 - protein, 469 aa, synthetic construct; identical to SEQ ID NO: 21143
  REGION 1..469: note = neuraminidase__InfluenzaA__AER08691

SEQ ID NO: 21199 - protein, 469 aa, synthetic construct
  REGION 1..469: note = neuraminidase__InfluenzaA__AER08693
MNPNQKIITIGSVSLTISTICFFMQIAILITTVTLHFKQYEFNSPPKNQVMLCEPTIIERNITEIVYLTNTTIEKEICPKLAEYRNWSKPQCDITGFAPFSKDNSIRLSAGGDIWVTREPYVSCDPDKCYQFALGQGTTLNNVHSNNTVRDRTPYRTLLMNELGVPFHLGTKQVCIAWSSSSCHDGKAWLHVCITGDDKNATASFIYNGKLVDSVVSWSKEILRTQESECVCINGTCTVVMTDGSASGKADTKILFIEEGKIVHTSTLSGSAQHVEECSCYPRYPGVRCVCRDNWKGSNRPIVDINIKDHSIVSSYVCSGLVGDTPRKNDSSSSSHCLDPNNEEGGHGVKGWAFDDGNDVWMGRTINETSRLGYETFKVIEGWSNPKSKLQINRQVIVDRGNRSGYSGIFSVEGKSCINRCFYVELIRGRKEETEVLWTSNSIVVFCGTSGTYGTGSWPDGADLNLMPI

SEQ ID NO: 21200 - protein, 469 aa, synthetic construct
  REGION 1..469: note = neuraminidase__InfluenzaA__AER08697
MNPNQKIITIGSVSLTISTICFFMQIAILITTVTLHFKQYEFNSPPNNQVMLCEPTIIERNITEIVYLTNTTIEKETCPTLAEYRNWSKPQCDITGFAPFSKDNSIRLSAGGDIWVTREPYVSCDPDKCYQFALGQGTTLNNVHSNNTVRDRTPYRTLLMNELGVPFHLGTKQVCIAWSSSSCHDGKAWLHVCITGDDKNATASFIYNGRLVDSVVSWSKEILRTQESECVCINGTCTVVMTDGSASGKADTKILFIEEGKIVHTSTLSGSAQHVEECSCYPRYPGVRCVCRDNWKGSNRPIVDINIKDHSIVSSYVCSGLVGDTPRKNDSSSSSHCLDPNNEEGGHGVKGWAFDDGNDVWMGRTINVTSRLGYETFKVIEGWSNPKSKLQINRQVIVDRGNRSGYSGIFSVEGKSCINRCFYVELIRGRKEETEVLWTSNSIVVFCGTSGTYGTGSWPDGADLNLMPI

SEQ ID NO: 21201 - protein, 469 aa, synthetic construct; identical to SEQ ID NO: 20997
  REGION 1..469: note = neuraminidase__InfluenzaA__AER92714

SEQ ID NO: 21202 - protein, 469 aa, synthetic construct; identical to SEQ ID NO: 16738
  REGION 1..469: note = neuraminidase__InfluenzaA__AER92721

SEQ ID NO: 21203 - protein, 469 aa, synthetic construct; identical to SEQ ID NO: 16738
  REGION 1..469: note = neuraminidase__InfluenzaA__AER92724

SEQ ID NO: 21204 - protein, 470 aa, synthetic construct
  REGION 1..470: note = neuraminidase__InfluenzaA__AET84165
MNPNQKIITIGSISIAIGIISLMLQIGNIISIWASHSIQTGSQNNTGICNQRIITYENSTWVNHTYVNINNTNVVAGEDKTSVTLAGNSSLCSISGWAIYTKDNSIRIGSKGDVFVIREPFISCSHLECRTFFLTQGALLNDKHSNGTVKDRSPYRALMSCPLGEAPSPYNSKFESVAWSASACHDGMGWLTIGISGPDNGAVAVLKYNGIITGTIKSWKKQILRTQESECVCMNGSCFTIMTDGPSNKAASYKIFKIEKGKVTKSIELSAPNFYYEECSCYPDTGIVMCVCRDNWHGSNRPWVSFNQNLDYQIGYICSGVFGDNPRPEDGEGSCNPVTIDGANGVKGFSYKYGNGVWIGRTKSNRLRKGFEMIWDPNGWTNTDSDFSVKQDVVAITDWSGYSGSFVQHPELTGLDCIRPCFWVELVRGLPRENTTIWTSGSSISFCGVNSDTANWSWPDGAELPFTIDK

SEQ ID NO: 21205 - protein, 470 aa, synthetic construct; identical to SEQ ID NO: 18930
  REGION 1..470: note = neuraminidase__InfluenzaA__AET84176

SEQ ID NO: 21206 - protein, 470 aa, synthetic construct
  REGION 1..470: note = neuraminidase__InfluenzaA__AET84187
MNPNQKIITIGSISIAIGIISLMLQIGNIISIWASHSIQTGSQNNTGICNQRIITYENSTWVNHTYVNINNTNVVAGEDKTSVTLAGNSSLCSISGWAIYTKDNSIRIGSKGDVFVIREPFISCSHLECRTFFLTQGALLNDKHSNGTVKDRSPYRALMSCPLGEAPSPYNSKFESVAWSASACHDGMDWLTIGISGPDNGAVAVLKYNGIITGTIKSWKKQILRTQESECVCMNGSCFTIMTDGPSNKAASYKIFKIEKGKVTKSIELNAPNFYYEECSCYPDTGIVMCVCRDNWHGSNRPWVSFNQNLDYQIGYICSGVFGDNPRPKDGEGSCNPVTIDGANGVKGFSYKYGNGVWIGRTKSNRLRKGFEMIWDPNGWTNTDSDFSVKQDVVAITDWSGYSGSFVQHPELTGLDCIRPCFWVELVRGLPRENTTIWTSGSSISFCGVNSDTANWSWPDGAELPFTIDK

SEQ ID NO: 21207 - protein, 470 aa, synthetic construct
  REGION 1..470: note = neuraminidase__InfluenzaA__AET84198
MNPNQKIITIGSISIAIGIISLMLQIGNIISIWASHSIQTGSQNNTGICNQRIITYENSTWVNHTYVNINNTNVVAGEDKTSMTLAGNSSLCSISGWAIYTKDNSIRIGSKGDVFVIREPFISCSHLECRTFFLTQGALLNDKHSNGTVKDRSPYRALMSCPLGEAPSPYNSKFESVAWSASACHDGMGWLTIGISGPDNGAVAVLKYNGIITGTIKSWKKQILRTQESECVCMNGSCFTIMTDGPSNKAASYKIFKIEKGKVTKSIELNAPNFYYEECSCYPDTGIVMCVCRDNWHGSNRPWVSFNQNLDYQIGYICSGVFGDNPRPKDGEGSCNPVTVDGANGVKGFSYKYGNGVWIGRTKSNRLRKGFEMIWDPNGWTNTDSDFSVKQDVVAITDWSGYSGSFVQHPELTGLDCIRPCFWVELVRGLPRENTTIWTSGSSISFCGVNSDTANWSWPDGAELPFTIDK

SEQ ID NO: 21208 - protein, 470 aa, synthetic construct
  REGION 1..470: note = neuraminidase__InfluenzaA__AET84209
MNPNQKIITIGSISIAIGIISLMLQIGNIISIWASHSIQTGSQNNTGICNQRIITYENSTWVNHTYVNINNTKVVAGEDKTSVTLAGNSSLCSISGWAINTKDNSIRIGSKGDVFVIREPFISCSHLECRTFFLTQGALLNDKHSNGTVKDRSPYRALMSCPLGEAPSPYNSKFESVAWSASACHDGMGWLTIGISGPDNGAVAVLKYNGIITGTIKSWKKQILRTQESECVCMNGSCFTIMTDGPSNKAASYKIFKIEKGKVTKSIELNAPNFYYEECSCYPDTGIVMCVCRDNWHGSNRPWVSFNQNLDYQIGYICSGVFGDNPRPKDGEGSCNPVTVDGANGVKGFSYKYGNGVWIGRTKSNRLRKGFEMIWDPNGWTNTDSDFSVKQDVVAITDWSGYSGSFVQHPELTGLDCIRPCFWVELVRGLPRENTTIWTSGSSISFCGVNSDTANWSWPDGAELPFTIDK

SEQ ID NO: 21209 - protein, 470 aa, synthetic construct
  REGION 1..470: note = neuraminidase__InfluenzaA__AET84231
MNPNQKIITIGSISIAIGIISLMLQIGSIISIWASHSIHTGSQNNTGICNQRIITYENSTWVNHTYVNINNTNVVAGEDKTSVTLAGNSSLCSISGWAIYTKDNSIRIGSKGDVFVIREPFISCSHLECRTFFLTQGALLNDKHSNGTVKDRSPYRALMSCPLGEAPSPYNSKFESVAWSASACHDGMGWLTIGISGPDNGAVAVLKYNGIITGTIKSWKKQILRTQESECVCMNGSCFTIMTDGPSNKASSYKIFKIEKGKVTKSIELNAPNFYYEECSCYPDTGIVMCVCRDNWHGSNRPWVSFNQNLDYQIGYICSGVFGDNPRPEDGEGSCNPVTVDGANGVKGFSYKYGNGVWIGRTKSNRLRKGFEMIWDPNGWTNTDSDFSVKQDVVAITDWSGYSGSFVQHPELTGLDCIRPCFWVELVRGLPRENTTIWTSGSSISFCGVNSDTANWSWPDGAELPFTIDK

SEQ ID NO: 21210 - protein, 470 aa, synthetic construct; identical to SEQ ID NO: 17461
  REGION 1..470: note = neuraminidase__InfluenzaA__AET84242

SEQ ID NO: 21211 - protein, 470 aa, synthetic construct
  REGION 1..470: note = neuraminidase__InfluenzaA__AET84253
MNPNQKIITIGSISIAIGIISLMLQIGSIISIWASHSIQTGSQNNTGICNQRIITYENSTWVNHTYVNINNTNVVAGEDKTSVTLAGNSSLCSISGWAIYTKDNSIRIGSKGDVFVIREPFISCSHLECRTFFLTQGALLNDKHSNGTVKDRSPYRALMSCPLGEAPSPYNSKFESVAWSASACHDGMGWLTIGISGPDNGAVAVLKYNGIITETIKSWKKQILRTQESECVCMNGSCFTIMTDGPSNKAASYKIFKIEKGKVTKSIELNAPNFYYEECSCYPDTGIVMCVCRDNWHGSNRPWVSFNQNLDYQIGYICSGVFGDNPRPEDGEGSCNPVTVDGANGVKGFSYKYGNGVWIGRTKSNRLRKGFEMIWDPNGWTNTDSDFSVKQDVVAITDWSGYSGSFVQHPELTGLDCIRPCFWVELVRGLPRENTTIWTSGSSISFCGVNSDTANWSWPDGAELPFTIDK

SEQ ID NO: 21212 - protein, 470 aa, synthetic construct
  REGION 1..470: note = neuraminidase__InfluenzaA__AET84264
MNPNQKIITIGSISIAIGIISLMFQIGSIISIWASHSIQTGSQNNTGICNQRIITYENSTWVNHTYVNINNTNVVAGEDKTSVTLAGNSSLCSISGWAIYTKDNSIRIGSKGDVFVIREPFISCSHLECRTFFLTQGALLNDKHSNGTVKDRSPYRALMSCPLGEAPSPYNSKFESVAWSASACHDGMGWLTIGISGPDNGAVAVLKYNGIITETIKSWKKQILRTQESECVCMNGSCFTIMTDGPSNKAASYKIFKIEKGKVTKSIELNAPNFYYEECSCYPDTGIVMCVCRDNWHGSNRPWVSFNQNLDYQIGYICSGVFGDNPRPEDGEGSCNPVTVDGANGVKGFSYKYGNGVWIGRTKSNRLRKGFEMIWDPNGWTNTDSDFSVKQDVVAITDWSGYSGSFVQHPELTGLDCIRPCFWVELVRGLPRENTTIWTSGSSISFCGVNSDTANWSWPDGAELPFTIDK

SEQ ID NO: 21213 - protein, 470 aa, synthetic construct
  REGION 1..470: note = neuraminidase__InfluenzaA__AET84275
MNPNQKIITIGSISIAIGIISLMLQIGNIISIWASHSIQTGSQNNTGICNQRIITYENSTWVNHTYVNINNTNVVAGEDKTSVTLAGNSSLCSISGWAIYTKDNSIRIGSKGDVFVIREPFISCSHLECRTFFLTQGALLNDKHSNGTVKDRSPYRALMSCPLGEAPSPYNSKFESVAWSASACHDGMGWLTIGISGPDNGAVAVLKYNGIITGTIKSWKKQILRTQESECVCMNGSCFTIMTDGPSNKAASYKIFKIEKGKVTKSIELNAPNFYYEECSCYPDTGIVMCVCRDNWHGSNRPWVSFNQNLDYQIGYICSGVFGDNPRPKDGEGSCNPVTVDGANGVKGFSYKYGNGVWIGRTKSNRLRKGFEMIWDPNGWTNTDSDFSVKQDVVAITDWSGYSGSFVQHPELTGLDCIRPCFWVELVRGLPRENTTIWTSGSSISFCGVNSDTANWSWPDGAELPFTIDK

SEQ ID NO: 21214 - protein, 470 aa, synthetic construct; identical to SEQ ID NO: 17461
  REGION 1..470: note = neuraminidase__InfluenzaA__AET84286

SEQ ID NO: 21215 - protein, 470 aa, synthetic construct
  REGION 1..470: note = neuraminidase__InfluenzaA__AET84297
MNPNQKIITIGSISIAIGIISLMLQIGNIISIWASHSIQTGSQNNTGICNQRIITYENSTWVNHTYVNINNTNVVAGEDKTSVTLAGNSSLCSISGWAIYTKDNSIRIGSKGDVFVIREPFISCSHLECRTFFLTQGALLNDKHSNGTVKDRSPYRALMSCPLGEAPSPYNSKFESVAWSASACHDGMGWLTIGISGPDNGAVAVLKYNGIITGTIKSWKKQILRTQESECVCMNGSCFTIMTDGPSNKAASYKIFKIEKGKVTKSIELNAPNFYYEECSCYPDTGIVMCVCRDNWHGSNRPWVSFNQNLDYQIGYICSGVFGDNPRPEDGEGSCNPVTVDGANGVKGFSYKYDNGVWIGRTKSNRLRKGFEMIWDPNGWTNTDSDFSVKQDVVAITDWSGYSGSFVQHPELTGLDCIRPCFWVELVRGLPRENTTIWTSGSSISFCGVNSDTTNWSWPDGAELPFTIDK

SEQ ID NO: 21216 - protein, 470 aa, synthetic construct
  REGION 1..470: note = neuraminidase__InfluenzaA__AET84308
MNPNQKIITIGSISIAIGIISLMLQIGNIISIWASHSIQTGSQNNTGICNQRIITYENSTWVNHTYVNINNTNVVAGEDKTSVTLAGNSSLCSISGWAIYTKDNSIRIGSKGDVFVIREPFISCSHLECRTFFLTQGALLNDKHSNGTVKDRSPYRALMSCPLGEAPSPYNSKFESVAWSASACHDGMGWLTIGISGPDNGAVAVLKYNGIITETIKSWKKQILRTQESECVCMNGSCFTIMTDGPSNKAASYKIFKIEKGKVTKSIELNAPNFHYEECSCYPDTGIVMCVCRDNWHGSNRPWVSFNQNLDYQIGYICSGVFGDNPRPEDGEGSCNPVTVDGANGVKGFSYKYDNGVWIGRTKSNRLRKGFEMIWDPNGWTNTDSDFSVKQDVVAITDWSGYSGSFVQHPELTGLDCIRPCFWVELVRGLPRENTTIWTSGSSISFCGVNSDTTNWSWPDGAELPFTIDK

SEQ ID NO: 21217 - protein, 470 aa, synthetic construct
  REGION 1..470: note = neuraminidase__InfluenzaA__AET84319
MNPNQKIITIGSISIAIGIISLMLQIGNIISIWASHSIQTGSQNNTGICNQRIITYENSTWVNHTYVNINNTNVVAGEDKTSMTLAGNSSLCSISGWAIYTKDNSIRIGSKGDVFVIREPFISCSHLECRTFFLTQGALLNDKHSNRTVKDRSPYRALMSCPLGEAPSPYNSKFESVAWSASACHDGMGWLTIGISGPDNGAVAVLKYNGIITETIKSWKKQILRTQESECVCMNGSCFTIMTDGPSNKAASYKIFKIEKGKVTKSIELNAPNFYYEECSCYPDTGIVMCVCRDNWHGSNRPWVSFNQNLDYQIGYICSGVFGDNPRPEDGEGSCNPVTVDGANGVKGFSYKYGNGVWIGRTKSNRLRKGFEMIWDPNGWTNTDSDFSVKQDVVAITDWSGYSGSFVQHPELTGLDCIRPCFWVELVRGLPRENTTIWTSGSSISFCGVNSDTANWSWPDGAELPFTIDK

SEQ ID NO: 21218 - protein, 470 aa, synthetic construct
  REGION 1..470: note = neuraminidase__InfluenzaA__AET84330
MNPNQRIITIGSISIAIGIISLMLQIGNIISIWASHSIQIGSQNNTGICNQRIITYENSTWVNHTYVNINNTNVVAGEDKTSVTLAGNSSLCSISGWAIYTKDNSIRIGSKGDVFVIREPFISCSHLECRTFFLTQGALLNDKHSNGTAKDRSPYRALMSCPLGEAPSPYNSKFESVAWSASACHDGMGWLTIGISGPDNGAVAVLKYNGIITGTIKSWKKQILRTQESECVCMNGSCFTIMTDGPSNKAASYKIFKIEKGKVTKSIELNAPNFYYEECSCYPDTGIVMCVCRDNWHGSNRPWVSFNQNLDYQIGYICSGVFGDNPRPKDGEGSCNPVTVDGANGVKGFSYKYGNGVWIGRTKSNRLRKGFEMIWDPNGWTNTDSDFSVKQDVVAITDWSGYSGSFVQHPELTGLDCIRPCFWVELVRGLPRENTTIWTSGSSISFCGVNSDTANWSWPDGAELPFTIDK

SEQ ID NO: 21219 - protein, 470 aa, synthetic construct
  REGION 1..470: note = neuraminidase__InfluenzaA__AET84341
MNPNQRIITIGSISIAIGIISLMLQIGNIISIWASHSIQIGSQNNTGICNQRIITYENSTWVNHTYVNINNTNVVAGEDKTSVTLAGNSSLCSISGWAIYTKDNSIRIGSKGDVFVIREPFISCSHLECRTFFLTQGALLNDKHSNGTAKDRSPYRALMSCPLGEAPSPYNSKFESVAWSASACHDGMGWLTIGISGPDNGAVAVLKYNGIITGTIKSWKKQILRTQESECVCMNGSCFTIMTDGPSNKAASYKIFKIEKGKVTKSIELNAPNFYYEECSCYPDTGIVMCVCRDNWHGSNRPWVSFNQNLDYQIGYICSGVFGDNPRPKDGEGSCNPVTVDGANGVKGFSYKYGNGVWIGRTKSNRLRKGFEMIWDPNGWTNTDSDFSVKQDVVAITDWSGYSGSFVQHPELTGLDCIRPCFWVELVRGLPKENTTIWTSGSSISFCGVNSDTANWSWPDGAELPFTIDK

SEQ ID NO: 21220 - protein, 470 aa, synthetic construct
  REGION 1..470: note = neuraminidase__InfluenzaA__AET84363
MNPNQRIITIGSISIAIGIISLMLQIGNIISIWASHSIQTGSQNNTGICNQRIITYENSTWVNHTYVNINNTNVVAGEDKTSMTLAGNSSLCSISGWAIYTKDNSIRIGSKGDVFVIREPFISCSHLECRTFFLTQGALLNDKHSNGTAKDRSPYRALMSCPLGEAPSPYNSKFESVAWSASACHDGMGWLTIGISGPDNGAVAVLKYNGIITGTIKSWKKQILRTQESECVCMNGSCFTIMTDGPSNKAASYKIFKIEKGKVTKSIELNAPNFYYEECSCYPDTGIVMCVCRDNWHGSNRPWVSFNQNLDYQIGYICSGVFGDNPRPKDGEGSCNPVTVDGANGVKGFSYKYGNGVWIGRTKSNRLRKGFEMIWDPNGWTNTDSDFSVKQDVVAITDWSGYSGSFVQHPELTGLDCIRPCFWVELVRGLPRENTTIWTSGSSISFCGVNSDTANWSWPDGAELPFTIDK

SEQ ID NO: 21221 - protein, 470 aa, synthetic construct
  REGION 1..470: note = neuraminidase__InfluenzaA__AET84374
MNPNQRIITIGSISIAIGIISLMLQIGNIISIWASHSIQIGSQNNTGICNQRIITYENSTWVNHTYVNINNTNVVAGEDKTSVTLAGNSSLCSISGWAIYTKDNSIRIGSKGDVFVIREPFISCSHLECRTFFLTQGALLNDKHSNGTAKDRSPYRALMSCPLGEAPSPYNSKFESVAWSASACHDGMGWLTIGISGPDNGAVAVLKYNGIITETIKSWKKQILRTQESECVCMNGSCFTIMTDGPSNKAASYKIFKIEKGKVTKSIELNAPNFYYEECSCYPDTGIVMCVCRDNWHGSNRPWVSFNQNLDYQIGYICSGVFGDNPRPKDGEGSCNPVTVDGANGVKGFSYKYGNGVWIGRTKSNRLRKGFEMIWDPNGWTNTDSDFSVKQDVVAITDWSGYSGSFVQHPELTGLDCIRPCFWVELVRGLPRENTTIWTSGSSISFCGVNSDTANWSWPDGAELPFTIDK

SEQ ID NO: 21222 - protein, 470 aa, synthetic construct
  REGION 1..470: note = neuraminidase__InfluenzaA__AET84396
MNPNQRIITIGSISIAIGIISLMLQIGNIISIWASHSIQTGSQNNTGICNQRIITYENSTWVNHTYVNINNTNVVAGEDKTSMTLAGNSSLCSISGWAIYTKDNSIRIGSKGDVFVIREPFISCSHLECRTFFLTQGALLNDKHSNGTAKDRSPYRALMSCPLGEAPSPYNSKFESVAWSASACHDGMGWLTIGISGPDNGAVAVLKYNGIITETIKSWKKQILRTQESECVCMNGSCFTIMTDGPSNKAASYKIFKIEKGKVTKSIELNAPNFYYEECSCYPDTGIVMCVCRDNWHGSNRPWVSFNQNLDYQIGYICSGVFGDNPRPKDGEGSCNPVTVDGANGVKGFSYKYGNGVWIGRTKSNRLRKGFEMIWDPNGWTNTDSDFSVKQDVVAITDWSGYSGSFVQHPELTGLDCIRPCFWVELVRGLPRENTTIWTSGSSISFCGVNSDTANWSWPDGAELPFTIDK

SEQ ID NO: 21223 - protein, 470 aa, synthetic construct
  REGION 1..470: note = neuraminidase__InfluenzaA__AET84407
MNPNQRIITIGSISIAIGIISLMLQIGNIISIWASHSIQIGSQNNTGICNQRIITYENSTWVNHTYVNINNTNVVAGEDKTSVTLAGNSSLCSISGWAIYTKDNSIRIGSKGDVFVIREPFISCSHLECRTFFLTQGALLNDKHSNGTAKDRSPYRALMSCPLGEAPSPYNSKFESVAWSASACHDGMGWLTIGISGPDNGAVAVLKYNGIITGTIKSWKKQILRTQESECVCMNGSCFTIMTDGPSNKAASYKIFKIEKGKVTKSIELNAPNFYYEECSCYPDTGIVMCVCRDNWHGSNRPWVSFNQNLDYQIGYICSGVFGDNPRPEDGEGSCNPVTVDGANGVKGFSYKYGNGVWIGRTKSNRLRKGFEMIWDPNGWTNTDSDFSVKQDVVAITDWSGYSGSFVQHPELTGLDCIRPCFWVELVRGLPRENTTIWTSGSSISFCGVNSDTANWSWPDGAELPFTIDK

SEQ ID NO: 21224 - protein, 470 aa, synthetic construct
  REGION 1..470: note = neuraminidase__InfluenzaA__AET84418
MNPNQRIIAIGSISIAIGIISLMLQIGNIISIWASHSIQIGSQNNTGICNQRIITYENSTWVNHTYVNINNTNVVAGEDKTSVTLAGNSSLCSISGWAIYTKDNSIRIGSKGDVFVIREPFISCSHLECRTFFLTQGALLNDKHSNGTAKDRSPYRALMSCPLGEAPSPYNSKFESVAWSASACHDGMGWLTIGISGPDNGAVAVLKYNGIITETIKSWKKQILRTQESECVCMNGSCFTIMTDGPSNKAASYKIFKIEKGKVTKSIELNAPNFYYEECSCYPDTGIVMCVCRDNWHGSNRPWVSFNQNLDYQIGYICSGVFGDNPRPEDGEGSCNPVTVDGANGVKGFSYKYGNGVWIGRTKSNRLRKGFEMIWDPNGWTNTDSDFSVKQDVVAITDWSGYSGSFVQHPELTGLDCIRPCFWVELVRGLPRENTTIWTSGSSISFCGVNSDTANWSWPDGAELPFTIDK

SEQ ID NO: 21225 - protein, 470 aa, synthetic construct
  REGION 1..470: note = neuraminidase__InfluenzaA__AET84429
MNPNQKIITIGSISIAIGIISLMLQIGNIISIWASHSIQTGSQNNTGICNQRIITYENSTWVNHTYVSINNTNVVAGKDKTSVTLAGNSSLCSISGWAIYTKDNSIRIGSKGDVFVIREPFISCSHLECRTFFLTQGALLNDKHSNGTVKDRSPYRALMSCPLGEAPSPYNSKFESVAWSASACHDGMGWLTIGISGPDNGAVAVLKYNGIITGTIKSWKKQILRTQESECVCMNGSCFTIMTDGPSNKAASYKIFKIEKGKVTKSIELNAPNFYYEECSCYPDTGIVMCVCRDNWHGSNRPWVSFNQDLDYQIGYICSGVFGDNPRPKDGEGSCNPVTVDGANGVKGFSYKYGNGVWIGRTKSNRLRKGFEMIWDPNGWTNTDSDFSVKQDVVAITDWSGYSGSFVQHPELTGLDCIRPCFWVELVRGLPRENTTIWTSGSSISFCGVNSDTANWSWPDGAELPFTIDK

SEQ ID NO: 21226 - protein, 470 aa, synthetic construct
  REGION 1..470: note = neuraminidase__InfluenzaA__AET84440
MNPNQKIITIGSISIAIGIISLMLQIGNIISIWASHSIQTGSQNNTGICNQRIITYENSTWVNHTYVNINNTNVVAGEDKTSVTLAGNSSLCSISGWAIYTKDNSIRIGSKGDVFVIREPFISCSHLECRTFFLTQGALLNDKHSNGTVKDRSPYRALMSCPLGEAPSPYNSKFESVAWSASACHDGMGWLTIGISGPDNGAVAVLKYNGIITETIKSWKKQILRTQESECVCMNGSCFTIMTDGPSNKAASYKIFKIEKGKVTKSIELNAPNFYYEECSCYPDTGIVMCVCRDNWHGSNRPWVSFNQNLDYQIGYICSGVFGDNPRPKDGEGSCNPVTVDGANGVKGFSYKYGNGVWIGRTKSNRLRKGFEMIWDPNGWTNTDSDFSVKQDVVAITDWSGYSGSFVQHPELTGLDCIRPCFWVELVRGLPRENTTIWTSGSSISFCGVNSDTANWSWPDGAELPFTIDK

SEQ ID NO: 21227 - protein, 470 aa, synthetic construct
  REGION 1..470: note = neuraminidase__InfluenzaA__AET84451
MNPNQKIITIGSISIAIGIISLILQIGNIISIWASHSIQTGSQNHTGICNQRIITYENSTWVNNTYVNINNTNVVAEKDKTSVTLAGNSSLCSISGWAIYTKDNSIRIGSKGDVFVIREPFISCSHLECRTFFLTKGALLNDKHSNGTVTDRSPYRALMSCPLGEAPSPYNSRFESVAWSASACHDGMGWLTIGISGPDNGAVAVLKYNGIITETIKSWKKRILRTQESECVCMNGSCFTIMTDGPSNGAASYKIFKIEKGKVTKTIELNAPNFHYEECSCYPDTGTVMCVCRDNWHGSNRPWVSFNQNLDYQIGYICSGVFGDNPRPKDGEGSCNPVTVDGADGVKGFSYKYGNGVWIGRTKSNRLRKGFEMIWDPNGWTNTDSDFSVKQDVVAITDWSGYSGSFVQHPELTGLDCIRPCFWVELVRGLPRENTTIWTSGSSISFCGVNSGTANWSWPDGAELPFTIDK

SEQ ID NO: 21228 - protein, 469 aa, synthetic construct; identical to SEQ ID NO: 16738
  REGION 1..469: note = neuraminidase__InfluenzaA__AEV53421

SEQ ID NO: 21229 - protein, 469 aa, synthetic construct; identical to SEQ ID NO: 16738
  REGION 1..469: note = neuraminidase__InfluenzaA__AEV53423

SEQ ID NO: 21230 - protein, 469 aa, synthetic construct; identical to SEQ ID NO: 18200
  REGION 1..469: note = neuraminidase__InfluenzaA__AEV53425

SEQ ID NO: 21231 - protein, 469 aa, synthetic construct; identical to SEQ ID NO: 16738
  REGION 1..469: note = neuraminidase__InfluenzaA__AEV53427

SEQ ID NO: 21232 - protein, 469 aa, synthetic construct; identical to SEQ ID NO: 18200
  REGION 1..469: note = neuraminidase__InfluenzaA__AEV53429

SEQ ID NO: 21233 - protein, 469 aa, synthetic construct
  REGION 1..469: note = neuraminidase__InfluenzaA__AEV53431
MNPNQKIITIGSVCMTIGMANLILQIGNIISIWISHSIQLGNQNQIETCNQSVITYENNTWVNQTYVNISNTNFAAGQSVVPVKLAGNSSLCPVSGWAIYSKDNSIRIGSKGDVFVIREPFISCSPLECRTFFLTQGALLNDKHSNGTIKDRSPYRTLMSCPIGEVPSPYNSRFESVAWSASACHDGINWLTIGISGPDNGAVAVLKYNGIITDTIKSWRNNILRTQESECACVNGSCFTVMTDGPSDGQASYKIFRIEKGKIVKSVEMNAPNYHYEECSCYPDSSEITCVCRDNWHGSNRPWVSFNQNLEYQIGYICSGIFGDNPRPNDKTGSCGPVSSNGANGVKGFSFKYGNGVWIGRTKSISSRNGFEMIWDPNGWTGTDNNFSIKQDIVGINEWSGYSGSFVQHPELTGLDCIRPCFWVELIRGRPKENTIWTSGSSISFCGVNSGTVGWSWPDGAELPFTIDK

SEQ ID NO: 21234 - protein, 469 aa, synthetic construct; identical to SEQ ID NO: 16738
  REGION 1..469: note = neuraminidase__InfluenzaA__AEV53435

SEQ ID NO: 21235 - protein, 469 aa, synthetic construct
  REGION 1..469: note = neuraminidase__InfluenzaA__AEV53437
MNPNQKIITIGSVCMTIGMANLILQIGNIISIWISHSIQLGNQNQIETCNQSVITYENNTWVNQTYVNISNTNFAAGQSVVSVKLAGNSSLCPVSGWAIYSKDNSIRIGSKGDVFVIREPFISCSPLECRTFFLTQGALLNDKHSNGTIKDRSPYRTLMSCPIGEVPSPYNSRFESVAWSASACHDGINWLTIGISGPDNGAVAVLKYNGIITDTIKSWRNNTLRTQESECACVNGSCFTVMTDGPSDGQASYKIFRIEKGKIVKSVEMNAPNYHYEECSCYPDSSEITCVCRDNWHGSNRPWVSFNQNLEYQIGYICSGIFGDNPRPNDKTGSCGPVSSNGANGVKGFSFKYGNGVWIGRTKSISSRNGFEMIWDPNGWTGTDNNFSIKQDIVGINEWSGYSGSFVQHPELTGLDCIRPCFWVELIRGRPKENTIWTSGSSISFCGVNSDTVGWSWPDGAELPFTIDK

SEQ ID NO: 21236 - protein, 469 aa, synthetic construct; identical to SEQ ID NO: 16738
  REGION 1..469: note = neuraminidase__InfluenzaA__AEV53439

SEQ ID NO: 21237 - protein, 469 aa, synthetic construct; identical to SEQ ID NO: 16738
  REGION 1..469: note = neuraminidase__InfluenzaA__AEV53441

SEQ ID NO: 21238 - protein, 469 aa, synthetic construct; identical to SEQ ID NO: 16738
  REGION 1..469: note = neuraminidase__InfluenzaA__AEV53443

SEQ ID NO: 21239 - protein, 469 aa, synthetic construct
  REGION 1..469: note = neuraminidase__InfluenzaA__AEV53445
MNPNQKIITIGSVCMTIGMANLILQIGNIISIWISHSIQLGNQNQIETCNQSVITYENNTWVNQTYVNISNTNFAAGQSVVSVKLAGNSSLCPVSGWAIYSKDNSIRIGSKGDVFVIREPFISCSPLECRTFFLTQGALLNDKHSNGTIKDRSPYRTLMSCPIGEVPSPYNSRFESVAWSASACHDGINWLTIGISGPDNGAVAVLKYNGIITDTIKSWRNNILRTQESECACVNGSCFTVMTDGPSDGQASYKIFRIEKGKIVKSVEMNAPNYHYEECSCYPDSSEITCVCRDNWHGSNRPWVSFNQNLEYQIGYICSGIFGDNPRPNDKTGSCGPVSSNGANGVKGFSFKYGNGVWIGRTKSISSRNGFEMIWDPNGWTGTDHNFSIKQDIVGINEWSGYSGSFVQHPELTGLDCIRPCFWVELIRGRPKENTIWTSGSSISFCGVNSDTVGWSWPDGAELPFTIDK

SEQ ID NO: 21240 - protein, 469 aa, synthetic construct; identical to SEQ ID NO: 16738
  REGION 1..469: note = neuraminidase__InfluenzaA__AEV53447

SEQ ID NO: 21241 - protein, 469 aa, synthetic construct; identical to SEQ ID NO: 18640
  REGION 1..469: note = neuraminidase__InfluenzaA__AEV53449

SEQ ID NO: 21242 - protein, 469 aa, synthetic construct
  REGION 1..469: note = neuraminidase__InfluenzaA__AEV53451
MNPNQKIITIGSVCMTIGMANLILQIGNIISIWISHSIQLGNQNQIETCNQSVITYENNTWVNQTYVNISNTNFAAGQSVVSVKLAGNSSLCPVSGWAIYSKDNSIRIGSKGDVFVIREPFISCSPLECRTFFLTQGALLNDKHSNGTIKDRSPYRTLMSCPIGEVPSPYNSRFESVAWSASACHDGINWLTIGISGPDNGAVAVLKYNGIITDTIKSWRNNILRTQESECACVNGSCFTVMTDGPSDGQASYKIFKIEKGKIVKSVEMNAPDYHYEECSCYPDSSEITCVCRDNWHGSNRPWVSFNQNLEYQIGYICSGIFGDNPRPNDKTGSCGPVSSNGANGVKGFSFKYGNGVWIGRTKSISSRNGFEMIWDPNGWTGTDNNFSIKQDIVGINEWSGYSGSFVQHPELTGLDCIRPCFWVELIRGRPKENTIWTSGSSISFCGVNSDTVGWSWPDGAELPFTIDK

SEQ ID NO: 21243 - protein, 469 aa, synthetic construct; identical to SEQ ID NO: 16738
  REGION 1..469: note = neuraminidase__InfluenzaA__AEV53453

SEQ ID NO: 21244 - protein, 469 aa, synthetic construct
  REGION 1..469: note = neuraminidase__InfluenzaA__AEV53455
MNPNQKIITIGSVCMTIGMANLILQIGNIISIWISHSIQLGNQNQIETCNQSVITYENNTWVNQTYVNISNTNFAAGQSVVSVKLAGNSSLCPVSGWAIYSKDNSIRIGSKGDVFVIREPFISCSPLECRTFFLTQGALLNDKHSNGTIKDRSPYRTLMSCPIGEVPSPYNSRFESVAWSASACHDGINWLTIGISGPDNGAVAVLKYNGIITDTIKSWRNNILRTQESECACVNGSCFTVMTDGPSDGQASYKIFRIEKGKIVKSVEMNAPNYHYEECSCYPDSSEITCVCRDNWHGSNRPWVSFNQNLEYQIGYICSGIFGDNPRPNDKTGSCGPVSSNGANGVKGFSFKYGNGVWIGRTKSISSRNGFEMIWDPNGWTETDNNFSIKQDIVGINEWSGYSGSFVQHPELTGLNCIRPCFWVELIRGRPKENTIWTSGSSISFCGVNSDTVGWSWPDGAELPFTIDK

SEQ ID NO: 21245 - protein, 469 aa, synthetic construct
  REGION 1..469: note = neuraminidase__InfluenzaA__AEV53457
MNPNQKIITIGSVCMTIGMANLILQIGNIISIWISHSIQLGNQNQIETCNQSVITYENNTWVNQTYVNISNTNFAAGQSVVSVKLAGNSSLCPVSGWAIYSKDNSIRIGSKGDVFVIREPFISCSPLECRTFFLTQGALLNDKHSNGTIKDRSPYRTLMSCPIGEVPSPYNSRFESVAWSASACHDGINWLTIGISGPDNGAVAVLKYNGIITDTIKSWRNNILRTQESECACVNGSCFTVMTDGPSDGQASYKIFRVEKGKIVKSVEMNAPNYHYEECSCYPDSSEITCVCRDNWHGSNRPWVSFNQNLEYQIGYICSGIFGDNPRPNDKTGSCGPVSSNGANGVKGFSFKYGNGVWIGRTKSISSRNGFEMIWDPNGWTGTDNNFSIKQDIVGINEWSGYSGSFVQHPELTGLDCIRPCFWVELIRGRPKENTIWTSGSSISFCGVNSDTVGWSWPDGAELPFTIDK

SEQ ID NO: 21246 - protein, 469 aa, synthetic construct
  REGION 1..469: note = neuraminidase__InfluenzaA__AEV53459
MNPNQKIITIGSVCMTIGMANLILQIGNIISIWISHSIQLGNQNQIETCNQSVITYENNTWVNQTYVNISNTNFAAGQSVVSVKLAGNSSLCPVSGWAIYSKDNSIRIGSKGDVFVIREPFISCSPLECRTFFLTQGALLNDKHSNGTIKDRSPYRTLMSCPIGEVPSPYNSRFESVAWSASACHDGINWLTIGISGPDNGAVAVLKYNGIITDTIKSWRNNILRTQESECACVNGSCFTVITDGPSDGQASYKIFRIEKGKIVKSVEMNAPNYHYEECSCYPDSSEITCVCRDNWHGSNRPWVSFNQNLEYQIGYICSGIFGDNPRPNDKTGSCGPVSSNGANGVKGFSFKYGNGVWIGRTKSISSRNGFEMIWDPNGWTETDNNFSIKQDIVGINEWSGYSGSFVQHPELTGLNCIRPCFWVELIRGRPKENTIWTSGSSISFCGVNSDTVGWSWPDGAELPFTIDK

SEQ ID NO: 21247 - protein, 469 aa, synthetic construct; identical to SEQ ID NO: 16738
  REGION 1..469: note = neuraminidase__InfluenzaA__AEV53461

SEQ ID NO: 21248 - protein, 469 aa, synthetic construct
  REGION 1..469: note = neuraminidase__InfluenzaA__AEV53463
MNPNQKIITIGSVCMTIGMANLILQIGNIISIWISHSIQLENQNQIETCNQSVITYENNTWVNQTYVNISNTNFAAGQSVVSVKLAGNSSLCPVSGWAIYSKDNSIRIGSKGDVFVIREPFISCSPLECRTFFLTQGALLNDKHSNGTIKDRSPYRTLMSCPIGEVPSPYNSRFESVAWSASACHDGINWLTIGISGPDNGAVAVLKYNGIITDTIKSWRNNILRTQESECACINGSCFTVMTDGPSDGQASYKIFRIEKGKIVKSVEMNAPNYHYEECSCYPDSSEITCVCRDNWHGSNRPWVSFNQNLEYQIGYICSGIFGDNPRPNDKTGSCGPVSSNGANGVKGFSFKYGNGVWIGRTKSISSRNGFEMIWDPNGWTGTDNNFSIKQDIVGINEWSGYSGSFVQHPELTGLDCIRPCFWVELIRGRPKENTIWTSGSSISFCGVNSDTVGWSWPDGAELPFTIDK

SEQ ID NO: 21249 - protein, 469 aa, synthetic construct
  REGION 1..469: note = neuraminidase__InfluenzaA__AEV53465
MNPNQKIITIGSVCMTIGMANLILQIGNIISIWISHSIQLGNQNQIETCNQSVITYENNTWVNQTYVNISNTNFAAGQSVVSVKLAGNSSLCPVSGWAIYSKDNSIRIGSKGDVFVIREPFISCSPLECRTFFLTQGALLNDKHSNGTIKDRSPYRTLMSCPIGEVPSPYNSRFESVAWSASACHDGINWLTIGISGPDNGAVAVLKYNGIITDTIKSWRNNILRTQESECACVNGSCFTVMTDGPSDRQASYKIFRIEKGKIVKSVEMNAPNYHYEECSCYPDSSEITCVCRDNWHGSNRPWVSFNQNLEYQIGYICSGIFGDNPRPNDKTGSCGPVSSNGANGVKGFSYKYGNGVWIGRTKSISSRNGFEMIWDPNGWTGTDNNFSIKQDIVGINEWSGYSGSFVQHPELTGLDCIRPCFWVELIRGRPKENTIWTSGSSISFCGVNSDTVGWSWPDGAELPFTIDK

SEQ ID NO: 21250 - protein, 469 aa, synthetic construct; identical to SEQ ID NO: 18539
  REGION 1..469: note = neuraminidase__InfluenzaA__AEV53467

SEQ ID NO: 21251 - protein, 469 aa, synthetic construct; identical to SEQ ID NO: 18539
  REGION 1..469: note = neuraminidase__InfluenzaA__AEV53469

SEQ ID NO: 21252 - protein, 469 aa, synthetic construct; identical to SEQ ID NO: 16738
  REGION 1..469: note = neuraminidase__InfluenzaA__AEV53471

SEQ ID NO: 21253 - protein, 469 aa, synthetic construct; identical to SEQ ID NO: 16738
  REGION 1..469: note = neuraminidase__InfluenzaA__AEV53473

SEQ ID NO: 21254 - protein, 469 aa, synthetic construct; identical to SEQ ID NO: 16738
  REGION 1..469: note = neuraminidase__InfluenzaA__AEV53475

SEQ ID NO: 21255 - protein, 469 aa, synthetic construct; identical to SEQ ID NO: 16738
  REGION 1..469: note = neuraminidase__InfluenzaA__AEV53477

SEQ ID NO: 21256 - protein, 469 aa, synthetic construct; identical to SEQ ID NO: 16738
  REGION 1..469: note = neuraminidase__InfluenzaA__AEV53479

SEQ ID NO: 21257 - protein, 469 aa, synthetic construct; identical to SEQ ID NO: 16738
  REGION 1..469: note = neuraminidase__InfluenzaA__AEV53481

SEQ ID NO: 21258 - protein, 469 aa, synthetic construct; identical to SEQ ID NO: 16738
  REGION 1..469: note = neuraminidase__InfluenzaA__AEV53483

SEQ ID NO: 21259 - protein, 469 aa, synthetic construct
  REGION 1..469: note = neuraminidase__InfluenzaA__AEV53485
MNPNQKIITIGSVCMTIGMANLILQIGNIISIWVSHSIQLGNQNQIETCNQSVITYENNTWVNQTYVNISNTNFAAGQSVVSVKLAGNSSLCPVSGWAIYSKDNSIRIGSKGDVFVIREPFISCSPLECRTFFLTQGALLNDKHSNGTIKDRSPYRTLMSCPIGEVPSPYNSRFESVAWSASACHDGINWLTIGISGPDNGAVAVLKYNGIITDTIKSWRNNILRTQESECACVNGSCFTVMTDGPSDGQASYKIFRIEKGKIVKSVEMNAPNYHYEECSCYPDSSEITCVCRDNWHGSNRPWVSFNQNLEYQIGYICSGIFGDNPRPNDKTGSCGPVSSNGANGVKGFSFKYGNGVWIGRTKSISSRNGFEMIWDPNGWTGTDNNFSIKQDIVGINEWSGYSGSFVQHPELTGLDCIRPCFWVELIRGRPKENTIWTSGSSISFCGVNSDTVGWSWPDGAELPFTIDK

SEQ ID NO: 21260 - protein, 469 aa, synthetic construct; identical to SEQ ID NO: 18539
  REGION 1..469: note = neuraminidase__InfluenzaA__AEV53487

SEQ ID NO: 21261 - protein, 469 aa, synthetic construct; identical to SEQ ID NO: 17756
  REGION 1..469: note = neuraminidase__InfluenzaA__AEV53489

SEQ ID NO: 21262 - protein, 469 aa, synthetic construct
  REGION 1..469: note = neuraminidase__InfluenzaA__AEV53491
MNPNQKIITIGLVCMTIGMANLILQIGNIISIWISHSIQLGNQNQIETCNQSVITYENNTWVNQTYVNISNTNFAAGQSVVSVKLAGNSSLCPVSGWAIYSKDNSIRIGSKGDVFVIREPFISCSPLECRTFFLTQGALLNDKHSNGTIKDRSPYRTLMSCPIGEVPSPYNSRFESVAWSASACHDGINWLTIGISGPDNGAVAVLKYNGIITDTIKSWRNNILRTQESECACVNGSCFTVMTDGPSDGQASYKIFRIEKGKIVKSVEMNAPNYHYEECSCYPDSSEITCVCRDNWHGSNRPWVSFNQNLEYQIGYICSGIFGDNPRPNDKTGSCGPVSSNGANGVKGFSFKYGNGVWIGRTKSISSRNGFEMIWDPNGWTGTDNNFSIKQDIVGINEWSGYSGSFVQHPELTGLDCIRPCFWVELIRGRPKENTIWTSGSSISFCGVNSDTVGWSWPDGAELPFTIDK

SEQ ID NO: 21263 - protein, 469 aa, synthetic construct; identical to SEQ ID NO: 16738
  REGION 1..469: note = neuraminidase__InfluenzaA__AEV53493

SEQ ID NO: 21264 - protein, 469 aa, synthetic construct; identical to SEQ ID NO: 18200
  REGION 1..469: note = neuraminidase__InfluenzaA__AEV53495

SEQ ID NO: 21265 - protein, 469 aa, synthetic construct
  REGION 1..469: note = neuraminidase__InfluenzaA__AEV53497
MNPNQKIITIGSVCMTIGMANLILQIGNIISIWISHSIQLENQNQIETCNQSVITYENNTWVNQTYVNISNTNFAAGQSVVSVNLAGNSSLCPVSGWAIYSKDNSIRIGSKGDVFVIREPFISCSPLECRTFFLTQGALLNDKHSNGTIKDRSPYRTLMSCPIGEVPSPYNSRFESVAWSASACHDGINWLTIGISGPDNGAVAVLKYNGIITDTIKSWRNNILRTQESECACVNGSCFTVMTDGPSDGQASYKIFRIEKGKIVKSVEMNAPNYHYEECSCYPDSSEITCVCRDNWHGSNRPWVSFNQNLEYQIGYICSGIFGDNPRPNDKTGSCGPVSSNGANGVKGFSFKYGNGVWIGRTKSISSRNGFEMIWDPNGWTGTDNNFSIKQDIVGINEWSGYSGSFVQHPELTGLDCIRPCFWVELIRGRPKENTIWTSGSSISFCGVNSDTVGWSWPDGAELPFTIDK

SEQ ID NO: 21266 - protein, 469 aa, synthetic construct; identical to SEQ ID NO: 17756
  REGION 1..469: note = neuraminidase__InfluenzaA__AEV53499

SEQ ID NO: 21267 - protein, 469 aa, synthetic construct; identical to SEQ ID NO: 16738
  REGION 1..469: note = neuraminidase__InfluenzaA__AEV53501

SEQ ID NO: 21268 - protein, 469 aa, synthetic construct; identical to SEQ ID NO: 16738
  REGION 1..469: note = neuraminidase__InfluenzaA__AEV53503

SEQ ID NO: 21269 - protein, 469 aa, synthetic construct; identical to SEQ ID NO: 16738
  REGION 1..469: note = neuraminidase__InfluenzaA__AEV53505

SEQ ID NO: 21270 - protein, 469 aa, synthetic construct; identical to SEQ ID NO: 16738
  REGION 1..469: note = neuraminidase__InfluenzaA__AEV53507

SEQ ID NO: 21271 - protein, 469 aa, synthetic construct; identical to SEQ ID NO: 16738
  REGION 1..469: note = neuraminidase__InfluenzaA__AEV53509

SEQ ID NO: 21272 - protein, 469 aa, synthetic construct; identical to SEQ ID NO: 18200
  REGION 1..469: note = neuraminidase__InfluenzaA__AEV53511

SEQ ID NO: 21273 - protein, 469 aa, synthetic construct; identical to SEQ ID NO: 18200
  REGION 1..469: note = neuraminidase__InfluenzaA__AEV53513

SEQ ID NO: 21274 - protein, 469 aa, synthetic construct; identical to SEQ ID NO: 18200
  REGION 1..469: note = neuraminidase__InfluenzaA__AEV53515

SEQ ID NO: 21275 - protein, 469 aa, synthetic construct
  REGION 1..469: note = neuraminidase__InfluenzaA__AEV53517
MNPNQRIITIGSVCMTIGMANLILQIGNIISIWVSHSIQLGNQNQIETCNQSVITYENNTWVNQTYVNISNTNFAAGQSVVSVKLAGNSSLCPVSGWAIYSKDNSIRIGSKGDVFVIREPFISCSPLECRTFFLTQGALLNDKHSNGTIKDRSPYRTLMSCPIGEVPSPYNSRFESVAWSASACHDGINWLTIGISGPDNGAVAVLKYNGIITDTIKSWRNNILRTQESECACVNGSCFTVMTDGPSDGQASYKIFRIEKGKIVKSVEMNAPNYHYEECSCYPDSSEITCVCRDNWHGSNRPWVSFNQNLEYQIGYICSGIFGDNPRPNDKTGSCGPVSSNGANGVKGFSFKYGNGVWIGRTKSISSRNGFEMIWDPNGWTGTDNNFSIKQDIVGINEWSGYSGSFVQHPELTGLDCIRPCFWVELIRGRPKENTIWTSGSSISFCGVNSDTVGWSWPDGAELPFTIDK

SEQ ID NO: 21276 - protein, 469 aa, synthetic construct; identical to SEQ ID NO: 16738
  REGION 1..469: note = neuraminidase__InfluenzaA__AEV53519

SEQ ID NO: 21277 - protein, 469 aa, synthetic construct; identical to SEQ ID NO: 18200
  REGION 1..469: note = neuraminidase__InfluenzaA__AEV53521

SEQ ID NO: 21278 - protein, 469 aa, synthetic construct; identical to SEQ ID NO: 18026
  REGION 1..469: note = neuraminidase__InfluenzaA__AEV53523

SEQ ID NO: 21279 - protein, 469 aa, synthetic construct; identical to SEQ ID NO: 17092
  REGION 1..469: note = neuraminidase__InfluenzaA__AEV53525

SEQ ID NO: 21280 - protein, 469 aa, synthetic construct; identical to SEQ ID NO: 16738
  REGION 1..469: note = neuraminidase__InfluenzaA__AEV53527

SEQ ID NO: 21281 - protein, 469 aa, synthetic construct
  REGION 1..469: note = neuraminidase__InfluenzaA__AEV53529
MNPNQKIITIGSVCMTIGMANLILQIGNIISIWISHSIQLENQNQIETCNQSVITYENNTWVNQTYVNISNTNFAAGQSVVSVKLAGNSSLCPVSGWAIYSKDNSIRIGSKGDVFVIREPFISCSPLECRTFFLTQGALLNDKHSNGTIKDRSPYRTLMSCPIGEVPSPYNSRFESVAWSASACHDGINWLTIGISGPDNGAVAVLKYNGIITDTIKSWRNNILRTQESECACVNGSCFTVMTDGPSDGQASYKIFRIEKGKIVKSVEMNAPNYHYEECSCYPDSSEITCVCRDNWHGSNRPWVSFNQNLEYQIGYICSGIFGDNPRPNDKTGSCGPVSSNGANGVKGFSFKYGNGVWIGRTKSISSRNGFEMIWDPNGWTGTDNNFSIKQDIVGIKEWSGYSGSFVQHPELTGLDCIRPCFWVELIRGRPKENTIWTSGSSISFCGVNSDTVGWSWPDGAELPFTIDK

SEQ ID NO: 21282 - protein, 469 aa, synthetic construct; identical to SEQ ID NO: 18200
  REGION 1..469: note = neuraminidase__InfluenzaA__AEV53531

SEQ ID NO: 21283 - protein, 469 aa, synthetic construct
  REGION 1..469: note = neuraminidase__InfluenzaA__AEV53533
MNPNQKIITIGSVCMTIGMANLILQIGNIISIWISHSIQLGNQNQIETCNQSVITYENNTWVNQTYVNISNTNFAAGQSVVSVKLAGNSSLCPVSGWAIYSKDNSIRIGSKGDVFVIREPFISCSPLECRTFFLTQGALLNDKHSNGTIKDRSPYRTLMSCPIGEVPSPYNSRFESVAWSASACHDGINWLTIGISGPDNGAVAVLKYNGIITDTIKSWRNNILRTQESECACVNGSCFTVMTDGPSDGQASYKIFRIEKGKIVKSVEMNAPNYYYEECSCYPDSSEITCVCRDNWHGSNRPWVSFNQNLEYQIGYICSGIFGDNPRPNDKTGSCGPVSSNGANGVKGFSFKYGNGVWIGRTKSISSRNGFEMIWDPNGWTGTDNNFSIKQDIVGINEWSGYSGSFVQHPELTGLNCIRPCFWVELIRGRPKENTIWTSGSSISFCGVNSDTVGWSWPDGAELPFTIDK

SEQ ID NO: 21284 - protein, 469 aa, synthetic construct; identical to SEQ ID NO: 16738
  REGION 1..469: note = neuraminidase__InfluenzaA__AEV53535

SEQ ID NO: 21285 - protein, 469 aa, synthetic construct; identical to SEQ ID NO: 21259
  REGION 1..469: note = neuraminidase__InfluenzaA__AEV53537

SEQ ID NO: 21286 - protein, 469 aa, synthetic construct; identical to SEQ ID NO: 16738
  REGION 1..469: note = neuraminidase__InfluenzaA__AEV53539

SEQ ID NO: 21287 - protein, 469 aa, synthetic construct; identical to SEQ ID NO: 20177
  REGION 1..469: note = neuraminidase__InfluenzaA__AEV53541

SEQ ID NO: 21288 - protein, 469 aa, synthetic construct; identical to SEQ ID NO: 20177
  REGION 1..469: note = neuraminidase__InfluenzaA__AEV53543

SEQ ID NO: 21289 - protein, 469 aa, synthetic construct; identical to SEQ ID NO: 18386
  REGION 1..469: note = neuraminidase__InfluenzaA__AEV53545

SEQ ID NO: 21290 - protein, 469 aa, synthetic construct; identical to SEQ ID NO: 20177
  REGION 1..469: note = neuraminidase__InfluenzaA__AEV53547

SEQ ID NO: 21291 - protein, 469 aa, synthetic construct; identical to SEQ ID NO: 20177
  REGION 1..469: note = neuraminidase__InfluenzaA__AEV53549

SEQ ID NO: 21292 - protein, 469 aa, synthetic construct; identical to SEQ ID NO: 20177
  REGION 1..469: note = neuraminidase__InfluenzaA__AEV53551

SEQ ID NO: 21293 - protein, 469 aa, synthetic construct; identical to SEQ ID NO: 20177
  REGION 1..469: note = neuraminidase__InfluenzaA__AEV53553

SEQ ID NO: 21294 - protein, 469 aa, synthetic construct; identical to SEQ ID NO: 21259
  REGION 1..469: note = neuraminidase__InfluenzaA__AEV53555

SEQ ID NO: 21295 - protein, 469 aa, synthetic construct; identical to SEQ ID NO: 17756
  REGION 1..469: note = neuraminidase__InfluenzaA__AEV53557

SEQ ID NO: 21296 - protein, 469 aa, synthetic construct; identical to SEQ ID NO: 16738
  REGION 1..469: note = neuraminidase__InfluenzaA__AEV53559

SEQ ID NO: 21297 - protein, 469 aa, synthetic construct; identical to SEQ ID NO: 16738
  REGION 1..469: note = neuraminidase__InfluenzaA__AEV53561

SEQ ID NO: 21298 - protein, 469 aa, synthetic construct; identical to SEQ ID NO: 18330
  REGION 1..469: note = neuraminidase__InfluenzaA__AEV53563

SEQ ID NO: 21299 - protein, 469 aa, synthetic construct
  REGION 1..469: note = neuraminidase__InfluenzaA__AEV53565
MNPNQKIITIGSVCMTIGMANLILQIGNIISIWISHSIQLGNQNQIETCNQSVITYENNTWVNQTYVNISNTNFAAGQSVVSVKLAGNSSLCPVNGWAIYSKDNSIRIGSKGDVFVIREPFISCSPLECRTFFLTQGALLNDKHSNGTIKDRSPYRTLMSCPIGEVPSPYNSRFESVAWSASACHDGINWLTIGISGPDNGAVAVLKYNGIITDTIKSWRNNILRTQESECACVNGSCFTVMTDGPSDGQASYKIFRIEKGKIVKSVEMNAPNYHYEECSCYPDSSEITCVCRDNWHGSNRPWVSFNQNLEYQIGYICSGIFGDNPRPNDKTGSCGPVSSNGANGVKGFSFKYGNGVWIGRTKSISSRNGFEMIWDPNGWTGTDNNFSIKQDIVGINEWSGYSGSFVQHPELTGLDCIRPCFWVELIRGRPKENTIWTSGSSISFCGVNSDTVGWSWPDGAELPLTIDK

SEQ ID NO: 21300 - protein, 469 aa, synthetic construct
  REGION 1..469: note = neuraminidase__InfluenzaA__AEV53567
MNPNQKIITIGSVCMTIGMANLILQIGNIISIWISHSIQLGNQNQIETCNQSVITYENNTWVNQTYVNISNTNFAAGQSVVSVKLAGNSSLCPVSGWAIYSKDNSIRIGSKGDVFVIREPFISCSPLECRTFFLTQGALLNDKHSNGTIKDRSPYRTLMSCPIGEVPSPYNSRFESVAWSASACHDGINWLTIGISGPDNGAVAVLKYNGIITDTIKSWRNNILRTQESECACVNGSCFTVMTDGPSDGQASYKIFRIEKGKIVKSVEMNAPNYHYEECSCYPDSSEITCVCRDNWHGSNRPWVSFNQNLEYQIGYICSGIFGDNPRPNDKTGSCGPVSSNGANGVKGFSFKYGNGAWIGRTKSISSRNGFEMIWDPNGWTETDNNFSIKQDIVGINEWSGYSGSFVQHPELTGLNCIRPCFWVELIRGRPKENTIWTSGSSISFCGVNSDTVGWSWPDGAELPFTIDK

SEQ ID NO: 21301 - protein, 469 aa, synthetic construct; identical to SEQ ID NO: 16738
  REGION 1..469: note = neuraminidase__InfluenzaA__AEV53569

SEQ ID NO: 21302 - protein, 469 aa, synthetic construct; identical to SEQ ID NO: 20177
  REGION 1..469: note = neuraminidase__InfluenzaA__AEV53571

SEQ ID NO: 21303 - protein, 469 aa, synthetic construct; identical to SEQ ID NO: 20177
  REGION 1..469: note = neuraminidase__InfluenzaA__AEV53573

SEQ ID NO: 21304 - protein, 469 aa, synthetic construct; identical to SEQ ID NO: 18539
  REGION 1..469: note = neuraminidase__InfluenzaA__AEV53575

SEQ ID NO: 21305 - protein, 469 aa, synthetic construct
  REGION 1..469: note = neuraminidase__InfluenzaA__AEV53577
MNPNQKIITIGSVCMTIGMANLILQIGNIISIWISHSIQLGNQNQIETCNQSVITYENNTWVNQTYVNISNTNFAAGQSVVSVKLAGNSSLCPVSGWAIYSKDNSIRIGSKGDVFVIREPFISCSPLECRTFFLTQGALLNDKHSNGTIKDRSPYRTLMSCPIGEVPSPYNSRFESVAWSASACHDGINWLTIGISGPDNGAVAVLKYNGIITDTIKSWRNNILRTQESECACVNGSCFTVMTDGPSDGQASYKIFRIEKGKIVKSVEMNAPNYHYEECSCYPDSSEITCVCRDNWHGSNRPWVSFNQNLEYQIGYICSGIFGDNPRPNDKTGSCGPVSSNGANGVKGFSFKYGNGVWIGRTKSISSRNGFEMIWDPNGWTGTDNNFSIKQDIVGINEWSGYSGSFVQQPELTGLDCIRPCFWVELIRGRPKENTIWTSGSSISFCGVNSDTVGWSWPDGAELPFTIDK

SEQ ID NO: 21306 - protein, 469 aa, synthetic construct; identical to SEQ ID NO: 21244
  REGION 1..469: note = neuraminidase__InfluenzaA__AEV53579

SEQ ID NO: 21307 - protein, 469 aa, synthetic construct; identical to SEQ ID NO: 18539
  REGION 1..469: note = neuraminidase__InfluenzaA__AEV53581

SEQ ID NO: 21308 - protein, 469 aa, synthetic construct; identical to SEQ ID NO: 18200
  REGION 1..469: note = neuraminidase__InfluenzaA__AEV53583

SEQ ID NO: 21309 - protein, 469 aa, synthetic construct; identical to SEQ ID NO: 18200
  REGION 1..469: note = neuraminidase__InfluenzaA__AEV53585

SEQ ID NO: 21310 - protein, 469 aa, synthetic construct
  REGION 1..469: note = neuraminidase__InfluenzaA__AEV76877
MNPNQKIITIGSVCMTIGMANLILQIGNIISIWISHSIQLGNQSQIETCNQSVITYENNTWVNQTYVNISTTNFAAGQSVVSVKLAGNSSLCPVSGWAIYSKDNSIRIGSKGDVFVIREPFISCSPLECRTFFLTQGALLNDKHSNGTIKDRSPYRTLMSCPIGEVPSPYNSRFESVAWSASACHDGINWLTIGISGPDNGAVAVLKYNGIITDTIKSWRNNILRTQESECACVNGSCFTIMTDGPSDGQASYKIFRIEKGKIVKSVEMNAPNYHYEECSCYPDSSEITCVCRDNWHGSNRPWVSFNQNLEYQIGYICSGIFGDNPRPNDKTGSCGPVSSNGANGVKGFSFKYGNGVWIGRTKSISSRKGFEMIWDPNGWTGTDNNFSIKQDIVGINEWSGYSGSFVQHPELTGLDCIRPCFWVELIRGRPKENTIWTSGSSISFCGVNSDTVGWSWPDGAELPFTIDK

SEQ ID NO: 21311 - protein, 469 aa, synthetic construct; identical to SEQ ID NO: 16738
  REGION 1..469: note = neuraminidase__InfluenzaA__AEW10576

SEQ ID NO: 21312 - protein, 469 aa, synthetic construct; identical to SEQ ID NO: 16738
  REGION 1..469: note = neuraminidase__InfluenzaA__AEW10586

SEQ ID NO: 21313 - protein, 469 aa, synthetic construct; identical to SEQ ID NO: 16738
  REGION 1..469: note = neuraminidase__InfluenzaA__AEW10596

SEQ ID NO: 21314 - protein, 469 aa, synthetic construct; identical to SEQ ID NO: 16738
  REGION 1..469: note = neuraminidase__InfluenzaA__AEW10606

SEQ ID NO: 21315 - protein, 469 aa, synthetic construct; identical to SEQ ID NO: 17625
  REGION 1..469: note = neuraminidase__InfluenzaA__AEW10616

SEQ ID NO: 21316 - protein, 469 aa, synthetic construct
  REGION 1..469: note = neuraminidase__InfluenzaA__AEW10626
MNPNQKIITIGSVCMTIGMANLILQIGNIISIWISHSIQLGNQNQIETCNQSVITYENNTWVNQTYVNISNTNFAAGQSVVSVKLAGNSSLCPVSGWAIYSKDNSIRIGSKGDVFVIREPFISCSPLECRTFFLTQGALLNDKHSNGTIKDRSPYRTLMSCPIGEVPSPYNSRFESVAWSASACHDGINWLTIGISGPDNGAMAVLKYNGIITDTIKSWRNNILRTQESECACVNGSCFTVMTDGPSDGQASYKIFRIEKGKIVKSVEMNAPNYHYEECSCYPDSSEITCVCRDNWHGSNRPWVSFNQNLEYQIGYICSGIFGDNPRPNDKTGSCGPVSSNGANGVKGFSFKYGNGVWIGRTKSISSRNGFEMIWDPNGWTGTDNNFSIKQDIVGINEWSGYSGSFVQHPELTGLDCIRPCFWVELIRGRPKENTIWTSGSSISFCGVNSDTVGWSWPDGAELPFTIDK

SEQ ID NO: 21317 - protein, 469 aa, synthetic construct; identical to SEQ ID NO: 16738
  REGION 1..469: note = neuraminidase__InfluenzaA__AEW10636

SEQ ID NO: 21318 - protein, 469 aa, synthetic construct; identical to SEQ ID NO: 16728
  REGION 1..469: note = neuraminidase__InfluenzaA__AEW10646

SEQ ID NO: 21319 - protein, 469 aa, synthetic construct; identical to SEQ ID NO: 16738
  REGION 1..469: note = neuraminidase__InfluenzaA__AEW10656

SEQ ID NO: 21320 - protein, 469 aa, synthetic construct; identical to SEQ ID NO: 16738
  REGION 1..469: note = neuraminidase__InfluenzaA__AEW10666

SEQ ID NO: 21321 - protein, 469 aa, synthetic construct; identical to SEQ ID NO: 16738
  REGION 1..469: note = neuraminidase__InfluenzaA__AEW10676

SEQ ID NO: 21322 - protein, 469 aa, synthetic construct; identical to SEQ ID NO: 16738
  REGION 1..469: note = neuraminidase__InfluenzaA__AEW10686

SEQ ID NO: 21323 - protein, 469 aa, synthetic construct; identical to SEQ ID NO: 16738
  REGION 1..469: note = neuraminidase__InfluenzaA__AEW10696

SEQ ID NO: 21324 - protein, 469 aa, synthetic construct; identical to SEQ ID NO: 16738
  REGION 1..469: note = neuraminidase__InfluenzaA__AEW10706

SEQ ID NO: 21325 - protein, 469 aa, synthetic construct; identical to SEQ ID NO: 16728
  REGION 1..469: note = neuraminidase__InfluenzaA__AEW10716

SEQ ID NO: 21326 - protein, 469 aa, synthetic construct; identical to SEQ ID NO: 16738
  REGION 1..469: note = neuraminidase__InfluenzaA__AEW10726

SEQ ID NO: 21327 - protein, 469 aa, synthetic construct; identical to SEQ ID NO: 16738
  REGION 1..469: note = neuraminidase__InfluenzaA__AEW10736

SEQ ID NO: 21328 - protein, 469 aa, synthetic construct; identical to SEQ ID NO: 16728
  REGION 1..469: note = neuraminidase__InfluenzaA__AEW10746

SEQ ID NO: 21329 - protein, 469 aa, synthetic construct; identical to SEQ ID NO: 16728
  REGION 1..469: note = neuraminidase__InfluenzaA__AEW10756

SEQ ID NO: 21330 - protein, 469 aa, synthetic construct; identical to SEQ ID NO: 16728
  REGION 1..469: note = neuraminidase__InfluenzaA__AEW10766

SEQ ID NO: 21331 - protein, 469 aa, synthetic construct; identical to SEQ ID NO: 16728
  REGION 1..469: note = neuraminidase__InfluenzaA__AEW10776

SEQ ID NO: 21332 - protein, 469 aa, synthetic construct; identical to SEQ ID NO: 16728
  REGION 1..469: note = neuraminidase__InfluenzaA__AEW10786

SEQ ID NO: 21333 - protein, 469 aa, synthetic construct; identical to SEQ ID NO: 16728
  REGION 1..469: note = neuraminidase__InfluenzaA__AEW10796

SEQ ID NO: 21334 - protein, 469 aa, synthetic construct; identical to SEQ ID NO: 16728
  REGION 1..469: note = neuraminidase__InfluenzaA__AEW10806

SEQ ID NO: 21335 - protein, 469 aa, synthetic construct; identical to SEQ ID NO: 16728
  REGION 1..469: note = neuraminidase__InfluenzaA__AEW10816

SEQ ID NO: 21336 - protein, 469 aa, synthetic construct; identical to SEQ ID NO: 16738
  REGION 1..469: note = neuraminidase__InfluenzaA__AEW10826

SEQ ID NO: 21337 - protein, 469 aa, synthetic construct; identical to SEQ ID NO: 16728
  REGION 1..469: note = neuraminidase__InfluenzaA__AEW10836

SEQ ID NO: 21338 - protein, 469 aa, synthetic construct; identical to SEQ ID NO: 16728
  REGION 1..469: note = neuraminidase__InfluenzaA__AEW10846

SEQ ID NO: 21339 - protein, 469 aa, synthetic construct; identical to SEQ ID NO: 16728
  REGION 1..469: note = neuraminidase__InfluenzaA__AEW10856

SEQ ID NO: 21340 - protein, 469 aa, synthetic construct; identical to SEQ ID NO: 16728
  REGION 1..469: note = neuraminidase__InfluenzaA__AEW10866

SEQ ID NO: 21341 - protein, 469 aa, synthetic construct; identical to SEQ ID NO: 16728
  REGION 1..469: note = neuraminidase__InfluenzaA__AEW10876

SEQ ID NO: 21342 - protein, 469 aa, synthetic construct; identical to SEQ ID NO: 16728
  REGION 1..469: note = neuraminidase__InfluenzaA__AEW10886

SEQ ID NO: 21343 - protein, 469 aa, synthetic construct; identical to SEQ ID NO: 16728
  REGION 1..469: note = neuraminidase__InfluenzaA__AEW10896

SEQ ID NO: 21344 - protein, 469 aa, synthetic construct; identical to SEQ ID NO: 16728
  REGION 1..469: note = neuraminidase__InfluenzaA__AEW10906

SEQ ID NO: 21345 - protein, 469 aa, synthetic construct; identical to SEQ ID NO: 16728
  REGION 1..469: note = neuraminidase__InfluenzaA__AEW10916

SEQ ID NO: 21346 - protein, 469 aa, synthetic construct
  REGION 1..469: note = neuraminidase__InfluenzaA__AEW10926
MNPNQKIITIGSVCMTIGMANLILQIGNIISIWISHSIQLGNQNQIETCNQSVITYENNTWVNQTYVNISNTNFAAGQSVVSVKLAGNSSLCPVSGWAIYSKDNSIRIGSKGDVFIIREPFISCSPLECRTFFLTQGALLNDKHSNGTIKDRSPYRTLMSCPIGEVPSPYNSRFESVAWSASACHDGINWLTIGISGPDNGAVAVLKYNGIITDTIKSWRNNILRTQESECACVNGSCFTVMTDGPSDGQASYKIFRIEKGKIVKSVEMNAPNYHYEECSCYPDSSEITCVCRDNWHGSNRPWVSFNQNLEYQIGYICSGIFGDNPRPNDKTGSCGPVSSNGANGVKGFSFKYGNGVWIGRTKSISSRNGFEMIWDPNGWTGTDNNFSIKQDIVGINEWSGYSGSFVQHPELTGLDCIRPCFWVELIRGRPKENTIWTSGSSISFCGVNSDTVGWSWPDGAELPFTIDK

SEQ ID NO: 21347 - protein, 469 aa, synthetic construct; identical to SEQ ID NO: 16728
  REGION 1..469: note = neuraminidase__InfluenzaA__AEW10936

SEQ ID NO: 21348 - protein, 469 aa, synthetic construct; identical to SEQ ID NO: 16728
  REGION 1..469: note = neuraminidase__InfluenzaA__AEW10946

SEQ ID NO: 21349 - protein, 469 aa, synthetic construct; identical to SEQ ID NO: 16738
  REGION 1..469: note = neuraminidase__InfluenzaA__AEW10956

SEQ ID NO: 21350 - protein, 469 aa, synthetic construct; identical to SEQ ID NO: 16738
  REGION 1..469: note = neuraminidase__InfluenzaA__AEW10966

SEQ ID NO: 21351 - protein, 469 aa, synthetic construct; identical to SEQ ID NO: 16728
  REGION 1..469: note = neuraminidase__InfluenzaA__AEW10976

SEQ ID NO: 21352 - protein, 469 aa, synthetic construct; identical to SEQ ID NO: 16738
  REGION 1..469: note = neuraminidase__InfluenzaA__AEW10986

SEQ ID NO: 21353 - protein, 469 aa, synthetic construct; identical to SEQ ID NO: 16738
  REGION 1..469: note = neuraminidase__InfluenzaA__AEW10996

SEQ ID NO: 21354 - protein, 469 aa, synthetic construct; identical to SEQ ID NO: 16738
  REGION 1..469: note = neuraminidase__InfluenzaA__AEW11006

SEQ ID NO: 21355 - protein, 469 aa, synthetic construct; identical to SEQ ID NO: 16738
  REGION 1..469: note = neuraminidase__InfluenzaA__AEW11016

SEQ ID NO: 21356 - protein, 469 aa, synthetic construct; identical to SEQ ID NO: 16738
  REGION 1..469: note = neuraminidase__InfluenzaA__AEW11026

SEQ ID NO: 21357 - protein, 469 aa, synthetic construct; identical to SEQ ID NO: 16738
  REGION 1..469: note = neuraminidase__InfluenzaA__AEW11036

SEQ ID NO: 21358 - protein, 469 aa, synthetic construct; identical to SEQ ID NO: 16728
  REGION 1..469: note = neuraminidase__InfluenzaA__AEW11046

SEQ ID NO: 21359 - protein, 469 aa, synthetic construct; identical to SEQ ID NO: 16738
  REGION 1..469: note = neuraminidase__InfluenzaA__AEW11056

SEQ ID NO: 21360 - protein, 469 aa, synthetic construct; identical to SEQ ID NO: 17542
  REGION 1..469: note = neuraminidase__InfluenzaA__AEW11066

SEQ ID NO: 21361 - protein, 469 aa, synthetic construct; identical to SEQ ID NO: 17542
  REGION 1..469: note = neuraminidase__InfluenzaA__AEW11076

SEQ ID NO: 21362 - protein, 469 aa, synthetic construct; identical to SEQ ID NO: 17542
  REGION 1..469: note = neuraminidase__InfluenzaA__AEW11086

SEQ ID NO: 21363 - protein, 469 aa, synthetic construct; identical to SEQ ID NO: 17542
  REGION 1..469: note = neuraminidase__InfluenzaA__AEW11096

SEQ ID NO: 21364 - protein, 469 aa, synthetic construct; identical to SEQ ID NO: 17542
  REGION 1..469: note = neuraminidase__InfluenzaA__AEW11106

SEQ ID NO: 21365 - protein, 469 aa, synthetic construct; identical to SEQ ID NO: 16738
  REGION 1..469: note = neuraminidase__InfluenzaA__AEW11116

SEQ ID NO: 21366 - protein, 469 aa, synthetic construct; identical to SEQ ID NO: 17542
  REGION 1..469: note = neuraminidase__InfluenzaA__AEW11126

SEQ ID NO: 21367 - protein, 469 aa, synthetic construct; identical to SEQ ID NO: 17446
  REGION 1..469: note = neuraminidase__InfluenzaA__AEW11136

SEQ ID NO: 21368 - protein, 469 aa, synthetic construct; identical to SEQ ID NO: 16738
  REGION 1..469: note = neuraminidase__InfluenzaA__AEW11146

SEQ ID NO: 21369 - protein, 469 aa, synthetic construct; identical to SEQ ID NO: 16738
  REGION 1..469: note = neuraminidase__InfluenzaA__AEW11156

SEQ ID NO: 21370 - protein, 469 aa, synthetic construct; identical to SEQ ID NO: 17542
  REGION 1..469: note = neuraminidase__InfluenzaA__AEW11166

SEQ ID NO: 21371 - protein, 469 aa, synthetic construct; identical to SEQ ID NO: 17542
  REGION 1..469: note = neuraminidase__InfluenzaA__AEW11176

SEQ ID NO: 21372 - protein, 469 aa, synthetic construct; identical to SEQ ID NO: 16738
  REGION 1..469: note = neuraminidase__InfluenzaA__AEW11186

SEQ ID NO: 21373 - protein, 469 aa, synthetic construct; identical to SEQ ID NO: 17542
  REGION 1..469: note = neuraminidase__InfluenzaA__AEW11196

SEQ ID NO: 21374 - protein, 469 aa, synthetic construct; identical to SEQ ID NO: 16738
  REGION 1..469: note = neuraminidase__InfluenzaA__AEW11206

SEQ ID NO: 21375 - protein, 469 aa, synthetic construct; identical to SEQ ID NO: 16738
  REGION 1..469: note = neuraminidase__InfluenzaA__AEW11216

SEQ ID NO: 21376 - protein, 469 aa, synthetic construct; identical to SEQ ID NO: 17446
  REGION 1..469: note = neuraminidase__InfluenzaA__AEW11226

SEQ ID NO: 21377 - protein, 469 aa, synthetic construct; identical to SEQ ID NO: 16738
  REGION 1..469: note = neuraminidase__InfluenzaA__AEW11236

SEQ ID NO: 21378 - protein, 469 aa, synthetic construct; identical to SEQ ID NO: 16738
  REGION 1..469: note = neuraminidase__InfluenzaA__AEW11246

SEQ ID NO: 21379 - protein, 469 aa, synthetic construct; identical to SEQ ID NO: 17542
  REGION 1..469: note = neuraminidase__InfluenzaA__AEW11255

SEQ ID NO: 21380 - protein, 469 aa, synthetic construct; identical to SEQ ID NO: 17542
  REGION 1..469: note = neuraminidase__InfluenzaA__AEW11265

SEQ ID NO: 21381 - protein, 469 aa, synthetic construct; identical to SEQ ID NO: 16738
  REGION 1..469: note = neuraminidase__InfluenzaA__AEW11275

SEQ ID NO: 21382 - protein, 469 aa, synthetic construct
  REGION 1..469: note = neuraminidase__InfluenzaA__AEW11285
MNPNQKIITIGSVCMTIGMANLILQIGNIISIWISHSIQLGNQNQIETCNQSVITYENNTWVNQTYVNISNTNFAAGQSVVSVKLAGNSSLCPVSGWAIYSKDNSVRIGSKGDVFVIREPFISCSPLECRTFFLTQGALLNDKHSNGTIKDRSPYRTLMSCPIGEVPSPYNSRFESVAWSASACHDGINWLTIGISGPDNGAVAVLKYNGIITDTIKSWRNNILRTQESECACVNGSCFTVMTDGPSNGQASYKIFRIEKGKIVKSVEMNAPNYHYEECSCYPDSSEITCVCRDNWHGSNRPWVSFNQNLEYQIGYICSGIFGDNPRPNDKTGSCGPVSSNGANGVKGFSFKYGNGVWIGRTKSISSRNGFEMIWDPNGWTGTDNNFSIKQDIVGINEWSGYSGSFVQNPELTGLDCIRPCFWVELIRGRPKENTIWTSGSSISFCGVNSDTVGWSWPDGAELPFTIDK

SEQ ID NO: 21383 - protein, 469 aa, synthetic construct; identical to SEQ ID NO: 17542
  REGION 1..469: note = neuraminidase__InfluenzaA__AEW11295

SEQ ID NO: 21384 - protein, 469 aa, synthetic construct; identical to SEQ ID NO: 16738
  REGION 1..469: note = neuraminidase__InfluenzaA__AEW11305

SEQ ID NO: 21385 - protein, 469 aa, synthetic construct; identical to SEQ ID NO: 17542
  REGION 1..469: note = neuraminidase__InfluenzaA__AEW11315

SEQ ID NO: 21386 - protein, 469 aa, synthetic construct; identical to SEQ ID NO: 16738
  REGION 1..469: note = neuraminidase__InfluenzaA__AEW11325

SEQ ID NO: 21387 - protein, 469 aa, synthetic construct; identical to SEQ ID NO: 16738
  REGION 1..469: note = neuraminidase__InfluenzaA__AEW25299

SEQ ID NO: 21388 - protein, 469 aa, synthetic construct; identical to SEQ ID NO: 16738
  REGION 1..469: note = neuraminidase__InfluenzaA__AEW25308

SEQ ID NO: 21389 - protein, 469 aa, synthetic construct; identical to SEQ ID NO: 17811
  REGION 1..469: note = neuraminidase__InfluenzaA__AEW25317

SEQ ID NO: 21390 - protein, 469 aa, synthetic construct; identical to SEQ ID NO: 16738
  REGION 1..469: note = neuraminidase__InfluenzaA__AEW25324

SEQ ID NO: 21391 - protein, 469 aa, synthetic construct
  REGION 1..469: note = neuraminidase__InfluenzaA__AEW25327
MNPNQKIITIGSVCMTIGMANLILQIGNIISIWISHSIQLGNQNQIETCNQSVITYENNTWVNQTYVNISNTNFAAGQSVVSVKLAGNSSLCPVSGWAIYSKDNSIRIGSKGDVFVIREPFISCSPLECRTFFLTQGALLNDKHSNGTIKDRSPYRTLMSCPIGEVPPPYNSRFESVAWSASACHDGINWLTIGISGPDNGAVAVLKYNGIITDTIKSWRNNILRTQESECACVNGSCFTVMTDGPSDGQASYKIFRIEKGKIVKSVEMNAPNYHCEECSCYPDSSEITCVCRDNWHGSNRPWVSFNQNLEYQIGYICSGIFGDNPRPNDKTGSCGPVSSNGANGVKGFSFKYGNGVWIGRTKSISSRNGFEMIWDPNGWTGTDNNFSIKQDIVGINEWSGYSGSFVQHPELTGLDCIRPCFWVELIRGRPKENTIWTSGSSISFCGVNSDTVGWSWPDGAELPFTIDK

SEQ ID NO: 21392 - protein, 469 aa, synthetic construct
  REGION 1..469: note = neuraminidase__InfluenzaA__AEW25333
MNPNQKIITIGSVCMTIGMANLILQIGNIISIWISHSIQLGNQNQIETCNQSVITYENNTWVNHTYVNISNTNFAAGQSVVSVKLAGNSSLCPVSGWAIYSKDNSIRIGSKGDVFVIREPFISCSPLECRTFFLTQGALLNDKHSNGTIKDRSPYRTLMSCPIGEVPSPYNSRFESVAWSASACHDGINWLTIGISGPDNGAVAVLKYNGIITDTIKSWRNNILRTQESECACVNGSCFTVMTDGPSDGQASYKIFRIEKGKIVKSVEMNAPNYHYEECSCYPDSSEITCVCRDNWHGSNRPWVSFNQNLEYQIGYICSGIFGDNPRPNDKTGSCGPVSSNGANGVKGFSFKYGNGVWVGRTKSISSRNGFEMIWDPNGWTGTDNNFSIKQDIVGINEWSGYSGSFVQHPELTGLDCIRHCFWVELIRGRPKENTIWTSGSSISFCGVNSDTVGWSWPDGAELPFTIDK

SEQ ID NO: 21393 - protein, 469 aa, synthetic construct
  REGION 1..469: note = neuraminidase__InfluenzaA__AEW25338
MNPNQKIITIGSVCMAIGMANLILQIGNIISIWISHSIQLGNQNQIETCNQSVITYENNTWVNQTYVNISNTNFAAGQSVVSVKLAGNSSLCPVSGWAIYSKDNSIRIGSKGDVFVIREPFISCSPLECRTFFLTQGALLNDKHSNGTIKDRSPYRTLMSCPIGEVPSPYNSRFESVAWSASACHDGINWLTIGISGPDNGAVAVLKYNGIITDTIKSWRNNILRTQESECACVNGSCFTVMTDGPSDGQASYKIFRIEKGKIVKSVEMNAPNYHYEECSCYPDSSEITCVCRDNWHGSNRPWVSFNQNLEYQIGYIRSGIFGDNPRPNDKTGSCGPVSSNGANGVKGFSFKYGNGVWIGRTKSISSRNGFEMIWDPNGWTGTDNNFSIKQDIVGINEWSGYSGSFVQHPELTGLDCIRPCFWVELIRGRPKENTIWTSGSSISFCGVNSDTVGWSWPDGAELPFTIDK

SEQ ID NO: 21394 - protein, 469 aa, synthetic construct
  REGION 1..469: note = neuraminidase__InfluenzaA__AEW25343
MNPNQKIITIGSVCMTIGMANLILQIGNIISIWISHSIQLGNQNQIETCNQSVITYENNTWVNQTYVNISNTNFAAGQSVVSVKLAGNSSLCPVSGWAIYSKDNSIRIGSKGDVFVIREPFISCSPLECRTFFLTQGALLNDKHSNGTIKDRSPYRTLMSCPIGEVPSPYNSRSESVAWSASACHDGINWLTIGISGPDNGAVAVLKYNGIITDTIKSWRNNILRTQESVCACVNGSCFTVMTDGPSDGQASYKIFRIEKGKIVKSVEMNAPNYHYEECSCYPDSSEITCVCRDNWHGSNRPWVSFNQNLEYQIGYICSGIFGDSPRPNDKTGSCGPVSSNGANGVKGFSFKYGNGVWIGRTKSISSRNGFEMIWDPNGWTGTDNNFSIKQDIVGINEWSGYSGSFVQHPELTGLDCIRPCFWVELIRGRPKENTIWTSGSSISFCGVNSDTVGWSWPDGAELPFTIDK

SEQ ID NO: 21395 - protein, 469 aa, synthetic construct
  REGION 1..469: note = neuraminidase__InfluenzaA__AEW25351
MNPNQKIITIGSVCMTIGMANLILQIGNIISIWISHSIQLGNQNQIETCNQSVITYENNTWVNHTYVNISNTNFAAGQSVVSVKLAGNSSLCPVSGWAIYSKDNSIRIGSKGDVFVIREPFISCSPLECRTFFLTQGALLNDKHSNGTINDRSPYRTLMSCPIGEVPSPYNSRFESVAWSASACHDGINWLTIGISGPDNGAVAVLKYNGIITDTIKSWRNNILRTQESECACVNGSCFTVMTDGPSDGQASYKIFRIEKGKIVKSVEMNAPNYHYEECSCYPDSSEITCVCRDNWHGSNRPWVSFNQNLEYQIGYICSGTFGDNPRPNDKTGSCGPVSSNGANGVKGFSFKYGNGVWIGRTKSISSRNGFEMIWDPNGWTGTDNNFSIKQDIVGINEWSGYSGSFVQHPELTGLDCIRPCFWVELIRGRPKENTIWTSGSSISFCGVNSDTVGWSWPDGAELPFTIDK

SEQ ID NO: 21396 - protein, 469 aa, synthetic construct
  REGION 1..469: note = neuraminidase__InfluenzaA__AEW25358
MNPNQKIITIGSVCMTIGMANLILQIGNIISIWVSHSIQLGNQNQIETCNQSVITYENNTWVNQTYVNISNTNFAAGQSVVSVKLAGNSSLCPVSGWAIYSKDNSIRIGSKGDVFVIREPFTSCSPLECRTFFLTQGALLNDKHSNGTIKDRSPYRTLMSCPIGEVPSPYNSRFESVAWSASACHDGINWLTIGISGPDNGAVAVLKYNGIITDTIKSWRNNILRTQESECACVNGSCFTVMTDGPSDGQASYKIFRIEKGKIVKSVEMNAPNYHYEECSCYPDSSEITCVCRDNWHGSNRPWVSFNQNLEYQIGYICSGIFGDNPRPNDKTGSCGPVSSNGANGVKGFSFKYGNGVWIGRTKSISSRNGFEMIWDPNGWTGTDNNFSIKQDIVGINEWSGYSGSFVQHPELTGLDCIRPCFWVELIRGRPKENTIWTSGSSISFCGVNSDTVGWSWPDGAELPFTIVK

SEQ ID NO: 21397 - protein, 469 aa, synthetic construct; identical to SEQ ID NO: 16738
  REGION 1..469: note = neuraminidase__InfluenzaA__AEW25361

SEQ ID NO: 21398 - protein, 469 aa, synthetic construct
  REGION 1..469: note = neuraminidase__InfluenzaA__AEW25379
MNPNQKIITIGSVCMTIGMANLILQIGNIISIWTSHSIQLGNQNQIETCNQSVITYENNTWVNQTYVNISNTNFAAGQSVVSVKLAGNSSLCPVSGWAIYSKDNSIRIGSKGDVFVIREPFISCSPLECRTFFLTQGALLNDKHSNGTIKDRSPYRTLMSCPIGEVPSPYNSRFESVAWSASACHDGINWLTIGISGPDNGAVAVLKYNGIITDTIKSWRNNILRTQESECACVNGSCFTVMTDGPSDGQASYKIFRIEKGKIVKSVEMNAPNYHYEECSCYPDSSEVTCVCRDNWHGSNRPWVSFNQNLEYQIGYICSGIFGDNPRPNDKTGSCGPVSSDGANGVKGFSFKYGNGVWIGRTKSISSRNGFEMIWDPNGWTGTDNNFSIKQDIVGINEWSGYSGSFVQHPELTGLDCIRPCFWVELIRGRPKENTIWTSGSSISFCGVNSDTVGWSWPDGAELPFTIDK

SEQ ID NO: 21399 - protein, 469 aa, synthetic construct
  REGION 1..469: note = neuraminidase__InfluenzaA__AEW25387
MNPNQKIITIGSVCMTIGMANLILQIGNIISIWISHSIQLGNQNQIETCNQSVITYENNTWVNQTYVNISNTNFAAGQSVVSVKLAGNSSLCPVSGWAIYSKDNSIRIGSKGDVFVIREPFISCSPLECRTFFLTQGALLNDKHSNGTIKDRSPYRTLMSCPIGEVPSPYNSRFESVAWSASACHDGINWLTIGISGPDNGAVAVLKYNGIITDTIKSWRNNILRTQESECACVDGSCFTVMTDGPSDGQASYKIFRIEKGKIVKSVEMNAPNYHYEECSCYPDSSEITCVCRDNWHGSNRPWVSFNQNLEYQIGYICSGIFEDNPRPNDKTGSCGPVSSNGANGVKGFSFKYGNGVWIGRTKSISSRNGFEMIWDPNGWTGTDNNFSIKQDIVGINEWSGYSGSFVQHPELTGLDCIRPCFWVELIRGRPKENTIWTSGSSISFCGVNSDTVGWSWPDGAELPFTIDK

SEQ ID NO: 21400 - protein, 469 aa, synthetic construct
  REGION 1..469: note = neuraminidase__InfluenzaA__AEW25392
MNPNQKIITIGSVCMTIGMANLILQIGNIISIWISHSIQLGNQNQIETCNQSVITYENNTWVNQTYVNISNTNFAAGQSVVSVKLAGNSSLCPVSGWAIYSKDNSIRIGSKGDVFVIREPFISCSPLECRTFFLTQGALLNDKHSNGTIKDRSPYRTLMSCPIGEVPSPYNSRFESVAWSASACHDGINWLTIGISGPDNGAVAVLKYNGIITDTIKSWRNNILRTQESECACVNGSCFTVMTDGPSDGQASYKIFRIEKGKIVKSVEMNAPNYHYEECSCYPDSSEITCVCRDNWHGSNRPWVSFNQNLEYQIGYICSGIFGDNPRPNDKTGSCGPVSSNGANGVKGFSFKYGNGVWIGRTKSISSRNGFEMIWDPNGWTGTDNNFSIKHDIVGINEWSGYSGSFVQHPELTGLDCIRPCFWVELIRGRPKENTIWTSGSSISFCGVNSDTVGWSWPDGAELPFTIDK

SEQ ID NO: 21401 - protein, 469 aa, synthetic construct
  REGION 1..469: note = neuraminidase__InfluenzaA__AEW25397
MNPNQKIITIGSVCMTIGMANLILQIGNIISIWISHSIQLGNQNQIETCNQSVITYENNTWVNQTYVNISNTNFAAGQSVVSVKLAGNSSLCPVSGWAIYSKDNSIRIGSKGDVFVIREPFISCSPLECRTFFLTQGALLNDKHSNGTIKDRSPYRTLMSCPIGEVPSPYNSRFEPVAWSASACHDGINWLTIGISGPDNGAVAVLKYNGIITDTIKSWRNNILRTQESECACVNGSCFTVMTDGPSDGQASYKIFRIEKGKIVKSVEMNAPNYHYEECSCYPDSSEITCVCRDNWHGSNRPWVSFNQNLEYQIGYICSGIFGDSPRPNDKTGSCGPVSSNGANGVKGFSFKYGNGVWIGRTKSISSRNGFEMIWDPNGWTGTDNNFSIKQDIVGINEWSGYSGSFVQHPELTGLDCIRPCFWVELIRGRPKENTIWTSGSSISFCGVNSDNVGWSWPDGAELPFTIDK

SEQ ID NO: 21402 - protein, 469 aa, synthetic construct; identical to SEQ ID NO: 16738
  REGION 1..469: note = neuraminidase__InfluenzaA__AEW25402

SEQ ID NO: 21403 - protein, 469 aa, synthetic construct; identical to SEQ ID NO: 16738
  REGION 1..469: note = neuraminidase__InfluenzaA__AEW25407

SEQ ID NO: 21404 - protein, 469 aa, synthetic construct
  REGION 1..469: note = neuraminidase__InfluenzaA__AEW25418
MNPNQKIITIGSVCMTIGMANLILQIGNIISIWISHSIQLGNQNQIETCNQSVITYENNTWVNHTYVNISNTNFAAGQSVVSVKLAGNSSLCPVSGWAIYSKDNSIRIGSKGDVFVIREPFISCSPLECRTFFLTQGALLNDKHSNGTIKDRSPYRTLMSCPIGEVPSPYNSRFESVAWSASACHDGINWLTIGISGPDNGAVAVLKYNGIITDTIKSWRNNILRTQESECACVNGSCFTVMTDGPSDGQASYKIFRIGKGKIVKSVEMNAPNYHYEECSCYPDSSEITCVCRDNWHGSNRPWVSFNQNLEYQIGYICSGIFGDNPRPNDKTGSCGPVSSNGENGVKGFSFKYGNGVWIGRTKSISSRNGFEMIWDPNGWTGTDNNFSIKQDIVGINEWSGYSGSFVQHPELTGLDCIRPCFWVELIRGRPKENTIWTSGSSISFCGVNSDTVGWFWPDGAELPFTIDK

SEQ ID NO: 21405 - protein, 469 aa, synthetic construct
  REGION 1..469: note = neuraminidase__InfluenzaA__AEW25423
MNPNQKIITIGSVCMTIGMANLILQIGNIISIWISNSIQLGNQNQIETCNQSVITYENNTWVNQTYVNISNTNFAAGQSVVSVKLAGNSSLCPVSGWAIYSKDNSIRIGSKGDVFVIREPFISCSPLECRTFFLTQGALLNDKHSNGTIKDRSPYRTLMSCPIGEVPSPYNSRFESVAWSASACHDGINWLTIGISGPDNGAVAVLKYNGIITDTIKSWRNNILRTQESECACVNGSCFTVMTDGPSDGQASYKIFRIEKGKIVKSVEMNAPNYHYEECSCYPDSSEITCVCRDNWHGSNRPWVSFNQNLEYQIGYICSGIFGDNPRPNDKTGSCGPVSSNGANGVKGFSFKYGNGVWIGRTKSISSRNGFEMIWDPNGWTGTDNNFSIKQDIVGINEWSGYSGSFVQHPELTGLDCIRPCFWVELIRGRPKENTIWTSGSSISFCGVNSDTVGWSWPDGAELPFTIDK

SEQ ID NO: 21406 - protein, 469 aa, synthetic construct; identical to SEQ ID NO: 16738
  REGION 1..469: note = neuraminidase__InfluenzaA__AEW25426

SEQ ID NO: 21407 - protein, 469 aa, synthetic construct
  REGION 1..469: note = neuraminidase__InfluenzaA__AEW25432
MNPNQKIITIGSVCMTIGMANLILQIGNIISIWTSHSIQLGNQNQIETCNQSVITYENNTWVNQTYVNISNTNFAAGQSVVSVKLAGNSSLCPVSGWAIYSKDNSIRIGSKGDVFVIREPFISCSPLECRTFFLTQGALLNDKHSNGTIKDRSPYRTLMSCPIGEVPSPYNSRFESVAWSASACHDGINWLTIGISGPDNGAVAVLKYNGIITDTIKSWRNNILRTQESECACVNGSCFTVMTDGPSDGQASYKIFRIEKGKIVKSVEMNAPNYHYEECSCYPDSSEITCVCRDNWHGSNRPWVSFNQNLEYQIGYICSGIFGDNPRPNDKTGSCGPVSSNGANGVKGFSFKYGNGVWIGRTKSISSRNGFEMIWDPNGWTGTDNNSSIKQDIVGINEWSGYSGSFVQHPELTGLDCIRPCFWVELIRGRPKENTIWTSGSSISFCGINSDAVGWSWPDGAELPFTIDK

SEQ ID NO: 21408 - protein, 469 aa, synthetic construct
  REGION 1..469: note = neuraminidase__InfluenzaA__AEW25436
MNPNQKIITIGSVCMTIGMANLILQIGNIISIWISHSIQLGNQNQIETCNQSIITYENNTWVNQTYVNISNTNFAAGQSVVSVKLAGNSSLCPVSGWAIYSKDNSIRIGSKGDVFVIREPFISCSPLECRTFFLTQGALLNDKHSNGTIKDRSPYRTLMSCPIGEVPSPYNSRFESVAWSASACHDGINWLTIGISGPDNGAVAVLKYNGIITDTIKSWRNNILRTQESECACVNGSCFTVMTDGPSDGQASYKIFRIEKGKIVKSVEMNAPNYHYEECSCYPDSSEITCVCRDNWHGSNRPWVSFNQNLEYRIGYICSGIFGDNPRPNDKTGSCGPVSSNGANGVKGFSFKYGNGVWIGRTKSISSRNGFEMIWDPNGWTGTDNNFSIKQDIVGTNEWSGYSGSFVQHPELTGLDCIRPCFWVELIRGRPKENTIWTSGSSISFCGVNSDTMGWSWPDGAELPFTIDK

SEQ ID NO: 21409 - protein, 469 aa, synthetic construct; identical to SEQ ID NO: 16738
  REGION 1..469: note = neuraminidase__InfluenzaA__AEW25440

SEQ ID NO: 21410 - protein, 469 aa, synthetic construct
  REGION 1..469: note = neuraminidase__InfluenzaA__AEW25448
MNPNQKIITIGSVCMTIGMANLILQIGNIISIWISHSIQLGNQNQIETCNQSVITYENNTWVNQTYVNISNTNFAAGQSVVSVKLAGNSSLCPVSGWAIYSKDNSIRIGSKGDVFVIREPFISCSPLECRTFFLTQGALLNDKHSNGTIKDRSPYRTLMSCPIGEVPSPYNSRFESVAWSASACHDGINWLTIGISGPDNGAVAVLKYNGIITDTIKSWRNNILRTQESECACVNGSCFTVMTDGPSDGQASYKIFRIEKGKIVKSVEMNAPNYHYEECSCYPDSSEITCVCRDNWHGSNRPWVSFNQNLEYQIGYICSGIFGDNPRPNDKTGSCGPVSSNGANGVKGFSFKYGNGVWIGRTKSISSRNGFEMIWDPNGWTGTDNNFSIKQDIVGINEWSGYSGSFVQHPELTGLDCIRPCFWVELIRGRPKENTIWTSGSSISFCGVNSDTVGWSWPDGAELPFTTDK

SEQ ID NO: 21411 - protein, 469 aa, synthetic construct; identical to SEQ ID NO: 16738
  REGION 1..469: note = neuraminidase__InfluenzaA__AEW25456

SEQ ID NO: 21412 - protein, 469 aa, synthetic construct
  REGION 1..469: note = neuraminidase__InfluenzaA__AEW25464
MNPNQKIITIGSVCMTIGMANLILQIGNIISIWISHSIQLGNQNQIETCNQSVITYENNTWVNQTYVNISNTNFAAGQSVVSVKLAGNSSLCPVSGWAIYSKDNSIRIGSKGDVFVIREPFISCSPLECRTFFLTQGALLNDKHSNGTIKDRSPYRTLMSCPIGEVPSPYNSRFESVAWSASACHDGINWLTIGISGPDNGAVAVLKYNGIITDTIKSWRNNILRTQESECACVNGSCFTVMTDGPSDGQASYKIFRIEKGKIVKSVELNAPNYHYEECSCYPDSSEITCVCRDNWHGSNRPWVSFNQNLEYQIGYICSGIFGDNPRPNDKTGSCGPVSSNGANGVKGFSFKYGNGVWIGRTKSISSRNGFEMIWDPNGWTGTDNNFSIKQDIVGINEWSGYSGSFVQHPELTGLDCIRPCFWVELIRGRPKENTIWTSGSSISFCGVNSDTVGWSWPDGAELPFTIDK

SEQ ID NO: 21413 - protein, 469 aa, synthetic construct
  REGION 1..469: note = neuraminidase__InfluenzaA__AEW25474
MNPNQKIITIGSVCMTIGMANLILQIGNIISIWISHSIQLGNQNQIETCNQSVITYENNTWVNQTYVNISNTNFAAGQSVVSVKLAGNSSLCPVSGWAIYSKDNSIRIGSKGDVFVIREPFISCSPLECRTFFLTQGALLNDKHSNGTIKDRSPYRTLMSCPIGEVPSPYNSRFESVAWSASACHDGINWLTIGISGPDNGAVAVLKYNGIITDTIKSWRNNILRTQESECACVNGSCFTVMTDGPSDGQASYKIFRIEKGKIVKSVEMNAPNYHYEECSCYPDSSEITCVCRDNWHGSNRPWVSFNQNLEYQIGYICSGIFGDNPRPNDKTGSCGPVSSNGANGVKGFSFKYGNGVWIGRTKSISSRNGFEMIWDPNGWTGTDNNFSIKQDIVGINEWSGYSGSFVQHPELTGLDCIRPCFWVELIRGRPKENTIWTSGSSISFCGVNSDTVGWSWPDGAELPSTIDK

SEQ ID NO: 21414 - protein, 469 aa, synthetic construct
  REGION 1..469: note = neuraminidase__InfluenzaA__AEW25484
MNPNQKIITIGSVCMTIGMANLILQIGNIISIWISHSIQLGNQNQIETCNQSVITYENNTWINQTYVNISNTNFAAGQSVVSVKLAGNSSLCPVSGWAIYSKDNSIRIGSKGDVFVIREPFISCSHLECRTFFLTQGALLNDKHSNGTIKDRSPYRTLMSCPIGEVPSPYNSRFESVAWSASACHDGINWLTIGISGPDHGAVAVLKYNGIITDTIKSWRNNILRTQESECACVNGSCFTVMTDGPSDGQASYKIFRIEKGKIVKSVEMNAPNYHYEECSCYPDSSEITCVCRDNWHGSNRPWVSFNQNLEYQIGYICSGIFGDNPRPNDKTGSCGPVSSNGANGVKGFSFKYGNGVWIGRTKSISSRNGFEMIWDPNGWTGTDNNFSIKQDIVGINEWSGYSGSFVQHPELTGLDCIRPCFWVELIRGRPKENTIWTSGSSISFCGVNSDTVGWSWPDGAELPFTIDK

SEQ ID NO: 21415 - protein, 469 aa, synthetic construct
  REGION 1..469: note = neuraminidase__InfluenzaA__AEW25494
MNPNQKIITIGSVCMTIGMANLILQIGNIISIWISHSIQLGNQNQIETCNQSVITYENNTWVNQTYVNISNTNFAAGQSVVSVKLAGNSSLCPVSGWAIYSKDNSIRIGSKGDVFVIREPFISCSPLECRTFFLTQGALLNDKHSNGTIKDRSPYRTLMSCPIGEVPSPYNSRFESVAWSASACHDGINWLTIGISGPDNGAVAVLKYNGIITDSIKSWRNNILRTQESECACVNGSCFTVMTDGPSDGQASYKIFRIEKGKIVKSVEMNAPNYHYEECSCYPDSSEITCVCRDNWHGSNRPWVSFNQNLEYQIGYICSGTFGDNPRPNDKTGSCGPVSSNGANGVKGFSFKYGNGVWIGRTKSISSRNGFEMIWDPNGWTGTDNNFSIKQDIVGINEWSGYSGSFVQHPELTGLDCIRPCFWVELIRGRPKENTIWTSGSSISFCGVNSDTVGWSWPDGAELPFTIDK

SEQ ID NO: 21416 - protein, 469 aa, synthetic construct
  REGION 1..469: note = neuraminidase__InfluenzaA__AEW25503
MNPNQKIITIGSVCMTIGMANLILQIGNIISIWISHSIQLGNQNQIETCNQSVITYENNTWVNQTYVNISNTNFAAGQSVVSVKLAGNSSLCPVSGWAIYSKDNSIRIGSKGDVFVIREPFISCSPLECRTFFLTQGALLNDKHSNGTIKDRSPYRTLMSCPIGEVPSPYNSRFESVAWSASACHDGINWLTIGISGPDNGAVAVLKYNGIITDTIKSWRNNILRTQESECACVNGSCFTVMTDGPSDGQASYKIFRIEKGKIVKSVEMNAPNYHYEECSCYPDSSEITCVCRDNWHGSNRPWVSFNQNLEYQIGYICSGIFGDNPRPNDKTGSCGPVSSNGANGVKGFSFKYGNGAWIGRTKSISSRNGFEMIWDPNGWTGTDNNFSIKQDIVGINEWSGYSGSFVQHPELTGLDCIRPCFWVELIRGRPKENTIWTSGSSISFCGVNSDTVGWSWPDGAELPFTIDK

SEQ ID NO: 21417 - protein, 469 aa, synthetic construct
  REGION 1..469: note = neuraminidase__InfluenzaA__AEW25511
MNPNQKIITIGSVCMTIGMANLILQIGNIISIWISHSIQLGNQNQIETCNQSVITYENNTWVNHTYVNISNTNFAAGQSVVSVKLAGNSSLCPVSGWAIYSKDNSIRIGSKGVVFVIREPFISCSPLECRTFFLTQGALLNDKHSNGTIKDRSPYRTLMSCPIGEVPSPYNSRFESVAWSASACHDGINWLTIGISGPDNGAVAVLKYNGIITDTIKSWRNNILRTQESECACVNGSCFTVMTDGPSDGQASYKIFRIEKGKIVKSVEMNAPNYHYEECSCYPDSSEITCVCRDNWHGSNRPWVSFNQNLEYQIGYICSGIFGDNPRPNDKTGSCGPVSSNGANGVKGFSFKYGNGVWIGRTKSISSRNGFEMIWDPNGWTGTDNNFSIKQDIVGINEWSGYSGSFVQHPELTGLDCIRPCFWVELIRGRPKENTIWTSGSSISFCGVNSDTVGWSWPDGAELPFTIDK

SEQ ID NO: 21418 - protein, 469 aa, synthetic construct
  REGION 1..469: note = neuraminidase__InfluenzaA__AEW25530
MNPNQKIITIGSVCMTIGMANLILQIGNIISIWISHSIQLGNQNQIETCNQSVITYENNTWVNHTYVNISNTNFAAGQSVVSVKLAGNSSLCPVSGWAIYSKDNSIRIGSKGDVFVIREPFISCSPLECRTFFLTQGALLNDKHSNGTIKDRSPYRTLMSCPIGEVPSPYNSRFESVAWSASACHDGINWLTIGISGPDNGAVAVLKYNGIITDTIKSWRYNILRTQESECACVNGSCFTVMTDGPSDGQASYKIFRIEKGKIVKSVEMNAPNYHYEECSCYPDSSEITCVCRDNWHGSNRPWVSFNQNLEYQIGYICSGIFGDNPRPNDKTGSCGPVSSNGENGVKGFSFKYGNGVWIGRTKSISSRNGFEMIWDPNGWTGTDNNFSIKQDIVGINEWSGYSGSFVQHPELTGLDCIRPCFWVELIRGRPKENTIWTSGSSISFCGVNSDTVGWSWPDGAELPFTIDK

SEQ ID NO: 21419 - protein, 469 aa, synthetic construct
  REGION 1..469: note = neuraminidase__InfluenzaA__AEW25537
MNPNQKIITIGSVCMTIGMANLILQIGNIISIWISHSIQLGNQNQIETCNQSVITYENNTWVNQTYVNISNTNFAAGQSVVSVKLAGNSSLCPVSGWAIYSKDNSIRIGSKGDVFVIREPFISCSPLECRTFFLTQGALLNDKHSNGTIKDRSPYRTLMSCPIGEVPSPYNSRFESVAWSASACHDGINWLTIGISGPDNGAVAVLKYNGIITDTIKSWRNNILRTQESECACVNGSCFTVMTDGPSDGQASYKIFRIEKGKIVKSVEMNAPNHHYEECSCYPDSSEITCVCRDNWHGSNRPWVSFNQNLEYQIGYICSGIFGDNPRPNDKTGSCGPVSSNGANGVKGFSFKYGNGVWIGRTKSISSRNGFEMIWDPNGWTGTDNNFSIKQDIVGINEWSGYSGSFVQHPELTGLDCIRPCFWVELIRGRPKENTIWTSGSSISFCGVNSDTVGWSWPDGAELPFTIDK

SEQ ID NO: 21420 - protein, 469 aa, synthetic construct; identical to SEQ ID NO: 16738
  REGION 1..469: note = neuraminidase__InfluenzaA__AEW25547

SEQ ID NO: 21421 - protein, 469 aa, synthetic construct; identical to SEQ ID NO: 16738
  REGION 1..469: note = neuraminidase__InfluenzaA__AEW25556

SEQ ID NO: 21422 - protein, 469 aa, synthetic construct; identical to SEQ ID NO: 16738
  REGION 1..469: note = neuraminidase__InfluenzaA__AEW25566

SEQ ID NO: 21423 - protein, 469 aa, synthetic construct
  REGION 1..469: note = neuraminidase__InfluenzaA__AEW25584
MNPNQKIITIGSVCMTIGMANLILQIGNIISIWISHSIQLGNQNQIETCNQSVITYENNTWVNQTYVNISNTNFAAGQSVVSVKLAGNSSLCPVSGWAIYSKDNSIRIGSKGDVFVIREPFISCSPLECRTFFLTQGALLNDKHSNGTIKDRSPYRTLMSCPIGEVPSPYNSRFESVAWSASACHDGINWLTIGISGPDNGAVAVLKYNGIITDTIKSWRNNILRTQESECACVNGSCFTVMTDGPSDGQASYKIFRIEKGKIVKSVEMNAPNYHYEECSCYPDSSEITCVCRDNWHGSNRPWVSFNQNLEYQIGYICSGIFGDNPRPNDKTGSCGPVSSNGANGVKGFSFKYGNGVWIGRTKSISSRNGFEMIWDPNGWTGTDNNFSIKQGIVGINEWSGYGGSFVQHPELTGLDCIRPCFWVELIRGRPKENTIWTSGSSISFCGVNSDTVGWSWPDGAELPFTIDK

SEQ ID NO: 21424 - protein, 469 aa, synthetic construct; identical to SEQ ID NO: 16738
  REGION 1..469: note = neuraminidase__InfluenzaA__AEW25592

SEQ ID NO: 21425 - protein, 469 aa, synthetic construct
  REGION 1..469: note = neuraminidase__InfluenzaA__AEW25602
MNPNQKIITIGSVCMTIGMANLILQIGNIISIWISHSIQLGNQNQIETCNQSVITYENNTWVNQTYVNISNTNFAAGQSVVSVKLAGNSSLCPVSGWAIYSKDNSIRIGSKGDVFVIREPFISCSPLECRTFFLTQGALLNDKHSNGTIKDRSPYRTLMSCPIGEVPSPYNSRFESVAWSASACHDGINWLTIGISGPDNGAVAVLKYNGIITDTIKSWRNNILRTQESECACVNGSCFTVMTDGPSDGQASYKIFRIEKGKIVKSVEMNAPNYHYEECSCYPDSSEITCVCRDNWHGSNRPWVSFNQNLEYQIGYICSGIFGDNPRPNDKTGSCGPVSSNGANGVKGFSFKYGNGVWIGRTKSISSRNGFEMIWDPNGWTGTDKNFSIKQDIVGINEWSGYSGSFVQHPELTGLDCIRPCFWVELIRGRPKENTIWTSGSSISFCGVNSDTVGWSWPDGAELPFTIDK

SEQ ID NO: 21426 - protein, 469 aa, synthetic construct
  REGION 1..469: note = neuraminidase__InfluenzaA__AEW25612
MNPNQKIITIGSVCMTIGMANLILQIGNIISIWISHSIQLGNQNQIETCNQSVITYENNTWVNQTYVNISNTNFAAGQSVVSVKLAGNSSLCPVSGWAIYSKDNSIRIGSKGDVFVIREPFISCSPLECRTFFLTQGALLNDKHSNGTIKDRSPYRTLMSCPIGEVPSPYNSRFESVAWSASACHDGINWLTIGISGPDNGAVAVLKYNGIITDTIKSWRNNILRTQESECACVNGSCFTVMTDGPSDRQASYKIFRIEKGKIVKSVEMNAPNYHYEECSCYPDSSEITCVCRDNWHGSNRPWVSFNQNLEYQIGYICSGIFGDNPRPNDKTGSCGPVSSNGANGVKGFSFKYGNGVWIGRTKSISSRNGFEMIWDPNGWTGTDNNFSIKQDIVGINEWSGYSGSFVQHPELTGLDCIRPCFWVELIRGRPKENTIWTSGSSISFCGVNSDTVGWSWPDGAELPFTIDK

SEQ ID NO: 21427 - protein, 469 aa, synthetic construct
  REGION 1..469: note = neuraminidase__InfluenzaA__AEW25622
MNPNQKIITIGSVCMTIGMANLILQIGNIISIWISHSIQLGNQNQIETCNQSVITYENNTWVNQTYVNISNTNFAAGQSVVSVKLAGNSSLCPVSGWAIYSKDNSIRIGSKGDVFVIREPFISCSPLECRTFFLTQGALLNDKHSNGTIKDRSPYRTLMSCPIGEVPSPYNSRFESVAWSASACHDGINWLTIGISGPDNGAVAVLKYNGIITDTIKSWRNNILRTQESECACVNGSCFTVMTDGPSDGQASYKIFRIEKGKIVKSVEMNAPNYHYEECSCYPDSSEITCVCRDNWHGSNRPWVSFNQNLEYQIGYICSGIFGDNPRPNDKTGSCGPVSSNGANGVKGFSFKYGNGVWIGRTKSISSRNGFEMIWDPNGWTGTDNNFSIKQDIVGINEWSGYSGSFVQHPELTGLDCIRPCFWVELIRGRPKENSIWTSGSSISFCGVNSDTVGWSWPDGAELPFTIDK

SEQ ID NO: 21428 - protein, 469 aa, synthetic construct
  REGION 1..469: note = neuraminidase__InfluenzaA__AEW25631
MNPNQKIITIGSVCMTIGMANLILQIGNIISIWISHSIQLGNQNQIETCNQSVITYENNTWVNQTYVNISNTNFAAGQSVVSVKLAGNSSLCPVSGWAIYSKDNSIRIGSKGDVFVIREPFISCSPLECRTFFLTQGALLNDKHSNGTIKDRSPYRTLMSCPIGEVPSPYNSRFESVAWSASACHDGINWLTIGISGPDNGAVAVLKYNGIITDTIKSWRNNILRTQESECACVNGSCFTVMTDGPSDGQASYKIFRIEKGKIVKSVEMNAPNYHYEECSCYPDSSEITCVCRDNWHGSNRPWVSFNQNLEYQIGYICSGIFGDNPRPNDKTGSCGPVSSNGASGVKGFSFKYGNGVWIGRTKSISSRNGFEMIWDPNGWTGTDNNFSIKQDIVGINEWSGYSGSFVQHPELTGLDCIRPCFWVELIRGRPKENTIWTSGSSISFCGVNSDTVGWSWPDGAELPFTIDK

SEQ ID NO: 21429 - protein, 469 aa, synthetic construct; identical to SEQ ID NO: 16738
  REGION 1..469: note = neuraminidase__InfluenzaA__AEW25639

SEQ ID NO: 21430 - protein, 469 aa, synthetic construct
  REGION 1..469: note = neuraminidase__InfluenzaA__AEW25648
MNPNQKIITIGSVCMTIGMANLILQIGNIISIWISHSIQLGNQNQIETCNQSVITYENNTWVNHTYVNISNTNFAAGQSVVSVKLAGNSSLCPVSGWAIYSKDNSIRIGSKGDVFVIREPFISCSPLECRTFFLTQGALLNDKHSNGTIKDRSPYRTLMSCPIGEVPSPYNSRFESVAWSASACHDGINWLTIGISGPDNGAVAVLKYNGIITDTIKSWRNNILRTQESECACVNGSCFTVMTDGPSDGQASYKIFRIEKGKIVKSVEMNAPNYHYEECSCYPDSSEITCVCRDNWHGSNRPWVSFNQNLEYQIGYICSGIFGDNPRPNDKTGSCGPVSSNGANGVKGFSFKYGNGVWIGRTKSISSRNGFEMIWDPNGWTGTDNNFSIKQDIVGINEWSGYSGSFVQHPELTGLDCIRPCFWVELIRGRPKENTIWTSGSSISFCGVNSDTVGWSWPDGAELPFTIDK

SEQ ID NO: 21431 - protein, 469 aa, synthetic construct
  REGION 1..469: note = neuraminidase__InfluenzaA__AEW25656
MNPNQKIITIGSVCMTIGMANLILQIGNIISIWISHSIQLGNQNQIETCNQSVITYENNTWVNQTYVNISNTNFAAGQSVVSVKLAGNSSLCPVSGWAIYSKDNSIRIGSKGDVFVIREPFISCSPLECRTFFLTQGALLNDKHSNGTIKDRSPYRTLMSCPIGEVPSPYNSRFESVAWSASACHDGINWLTIGISGPDNGAVAVLKYNGIITDTIKSWRNNILRTQESECACVNGSCFTVMTDGPSDGQASYKIFRIEKGKIVKSVEMNAPNYHYEECSCYPDSSEITCVCRDNWHGSNRPWVSFNQNLEYQIGYICSGIFGDNPRPNDKTGSCGPVSSNGANGVKGFSFKYGNGVWIGRTKSISSRNGFEMIWDPNGWTGTDNNFPIKQDIVGINEWSGYSGSFVQHPELTGLDCIRPCFWVELIRGRPKENTIWTSGSSISFCGVNSDTVGWSWPDGAELPFTIDK

SEQ ID NO: 21432 - protein, 469 aa, synthetic construct
  REGION 1..469: note = neuraminidase__InfluenzaA__AEW25664
MNPNQKIITIGSVCMTIGMANLILQIGNIISIWISHSIQLGNQNQIETCNQSVITYENNTWVNQTYVNISNTNFTAGQSVVSVKLAGNSSLCPVSGWAIYSKDNSIRIGSKGDVFVIREPFISCSPLECRTFFLTQGALLNDKHSNGTIKDRSPYRTLMSCPIGEVPSPYNSRFESVAWSASACHDGINWLTIGISGPDNGAVAVLKYNGIITDTIKSWRNNILRTQESECACVNGSCFTVMTDGPSDGQASYKIFRIEKGKIVKSVEMNAPNYHYEECSCYPDSSEITCVCRDNWHGSNRPWVSFNQNLEYQIGYICSGIFGDNPRPNDKTGSCGPVSSNGANGVKGFSFKYGNGVWIGRTKSISSRNGFEMIWDPNGWTGTDNNFSIKQDIVGINEWSGYSGSFVQHPELTGLDCIRPCFWVELIRGRPKENTIWTSGSSISFCGVNSDTGGWSWPDGAELPFTIDK

SEQ ID NO: 21433 - protein, 469 aa, synthetic construct; identical to SEQ ID NO: 21427
  REGION 1..469: note = neuraminidase__InfluenzaA__AEW25671

SEQ ID NO: 21434 - protein, 469 aa, synthetic construct; identical to SEQ ID NO: 17915
  REGION 1..469: note = neuraminidase__InfluenzaA__AEW25680

SEQ ID NO: 21435 - protein, 469 aa, synthetic construct
  REGION 1..469: note = neuraminidase__InfluenzaA__AEW25689
MNPNQKIITIGSVCMTIGMANLILQIGNIISIWISHSIQLGNQNQIETCNQSVITYENNTWVNQTYVNISNTNFAAGQSVVSVKLAGNSSLCPVSGWAIYSKDNSIRVGSKGDVFVIREPFISCSPLECRTFFLTQGALLNDKHSNGTIKDRSPYRTLMSCPIGEVPSPYNSRFESVAWSASACHDGINWLTIGISGPDNGAVAVLKYNGIITDTIKSWRNNILRTQESECACVNGSCFTVMTDGPSDGQASYKIFRIEKGKIVKSVEMNAPNYHYEECSCYPDSSEITCVCRDNWHGSNRPWVSFNQNLEYQIGYICSGIFGDNPRPNDKTGSCGPVSSNGANGVKGFSFKYGNGVWIGRTKSISSRNGFEMIWDPNGWTGTDNNFSIKQDIVGINEWSGYSGSFVQHPELTGLDCIRPCFWVELIRGRPKENTIWTSGSSISFCGVNSDTVGWSWPDGAELPFTIDK

SEQ ID NO: 21436 - protein, 469 aa, synthetic construct; identical to SEQ ID NO: 21430
  REGION 1..469: note = neuraminidase__InfluenzaA__AEW25698

SEQ ID NO: 21437 - protein, 469 aa, synthetic construct; identical to SEQ ID NO: 16738
  REGION 1..469: note = neuraminidase__InfluenzaA__AEW25708

SEQ ID NO: 21438 - protein, 469 aa, synthetic construct; identical to SEQ ID NO: 16738
  REGION 1..469: note = neuraminidase__InfluenzaA__AEX09177

SEQ ID NO: 21439 - protein, 470 aa, synthetic construct
  REGION 1..470: note = neuraminidase__InfluenzaA__AEX33324
MNPNQKIITIGSISIAIGIISLMLQIGNIISIWASHSIQTGSQNHTGICNQRIITYENSTWVNHTYVTINNTNVVAGKDKTSVTLAGNSSLCSISGWAIYTKDNSIRIGSKGDVFVIREPFISCSHLECRTFFLTQGALLNDKHSNGTVKDRSPYRALMSCPLGEAPSPYNSKFESVAWSASACHDGMGWLTIGISGPDNGAVAVLKYNGIITETIKSWKKRILRTQESECVCVNGSCFTIMTDGPSNGAASYKIFKIEKGKVTKSIELNAPNFHYEECSCYPDTGTVMCVCRDNWHGSNRPWVSFNQNLDYQIGYICSGVFGDNPRPKDGEGSCNPVTVDGADGVKGFSYKYGNGVWIGRTKSNRLRKGFEMIWDPNGWTDTDSDFSVKQDVVAITDWSGYSGSFVQHPELTGLDCIRPCFWVELVRGLPRENTTIWTSGSSISFCGVNSDTANWSWPDGAELPFTIDK

SEQ ID NO: 21440 - protein, 470 aa, synthetic construct
  REGION 1..470: note = neuraminidase__InfluenzaA__AEX33368
MNPNQKIITIGSISIAIGIISLMLQIGNIISIWASHSIQTGSQNHTGICNQRIITYENSTWVNHTYVNINNTNVVAGKDKTSVTLAGNSSLCAISGWAIYTKDNSIRIGSKGDVFVIREPFISCSHLECRTFFLTQGALLNDKHSNGTVKDRSPYRALMSCPLGEAPSPYNSKFESVAWSASACHDGMGWLTIGISGPDNGAVAVLKYNGIITETIKSWKKRILRTQESECVCVNGSCFTIMTDGPSNGAASYKIFKIEKGKVTKSIELNAPNFHYEECSCYPDTGTVMCVCRDNWHGSNRPWVSFNQNLDYQIGYICSGVFGDNPRPKDGEGSCNPVTVDGADGVKGFSYKYGNGVWIGRTKSNRLRKGFEMIWDPNGWTDTDSDFSVKQDVVAITDWSGYSGSFVQHPELTGLDCIRPCFWVELVRGLPRENTTIWTSGSSISFCGVNSDTANWSWPDGAELPFTIDK

SEQ ID NO: 21441 - protein, 470 aa, synthetic construct
  REGION 1..470: note = neuraminidase__InfluenzaA__AEX33379
MNPNQKIITIGSISIAIGIISLMLQIGNIISIWASHSIQTGIQNHTGICNQRIITYENSTWVNHTYVTINNTNVVAGKDKTSVTLAGNSSLCSISGWAIYTKDNSIRIGSKGDVFVIREPFISCSHLECRTFFLTQGALLNDKHSNGTVKDRSPYRALMSCPLGEAPSPYNSKFESVAWSASACHDGMGWLTIGISGPDNGAVAVLKYNGIITETIKSWKKRILRTQESECVCVNGSCFTIMTDGPSNGAASYKIFKIEKGKVTKSIELNAPNFHYEECSCYPDTGTVMCVCRDNWHGSNRPWVSFNQNLDYQIGYICSGVFGDNPRPRDGEGSCNPVTVDGADGVKGFSYKYGNGVWIGRTKSNRLRKGFEMIWDPNGWTDTDSDFSVKQDVVAITDWSGYSGSFVQHPELTGLDCIRPCFWVELVRGLPRENTTIWTSGSSISFCGVNSDTANWSWPDGAELPFTIDK

SEQ ID NO: 21442 - protein, 470 aa, synthetic construct; identical to SEQ ID NO: 21441
  REGION 1..470: note = neuraminidase__InfluenzaA__AEX33390

SEQ ID NO: 21443 - protein, 470 aa, synthetic construct; identical to SEQ ID NO: 21441
  REGION 1..470: note = neuraminidase__InfluenzaA__AEX33401

SEQ ID NO: 21444 - protein, 470 aa, synthetic construct; identical to SEQ ID NO: 21441
  REGION 1..470: note = neuraminidase__InfluenzaA__AEX33412

SEQ ID NO: 21445 - protein, 470 aa, synthetic construct; identical to SEQ ID NO: 21441
  REGION 1..470: note = neuraminidase__InfluenzaA__AEX33423

SEQ ID NO: 21446 - protein, 470 aa, synthetic construct; identical to SEQ ID NO: 21441
  REGION 1..470: note = neuraminidase__InfluenzaA__AEX33434

SEQ ID NO: 21447 - protein, 470 aa, synthetic construct; identical to SEQ ID NO: 21441
  REGION 1..470: note = neuraminidase__InfluenzaA__AEX33445

SEQ ID NO: 21448 - protein, 469 aa, synthetic construct
  REGION 1..469: note = neuraminidase__InfluenzaA__AEX33544
MNPNQKIITIGSFSLTIAAICFLMQIAILVTTVTLHFKQHECNSPPNNQVMLCEPTIIERNITEIVYLTNTTIEKEICPKLAEYRNWSKPQCNITGFAPFSKDNSIRLSAGGDIWVTREPYVSCDPDKCYQFALGQGTTLNNGHSNDTVHDRTPYRTLLMNELGVPFHLGTRQVCIAWSSSSCHDGKAWLHVCVTGDDKNATASFIYNGRLVDSIGSWSKKILRTQESECVCINGTCTVVMTDGSASGKADTKILFIEEGKIVHISTLSGSAQHVEECSCYPRYPGVRCVCRDNWKGSNRPIVDINVKDYSIVSSYVCSGLVGDTPRKNDSFSSSHCLDPNNEEGGHGVKGWAFDDGNDVWMGRTISEKLRSGYETFKVIEGWSKPNSKLQINRQVIVERGNRSGYSGIFSVEGKSCINRCFYVELIRGRKEKTEVWWTSNSIVVFCGTSGTYGTGSWPDGADINLMPI

SEQ ID NO: 21449 - protein, 469 aa, synthetic construct; identical to SEQ ID NO: 14714
  REGION 1..469: note = neuraminidase__InfluenzaA__AEX33555

SEQ ID NO: 21450 - protein, 469 aa, synthetic construct
  REGION 1..469: note = neuraminidase__InfluenzaA__AEX33610
MNPNQKIITIGSVSLTISTICFFMQIAILITTVTLHFKQYEFNPPPNNQVMLCEPTIIERNITEIVYLTNTTIEKEICPKLAEYRNWSKPQCDITGFAPFSKDNSIRLSAGGDIWVTREPYVSCDPDKCYQFALGQGTTLNNVHSNDTVHDRTPYRTLLMNELGVPFHLGTKQVCIAWSSSSCHDGKAWLHVCVTGDDKNATASFIYNGRLVDSIVSWSKKILRTQESECVCINGTCTVVMTDGSASGKADTKILFIEEGKIVHTSTLSGSAQHVEECSCYPRYPGVRCVCRDNWKGSNRPIVDINIKDYNIVSSYVCSGLVGDTPRKNDSSSSSHCLDPNNEEGGHGVKGWAFDDGNDVWMGRTISEKLRSGYETFKVIGGWSNPNSKLQINRQVIVDRGNRSGYSGIFSVEGKSCINRCFYVELIRGRKEETEVLWTSNSIVVFCGTSGTYGTGSWPDGADINLMPI

SEQ ID NO: 21451 - protein, 469 aa, synthetic construct
  REGION 1..469: note = neuraminidase__InfluenzaA__AEX33828
MNPNQKIITIGSVSLTISTICFFMQIAILITTVTLHFKQYEFNPPPNNQVMLCEPTIIERNITEIVYLTNTTIEKEICPKLAEYRNWSKPQCDITGFAPFSKDNSIRLSAGGDIWVTREPYVSCDPDKCYQFALGQGTTLNNVHSNDTVHDRTPYRTLLMNELGVPFHLGTKQVCIAWSSSSCHDGKAWLHVCVTGDDKNATASFIYNGRLVDSIVSWSKEILRTQESECVCINGTCTVVMTDGSASGKADTKILFIEEGKIVHTSTLSGSAQHVEECSCYPRYPGVRCVCRDNWKGSNRPIVDINIKDYSIVSSYVCSGLVGDTPRKNDSSSSSHCLDPNNEEGGHGVKGWAFDDGNDVWMGRTISEKLRSGYETFKVIEGWSNPNSKLQINRQVIVDRGNRSGYSGIFSVEGKSCINRCFYVELIRGRKEETEVLWTSNSIVVFCGTSGTYGTGSWPDGADINLMPI

SEQ ID NO: 21452 - protein, 469 aa, synthetic construct; identical to SEQ ID NO: 14712
  REGION 1..469: note = neuraminidase__InfluenzaA__AEX33839

SEQ ID NO: 21453 - protein, 470 aa, synthetic construct
  REGION 1..470: note = neuraminidase__InfluenzaA__AEX33861
MNPNQKIITIGSISIAIGTISLMLQVGNIISIWASHSIQTGSQNHTGICNQRIITYENSTWVNHTYVNINNTNVVAGKDKTSVALAGNSSLCSISGWAIYTKDNSIRIGSKGDVFVIREPFISCSHLECRTFFLTQGALLNDKHSNGTVKDRSPYRALMSCPLGEAPSPYNSKFESVAWSASACHDGMGWLTIGISGPDNGAVAVLKYNGIITETIKSWKKRILRTQESECVCVNGSCFTIMTDGPSNGAASYKIFKIEKGQVTKSVELNAPNFHYEECSCYPDTGTVMCVCRDNWHGSNRPWVSFNQNLDYQIGYICSGVFGDNPRPKDGKGSCNPVTVDGADGVKGFSYKYGNGVWIGRTKSNRLRKGFEMIWDPNGWTDTDSDFSVKQDVVAITDWSGYSGSFVQHPELTGLDCIRPCFWVELVRGLPRENTTIWTSGSSISFCGVDSDTANWSWPDGAELPFTIDK

SEQ ID NO: 21454 - protein, 469 aa, synthetic construct
  REGION 1..469: note = neuraminidase__InfluenzaA__AEX33872
MNPNQKIITIGSVSLTISTICFFMQIAILITTVTLHFKQYEFNSPPNNQVMQCEPTIIERNITEIVYLTNTTIEKEICPKLAEYRNWSKPQCDITGFAPFSKDNSIRLSAGGDIWVTREPYVSCDPDKCYQFALGQGTTLNNVHSNDTVHDRTPYRTLLMNELGVPFHLGTKQVCIAWSSSSCHDGKAWLHVCVTGDDKNATASFIYNGRLVDSIVSWSKEILRTQESECVCINGTCTVVMTDGSASGKADTKILFIEEGKIVHTSTLSGSAQHVEECSCYPRYPGVRCVCRDNWKGSNRPIVDINIKDYSIVSSYVCSGLVGDTPRKNDSSSSSHCLNPNNEEGGHGVKGWAFDDGNDVWMGRTISEKLRLGYETFKVIEGWSNPNSKLQINRQVIVDRGNRSGYSGIFSVEGKSCINRCFYVELIRGRKEETEVLWTSNSIVVFCGTSGTYGTGSWPDGADINLMPI

SEQ ID NO: 21455 - protein, 469 aa, synthetic construct; identical to SEQ ID NO: 14712
  REGION 1..469: note = neuraminidase__InfluenzaA__AEX33883

SEQ ID NO: 21456 - protein, 469 aa, synthetic construct
  REGION 1..469: note = neuraminidase__InfluenzaA__AEX33894
MNPNQKIITIGSVSLTISTICFFMQIAILITTVTLHFKQYEFNSPPNNQVMLCEPTIIERNITEIVYLTNTTIEKEICPKLAEYRNWSKPQCNITGFAPFSKDNSIRLSAGGDIWVTREPYVSCDPDKCYQFALGQGTTLNNVHSNDTVHDRTPYRTLLMNELGVPFHLGTKQVCIAWSSSSCHDGKAWLHVCVTGDDKNATASFIYNGRLVDSIVSWSKEILRTQESECVCIDGTCTVVMTDGSASGKADTKILFIEEGKIVHTSTLSGSAQHVEECSCYPRYPGVRCVCRDNWKGSNRPIVDINIKDYSIVSSYVCSGLVGDTPRKNDSSSSSHCLDPNNEEGGHGVKGWAFDDGNDVWMGRTISEKLRSGYETFKVIEGWSNPNSKLQINRQVIVDRGNRSGYSGIFSVEGKSCINRCFYVELIRGRKEETEVLWTSNSIVVFCGTSGTYGTGSWPDGADINLMPI

SEQ ID NO: 21457 - protein, 470 aa, synthetic construct
  REGION 1..470: note = neuraminidase__InfluenzaA__AEX33916
MNPNQKIITIGSISIAIGIISLILQIGNIISIWASHSIQTGSQNHTGICNQRIITYENSTWVNNTYVNINNTNVVAEKDKTSVTLAGNSSLCSISGWAIYTKDNSIRIGSKGDVFVIREPFISCSHLECRTFFLTQGALLNDKHSNGTVKDRSPYRALMSCPLGEAPSPYNSRFESVAWSASACHDGMGWLTIGISGPDNGAVAVLKYNGIITETIKSWKKRILRTQESECVCMNGSCFTIMTDGPSNGAASYKIFKIEKGKVTKTIELNAPNFHYEECSCYPDTGTVMCVCRDNWHGSNRPWVSFNQNLDYQTGYICSGVFGDNPRPKDGEGSCNPMTVDGADGVKGFSYKYGNGVWIGRTKSNRLRKGFEMIWDPNGWTNTDSDFSVKQDVVAITDWSGYSGSFVQHPELTGLDCIRPCFWVELVRGLPRENTTIWTSGSSISFCGVNSGTANWSWPDGAELPFTIDK

SEQ ID NO: 21458 - protein, 470 aa, synthetic construct; identical to SEQ ID NO: 15869
  REGION 1..470: note = neuraminidase__InfluenzaA__AEX33927

SEQ ID NO: 21459 - protein, 470 aa, synthetic construct
  REGION 1..470: note = neuraminidase__InfluenzaA__AEX33938
MNPNQKIITIGSISIAIGIISLILQIGNIISIWASHSIQTGSQNHTGICNQRIITYENSTWVNNTYVNINNTNVVVEKDKTSVTLAGNSSLCSISGWAIYTKDNSIRIGSKGDVFVIREPFISCSHLECRTFFLTQGALLNDKHSNGTVKDRSPYRALMSCPLGEAPSPYNSRFESVAWSASACHDGMGWLTIGISGPDNGAVAVLKYNGIITETIKSWKKRILRTQESECVCMNGSCFTIMTDGPSNGAASYKIFKIEKGKVTKTIELNAPNFHYEECSCYPDTGTVMCVCRDNWHGSNRPWVSFNQNLDYQIGYICSGVFGDNPRPKDGEGSCNPVTVDGADGVKGFSYKYGNGVWIGRTKSNRLRKGFEMIWDPNGWTNTDSDFSVKQDVVAITDWSGYSGSFVQHPELTGLDCIRPCFWVELVRGLPRENTTIWTSGSSISFCGVNSGTTNWSWPDGAELPFTIDK

SEQ ID NO: 21460 - protein, 470 aa, synthetic construct
  REGION 1..470: note = neuraminidase__InfluenzaA__AEX33949
MNPNQKIITIGSISIAIGIISLILQIGNIISIWASHSIQTGSQNHTGICNQRIITYENSTWVNNTYVNINNTNVVVEKDKTSVTLAGNSSLCSISGWAIYTKDNSIRIGSKGDVFVIREPFISCSHLECRTFFLTQGALLNDKHSNGTVKDRSPYRALMSCPLGEAPSPYNSRFESVAWSASACHDGMGWLTIGISGPDNGAVAVLKYNGIITETVKSWKKRILRTQESECVCMNGSCFTIMTDGPSNGAASYKIFKIEKGKVTKTIELNAPNFHYEECSCYPDTGTVMCVCRDNWHGSNRPWVSFNQNLDYQIGYICSGVFGDNPRPKDGEGSCNPVTVDGADGVKGFSYKYGNGVWIGRTKSNRLRKGFEMIWDPNGWTNTDSDFSVKQDVVAITDWSGYSGSFVQHPELTGLDCIRPCFWVELVRGLPRENTTIWTSGSSISFCGVNSGTANWSWPDGAELPFTIDK

SEQ ID NO: 21461 - protein, 469 aa, synthetic construct
  REGION 1..469: note = neuraminidase__InfluenzaA__AEX33971
MNPNQKIITIGSVSLTISTICFFMQIAILITTVTLHFKQYEFSSPPNNQVMLCEPAIIERNITETVYLTNTTTEKEICPKLAEYRNWSKPQCDITGFAPFSKDNSIRLSAGGDIWVTREPYVSCDPDKCYQFALGQGTTLNNVHSNDTVHDRTPYRTLLMNELGVPFHLGTKQVCIAWSSSSCHDGKAWLHVCVTGDDKNATASFIYNGRLVDSIVSWSKEILRTQESECVCINGTCTVVMTDGSASGKADTKILFIEEGKIVHTSTLSGSAQHVEECSCYPRYPGVRCVCRDNWKGSNRPIVDINIKDYSIVSRYVCSGIVGDTPRKNDSSSSSHCLDPNNEEGGHGVKGWAFDDGNDVWMGRTISEKSRSGYETFKVIEGWSNPNSKLQINRQVIVDRGNRSGYSGIFSVEGKSCINRCFYVELIRGRKEETEVLWTSNSIVVFCGTSGTYGTGSWPDGADINLMPI

SEQ ID NO: 21462 - protein, 469 aa, synthetic construct
  REGION 1..469: note = neuraminidase__InfluenzaA__AEX33993
MNPNQKIITIGSVSLTISTICFFMQIAILITTVTLHFKQYEFNSPPNNQVMLCEPTIIERNITEIVYLTNTTIEKEICPKLAEYRNWSKPQCDITGFAPFSKDNSIRLSAGGDIWVTREPYVSCDPDKCYQFALGQGTTLNNVHSNDTVRDRTPYRTLLMNELGVPFHLGTKQVCIAWSSSSCHDGKAWLHVCITGDDKNATASFIYNGRLVDSIVSWSKEILRTQESECVCINGTCTVVMTDGSASGEADTKILFIEEGKIVHTSTLSGSAQHVEECSCYPRYPGVRCVCRDNWKGSNRPIVDINIKDHSIVSSYVCSGLVGDTPRKNDSSSSSHCLDPNNEEGGHGVKGWAFDDGNDVWMGRTISEKSRLGYETFKVIEGWSNPKSKLQINRQVIVDRGNRSGYSGIFSVEGKSCINRCFYVELIRGRKEETEVLWTSNSIVVFCGTSGTYGTGSWPDGADINLMPV

SEQ ID NO: 21463 - protein, 469 aa, synthetic construct; identical to SEQ ID NO: 16512
  REGION 1..469: note = neuraminidase__InfluenzaA__AEX34026

SEQ ID NO: 21464 - protein, 469 aa, synthetic construct
  REGION 1..469: note = neuraminidase__InfluenzaA__AEX34036
MNPNQKIITIGSVSLTISTICFFMQIAILITTVTLHFKQYEFSSPPNNQVMLCEPTIIERNITEIVYLTNTTIEKEICPKLAEYRNWSKPQCDITGFAPFSKDNSIRLSAGGDIWVTREPYVSCDPDKCYQFALGQGTTLNNVHSNDTVHGRTPYRTLLMNELGVPFHLGTKQVCIAWSSSSCHDGKAWLHVCVTGDDKNATASFIYNGRLVDSIVSWSKEILRTQESECVCINGTCAVVMTDGSASGKADTKILFIEEGKIVHTSTLSGSAQHVEECSCYPRYPGVRCVCRDNWKGSNRPIVDINIKDYSIVSRYVCSGLVGDTPRKNDSSSSSHCLDPNNEEGGHGVKGWAFDDGDDVWMGRTISEKSRSGYETFKVIEGWSNPNSKLQINRQVIVDRGNRSGYSGIFSVEGKSCINRCFYVELIRGRKEETEVLWTSNSIVVFCGTSGTYGTGSWPDGADINLMPI

SEQ ID NO: 21465 - protein, 469 aa, synthetic construct
  REGION 1..469: note = neuraminidase__InfluenzaA__AEX34058
MNPNQKIITIGSVSLTISTICFFMQIAILITTVTLHFKQYEFSSPPNNQVMLCEPAIIERNITEIVYLTNTTIEKEICPKLTEYRNWSKPQCDITGFAPFSKDNSIRLSAGGDIWVTREPYVSCDPDKCYQFALGQGTTLNNVHSNDTVHDRTPYRTLLMNELGVPFHLGTKQVCIAWSSSSCHDGKAWLHVCVTGDDKNATASFIYNGRLVDSIVSWSKEILRTQESECVCINGTCTVVMTDGSASGKADTKILFIEEGKIVHTSTLSGSAQHVEECSCYPRYPGVRCVCRDNWKGSNRPIVDINIKDYSIVSRYVCSGLVGDTPRKNDSSSSSHCLDPNNEEGGHGVKGWAFDDGNDVWMGRTISEKSRSGYETFKVIEGWSNPNSKLQINRQVIVDRGNRSGYSGIFSVEGKSCINRCFYVELIRGRKEETEVLWTSNSIVVFCGTSGTYGTGSWPDGADINLMPI

SEQ ID NO: 21466 - protein, 469 aa, synthetic construct
  REGION 1..469: note = neuraminidase__InfluenzaA__AEX34103
MNPNQKIITIGSVSLTISTICFFMQIAILITTVTLHFKQYEFSSPPNNQVMLCEPTIIERNITEIVYLTNTTIEKEVCPKLAEYRNWSKPQCDITGFAPFSKDNSIRLSAGGDIWVTREPYVSCDPDKCYQFALGQGTTLNNVHSNDTVHDRTPYRTLLMNELGVPFHLGTKQVCIAWSSSSCHDGKAWLHVCVTGDDKNATASFIYNGRLVDSIVSWSKEILRTQESECVCINGTCTVVMTDGSASGKADTKILFIEEGKIVHTSTLSGNAQHVEECSCYPRYPGVRCVCRDNWKGSNRPIVDINIKDYSIVSRYVCSGLVGDTPRKNDSSSSSHCLDPNNEEGGHGVKGWAFDDGNDVWMGRTISEKSRSGYETFKVIEGWSNPNSKLQINRQVIVDRGNRSGYSGIFSVEGKSCINRCFYVELIRGRKEETKVLWTSNSIVVFCGTSGTYGTGSWPDGADINLMPI

SEQ ID NO: 21467 - protein, 469 aa, synthetic construct
  REGION 1..469: note = neuraminidase__InfluenzaA__AEX34114
MNPNQKIITIGSVSLTISTICFFMQIAILITTVTLHFKQYEFSSPPNNQVMLCEPAIIERNITEIVYPTNTTIEKEICPKLAEYRNWSKPQCDITGFAPFSKDNSIRLSAGGDIWVTREPYVSCDPDKCYQFALGQGTTLNNVHSNDTVHDRTPYRTLLMNELGVPFHLGTKQVCIAWSSSSCHDGKAWLHVCVTGDDKNATASFIYNGRLVDSIVSWSKEILRTQESECVCINGTCTVVMTDGSASGKADTKILFIEEGKIVHTSTLSGSAQHVEECSCYPRYPGVRCVCRDNWKGSNRPIVDINIKDYSIVSRYVCSGLVGDTPRKNDSSSSSHCLDPNNEEGGHGVKGWAFDDGNDVWMGRTISEKSRSGYETFKVIEGWSNPNSKLQINRQVIVDRGNRSGYSGIFSVEGKSCINRCFYVELIRGRKEETEVLWTSNSIVVFCGTSGTYGTGSWPDGADINLMPI

SEQ ID NO: 21468 - protein, 469 aa, synthetic construct
  REGION 1..469: note = neuraminidase__InfluenzaA__AEX34137
MNPNQKIITIGSVSLTISTICFFMQIAILITTVTLHFKQYEFNSPPNNQVMLCEPTIIERNITEIVYLTNTTIEKEICPKLAEYRNWSKPQCDITGFAPFSKDNSIRLSAGGDIWVTREPYVSCDPDKCYQFALGQGTTLNNVHSNDTVRGRTPYRTLLMNELGVPFHLGTKQVCIAWSSSSCHDGKAWLHVCITGDDKNATASFIYNGRLVDSIVSWSKEILRTQESECVCINGTCTVVMTDGSASGKADTKILFIEEGKIVHTSTLSGSAQHVEECSCYPRYPGVRCVCRDNWKGSNRPIVDINIKDHSIVSSYVCSGLVGDTPRKNDSSSSSHCLDPNNEEGGHGVKGWAFDDGNDVWMGRTISEKSRLGYETFKVIEGWSNPKSKLQINRQVIVDRGNRSGYSGIFSVEGKSCINRCFYVELIRGRKEETEVLWTSNSIVVFCGTSGTYGTGSWPDGADINLMPI

SEQ ID NO: 21469 - protein, 469 aa, synthetic construct
  REGION 1..469: note = neuraminidase__InfluenzaA__AEX34191
MNPNQKIITIGSVSLSISTICFFMQIAILITTVTLHFKQYEFNSSPNNQVMLCEPTIIERNITEIVYLTNTTIEKEICPKLAEYRNWSKPQCDITGFAPFSKDNSIRLSAGGDIWVTREPYVSCDPDKCYQFALGQGTTLNNVHSNNTVRDRTPYRTLLMNELGVPFHLGTKQVCIAWSSSSCHDGKAWLHVCITGDDKNATASFIYNGRLVDSIVSWSKEILRTQESECVCINGTCTVVMTDGSASGKADTKILFIEEGKIVHTSTLSGSAQHVEECSCYPRYPGVRCVCRDNWKGSNRPIVDINIKDHSIVSSYVCSGLVGDTPRKNDSSSSSHCLDPNNEEGGHGVKGWAFDDGNDVWMGRTISEKSRLGYETFKVIEGWSNPKSKLQINRQVIVDRGNRSGYSGIFSVEGKSCINRCFYVELIRGRKEETEVLWTSNSIVVFCGTSGTYGTGSWPDGADINLMPI

SEQ ID NO: 21470 - protein, 469 aa, synthetic construct
  REGION 1..469: note = neuraminidase__InfluenzaA__AEX34224
MNPNQKIITIGSVSLTISTICFFMQIAILITTVTLHFKQYEFSSPPNNQVMLCEPTIIERNITEIVYLTNTTIEKEICPKLAEYRNWSKPQCDITGFAPFSKDNSIRLSAGGDIWVTREPYVSCDPDKCYQFALGQGTTLNNVHSNDTVHGRTPYRTLLMNELGVPFHLGTKQVCIAWSSSSCHDGKAWLHVCVTGDDKNATASFIYNGRLVDSIVSWSKEILRTQESECVCINGTCTVVMTDGSASGKADTKILFIEEGKIVHTSTLSGSAQHVEECSCYPRYPGVRCVCRDNWKGSNRPIVDINIKDYSIVSRYVCSGLVGDTPRKNDSSSSSHCLDPNNEEGGHGVKGWAFDDGNDVWMGRTISEKLRSGYETFKVIEGWSNPNSKLQINRQVIVDRGNRSGYSGIFSVEGKSCINRCFYVELIRGRKEETEVLWTSNSIVVFCGTSGTYGTGSWPDGADINLMPI

SEQ ID NO: 21471 - protein, 469 aa, synthetic construct
  REGION 1..469: note = neuraminidase__InfluenzaA__AEX34235
MNPNQKIITIGSVSLTISTICFFMQIAILITTVTLHFKQYEFSSPPNNQVMLCEPAIIERNITEIVYLTNTTIEKEICPKLAEYRNWSKPQCDITGFAPFSKDNSIRLSAGGDIWVTREPYVSCDPDKCYQFALGQGTTLNNVHSNDTVHDRTPYRTLLMNELGVPFHLGTKQVCIAWSSSSCHDGKAWLHVCVTGDDKNATASFIYNGRLVDSIVSWSKEILRTQESECVCINGTCTVVMTDGSASGKADTKILFIEEGKIVHTSTLSGSAQHVEECSCYPRYPGVRCVCRDNWKGSNRPIVDINIKDYSIVSRYVCSGLVGDTPRKSDSSSSSHCLDPNNEEGGHGVKGWAFDDGNDVWMGRTISEKSRSGYETFKVIEGWSNPNSKLQINRQVIVDRGNRSGYSGIFSVEGKSCINRCFYVELIRGRKEETEVLWTSNSIVVFCGTSGTYGTGSWPDGADINLMPI

SEQ ID NO: 21472 - protein, 469 aa, synthetic construct
  REGION 1..469: note = neuraminidase__InfluenzaA__AEX34246
MNPNQKIITIGSVSLTISTICFFMQIAILITTVTLHFKQYEFNSPPNNQVMLCEPTIIERNITEIVYLTNTTIEKEICPKLAEYRNWSKPQCDITGFAPFSKDNSIRLSAGGDIWVTREPYVSCDPDKCYQFALGQGTTLNNVHSNDTVRGRTPYRTLLMNELGVPFHLGTKQVCIAWSSSSCHDGKAWLHVCITGDDKNATASFIYNGRLVDSIVSWSKEILRTQESECVCINGTCTVVMTDGSASGKADTKILFIEEGKIVHTSTLSGSAQHVEECSCYPRYPGVRCVCRDNWKGSNRPIVDINIKDHSIVSSYVCSGLVGDTPRKNDSSSSSHCLDPNNEEGGHGVKGWAFDDGNDVWMGRTISEKSRLGYETFKVIEGWSNPKSKLQVNRQVIVDRGNRSGYSGIFSVEGKSCINRCFYVELIRGRKEETEVLWTSNSIVVFCGTSGTYGTGSWPDGADINLMPI

SEQ ID NO: 21473 - protein, 469 aa, synthetic construct
  REGION 1..469: note = neuraminidase__InfluenzaA__AEX34257
MNPNQKIITIGSVSLTISTICFFMQIAILITTVTLHFKQYEFNSSPNNQVMLCEPTIIERNITEIVYLTNTTIEKEICPKLAEYRNWSKPQCDITGFAPFSKDNSIRLSAGGDIWVTREPYVSCDPDKCYQFALGQGTTLNNVHSNNTVRNRTPYRTLLMNELGVPFHLGTKQVCIAWSSSSCHDGKAWLHVCITGDDKNATASFIYNGRLVDSIVSWSKEILRTQESECVCINGTCTVVMTDGSASGKADTKILFIEEGKIVHTSTLSGSAQHVEECSCYPRYPGVRCVCRDNWKGSNRPIVDINIKDHSIVSSYVCSGLVGDTPRKNDSSSSSHCLDPNNEEGGHGVKGWAFDDGNDVWMGRTISEKSRLGYETFKVIEGWSNPKSKLQINRQVIVDRGNRSGYSGIFSVEGKSCINRCFYVELIRGRKEETEVLWTSNSIVVFCGTSGTYGTGSWPDGADINLMPI

SEQ ID NO: 21474 - protein, 469 aa, synthetic construct
  REGION 1..469: note = neuraminidase__InfluenzaA__AEX34268
MNPNKKIITIGSVSLTISTICFFMQIAILITTVTLHFKQYEFNSPPNNQVMLCEPTIIERNITEIVYLTNTTIEKEICPKLAEYRNWSKPQCDITGFAPFSKDNSIRLSAGGDIWVTREPYVSCDPDKCYQFALGQGTTLNNVHSNDTVRNRTPYRTLLMNELGVPFHLGTKQVCIAWSSSSCHDGKAWLHVCITGDDKNATASFIYNGRLVDSIVSWSKEILRTQESECVCINGTCTVVMTDGSASGKADTKILFIEEGKIVHTSKLSGSAQHVEECSCYPRYPGVRCVCRDNWKGSNRPIVDINIKDHSIVSSYVCSGLVGDTPRKNDSSSSSHCLDPNNEEGGHGVKGWAFDDGNDVWMGRTISEKSRLGYETFKVIEGWSNPKSKLQINRQVIVDRGNRSGYSGIFSVEGKSCINRCFYVELIRGRKEETEVLWTSNSIVVFCGTSGTYGTGSWPDGADINLMPI

SEQ ID NO: 21475 - protein, 469 aa, synthetic construct
  REGION 1..469: note = neuraminidase__InfluenzaA__AEX34278
MNPNQKIITIGSVSLTISTICFFMQIAILITTVTLHFKQYEFSSPPNNQVMLCEPAIIERNITEIVYLTNTTIEKEICPKLAEYRNWSKPQCDITGFAPFSKDNSIRLSAGGDIWVTREPYVSCDPDKCYQFALGQGTTLNNVHSNDTVHDRTPYRTLLMNELGVPFHLGTKQVCIAWSSSSCHDGKAWLHVCVTGDDKNATASFIYNGRLVDSIVSWSKEILRTQESECVCINGTCTVVMTDGSASGKADTKILFIEEGKIVHTSTLSGSAQHVEECSCYPRYPGVRCVCRDNWKGSNRPIVDINIKDYSIVSRYVCSGLVGDTPRKNDSSSSSHCLDPNNEKGGHGVKGWAFDDGNDVWMGRTISEKSRSGYETFKVIEGWSNPNSKLQINRQVIVDRGNRSGYSGIFSVEGKSCINRCFYVELIRGRKEETEVLWTSNSIVVFCGTSGTYGTGSWPDGADINLMPI

SEQ ID NO: 21476 - protein, 470 aa, synthetic construct
  REGION 1..470: note = neuraminidase__InfluenzaA__AEX34310
MNPNQKIITIGSISIAIGIISLMLQIGNIISIWASHSIQTGTQNHTGICNQRIITYENSTWVNHTYVNINNTNVVAGKDKTPVTLVGNSSLCSISGWAIYTKDNSIRIGSKGDVFVIREPFISCSHLECKTFFLTQGALLNDKHSNGTVKDRSPYRALMSCPLGEAPSPYNSKFESVAWSASACHDGIGWLTIGISGPDNGAVAVLKYKGIITGTIKSWKKQILRTQESECVCMNGSCFTIMTDGPSNGAASYKIFKIEKGKVTKSMELNAPNFHYEECSCYPDTGTVMCVCRDNWHGSNRPWVSFNQNLDYQIGYICSGVFGDNPRPKDREGSCNPVTVDGANGVKGFSYKYGNGVWIGRTKSNRIRKGFEMIWDPNGWTNTDSDFSVKQDIVAITDWSGYSGSFVQHPELTGLDCIRPCFWVELVRGLPGENTTIWTSGSSISFCGVNGDIANWSWPDGAELPFTIDK

SEQ ID NO: 21477 - protein, 470 aa, synthetic construct
  REGION 1..470: note = neuraminidase__InfluenzaA__AEX34321
MNPNQKIITIGSISIAIGIISLMLQIGNIISIWVSHSIQTGSQNNTGICNQRIITYENSTWVNHTYVNINNTNVVAGEDKTSVTLAGNSSLCSISGWAIYTKDNSIRIGSKGDVFVIREPFISCSHLECRTFFLTQGALLNDKHSNGTVKDRSPYRALMSCPLGEAPSPYNSKFESVAWSASACHDGMGWLTIGISGPDNGAVAVLKYNGIITGTIKSWKKQILRTQESECVCMNGSCFTIMTDGPSNKAASYKIFKIEKGKVTKSIELNAPNFYYEECSCYPDTGIVMCVCRDNWHGSNRPWVSFNQNLDYQIGYICSGVFGDNPRPEDGEGSCNPVTVDGANGVKGFSYKYGNGVWIGRTKSNRLRKGFEMIWDPNGWTNTDSDFSVKQDVVAITDWSGYSGSFVQHPELTGLDCIRPCFWVELVRGLPRENTTIWTSGSSISFCGVNSDTANWSWPDGAELPFTIDK

SEQ ID NO: 21478 - protein, 469 aa, synthetic construct; identical to SEQ ID NO: 16057
  REGION 1..469: note = neuraminidase__InfluenzaA__AEX34356

SEQ ID NO: 21479 - protein, 469 aa, synthetic construct
  REGION 1..469: note = neuraminidase__InfluenzaA__AEX34367
MNPNQKIITIGSVSLTISTICFFMQIAILITTVTLHFKQYEFNSPPNNQVMLCEPTIIERNITEIVYLTNTTIEKEICPKLAEYRNWSKPQCDITGFAPFSKDNSIRLSAGGDIWVTREPYVSCDPDKCYQFALGQGTTLNNVHSNDTVRDRTPYRTLLMNELGVPFHLGTKQVCIAWSSSSCHDGKAWLHVCITGDDKNATASFIYNGRLVDSIVSWSKEILRTQESECVCINGTCTVVMTDGSASGKADTKILFIEEGKIVHTSTLSGSAKHVEECSCYPRHPGVRCVCRDNWKGSNRPIVDINIKDHSIVSSYVCSGLVGDTPRKNDSSSSSHCLDPNNEEGGHGVKGWAFDDGNDVWMGRTISEKSRLGYETFKVIEGWSNPKSKLQINRQVIVDRGNRSGYSGIFSVEGKSCINRCFYVELIRGRKEETEVLWTSNSIVVFCGTSGTYGTGSWPDGADINLMPI

SEQ ID NO: 21480 - protein, 469 aa, synthetic construct
  REGION 1..469: note = neuraminidase__InfluenzaA__AEX34378
MNPNQKIITIGSVSLTISTICFFMQIAILITTVTLHFKQYEFNSPPNNQVMLCEPTIIERNITEIVYLTNTTIEKEICPNLAEYRNWSKPQCDITGFAPFSKDNSIRLSAGGDIWVTREPYVSCDPDKCYQFALGQGTTLNNVHSNDTVRDRTPYRTLLMNELGVPFHLGTKQVCIAWSSSSCHDGKAWLHVCITGDDKNATASFIYNGRLVDSIVSWSKEILRTQESECVCINGTCTVVMTDGSASGKADTKILFIEEGKIVHTSTLSGSAKHVEECSCYPRHPGVRCVCRDNWKGSNRPIVDINIKDHSIVSSYVCSGLVGDTPRKNDSSSSSHCLDPNNEEGGHGVKGWAFDDGNDVWMGRTISEKSRLGYETFKVIEGWSNPKSKLQINRQVIVDRGNRSGYSGIFSVEGKSCINRCFYVELIRGRKEETEVLWTSNSIVVFCGTSGTYGTGSWPDGADINLMPI

SEQ ID NO: 21481 - protein, 469 aa, synthetic construct
  REGION 1..469: note = neuraminidase__InfluenzaA__AEX34400
MNPNQKIITIGSVSLTISTICFFMQIAILITTVTLHFKQYEFNSPPNNQVMLCEPTIIERNITEIVYLTNTTIEKEICPKLAEYRNWSKPQCDITGFAPFSKDNSIRLSAGGDIWVTREPYVSCDPDKCYQFALGQGTTLNNVHSNDTVRGRTPYRTLLMNELGVPFHLGTKQVCIAWSSSSCHDGKAWLHVCITGDDKNATASFIYNGRLVDSVVSWSKEILRTQESECVCINGTCTVVMTDGSASGKADTKILFIKEGKIVHTSTLSGSAQHVEECSCYPRYPGVRCVCRDNWKGSNRPIVDINIKDHSIVSSYVCSGLVGDTPRKNDSSSSSHCLDPNNEEGGHGVKGWAFDDGNDVWMGRTISEKSRLGYETFKVIEGWSNPKSKLQINRQVIVDRGNRSGYSGIFSVEGKSCINRCFYVELIRGRKEETEVLWTSNSIVVFCGTSGTYGTGSWPDGADINLMPI

SEQ ID NO: 21482 - protein, 470 aa, synthetic construct
  REGION 1..470: note = neuraminidase__InfluenzaA__AEX34432
MNPNQKIITIGSISIAIGIISLILQIGNIISIWASHSIQTGSQNHTGICNQRIITYENSTWVNNTYVNINNTNVVVEKDKTSVTLAGNSSLCSISGWAIYTKDNSIRIGSKGDVFVIREPFISCSHLECRTFFLTQGALLNDKHSNGTVKDRSPYRALMSCPLGEAPSPYNSRFESVAWSASACHDGMGWLTIGISGPDNGAVAVLKYNGIITETIKSWKKRILRTQESECVCMNGSCFTIMTDGPSNGTASYKIFKIEKGKVTKTIELNAPNFHYEECSCYPDTGTVMCVCRDNWHGSNRPWVSFNQNLDYQIGYICSGVFGDNPRPKDGEGSCNPVTVDGADGVKGFSYKYGNGVWIGRTKSNRLRKGFEMIWDPNGWTNTDSDFSVKQDVVAITDWSGYSGSFVQHPELTGLDCIRPCFWVELVRGLPRENTTIWTSGSSISFCGVNSGTANWSWPDGAELPFTIDK

SEQ ID NO: 21483 - protein, 470 aa, synthetic construct; identical to SEQ ID NO: 21482
  REGION 1..470: note = neuraminidase__InfluenzaA__AEX34443

SEQ ID NO: 21484 - protein, 469 aa, synthetic construct; identical to SEQ ID NO: 16603
  REGION 1..469: note = neuraminidase__InfluenzaA__AEX34454

SEQ ID NO: 21485 - protein, 470 aa, synthetic construct
  REGION 1..470: note = neuraminidase__InfluenzaA__AEX34465
MNPNQKIITIGSISIAIGIISLMLQIGNIISIWASHSIQTGSQNHTGICNQRIITYENSTWVNHTYVNINNTNVVAGKDKTSVTLAGNSSLCSISGWAIYTKDNSIRIGSKGDVFVIREPFISCSHLECRTFFLTQGALLNDKHSNGTVKDRSPYRALMSCPLGEAPSPYNSKFESVAWSASACHDGMGWLTIGISGPDNGAVAVLKYNGIITETIKSWKKRILRTQESECVCVNGSCFTIMTDGPSNGAASYKIFKIEKGKVTKSIELNAPNFHYEECSCYPDTGTVMCVCRDNWHGSNRPWVSFNQNLDYQIGYICSGVFGDNPRPKDGEGSCNPVTVDGADGIKGFSYKYGNGVWIGRTKSNRLRKGFEMIWDPNGWTDTDSDFSVKQDVVAITDWSGYSGSFVQHPELTGLDCMRPCFWVELVRGLPRENTTIWTSGSSISFCGVNSDTANWSWPDGAELPFTIDK

SEQ ID NO: 21486 - protein, 470 aa, synthetic construct; identical to SEQ ID NO: 21439
  REGION 1..470: note = neuraminidase__InfluenzaA__AEX34476

SEQ ID NO: 21487 - protein, 470 aa, synthetic construct; identical to SEQ ID NO: 21441
  REGION 1..470: note = neuraminidase__InfluenzaA__AEX34487

SEQ ID NO: 21488 - protein, 470 aa, synthetic construct; identical to SEQ ID NO: 21441
  REGION 1..470: note = neuraminidase__InfluenzaA__AEX34498

SEQ ID NO: 21489 - protein, 470 aa, synthetic construct; identical to SEQ ID NO: 21441
  REGION 1..470: note = neuraminidase__InfluenzaA__AEX34509

SEQ ID NO: 21490 - protein, 470 aa, synthetic construct; identical to SEQ ID NO: 21441
  REGION 1..470: note = neuraminidase__InfluenzaA__AEX34520

SEQ ID NO: 21491 - protein, 470 aa, synthetic construct; identical to SEQ ID NO: 21441
  REGION 1..470: note = neuraminidase__InfluenzaA__AEX34531

SEQ ID NO: 21492 - protein, 470 aa, synthetic construct; identical to SEQ ID NO: 21441
  REGION 1..470: note = neuraminidase__InfluenzaA__AEX34542

SEQ ID NO: 21493 - protein, 470 aa, synthetic construct; identical to SEQ ID NO: 21441
  REGION 1..470: note = neuraminidase__InfluenzaA__AEX34553

SEQ ID NO: 21494 - protein, 470 aa, synthetic construct; identical to SEQ ID NO: 21441
  REGION 1..470: note = neuraminidase__InfluenzaA__AEX34564

SEQ ID NO: 21495 - protein, 470 aa, synthetic construct; identical to SEQ ID NO: 21441
  REGION 1..470: note = neuraminidase__InfluenzaA__AEX34575

SEQ ID NO: 21496 - protein, 470 aa, synthetic construct; identical to SEQ ID NO: 21441
  REGION 1..470: note = neuraminidase__InfluenzaA__AEX34586

SEQ ID NO: 21497 - protein, 470 aa, synthetic construct; identical to SEQ ID NO: 21441
  REGION 1..470: note = neuraminidase__InfluenzaA__AEX34597

SEQ ID NO: 21498 - protein, 470 aa, synthetic construct; identical to SEQ ID NO: 21441
  REGION 1..470: note = neuraminidase__InfluenzaA__AEX34608

SEQ ID NO: 21499 - protein, 470 aa, synthetic construct; identical to SEQ ID NO: 21441
  REGION 1..470: note = neuraminidase__InfluenzaA__AEX34619

SEQ ID NO: 21500 - protein, 470 aa, synthetic construct; identical to SEQ ID NO: 21441
  REGION 1..470: note = neuraminidase__InfluenzaA__AEX34630

SEQ ID NO: 21501 - protein, 470 aa, synthetic construct; identical to SEQ ID NO: 21441
  REGION 1..470: note = neuraminidase__InfluenzaA__AEX34641

SEQ ID NO: 21502 - protein, 470 aa, synthetic construct
  REGION 1..470: note = neuraminidase__InfluenzaA__AEX34653
MNPNQKIITIGSISIAIGIISLMLQVGNIISIWASHSIQTGSQNHTGICNQRIITYENSTWVNHTYVNINNTNVVAGKDKTSVALAGNSSLCSISGWAIYTKDNSIRIGSKGDVFVIREPFISCSHLECRTFFLTQGALLNDKHSNGTVKDRSPYRALMSCPLGEAPSPYNSKFESVAWSASACHDGLGWLTIGISGPDNGAVAVLKYNGIITETIKSWKKRILRTQESECVCVNGSCFTIMTDGPSNGAASYKIFKIEKGQVTKSVELNAPNFHYEECSCYPDTGTVMCVCRDNWHGSNRPWVSFNQDLDYQIGYICSGVFGDNPRPKDGKGSCNPVTVDGADGVKGFSYKYGNGVWIGRTKSNRLRKGFEMIWDPNGWTDTDSDFSVKQDVVAITDWSGYSGSFVQHPELTGLDCIRPCFWVELVRGLPRENTTIWTSGSSISFCGVDSDTANWSWPDGAELPFTIDK

SEQ ID NO: 21503 - protein, 470 aa, synthetic construct
  REGION 1..470: note = neuraminidase__InfluenzaA__AEX34664
MNPNQKIITIGSISIAIGIISLMLQIGNIISIWASHSIQTGSQNHTGICNQRIITYENSTWVNHTYVNINNTNVVAGKDKTSVTLAGNSSLCSISGWAIYTKDNSIRIGSKGDVFVIREPFISCSHLECRTFFLTQGALLNDKHSNGTVKDRSPYRALMSCPLGEAPSPYNSKFESVAWSASACHDGMGWLTIGISGPDNGAVAVLKYNGIITETIKSWKKRILRTQESECVCVNGSCFTIMTDGPSNGAASYKIFKIEKGKVTKSRELNAPNFHYEECSCYPDTGTVMCVCRDNWHGSNRPWVSFNQNLDYQIGYICSGVFGDNPRPKDGKGSCNPVTADGADGVKGFSYKYGNGVWIGRTKSNRLRKGFEMIWDPNGWTDTDSDFSVKQDVVAITDWSGYSGSFVQHPELTGLDCIRPCFWVELVRGLPRENTTIWTSGSSISFCGVDSDTANWSWPDGAELPFTIDK

SEQ ID NO: 21504 - protein, 470 aa, synthetic construct; identical to SEQ ID NO: 21482
  REGION 1..470: note = neuraminidase__InfluenzaA__AEX34686

SEQ ID NO: 21505 - protein, 470 aa, synthetic construct
  REGION 1..470: note = neuraminidase__InfluenzaA__AEX34760
MNPNQKIITIGSISIAIGIISLILQIGNIISIWASHSIQTGSQNHTGICNQRIITYENSTWVNNTYVNINNTNVVVEKDKTSVTLAGNSSLCSISGWAIYTKDNSIRIGSKGDVFVIREPFISCSHLECRTFFLTQGALLNDKHSNGTVKDRSPYRALMSCPLGEAPSPYNSRFESVAWSASACHDGMGWLTIGISGPDNGAVAVLKYNGIITETIKSWKKRILRTQESECVCMNGSCFTIMTDGPSNGAASYKIFKIEKGKVTKTIELNAPNFHYEECSCYPDTGTVMCVCRDNWHGSNRPWVSFNQNLDYQIGYICSGVFGDNPRPKDGEGSCNPVTVDGADGVKGFSYKYGNGVWIGRTKSNRLRKGFEMIWDPNGWTNTDSDFSVKQDVVAITDWSGYSGSFVQHPELTGLDCIRPCFWVELVRGLPRENTTIWTSGSSISFCGVNSGTVNWSWPDGAELPFTIDK

SEQ ID NO: 21506 - protein, 470 aa, synthetic construct
  REGION 1..470: note = neuraminidase__InfluenzaA__AEX34771
MNPNQKIITIGSISIAIGIISLILQIGNIISIWASHSIQTGSQNHTGICNQRIITYENSTWVNNTYVNINNTNVVVEKDKTSVTLAGNSSLCSISGWAIYTKDNSIRIGSKGDVFVIREPFISCSHLECRTFFLTQGALLNDKHSNGTVKDRSPYRALMSCPLGEAPSPYNSRFESVAWSASACHDGMGWLTIGISGPDNGAVAVLKYNGIITETIKSWKKRILRTQESECVCMNGSCFTIMTDGPSNGAASYKIFKIEKGKVTKTIELNAPNFHYEECSCYPDTGTVMCVCRDNWHGSNRPWVSFNQNLDYQIGYICSGVFGDNPRPKDGEGSCNPVTVDGADGVKGFSYKYGNGVWIGRTKSNRLRKGFEMIWDPNGWTNTDSDFSVKQDVVAITDWSGYSGSFVQHPELTGLDCIRPCFWVELVRGLPRENTTIWTSGSSISFCGVNSGTANWSWPDGAELPFTIDK

SEQ ID NO: 21507 - protein, 470 aa, synthetic construct; identical to SEQ ID NO: 17461
  REGION 1..470: note = neuraminidase__InfluenzaA__AEX34782

SEQ ID NO: 21508 - protein, 470 aa, synthetic construct
  REGION 1..470: note = neuraminidase__InfluenzaA__AEX34793
MNPNQKIITIGSISIAIGIISLMLQIGNIISIWASHSIQTGSQNHTGICNQRIITYENSTWVNHTYVNINNTNVVAGKDKTPVTLVGNSSLCSISGWAIYTKDNSIRIGSKGDVFVIREPFISCSHLECKTFFLTQGALLNDKHSNGTVKDRSPYRALMSCPLGEAPSPYNSKFESVAWSASACHDGIGWLTIGISGPDNGAVAVLKYKGIITGTIKSWKKQILRTQESECVCMNGSCFTIMTDGPSNGAASYKIFKIEKGKVTKSMELNAPNFHYEECSCYPDTGTVMCVCRDNWHGSNRPWVSFNQNLDYQIGYICSGVFGDNPRPKDREGSCNPVTVDGANGVKGFSYKYGNGVWIGRTKSNRIRKGFEMIWDPNGWTNTDSDFSVKQDIVAITDWSGYSGSFVQHPELTGLDCIRPCFWVELVRGLPRENTTIWTSGSSISFCGVNGDIANWSWPDGAELPFTIDK

SEQ ID NO: 21509 - protein, 470 aa, synthetic construct; identical to SEQ ID NO: 21508
  REGION 1..470: note = neuraminidase__InfluenzaA__AEX34804

SEQ ID NO: 21510 - protein, 470 aa, synthetic construct
  REGION 1..470: note = neuraminidase__InfluenzaA__AEX34815
MNPNQKIITIGSISIAIGIISLMLQIGNIISIWASHSIQTGSQNNTGICNQRIITYENSTWVNHTYVNINNTNVVAGEDKTSVTLTGNSSLCSISGWAIYTKDNSIRIGSKGDVFVIREPFISCSHLECRTFFLTQGALLNDKHSNGTVKDRSPYRALMSCPLGEAPSPYNSKFESVAWSASACHDGMGWLTIGISGPDNGAVAVLKYNGIITGTIKSWKKQILRTQESECVCMNGSCFTIMTDGPSNKAASYKIFKIEKGKVTKSIELNAPNFYYEECSCYPDTGIVMCVCRDNWHGSNRPWVSFNQNLDYQIGYICSGVFGDNPRPEDGEGSCNPVTVDGANGVKGFSYKYGNGVWIGRTKSNRLRKGFEMIWDPNGWTNTDSDFSVKQDVVAITDWSGYSGSFVQHPELTGLDCIRPCFWVELVRGLPRENTTIWTSGSSISFCGVNSDTANWSWPDGAELPFTIDK

SEQ ID NO: 21511 - protein, 470 aa, synthetic construct; identical to SEQ ID NO: 21508
  REGION 1..470: note = neuraminidase__InfluenzaA__AEX34826

SEQ ID NO: 21512 - protein, 470 aa, synthetic construct; identical to SEQ ID NO: 21508
  REGION 1..470: note = neuraminidase__InfluenzaA__AEX34837

SEQ ID NO: 21513 - protein, 470 aa, synthetic construct
  REGION 1..470: note = neuraminidase__InfluenzaA__AEX34859
MNPNQKIITIGSTSIAIGIISLMLQIGNIISIWASHSIQTGSQNHTGICNQRIITYENSTWVNHTYVNINNTNVVAGKDKTPVTLIGNSSLCSISGWAIYTKDNSIRIGSKGDVFVIREPFISCSHLECKTFFLTQGALLNDKHSNGTVKDRSPYRALMSCPLGEAPSPYNSKFESVAWSASACHDGIGWLTIGISGPDNGAVAVLKYKGIITGTIKSWKKQILRTQESECVCMNGSCFTIMTDGPSNGAASYKIFKIEKGKVTKSMELNAPNFHYEECSCYPDTGTVMCVCRDNWHGSNRPWVSFNQNLDYQIGYICSGVFGDNPRPKDREGSCNPVTVDGANGVKGFSYKYGNGVWIGRTKSNRIRKGFEMIWDPNGWTNTDSDFSVKQDIVAITDWSGYSGSFVQHPELTGLDCIRPCFWVELVRGLPRENTTIWTSGSSISFCGVNGDIANWSWPDGAELPFTIDK

SEQ ID NO: 21514 - protein, 470 aa, synthetic construct
  REGION 1..470: note = neuraminidase__InfluenzaA__AEX34870
MNPNQKIITIGSISIAIGIISLMLQIGNIISIWASHSIQTGSQNNTGICNQRIITYENSTWVNHTYVNINNTNVVAGEDKISVTLAGNSSLCSISGWAIYTKDNSIRIGSKGDVFVIREPFISCSHLECRTFFLTQGALLNDKHSNGTVKDRSPYRALMSCPLGEAPSPYNSKFESVAWSASACHDGIGWLTIGISGPDNGAVAVLKYNGIITGTIKSWKKQILRTQESECVCMNGSCFTIMTDGPSNKAASYKIFKIEKGKVTKSIELNAPNFYYEECSCYPDTGIVMCVCRDNWHGSNRPWVSFNQNLDYQIGYICSGVFGDNPRPEDGEGSCNPVTVDGANGVKGFSYKYGNGVWIGRTKSNRLRKGFEMIWDPNGWTNTDSDFSVKQDVVAITDWSGYSGSFVQHPELTGLDCIRPCFWVELVRGLPRENTTIWTSGSSISFCGVNSDTANWSWPDGAELPFTIDK

SEQ ID NO: 21515 - protein, 470 aa, synthetic construct
  REGION 1..470: note = neuraminidase__InfluenzaA__AEX34881
MNPNQKIITIGSISIAIGIISLMLQIGNIISIWASHSIQTGSQNHTGICNQRIITYENSTWVNHTYVNINNTNVVAGKDKAPVTLIGNSSLCSISGWAIYTKDNSIRIGSKGDVFVIREPFISCSHLECKTFFLTQGALLNDKHSNGTVKDRSPYRALMSCPLGEAPSPYNSKFESVAWSASACHDGIGWLTIGISGPDNGAVAVLKYKGIITGTIKSWKKQILRTQESECVCMNGSCFTIMTDGPSNGAASYKIFKIEKGKVTKSMELNAPNFHYEECSCYPDTGTVMCVCRDNWHGSNRPWVSFNQNLDYQIGYICSGVFGDNPRPKDREGSCNPVTVDGANGVKGFSYKYGNGVWIGRTKSNRIRKGFEMIWDPNGWTNTDSDFSVKQDIVAITDWSGYSGSFVQHPELTGLDCIRPCFWVELVRGLPRENTTIWTSGSSISFCGVNGDIANWSWPDGAELPFTIDK

SEQ ID NO: 21516 - protein, 470 aa, synthetic construct
  REGION 1..470: note = neuraminidase__InfluenzaA__AEX34892
MNPNQKIITIGSISIAIGIISLMLQIGNIISIWASHSIQTGSQNNTGICNQRIITYENSTWVNHTYVNINNTNVVAGEDKTSVTLAGNSSLCSISGWAIYTKDNSIRIGSKGDVFVIREPFISCSHLECRTFFLTQGALLNDKHSNGTVKDRSPYRALMSCPLGEAPSPYNSKFESVAWSASACHDGMGWLTIGISGPDNGAVAVLKYNGIITGTIKSWKKQILRTQESECVCMNGSCFTIMTDGPSNKAASYKIFKIEKGKVTKSIELNAPNFYYEECSCYPDTGIVMCVCRDNWHGSNRPWVSFNQNLDYQIGYICSGVFGDNPRPEDGEGSCNPVTVDGANGVKGFSYKYGNGVWIGRTKSNRLRKGFEMIWDPNGWTNTDSDFSVKQNVVAITDWSGYSGSFVQHPELTGLDCIRPCFWVELVRGLPRENTTIWTSGSSISFCGVNSDTANWSWPDGAELPFTIDK

SEQ ID NO: 21517 - protein, 470 aa, synthetic construct
  REGION 1..470: note = neuraminidase__InfluenzaA__AEX34903
MNPNQKIITIGSISIAIGIISLMLQIGNIISIWASRSIQTGSQNHTGICNQRIITYENSTWVNHTYVNINNTNVVAGKDKTPVTLVGNSSLCSISGWAIYTKDNSIRIGSKGDVFVIREPFISCSHLECKTFFLTQGALLNDKHSNGTVKDRSPYRALMSCPLGEAPSPYNSKFESVAWSASACHDGIGWLTIGISGPDNGAVAVLKYKGIITGTIKSWKKQILRTQESECVCMNGSCFTIMTDGPSNGAASYKIFKIEKGKVTKSMELNAPNFHYEECSCYPDTGTVMCVCRDNWHGSNRPWVSFNQNLDYQIGYICSGVFGDNPRPKDREGSCNPVTVDGANGVKGFSYKYGNGVWIGRTKSNRIRKGFEMIWDPNGWTNTDSDFSVRQDIVAITDWSGYSGSFVQHPELTGLDCIRPCFWVELVRGLPRENTTIWTSGSSISFCGVNGDIANWSWPDGAELPFTIDK

SEQ ID NO: 21518 - protein, 470 aa, synthetic construct; identical to SEQ ID NO: 17461
  REGION 1..470: note = neuraminidase__InfluenzaA__AEX34914

SEQ ID NO: 21519 - protein, 470 aa, synthetic construct; identical to SEQ ID NO: 17461
  REGION 1..470: note = neuraminidase__InfluenzaA__AEX34925

SEQ ID NO: 21520 - protein, 470 aa, synthetic construct; identical to SEQ ID NO: 17461
  REGION 1..470: note = neuraminidase__InfluenzaA__AEX34936

SEQ ID NO: 21521 - protein, 470 aa, synthetic construct; identical to SEQ ID NO: 17461
  REGION 1..470: note = neuraminidase__InfluenzaA__AEX34947

SEQ ID NO: 21522 - protein, 470 aa, synthetic construct; identical to SEQ ID NO: 17461
  REGION 1..470: note = neuraminidase__InfluenzaA__AEX34958

SEQ ID NO: 21523 - protein, 470 aa, synthetic construct; identical to SEQ ID NO: 17461
  REGION 1..470: note = neuraminidase__InfluenzaA__AEX34969

SEQ ID NO: 21524 - protein, 470 aa, synthetic construct; identical to SEQ ID NO: 17461
  REGION 1..470: note = neuraminidase__InfluenzaA__AEX34980

SEQ ID NO: 21525 - protein, 470 aa, synthetic construct; identical to SEQ ID NO: 17461
  REGION 1..470: note = neuraminidase__InfluenzaA__AEX34991

SEQ ID NO: 21526 - protein, 470 aa, synthetic construct
  REGION 1..470: note = neuraminidase__InfluenzaA__AEX35002
MNPNQKIITIGSISIAIGIISLMLQIGNIISIWASHSIQTGSQNHTGICNQRIITYENSTWVNHTYVNINNTNVVAGKDKTPVTLIGNSSLCSISGWAIYTKDNSIRIGSKGDVFVIREPFISCSHLECKTFFLTQGALLNDKHSNGTVKDRSPYRALMSCPLGEAPSPYNSKFESVAWSASACHDGIGWLTIGISGPDNGAVAVLKYKGIITGTIKSWKKQILRTQESECVCMNGSCFTIMTDGPSNGAASYKIFKIEKGKVTKSMELNAPNFHYEECSCYPDTGTVMCVCRDNWHGSNRPWVSFNQNLDYQIGYICSGVFGDNPRPKDREGSCNPVTVDGANGVKGFSYKYGNGVWIGRTKSNRIRKGFEMIWDPNGWTNTDSDFSVKQDIVAITDWSGYSGSFVQHPELTGLDCIRPCFWVELVRGLPRENTTIWTSGSSISFCGVNGDIANWSWPDGAELPFTIDK

SEQ ID NO: 21527 - protein, 470 aa, synthetic construct; identical to SEQ ID NO: 17461
  REGION 1..470: note = neuraminidase__InfluenzaA__AEX35013

SEQ ID NO: 21528 - protein, 470 aa, synthetic construct; identical to SEQ ID NO: 17461
  REGION 1..470: note = neuraminidase__InfluenzaA__AEX35024

SEQ ID NO: 21529 - protein, 470 aa, synthetic construct; identical to SEQ ID NO: 17461
  REGION 1..470: note = neuraminidase__InfluenzaA__AEX35035

SEQ ID NO: 21530 - protein, 470 aa, synthetic construct; identical to SEQ ID NO: 17461
  REGION 1..470: note = neuraminidase__InfluenzaA__AEX35046

SEQ ID NO: 21531 - protein, 470 aa, synthetic construct; identical to SEQ ID NO: 17461
  REGION 1..470: note = neuraminidase__InfluenzaA__AEX35057

SEQ ID NO: 21532 - protein, 470 aa, synthetic construct; identical to SEQ ID NO: 17461
  REGION 1..470: note = neuraminidase__InfluenzaA__AEX35068

SEQ ID NO: 21533 - protein, 470 aa, synthetic construct
  REGION 1..470: note = neuraminidase__InfluenzaA__AEX35079
MNPNQKIITIGSISIAIGIISLMLQIGNIISMWASHSIQTGSQNNTGICNQRIITYENSTWVNHTYVNINNTNVVAGEDKTSVTLAGNSSLCSISGWAIYTKDNSIRIGSKGDVFVIREPFISCSHLECRTFFLTQGALLNDKHSNGTVKDRSPYRALMSCPLGEAPSPYNSKFESVAWSASACHDGMGWLTIGISGPDNGAVAVLKYNGIITGTIKSWKKQILRTQESECVCMNGSCFTIMTDGPSNKAASYKIFKIEKGKVTKSIELNAPNFYYEECSCYPDTGIVMCVCRDNWHGSNRPWVSFNQDLDYQIGYICSGVFGDNPRPEDGEGSCNPVTVDGANGVKGFSYKYGNGVWIGRTKSNRLRKGFEMIWDPNGWTNTDSDFSVKQDVVAITDWSGYSGSFVQHPELTGLDCIRPCFWVELVRGLPRENTTIWTSGSSISFCGVNSDTANWSWPDGAELPFTIDK

SEQ ID NO: 21534 - protein, 470 aa, synthetic construct; identical to SEQ ID NO: 21508
  REGION 1..470: note = neuraminidase__InfluenzaA__AEX35090

SEQ ID NO: 21535 - protein, 470 aa, synthetic construct
  REGION 1..470: note = neuraminidase__InfluenzaA__AEX35101
MNPNQKIITIGSISIAIGIISLMLQIGNIISIWASHSIQTGSQNNTGICNQRIITYENSTWVNHTYVNINNTNVVAGEDKTSVTLAGNSSLCSISGWAIYTKDNSIRIGSKGDVFVIREPFISCSHLECRTFFLTQGALLNDKHSNGTVKDRSPYRALMSCPLGEAPSPYNSKFESVAWSASACHDGMGWLTIGISGPDNGAVAVLKYNGIITGTIKSWKKQILRTQESECVCMNGSCFTIMTDGPSNKAASYKIFKIEKGKVTKSIELNAPNFHYEECSCYPDTGIVMCVCRDNWHGSNRPWVSFNQNLDYQIGYICSGVFGDNPRPEDGEGSCNPVTVDGANGVKGFSYKYDNGVWIGRTKSNRLRKGFEMIWDPNGWTNTDSVFSVKQDVVAITDWSGYSGSFVQHPELTGLDCIRPCFWVELVRGLPRENTTIWTSGSSISFCGVNSDTANWSWPDGAELPFTIDK

SEQ ID NO: 21536 - protein, 470 aa, synthetic construct
  REGION 1..470: note = neuraminidase__InfluenzaA__AEX35112
MNPNQKIITIGSISIAIGIISLMLQIGNIISIWASHSIQTGSQNNTGICNQRIITYENSTWVNHTYVNINNTNVVAGEDKTSVTLAGNSSLCSISGWAIYTKDNSIRIGSKGDVFVIREPFISCSHLECRTFFLTQGALLNDKHSNGTVKDRSPYRALMSCPLGEAPSPYNSKFESVAWSASACHDGMGWLTIGISGPDNGAVAVLKYNGIITGTIKSWKKQILRTQESECVCMNGSCFTIMTDGPSNKAASYKIFKIEKGKVTKSIELNASNFYYEECSCYPDTGIVMCVCRDNWHGSNRPWVSFNQNLDYQIGYICSGVFGDNPRPEDGEGSCNPVTVDGANGVKGFSYKYGNGVWIGRTKSNRLRKGFEMIWDPNGWTNTDSDFSVKQDVVAITDWSGYSGSFVQHPELTGLDCIRPCFWVELVRGLPRENTTIWTSGSSISFCGVNSDTANWSWPDGAELPFTIDK

SEQ ID NO: 21537 - protein, 470 aa, synthetic construct; identical to SEQ ID NO: 17461
  REGION 1..470: note = neuraminidase__InfluenzaA__AEX35123

SEQ ID NO: 21538 - protein, 470 aa, synthetic construct
  REGION 1..470: note = neuraminidase__InfluenzaA__AEX35145
MNPNQKIITIGSISIAIGIISLMLQIGNIISIWASHSIQTGSQNNTGICNQRIITYENSTWVNHTYVNINNTNVVAGEDKTSVTLAGNSSLCSISGWAIYTKDNSIRIGSKGDVFVIREPFISCSHLECRTFFLTQGALLNDKHSNGTVKDRSPYRALMSCPLGEAPSPYNSKFESVAWSASACHDGMGWLTIGISGPDNGAVAVLKYNGIITGTIKSWKKQILRTQESECVCMNGSCFTIMTDGPSNKAASYKIFKIEKGKVTKSIELNAPNFYYEECSCYPDTGIVMCVCRDNWHGSNRPWVSFNQNLDYQIGYICSGVFGDNPRPEDGEGSCNPVTVDGANGVKGFSYKYGNGVWIGRTKSNRLRKGFEMIWDPNGWTNTDSDFSVKQDIVAITDWSGYSGSFVQHPELTGLDCIRPCFWVELVRGLPRENTTIWTSGSSISFCGVNSDTANWSWPDGAELPFTIDK

SEQ ID NO: 21539 - protein, 470 aa, synthetic construct; identical to SEQ ID NO: 21508
  REGION 1..470: note = neuraminidase__InfluenzaA__AEX35156

SEQ ID NO: 21540 - protein, 470 aa, synthetic construct; identical to SEQ ID NO: 17461
  REGION 1..470: note = neuraminidase__InfluenzaA__AEX35167

SEQ ID NO: 21541 - protein, 470 aa, synthetic construct
  REGION 1..470: note = neuraminidase__InfluenzaA__AEX35178
MNPNQKIITIGSISIAIGIISLMLQIGNIISIWASHSIQTGSQNHTGICNQRIITYENSTWVNHTYVNINNTNVVAGKDKTSVTLAGNSSLCSISGWAIYTKDNSIRIGSKGDVFVIREPFISCSHLECRTFFLTQGALLNDKHSNGTVKDRSPYRALMSCPLGEAPSPYNSKFESVAWSASACHDGMGWLTIGISGPDNGAVAVLKYNGIITETIKSWKERILRTQESECVCVNGSCFTIMTDGPSNGAASYKIFKIEKGKVTKSRELNAPNFHYEECSCYPDTGTVMCVCRDNWHGSNRPWVSFNQNLDYQIGYICSGVFGDNPRPKDGKGSCNPVTADGADGVKGFSYKYGNGVWIGRTKSNRLRKGFEMIWDPNGWTDTDSDFSVKQDVVAITDWSGYSGSFVQHPELTGLDCIRPCFWVELVRGLPRENTTIWTSGSSISFCGVDSDTANWSWPDGAELPFTIDK

SEQ ID NO: 21542 - protein, 470 aa, synthetic construct; identical to SEQ ID NO: 21482
  REGION 1..470: note = neuraminidase__InfluenzaA__AEX35189

SEQ ID NO: 21543 - protein, 470 aa, synthetic construct; identical to SEQ ID NO: 21482
  REGION 1..470: note = neuraminidase__InfluenzaA__AEX35200

SEQ ID NO: 21544 - protein, 470 aa, synthetic construct; identical to SEQ ID NO: 17461
  REGION 1..470: note = neuraminidase__InfluenzaA__AEX35211

SEQ ID NO: 21545 - protein, 469 aa, synthetic construct
  REGION 1..469: note = neuraminidase__InfluenzaA__AEX35222
MNPNQKIITIGSVSLTISTICFFMQIAILVTTVTLHFKQYECNSPPNNQVMLCEPTIIERNITEIVYLTNTTIEKEICPKLAEYRNWSKPQCNITGFAPFSKDNSIRLSAGGDIWVTREPYVSCDPDKCYQFALGQGTTLNNGHSNDTVHDRTPYRTLLMNELGVPFHLGTKQVCIAWSSSSCHDGKAWLHVCVTGDDENATASFIYNGRLVDSIGSWSKKILRTQESECVCINGTCTVVMTDGSASGKADTKILFIEEGKIVHTSTLSGSAQHVEECSCYPRYPGVRCVCRDNWKGSNRPIVDINIKDYSIVSSYVCSGLVGDTPRKNDSSSSSHCLDPNNEEGGHGVKGWAFDDGNDVWMGRTISEKLRSGYETFKVIEGWSKPNSKLQINRQVIVDRGNRSGYSGIFSVEGKSCINRCFYVELIRGRKQETEVLWTSNSIVVFCGTSGTYGTGSWPDGADINLMPI

SEQ ID NO: 21546 - protein, 470 aa, synthetic construct; identical to SEQ ID NO: 21441
  REGION 1..470: note = neuraminidase__InfluenzaA__AEX35233

SEQ ID NO: 21547 - protein, 469 aa, synthetic construct
  REGION 1..469: note = neuraminidase__InfluenzaA__AEX35244
MNPNQKIITIGSVSLTISTICFFMQIAILINTVTLHFKQYEFNSPPNNQVMLCEPTIIERNITEIVYLTNTTIEKEICPKLAEYRNWSKPQCNITGFAPFSKDNSIRLSAGGDIWVTREPYVSCDPDKCYQFALGQGTTLNNVHSNDTVHDRTPYRTLLMNELGVPFHLGTKQVCIAWSSSSCHDGKAWLHVCVTGDDKNATASFIYNGRLVDSIVSWSKKILRTQESECVCINGTCTVVMTDGSASGKADTKILFIEEGKIVHTSTLSGSAQHVEECSCYPRYPGVRCVCRDNWKGSNRPIVDINIKDYSIVSSYVCSGLVGDTPRKNDSSSSSHCLDPNNEEGGNGVKGWAFDDGNDVWMGRTISEKLRSGYETFKVIEGWSNPNSKLQINRQVIVDRGNRSGYSGIFSVEGKSCINRCFYVELIRGRKQENEVLWTSNSIVVFCGTSGTYGTGSWPDGADINLMPV

SEQ ID NO: 21548 - protein, 469 aa, synthetic construct; identical to SEQ ID NO: 15929
  REGION 1..469: note = neuraminidase__InfluenzaA__AEX35255

SEQ ID NO: 21549 - protein, 470 aa, synthetic construct; identical to SEQ ID NO: 21441
  REGION 1..470: note = neuraminidase__InfluenzaA__AEX35266

SEQ ID NO: 21550 - protein, 470 aa, synthetic construct; identical to SEQ ID NO: 21441
  REGION 1..470: note = neuraminidase__InfluenzaA__AEX35277

SEQ ID NO: 21551 - protein, 469 aa, synthetic construct
  REGION 1..469: note = neuraminidase__InfluenzaA__AEX35288
MNPNQKIITIGSVSLTISTICFFMQIAILITTVTLHFKQYEFNSPPNNQVMLCEPTIIERNITEIVYLTNTTIEKEICPKLAEYRNWSKPQCDITGFAPFSKDNSIRLSAGGDIWVTREPYVSCDPDKCYQFALGQGTTLNNVHSNDTVHNRTPYRTLLMNELGVPFHLGTKQVCIAWSSSSCHDGKAWLHVCVTGDDKNATASFIYNGRLVDSIVSWSKKILRTQESECVCINGTCTVVMTDGSASGKADTKILFIEEGKIVHTSTLSGSAQHVEECSCYPRYPGVRCVCRDNWKGSNRPIVDINIKDYSIVSSYVCSGLVGDTPRKNDSSSSSHCLDPNNEEGGHGVKGWAFDDGNDVWMGRTISEKLRSGYETFKVIEGWSNPNSKLQINRQVIVDRGNRSGYSGIFSVEGKSCINRCFYVELIRGRKEETEVLWTSNSIVVFCGTSGTYGTGSWPDGADINLMPI

SEQ ID NO: 21552 - protein, 469 aa, synthetic construct; identical to SEQ ID NO: 14714
  REGION 1..469: note = neuraminidase__InfluenzaA__AEX35299

SEQ ID NO: 21553 - protein, 469 aa, synthetic construct
  REGION 1..469: note = neuraminidase__InfluenzaA__AEX35310
MNPNQKIITIGSVSLTISTICFFMQIAILITTVTLHFKQYEFNSPPNNQVMLCEPTIIERNITEIVYLTNTTIEKEICPKLAEYRNWSKPQCNITGFAPFSKDNSIRLSAGGDIWVTREPYVSCDPDKCYQFALGQGTTLNNVHSNDTVHDRTPYRTLLMNELGVPFHLGTKQVCIAWSSSSCHDGKAWLHVCVTGDDENATASFIYNGRLVDSIVSWSKKILRTQESECVCINGTCTVVMTDGSASGKADTKILFIEEGKIVHTSTLSGSAQHVEECSCYPRYPGVRCVCRDNWKGSNRPIVDINIKDYSIVSSYVCSGLVGDTPRKNDSSSSSHCLDPNNEEGGHGVKGWAFDDGDDVWMGRTISEKLRSGYETFKVIEGWSNPNSKLQINRQVIVDRGNRSGYSGIFSVEGKSCINRCFYVELIRGRNQETEVLWTSNSIVVFCGTSGTYGTGSWPDGADINLMPI

SEQ ID NO: 21554 - protein, 469 aa, synthetic construct; identical to SEQ ID NO: 14714
  REGION 1..469: note = neuraminidase__InfluenzaA__AEX35321

SEQ ID NO: 21555 - protein, 469 aa, synthetic construct; identical to SEQ ID NO: 15929
  REGION 1..469: note = neuraminidase__InfluenzaA__AEX35332

SEQ ID NO: 21556 - protein, 469 aa, synthetic construct; identical to SEQ ID NO: 15929
  REGION 1..469: note = neuraminidase__InfluenzaA__AEX35343

SEQ ID NO: 21557 - protein, 469 aa, synthetic construct
  REGION 1..469: note = neuraminidase__InfluenzaA__AEX35354
MNPNQKIITIGSVSLTISTICFFMQIAILITTVTLHFKQYEFNSPPNNQVMLCEPTIIERNITEIVYLTNTTIEKEICPKLAEYRNWSKPQCDITGFAPFSKDNSIRLSAGGDIWVTREPYVSCDPDKCYQFALGQGTTLNNVHSNDTVHDRTPYRTLLMNELGVPFHLGTKQVCIAWSSSSCHDGKAWLHVCVTGDDKNATASFIYNGRLVDSIVSWSKKILRTQESECVCINGTCTVVMTDGSTSGKADTKILFIEEGKIVHTSTLSGSAQHVEECSCYPRYPGVRCVCRDNWKGSNRPIVDINIKDYSIVSSYVCSGLVGDTPRKNDSSSSSHCLDPNNEEGGHGVKGWAFDDGNDVWMGRTISEKLRSGYETFKVIEGWSNPNSKLQINRQVIVDRGNRSGYSGIFSVEGKSCINRCFYVELIRGRKEETEVLWTSNSIVVFCGTSGTYGTGSWPDGADINLMPI

SEQ ID NO: 21558 - protein, 469 aa, synthetic construct; identical to SEQ ID NO: 14714
  REGION 1..469: note = neuraminidase__InfluenzaA__AEX35365

SEQ ID NO: 21559 - protein, 469 aa, synthetic construct
  REGION 1..469: note = neuraminidase__InfluenzaA__AEX35376
MNPNQKIITIGSVSLTISTICFFMQIAILITTVTLHFKQYEFNSPPNNQVMLCEPTIIERNITEIVYLTNTTIEKEICPKLAEYRNWSKPQCDITGFAPFSKDNSIRLSAGGDIWVTREPYVSCDPDKCYQFALGQGTTLNNVHSNDTVHERTPYRTLLMNELGVPFHLGTKQVCIAWSSSSCHDGKAWLHVCVTGDDKNATASFIYNGRLVDSIVSWSKKILRTQESECVCINGTCTVVMTDGSASGKADTKILFIEEGKIVHTSTLSGSAQHVEECSCYPRYPGVRCVCRDNWKGSNRPIVDINIKDYSIVSSYVCSGLVGDTPRKNDSSSSSHCLDPNNEEGGHGVKGWAFDDGNDVWMGRTISEKLRSGYETFKVIEGWSNPNSKLQINRQVIVDRGNRSGYSGIFSVEGKSCINRCFYVELIRGRKEETEVLWTSNSIVVFCGTSGTYGTGSWPDGADINLMPI

SEQ ID NO: 21560 - protein, 469 aa, synthetic construct; identical to SEQ ID NO: 14714
  REGION 1..469: note = neuraminidase__InfluenzaA__AEX35387

SEQ ID NO: 21561 - protein, 469 aa, synthetic construct
  REGION 1..469: note = neuraminidase__InfluenzaA__AEX35398
MNPNQKIITIGSVSLTISTICFFMQIAILITTVTLHFKQYEFNSPPNNQVMLCEPTIIERNITEIVYLTNTTIEKEICPKLAEYRNWSKPQCDITGFAPFSKDNSIRLSAGGDIWVTREPYVSCDPDKCYQFALGQGTTLNNVHSNDTVHDRTPYRTLLMNELGVPFHLGTKQVCIAWSSSSCHDGKAWLHVCVTGDDKNATASFIYNGRLVDSIVSWSKKILRTQESECVCINGTCAVVMTDGSASGKADTKILFIEEGKIVHTSTLSGSAQHVEECSCYPRYPGVRCVCRDNWKGSNRPIVDINIKDYSIVSSYVCSGLVGDTPRKNDSSSSSHCLDPNNEEGGHGVKGWAFDDGNDVWMGRTISEKLRSGYETFKVIEGWSNPNSKLQINRQVIVDRGNRSGYSGIFSVEGKSCINRCFYVELIRGRKEETEVLWTSNSIVVFCGTSGTYGTGSWPDGADINLMPI

SEQ ID NO: 21562 - protein, 469 aa, synthetic construct; identical to SEQ ID NO: 14714
  REGION 1..469: note = neuraminidase__InfluenzaA__AEX35409

SEQ ID NO: 21563 - protein, 469 aa, synthetic construct; identical to SEQ ID NO: 21551
  REGION 1..469: note = neuraminidase__InfluenzaA__AEX35420

SEQ ID NO: 21564 - protein, 469 aa, synthetic construct
  REGION 1..469: note = neuraminidase__InfluenzaA__AEX35431
MNPNQKIITIGSVSLTISTICFFMQIAILITTVTLHFKQYEFNSPPNNQVMLCEPTIIERNITEIVYLTNTTIEKEICPKLAEYRNWSKPQCNITGFAPFSKDNSIRLSAGGDIWVTREPYVSCDPDKCYQFALGQGTTLNNVHSNDTVHDRTPYRTLLMNELGVPFHLGTKQVCIAWSSSSCHDGKAWLHVCVTGDDENATASFIYNGRLVDSIVSWSKKILRTQESECVCINGTCTVVMTDGSASGKADTKILFIEEGKIVHTSTLSGSAQHVEECSCYPRYPGVRCVCRDNWKGSNRPIVDINIKDYSIVSSYVCSGLVGDTPRKNDSSSSSHCLDPNNEEGGHGVKGWAFDDGNDVWMGRTISEKLRSGYETFKVIEGWSNPNSKLQINRQVIVDRGNRSGYSGIFSVEGKSCINRCFYVELIRGRKKETEVLWTSNSIVVFCGTSGTYGTGSWPDGADINLMPI

SEQ ID NO: 21565 - protein, 469 aa, synthetic construct; identical to SEQ ID NO: 14712
  REGION 1..469: note = neuraminidase__InfluenzaA__AEX35453

SEQ ID NO: 21566 - protein, 469 aa, synthetic construct; identical to SEQ ID NO: 14712
  REGION 1..469: note = neuraminidase__InfluenzaA__AEX35464

SEQ ID NO: 21567 - protein, 469 aa, synthetic construct; identical to SEQ ID NO: 14712
  REGION 1..469: note = neuraminidase__InfluenzaA__AEX35475

SEQ ID NO: 21568 - protein, 469 aa, synthetic construct; identical to SEQ ID NO: 14712
  REGION 1..469: note = neuraminidase__InfluenzaA__AEX35486

SEQ ID NO: 21569 - protein, 469 aa, synthetic construct
  REGION 1..469: note = neuraminidase__InfluenzaA__AEX35497
MNPNQKIITIGSVSLTISTICFFMQIAILITTVTLHFKQYEFNSPPNNQVMLCEPTIIERNITEIVYLTNTTIEKEKCPKLAEYRNWSKPQCNITGFAPFSKDNSIRLSAGGDIWVTREPYVSCDPDKCYQFALGQGTTLNNVHSNDTVHDRTPYRTLLMNELGVPFHLGTKQVCIAWSSSSCHDGKAWLHVCVTGDDKNATASFIYNGRLVDSIVSWSKEILRTQESECVCINGTCTVVMTDGSASGKADTKILFIEEGKIVHTSTLSGSAQHVEECSCYPRYPGVRCVCRDNWKGSNRPIVDINIKDYSIVSSYVCSGLVGDTPRKNDSSSSSHCLDPNNEEGGHGVKGWAFDDGNDVWMGRTISEKLRSGYETFKVIEGWSNPNSKLQINRQVIVDRGNRSGYSGIFSVEGKSCINRCFYVELIRGRKEETEVLWTSNSIVVFCGTSGTYGTGSWPDGADINLMPI

SEQ ID NO: 21570 - protein, 469 aa, synthetic construct; identical to SEQ ID NO: 14712
  REGION 1..469: note = neuraminidase__InfluenzaA__AEX35508

SEQ ID NO: 21571 - protein, 469 aa, synthetic construct; identical to SEQ ID NO: 21569
  REGION 1..469: note = neuraminidase__InfluenzaA__AEX35519

SEQ ID NO: 21572 - protein, 469 aa, synthetic construct
  REGION 1..469: note = neuraminidase__InfluenzaA__AEX35530
MNPNQKIITIGSVSLTISTICFFMQIAILITTVTLHFKQYEFNSPPNNQVMQCEPTIIERNITEIVYLTNTTIEKEICPKLAEYRNWSKPQCDITGFAPFSKDNSIRLSAGGDIWVTREPYVSCDPDKCYQFALGQGTTLNNVHSNDTVHDRTPYRTLLMNELGVPFHLGTKQVCIAWSSSSCHDGKAWLHVCVTGDDKNATASFIYNGRLVDSIVSWSKEILRTQESECVCINGTCTVVMTDGSASGKADTKILFIEEGKIVHTSTLSGSAQHVEECSCYPRYPGVRCVCRDNWKGSNRPIVDINTKDYSIVSSYVCSGLVGDTPRKNDSSSSSHCLNPNNEEGGHGVKGWAFDDGNDVWMGRTISEKLRLGYETFKVIEGWSNPNSKLQINRQVIVDRGNRSGYSGIFSVEGKSCINRCFYVELIRGRKEETEVLWTSNSIVVFCGTSGTYGTGSWPDGADINLMPI

SEQ ID NO: 21573 - protein, 469 aa, synthetic construct; identical to SEQ ID NO: 14712
  REGION 1..469: note = neuraminidase__InfluenzaA__AEX35541

SEQ ID NO: 21574 - protein, 469 aa, synthetic construct
  REGION 1..469: note = neuraminidase__InfluenzaA__AEX35552
MNPNQKIITIGSASLTISTICFFMQIAILITTVTLHFKQYEFNPPPNNQAMLCEPTIIERNITEIVYLTNTTIEKEICPKLAEYRNWSKPQCDITGFAPFSKDNSIRLSAGGDIWVTREPYVSCDPDKCYQFALGQGTTLNNVHSNDTVHDRTPYRTLLMNELGVPFHLGTKQVCIAWSSSSCHDGKAWLHVCVTGDDKNATASFIYNGRLVDSIVSWSKEILRTQESECVCINGTCTVVMTDGSASGKADTKILFIEEGKIVHTSTLSGSAQHVEECSCYPRYPGVRCVCRDNWKGSNRPIVDINIKDYSIASSYVCSGLVGDTPRKNDSSSSSHCLDPNNEEGGHGVKGWAFDDGNDVWMGRTISEKLRSGYETFKVIEGWSNPNSKLQINRQVIVDRGNRSGYSGIFSVEGKSCINRCFYVELIRGRKEETEVLWTSNSIVVFCGTSGTYGTGSWPDGADINLMPI

SEQ ID NO: 21575 - protein, 469 aa, synthetic construct
  REGION 1..469: note = neuraminidase__InfluenzaA__AEX35563
MNPNQKIITIGSVSLTISTICFFMQIAILITTVTLHFKQYEFNSPPNNQVMLCEPTIIERNITEIVYLTNTTIEKEICPKLAEYRNWSKPQCDITGFAPFSKDNSIRLSAGGDIWVTREPYVSCDPDKCYQFALGQGTTLNNVHSNDTVHDRTPYRTLLMNELGVPFHLGTKQVCIAWSSSSCHDGKAWLHVCVTGDDKNATASFIYNGRLVDSIVSWSKEILRTQESECVCINGTCTVVMTDGSASGKADTKILFIEEGKIVHTSTLSGSAQHVEECSCYPRYPGVRCVCRDNWKGSNRPIVDINIKDYSIVSSYVCSGLVGDTPRKNDSSSSSHCLNPNNEEGGHGVKGWAFDDGNDVWMGRTISEKLRLGYETFKVIEGWSNPNSKLQINRQVIVDRGNRSGYSGIFSVEGKSCINRCFYVELIRGRKEETEVLWTSNSIVVFCGTSGTYGTGSWPDGADINLMPI

SEQ ID NO: 21576 - protein, 469 aa, synthetic construct; identical to SEQ ID NO: 21456
  REGION 1..469: note = neuraminidase__InfluenzaA__AEX35585

SEQ ID NO: 21577 - protein, 469 aa, synthetic construct
  REGION 1..469: note = neuraminidase__InfluenzaA__AEX35596
MNPNQKIITIGSVSLTISTICFFMQIAILITTVTLHFKQYEFNSPPNNQVMLCEPTIIERNITEIVYLTNTTIEKEICPKLAEYRNWSKPQCNITGFAPFSKDNSIRLSAGGDIWVTREPYVSCDPDKCYQFALGQGTTLNNVHSNDTVHDRTPYRTLLMNELGVPFHLGTKQVCIAWSSSSCHDGKAWLHVCVTGDDKNATASFIYNGRLVDSIVSWSKEILRTQESECVCINGTCTVVMTDGSASGKADTKILFIEEGKIVHTSTLSGSAQHVEECSCYPRYPGVRCVCRDNWKGSNRPIVDINIKDYSIVSSYVCSGLVGDTPRKNDSSSSSHCLDPNNEEGGHGVKGWAFDDGNDVWMGRTISEKLRSGYETFKVIEGWSNPDSKLQINRQVIVDRGNRSGYSGIFSVEGKSCINRCFYVELIRGRKEETEVLWTSNSIVVFCGTSGTYGTGSWPDGADINLMPI

SEQ ID NO: 21578 - protein, 469 aa, synthetic construct; identical to SEQ ID NO: 14712
  REGION 1..469: note = neuraminidase__InfluenzaA__AEX35607

SEQ ID NO: 21579 - protein, 469 aa, synthetic construct
  REGION 1..469: note = neuraminidase__InfluenzaA__AEX35618
MNPNQKIITIGSVSLTISTICFFMQIAILITTVTLHFKQYELNSPPNNQVMLCEPTIIERNITEIVYLTNTTIEKETCPKLAEYRNWSKPQCYITGFAPFSKDNSIRLSAGGDIWVTREPYVSCDPDKCYQFALGQGTTLNNVHSNDTVRDRTPYRTLLMNELGVPFHLGTKQVCIAWSSSSCHDGKAWLHVCITGDDKNATASFIYNGRLVDSIVSWSKEILRTQESECVCINGTCTVVMTDGSASGKADTKILFIEEGKIVHTSTLSGSAQHVEECSCYPRYPGVRCVCRDNWKGSNRPIVDINIKDHSIVSSYVCSGLVGDTPRKNDSSSSSHCLDPNNEEGGHGVKGWAFDDGNDVWMGRTISEKSRLGYETFKVIEGWSNPKSKLQINRQVIVDRDNRSGYSGIFSVEGKSCINRCFYVELIRGRKEETEVLWTSNSIVVFCGTSGTYGTGSWPDGADINLMPI

SEQ ID NO: 21580 - protein, 469 aa, synthetic construct
  REGION 1..469: note = neuraminidase__InfluenzaA__AEX35640
MNPNQKIITIGSVSLTISTICFFMQIAILITTVTLHFKQYEFNSPPNNQVMLCEPTIIERNITEIVYLTNTTIEKEICPKLAEYRKWSKPQCNITGFAPFSKDNSIRLSAGGDIWVTREPYVSCDPDKCYQFALGQGTTLNNVHSNDTVRDRTPYRTLLMNELGVPFHLGTKQVCIAWSSSSCHDGKAWLHVCVTGDNKNATASFIYNGRLVDSIVSWSKEILRTQESECVCINGTCTVVMTDGSASGKADTKILFIEEGKIVHTSTLSGSAQHVEECSCYPRYPGVRCVCRDNWRGSNRPIVDINMKDYSIVSSYVCSGLVGDTPRKNDSSSSGHCLDPNDEEGGHGVKGWAFDDGNDVWMGRTISEKSRSGYETFKVIEGWSNPNSKLQINRQVIVDRGNRSGYSGIFSVEGKSCINRCFYVELIRGRKEETEVLWTSNSIVVFCGTSGTYGTGSWPDGADINLMPI

SEQ ID NO: 21581 - protein, 469 aa, synthetic construct
  REGION 1..469: note = neuraminidase__InfluenzaA__AEX35651
MNPNQKIITIGSVSLTISTICFFMQIAILITTVTLHFKQYEFNSPPNNQVMLCEPTIIERNITEIVYLTNTTIEKEICPKLAEYRNWSKPQCDITGFAPFSKDNSIRLSAGGDIWVTREPYVSCDPDKCYQFALGQGTTLNNVHSNDTVRDRTPYRTLLMNELGVPFHLGTKQVCIAWSSSSCHDGKAWLHVCITGDDKNATASFIYNGRLVDSVVSWSKEILRTQESECVCINGTCTVVMTDGSASGKADTKILFIEEGKIVHTSTLSGSAQHVEECSCYPRYPGVRCVCRDNWKGSNRPIVDINIKDHSIVSSYVCSGLVGDTPRKNDSSSSSHCLDPNNEEGGHGVKGWAFDDGNDVWMGRTISEKSRLGYETFKVIEGWSNPKSKLQINRQVIVDRGNRSGYSGIFSVEDKSCINRCFYVELIRGRKEETEVLWTSNSIVVFCGTSGTYGTGSWPDGADINLMPI

SEQ ID NO: 21582 - protein, 469 aa, synthetic construct; identical to SEQ ID NO: 15884
  REGION 1..469: note = neuraminidase__InfluenzaA__AEX36105

SEQ ID NO: 21583 - protein, 469 aa, synthetic construct
  REGION 1..469: note = neuraminidase__InfluenzaA__AEX36116
MNPNQKIITIGSVSLTISTICFFMQIAILITTVTLHFKQYEFNSPPNNQVMLCEPTIIERNITEIVYLTNTTIEKEICPKLAEYRNWSKPQCDITGFAPFSKDNSIRLSAGGDIWVTREPYVSCDPDKCYQFALGQGTTLNNVHSNDTVRNRTPYRTLLMNELGVPFHLGTKQVCIAWSSSSCHDGKAWLHVCITGDDKNATASFIYNGRLVDSIVSWSKEILRTQESECVCINGTCTVVMTDGSASGEADTKILFIEEGKIVHTSTLSGSAQHVEECSCYPRYPGVRCVCRDNWKGSNRPIVDINIKDHSIVSSYVCSGLVGDTPRKNDSSSSSHCLDPNNEEGGHGVKGWAFDDGNDVWMGRTISEKSRLGYETFKVIEGWSNPKSKLQINRQVIVDRGNRSGYSGIFSVEGKSCINRCFYVELIRGRKEETEVLWTSNSIVVFCGTSGTYGTGSWPDGADINLMPI

SEQ ID NO: 21584 - protein, 469 aa, synthetic construct
  REGION 1..469: note = neuraminidase__InfluenzaA__AEX36127
MNPNQKIITIGSVSLTISTICFFMQIAILITTVTLHFKQYEFNSPPNNQVMLCEPTIIERNITEIVYLTNTTIEKEICPKLAEYRNWLKPQCDITGFAPFSKDNSIRLSAGGDIWVTREPYVSCDPDKCYQFALGQGTTLNNVHSNDTVRDRTPYRTLLMNELGVPFHLGTKQVCIAWSSSSCHDGKAWLHVCITGDDKNATASFIYNGRLVDSVVSWSKEILRTQESECVCINGTCTVVMTDGSASGKADTKILFIEEGKIVHTSTLSGSAQHVEECSCYPRYPGVRCVCRDNWKGSNRPIVDINIKDHSIVSSYVCSGLVGDTPRKNDSSSSSHCLDPNNEEGGHGVKGWAFDDGDDVWMGRTISEKSRLGYETFKVIEGWSNPKSKLQINRQVIVDRGNRSGYSGIFSVEGKSCINRCFYVELIRGRKEETEVLWTSNSIVVFCGTSGTYGTGSWPDGADINLMPI

SEQ ID NO: 21585 - protein, 469 aa, synthetic construct
  REGION 1..469: note = neuraminidase__InfluenzaA__AEX36149
MNPNQKIITIGSVSLTISTICFFMQIAILITTVTLHFKQYEFNSPPNNQVMLCEPTIIERNITEIVYLTNTTIEKEICPKLAEYRNWSKPQCDITGFAPFSKDNSIRLSAGGDIWVTREPYVSCDPDKCYQFALGQGTTLNNVHSNDTVRDRTPYRTLLMNELGVPFHLGTKQVCIAWSSSSCHDGKAWLHVCITGDDKNATASFIYNGRLVDSVVSWSKEILRTQESECVCINGTCTVVMTDGSASGKADTKILFIEEGKIVHTSTLSGSAQHVEECSCYPRYPGVRCVCRDNWKGSNRPIVDINIKDHSIVSSYVCSGLVGDTPRKNDSSSSSHCLDPNNEEGGHGVKGWAFDDGNDVWMGRTISEKSRLGYETFKVIEGWSNPKSKLQINRQVIVDRGNRSGYSGIFSVEDKSCINRCFYVELIRGRKEETEVLWTTNSIVVFCGTSGTYGTGSWPDGADINLMPI

SEQ ID NO: 21586 - protein, 469 aa, synthetic construct; identical to SEQ ID NO: 16512
  REGION 1..469: note = neuraminidase__InfluenzaA__AEX36160

SEQ ID NO: 21587 - protein, 469 aa, synthetic construct
  REGION 1..469: note = neuraminidase__InfluenzaA__AEX36171
MNPNQKIITIGSVSLTISTICFFMQIAILITTVTLHFKQYEFSSPPNNQVMLCEPTIIERNITEIVYLTNTTIEKEICPKLAEYRNWSKPQCDITGFAPFSKDNSIRLSAGGDIWVTREPYVSCDPDKCYQFALGQGTTLNNVHSNDTVHNRTPYRTLLMNELGVPFHLGTKQVCIAWSSSSCHDGKAWLHVCVTGDDKNATASFIYNGRLVDSIVSWSKEILRTQESECVCINGTCAVVMTDGSASGKADTKILFIEEGKIVHTSTLSGSAQHVEECSCYPRYPGVRCVCRDNWKGSNRPIVDINIKDYSIVSRYVCSGLVGDTPRKNDSSSSSHCLDPNNEEGGHGVKGWAFDDGDDVWMGRTISEKSRSGYETFKVIEGWSNPNSKLQINRQVIVDRGNRSGYSGIFSVEGKSCINRCFYVELIRGRKEETEVLWTSNSIVVFCGTSGTYGTGSWPDGADINLMPI

SEQ ID NO: 21588 - protein, 469 aa, synthetic construct
  REGION 1..469: note = neuraminidase__InfluenzaA__AEX36193
MNPNQKIITIGSVSLTISTICFFMQIAILITTVTLHFKQYEFNSSPNNQVMLCEPTIIERNITEIVYLTNTTIEKEICPKLAEYRNWSKPQCDITGFAPFSKDNSIRLSAGGDIWVTREPYVSCDPDKCYQFALGQGTTLNNVHSNNTVRDRTPYRTLLMNELGVPFHLGTKQVCIAWSSSSCHDGKAWLHVCITGDDKNATASFIYNGMLVDSIVSWSKEILRTQESECVCINGTCTVVMTDGSASGKADTKILFIEEGKIVHTSTLSGSAQHVEECSCYPRYPGVRCVCRDNWKGSNRPIVDINIKDHSIVSSYVCSGLVGDTPRKNDSSSSSHCLDPNNEEGGHGVKGWAFDDGNDVWMGRTISEKSRLGYETFKVIEGWSNPKSKLQINRQVIVDRGNRSGYSGIFSVEGKSCINRCFYVELIRGRKEETEVLWTSNSIVVFCGTSGTYGTGSWPDGADINLMPI

SEQ ID NO: 21589 - protein, 469 aa, synthetic construct
  REGION 1..469: note = neuraminidase__InfluenzaA__AEX36204
MNPNQKIITIGSVSLTISTICFFMQIAILITTVTLHFKQYEFNSPPNNQVMLCEPAIIERNITEIVYLTNTTIEKEICPKLAEYRNWSKPQCDITGFAPFSKDNSIRLSAGGDIWVTREPYVSCDPDKCYQFALGQGTTLNNVHSNDTVHERTPYRTLLMNELGVPFHLGTKQVCIAWSSSSCHDGKAWLHVCVTGDDKNATASFIYNGRLVDSIVSWSKEILRTQESECVCINGTCTVVMTDGSASGKADTKILFIEEGKIVHTSTLSGSAQHVEECSCYPRYPGVRCVCRDNWKGSNRPIVDINIKDYSIVSRYVCSGLVGDTPRKNDSSSSSHCLDPNNEEGGHGVKGWAFDDGNDVWMGRTISEKSRSGYETFKVIEGWSNPNSKLQINRQVIVDRGNRSGYSGIFSVEGKSCINRCFYVELIRGRKEETEVLWTSNSIVVFCGTSGTYGTGSWPDGADINLMPI

SEQ ID NO: 21590 - protein, 469 aa, synthetic construct
  REGION 1..469: note = neuraminidase__InfluenzaA__AEX36215
MNPNQKIITIGSVSLTISTICFFMQIAILITTVTLHFKQYEFSSPPNNQVMLCEPAIIEKNITEIVYLTNTTIEKEICPKLAEYRNWSKPQCDITGFAPFSKDNSIRLSAGGDIWVTREPYVSCDPDKCYQFALGQGTTLNNVHSNDTVHERTPYRTLLMNELGVPFHLGTKQVCIAWSSSSCHDGKAWLHVCVTGDDKNATASFIYNGRLVDSIVSWSKEILRTQESECVCINGTCTVVMTDGSASGKADTKILFIEEGKIVHTSTLSGSAQHVEECSCYPRYPGVRCVCRDNWKGSNRPIVDINIKDYSIVSRYVCSGLVGDTPRKNDSSSSSHCLDPNNEEGGHGVKGWAFDDGNDVWMGRTISEKSRSGYETFKVIEGWSNPNSKLQINRQVIVDRGNRSGYSGIFSVEGKSCINRCFYVELIRGRKEETEVLWTSNSIVVFCGTSGTYGTGSWPDGADINLMPI

SEQ ID NO: 21591 - protein, 469 aa, synthetic construct
  REGION 1..469: note = neuraminidase__InfluenzaA__AEX36226
MNPNQKIITIGSVSLTISTICFFMQIAILITTVTLHFKQYEFSSPPNNQVMLCEPAIIERNITEIVYLTNTTIEKEICPKLAEYRNWSKPQCDITGFAPFSKDNSIRLSAGGDIWVTREPYVSCDPDKCYQFALGQGTTLNNVHSNDTVHNRTPYRTLLMNELGVPFHLGTKQVCIAWSSSSCHDGKAWLHVCVTGDDKNATASFIYNGRLVDSIVSWSKEILRTQESECVCINGTCTVVMTDGSASGKADTKILFIEEGKIVHTSTLSGSAQHVEECSCYPRYPGVRCVCRDNWKGSNRPIVDINIKDYSIVSRYVCSGIVGDTPRKNDSSSSSHCLDPNNEEGGHGVKGWAFDDGNDVWMGRTISEKSRSGYETFKVIEGWSNPNSKLQINRQVIVDRGNRSGYSGIFSVEGKSCINRCFYVELIRGRKEETEVLWTSNSIVVFCGTSGTYGTGSWPDGADINLMPI

SEQ ID NO: 21592 - protein, 469 aa, synthetic construct
  REGION 1..469: note = neuraminidase__InfluenzaA__AEX36237
MNPNQKIITIGSVSLTISTICFFMQIAILITTVTLHFKQYEFNSPPNNQVMLCEPTIIERNITEIVYLTNTTIEKEICPKLAEYRKWSKPQCNITGFAPFSKDNSIRLSAGGDIWVTREPYVSCDPDKCYQFALGQGTTLNNVHSNDTVRERTPYRTLLMNELGVPFHLGTKQVCIAWSSSSCHDGKAWLHVCVTGDDKNATASFIYNGRLVDSIVSWSKEILRTQESECVCINGTCTVVMTDGSASGKADTKILFIEEGKIVHTSTLSGSAQHVEECSCYPRYPGVRCVCRDNWRGSNRPIVDINMKDYSIVSSYVCSGLVGDTPRKNDSSSSGHCLDPNDEEGGHGVKGWAFDDGNDVWMGRTISEKSRSGYETFKVIEGWSNPNSKLQINRQVIVDRGNRSGYSGIFSVEGKSCINRCFYVELIRGRKEETEVLWTSNSIVVFCGTSGTYGTGSWPDGADINLMPI

SEQ ID NO: 21593 - protein, 469 aa, synthetic construct
  REGION 1..469: note = neuraminidase__InfluenzaA__AEX36248
MNPNQKIITIGSVSLTISTICFFMQIAILITTVTLHFKQYEFSSPPNNQVMLCEPAIIERNITEIVYLTNTTIEKEICPKLAEYRNWSKPQCDITGFAPFSKDNSIRLSAGGDIWVTREPYVSCDPDKCYQFALGQGTTLNNVHSNDTVHNRTPYRTLLMNELGVPFHLGTKQVCIAWSSSSCHDGKAWLHVCVTGDDKNATASFIYNGRLVDSIVSWSKEILRTQESECVCINGTCTVVMTDGSASGRADTKILFIEEGKIVHTSTLSGSAQHVEECSCYPRYPGVRCVCRDNWKGSNRPIVDINIKDYSIVSRYVCSGLVGDTPRKNDSSSSSHCLDPNNEEGGHGVKGWAFDDGNDVWMGRTISEKSRSGYETFKVIEGWSNPNSKLQINRQVIVDRGNRSGYSGIFSVEGKSCINRCFYVELIRGRKEETEVLWTSNSIVVFCGTSGTYGTGSWPDGADINLMPI

SEQ ID NO: 21594 - protein, 469 aa, synthetic construct; identical to SEQ ID NO: 16512
  REGION 1..469: note = neuraminidase__InfluenzaA__AEX36259

SEQ ID NO: 21595 - protein, 469 aa, synthetic construct
  REGION 1..469: note = neuraminidase__InfluenzaA__AEX36270
MNPNQKIITIGSVSLTISTICFFMQIAILITTVTLHFKQYEFSSPPNNQVMLCEPAIIERNITEIVYLTNTTIEKEICPKLAEYRNWSKPQCDITGFAPFSKDNSIRLSAGGDIWVTREPYVSCDPDKCYQFALGQGTTLNNVHSNDTVHGRTPYRTLLMNELGVPFHLGTKQVCIAWSSSSCHDGKAWLHVCVTGDDKNATASFIYNGRLVDSIVSWSKEILRTQESECVCINGTCTVVMTDGSASGKADTKILFIEEGKIVHTSTLSGSAQHVEECSCYPRYPGVRCVCRDNWKGSNRPIVDINIKDYSIVSRYVCSGLVGDTPRKNDSSSSSHCLDPNNEEGGHGVKGWAFDDGNDVWMGRTISEKSRSGYETFKVIEGWSNPNSKLQINRQVIVDRGNRSGYSGIFSVEGKSCINRCFYVELIRGREEETKVLWTSNSIVVFCGTSGTYGTGSWPDGADINLMPI

SEQ ID NO: 21596 - protein, 469 aa, synthetic construct
  REGION 1..469: note = neuraminidase__InfluenzaA__AEX36281
MNPNQKIITIGSVSLTISTICFFMQIAILITTVTLHFKQYEFSSPPNNQVMLCEPAIIERNITEIVYLTNTTIEKEICPKLAEYRNWSKPQCDITGFAPFSKDNSIRLSAGGDIWVTREPYVSCDPDKCYQFALGQGTTLNNVHSNDTVHGRTPYRTLLMNELGVPFHLGTKQVCIAWSSSSCHDGKAWLHVCVTGDDKNATASFIYNGRLVDSIVSWSKEILRTQESECVCINGTCTVVMTDGSASGKADTKILFIEEGKIVHTSTLSGSAQHVEECSCYPRYPGVRCVCRDNWKGSNRPIVDINIKDYSIVSRYVCSGLVGDTPRKNDSSSSSHCLDPNNEEGGHGVKGWAFDDGNDVWMGRTISEKSRSGYETFKVIEGWSNPNSKLQINRQVIVDRGNRSGYSGIFSVEGKSCINRCFYVELIRGRKEETEVLWTSNSIVVFCGTSGTYGTGSWPDGADINLMPI

SEQ ID NO: 21597 - protein, 469 aa, synthetic construct; identical to SEQ ID NO: 21596
  REGION 1..469: note = neuraminidase__InfluenzaA__AEX36292

SEQ ID NO: 21598 - protein, 469 aa, synthetic construct
  REGION 1..469: note = neuraminidase__InfluenzaA__AEX36303
MNPNQKIITIGSVSLTISTICFFMQIAILITTVTLHFKQYEFSSPPNNQVMLCEPAIIERNITEIVYLTNTTIEKEICPKLAEYRNWSKPQCDITGFAPFSKDNSIRLSAGGDIWVTREPYVSCDPDKCYQFALGQGTTLNNVHSNDTVHERTPYRTLLMNELGVPFHLGTKQVCIAWSSSSCHDGKAWLHVCVTGDDKNATASFIYNGRLVDSIVSWSKEILRTQESECVCINGTCTVVMTDGSASGKADTKILFIEEGKIVHTSTLSGSAQHVEECSCYPRYPGVRCVCRDNWKGSNRPIVDINIKDYSIVSRYVCSGLVGDTPRKNDSSSSSHCLDPNNEEGGHGVKGWAFDDGNDVWMGRTISEKSRSGYETFKVIEGWSNPNSKLQINRQVIVDRGNRSGYSGIFSVEGKSCINRCFYVELIRGRKEETEVLWTSNSIVVFCGTSGTYGTGSWPDGADINLMPI

SEQ ID NO: 21599 - protein, 469 aa, synthetic construct
  REGION 1..469: note = neuraminidase__InfluenzaA__AEX36314
MNPNQKIITIGSVSLTISTICFFMQIAILITTVTLHFKQYEFSSPPNNQVMLCEPTIIERNITEIVYLTNTTIEKEICPKLAEYRNWSKPQCDITGFAPFSKDNSIRLSAGGDIWVTREPYVSCDPDKCYQFALGQGTTLNNVHSNDTVHNRTPYRTLLMNELGVPFHLGTKQVCIAWSSSSCHDGKAWLHVCVTGDDKNATASFIYNGRLVDSIVSWSKEILRTQESECVCINGTCAVVMTDGSASGKADTKILFIEEGKIVHTSTLSGSAQHVEECSCYPRYPGVRCVCRDNWKGSNRPIVDINIKDYSIVSRYVCSGLVGDTPRKNDSSSSSHCLDPNNEEGDHGVKGWAFDDGNDVWMGRTISEKSRSGYETFKVIEGWSNPNSKLQINRQVIVDRGNRSGYSGIFSVEGKSCINRCFYVELIRGRKEETEVLWTSNSIVVFCGTSGTYGTGSWPDGAEINLMPI

SEQ ID NO: 21600 - protein, 469 aa, synthetic construct; identical to SEQ ID NO: 21596
  REGION 1..469: note = neuraminidase__InfluenzaA__AEX36336

SEQ ID NO: 21601 - protein, 469 aa, synthetic construct
  REGION 1..469: note = neuraminidase__InfluenzaA__AEX36347
MNPNQKIITIGSVSLTISTICFFMQIAILITTVTLHFKQYEFSSPPNNQVMLCEPIIIERNITEIVYLTNTTIEKEICPKLAEYRNWSKPQCDITGFAPFSKDNSIRLSAGGDIWVTREPYVSCDPDKCYQFALGQGTTLNNVHSNDTVHNRTPYRTLLMNELGVPFHLGTKQVCIAWSSSSCHDGKAWLHVCVTGDDKNATASFIYNGRLVDSIVSWSKEILRTQESECVCINGTCAVVMTDGSASGKADTKILFIEEGKIVHASTLSGSAQHVEECSCYPRYPGVRCVCRDNWKGSNRPIVDINIKDYSIVSRYVCSGLVGDTPRKNDSSSSSHCLDPNNEEGGHGVKGWAFDDGNDVWMGRTISEKSRSGYETFKVIEGWSNPNSKLQINRQVIVDRGNRSGYSGIFSVEGKSCINRCFYVELIRGRKEETEVLWTSNSIVVFCGTSGTYGTGSWPDGADINLMPI

SEQ ID NO: 21602 - protein, 469 aa, synthetic construct; identical to SEQ ID NO: 15884
  REGION 1..469: note = neuraminidase__InfluenzaA__AEX36358

SEQ ID NO: 21603 - protein, 469 aa, synthetic construct
  REGION 1..469: note = neuraminidase__InfluenzaA__AEX36369
MNPNQKIITIGSVSLTISTICFFMQIAILITTVTLHFKQYEFNSPPNNQVMLCEPTIIERNITEIVYLTNTTIEKEICPKLAEYRNWSKPQCDITGFAPFSKDNSIRLSAGGDIWVTREPYVSCDPDKCYQFALGQGTTLNNVHSNDTVRNRTPYRTLLMNELGVPFHLGTKQVCIAWSSSSCHDGKAWLHVCITGDDKNATASFIYNGRLVDSIVSWSKEILRTQESECVCINGTCTVVMTDGSASGKADTKILFIEEGKIVHTSTLSGSAQHVEECSCYPRYPGVRCVCRDNWKGSNRPIVDINIKDHSIVSSYVCSGLVGDTPRKNDSSSSSHCLDPNNEEGGHGVKGWAFDDGNDVWMGRTISEKSRLGYETFKVIEGWSNPKSKLQINRQVIVDRGNRTGYSGIFSVEGKSCINRCFYVELIRGRKEETEVLWTSNSIVVFCGTSGTYGTGSWPDGADINLMPI

SEQ ID NO: 21604 - protein, 469 aa, synthetic construct
  REGION 1..469: note = neuraminidase__InfluenzaA__AEX36391
MNPNQKIITIGSVSLTISTICFFMQIAILITTVTLHFKQYEFNSPPNNQVMLCEPTIIERNITEIVYLTNTTIEKEICPKLAEYRNWSKPQCDIAGFAPFSKDNSIRLSAGGDIWVTREPYVSCDPDKCYQFALGQGTTLNNVHSNDTVRNRTPYRTLLMNELGVPFHLGTKQVCIAWSSSSCHDGKAWLHVCITGDDKNATASFIYNGRLVDSIVSWSKEILRTQESECVCINGTCTVVMTDGSASGKADTKILFIEEGKIVHTSTLSGSAQHVEECSCYPRYPGVRCVCRDNWKGSNRPIVDINIKDHSIVSSYVCSGLVGDTPRKNDSSSSSHCLDPNNEEGGHGVKGWAFDDGNDVWMGRTISEKSRLGYETFKVIEGWSNPKSKLQINRQVIVDRGDRSGYSGIFSVEGKSCINRCFYVELIRGRKEETEVLWTSNSIVVFCGTSGTYGTGSWPDGADINLMPI

SEQ ID NO: 21605 - protein, 469 aa, synthetic construct
  REGION 1..469: note = neuraminidase__InfluenzaA__AEX36402
MNPNQKIITIGSVSLTISTICFFMQIAILITTVTLHFKQYEFNSPPNNQVMLCEPTIIERNITEIVYLTNTTIEKEICPKLAEYRNWSKPQCDITGFAPFSKDNSIRLSAGGDIWVTREPYVSCDPDKCYQFALGQGTTLNNVHSNDTVRGRTPYRTLLMNELGVPFHLGTKQVCIAWSSSSCHDGKAWLHVCITGDDKNATASFIYNGRLVDSIVSWSKEILRTQESECVCINGTCTVVMTDGSASGKADTKILFIEEGKIVHTSTLSGSAQHVEECSCYPRFPGVRCVCRDNWKGSNRPIVDINIKDHSIVSSYVCSGLVGDTPRKNDSSSSSHCLDPNNEEGGHGVKGWAFDDGNDVWMGRTISEKSRLGYETFKVIEGWSNPKSKLQINRQVIVDRGNRTGYSGIFSVEGKSCINRCFYVELIRGRKEETEVLWTSNSIVVFCGTSGTYGTGSWPDGADINLMPI

SEQ ID NO: 21606 - protein, 469 aa, synthetic construct; identical to SEQ ID NO: 15884
  REGION 1..469: note = neuraminidase__InfluenzaA__AEX36413

SEQ ID NO: 21607 - protein, 469 aa, synthetic construct
  REGION 1..469: note = neuraminidase__InfluenzaA__AEX36424
MNPNQKIITIGSVSLTISTICFFMQIAILITTVTLHFKQYEFNSPPNNQVMLCEPTIIERNITEIVYLTNTTIEKEICSKLAEYRNWSKPQCDITGFAPFSKDNSIRLSAGGDIWVTREPYVSCDPDKCYQFALGQGTTLNNVHSNDTIRDRTPYRTLLMNELGVPFHLGTKQVCIAWSSSSCHDGKAWLHVCITGDDKNATASFIYNGRLVDSVVSWSKEILRTQESECVCINGTCTVVMTDGSASGKADTKILFIEEGKIVHTSTLSGSAQHVEECSCYPRYPGVRCVCRDNWKGSNRPIVDINIKDHSIVSSYVCSGLVGDTPRKNDSSSSSHCLDPNNEEGGHGVKGWAFDDGNDVWMGRTISEKSRLGYETFKVIEGWSNPKSKLQINRQVIVDRGNRSGYSGIFSVEGKSCINRCFYVELIRGRKEETEVLWTSNSIVVFCGTSGTYGTGSWPDGADINLMPI

SEQ ID NO: 21608 - protein, 469 aa, synthetic construct
  REGION 1..469: note = neuraminidase__InfluenzaA__AEX36435
MNPNQKIITIGSVSLTISTICFFMQIAILITTVTLHFKQYEFNSPPNNQVMLCEPTIIERNITEIVYLTNTTIEKEICPKLAEYRNWSKPQCDITGFAPFSKDNSIRLSAGGDIWVTREPYVSCDPDKCYQFALGQGTTLNNVHSNDTVRDRTPYRTLLMNELGVPFHLGTKQVCIAWSSSSCHDGKAWLHVCITGDDKNATASFIYNGRLVDSVVSWSKEILRTQESECVCINGTCTVVMTDGSASGKADTKILFIKEGKIVHTSTLSGSAQHVEECSCYPRYPGVRCVCRDNWKGSNRPIVDINIKDHSIVSSYVCSGLVGDTPRKNDSSSSSHCLDPNNEEGGHGVKGWAFDDGNDVWMGRTISEKSRLGYETFKVIEGWSNSKSKLQINRQVIVDRGNRSGYSGIFSVEGKSCINRCFYVELIRGRKEETEVLWTSNSIVVFCGTSGTYGTGSWPDGADINLMPI

SEQ ID NO: 21609 - protein, 469 aa, synthetic construct; identical to SEQ ID NO: 16066
  REGION 1..469: note = neuraminidase__InfluenzaA__AEX36446

SEQ ID NO: 21610 - protein, 469 aa, synthetic construct; identical to SEQ ID NO: 16066
  REGION 1..469: note = neuraminidase__InfluenzaA__AEX36457

SEQ ID NO: 21611 - protein, 469 aa, synthetic construct
  REGION 1..469: note = neuraminidase__InfluenzaA__AEX36468
MNPNQKIITIGSVSLTISTICFFMQIAILITTVTLHFKQYEFSSPPNNQVMLCEPTIIERNITEIVYLTNTTIEKEICPKLAEYRNWSKPQCDITGFAPFSKDNSIRLSAGGDIWVTREPYVSCDPDKCYQFALGQGTTLNNVHSNDTVHNRTPYRTLLMNELGVPFHLGTKQVCIAWSSSSCHDGKAWLHVCVTGDDKNATASFIYNGRLVDSIVSWSKEILRTQESECVCINGTCTVVMTDGSASGKADTKILFIEEGKIVHTSTLSGNAQHVEECSCYPRYPGVRCVCRDNWKGSNRPIVDINIKDYSIVSRYVCSGLVGDTPRKNDSSSSSHCLDPNNEEGGHGVKGWAFDDGNDVWMGRTISEKSRSGYETFKVIEGWSNPNSKLQINRQVIVDRGNRSGYSGIFSVEGKSCINRCFYVELIRGRKEETKVLWTSNSIVVFCGTSGTYGTGSWPDGADINLMPI

SEQ ID NO: 21612 - protein, 469 aa, synthetic construct
  REGION 1..469: note = neuraminidase__InfluenzaA__AEX36479
MNPNQKIITIGSVSLTISTICFFMQIAILITTVTLHFKQYEFSSPPNNQVMLCEPTIIERNITEIVYPTNTTTEKEICPKLAEYRNWSKPQCDITGFAPFSKDNSIRLSAGGDIWVTREPYVSCDPDKCYQFALGQGTTLNNVHSNDTVHDRTPYRTLLMNELGVPFHLGTKQVCIAWSSSSCHDGKAWLHVCVTGDDKNATASFIYNGRLVDSIVSWSKEILRTQESECVCINGTCTVVMTDGSASGKADTKILFIEEGKIVHTSTLSGSAQHVEECSCYPRYPGVRCVCRDNWKGSNRPIVDINIKDYSIVSRYVCSGLVGDTPRKNDSSSSSHCLDPNNEEGGHGVKGWAFDDGNDVWMGRTISEKLRSGYETFKVIEGWSNPNSKLQINRQVIVDRGNRSGYSGIFSVEGKSCINRCFYVELIRGRKEETEVLWTSNSIVVFCGTSGTYGTGSWPDGADINLMPI

SEQ ID NO: 21613 - protein, 469 aa, synthetic construct
  REGION 1..469: note = neuraminidase__InfluenzaA__AEX36490
MNPNQKIITIGSVSLTISTICFFMQIAILITTVTLHFKQYEFSYPPNNQVMLCEPTIIERNITEIVYLTNTTIEKEICPKLAEYRNWSKPQCDITGFAPFSKDNSIRLSAGGDIWVTREPYVSCDPDKCYQFALGQGTTLNNVHSNDTVHDRTPYRTLLMNELGVPFHLGTKQVCIAWSSSSCHDGKAWLHVCVTGDDKNATASFIYNGRLVDSIVSWSKEILRTQESECVCINGTCTVVMTDGSASGKADTKILFIEEGKIVHTSTLSGNAQHVEECSCYPRYPGVRCVCRDNWKGSNRPIVDINIKDYSIVSRYVCSGLVGDTPRKNDSSSSSHCLDPNNEEGGHGVKGWAFDDGNDVWMGRTISEKSRSGYETFKVIEGWSNPNSKLQINRQVIVDRGNRSGYSGIFSVEGKSCINRCFYVELIRGRKEETKVLWTSNSIVVFCGTSGTYGTGSWPDGADINLMPI

SEQ ID NO: 21614 - protein, 469 aa, synthetic construct
  REGION 1..469: note = neuraminidase__InfluenzaA__AEX36501
MNPNQKIITIGSVSLTISTICFFMQIAILITTVTLHFKQYEFSSPPNNQVMLCEPAIIERNITEIVYLTNTTIEKEKCPKLAEYRNWSKPQCDITGFAPFSKDNSIRLSAGGDIWVTREPYVSCDPDKCYQFALGQGTTLNNVHSNDTVHGRTPYRTLLMNELGVPFHLGTKQVCIAWSSSSCHDGKAWLHVCVTGDDKNATASFIYNGRLVDSIVSWSKEILRTQESECVCINGTCTVVMTDGSASGKADTKILFIEEGKIVHTSTLSGSAQHVEECSCYPRYPGVRCVCRDNWKGSNRPIVDINIKDYSIVSRYVCSGLVGDTPRKSDSSSSSHCLDPNNEEGGHGVKGWAFDDGNDVWMGRTISEKSRSGYETFKVIEGWSNPNSKLQINRQVIVDRGNRSGYSGIFSVEGKSCINRCFYVELIRGRKEETEVLWTSNSIVVFCGTSGTYGTGSWPDGADINLMPI

SEQ ID NO: 21615 - protein, 469 aa, synthetic construct
  REGION 1..469: note = neuraminidase__InfluenzaA__AEX36512
MNPNQKIITIGSVSLTISTICFFMQIAILITTVTLHFKQYEFSSPPNNQVMLCEPAIIERNITEIVYLTNTTIEKEICPKLAEYRNWSKPQCDITGFAPFSKDNSIRLSAGGDIWVTREPYVSCDPDKCYQFALGQGTTLNNVHSNDTVHDRTPYRTLLMNELGVPFHLGTKQVCIAWSSSSCHDGKAWLHVCVTGDDKNATASFIYNGRLVDSIVSWSKEILRTQESECVCINGTCTVVMTDGSASGKADTKILFIEEGKIVHTSTLSGSAQHVEECSCYPRYPGVRCVCRDNWKGSNRPIVDINIKDYSIVSRYVCSGLVGDTPRKNDSSSSSHCLDPNNEEGGHGVKGWAFDDGNDVWMGRTISEKSRSGYETFKVIEGWSNPNSKLQINRQVIVDRGNRSGYSGIFSVEGKSCINRCFYVELIRGRKEETEVLWTSNSIVVFCGTSGTYGTGSWPDGADINLMPI

SEQ ID NO: 21616 - protein, 469 aa, synthetic construct
  REGION 1..469: note = neuraminidase__InfluenzaA__AEX36523
MNPNQKIITIGSVSLTISTICFFMQIAILITTVTLHFKQYEFNSPPNNQVMLCEPTIIERNITEIVYLTNTTIEKEICPKLAEYRNWSKPQCDITGFAPFSKDNSIRLSAGGDIWVTREPYVSCDPDKCYQFALGQGTTLNNVHSNDTVRDRTPYRTLLMNELGVPFHLGTKQVCIAWSSSSCHDGKAWLHVCITGDDKNATASFIYNGRLVDSVVSWSKEILRTQESECVCINGTCTVVMTDGSASGEADTKILFIEEGKIVHTSTLSGSAQHVEECSCYPRYPGVRCVCRDNWKGSNRPIVDINIKDHSIVSSYVCSGLVGDTPRKNDSSSSSHCLDPNNEEGGHGVKGWAFDDGNDVWMGRTISEKSRLGYETFKVIEGWSNPKSKLQINRQVIVDRGNRSGYSGIFSVEGKSCINRCFYVELIRGRKEETEVLWTSNSIVVFCGTSGTYGTGSWPDGADINLMPI

SEQ ID NO: 21617 - protein, 469 aa, synthetic construct; identical to SEQ ID NO: 16599
  REGION 1..469: note = neuraminidase__InfluenzaA__AEX36534

SEQ ID NO: 21618 - protein, 469 aa, synthetic construct
  REGION 1..469: note = neuraminidase__InfluenzaA__AEX36545
MNPNQKIITIGSVSLTISTICFFMQIAILITTVTLHFKQYEFNSPPNNQVMLCEPTIIERNITEIVYLTNTTIEKEICPKLAEYRNWSKPQCDITGFAPFSKDNSIRLSAGGDIWVTREPYVSCDPDKCYQFALGQGTTLNNVHSNDTVRDRTPYRTLLMNELGVPFHLGTKQVCIAWSSSSCHDGKAWLHVCITGDDKNATASFIYNGRLVDSVVSWSKEILRTQESECVCINGTCTVVMTDGSALGKADTKILFIEEGKIVHTSTLSGSAQHVEECSCYPRYPGVRCVCRDNWKGSNRPIVDINIKDHSIVSSYVCSGLVGDTPRKNDSSSSSHCLDPNNEEGGHGVKGWAFDDGNDVWMGRTISEKSRLGYETFKVIEGWSNPKSKLQINRQVIVDRGNRSGYSGIFSVEGKSCINRCFYVELIRGRKEETEVLWTSNSIVVFCGTSGTYGTGSWPDGADINLMPI

SEQ ID NO: 21619 - protein, 469 aa, synthetic construct; identical to SEQ ID NO: 16512
  REGION 1..469: note = neuraminidase__InfluenzaA__AEX36556

SEQ ID NO: 21620 - protein, 469 aa, synthetic construct; identical to SEQ ID NO: 16512
  REGION 1..469: note = neuraminidase__InfluenzaA__AEX36567

SEQ ID NO: 21621 - protein, 469 aa, synthetic construct
  REGION 1..469: note = neuraminidase__InfluenzaA__AEX36578
MNPNQKIITIGSVSLTISTICFFMQIAILITTVTLHFKQYEFNSPPNNQVMLCEPTIIERNITEIVYLTNTTIEKEICPKLAEYRNWSKPQCDITGFAPFSKDNSIRLSAGGDIWVTREPYVSCDPDKCYQFALGQGTTLNNVHSNDTVRDRTPYRTLLMNELGVPFHLGTKQVCIAWSSSSCHDGKAWLHVCITGDDKNATASFIYNGRLVDSVVSWSKEILRTQESECVCINGTCTVVMTDGSASGKADTKILFIKEGKIVHTSTLSGSAQHVEECSCYPRYPGVRCVCRDNWKGSNRPIVDINIKDHSIVSSYVCSGLVGDTPRKNDSSSSSHCLDPNNEEGGHGVKGWAFDDGNDVWMGRTISEKSRLGYETFKVIEGWSNPKSKLQINRQVIVDRGNRSGYSGIFSVEGKSCINRCFYVELIRGRKEETEVLWTSNSIVVFCGTSGTYGTGSWPDGADINLMPI

SEQ ID NO: 21622 - protein, 469 aa, synthetic construct; identical to SEQ ID NO: 21621
  REGION 1..469: note = neuraminidase__InfluenzaA__AEX36589

SEQ ID NO: 21623 - protein, 469 aa, synthetic construct
  REGION 1..469: note = neuraminidase__InfluenzaA__AEX36600
MNPNQKIITIGSVSLTISTICFFMQIAILITTVTLHFKQYEFNSPPNNQVMLCEPTIIERNITEIVYLTNTTIEKEICPKLAEYRNWSKPQCDITGFAPFSKDNSIRLSAGGDIWVTREPYVSCDPDKCYQFALGQGTTLNNVHSNDTVRDRTPYRTLLMNELGVPFHLGTKQVCIAWSSSSCHDGKAWLHVCITGDDKNATASFIYNGRLVDSVVSWSKEILRTQESECVCINGTCTVVMTDGSASGKADTKILFIKEGKIVHTSTLSGSAQHVEECSCYPRYPGVRCVCRDNWKGSNRPIVDINIKDHSIVSSYVCSGLVGDTPRKNDSSSSSHCLDPNNEEGGHGVKGWAFDDGNNVWMGRTISEKSRLGYETFKVIEGWSNPKSKLQINRQVIVDRGNRSGYSGIFSVEGKSCINRCFYVELIRGRKEETEVLWTSNSIVVFCGTSGTYGTGSWPDGADINLMPI

SEQ ID NO: 21624 - protein, 469 aa, synthetic construct; identical to SEQ ID NO: 14714
  REGION 1..469: note = neuraminidase__InfluenzaA__AEX36622

SEQ ID NO: 21625 - protein, 469 aa, synthetic construct
  REGION 1..469: note = neuraminidase__InfluenzaA__AEX63619
MNPNQKIITIGSICMTIGIASLILQIGNIISIWISHSIQTENQNQPEICNQNVITYENNTWVNQTYVNVSNTNFVAEQAVASVKLAGNSSLCPVSGWAIYSKDNSVRIGSKGDVFVIREPFISCSHSECRTFFLTQGALLNDKHSNGTIKDRSPYRTLMSCPIGEVPSPYNSRFESVAWSASACHDGTSWLTIGISGPDNGAVAVLKYNGIITDTIKSWRKNILRTQESECACVNGSCFTVMTDGPSNGQASYKVFKIERGKVVKSVELNAPNYHYEECSCYPESSEITCVCRDNWHGSNRPWVSFNQNLEYQMGYICSGIFGDNPRPNDKTGSCGPVFSNGANGVKGFSFKYGNGVWIGRTKSTSSRMGFEMIWDPDGWTKTDDKFSVKQDIIGITDWSGYSGSFVQHPELTGLDCMRPCFWVELIRGRPKENTIWTSGSSISFCGVNSDTVGWSWPDGAELPFTIDK

SEQ ID NO: 21626 - protein, 454 aa, synthetic construct; identical to SEQ ID NO: 15719
  REGION 1..454: note = neuraminidase__InfluenzaA__AEX92876

SEQ ID NO: 21627 - protein, 454 aa, synthetic construct; identical to SEQ ID NO: 15719
  REGION 1..454: note = neuraminidase__InfluenzaA__AEX92887

SEQ ID NO: 21628 - protein, 454 aa, synthetic construct; identical to SEQ ID NO: 15719
  REGION 1..454: note = neuraminidase__InfluenzaA__AEX92904

SEQ ID NO: 21629 - protein, 454 aa, synthetic construct; identical to SEQ ID NO: 15719
  REGION 1..454: note = neuraminidase__InfluenzaA__AEX96924

SEQ ID NO: 21630 - protein, 469 aa, synthetic construct; identical to SEQ ID NO: 18469
  REGION 1..469: note = neuraminidase__InfluenzaA__AEY69091

SEQ ID NO: 21631 - protein, 469 aa, synthetic construct; identical to SEQ ID NO: 16599
  REGION 1..469: note = neuraminidase__InfluenzaA__AEY69101

SEQ ID NO: 21632 - protein, 469 aa, synthetic construct; identical to SEQ ID NO: 16599
  REGION 1..469: note = neuraminidase__InfluenzaA__AEY69112

SEQ ID NO: 21633 - protein, 469 aa, synthetic construct
  REGION 1..469: note = neuraminidase__InfluenzaA__AEY69145
MNTNQKIITIGSVSLTISTICFFMQIAILITTVTLHFKQYEFNSPPNNQVMLCEPTIIERNITEIVYLTNTTIEKEICPKLAEYRNWSKPQCDITGFAPFSKDNSIRLSAGGDIWVTREPYVSCDPDKCYQFALGQGTTINNVHSNNTVRDRTPYRTLLMNELGVPFHLGTKQVCIAWSSSSCHDGKAWLHVCITGDDKNATASFIYNGRLVDSVVSWSKEILRTQESECVCINGTCTVVMTDGSASGKADTKILFIEEGKIVHTSTLSGSAQHVEECSCYPRYPGVRCVCRDNWKGSNRPIVDINMKDHSIVSSYVCSGLVGDTPRKNDSSSSSHCLDPNNEEGGHGVKGWAFDDGNDVWMGRTISEKSRLGYETFKVIEGWSNPKSKLQINRQVIVDRGNRSGYSGIFSVEGKSCINRCFYVELIRGRKEETEVLWTSNSVVVFCGTSGTYGTGSWPDGADINLMPI

SEQ ID NO: 21634 - protein, 469 aa, synthetic construct; identical to SEQ ID NO: 16599
  REGION 1..469: note = neuraminidase__InfluenzaA__AEY69156

SEQ ID NO: 21635 - protein, 469 aa, synthetic construct
  REGION 1..469: note = neuraminidase__InfluenzaA__AEY69167
MNPNQKIITIGSVSLTISTICFFMQIAILITTVTLHFKQYEFNSPPNNQVMLCEPTIIERNITEIVYLTNTTIEKEICPKLAEYRNWSKPQCDITGFAPFSKDNSIRLSAGGDIWVTREPYVSCDPDKCYQFALGQGTTLNNVHSNNTVRDRTPYRTLLMNELGVPFHLGTKQVCIAWSSSSCHDGKAWLHVCITGDDKNATASFIYNGRLVDSVVSWSKEILRTQESECVCINGTCTVVMTDGSASGKADTKILFIEEGKIVHTSTLSGSAQHVEECSCYPRYPGVRCVCRDNWKGSNRPIVDINIKDHSIVSSYVCSGLVGDTPRKNDSSSSSHCLDPNNEEGGHGVKGWAFDDGNDVWMGRTISEKSRLGYETFKVIEGWSNPKSKLQINRQVIVDRGNRSGYSGIFSVEGKSCINRCFYVELIRGRKEETEVLWTSNSIVVFCGTSGTYGTGSWPDGADINLMPV

SEQ ID NO: 21636 - protein, 469 aa, synthetic construct; identical to SEQ ID NO: 21635
  REGION 1..469: note = neuraminidase__InfluenzaA__AEY69178

SEQ ID NO: 21637 - protein, 469 aa, synthetic construct; identical to SEQ ID NO: 21635
  REGION 1..469: note = neuraminidase__InfluenzaA__AEY69189

SEQ ID NO: 21638 - protein, 469 aa, synthetic construct
  REGION 1..469: note = neuraminidase__InfluenzaA__AEY69211
MNPNQKIITIGSVSLTISTICFFMQIAILITTVTLHFKQYKFNSPPNNQVMLCEPTIIERNITEIVYLTNTTIEKEICPKLAEYRNWSKPQCDITGFAPFSKDNSIRLSAGGDIWVTREPYVSCDPDKCYQFALGQGTTLNNVHSNNTVRDRTPYRTLLMNELGVPFHLGTKQVCIAWSSSSCHDGKAWLHVCITGDDKNATASFIYNGRLVDSVVSWSKEILRTQESECVCINGTCTVVMTDGSASGKADTKILFIEEGKIVHTSTLSGSAQHVEECSCYPRYPGVRCVCRDNWKGSNRPIVDINIKDHSIVSSYVCSGLVGDTPRKNDSSSSSHCLDPNNEEGGHGVKGWAFDDGNDVWMGRTISEKSRLGYETFKVIEGWSNPKSKLQINRQVIVDRGNRSGYSGIFSVEGKSCINRCFYVELIRGRKEETEVLWTSNSIVVFCGTSGTYGTGSWPDGADINLMPV

SEQ ID NO: 21639 - protein, 469 aa, synthetic construct; identical to SEQ ID NO: 21635
  REGION 1..469: note = neuraminidase__InfluenzaA__AEY69233

SEQ ID NO: 21640 - protein, 469 aa, synthetic construct; identical to SEQ ID NO: 21635
  REGION 1..469: note = neuraminidase__InfluenzaA__AEY69272

SEQ ID NO: 21641 - protein, 469 aa, synthetic construct; identical to SEQ ID NO: 21635
  REGION 1..469: note = neuraminidase__InfluenzaA__AEY69283

SEQ ID NO: 21642 - protein, 469 aa, synthetic construct
  REGION 1..469: note = neuraminidase__InfluenzaA__AEY69294
MNPNQKIITIGSVSLTISTICFFMQTAILITTVTLHFKQCEFNSPPNNQVMLCEPTIIERNITEIVYLTNTTIEKEICPKLAEYRNWSKPQCDITGFAPFSKDNSIRLSAGGDIWVTREPYVSCDPDKCYQFALGQGTTLNNVHSNNTVRDRTPYRTLLMNELGVPFHLGTKQVCIAWSSSSCHDGKAWLHVCITGDDKNATASFIYNGRLVDSVVSWSKEILRTQESECVCINGTCTVVMTDGSASGKADTKILFIEEGKIVHTSTLSGSAQHVEECSCYPRYPGVRCVCRDNWKGSNRPIVDINIKDHSIVSSYVCSGLVGDTPRKNDSSSSSHCLDPNNEEGGNGVKGWAFDDGNDVWMGRTISEKSRLGYETFKVIEGWSNPKSKLQINRQVIVDRGNRSGYSGIFSVEGKSCINRCFYVELIRGRKEETEVLWTSNSIVVFCGTSGTYGTGSWPDGADINLMPI

SEQ ID NO: 21643 - protein, 469 aa, synthetic construct; identical to SEQ ID NO: 21642
  REGION 1..469: note = neuraminidase__InfluenzaA__AEY69305

SEQ ID NO: 21644 - protein, 469 aa, synthetic construct; identical to SEQ ID NO: 21642
  REGION 1..469: note = neuraminidase__InfluenzaA__AEY69316

SEQ ID NO: 21645 - protein, 469 aa, synthetic construct; identical to SEQ ID NO: 21642
  REGION 1..469: note = neuraminidase__InfluenzaA__AEY69788

SEQ ID NO: 21646 - protein, 469 aa, synthetic construct; identical to SEQ ID NO: 16599
  REGION 1..469: note = neuraminidase__InfluenzaA__AEY69799

SEQ ID NO: 21647 - protein, 469 aa, synthetic construct; identical to SEQ ID NO: 16599
  REGION 1..469: note = neuraminidase__InfluenzaA__AEY69810

SEQ ID NO: 21648 - protein, 469 aa, synthetic construct; identical to SEQ ID NO: 21635
  REGION 1..469: note = neuraminidase__InfluenzaA__AEY69832

SEQ ID NO: 21649 - protein, 469 aa, synthetic construct
  REGION 1..469: note = neuraminidase__InfluenzaA__AEY69843
MNPNQKIITIGSVSLTISTICFFMQIAILITTVTLHFKQYEFNSPPNNQVMLCEPTIIERNITEIVYLTNTTIEKEICPKLAEYRNWSKPQCDITGFAPFSKDNSIRLSAGGDIWVTREPYVSCDPDKCYQFALGQGTTLNNVHSNNTVRDRTPYRTLLMNELGVPFHLGTKQVCIAWSSSSCHDGKAWLHVCIAGDDKNATASFIYNGRLVDSVVSWSKEILRTQESECVCINGTCTVVMTDGSASGKADTKILFIEEGKIVHTSTLSGSAQHVEECSCYPRYPGVRCVCRDNWKGSNRPIVDINIKDHSIVSSYVCSGLVGDTPRKNDSSSSSHCLDPNNEEGGHGVKGWAFDDGNDVWMGRTISEKSRLGYETFKVIEGWSNPKSKLQINRQVIVDRGNRSGYSGIFSVEGKSCINRCFYVELIRGRKEETEVLWTSNSIVVFCGTSGTYGTGSWPDGADINLMPV

SEQ ID NO: 21650 - protein, 469 aa, synthetic construct; identical to SEQ ID NO: 21635
  REGION 1..469: note = neuraminidase__InfluenzaA__AEY69854

SEQ ID NO: 21651 - protein, 469 aa, synthetic construct; identical to SEQ ID NO: 21635
  REGION 1..469: note = neuraminidase__InfluenzaA__AEY69876

SEQ ID NO: 21652 - protein, 469 aa, synthetic construct; identical to SEQ ID NO: 21635
  REGION 1..469: note = neuraminidase__InfluenzaA__AEY69887

SEQ ID NO: 21653 - protein, 469 aa, synthetic construct; identical to SEQ ID NO: 21635
  REGION 1..469: note = neuraminidase__InfluenzaA__AEY69898

SEQ ID NO: 21654 - protein, 469 aa, synthetic construct; identical to SEQ ID NO: 16599
  REGION 1..469: note = neuraminidase__InfluenzaA__AEY69909

SEQ ID NO: 21655 - protein, 469 aa, synthetic construct
  REGION 1..469: note = neuraminidase__InfluenzaA__AEY69942
MNPNQKIITIGSVSLTISTICFFMQIAILITTVTLHFKQYEFNSPPNNQVMLCEPTIIERNITEIVYLTNTTIEKEICPKLAEYRNWSKPQCDITGFAPFSKDNSIRLSDGGDIWVTREPYVSCDPDKCYQFALGQGTTLNNIHSNNTVRDRTPYRTLLMNELGVPFHLGTKQVCIAWSSSSCHDGKAWLHVCITGDDKNATASFIYNGRLVDSVVSWSKEILRTQESECVCINGTCTVVMTDGSASGKADTKILFIEEGKIVHTSTLSGSAQHVEECSCYPRYPGVRCVCRDNWKGSNRPIVDINIKDHSIVSSYVCSGLVGDTPRKNDSSSSSHCLDPNNEEGGHGVKGWAFDDGNDVWMGRTISEKSRLGYETFKVIEGWSNPKSKLQINRQVIVDRGNRSGYSGIFSVEGKSCINRCFYVELIRGRKEETEVLWTSNSIVVFCGTSGTYGTGSWPDGADINLMPV

SEQ ID NO: 21656 - protein, 469 aa, synthetic construct; identical to SEQ ID NO: 21655
  REGION 1..469: note = neuraminidase__InfluenzaA__AEY69953

SEQ ID NO: 21657 - protein, 469 aa, synthetic construct; identical to SEQ ID NO: 21655
  REGION 1..469: note = neuraminidase__InfluenzaA__AEY69964

SEQ ID NO: 21658 - protein, 469 aa, synthetic construct; identical to SEQ ID NO: 21635
  REGION 1..469: note = neuraminidase__InfluenzaA__AEY69975

SEQ ID NO: 21659 - protein, 469 aa, synthetic construct; identical to SEQ ID NO: 21635
  REGION 1..469: note = neuraminidase__InfluenzaA__AEY69986

SEQ ID NO: 21660 - protein, 469 aa, synthetic construct; identical to SEQ ID NO: 21635
  REGION 1..469: note = neuraminidase__InfluenzaA__AEY69997

SEQ ID NO: 21661 - protein, 469 aa, synthetic construct; identical to SEQ ID NO: 21635
  REGION 1..469: note = neuraminidase__InfluenzaA__AEY70008

SEQ ID NO: 21662 - protein, 469 aa, synthetic construct; identical to SEQ ID NO: 21635
  REGION 1..469: note = neuraminidase__InfluenzaA__AEY70019

SEQ ID NO: 21663 - protein, 469 aa, synthetic construct; identical to SEQ ID NO: 21635
  REGION 1..469: note = neuraminidase__InfluenzaA__AEY70259

SEQ ID NO: 21664 - protein, 469 aa, synthetic construct; identical to SEQ ID NO: 21635
  REGION 1..469: note = neuraminidase__InfluenzaA__AEY70270

SEQ ID NO: 21665 - protein, 469 aa, synthetic construct; identical to SEQ ID NO: 21635
  REGION 1..469: note = neuraminidase__InfluenzaA__AEY70281

SEQ ID NO: 21666 - protein, 469 aa, synthetic construct; identical to SEQ ID NO: 16599
  REGION 1..469: note = neuraminidase__InfluenzaA__AEY70303

SEQ ID NO: 21667 - protein, 469 aa, synthetic construct; identical to SEQ ID NO: 16599
  REGION 1..469: note = neuraminidase__InfluenzaA__AEY70314

SEQ ID NO: 21668 - protein, 469 aa, synthetic construct
  REGION 1..469: note = neuraminidase__InfluenzaA__AEY70325
MNPNQKIITIGSVSLTISTICFFMQIAILMTTVTLHFKQYEFNPPPNNQVMLCEPTIIERNITEIVYLTNTTIEKEICPKLAEYRNWSKPQCDITGFAPFSKDNSIRLSAGGDIWVTREPYVSCDPDKCYQFALGQGTTLNNVHSNNTVRDRTPYRTLLMNELGVPFHLGTKQVCIAWSSSSCHDGKAWLHVCITGDDKNATASFIYNGRLVDSVVSWSKEILRTQESECVCINGTCTVVMTDGSASGKADTKILFIEEGKIVHTSTLSGSAQHVEECSCYPRYPGVRCVCRDNWKGSNRPIVDINIKDHSIVSSYVCSGLVGDTPRKNDSSSSSHCLDPNNEEGGHGVKGWAFDDGNDVWMGRTISEKSRLGYETFKVIEGWSNPKSKLQINRQVIVDRGNRSGYSGIFSVEGKSCINRCFYVELIRGRKEETEVLWTSNSIVVFCGTSGTYGTGSWPDGADINLMPV

SEQ ID NO: 21669 - protein, 469 aa, synthetic construct
  REGION 1..469: note = neuraminidase__InfluenzaA__AEY70336
MNPNQKIITIGSVSLTISTICFFMQIAILITTVTLHFKQYEFNSPPNNQVMLCEPTIIERNITEIVYLTNTTIEKEICPKLAEYRNWSKPQCDITGFAPFSKDNSIRLSAGGDIWVTREPYVSCDPDKCYQFALGQGTTLNNVHSNNTVRDRTPYRTLLMNELGVPFHLGTKQVCIAWSSSSCHDGKAWLHVCITGDDKNATASFIYNGRLVDSVVSWSKEILRTQESECVCINGTCTVVMTDGSASGKADTKILFIEEGKIVHTSTLSGSAQHVEECSCYPRYPGVRCICRDNWKGSNRPIVDINIKDHSIVSSYVCSGLVGDTPRKNDSSSSSHCLDPNNEEGGHGVKGWAFDDGNDVWMGRTISEKSRLGYETFKVIEGWSNPKSKLQINRQVIVDRGNRSGYSGIFSVEDKSCINRCFYVELIRGRKEETEVLWTSNSIVVFCGTSGTYGTGSWPDGADINLMPV

SEQ ID NO: 21670 - protein, 469 aa, synthetic construct; identical to SEQ ID NO: 16738
  REGION 1..469: note = neuraminidase__InfluenzaA__AEY70358

SEQ ID NO: 21671 - protein, 469 aa, synthetic construct; identical to SEQ ID NO: 16599
  REGION 1..469: note = neuraminidase__InfluenzaA__AEY70379

SEQ ID NO: 21672 - protein, 469 aa, synthetic construct; identical to SEQ ID NO: 18361
  REGION 1..469: note = neuraminidase__InfluenzaA__AFB70139

SEQ ID NO: 21673 - protein, 469 aa, synthetic construct; identical to SEQ ID NO: 16738
  REGION 1..469: note = neuraminidase__InfluenzaA__AFB70141

SEQ ID NO: 21674 - protein, 469 aa, synthetic construct; identical to SEQ ID NO: 18361
  REGION 1..469: note = neuraminidase__InfluenzaA__AFB70147

SEQ ID NO: 21675 - protein, 469 aa, synthetic construct; identical to SEQ ID NO: 16738
  REGION 1..469: note = neuraminidase__InfluenzaA__AFB70153

SEQ ID NO: 21676 - protein, 469 aa, synthetic construct; identical to SEQ ID NO: 16738
  REGION 1..469: note = neuraminidase__InfluenzaA__AFB70155

SEQ ID NO: 21677 - protein, 469 aa, synthetic construct; identical to SEQ ID NO: 17708
  REGION 1..469: note = neuraminidase__InfluenzaA__AFB70157

SEQ ID NO: 21678 - protein, 469 aa, synthetic construct; identical to SEQ ID NO: 16738
  REGION 1..469: note = neuraminidase__InfluenzaA__AFB70159

SEQ ID NO: 21679 - protein, 469 aa, synthetic construct
  REGION 1..469: note = neuraminidase__InfluenzaA__AFB70161
MNPNQKIITIGSVCMTIGMANLILQIGNIISIWISHSIQLGNQNQIETCNQSVITYENNTWVNQTYVNISNTNFAAGQSVVSVKLAGNSSLCPVSGWAIYSKDNSIRIGSKGDVFVIREPFISCSPLECRTFFLTQGALLNDKHSNGTIKDRSPYRTLMSCPIGEVPSPYNSRFESVAWSASACHDGINWLTIGISGPDNGAVAVLKYNGIITDTIKSWRNNILRTQESECACVNGSCFTVMTDGPSDGQASYKIFRIEKGKIVKSVEMNAPNYHYEECSCYPDSSEITCVCRDNWHGSNRPWVSFNQNLEYQIGYICSGIFGDNPRPNDKTGSCGPVSSNGANGVKGFSFKYGNGVWIGRTKSISSRNGFEMIWDPNGWTGTDNNFSTKQDIVGINEWSGYSGSFVQHPELTGLDCIRPCFWVELIRGRPKENTIWTSGSSISFCGVNSDTVGWYWPDGAELPFTIDK

SEQ ID NO: 21680 - protein, 469 aa, synthetic construct
  REGION 1..469: note = neuraminidase__InfluenzaA__AFB70163
MNPNQKIITIGSVCMTIGMANLILQIGNIISIWISHSIQLGNQNQIETCNQSVITYENNTWVNQTYVNISNTNFAAGQSVVSVKLAGNSSLCPVSGWAIYSKDNSIRIGSKGDVFVIREPFISCSPLECRTFFLTQGALLNDKHSNGTIKDRSPYRTLMSCPIGEVPSPYNSRFESVAWSASACHDGINWLTIGISGPDNGAVAVLKYNGIITDTIKSWRNNILRTQESECACVNGSCFTVMTDGPSDGQASYKIFRIEKGKIVKSVEMNAPNYHYEECSCYPDSSEITCVCRDNWHGSNRPWVSFNQNLEYQIGYICSGIFGDNPRPNDKTGSCGPVSSNGANGVKGFSFKYGNGVWIGRTKSISSRNGFEMIWDPNGWTGTDNNFSIKQDIVGINEWSGYSGSFVQHPELTGLDCIRPCFWVELIRGRPKENAIWTSGSSISFCGVNSDTVGWSWPDGAELPFTIDK

SEQ ID NO: 21681 - protein, 469 aa, synthetic construct
  REGION 1..469: note = neuraminidase__InfluenzaA__AFB70169
MNPNQKIITIGSVCMTIGMANLILQIGNIISIWINHSIQLGNQNQIETCNQSVITYENNTWVNQTYVNISNTNFAAGQSVVSVKLAGNSSLCPVSGWAIYSKDNSIRIGSKGDVFVIREPFISCSPLECRTFFLTQGALLNDKHSNGTIKDRSPYRTLMSCPIGEVPSPYNSRFESVAWSASACHDGINWLTIGISGPDNGAVAVLKYNGIITDTIKSWRNNILRTQESECACVNGSCFTVMTDGPSDGQASYKIFRIEKGKIVKSVEMNAPNYHYEECSCYPDSSEITCVCRDNWHGSNRPWVSFNQNLEYQIGYICSGIFGDNPRPNDKTGSCGPVSSNGANGVKGFSFKYGNGVWIGRTKSISSRNGFEMIWDPNGWTGTDNNFSIKQDIVGINEWSGYSGSFVQHPELTGLDCIRPCFWVELIRGRPKENTIWTSGSSISFCGVNSDTVGWSWPDGAELPFTIDK

SEQ ID NO: 21682 - protein, 469 aa, synthetic construct; identical to SEQ ID NO: 16738
  REGION 1..469: note = neuraminidase__InfluenzaA__AFB70199

SEQ ID NO: 21683 - protein, 469 aa, synthetic construct; identical to SEQ ID NO: 16738
  REGION 1..469: note = neuraminidase__InfluenzaA__AFB70209

SEQ ID NO: 21684 - protein, 469 aa, synthetic construct; identical to SEQ ID NO: 16738
  REGION 1..469: note = neuraminidase__InfluenzaA__AFB70219

SEQ ID NO: 21685 - protein, 469 aa, synthetic construct; identical to SEQ ID NO: 16738
  REGION 1..469: note = neuraminidase__InfluenzaA__AFB70229

SEQ ID NO: 21686 - protein, 469 aa, synthetic construct; identical to SEQ ID NO: 16738
  REGION 1..469: note = neuraminidase__InfluenzaA__AFB70239

SEQ ID NO: 21687 - protein, 469 aa, synthetic construct; identical to SEQ ID NO: 16738
  REGION 1..469: note = neuraminidase__InfluenzaA__AFB70249

SEQ ID NO: 21688 - protein, 469 aa, synthetic construct; identical to SEQ ID NO: 16738
  REGION 1..469: note = neuraminidase__InfluenzaA__AFB70259

SEQ ID NO: 21689 - protein, 469 aa, synthetic construct; identical to SEQ ID NO: 17708
  REGION 1..469: note = neuraminidase__InfluenzaA__AFB70269

SEQ ID NO: 21690 - protein, 469 aa, synthetic construct; identical to SEQ ID NO: 16738
  REGION 1..469: note = neuraminidase__InfluenzaA__AFB70279

SEQ ID NO: 21691 - protein, 469 aa, synthetic construct; identical to SEQ ID NO: 16738
  REGION 1..469: note = neuraminidase__InfluenzaA__AFB70289

SEQ ID NO: 21692 - protein, 469 aa, synthetic construct; identical to SEQ ID NO: 16738
  REGION 1..469: note = neuraminidase__InfluenzaA__AFB70299

SEQ ID NO: 21693 - protein, 469 aa, synthetic construct; identical to SEQ ID NO: 16738
  REGION 1..469: note = neuraminidase__InfluenzaA__AFB70309

SEQ ID NO: 21694 - protein, 469 aa, synthetic construct; identical to SEQ ID NO: 18361
  REGION 1..469: note = neuraminidase__InfluenzaA__AFB70319

SEQ ID NO: 21695 - protein, 469 aa, synthetic construct; identical to SEQ ID NO: 16738
  REGION 1..469: note = neuraminidase__InfluenzaA__AFB70329

SEQ ID NO: 21696 - protein, 469 aa, synthetic construct; identical to SEQ ID NO: 16738
  REGION 1..469: note = neuraminidase__InfluenzaA__AFB70349

SEQ ID NO: 21697 - protein, 469 aa, synthetic construct; identical to SEQ ID NO: 16738
  REGION 1..469: note = neuraminidase__InfluenzaA__AFB70359
